United States Patent Application Publication US 2007/0214517 A1 - sequence listing, part 11

SEQ ID NO: 13847 - DNA, 733 bp, Zea mays subsp. mays
  misc_feature (1)..(733): Ceres Seq. ID no. 12551453
  misc_feature: MA Experiment ID: 108535 Result: Up-regulated in Transcription
  misc_feature: MA Experiment 108535 PARAMETER Experiment Name: Zm_Meristem_P Parameter: Age (day) Value: 8
  misc_feature: MA Experiment 108535 PARAMETER Experiment Name: Zm_Meristem_P Parameter: Organism Value: Zea mays
  misc_feature: MA Experiment 108535 PARAMETER Experiment Name: Zm_Meristem_P Parameter: Plant Line Value: 35A19
  misc_feature: MA Experiment 108535 PARAMETER Experiment Name: Zm_Meristem_P Parameter: Tissue Value: Root Meristem vs. Above Root Meristem
  misc_feature: MA Experiment ID: 108543 Result: Up-regulated in Transcription
  misc_feature: MA Experiment ID: 108556 Result: Down-regulated in Transcription
  misc_feature: MA Experiment 108556 PARAMETER Experiment Name: Zm_Drought_P Parameter: Age (day) Value: 9
  misc_feature: MA Experiment 108556 PARAMETER Experiment Name: Zm_Drought_P Parameter: Organism Value: Zea mays
  misc_feature: MA Experiment 108556 PARAMETER Experiment Name: Zm_Drought_P Parameter: Plant Line Value: 35A19
  misc_feature: MA Experiment 108556 PARAMETER Experiment Name: Zm_Drought_P Parameter: Timepoint (hr) Value: 24
  misc_feature: MA Experiment 108556 PARAMETER Experiment Name: Zm_Drought_P Parameter: Tissue Value: Aerial
  misc_feature: MA Experiment 108556 PARAMETER Experiment Name: Zm_Drought_P Parameter: Treatment Value: Drought vs. No Drought
  misc_feature: MA Experiment ID: 108689 Result: Down-regulated in Transcription
  misc_feature: MA Experiment 108689 PARAMETER Experiment Name: Zm_Drought_Roots_P Parameter: Age (day) Value: 9
  misc_feature: MA Experiment 108689 PARAMETER Experiment Name: Zm_Drought_Roots_P Parameter: Organism Value: Zea mays
  misc_feature: MA Experiment 108689 PARAMETER Experiment Name: Zm_Drought_Roots_P Parameter: Plant Line Value: 35A19
  misc_feature: MA Experiment 108689 PARAMETER Experiment Name: Zm_Drought_Roots_P Parameter: Timepoint (hr) Value: 24
  misc_feature: MA Experiment 108689 PARAMETER Experiment Name: Zm_Drought_Roots_P Parameter: Tissue Value: Roots
  misc_feature: MA Experiment 108689 PARAMETER Experiment Name: Zm_Drought_Roots_P Parameter: Treatment Value: Drought vs. No Drought
  misc_feature: MA Experiment ID: 20000478 Result: Down-regulated in Transcription
  misc_feature: MA Experiment 20000478 PARAMETER Experiment Name: Zm_5mM_SA_P Parameter: Age (day) Value: 11
  misc_feature: MA Experiment 20000478 PARAMETER Experiment Name: Zm_5mM_SA_P Parameter: Organism Value: Zea mays
  misc_feature: MA Experiment 20000478 PARAMETER Experiment Name: Zm_5mM_SA_P Parameter: Plant Line Value: 35A19
  misc_feature: MA Experiment 20000478 PARAMETER Experiment Name: Zm_5mM_SA_P Parameter: Timepoint (hr) Value: 72
  misc_feature: MA Experiment 20000478 PARAMETER Experiment Name: Zm_5mM_SA_P Parameter: Tissue Value: Aerial
  misc_feature: MA Experiment 20000478 PARAMETER Experiment Name: Zm_5mM_SA_P Parameter: Treatment Value: 5mM SA vs. No Treatment
  misc_feature: MA Experiment ID: 20000479 Result: Down-regulated in Transcription
  misc_feature: MA Experiment 20000479 PARAMETER Experiment Name: Zm_Drought_P Parameter: Age (day) Value: 10
  misc_feature: MA Experiment 20000479 PARAMETER Experiment Name: Zm_Drought_P Parameter: Organism Value: Zea mays
  misc_feature: MA Experiment 20000479 PARAMETER Experiment Name: Zm_Drought_P Parameter: Plant Line Value: 35A19
  misc_feature: MA Experiment 20000479 PARAMETER Experiment Name: Zm_Drought_P Parameter: Timepoint (hr) Value: 48
  misc_feature: MA Experiment 20000479 PARAMETER Experiment Name: Zm_Drought_P Parameter: Tissue Value: Aerial
  misc_feature: MA Experiment 20000479 PARAMETER Experiment Name: Zm_Drought_P Parameter: Treatment Value: Drought vs. No Drought
  misc_feature: MA Experiment ID: 20000480 Result: Down-regulated in Transcription
  misc_feature: MA Experiment 20000480 PARAMETER Experiment Name: Zm_Drought_P Parameter: Age (day) Value: 11
  misc_feature: MA Experiment 20000480 PARAMETER Experiment Name: Zm_Drought_P Parameter: Organism Value: Zea mays
  misc_feature: MA Experiment 20000480 PARAMETER Experiment Name: Zm_Drought_P Parameter: Plant Line Value: 35A19
  misc_feature: MA Experiment 20000480 PARAMETER Experiment Name: Zm_Drought_P Parameter: Timepoint (hr) Value: 72
  misc_feature: MA Experiment 20000480 PARAMETER Experiment Name: Zm_Drought_P Parameter: Tissue Value: Aerial
  misc_feature: MA Experiment 20000480 PARAMETER Experiment Name: Zm_Drought_P Parameter: Treatment Value: Drought vs. No Drought
  misc_feature: MA Experiment ID: 20000487 Result: Down-regulated in Transcription
  misc_feature: MA Experiment 20000487 PARAMETER Experiment Name: Zm_50mM_NH4NO3_L_to_H_P Parameter: Organism Value: Zea mays
  misc_feature: MA Experiment 20000487 PARAMETER Experiment Name: Zm_50mM_NH4NO3_L_to_H_P Parameter: Timepoint (hr) Value: 4
  misc_feature: MA Experiment 20000487 PARAMETER Experiment Name: Zm_50mM_NH4NO3_L_to_H_P Parameter: Tissue Value: Leaves
  misc_feature: MA Experiment 20000487 PARAMETER Experiment Name: Zm_50mM_NH4NO3_L_to_H_P Parameter: Treatment Value: 50mM NH4NO3 vs. 100mM Mannitol
  misc_feature: MA Experiment ID: 20000632 Result: Down-regulated in Transcription
  misc_feature: MA Experiment 20000632 PARAMETER Experiment Name: Zm_Herbicide-Treatments_P Parameter: Timepoint (hr) Value: 4
  misc_feature: MA Experiment 20000632 PARAMETER Experiment Name: Zm_Herbicide-Treatments_P Parameter: Tissue Value: Aerial
  misc_feature: MA Experiment 20000632 PARAMETER Experiment Name: Zm_Herbicide-Treatments_P Parameter: Treatment Value: Glean vs. No Treatment
cataaagatctcgacctcgccccttcgaccgcaagccatcccgctccctcggtaagcttccaagcggagtccggcggcgtcgagtcgaatggcgggcaagtcgcacacgcgcaaggcgttcctcctgtgcaactacgtcctcatgggcgccgcttccagctgcatcttcctcacgctgtcgctgcgcctgctgccgtccccgtgcggcctcctcctgctcttcctccacgccctcaccgccgtcttctccgcggccggctgctcgggctccttcacggcgcccgccacgcccgcgcagtggcacaacgcgcacaccgcgggggccgcgctcaccgccatcttccagggggccgtcgcgctgctcgcgttcacccgcacctccgacttcctggccgagcttcagtcctacgtccgcgacgaggacggcgccgtcatcctcaagatggtcgggggcctcggcaccgccatcttcgtcctcgagtgggccgcgctcgcgctcgccttctccctccgcctcgatgacgacgacgacgacgacctccaggccaagaaccggcggccgtaccatgtctgatcgtccgctggtgttagctccttcagaatgatatatgaacaagattcgttgattctttgccgtctgttagtatgtactattgcttttttttggtactactgtgcctgttcaaccaaaattgttaaatgccaaagcaaatatacattgctttttgttgcc

SEQ ID NO: 13848 - protein, 173 aa, Zea mays subsp. mays
  peptide (1)..(173): Ceres Seq. ID no. 12551454
HKDLDLAPSTASHPAPSVSFQAESGGVESNGGQVAHAQGVPPVQLRPHGRRFQLHLPHAVAAPAAVPVRPPPALPPRPHRRLLRGRLLGLLHGARHARAVAQRAHRGGRAHRHLPGGRRAARVHPHLRLPGRASVLRPRRGRRRHPQDGRGPRHRHLRPRVGRARARLLPPPR

SEQ ID NO: 13849 - protein, 161 aa, Zea mays subsp. mays
  peptide (1)..(161): Ceres Seq. ID no. 12551455
  misc_feature (2)..(161): Homolog of NCBI NO: 34907616 NR Description: contains EST C27797(C52876)~unknown protein
  misc_feature (1)..(142): Homolog of NCBI NO: 38345379 NR Description: OSJNBa0067K08.8 [Oryza sativa (japonica
  misc_feature (4)..(156): Homolog of NCBI NO: 15239379 NR Description: putative protein; protein id: At5g36710.1 thaliana] >gi|8885623|dbj|BAA97553.1| to unknown protein [Arabidopsis thaliana]
  misc_feature (4)..(156): Homolog of NCBI NO: 15239407 NR Description: putative protein; protein id: At5g36800.1
  misc_feature (1)..(142): Homolog of NCBI NO: 21703131 NR Description: AT5g16250/T21H19_170 [Arabidopsis thaliana]
  misc_feature (1)..(142): Homolog of NCBI NO: 15237310 NR Description: putative protein; protein id: At5g16250.1, by cDNA: 18222. [Arabidopsis thaliana] >gi|11346160|pir||T51495
  misc_feature (1)..(142): Homolog of NCBI NO: 21553926 NR Description: unknown [Arabidopsis thaliana]
  misc_feature (6)..(142): Homolog of NCBI NO: 18396262 NR Description: expressed protein; protein id: At3g02640.1, by cDNA: 4861., supported by cDNA: gi_17065095 [Arabidopsis
MAGKSHTRKAFLLCNYVLMGAASSCIFLTLSLRLLPSPCGLLLLFLHALTAVFSAAGCSGSFTAPATPAQWHNAHTAGAALTAIFQGAVALLAFTRTSDFLAELQSYVRDEDGAVILKMVGGLGTAIFVLEWAALALAFSLRLDDDDDDDLQAKNRRPYHV

SEQ ID NO: 13850 - protein, 143 aa, Zea mays subsp. mays
  peptide (1)..(143): Ceres Seq. ID no. 12551456
  misc_feature (1)..(143): Homolog of NCBI NO: 34907616 NR Description: contains EST C27797(C52876)~unknown protein
  misc_feature (1)..(124): Homolog of NCBI NO: 38345379 NR Description: OSJNBa0067K08.8 [Oryza sativa (japonica
  misc_feature (1)..(138): Homolog of NCBI NO: 15239379 NR Description: putative protein; protein id: At5g36710.1 thaliana] >gi|8885623|dbj|BAA97553.1| to unknown protein [Arabidopsis thaliana]
  misc_feature (1)..(138): Homolog of NCBI NO: 15239407 NR Description: putative protein; protein id: At5g36800.1
  misc_feature (1)..(124): Homolog of NCBI NO: 21703131 NR Description: AT5g16250/T21H19_170 [Arabidopsis thaliana]
  misc_feature (1)..(124): Homolog of NCBI NO: 15237310 NR Description: putative protein; protein id: At5g16250.1, by cDNA: 18222. [Arabidopsis thaliana] >gi|11346160|pir||T51495
  misc_feature (1)..(124): Homolog of NCBI NO: 21553926 NR Description: unknown [Arabidopsis thaliana]
  misc_feature (1)..(124): Homolog of NCBI NO: 18396262 NR Description: expressed protein; protein id: At3g02640.1, by cDNA: 4861., supported by cDNA: gi_17065095 [Arabidopsis
MGAASSCIFLTLSLRLLPSPCGLLLLFLHALTAVFSAAGCSGSFTAPATPAQWHNAHTAGAALTAIFQGAVALLAFTRTSDFLAELQSYVRDEDGAVILKMVGGLGTAIFVLEWAALALAFSLRLDDDDDDDLQAKNRRPYHV

SEQ ID NO: 13851 - DNA, 1361 bp, Zea mays subsp. mays
  misc_feature (1)..(1361): Ceres Seq. ID no. 12391506
  misc_feature: MA Experiment ID: 108527 Result: Down-regulated in Transcription
  misc_feature: MA Experiment 108527 PARAMETER Experiment Name: Zm_5mM_NO_P Parameter: Age (day) Value: 8
  misc_feature: MA Experiment 108527 PARAMETER Experiment Name: Zm_5mM_NO_P Parameter: Organism Value: Zea mays
  misc_feature: MA Experiment 108527 PARAMETER Experiment Name: Zm_5mM_NO_P Parameter: Plant Line Value: 35A19
  misc_feature: MA Experiment 108527 PARAMETER Experiment Name: Zm_5mM_NO_P Parameter: Timepoint (hr) Value: 6
  misc_feature: MA Experiment 108527 PARAMETER Experiment Name: Zm_5mM_NO_P Parameter: Tissue Value: Aerial
  misc_feature: MA Experiment 108527 PARAMETER Experiment Name: Zm_5mM_NO_P Parameter: Treatment Value: 5mM NO vs. No Treatment
  misc_feature: MA Experiment ID: 108530 Result: Up-regulated in Transcription
  misc_feature: MA Experiment 108530 PARAMETER Experiment Name: Zm_Imbibed_Seeds_P Parameter: Age (day) Value: 6 vs. 2
  misc_feature: MA Experiment 108530 PARAMETER Experiment Name: Zm_Imbibed_Seeds_P Parameter: Organism Value: Zea mays
  misc_feature: MA Experiment 108530 PARAMETER Experiment Name: Zm_Imbibed_Seeds_P Parameter: Plant Line Value: 35A19
  misc_feature: MA Experiment 108530 PARAMETER Experiment Name: Zm_Imbibed_Seeds_P Parameter: Tissue Value: Aerial vs. Embryo
  misc_feature: MA Experiment ID: 108534 Result: Down-regulated in Transcription
  misc_feature: MA Experiment 108534 PARAMETER Experiment Name: Zm_4deg_Cold_P Parameter: Age (hr) Value: 8
  misc_feature: MA Experiment 108534 PARAMETER Experiment Name: Zm_4deg_Cold_P Parameter: Organism Value: Zea mays
  misc_feature: MA Experiment 108534 PARAMETER Experiment Name: Zm_4deg_Cold_P Parameter: Plant Line Value: 35A19
  misc_feature: MA Experiment 108534 PARAMETER Experiment Name: Zm_4deg_Cold_P Parameter: Temperature (deg C) Value: 4 vs. 22
  misc_feature: MA Experiment 108534 PARAMETER Experiment Name: Zm_4deg_Cold_P Parameter: Timepoint (hr) Value: 6
  misc_feature: MA Experiment 108534 PARAMETER Experiment Name: Zm_4deg_Cold_P Parameter: Tissue Value: Aerial
  misc_feature: MA Experiment ID: 108545 Result: Up-regulated in Transcription
  misc_feature: MA Experiment 108545 PARAMETER Experiment Name: Zm_Imbibed_Seeds_P Parameter: Age (day) Value: 3 vs. 2
  misc_feature: MA Experiment 108545 PARAMETER Experiment Name: Zm_Imbibed_Seeds_P Parameter: Organism Value: Zea mays
  misc_feature: MA Experiment 108545 PARAMETER Experiment Name: Zm_Imbibed_Seeds_P Parameter: Plant Line Value: 35A19
  misc_feature: MA Experiment 108545 PARAMETER Experiment Name: Zm_Imbibed_Seeds_P Parameter: Tissue Value: Aerial vs. Embryo
  misc_feature: MA Experiment ID: 20000492 Result: Up-regulated in Transcription
  misc_feature: MA Experiment 20000492 PARAMETER Experiment Name: Zm_Hybrid_Seed_Dev_P Parameter: DAP Value: 12
  misc_feature: MA Experiment 20000492 PARAMETER Experiment Name: Zm_Hybrid_Seed_Dev_P Parameter: Organism Value: Zea mays
  misc_feature: MA Experiment 20000492 PARAMETER Experiment Name: Zm_Hybrid_Seed_Dev_P Parameter: Plant Line Value: 35A19
  misc_feature: MA Experiment 20000492 PARAMETER Experiment Name: Zm_Hybrid_Seed_Dev_P Parameter: Tissue Value: Fert Kernel vs. Unfert Floret
attaccaaaccaacagtttccagttcagcggtaggaacagaccgtcacggcgtcatccgccaaaggataatccatttgctcacacaggcgcaaacgctgagcgcctgagcctgctctcgcggtctaggagatggcgttgatcacgaatgtctctgactatgaggagcttgcagagcagaagctgcctaagatggtttatgacttctatgccgggggtgcagaagaccagtggacactcaaggagaataagggggcattctccaagattctggttcgaccacgggtgctgattgatgtgtctcatattgacatgtctacaagtatattgggttacaaaatttccatgcctattatggtggctcccactgctttgcacaaactggcccaccaagaaggagaggttgcttctgcccaggcagcagctgctgcaggaactataatgacgttgtcttcatggtcatcttgcagcattgaggaagttagctcaagtgcaccaggactccgtttcttccaactttcagtattcaaggatagggatatcgtgcaacagcttgtcagaagggctgaaaatgctggctacaaggcaatcgccgtcactgtcgacgctccacgccttggtcgcagggaagccgacgtcaggaacagattcacgctgcctgaaaatgtggtgttgaagtgctttgaaggactggatctcagcaagatggacaagactaagggttcaggccttgctgcttacgccactagccagattgacagctctctttcttggaaggatatcaagtggctacagacgattaccgggctgcctatcttagtgaaaggagtcataacagcagaagatgctcgaattgctatcgaatgcggtgtcgccggcattatcgtgtccaaccacgggggacgccagctagactatcttcctgcaaccatcagctgcctggaagaggtcgtgagagaagtgaagggccgccgtgtgcctgtgttcctcgacggcggcatccgccgtggcactgacgtgttcaaggccttggcgctgggagcctcaggagtgtttattggaaggcccgtactgttcgccctcgccgtggacggcagggcaggggtgaggaatgcgctgcggatgctgagggatgagctcgagatcaccatggcgctgagcggctgctcgtcgctgaaagatatcacccgcgatcgcgttatcactgagagcgacatgatccgtcgctctcggatgtaggcttcgattcgtttgctgttgtgttgtgttgtgccctggcatgactgtcttattcgaaactgaccggaccatcagattggttttgacttttgacctattggctaatgatgtgttaggttttctc

SEQ ID NO: 13852 - protein, 368 aa, Zea mays subsp. mays
  peptide (1)..(368): Ceres Seq. ID no. 12391507
  misc_feature (14)..(358): Pfam Name: FMN-dependent dehydrogenase Pfam Description: FMN-dependent dehydrogenase
  misc_feature (4)..(368): Homolog of NCBI NO: 27549566 NR Description: glycolate oxidase [Zantedeschia aethiopica]
  misc_feature (4)..(366): Homolog of NCBI NO: 15231850 NR Description: glycolate oxidase, putative; protein id: supported by cDNA: gi_15450740, supported by cDNA: gi_16226422, by cDNA: gi_16226771, supported by cDNA: gi_16604393, supported
  misc_feature (4)..(366): Homolog of NCBI NO: 16226772 NR Description: AT3g14420/MOA2_2 [Arabidopsis thaliana]
  misc_feature (4)..(361): Homolog of NCBI NO: 15236857 NR Description: glycolate oxidase - like protein; protein id: supported by cDNA: gi_15292936 [Arabidopsis thaliana]
  misc_feature (4)..(364): Homolog of NCBI NO: 15229497 NR Description: glycolate oxidase; protein id: At3g14415.1
  misc_feature (4)..(368): Homolog of NCBI NO: 1773330 NR Description: glycolate oxidase [Mesembryanthemum crystallinum]
  misc_feature (4)..(364): Homolog of NCBI NO: 228403 NR Description: glycolate oxidase
  misc_feature (4)..(361): Homolog of NCBI NO: 999542 NR Description: Chain A, Glycolate Oxidase (E.C.1.1.3.15) Mutant Tyr 24 Replaced By Phe (Y24f) >gi|999543|pdb|1GYL|B Chain B,
  misc_feature (4)..(361): Homolog of NCBI NO: 121530 NR Description: (S)-2-hydroxy-acid oxidase, peroxisomal
  misc_feature (4)..(361): Homolog of NCBI NO: 2554675 NR Description: Three-Dimensional Structure Of Glycolate Oxidase
MALITNVSDYEELAEQKLPKMVYDFYAGGAEDQWTLKENKGAFSKILVRPRVLIDVSHIDMSTSILGYKISMPIMVAPTALHKLAHQEGEVASAQAAAAAGTIMTLSSWSSCSIEEVSSSAPGLRFFQLSVFKDRDIVQQLVRRAENAGYKAIAVTVDAPRLGRREADVRNRFTLPENVVLKCFEGLDLSKMDKTKGSGLAAYATSQIDSSLSWKDIKWLQTITGLPILVKGVITAEDARIAIECGVAGIIVSNHGGRQLDYLPATISCLEEVVREVKGRRVPVFLDGGIRRGTDVFKALALGASGVFIGRPVLFALAVDGRAGVRNALRMLRDELEITMALSGCSSLKDITRDRVITESDMIRRSRM

SEQ ID NO: 13853 - protein, 348 aa, Zea mays subsp. mays
  peptide (1)..(348): Ceres Seq. ID no. 12391508
  misc_feature (1)..(338): Pfam Name: FMN-dependent dehydrogenase Pfam Description: FMN-dependent dehydrogenase
  misc_feature (1)..(348): Homolog of NCBI NO: 27549566 NR Description: glycolate oxidase [Zantedeschia aethiopica]
  misc_feature (1)..(346): Homolog of NCBI NO: 15231850 NR Description: glycolate oxidase, putative; protein id: supported by cDNA: gi_15450740, supported by cDNA: gi_16226422, by cDNA: gi_16226771, supported by cDNA: gi_16604393, supported
  misc_feature (1)..(346): Homolog of NCBI NO: 16226772 NR Description: AT3g14420/MOA2_2 [Arabidopsis thaliana]
  misc_feature (1)..(341): Homolog of NCBI NO: 15236857 NR Description: glycolate oxidase - like protein; protein id: supported by cDNA: gi_15292936 [Arabidopsis thaliana]
  misc_feature (1)..(344): Homolog of NCBI NO: 15229497 NR Description: glycolate oxidase; protein id: At3g14415.1
  misc_feature (1)..(348): Homolog of NCBI NO: 1773330 NR Description: glycolate oxidase [Mesembryanthemum crystallinum]
  misc_feature (1)..(344): Homolog of NCBI NO: 228403 NR Description: glycolate oxidase
  misc_feature (1)..(341): Homolog of NCBI NO: 999542 NR Description: Chain A, Glycolate Oxidase (E.C.1.1.3.15) Mutant Tyr 24 Replaced By Phe (Y24f) >gi|999543|pdb|1GYL|B Chain B,
  misc_feature (1)..(341): Homolog of NCBI NO: 121530 NR Description: (S)-2-hydroxy-acid oxidase, peroxisomal
  misc_feature (1)..(341): Homolog of NCBI NO: 2554675 NR Description: Three-Dimensional Structure Of Glycolate Oxidase
MVYDFYAGGAEDQWTLKENKGAFSKILVRPRVLIDVSHIDMSTSILGYKISMPIMVAPTALHKLAHQEGEVASAQAAAAAGTIMTLSSWSSCSIEEVSSSAPGLRFFQLSVFKDRDIVQQLVRRAENAGYKAIAVTVDAPRLGRREADVRNRFTLPENVVLKCFEGLDLSKMDKTKGSGLAAYATSQIDSSLSWKDIKWLQTITGLPILVKGVITAEDARIAIECGVAGIIVSNHGGRQLDYLPATISCLEEVVREVKGRRVPVFLDGGIRRGTDVFKALALGASGVFIGRPVLFALAVDGRAGVRNALRMLRDELEITMALSGCSSLKDITRDRVITESDMIRRSRM

SEQ ID NO: 13854 - protein, 308 aa, Zea mays subsp. mays
  peptide (1)..(308): Ceres Seq. ID no. 12391509
  misc_feature (1)..(298): Pfam Name: FMN-dependent dehydrogenase Pfam Description: FMN-dependent dehydrogenase
  misc_feature (1)..(308): Homolog of NCBI NO: 27549566 NR Description: glycolate oxidase [Zantedeschia aethiopica]
  misc_feature (1)..(306): Homolog of NCBI NO: 15231850 NR Description: glycolate oxidase, putative; protein id: supported by cDNA: gi_15450740, supported by cDNA: gi_16226422, by cDNA: gi_16226771, supported by cDNA: gi_16604393, supported
  misc_feature (1)..(306): Homolog of NCBI NO: 16226772 NR Description: AT3g14420/MOA2_2 [Arabidopsis thaliana]
  misc_feature (1)..(301): Homolog of NCBI NO: 15236857 NR Description: glycolate oxidase - like protein; protein id: supported by cDNA: gi_15292936 [Arabidopsis thaliana]
  misc_feature (1)..(304): Homolog of NCBI NO: 15229497 NR Description: glycolate oxidase; protein id: At3g14415.1
  misc_feature (1)..(308): Homolog of NCBI NO: 1773330 NR Description: glycolate oxidase [Mesembryanthemum crystallinum]
  misc_feature (1)..(304): Homolog of NCBI NO: 228403 NR Description: glycolate oxidase
  misc_feature (1)..(301): Homolog of NCBI NO: 999542 NR Description: Chain A, Glycolate Oxidase (E.C.1.1.3.15) Mutant Tyr 24 Replaced By Phe (Y24f) >gi|999543|pdb|1GYL|B Chain B,
  misc_feature (1)..(301): Homolog of NCBI NO: 121530 NR Description: (S)-2-hydroxy-acid oxidase, peroxisomal
  misc_feature (1)..(301): Homolog of NCBI NO: 2554675 NR Description: Three-Dimensional Structure Of Glycolate Oxidase
MSTSILGYKISMPIMVAPTALHKLAHQEGEVASAQAAAAAGTIMTLSSWSSCSIEEVSSSAPGLRFFQLSVFKDRDIVQQLVRRAENAGYKAIAVTVDAPRLGRREADVRNRFTLPENVVLKCFEGLDLSKMDKTKGSGLAAYATSQIDSSLSWKDIKWLQTITGLPILVKGVITAEDARIAIECGVAGIIVSNHGGRQLDYLPATISCLEEVVREVKGRRVPVFLDGGIRRGTDVFKALALGASGVFIGRPVLFALAVDGRAGVRNALRMLRDELEITMALSGCSSLKDITRDRVITESDMIRRSRM

SEQ ID NO: 13855 - DNA, 1161 bp, Zea mays subsp. mays
  misc_feature (1)..(1161): Ceres Seq. ID no. 12364133
  misc_feature: MA Experiment ID: 108529 Result: Up-regulated in Transcription
  misc_feature: MA Experiment 108529 PARAMETER Experiment Name: Zm_Imbibed_Seeds_P Parameter: Age (day) Value: 5 vs. 2
  misc_feature: MA Experiment 108529 PARAMETER Experiment Name: Zm_Imbibed_Seeds_P Parameter: Organism Value: Zea mays
  misc_feature: MA Experiment 108529 PARAMETER Experiment Name: Zm_Imbibed_Seeds_P Parameter: Plant Line Value: 35A19
  misc_feature: MA Experiment 108529 PARAMETER Experiment Name: Zm_Imbibed_Seeds_P Parameter: Tissue Value: Roots vs. Embryo
  misc_feature: MA Experiment ID: 108535 Result: Down-regulated in Transcription
  misc_feature: MA Experiment 108535 PARAMETER Experiment Name: Zm_Meristem_P Parameter: Age (day) Value: 8
  misc_feature: MA Experiment 108535 PARAMETER Experiment Name: Zm_Meristem_P Parameter: Organism Value: Zea mays
  misc_feature: MA Experiment 108535 PARAMETER Experiment Name: Zm_Meristem_P Parameter: Plant Line Value: 35A19
  misc_feature: MA Experiment 108535 PARAMETER Experiment Name: Zm_Meristem_P Parameter: Tissue Value: Root Meristem vs. Above Root Meristem
  misc_feature: MA Experiment ID: 108543 Result: Up-regulated in Transcription
  misc_feature: MA Experiment ID: 108546 Result: Up-regulated in Transcription
  misc_feature: MA Experiment 108546 PARAMETER Experiment Name: Zm_Imbibed_Seeds_P Parameter: Age (day) Value: 3 vs. 2
  misc_feature: MA Experiment 108546 PARAMETER Experiment Name: Zm_Imbibed_Seeds_P Parameter: Organism Value: Zea mays
  misc_feature: MA Experiment 108546 PARAMETER Experiment Name: Zm_Imbibed_Seeds_P Parameter: Plant Line Value: 35A19
  misc_feature: MA Experiment 108546 PARAMETER Experiment Name: Zm_Imbibed_Seeds_P Parameter: Tissue Value: Roots vs. Embryo
  misc_feature: MA Experiment ID: 20000478 Result: Up-regulated in Transcription
  misc_feature: MA Experiment 20000478 PARAMETER Experiment Name: Zm_5mM_SA_P Parameter: Age (day) Value: 11
  misc_feature: MA Experiment 20000478 PARAMETER Experiment Name: Zm_5mM_SA_P Parameter: Organism Value: Zea mays
  misc_feature: MA Experiment 20000478 PARAMETER Experiment Name: Zm_5mM_SA_P Parameter: Plant Line Value: 35A19
  misc_feature: MA Experiment 20000478 PARAMETER Experiment Name: Zm_5mM_SA_P Parameter: Timepoint (hr) Value: 72
  misc_feature: MA Experiment 20000478 PARAMETER Experiment Name: Zm_5mM_SA_P Parameter: Tissue Value: Aerial
  misc_feature: MA Experiment 20000478 PARAMETER Experiment Name: Zm_5mM_SA_P Parameter: Treatment Value: 5mM SA vs. No Treatment
attagcaaagcgtacatccctccaacaaaccttgagttgagagaggagagaggagacagcaagcgacacaacacagaggtaaccggctcacgcctgtctcggtggccgtgggcaatcatggccactgtgggacagtctggggccctgaggagggtcaccgtgcactacgccaactcgcccacaggcagcacggtggcagaagtgagctttgacgaccttgacgacnagctgctcctgtttgtgctcgccgatcttcttcctggccaggaaggtttacaccagtcgatcttggaaggaacatacaacaaccaggagaaccacatgagaggtgcagcacccagtgcaccatatggttattcacggccagaggagtaccgtgcagagagcagcactgctgcagcagcagcaactggttctaggaattcaggcatggatgaacagatcgcctcggacttcgagtacgccaagcagctgcagcaggagatggaggacctcagcgtcaaagacgaagacgacaacgatatcagctgcgtgccgtctccatctgactctgacgatgagcacgagcatcatgacgaagaggaagaggctgacaggcaggaggacggtgatggtgatgatgatccagacaacatgacttatgagcaaggacaggcacttgtagaatctgtggggactgagtacagaggtctatccgatgagctcatctcctacctgcagccatggaagtacaaggcagtcaaggcttcagggctcttctcccggaaaacaaaccatgaagactgcccgatctgcctgtccactttcagaaaccgggaaaccatgataacgttgccgtgcaggcatcactaccacgcagcttgtgtcaccagatggctcaaggtcaacaagacatgccctgtatgcaaatacgaactgtttggaccttcctaggatccgaccacgtcgacgatggagctgagaggataatgatgatgacgacgacaacgacagatggttgtgtcatctgctctctttttttagcgccaagaaaactggaaatgaaaaagggaaatcaatccgaaaggagaatagaaattaggaagtataggtagaatatctctcttgccagtgactgtgcgatgaattaagcatacctcgtgctatttatgagaaaaaggg

SEQ ID NO: 13856 - protein, 310 aa, Zea mays subsp. mays
  peptide (1)..(310): Ceres Seq. ID no. 12364134
  misc_feature (262)..(302): Pfam Name: Zinc finger, C3HC4 type (RING finger) Pfam Description: Zinc finger, C3HC4 type (RING finger)
  misc_feature (38)..(306): Homolog of NCBI NO: 18402411 NR Description: expressed protein; protein id: At3g19910.1, by cDNA: 108568., supported by cDNA: gi_15010577, supported by gi_15028362, supported by cDNA: gi_19310706 [Arabidopsis
  misc_feature (123)..(310): Homolog of NCBI NO: 10334499 NR Description: hypothetical protein [Cicer arietinum]
  misc_feature (127)..(302): Homolog of NCBI NO: 15232746 NR Description: zinc-finger protein-like protein; protein id:
  misc_feature (40)..(310): Homolog of NCBI NO: 34898016 NR Description: ESTs C26000(C11448),AU082130(C11448) correspond
  misc_feature (165)..(310): Homolog of NCBI NO: 22331928 NR Description: putative protein; protein id: At3g63530.1 thaliana] >gi|21104275|emb|CAD32249.1| putative protein
  misc_feature (38)..(306): Homolog of NCBI NO: 21536693 NR Description: unknown [Arabidopsis thaliana]
  misc_feature (82)..(308): Homolog of NCBI NO: 38567912 NR Description: OSJNBa0088I22.8 [Oryza sativa (japonica
  misc_feature (223)..(306): Homolog of NCBI NO: 15236782 NR Description: putative protein; protein id: At4g26580.1
  misc_feature (208)..(303): Homolog of NCBI NO: 11358785 NR Description: RING-H2 finger protein RHG1a [imported] -
  misc_feature (223)..(306): Homolog of NCBI NO: 34911538 NR Description: P0421H07.18 [Oryza sativa (japonica
  misc_feature (76)..(76): Xaa is any aa, unknown or other
ISKAYIPPTNLELREERGDSKRHNTEVTGSRLSRWPWAIMATVGQSGALRRVTVHYANSPTGSTVAEVSFDDLDDXLLLFVLADLLPGQEGLHQSILEGTYNNQENHMRGAAPSAPYGYSRPEEYRAESSTAAAAATGSRNSGMDEQIASDFEYAKQLQQEMEDLSVKDEDDNDISCVPSPSDSDDEHEHHDEEEEADRQEDGDGDDDPDNMTYEQGQALVESVGTEYRGLSDELISYLQPWKYKAVKASGLFSRKTNHEDCPICLSTFRNRETMITLPCRHHYHAACVTRWLKVNKTCPVCKYELFGPS

SEQ ID NO: 13857 - protein, 271 aa, Zea mays subsp. mays
  peptide (1)..(271): Ceres Seq. ID no. 12364135
  misc_feature (223)..(263): Pfam Name: Zinc finger, C3HC4 type (RING finger) Pfam Description: Zinc finger, C3HC4 type (RING finger)
  misc_feature (1)..(271): Homolog of NCBI NO: 34898016 NR Description: ESTs C26000(C11448),AU082130(C11448) correspond
  misc_feature (43)..(269): Homolog of NCBI NO: 38567912 NR Description: OSJNBa0088I22.8 [Oryza sativa (japonica
  misc_feature (126)..(271): Homolog of NCBI NO: 22331928 NR Description: putative protein; protein id: At3g63530.1 thaliana] >gi|21104275|emb|CAD32249.1| putative protein
  misc_feature (1)..(267): Homolog of NCBI NO: 21536693 NR Description: unknown [Arabidopsis thaliana]
  misc_feature (1)..(267): Homolog of NCBI NO: 18402411 NR Description: expressed protein; protein id: At3g19910.1, by cDNA: 108568., supported by cDNA: gi_15010577, supported by gi_15028362, supported by cDNA: gi_19310706 [Arabidopsis
  misc_feature (84)..(271): Homolog of NCBI NO: 10334499 NR Description: hypothetical protein [Cicer arietinum]
  misc_feature (88)..(263): Homolog of NCBI NO: 15232746 NR Description: zinc-finger protein-like protein; protein id:
  misc_feature (184)..(267): Homolog of NCBI NO: 15236782 NR Description: putative protein; protein id: At4g26580.1
  misc_feature (169)..(264): Homolog of NCBI NO: 11358785 NR Description: RING-H2 finger protein RHG1a [imported] -
  misc_feature (184)..(267): Homolog of NCBI NO: 34911538 NR Description: P0421H07.18 [Oryza sativa (japonica
  misc_feature (37)..(37): Xaa is any aa, unknown or other
MATVGQSGALRRVTVHYANSPTGSTVAEVSFDDLDDXLLLFVLADLLPGQEGLHQSILEGTYNNQENHMRGAAPSAPYGYSRPEEYRAESSTAAAAATGSRNSGMDEQIASDFEYAKQLQQEMEDLSVKDEDDNDISCVPSPSDSDDEHEHHDEEEEADRQEDGDGDDDPDNMTYEQGQALVESVGTEYRGLSDELISYLQPWKYKAVKASGLFSRKTNHEDCPICLSTFRNRETMITLPCRHHYHAACVTRWLKVNKTCPVCKYELFGPS

SEQ ID NO: 13858 - protein, 203 aa, Zea mays subsp. mays
  peptide (1)..(203): Ceres Seq. ID no. 12364136
  misc_feature (155)..(195): Pfam Name: Zinc finger, C3HC4 type (RING finger) Pfam Description: Zinc finger, C3HC4 type (RING finger)
  misc_feature (1)..(203): Homolog of NCBI NO: 34898016 NR Description: ESTs C26000(C11448),AU082130(C11448) correspond
  misc_feature (1)..(201): Homolog of NCBI NO: 38567912 NR Description: OSJNBa0088I22.8 [Oryza sativa (japonica
  misc_feature (58)..(203): Homolog of NCBI NO: 22331928 NR Description: putative protein; protein id: At3g63530.1 thaliana] >gi|21104275|emb|CAD32249.1| putative protein
  misc_feature (1)..(199): Homolog of NCBI NO: 21536693 NR Description: unknown [Arabidopsis thaliana]
  misc_feature (1)..(199): Homolog of NCBI NO: 18402411 NR Description: expressed protein; protein id: At3g19910.1, by cDNA: 108568., supported by cDNA: gi_15010577, supported by gi_15028362, supported by cDNA: gi_19310706 [Arabidopsis
  misc_feature (16)..(203): Homolog of NCBI NO: 10334499 NR Description: hypothetical protein [Cicer arietinum]
  misc_feature (20)..(195): Homolog of NCBI NO: 15232746 NR Description: zinc-finger protein-like protein; protein id:
  misc_feature (116)..(199): Homolog of NCBI NO: 15236782 NR Description: putative protein; protein id: At4g26580.1
  misc_feature (101)..(196): Homolog of NCBI NO: 11358785 NR Description: RING-H2 finger protein RHG1a [imported] -
  misc_feature (116)..(199): Homolog of NCBI NO: 34911538 NR Description: P0421H07.18 [Oryza sativa (japonica
MRGAAPSAPYGYSRPEEYRAESSTAAAAATGSRNSGMDEQIASDFEYAKQLQQEMEDLSVKDEDDNDISCVPSPSDSDDEHEHHDEEEEADRQEDGDGDDDPDNMTYEQGQALVESVGTEYRGLSDELISYLQPWKYKAVKASGLFSRKTNHEDCPICLSTFRNRETMITLPCRHHYHAACVTRWLKVNKTCPVCKYELFGPS

SEQ ID NO: 13859 - DNA, 1914 bp, Zea mays subsp. mays
  misc_feature (1)..(1914): Ceres Seq. ID no. 12454931
  misc_feature: MA Experiment ID: 108543 Result: Down-regulated in Transcription
  misc_feature: MA Experiment ID: 108689 Result: Up-regulated in Transcription
  misc_feature: MA Experiment 108689 PARAMETER Experiment Name: Zm_Drought_Roots_P Parameter: Age (day) Value: 9
  misc_feature: MA Experiment 108689 PARAMETER Experiment Name: Zm_Drought_Roots_P Parameter: Organism Value: Zea mays
  misc_feature: MA Experiment 108689 PARAMETER Experiment Name: Zm_Drought_Roots_P Parameter: Plant Line Value: 35A19
  misc_feature: MA Experiment 108689 PARAMETER Experiment Name: Zm_Drought_Roots_P Parameter: Timepoint (hr) Value: 24
  misc_feature: MA Experiment 108689 PARAMETER Experiment Name: Zm_Drought_Roots_P Parameter: Tissue Value: Roots
  misc_feature: MA Experiment 108689 PARAMETER Experiment Name: Zm_Drought_Roots_P Parameter: Treatment Value: Drought vs. No Drought
  misc_feature: MA Experiment ID: 20000477 Result: Up-regulated in Transcription
  misc_feature: MA Experiment 20000477 PARAMETER Experiment Name: Zm_5mM_SA_P Parameter: Age (day) Value: 10
  misc_feature: MA Experiment 20000477 PARAMETER Experiment Name: Zm_5mM_SA_P Parameter: Organism Value: Zea mays
  misc_feature: MA Experiment 20000477 PARAMETER Experiment Name: Zm_5mM_SA_P Parameter: Plant Line Value: 35A19
  misc_feature: MA Experiment 20000477 PARAMETER Experiment Name: Zm_5mM_SA_P Parameter: Timepoint (hr) Value: 48
  misc_feature: MA Experiment 20000477 PARAMETER Experiment Name: Zm_5mM_SA_P Parameter: Tissue Value: Aerial
  misc_feature: MA Experiment 20000477 PARAMETER Experiment Name: Zm_5mM_SA_P Parameter: Treatment Value: 5mM SA vs. No Treatment
  misc_feature: MA Experiment ID: 20000535 Result: Down-regulated in Transcription
  misc_feature: MA Experiment 20000535 PARAMETER Experiment Name: Zm_Hybrid_Seed_Dev_P Parameter: DAP Value: 30 vs. 12
  misc_feature: MA Experiment 20000535 PARAMETER Experiment Name: Zm_Hybrid_Seed_Dev_P Parameter: Organism Value: Zea mays
  misc_feature: MA Experiment 20000535 PARAMETER Experiment Name: Zm_Hybrid_Seed_Dev_P Parameter: Plant Line Value: 35A19
  misc_feature: MA Experiment 20000535 PARAMETER Experiment Name: Zm_Hybrid_Seed_Dev_P Parameter: Tissue Value: Embryo vs. Unfert Floret
aaggcccaactccactcatcgccactgcgccgaaacccaaagcggggaggaggagcggaaaagaaaaggaaaatgggaggagcggaagcaagtccgagcaagtcagaggatccgccggcctatctccgcctataaaatgccgtcccaccccccaccttcctagcagctgctctccaccaagagctgctggcaccaccaaaccaatcgctggatttgtccagagtatttccggtttcaccgccctagatctgacccgagacgccgcgtcttcgctgagatggcgattactgtgaggcggtcgacgatggtgcgcccggcgcgggagacgccgcggcagcggctgtggaactccaacctcgacctcgtggtgccgcgcttccacacgcccagtgtctacttctaccgccgcgacggccccgtgccggatgcggaggggttcttcgacggcgagcggatgcggcgcgcgctggcagaggcgctcgtgccgttctatccaatggcgggccgcctcgcgcgggacgaggacggtagggtcgagatcgactgcaatggcgagggagtgctcttcgtcgaggccgacgcgcccgatgcctctgtcgatgactacggtgacttcgcgcccaccatggagctcaagcgcctcatcccgaccgtcgattacaccgacgacatctcggccttctcgctactcgtgctccaggtgacttatttcaaatgtggaggcgtctcccttggtgttggcatgcaacaccatgcagcggatggcatgtctggcttgcacttcattaactcatggtctgacctctgccgtggagctcaaatttctgtcatgcccttcattgaccgcacccttcttcgtgctcgtgatccaccaactccatcttttcaacatatcgagtaccagcctgccccagctatgttgtcctccacaacccagttccttgcttccaagtcaaagccacctgccactgctgtggacattttcaagctcactcgctcagaccttggccggctgcgctcacagcttcctgcaggggaaggtgcaccccggttcagcacatatgcagtgctagcggcacatgtctggaaatgtgtctcccttgcacgcagcctacctcctgaacaacccaccaagttgtattgcgccactgatggccgtcaacggctacagcctccactaccagatgggtactttggcaatgtcatcttcaccgcgacaccacttgctgaggcgggcaaggtgaccagtgagctggcagaaggagcagcagtcatccagggagcactggataggatggacaacgactactgccgctcagcgttagactacctggatcttcaaccggatctgtcagcacttgtgcgtggagcgcataccttccgctgcccgaacctagggctcaccagctgggtgcgccttcctatccatgatgctgacttcggatggggccggcctgtgttcatggggccaggtggcattgcgtatgaaggtctggcgtttgtcctcccaagtgcaaatggcgacggcagcctgtccattgctatctcgttgcaggctgagcacatggagaagttccggaagctaatcggcggtgccaactgttgaaggaggatgtcatagggcgagagggattatgctccgcccaaattctcagataaaatactgaagtttcaagtgaacccagtggctgcactttcactttgaagacttgcagaggaaattcatggtcacttcattttgtgaggttaattatagagaaagggtagaaattatatgaagaaacatagtaaaaaatcattgttaggaacaaactccaatagcaggctctacttgtacgtcgcagacataagctgagactgatctgcgattgcaacagattatactcttctatcaggttgactgaagttccctcg

SEQ ID NO: 13860 - protein, 442 aa, Zea mays subsp. mays
  peptide (1)..(442): Ceres Seq. ID no. 12454932
  misc_feature (1)..(437): Pfam Name: Transferase family Pfam Description: Transferase family
  misc_feature (1)..(437): Homolog of NCBI NO: 38345030 NR Description: OSJNBa0029H02.14 [Oryza sativa (japonica
  misc_feature (1)..(437): Homolog of NCBI NO: 32400295 NR Description: hydroxyanthranilate hydroxycinnamoyltransferase 3
  misc_feature (1)..(437): Homolog of NCBI NO: 32400291 NR Description: hydroxyanthranilate hydroxycinnamoyltransferase 1
  misc_feature (1)..(437): Homolog of NCBI NO: 32400293 NR Description: hydroxyanthranilate hydroxycinnamoyltransferase 2
  misc_feature (1)..(437): Homolog of NCBI NO: 27475616 NR Description: hydroxycinnamoyl transferase [Nicotiana tabacum]
  misc_feature (1)..(437): Homolog of NCBI NO: 21536883 NR Description: anthranilate N-benzoyltransferase [Arabidopsis
  misc_feature (1)..(437): Homolog of NCBI NO: 15239747 NR Description: anthranilate N-benzoyltransferase; protein id: supported by cDNA: 114130. [Arabidopsis thaliana]
  misc_feature (1)..(154): Homolog of NCBI NO: 10241667 NR Description: putative N-hydroxycinnamoyl/benzoyl transferase
  misc_feature (303)..(437): Homolog of NCBI NO: 10241667 NR Description: putative N-hydroxycinnamoyl/benzoyl transferase
  misc_feature (138)..(437): Homolog of NCBI NO: 32400297 NR Description: hydroxyanthranilate hydroxycinnamoyltransferase 4
MAITVRRSTMVRPARETPRQRLWNSNLDLVVPRFHTPSVYFYRRDGPVPDAEGFFDGERMRRALAEALVPFYPMAGRLARDEDGRVEIDCNGEGVLFVEADAPDASVDDYGDFAPTMELKRLIPTVDYTDDISAFSLLVLQVTYFKCGGVSLGVGMQHHAADGMSGLHFINSWSDLCRGAQISVMPFIDRTLLRARDPPTPSFQHIEYQPAPAMLSSTTQFLASKSKPPATAVDIFKLTRSDLGRLRSQLPAGEGAPRFSTYAVLAAHVWKCVSLARSLPPEQPTKLYCATDGRQRLQPPLPDGYFGNVIFTATPLAEAGKVTSELAEGAAVIQGALDRMDNDYCRSALDYLDLQPDLSALVRGAHTFRCPNLGLTSWVRLPIHDADFGWGRPVFMGPGGIAYEGLAFVLPSANGDGSLSIAISLQAEHMEKFRKLIGGANC

SEQ ID NO: 13861 - protein, 433 aa, Zea mays subsp. mays
  peptide (1)..(433): Ceres Seq. ID no. 12454933
  misc_feature (1)..(428): Pfam Name: Transferase family Pfam Description: Transferase family
  misc_feature (1)..(428): Homolog of NCBI NO: 38345030 NR Description: OSJNBa0029H02.14 [Oryza sativa (japonica
  misc_feature (1)..(428): Homolog of NCBI NO: 32400295 NR Description: hydroxyanthranilate hydroxycinnamoyltransferase 3
  misc_feature (1)..(428): Homolog of NCBI NO: 32400291 NR Description: hydroxyanthranilate hydroxycinnamoyltransferase 1
  misc_feature (1)..(428): Homolog of NCBI NO: 32400293 NR Description: hydroxyanthranilate hydroxycinnamoyltransferase 2
  misc_feature (1)..(428): Homolog of NCBI NO: 27475616 NR Description: hydroxycinnamoyl transferase [Nicotiana tabacum]
  misc_feature (1)..(428): Homolog of NCBI NO: 21536883 NR Description: anthranilate N-benzoyltransferase [Arabidopsis
  misc_feature (1)..(428): Homolog of NCBI NO: 15239747 NR Description: anthranilate N-benzoyltransferase; protein id: supported by cDNA: 114130. [Arabidopsis thaliana]
  misc_feature (1)..(145): Homolog of NCBI NO: 10241667 NR Description: putative N-hydroxycinnamoyl/benzoyl transferase
  misc_feature (294)..(428): Homolog of NCBI NO: 10241667 NR Description: putative N-hydroxycinnamoyl/benzoyl transferase
  misc_feature (129)..(428): Homolog of NCBI NO: 32400297 NR Description: hydroxyanthranilate hydroxycinnamoyltransferase 4
MVRPARETPRQRLWNSNLDLVVPRFHTPSVYFYRRDGPVPDAEGFFDGERMRRALAEALVPFYPMAGRLARDEDGRVEIDCNGEGVLFVEADAPDASVDDYGDFAPTMELKRLIPTVDYTDDISAFSLLVLQVTYFKCGGVSLGVGMQHHAADGMSGLHFINSWSDLCRGAQISVMPFIDRTLLRARDPPTPSFQHIEYQPAPAMLSSTTQFLASKSKPPATAVDIFKLTRSDLGRLRSQLPAGEGAPRFSTYAVLAAHVWKCVSLARSLPPEQPTKLYCATDGRQRLQPPLPDGYFGNVIFTATPLAEAGKVTSELAEGAAVIQGALDRMDNDYCRSALDYLDLQPDLSALVRGAHTFRCPNLGLTSWVRLPIHDADFGWGRPVFMGPGGIAYEGLAFVLPSANGDGSLSIAISLQAEHMEKFRKLIGGANC

SEQ ID NO: 13862 - protein, 383 aa, Zea mays subsp. mays
  peptide (1)..(383): Ceres Seq. ID no. 12454934
  misc_feature (1)..(378): Pfam Name: Transferase family Pfam Description: Transferase family
  misc_feature (1)..(378): Homolog of NCBI NO: 38345030 NR Description: OSJNBa0029H02.14 [Oryza sativa (japonica
  misc_feature (1)..(378): Homolog of NCBI NO: 32400295 NR Description: hydroxyanthranilate hydroxycinnamoyltransferase 3
  misc_feature (1)..(378): Homolog of NCBI NO: 32400291 NR Description: hydroxyanthranilate hydroxycinnamoyltransferase 1
  misc_feature (1)..(378): Homolog of NCBI NO: 32400293 NR Description: hydroxyanthranilate hydroxycinnamoyltransferase 2
  misc_feature (1)..(378): Homolog of NCBI NO: 27475616 NR Description: hydroxycinnamoyl transferase [Nicotiana tabacum]
  misc_feature (1)..(378): Homolog of NCBI NO: 21536883 NR Description: anthranilate N-benzoyltransferase [Arabidopsis
  misc_feature (1)..(378): Homolog of NCBI NO: 15239747 NR Description: anthranilate N-benzoyltransferase; protein id: supported by cDNA: 114130. [Arabidopsis thaliana]
  misc_feature (1)..(95): Homolog of NCBI NO: 10241667 NR Description: putative N-hydroxycinnamoyl/benzoyl transferase
  misc_feature (244)..(378): Homolog of NCBI NO: 10241667 NR Description: putative N-hydroxycinnamoyl/benzoyl transferase
  misc_feature (79)..(378): Homolog of NCBI NO: 32400297 NR Description: hydroxyanthranilate hydroxycinnamoyltransferase 4
MRRALAEALVPFYPMAGRLARDEDGRVEIDCNGEGVLFVEADAPDASVDDYGDFAPTMELKRLIPTVDYTDDISAFSLLVLQVTYFKCGGVSLGVGMQHHAADGMSGLHFINSWSDLCRGAQISVMPFIDRTLLRARDPPTPSFQHIEYQPAPAMLSSTTQFLASKSKPPATAVDIFKLTRSDLGRLRSQLPAGEGAPRFSTYAVLAAHVWKCVSLARSLPPEQPTKLYCATDGRQRLQPPLPDGYFGNVIFTATPLAEAGKVTSELAEGAAVIQGALDRMDNDYCRSALDYLDLQPDLSALVRGAHTFRCPNLGLTSWVRLPIHDADFGWGRPVFMGPGGIAYEGLAFVLPSANGDGSLSIAISLQAEHMEKFRKLIGGANC

SEQ ID NO: 13863 - DNA, 387 bp, Zea mays subsp. mays
  misc_feature (1)..(387): Ceres Seq. ID no. 13622708
  misc_feature: MA Experiment ID: 108528 Result: Up-regulated in Transcription
  misc_feature: MA Experiment 108528 PARAMETER Experiment Name: Zm_Imbibed_Seeds_P Parameter: Age (day) Value: 5 vs. 2
  misc_feature: MA Experiment 108528 PARAMETER Experiment Name: Zm_Imbibed_Seeds_P Parameter: Organism Value: Zea mays
  misc_feature: MA Experiment 108528 PARAMETER Experiment Name: Zm_Imbibed_Seeds_P Parameter: Plant Line Value: 35A19
  misc_feature: MA Experiment 108528 PARAMETER Experiment Name: Zm_Imbibed_Seeds_P Parameter: Tissue Value: Aerial vs. Embryo
  misc_feature: MA Experiment ID: 108530 Result: Up-regulated in Transcription
  misc_feature: MA Experiment 108530 PARAMETER Experiment Name: Zm_Imbibed_Seeds_P Parameter: Age (day) Value: 6 vs. 2
  misc_feature: MA Experiment 108530 PARAMETER Experiment Name: Zm_Imbibed_Seeds_P Parameter: Organism Value: Zea mays
  misc_feature: MA Experiment 108530 PARAMETER Experiment Name: Zm_Imbibed_Seeds_P Parameter: Plant Line Value: 35A19
  misc_feature: MA Experiment 108530 PARAMETER Experiment Name: Zm_Imbibed_Seeds_P Parameter: Tissue Value: Aerial vs. Embryo
  misc_feature: MA Experiment ID: 108545 Result: Up-regulated in Transcription
  misc_feature: MA Experiment 108545 PARAMETER Experiment Name: Zm_Imbibed_Seeds_P Parameter: Age (day) Value: 3 vs. 2
  misc_feature: MA Experiment 108545 PARAMETER Experiment Name: Zm_Imbibed_Seeds_P Parameter: Organism Value: Zea mays
  misc_feature: MA Experiment 108545 PARAMETER Experiment Name: Zm_Imbibed_Seeds_P Parameter: Plant Line Value: 35A19
  misc_feature: MA Experiment 108545 PARAMETER Experiment Name: Zm_Imbibed_Seeds_P Parameter: Tissue Value: Aerial vs. Embryo
  misc_feature: MA Experiment ID: 108547 Result: Up-regulated in Transcription
  misc_feature: MA Experiment 108547 PARAMETER Experiment Name: Zm_Imbibed_Seeds_P Parameter: Age (day) Value: 4 vs. 2
  misc_feature: MA Experiment 108547 PARAMETER Experiment Name: Zm_Imbibed_Seeds_P Parameter: Organism Value: Zea mays
  misc_feature: MA Experiment 108547 PARAMETER Experiment Name: Zm_Imbibed_Seeds_P Parameter: Plant Line Value: 35A19
  misc_feature: MA Experiment 108547 PARAMETER Experiment Name: Zm_Imbibed_Seeds_P Parameter: Tissue Value: Aerial vs. Embryo
  misc_feature: MA Experiment ID: 20000487 Result: Up-regulated in Transcription
  misc_feature: MA Experiment 20000487 PARAMETER Experiment Name: Zm_50mM_NH4NO3_L_to_H_P Parameter: Organism Value: Zea mays
  misc_feature: MA Experiment 20000487 PARAMETER Experiment Name: Zm_50mM_NH4NO3_L_to_H_P Parameter: Timepoint (hr) Value: 4
  misc_feature: MA Experiment 20000487 PARAMETER Experiment Name: Zm_50mM_NH4NO3_L_to_H_P Parameter: Tissue Value: Leaves
  misc_feature: MA Experiment 20000487 PARAMETER Experiment Name: Zm_50mM_NH4NO3_L_to_H_P Parameter: Treatment Value: 50mM NH4NO3 vs. 100mM Mannitol
gatagatgcccgaccaatctaatagcgccgcaacgcgaagcgcgaagccgcgaagcctcacctacagttccttcgcgcaccggcaccgcggcggcagttcagcatggtggcagcatccgtagccgagcgggcctatgaggcggcgacgcggtccgcgctggtggcgctggagcgcaacctcatcccggacgcggtgacccggcgcctgacgcggctcctgctcgcgcagcgcctccgccagggctacctcccctccgcgccgctccagctgcagcagctcctccagttcgtccactctcttgaagagatgcccattgccattgaaacagacaaagctaaagcccaacactatgagttgccaactacatttttcaagctagtgctggg

SEQ ID NO: 13864 - protein, 94 aa, Zea mays subsp. mays
  peptide (1)..(94): Ceres Seq. ID no. 13622709
  misc_feature (6)..(93): Homolog of NCBI NO: 7486449 NR Description: hypothetical protein F4I10.40 - Arabidopsis >gi|4455325|emb|CAB36785.1| putative protein [Arabidopsis >gi|7270258|emb|CAB80028.1| putative protein [Arabidopsis
  misc_feature (6)..(93): Homolog of NCBI NO: 18418151 NR Description: expressed protein [Arabidopsis thaliana]
  misc_feature (6)..(93): Homolog of NCBI NO: 21593795 NR Description: coclaurine N-methyltransferase [Arabidopsis
  misc_feature (6)..(93): Homolog of NCBI NO: 26451688 NR Description: unknown protein [Arabidopsis thaliana]
  misc_feature (6)..(93): Homolog of NCBI NO: 30689611 NR Description: expressed protein [Arabidopsis thaliana]
  misc_feature (1)..(93): Homolog of NCBI NO: 21242125 NR Description: conserved hypothetical protein [Xanthomonas pv. citri str. 306] >gi|21107536|gb|AAM36243.1| conserved
  misc_feature (7)..(93): Homolog of NCBI NO: 16754879 NR Description: coclaurine N-methyltransferase [Coptis japonica]
  misc_feature (14)..(92): Homolog of NCBI NO: 33413898 NR Description: S-adenosyl-L-methionine:coclaurine
  misc_feature (22)..(93): Homolog of NCBI NO: 39997416 NR Description: cyclopropane-fatty-acyl-phospholipid synthase,
MVAASVAERAYEAATRSALVALERNLIPDAVTRRLTRLLLAQRLRQGYLPSAPLQLQQLLQFVHSLEEMPIAIETDKAKAQHYELPTTFFKLVL

SEQ ID NO: 13865 - DNA, 442 bp, Zea mays subsp. mays
  misc_feature (1)..(442): Ceres Seq. ID no. 2817268
  misc_feature: MA Experiment ID: 20000535 Result: Up-regulated in Transcription
  misc_feature: MA Experiment 20000535 PARAMETER Experiment Name: Zm_Hybrid_Seed_Dev_P Parameter: DAP Value: 30 vs. 12
  misc_feature: MA Experiment 20000535 PARAMETER Experiment Name: Zm_Hybrid_Seed_Dev_P Parameter: Organism Value: Zea mays
  misc_feature: MA Experiment 20000535 PARAMETER Experiment Name: Zm_Hybrid_Seed_Dev_P Parameter: Plant Line Value: 35A19
  misc_feature: MA Experiment 20000535 PARAMETER Experiment Name: Zm_Hybrid_Seed_Dev_P Parameter: Tissue Value: Embryo vs. Unfert Floret
  misc_feature: MA Experiment ID: 20000632 Result: Down-regulated in Transcription
  misc_feature: MA Experiment 20000632 PARAMETER Experiment Name: Zm_Herbicide-Treatments_P Parameter: Timepoint (hr) Value: 4
  misc_feature: MA Experiment 20000632 PARAMETER Experiment Name: Zm_Herbicide-Treatments_P Parameter: Tissue Value: Aerial
  misc_feature: MA Experiment 20000632 PARAMETER Experiment Name: Zm_Herbicide-Treatments_P Parameter: Treatment Value: Glean vs. No Treatment
aatggcagaattccaattttctctccacaccaggccacgccacacacaggatagcgagcgggagcgacggcggcggcggaggagctagggttttgatccggcctcgccggctaggctgcgccgccccgacgccgaagccatggacagggagcttctagagacgtttgacgtggccaagaaggcggccgacgcggcggcaggggacggcaactcgccggaggctggccgctgcctcgacgcgctgcggcggctgcgcgacattcgcgtcaacaccgacatcctcgtctcgacgcaggttggcaaacgccttcgaccccttactaagcatcctcactcaggcattcaagcagttgctgcagacctttttgggtactggaaaaaggttgtccttgaagagtcaggaaagaaaaatggcggctcagagaatgaaagatcaagtgac

SEQ ID NO: 13866 - protein, 101 aa, Zea mays subsp. mays
  peptide (1)..(101): Ceres Seq. ID no. 2817269
  misc_feature (1)..(100): Homolog of NCBI NO: 28876018 NR Description: putative transcription elongation factor [Oryza
  misc_feature (1)..(100): Homolog of NCBI NO: 23617251 NR Description: putative transcription elongation factor [Oryza
  misc_feature (1)..(89): Homolog of NCBI NO: 15224901 NR Description: putative elongation factor; protein id: [Arabidopsis thaliana] >gi|25408599|pir||E84806 probable
  misc_feature (1)..(89): Homolog of NCBI NO: 18377737 NR Description: putative elongation factor [Arabidopsis thaliana]
MDRELLETFDVAKKAADAAAGDGNSPEAGRCLDALRRLRDIRVNTDILVSTQVGKRLRPLTKHPHSGIQAVAADLFGYWKKVVLEESGKKNGGSENERSSD

SEQ ID NO: 13867 - protein, 51 aa, Zea mays subsp. mays
  peptide (1)..(51): Ceres Seq. ID no. 2817270
WQNSNFLSTPGHATHRIASGSDGGGGGARVLIRPRRLGCAAPTPKPWTGSF

SEQ ID NO: 13868 - DNA, 488 bp, Zea mays subsp. mays
  misc_feature (1)..(488): Ceres Seq. ID no. 2817291
  misc_feature: MA Experiment ID: 108528 Result: Up-regulated in Transcription
  misc_feature: MA Experiment 108528 PARAMETER Experiment Name: Zm_Imbibed_Seeds_P Parameter: Age (day) Value: 5 vs. 2
  misc_feature: MA Experiment 108528 PARAMETER Experiment Name: Zm_Imbibed_Seeds_P Parameter: Organism Value: Zea mays
  misc_feature: MA Experiment 108528 PARAMETER Experiment Name: Zm_Imbibed_Seeds_P Parameter: Plant Line Value: 35A19
  misc_feature: MA Experiment 108528 PARAMETER Experiment Name: Zm_Imbibed_Seeds_P Parameter: Tissue Value: Aerial vs. Embryo
  misc_feature: MA Experiment ID: 108530 Result: Up-regulated in Transcription
  misc_feature: MA Experiment 108530 PARAMETER Experiment Name: Zm_Imbibed_Seeds_P Parameter: Age (day) Value: 6 vs. 2
  misc_feature: MA Experiment 108530 PARAMETER Experiment Name: Zm_Imbibed_Seeds_P Parameter: Organism Value: Zea mays
  misc_feature: MA Experiment 108530 PARAMETER Experiment Name: Zm_Imbibed_Seeds_P Parameter: Plant Line Value: 35A19
  misc_feature: MA Experiment 108530 PARAMETER Experiment Name: Zm_Imbibed_Seeds_P Parameter: Tissue Value: Aerial vs. Embryo
  misc_feature: MA Experiment ID: 108534 Result: Up-regulated in Transcription
  misc_feature: MA Experiment 108534 PARAMETER Experiment Name: Zm_4deg_Cold_P Parameter: Age (hr) Value: 8
  misc_feature: MA Experiment 108534 PARAMETER Experiment Name: Zm_4deg_Cold_P Parameter: Organism Value: Zea mays
  misc_feature: MA Experiment 108534 PARAMETER Experiment Name: Zm_4deg_Cold_P Parameter: Plant Line Value: 35A19
  misc_feature: MA Experiment 108534 PARAMETER Experiment Name: Zm_4deg_Cold_P Parameter: Temperature (deg C) Value: 4 vs. 22
  misc_feature: MA Experiment 108534 PARAMETER Experiment Name: Zm_4deg_Cold_P Parameter: Timepoint (hr) Value: 6
  misc_feature: MA Experiment 108534 PARAMETER Experiment Name: Zm_4deg_Cold_P Parameter: Tissue Value: Aerial
  misc_feature: MA Experiment ID: 108547 Result: Up-regulated in Transcription
  misc_feature: MA Experiment 108547 PARAMETER Experiment Name: Zm_Imbibed_Seeds_P Parameter: Age (day) Value: 4 vs. 2
  misc_feature: MA Experiment 108547 PARAMETER Experiment Name: Zm_Imbibed_Seeds_P Parameter: Organism Value: Zea mays
  misc_feature: MA Experiment 108547 PARAMETER Experiment Name: Zm_Imbibed_Seeds_P Parameter: Plant Line Value: 35A19
  misc_feature: MA Experiment 108547 PARAMETER Experiment Name: Zm_Imbibed_Seeds_P Parameter: Tissue Value: Aerial vs. Embryo
  misc_feature: MA Experiment ID: 108556 Result: Down-regulated in Transcription
  misc_feature: MA Experiment 108556 PARAMETER Experiment Name: Zm_Drought_P Parameter: Age (day) Value: 9
  misc_feature: MA Experiment 108556 PARAMETER Experiment Name: Zm_Drought_P Parameter: Organism Value: Zea mays
  misc_feature: MA Experiment 108556 PARAMETER Experiment Name: Zm_Drought_P Parameter: Plant Line Value: 35A19
  misc_feature: MA Experiment 108556 PARAMETER Experiment Name: Zm_Drought_P Parameter: Timepoint (hr) Value: 24
  misc_feature: MA Experiment 108556 PARAMETER Experiment Name: Zm_Drought_P Parameter: Tissue Value: Aerial
  misc_feature: MA Experiment 108556 PARAMETER Experiment Name: Zm_Drought_P Parameter: Treatment Value: Drought vs. No Drought
  misc_feature: MA Experiment ID: 108559 Result: Down-regulated in Transcription
  misc_feature: MA Experiment 108559 PARAMETER Experiment Name: Zm_5mM_NO_P Parameter: Age (day) Value: 8
  misc_feature: MA Experiment 108559 PARAMETER Experiment Name: Zm_5mM_NO_P Parameter: Organism Value: Zea mays
  misc_feature: MA Experiment 108559 PARAMETER Experiment Name: Zm_5mM_NO_P Parameter: Plant Line Value: 35A19
  misc_feature: MA Experiment 108559 PARAMETER Experiment Name: Zm_5mM_NO_P Parameter: Timepoint (hr) Value: 12
  misc_feature: MA Experiment 108559 PARAMETER Experiment Name: Zm_5mM_NO_P Parameter: Tissue Value: Aerial
  misc_feature: MA Experiment 108559 PARAMETER Experiment Name: Zm_5mM_NO_P Parameter: Treatment Value: 5mM NO vs. No Treatment
  misc_feature: MA Experiment ID: 20000479 Result: Down-regulated in Transcription
  misc_feature: MA Experiment 20000479 PARAMETER Experiment Name: Zm_Drought_P Parameter: Age (day) Value: 10
  misc_feature: MA Experiment 20000479 PARAMETER Experiment Name: Zm_Drought_P Parameter: Organism Value: Zea mays
  misc_feature: MA Experiment 20000479 PARAMETER Experiment Name: Zm_Drought_P Parameter: Plant Line Value: 35A19
  misc_feature: MA Experiment 20000479 PARAMETER Experiment Name: Zm_Drought_P Parameter: Timepoint (hr) Value: 48
  misc_feature: MA Experiment 20000479 PARAMETER Experiment Name: Zm_Drought_P Parameter: Tissue Value: Aerial
  misc_feature: MA Experiment 20000479 PARAMETER Experiment Name: Zm_Drought_P Parameter: Treatment Value: Drought vs. No Drought
  misc_feature: MA Experiment ID: 20000480 Result: Down-regulated in Transcription
  misc_feature: MA Experiment 20000480 PARAMETER Experiment Name: Zm_Drought_P Parameter: Age (day) Value: 11
  misc_feature: MA Experiment 20000480 PARAMETER Experiment Name: Zm_Drought_P Parameter: Organism Value: Zea mays
  misc_feature: MA Experiment 20000480 PARAMETER Experiment Name: Zm_Drought_P Parameter: Plant Line Value: 35A19
  misc_feature: MA Experiment 20000480 PARAMETER Experiment Name: Zm_Drought_P Parameter: Timepoint (hr) Value: 72
  misc_feature: MA Experiment 20000480 PARAMETER Experiment Name: Zm_Drought_P Parameter: Tissue Value: Aerial
  misc_feature: MA Experiment 20000480 PARAMETER Experiment Name: Zm_Drought_P Parameter: Treatment Value: Drought vs. No Drought
actacacgccaaccaaacgccacccgataataaaaacacgagcggcagcagcgatgcttcaggttcgcgcgtccccggccttcctcccctccacctcctccccgccatcgtcgtcgcaggcgccaccgcgttcccgctctcggggaagagccagcggcgccgcggcgggctggtcgcggtgccgcaggcgagccgcgtggctaggcggtccgtgatggcagcggcgggggcagccgcagccgccccggcggcggccaagctcgaggacgccgacgcgctcatcgactctgtggagaccttcatcttcgactgcgacggtgtgatctggaagggcgacaagctgatcgacggcgtgctggagactctcgacctgctccgatcaaagggcaagcggctggtgttcgtgaccaacaactccaccaagtcgaggaagcagtacggcaggaagttcgagacgctggggctgagcgtcgacgaggaagagatct

SEQ ID NO: 13869 - protein, 162 aa, Zea mays subsp. mays
  peptide (1)..(162): Ceres Seq. ID no. 2817292
  misc_feature (97)..(161): Pfam Name: haloacid dehalogenase-like hydrolase Pfam Description: haloacid dehalogenase-like hydrolase
  misc_feature (41)..(161): Homolog of NCBI NO: 38345235 NR Description: OSJNBa0084K20.14 [Oryza sativa (japonica
  misc_feature (72)..(161): Homolog of NCBI NO: 8953699 NR Description: 4-nitrophenylphosphatase-like [Arabidopsis
  misc_feature (72)..(161): Homolog of NCBI NO: 15239406 NR Description: p-nitrophenylphosphatase-like protein; protein At5g36790.1, supported by cDNA: gi_20453152 [Arabidopsis >gi|20453153|gb|AAM19818.1| AT5g36790/f5h8_20 [Arabidopsis
  misc_feature (72)..(161): Homolog of NCBI NO: 8885622 NR Description: N-glyceraldehyde-2-phosphotransferase-like
  misc_feature (72)..(161): Homolog of NCBI NO: 26450878 NR Description: putative p-nitrophenylphosphatase [Arabidopsis
  misc_feature (81)..(161): Homolog of NCBI NO: 21593203 NR Description: 4-nitrophenylphosphatase-like protein
  misc_feature (81)..(161): Homolog of NCBI NO: 10177912 NR Description: 4-nitrophenylphosphatase-like protein
  misc_feature (81)..(161): Homolog of NCBI NO: 15238800 NR Description: 4-nitrophenylphosphatase-like protein; protein
  misc_feature (65)..(161): Homolog of NCBI NO: 15982558 NR Description: phosphoglycolate phosphatase precursor reinhardtii] >gi|28316388|dbj|BAC56941.1| phosphoglycolate
  misc_feature (94)..(161): Homolog of NCBI NO: 32403122 NR Description: hypothetical protein [Neurospora crassa]
LHANQTPPDNKNTSGSSDASGSRVPGLPPLHLLPAIVVAGATAFPLSGKSQRRRGGLVAVPQASRVARRSVMAAAGAAAAAPAAAKLEDADALIDSVETFIFDCDGVIWKGDKLIDGVLETLDLLRSKGKRLVFVTNNSTKSRKQYGRKFETLGLSVDEEEI

SEQ ID NO: 13870 - protein, 91 aa, Zea mays subsp. mays
  peptide (1)..(91): Ceres Seq. ID no. 2817293
  misc_feature (26)..(90): Pfam Name: haloacid dehalogenase-like hydrolase Pfam Description: haloacid dehalogenase-like hydrolase
  misc_feature (1)..(90): Homolog of NCBI NO: 38345235 NR Description: OSJNBa0084K20.14 [Oryza sativa (japonica
  misc_feature (1)..(90): Homolog of NCBI NO: 8953699 NR Description: 4-nitrophenylphosphatase-like [Arabidopsis
  misc_feature (1)..(90): Homolog of NCBI NO: 15239406 NR Description: p-nitrophenylphosphatase-like protein; protein At5g36790.1, supported by cDNA: gi_20453152 [Arabidopsis >gi|20453153|gb|AAM19818.1| AT5g36790/f5h8_20 [Arabidopsis
  misc_feature (1)..(90): Homolog of NCBI NO: 8885622 NR Description: N-glyceraldehyde-2-phosphotransferase-like
  misc_feature (1)..(90): Homolog of NCBI NO: 26450878 NR Description: putative p-nitrophenylphosphatase [Arabidopsis
  misc_feature (10)..(90): Homolog of NCBI NO: 21593203 NR Description: 4-nitrophenylphosphatase-like protein
  misc_feature (10)..(90): Homolog of NCBI NO: 10177912 NR Description: 4-nitrophenylphosphatase-like protein
  misc_feature (10)..(90): Homolog of NCBI NO: 15238800 NR Description: 4-nitrophenylphosphatase-like protein; protein
  misc_feature (1)..(90): Homolog of NCBI NO: 15982558 NR Description: phosphoglycolate phosphatase precursor reinhardtii] >gi|28316388|dbj|BAC56941.1| phosphoglycolate
  misc_feature (23)..(90): Homolog of NCBI NO: 32403122 NR Description: hypothetical protein [Neurospora crassa]
MAAAGAAAAAPAAAKLEDADALIDSVETFIFDCDGVIWKGDKLIDGVLETLDLLRSKGKRLVFVTNNSTKSRKQYGRKFETLGLSVDEEEI

SEQ ID NO: 13871 - DNA, 2115 bp, Zea mays subsp. mays
  misc_feature (1)..(2115): Ceres Seq. ID no. 13635237
  misc_feature: MA Experiment ID: 108504 Result: Up-regulated in Transcription
  misc_feature: MA Experiment 108504 PARAMETER Experiment Name: Zm_Drought_P Parameter: Age (day) Value: 8
  misc_feature: MA Experiment 108504 PARAMETER Experiment Name: Zm_Drought_P Parameter: Organism Value: Zea mays
  misc_feature: MA Experiment 108504 PARAMETER Experiment Name: Zm_Drought_P Parameter: Plant Line Value: 35A19
  misc_feature: MA Experiment 108504 PARAMETER Experiment Name: Zm_Drought_P Parameter: Timepoint (hr) Value: 12
  misc_feature: MA Experiment 108504 PARAMETER Experiment Name: Zm_Drought_P Parameter: Tissue Value: Aerial
  misc_feature: MA Experiment 108504 PARAMETER Experiment Name: Zm_Drought_P Parameter: Treatment Value: Drought vs. No Drought
  misc_feature: MA Experiment ID: 108513 Result: Up-regulated in Transcription
  misc_feature: MA Experiment 108513 PARAMETER Experiment Name: Zm_100uM_ABA_P Parameter: Age (day) Value: 8
  misc_feature: MA Experiment 108513 PARAMETER Experiment Name: Zm_100uM_ABA_P Parameter: Organism Value: Zea mays
  misc_feature: MA Experiment 108513 PARAMETER Experiment Name: Zm_100uM_ABA_P Parameter: Plant Line Value: 35A19
  misc_feature: MA Experiment 108513 PARAMETER Experiment Name: Zm_100uM_ABA_P Parameter: Timepoint (hr) Value: 6
  misc_feature: MA Experiment 108513 PARAMETER Experiment Name: Zm_100uM_ABA_P Parameter: Tissue Value: Aerial
  misc_feature: MA Experiment 108513 PARAMETER Experiment Name: Zm_100uM_ABA_P Parameter: Treatment Value: 100uM ABA vs. No Treatment
  misc_feature: MA Experiment ID: 108523 Result: Up-regulated in Transcription
  misc_feature: MA Experiment 108523 PARAMETER Experiment Name: Zm_42deg_Heat_P Parameter: Age (day) Value: 8
  misc_feature: MA Experiment 108523 PARAMETER Experiment Name: Zm_42deg_Heat_P Parameter: Organism Value: Zea mays
  misc_feature: MA Experiment 108523 PARAMETER Experiment Name: Zm_42deg_Heat_P Parameter: Plant Line Value: 35A19
  misc_feature: MA Experiment 108523 PARAMETER Experiment Name: Zm_42deg_Heat_P Parameter: Temperature (deg C) Value: 42 vs. 22
  misc_feature: MA Experiment 108523 PARAMETER Experiment Name: Zm_42deg_Heat_P Parameter: Timepoint (hr) Value: 6
  misc_feature: MA Experiment 108523 PARAMETER Experiment Name: Zm_42deg_Heat_P Parameter: Tissue Value: Aerial
  misc_feature: MA Experiment ID: 108528 Result: Down-regulated in Transcription
  misc_feature: MA Experiment 108528 PARAMETER Experiment Name: Zm_Imbibed_Seeds_P Parameter: Age (day) Value: 5 vs. 2
  misc_feature: MA Experiment 108528 PARAMETER Experiment Name: Zm_Imbibed_Seeds_P Parameter: Organism Value: Zea mays
  misc_feature: MA Experiment 108528 PARAMETER Experiment Name: Zm_Imbibed_Seeds_P Parameter: Plant Line Value: 35A19
  misc_feature: MA Experiment 108528 PARAMETER Experiment Name: Zm_Imbibed_Seeds_P Parameter: Tissue Value: Aerial vs. Embryo
  misc_feature: MA Experiment ID: 108530 Result: Down-regulated in Transcription
  misc_feature: MA Experiment 108530 PARAMETER Experiment Name: Zm_Imbibed_Seeds_P Parameter: Age (day) Value: 6 vs. 2
  misc_feature: MA Experiment 108530 PARAMETER Experiment Name: Zm_Imbibed_Seeds_P Parameter: Organism Value: Zea mays
  misc_feature: MA Experiment 108530 PARAMETER Experiment Name: Zm_Imbibed_Seeds_P Parameter: Plant Line Value: 35A19
  misc_feature: MA Experiment 108530 PARAMETER Experiment Name: Zm_Imbibed_Seeds_P Parameter: Tissue Value: Aerial vs. Embryo
  misc_feature: MA Experiment ID: 108534 Result: Down-regulated in Transcription
  misc_feature: MA Experiment 108534 PARAMETER Experiment Name: Zm_4deg_Cold_P Parameter: Age (hr) Value: 8
  misc_feature: MA Experiment 108534 PARAMETER Experiment Name: Zm_4deg_Cold_P Parameter: Organism Value: Zea mays
  misc_feature: MA Experiment 108534 PARAMETER Experiment Name: Zm_4deg_Cold_P Parameter: Plant Line Value: 35A19
  misc_feature: MA Experiment 108534 PARAMETER Experiment Name: Zm_4deg_Cold_P Parameter: Temperature (deg C) Value: 4 vs. 22
  misc_feature: MA Experiment 108534 PARAMETER Experiment Name: Zm_4deg_Cold_P Parameter: Timepoint (hr) Value: 6
  misc_feature: MA Experiment 108534 PARAMETER Experiment Name: Zm_4deg_Cold_P Parameter: Tissue Value: Aerial
  misc_feature: MA Experiment ID: 108540 Result: Up-regulated in Transcription
  misc_feature: MA Experiment 108540 PARAMETER Experiment Name: Zm_20percent_PEG_P Parameter: Age (day) Value: 8
  misc_feature: MA Experiment 108540 PARAMETER Experiment Name: Zm_20percent_PEG_P Parameter: Organism Value: Zea mays
  misc_feature: MA Experiment 108540 PARAMETER Experiment Name: Zm_20percent_PEG_P Parameter: Plant Line Value: 35A19
  misc_feature: MA Experiment 108540 PARAMETER Experiment Name: Zm_20percent_PEG_P Parameter: Timepoint (hr) Value: 6
  misc_feature: MA Experiment 108540 PARAMETER Experiment Name: Zm_20percent_PEG_P Parameter: Tissue Value: Aerial
  misc_feature: MA Experiment 108540 PARAMETER Experiment Name: Zm_20percent_PEG_P Parameter: Treatment Value: 20percent PEG vs. No Treatment
  misc_feature: MA Experiment ID: 108542 Result: Up-regulated in Transcription
  misc_feature: MA Experiment 108542 PARAMETER Experiment Name: Zm_150mM_NaCl_P Parameter: Age (day) Value: 8
  misc_feature: MA Experiment 108542 PARAMETER Experiment Name: Zm_150mM_NaCl_P Parameter: Organism Value: Zea mays
  misc_feature: MA Experiment 108542 PARAMETER Experiment Name: Zm_150mM_NaCl_P Parameter: Plant Line Value: 35A19
  misc_feature: MA Experiment 108542 PARAMETER Experiment Name: Zm_150mM_NaCl_P Parameter: Timepoint (hr) Value: 6
  misc_feature: MA Experiment 108542 PARAMETER Experiment Name: Zm_150mM_NaCl_P Parameter: Tissue Value: Aerial
  misc_feature: MA Experiment 108542 PARAMETER Experiment Name: Zm_150mM_NaCl_P Parameter: Treatment Value: 150mM NaCl vs. No Treatment
  misc_feature: MA Experiment ID: 108543 Result: Up-regulated in Transcription
  misc_feature: MA Experiment ID: 108547 Result: Down-regulated in Transcription
  misc_feature: MA Experiment 108547 PARAMETER Experiment Name: Zm_Imbibed_Seeds_P Parameter: Age (day) Value: 4 vs. 2
  misc_feature: MA Experiment 108547 PARAMETER Experiment Name: Zm_Imbibed_Seeds_P Parameter: Organism Value: Zea mays
  misc_feature: MA Experiment 108547 PARAMETER Experiment Name: Zm_Imbibed_Seeds_P Parameter: Plant Line Value: 35A19
  misc_feature: MA Experiment 108547 PARAMETER Experiment Name: Zm_Imbibed_Seeds_P Parameter: Tissue Value: Aerial vs. Embryo
  misc_feature: MA Experiment ID: 108556 Result: Up-regulated in Transcription
  misc_feature: MA Experiment 108556 PARAMETER Experiment Name: Zm_Drought_P Parameter: Age (day) Value: 9
  misc_feature: MA Experiment 108556 PARAMETER Experiment Name: Zm_Drought_P Parameter: Organism Value: Zea mays
  misc_feature: MA Experiment 108556 PARAMETER Experiment Name: Zm_Drought_P Parameter: Plant Line Value: 35A19
  misc_feature: MA Experiment 108556 PARAMETER Experiment Name: Zm_Drought_P Parameter: Timepoint (hr) Value: 24
  misc_feature: MA Experiment 108556 PARAMETER Experiment Name: Zm_Drought_P Parameter: Tissue Value: Aerial
  misc_feature: MA Experiment 108556 PARAMETER Experiment Name: Zm_Drought_P Parameter: Treatment Value: Drought vs. No Drought
  misc_feature: MA Experiment ID: 108559 Result: Up-regulated in Transcription
  misc_feature: MA Experiment 108559 PARAMETER Experiment Name: Zm_5mM_NO_P Parameter: Age (day) Value: 8
  misc_feature: MA Experiment 108559 PARAMETER Experiment Name: Zm_5mM_NO_P Parameter: Organism Value: Zea mays
  misc_feature: MA Experiment 108559 PARAMETER Experiment Name: Zm_5mM_NO_P Parameter: Plant Line Value: 35A19
  misc_feature: MA Experiment 108559 PARAMETER Experiment Name: Zm_5mM_NO_P Parameter: Timepoint (hr) Value: 12
  misc_feature: MA Experiment 108559 PARAMETER Experiment Name: Zm_5mM_NO_P Parameter: Tissue Value: Aerial
  misc_feature: MA Experiment 108559 PARAMETER Experiment Name: Zm_5mM_NO_P Parameter: Treatment Value: 5mM NO vs. No Treatment
  misc_feature: MA Experiment ID: 108599 Result: Up-regulated in Transcription
  misc_feature: MA Experiment 108599 PARAMETER Experiment Name: Zm_RT1_P Parameter: Age (day) Value: 11
  misc_feature: MA Experiment 108599 PARAMETER Experiment Name: Zm_RT1_P Parameter: Organism Value: Zea mays
  misc_feature: MA Experiment 108599 PARAMETER Experiment Name: Zm_RT1_P Parameter: Plant Line Value: rt1 mut vs. rt1 wt
  misc_feature: MA Experiment 108599 PARAMETER Experiment Name: Zm_RT1_P Parameter: Tissue Value: Roots
  misc_feature: MA Experiment ID: 108687 Result: Down-regulated in Transcription
  misc_feature: MA Experiment 108687 PARAMETER Experiment Name: Zm_Embryos-Flowers__P Parameter: Tissue Value: Embryo vs. Aerial+
  misc_feature: MA Experiment ID: 20000477 Result: Up-regulated in Transcription
  misc_feature: MA Experiment 20000477 PARAMETER Experiment Name: Zm_5mM_SA_P Parameter: Age (day) Value: 10
  misc_feature: MA Experiment 20000477 PARAMETER Experiment Name: Zm_5mM_SA_P Parameter: Organism Value: Zea mays
  misc_feature: MA Experiment 20000477 PARAMETER Experiment Name: Zm_5mM_SA_P Parameter: Plant Line Value: 35A19
  misc_feature: MA Experiment 20000477 PARAMETER Experiment Name: Zm_5mM_SA_P Parameter: Timepoint (hr) Value: 48
  misc_feature: MA Experiment 20000477 PARAMETER Experiment Name: Zm_5mM_SA_P Parameter: Tissue Value: Aerial
  misc_feature: MA Experiment 20000477 PARAMETER Experiment Name: Zm_5mM_SA_P Parameter: Treatment Value: 5mM SA vs. No Treatment
  misc_feature: MA Experiment ID: 20000478 Result: Up-regulated in Transcription
  misc_feature: MA Experiment 20000478 PARAMETER Experiment Name: Zm_5mM_SA_P Parameter: Age (day) Value: 11
  misc_feature: MA Experiment 20000478 PARAMETER Experiment Name: Zm_5mM_SA_P Parameter: Organism Value: Zea mays
  misc_feature: MA Experiment 20000478 PARAMETER Experiment Name: Zm_5mM_SA_P Parameter: Plant Line Value: 35A19
  misc_feature: MA Experiment 20000478 PARAMETER Experiment Name: Zm_5mM_SA_P Parameter: Timepoint (hr) Value: 72
  misc_feature: MA Experiment 20000478 PARAMETER Experiment Name: Zm_5mM_SA_P Parameter: Tissue Value: Aerial
  misc_feature: MA Experiment 20000478 PARAMETER Experiment Name: Zm_5mM_SA_P Parameter: Treatment Value: 5mM SA vs. No Treatment
  misc_feature: MA Experiment ID: 20000479 Result: Up-regulated in Transcription
  misc_feature: MA Experiment 20000479 PARAMETER Experiment Name: Zm_Drought_P Parameter: Age (day) Value: 10
  misc_feature: MA Experiment 20000479 PARAMETER Experiment Name: Zm_Drought_P Parameter: Organism Value: Zea mays
  misc_feature: MA Experiment 20000479 PARAMETER Experiment Name: Zm_Drought_P Parameter: Plant Line Value: 35A19
  misc_feature: MA Experiment 20000479 PARAMETER Experiment Name: Zm_Drought_P Parameter: Timepoint (hr) Value: 48
  misc_feature: MA Experiment 20000479 PARAMETER Experiment Name: Zm_Drought_P Parameter: Tissue Value: Aerial
  misc_feature: MA Experiment 20000479 PARAMETER Experiment Name: Zm_Drought_P Parameter: Treatment Value: Drought vs. No Drought
  misc_feature: MA Experiment ID: 20000488 Result: Up-regulated in Transcription
  misc_feature: MA Experiment 20000488 PARAMETER Experiment Name: Zm_50mM_NH4NO3_L_to_H_P Parameter: Organism Value: Zea mays
  misc_feature: MA Experiment 20000488 PARAMETER Experiment Name: Zm_50mM_NH4NO3_L_to_H_P Parameter: Timepoint (hr) Value: 8
  misc_feature: MA Experiment 20000488 PARAMETER Experiment Name: Zm_50mM_NH4NO3_L_to_H_P Parameter: Tissue Value: Leaves
  misc_feature: MA Experiment 20000488 PARAMETER Experiment Name: Zm_50mM_NH4NO3_L_to_H_P Parameter: Treatment Value: 50mM NH4NO3 vs. 100mM Mannitol
  misc_feature: MA Experiment ID: 20000533 Result: Up-regulated in Transcription
  misc_feature: MA Experiment 20000533 PARAMETER Experiment Name: Zm_0.001percent_MeJA_P Parameter: Age (day) Value: 11
  misc_feature: MA Experiment 20000533 PARAMETER Experiment Name: Zm_0.001percent_MeJA_P Parameter: Organism Value: Zea mays
  misc_feature: MA Experiment 20000533 PARAMETER Experiment Name: Zm_0.001percent_MeJA_P Parameter: Plant Line Value: 35A19
  misc_feature: MA Experiment 20000533 PARAMETER Experiment Name: Zm_0.001percent_MeJA_P Parameter: Timepoint (hr) Value: 72
  misc_feature: MA Experiment 20000533 PARAMETER Experiment Name: Zm_0.001percent_MeJA_P Parameter: Tissue Value: Aerial
  misc_feature: MA Experiment 20000533 PARAMETER Experiment Name: Zm_0.001percent_MeJA_P Parameter: Treatment Value: 0.001percent MeJA vs. No Treatment
  misc_feature: MA Experiment ID: 20000626 Result: Up-regulated in Transcription
  misc_feature: MA Experiment 20000626 PARAMETER Experiment Name: Zm_Herbicide-Treatments_P Parameter: Timepoint (hr) Value: 12
  misc_feature: MA Experiment 20000626 PARAMETER Experiment Name: Zm_Herbicide-Treatments_P Parameter: Tissue Value: Aerial
  misc_feature: MA Experiment 20000626 PARAMETER Experiment Name: Zm_Herbicide-Treatments_P Parameter: Treatment Value: Roundup vs. No Treatment
  misc_feature: MA Experiment ID: 20001612 Result: Up-regulated in Transcription
  misc_feature: MA Experiment 20001612 PARAMETER Experiment Name: Zm_50ppm_KNO3_L-to-H_P Parameter: Age (day) Value: 19
  misc_feature: MA Experiment 20001612 PARAMETER Experiment Name: Zm_50ppm_KNO3_L-to-H_P Parameter: Organism Value: Zea mays
  misc_feature: MA Experiment 20001612 PARAMETER Experiment Name: Zm_50ppm_KNO3_L-to-H_P Parameter: Plant Line Value: 35A19
  misc_feature: MA Experiment 20001612 PARAMETER Experiment Name: Zm_50ppm_KNO3_L-to-H_P Parameter: Timepoint (hr) Value: 8
  misc_feature: MA Experiment 20001612 PARAMETER Experiment Name: Zm_50ppm_KNO3_L-to-H_P Parameter: Tissue Value: Roots
  misc_feature: MA Experiment 20001612 PARAMETER Experiment Name: Zm_50ppm_KNO3_L-to-H_P Parameter: Treatment Value: 50ppm KNO3 vs. 50ppm KCl
atgtgtgggattctggcggtgctgggcgtcgttgaggtctccctcgccaagcgctcccgcatcattgagctctcgcgcaggttacggcaccgagggcctgattggagtggtttgcactgtcatgaggattgttaccttgcacaccagcggttggctattatcgatcctacatctggagaccagcctttgtacaatgaggataaaacagttgttgtaacggtgaacggcgaaatttacaatcatgaagaattgaaagctaagttgaaaactcatgagttccaaactggcagtgattgtgaagttatagcccatctttacgaagaatatggcgaagaatttgtggatatgttggatggaatgttctcctttgttcttcttgatacacgtgataaaagcttcatcgcagctcgtgatgctattggcatctgccctttatacatgggatggggtcttgatggatcagtctggttttcttcagagatgaaggcattgagtgatgattgtgaacgcttcataacatttcccccagggcatctctactccagcaagacaggtggtctaaggagatggtacaacccaccatggttttcagagactgtcccttcaaccccttacaatgctctcttcctccgggagatgtttgagaaggctgttattaagaggctgatgactgatgtgccatttggtgtgcttttatctggtggactcgactcttctttggttgcatctgttgcttcgcggcacttaaacgaaacaaaggttgacaggcagtggggaaataaattgcatactttctgtataggcttgaagggttctcctgatcttaaagctgctagagaagttgctgattacctcagcactgtacatcatgagttccacttcacagtgcaggaggggattgatgccttggaagaagtcatctaccatattgagacatatgatgttacaacaatcagagcaagtaccccaatgtttttgatgtcacgcaaaatcaaatctttgggtgtgaagatggttatttctggcgaaggttcagatgaaatttttggtggttacctttattttcacaaggcaccaaacaagaaagaattcctagaggaaacatgtcggaagataaaagcactacatctgtatgactgcttgagagctaacaaagcaacttctgcctggggtgttgaggctcgtgttccattccttgacaaaagtttcatcagtgtagcaatggacattgatcctgaatggaacatgataaaacgtgacctcggtcgaattgagaagtgggtcatgaggaaggcgttcgacgacgacgagcacccttacctgcccaagcatattctctacaggcagaaagaacagttcagtgacggcgttggctacaactggatcgatggcctcaaatccttcactgaacagcaggtgacggatgagatgatgaacaacgccgcccagatgttcccctacaacacgcccgtcaacaaggaggcctactactaccggatgatattcgagaggctcttccctcaggactcggcgagggagacggtgccgtggggcccgagcatcgcctgcagcacgcccgcggccatcgagtgggtggagcagtggaaggcctccaacgacccctccggccgcttcatctcctcccacgactccgccgccaccgaccacacggcggtaagccggcggtggccaacggcggcggcacggccggcgaacggcacggtcaacggcaaggacgtgccagtgccgatcgcggtctgacgagagtacgtgctcgcgcacctccctgctagcttctaccgggctgcagcctgcagcatgcactgtgcgagcacagccgatcagcgccaataaactggaggataagaacgactggtagctgtgtgtgtgtgtgtcgtgcgtgcccaccggccatatcccggtgcggcagcacgtgctattgttacgtgttgtactgccaccagcgtacgtgtctgtgtgtctcgatcatatctgtacgtttttagatttagaagagaaaaaaaaagtatgcccgtgtctgtatgtctggatcatatctgtacgttcttagatttagaagaaagaagaaaaagaatatatacgtgtctctatgtc

SEQ ID NO: 13872 - protein, 586 aa, Zea mays subsp. mays
  peptide (1)..(586): Ceres Seq. ID no. 13635238
  misc_feature (193)..(516): Pfam Name: Asparagine synthase Pfam Description: Asparagine synthase
  misc_feature (1)..(555): Homolog of NCBI NO: 3182921 NR Description: Asparagine synthetase [glutamine-hydrolyzing] dependent asparagine synthetase) >gi|7438076|pir||T03602 probable
  misc_feature (1)..(570): Homolog of NCBI NO: 22208544 NR Description: asparagine synthetase 2 [Striga hermonthica]
  misc_feature (1)..(561): Homolog of NCBI NO: 25293864 NR Description: asparagine synthase (glutamine-hydrolyzing) (EC
  misc_feature (1)..(561): Homolog of NCBI NO: 15238108 NR Description: asparagine synthetase ASN3 [Arabidopsis thaliana]
  misc_feature (1)..(574): Homolog of NCBI NO: 30698086 NR Description: asparagine synthetase (gb|AAC72837.1) thaliana] >gi|8843765|dbj|BAA97313.1| asparagine synthetase thaliana] >gi|13605883|gb|AAK32927.1|AF367340_1 AT5g65010/MXK3_25
  misc_feature (1)..(574): Homolog of NCBI NO: 3859536 NR Description: asparagine synthetase [Arabidopsis thaliana]
  misc_feature (1)..(574): Homolog of NCBI NO: 30698088 NR Description: asparagine synthetase (gb|AAC72837.1)
  misc_feature (1)..(555): Homolog of NCBI NO: 6049843 NR Description: asparagine synthetase [Helianthus annuus]
  misc_feature (1)..(552): Homolog of NCBI NO: 3132675 NR Description: asparagine synthetase [Elaeagnus umbellata]
  misc_feature (1)..(552): Homolog of NCBI NO: 26246639 NR Description: Asparagine synthetase B [glutamine-hydrolyzing] coli CFT073] >gi|26107038|gb|AAN79222.1|AE016757_126 Asparagine
MCGILAVLGVVEVSLAKRSRIIELSRRLRHRGPDWSGLHCHEDCYLAHQRLAIIDPTSGDQPLYNEDKTVVVTVNGEIYNHEELKAKLKTHEFQTGSDCEVIAHLYEEYGEEFVDMLDGMFSFVLLDTRDKSFIAARDAIGICPLYMGWGLDGSVWFSSEMKALSDDCERFITFPPGHLYSSKTGGLRRWYNPPWFSETVPSTPYNALFLREMFEKAVIKRLMTDVPFGVLLSGGLDSSLVASVASRHLNETKVDRQWGNKLHTFCIGLKGSPDLKAAREVADYLSTVHHEFHFTVQEGIDALEEVIYHIETYDVTTIRASTPMFLMSRKIKSLGVKMVISGEGSDEIFGGYLYFHKAPNKKEFLEETCRKIKALHLYDCLRANKATSAWGVEARVPFLDKSFISVAMDIDPEWNMIKRDLGRIEKWVMRKAFDDDEHPYLPKHILYRQKEQFSDGVGYNWIDGLKSFTEQQVTDEMMNNAAQMFPYNTPVNKEAYYYRMIFERLFPQDSARETVPWGPSIACSTPAAIEWVEQWKASNDPSGRFISSHDSAATDHTAVSRRWPTAAARPANGTVNGKDVPVPIAV

SEQ ID NO: 13873 - protein, 471 aa, Zea mays subsp. mays
  peptide (1)..(471): Ceres Seq. ID no. 13635239
  misc_feature (78)..(401): Pfam Name: Asparagine synthase Pfam Description: Asparagine synthase
  misc_feature (1)..(440): Homolog of NCBI NO: 3182921 NR Description: Asparagine synthetase [glutamine-hydrolyzing] dependent asparagine synthetase) >gi|7438076|pir||T03602 probable
  misc_feature (1)..(455): Homolog of NCBI NO: 22208544 NR Description: asparagine synthetase 2 [Striga hermonthica]
  misc_feature (1)..(446): Homolog of NCBI NO: 25293864 NR Description: asparagine synthase (glutamine-hydrolyzing) (EC
  misc_feature (1)..(446): Homolog of NCBI NO: 15238108 NR Description: asparagine synthetase ASN3 [Arabidopsis thaliana]
  misc_feature (1)..(459): Homolog of NCBI NO: 30698086 NR Description: asparagine synthetase (gb|AAC72837.1) thaliana] >gi|8843765|dbj|BAA97313.1| asparagine synthetase thaliana] >gi|13605883|gb|AAK32927.1|AF367340_1 AT5g65010/MXK3_25
  misc_feature (1)..(459): Homolog of NCBI NO: 3859536 NR Description: asparagine synthetase [Arabidopsis thaliana]
  misc_feature (1)..(459): Homolog of NCBI NO: 30698088 NR Description: asparagine synthetase (gb|AAC72837.1)
  misc_feature (1)..(440): Homolog of NCBI NO: 6049843 NR Description: asparagine synthetase [Helianthus annuus]
  misc_feature (1)..(437): Homolog of NCBI NO: 3132675 NR Description: asparagine synthetase [Elaeagnus umbellata]
  misc_feature (1)..(437): Homolog of NCBI NO: 26246639 NR Description: Asparagine synthetase B [glutamine-hydrolyzing] coli CFT073] >gi|26107038|gb|AAN79222.1|AE016757_126 Asparagine
MLDGMFSFVLLDTRDKSFIAARDAIGICPLYMGWGLDGSVWFSSEMKALSDDCERFITFPPGHLYSSKTGGLRRWYNPPWFSETVPSTPYNALFLREMFEKAVIKRLMTDVPFGVLLSGGLDSSLVASVASRHLNETKVDRQWGNKLHTFCIGLKGSPDLKAAREVADYLSTVHHEFHFTVQEGIDALEEVIYHIETYDVTTIRASTPMFLMSRKIKSLGVKMVISGEGSDEIFGGYLYFHKAPNKKEFLEETCRKIKALHLYDCLRANKATSAWGVEARVPFLDKSFISVAMDIDPEWNMIKRDLGRIEKWVMRKAFDDDEHPYLPKHILYRQKEQFSDGVGYNWIDGLKSFTEQQVTDEMMNNAAQMFPYNTPVNKEAYYYRMIFERLFPQDSARETVPWGPSIACSTPAAIEWVEQWKASNDPSGRFISSHDSAATDHTAVSRRWPTAAARPANGTVNGKDVPVPIAV

SEQ ID NO: 13874 - protein, 467 aa, Zea mays subsp. mays
  peptide (1)..(467): Ceres Seq. ID no. 13635240
  misc_feature (74)..(397): Pfam Name: Asparagine synthase Pfam Description: Asparagine synthase
  misc_feature (1)..(455): Homolog of NCBI NO: 30698088 NR Description: asparagine synthetase (gb|AAC72837.1)
  misc_feature (1)..(436): Homolog of NCBI NO: 6049843 NR Description: asparagine synthetase [Helianthus annuus]
  misc_feature (1)..(436): Homolog of NCBI NO: 3182921 NR Description: Asparagine synthetase [glutamine-hydrolyzing] dependent asparagine synthetase) >gi|7438076|pir||T03602 probable
  misc_feature (1)..(442): Homolog of NCBI NO: 25293864 NR Description: asparagine synthase (glutamine-hydrolyzing) (EC
  misc_feature (1)..(455): Homolog of NCBI NO: 30698086 NR Description: asparagine synthetase (gb|AAC72837.1) thaliana] >gi|8843765|dbj|BAA97313.1| asparagine synthetase thaliana] >gi|13605883|gb|AAK32927.1|AF367340_1 AT5g65010/MXK3_25
  misc_feature (1)..(455): Homolog of NCBI NO: 3859536 NR Description: asparagine synthetase [Arabidopsis thaliana]
  misc_feature (1)..(442): Homolog of NCBI NO: 15238108 NR Description: asparagine synthetase ASN3 [Arabidopsis thaliana]
  misc_feature (1)..(451): Homolog of NCBI NO: 22208544 NR Description: asparagine synthetase 2 [Striga hermonthica]
  misc_feature (1)..(433): Homolog of NCBI NO: 3132675 NR Description: asparagine synthetase [Elaeagnus umbellata]
  misc_feature (1)..(433): Homolog of NCBI NO: 26246639 NR Description: Asparagine synthetase B [glutamine-hydrolyzing] coli CFT073] >gi|26107038|gb|AAN79222.1|AE016757_126 Asparagine
MFSFVLLDTRDKSFIAARDAIGICPLYMGWGLDGSVWFSSEMKALSDDCERFITFPPGHLYSSKTGGLRRWYNPPWFSETVPSTPYNALFLREMFEKAVIKRLMTDVPFGVLLSGGLDSSLVASVASRHLNETKVDRQWGNKLHTFCIGLKGSPDLKAAREVADYLSTVHHEFHFTVQEGIDALEEVIYHIETYDVTTIRASTPMFLMSRKIKSLGVKMVISGEGSDEIFGGYLYFHKAPNKKEFLEETCRKIKALHLYDCLRANKATSAWGVEARVPFLDKSFISVAMDIDPEWNMIKRDLGRIEKWVMRKAFDDDEHPYLPKHILYRQKEQFSDGVGYNWIDGLKSFTEQQVTDEMMNNAAQMFPYNTPVNKEAYYYRMIFERLFPQDSARETVPWGPSIACSTPAAIEWVEQWKASNDPSGRFISSHDSAATDHTAVSRRWPTAAARPANGTVNGKDVPVPIAV

SEQ ID NO: 13875 - DNA, 1895 bp, Zea mays subsp. mays
  misc_feature (1)..(1895): Ceres Seq. ID no. 12567136
  misc_feature: MA Experiment ID: 108515 Result: Up-regulated in Transcription
  misc_feature: MA Experiment 108515 PARAMETER Experiment Name: Zm_2mM_SA_P Parameter: Age (day) Value: 8
  misc_feature: MA Experiment 108515 PARAMETER Experiment Name: Zm_2mM_SA_P Parameter: Organism Value: Zea mays
  misc_feature: MA Experiment 108515 PARAMETER Experiment Name: Zm_2mM_SA_P Parameter: Plant Line Value: 35A19
  misc_feature: MA Experiment 108515 PARAMETER Experiment Name: Zm_2mM_SA_P Parameter: Timepoint (hr) Value: 12
  misc_feature: MA Experiment 108515 PARAMETER Experiment Name: Zm_2mM_SA_P Parameter: Tissue Value: Aerial
  misc_feature: MA Experiment 108515 PARAMETER Experiment Name: Zm_2mM_SA_P Parameter: Treatment Value: 2mM SA vs. No Treatment
  misc_feature: MA Experiment ID: 108527 Result: Up-regulated in Transcription
  misc_feature: MA Experiment 108527 PARAMETER Experiment Name: Zm_5mM_NO_P Parameter: Age (day) Value: 8
  misc_feature: MA Experiment 108527 PARAMETER Experiment Name: Zm_5mM_NO_P Parameter: Organism Value: Zea mays
  misc_feature: MA Experiment 108527 PARAMETER Experiment Name: Zm_5mM_NO_P Parameter: Plant Line Value: 35A19
  misc_feature: MA Experiment 108527 PARAMETER Experiment Name: Zm_5mM_NO_P Parameter: Timepoint (hr) Value: 6
  misc_feature: MA Experiment 108527 PARAMETER Experiment Name: Zm_5mM_NO_P Parameter: Tissue Value: Aerial
  misc_feature: MA Experiment 108527 PARAMETER Experiment Name: Zm_5mM_NO_P Parameter: Treatment Value: 5mM NO vs. No Treatment
  misc_feature: MA Experiment ID: 108530 Result: Down-regulated in Transcription
  misc_feature: MA Experiment 108530 PARAMETER Experiment Name: Zm_Imbibed_Seeds_P Parameter: Age (day) Value: 6 vs. 2
  misc_feature: MA Experiment 108530 PARAMETER Experiment Name: Zm_Imbibed_Seeds_P Parameter: Organism Value: Zea mays
  misc_feature: MA Experiment 108530 PARAMETER Experiment Name: Zm_Imbibed_Seeds_P Parameter: Plant Line Value: 35A19
  misc_feature: MA Experiment 108530 PARAMETER Experiment Name: Zm_Imbibed_Seeds_P Parameter: Tissue Value: Aerial vs. Embryo
  misc_feature: MA Experiment ID: 108544 Result: Up-regulated in Transcription
  misc_feature: MA Experiment ID: 108559 Result: Up-regulated in Transcription
  misc_feature: MA Experiment 108559 PARAMETER Experiment Name: Zm_5mM_NO_P Parameter: Age (day) Value: 8
  misc_feature: MA Experiment 108559 PARAMETER Experiment Name: Zm_5mM_NO_P Parameter: Organism Value: Zea mays
  misc_feature: MA Experiment 108559 PARAMETER Experiment Name: Zm_5mM_NO_P Parameter: Plant Line Value: 35A19
  misc_feature: MA Experiment 108559 PARAMETER Experiment Name: Zm_5mM_NO_P Parameter: Timepoint (hr) Value: 12
  misc_feature: MA Experiment 108559 PARAMETER Experiment Name: Zm_5mM_NO_P Parameter: Tissue Value: Aerial
  misc_feature: MA Experiment 108559 PARAMETER Experiment Name: Zm_5mM_NO_P Parameter: Treatment Value: 5mM NO vs. No Treatment
  misc_feature: MA Experiment ID: 20000477 Result: Up-regulated in Transcription
  misc_feature: MA Experiment 20000477 PARAMETER Experiment Name: Zm_5mM_SA_P Parameter: Age (day) Value: 10
  misc_feature: MA Experiment 20000477 PARAMETER Experiment Name: Zm_5mM_SA_P Parameter: Organism Value: Zea mays
  misc_feature: MA Experiment 20000477 PARAMETER Experiment Name: Zm_5mM_SA_P Parameter: Plant Line Value: 35A19
  misc_feature: MA Experiment 20000477 PARAMETER Experiment Name: Zm_5mM_SA_P Parameter: Timepoint (hr) Value: 48
  misc_feature: MA Experiment 20000477 PARAMETER Experiment Name: Zm_5mM_SA_P Parameter: Tissue Value: Aerial
  misc_feature: MA Experiment 20000477 PARAMETER Experiment Name: Zm_5mM_SA_P Parameter: Treatment Value: 5mM SA vs. No Treatment
  misc_feature: MA Experiment ID: 20000478 Result: Up-regulated in Transcription
  misc_feature: MA Experiment 20000478 PARAMETER Experiment Name: Zm_5mM_SA_P Parameter: Age (day) Value: 11
  misc_feature: MA Experiment 20000478 PARAMETER Experiment Name: Zm_5mM_SA_P Parameter: Organism Value: Zea mays
  misc_feature: MA Experiment 20000478 PARAMETER Experiment Name: Zm_5mM_SA_P Parameter: Plant Line Value: 35A19
  misc_feature: MA Experiment 20000478 PARAMETER Experiment Name: Zm_5mM_SA_P Parameter: Timepoint (hr) Value: 72
  misc_feature: MA Experiment 20000478 PARAMETER Experiment Name: Zm_5mM_SA_P Parameter: Tissue Value: Aerial
  misc_feature: MA Experiment 20000478 PARAMETER Experiment Name: Zm_5mM_SA_P Parameter: Treatment Value: 5mM SA vs. No Treatment
  misc_feature: MA Experiment ID: 20000534 Result: Down-regulated in Transcription
  misc_feature: MA Experiment 20000534 PARAMETER Experiment Name: Zm_Hybrid_Pollen_P Parameter: Age (day) Value: 8
  misc_feature: MA Experiment 20000534 PARAMETER Experiment Name: Zm_Hybrid_Pollen_P Parameter: Organism Value: Zea mays
  misc_feature: MA Experiment 20000534 PARAMETER Experiment Name: Zm_Hybrid_Pollen_P Parameter: Plant Line Value: 35A19
  misc_feature: MA Experiment 20000534 PARAMETER Experiment Name: Zm_Hybrid_Pollen_P Parameter: Tissue Value: Pollen vs. Aerial
  misc_feature: MA Experiment ID: 20000626 Result: Up-regulated in Transcription
  misc_feature: MA Experiment 20000626 PARAMETER Experiment Name: Zm_Herbicide-Treatments_P Parameter: Timepoint (hr) Value: 12
  misc_feature: MA Experiment 20000626 PARAMETER Experiment Name: Zm_Herbicide-Treatments_P Parameter: Tissue Value: Aerial
  misc_feature: MA Experiment 20000626 PARAMETER Experiment Name: Zm_Herbicide-Treatments_P Parameter: Treatment Value: Roundup vs. No Treatment
acccgtcctccacttgcccttctccgccaacagactgtccccggccgctgccattgccgattgctcacatccgcgttcgtgttcgcatccgcatcagggtcacctgcgccggcgagccatttgaaagggaggagtagcagactctcagaggtggacatgacgctgttgtgcgtgccgctggtggggcggacggtggaggagatgattacagacgcggcggcggccgccgccaccggcggcgacatggtcgagatccggcttgacttcatccaggggttccgcccgcgtgagcacctaccgcccctgctccgcggctgcccactcccggccctcgtcacctatcgacctgtctgggaaggaggccaatatgaaggtgatgacaccacaagatttgagacactacgtttagcaatggaattaggtgtagactatgttgatattgaattgaaggttgcagacaaatttatgagctttattgctggccataagccagagaaatgtaaacttattgtttcttcacataattatgaatatactccatcatgtgaggaaattacaaatcttgtcgctagtatacaagcagttggagctgatatagtgaaagttgcaacaaccgccaaggacattgtcgatgtatcacggatgttccaagtgatggtacactgccaagtgcctatgattggactcgtaatgagtgaaaaaggtttaatgtcaagagtgttagcgcccaagtttggtggatatcttacatttgggatactgaatgctacaaagacatcagcttctggacaaccaacagttgaggacttactggacatttacaacataaagtgtattgggcctgatacaaagattcttggtcttatagccaacccagtaaaacagagcaagagcccaattttacacaataaatgtcttcagtccattggatataatgctgtttatcttccacttcttggagataatcttgctagttttctggagacatactcatctcctgacttttcaggatttagttgctcacttcctttcaaagtagatgctgtacagtgttgtgatgaacatgatccagttgctaagtcaataggagccataaacactataattagaagaccagatggcaaattagtggggtacaatacggactacattggagctatatctgctattgaggatggcattggaggtccagggtcaaaggatgctgtcatctcaccattggctggtaggcttattgttgttgtaggagctgggggtgctggtaaggcaattgcttatggggcaaaggagaagggtgcgagggtagttatagcaaatcgcacctatgagaaggctgtacgtcttgccaatgcaattggtggtcaggccctgagattagaagacctggaaactttcagacctgaagaagggatgatccttgctaatgcaacatcattggggatgtacccaaatgttgatggtactcctattccaaagaaagccttgggtttctatgatgtggtatttgatgccgtatatgccccaaaagttactcggcttcttcgagaagcagaagaatgtggagttaaagttgttagtggtgtggaaatgtttattagacaagccatgggtcaatttgagcatttcaccggtggtatagaagctcctgaaagcctgatgcgtgagatagcagcaaaatacacctagcaggctaatggcgaaaacctatctttgatgaatatttgcccaaagattttctcgggctgagtgaataaatgttttgcagttatcatgtttgctgttatgttagatttagccgacttgtcacctgcacactgtaagattatgttgccatgctatagtgttcttgtacctgcaatagaagagttgcaagaataaagagtcagcttagaacc

SEQ ID NO: 13876 - protein, 561 aa, Zea mays subsp. mays
  peptide (1)..(561): Ceres Seq. ID no. 12567137
  misc_feature (301)..(545): Pfam Name: Shikimate / quinate 5-dehydrogenase Pfam Description: Shikimate / quinate 5-dehydrogenase
  misc_feature (114)..(561): Homolog of NCBI NO: 34914824 NR Description: putative 3-dehydroquinate dehydratase [Oryza
  misc_feature (53)..(115): Homolog of NCBI NO: 34914824 NR Description: putative 3-dehydroquinate dehydratase [Oryza
  misc_feature (53)..(551): Homolog of NCBI NO: 34914828 NR Description: putative 3-dehydroquinate dehydratase / shikimate
  misc_feature (54)..(560): Homolog of NCBI NO: 15230703 NR Description: dehydroquinate dehydratase/shikimate putative; protein id: At3g06350.1 [Arabidopsis thaliana] putative dehydroquinase shikimate dehydrogenase [Arabidopsis
  misc_feature (116)..(560): Homolog of NCBI NO: 7436862 NR Description: 3-dehydroquinate dehydratase (EC 4.2.1.10) /
  misc_feature (41)..(122): Homolog of NCBI NO: 7436862 NR Description: 3-dehydroquinate dehydratase (EC 4.2.1.10) /
  misc_feature (54)..(561): Homolog of NCBI NO: 629688 NR Description: 3-dehydroquinate dehydratase (EC 4.2.1.10) /
  misc_feature (54)..(372): Homolog of NCBI NO: 7488788 NR Description: 3-dehydroquinate dehydratase (EC 4.2.1.10) /
  misc_feature (279)..(561): Homolog of NCBI NO: 15669272 NR Description: shikimate 5-dehydrogenase (aroE) [Methanococcus
  misc_feature (279)..(561): Homolog of NCBI NO: 29726767 NR Description: Chain A, Crystal Structure Of Shikimate (Aroe Or Mj1084) In Complex With Nadp+ >gi|29726768|pdb|1NVT|B B, Crystal Structure Of Shikimate Dehydrogenase (Aroe Or Mj1084)
TRPPLALLRQQTVPGRCHCRLLTSAFVFASASGSPAPASHLKGRSSRLSEVDMTLLCVPLVGRTVEEMITDAAAAAATGGDMVEIRLDFIQGFRPREHLPPLLRGCPLPALVTYRPVWEGGQYEGDDTTRFETLRLAMELGVDYVDIELKVADKFMSFIAGHKPEKCKLIVSSHNYEYTPSCEEITNLVASIQAVGADIVKVATTAKDIVDVSRMFQVMVHCQVPMIGLVMSEKGLMSRVLAPKFGGYLTFGILNATKTSASGQPTVEDLLDIYNIKCIGPDTKILGLIANPVKQSKSPILHNKCLQSIGYNAVYLPLLGDNLASFLETYSSPDFSGFSCSLPFKVDAVQCCDEHDPVAKSIGAINTIIRRPDGKLVGYNTDYIGAISAIEDGIGGPGSKDAVISPLAGRLIVVVGAGGAGKAIAYGAKEKGARVVIANRTYEKAVRLANAIGGQALRLEDLETFRPEEGMILANATSLGMYPNVDGTPIPKKALGFYDVVFDAVYAPKVTRLLREAEECGVKVVSGVEMFIRQAMGQFEHFTGGIEAPESLMREIAAKYT

SEQ ID NO: 13877 - protein, 509 aa, Zea mays subsp. mays
  peptide (1)..(509): Ceres Seq. ID no. 12567138
  misc_feature (249)..(493): Pfam Name: Shikimate / quinate 5-dehydrogenase Pfam Description: Shikimate / quinate 5-dehydrogenase
  misc_feature (62)..(509): Homolog of NCBI NO: 34914824 NR Description: putative 3-dehydroquinate dehydratase [Oryza
  misc_feature (1)..(63): Homolog of NCBI NO: 34914824 NR Description: putative 3-dehydroquinate dehydratase [Oryza
  misc_feature (1)..(499): Homolog of NCBI NO: 34914828 NR Description: putative 3-dehydroquinate dehydratase / shikimate
  misc_feature (2)..(508): Homolog of NCBI NO: 15230703 NR Description: dehydroquinate dehydratase/shikimate putative; protein id: At3g06350.1 [Arabidopsis thaliana] putative dehydroquinase shikimate dehydrogenase [Arabidopsis
  misc_feature (64)..(508): Homolog of NCBI NO: 7436862 NR Description: 3-dehydroquinate dehydratase (EC 4.2.1.10) /
  misc_feature (1)..(70): Homolog of NCBI NO: 7436862 NR Description: 3-dehydroquinate dehydratase (EC 4.2.1.10) /
  misc_feature (2)..(509): Homolog of NCBI NO: 629688 NR Description: 3-dehydroquinate dehydratase (EC 4.2.1.10) /
  misc_feature (2)..(320): Homolog of NCBI NO: 7488788 NR Description: 3-dehydroquinate dehydratase (EC 4.2.1.10) /
  misc_feature (227)..(509): Homolog of NCBI NO: 15669272 NR Description: shikimate 5-dehydrogenase (aroE) [Methanococcus
  misc_feature (227)..(509): Homolog of NCBI NO: 29726767 NR Description: Chain A, Crystal Structure Of Shikimate (Aroe Or Mj1084) In Complex With Nadp+ >gi|29726768|pdb|1NVT|B B, Crystal Structure Of Shikimate Dehydrogenase (Aroe Or Mj1084)
MTLLCVPLVGRTVEEMITDAAAAAATGGDMVEIRLDFIQGFRPREHLPPLLRGCPLPALVTYRPVWEGGQYEGDDTTRFETLRLAMELGVDYVDIELKVADKFMSFIAGHKPEKCKLIVSSHNYEYTPSCEEITNLVASIQAVGADIVKVATTAKDIVDVSRMFQVMVHCQVPMIGLVMSEKGLMSRVLAPKFGGYLTFGILNATKTSASGQPTVEDLLDIYNIKCIGPDTKILGLIANPVKQSKSPILHNKCLQSIGYNAVYLPLLGDNLASFLETYSSPDFSGFSCSLPFKVDAVQCCDEHDPVAKSIGAINTIIRRPDGKLVGYNTDYIGAISAIEDGIGGPGSKDAVISPLAGRLIVVVGAGGAGKAIAYGAKEKGARVVIANRTYEKAVRLANAIGGQALRLEDLETFRPEEGMILANATSLGMYPNVDGTPIPKKALGFYDVVFDAVYAPKVTRLLREAEECGVKVVSGVEMFIRQAMGQFEHFTGGIEAPESLMREIAAKYT

SEQ ID NO: 13878 - protein, 494 aa, Zea mays subsp. mays
  peptide (1)..(494): Ceres Seq. ID no. 12567139
  misc_feature (234)..(478): Pfam Name: Shikimate / quinate 5-dehydrogenase Pfam Description: Shikimate / quinate 5-dehydrogenase
  misc_feature (47)..(494): Homolog of NCBI NO: 34914824 NR Description: putative 3-dehydroquinate dehydratase [Oryza
  misc_feature (1)..(48): Homolog of NCBI NO: 34914824 NR Description: putative 3-dehydroquinate dehydratase [Oryza
  misc_feature (1)..(484): Homolog of NCBI NO: 34914828 NR Description: putative 3-dehydroquinate dehydratase / shikimate
  misc_feature (1)..(493): Homolog of NCBI NO: 15230703 NR Description: dehydroquinate dehydratase/shikimate putative; protein id: At3g06350.1 [Arabidopsis thaliana] putative dehydroquinase shikimate dehydrogenase [Arabidopsis
  misc_feature (49)..(493): Homolog of NCBI NO: 7436862 NR Description: 3-dehydroquinate dehydratase (EC 4.2.1.10) /
  misc_feature (1)..(55): Homolog of NCBI NO: 7436862 NR Description: 3-dehydroquinate dehydratase (EC 4.2.1.10) /
  misc_feature (1)..(494): Homolog of NCBI NO: 629688 NR Description: 3-dehydroquinate dehydratase (EC 4.2.1.10) /
  misc_feature (1)..(305): Homolog of NCBI NO: 7488788 NR Description: 3-dehydroquinate dehydratase (EC 4.2.1.10) /
  misc_feature (212)..(494): Homolog of NCBI NO: 15669272 NR Description: shikimate 5-dehydrogenase (aroE) [Methanococcus
  misc_feature (212)..(494): Homolog of NCBI NO: 29726767 NR Description: Chain A, Crystal Structure Of Shikimate (Aroe Or Mj1084) In Complex With Nadp+ >gi|29726768|pdb|1NVT|B B, Crystal Structure Of Shikimate Dehydrogenase (Aroe Or Mj1084)
MITDAAAAAATGGDMVEIRLDFIQGFRPREHLPPLLRGCPLPALVTYRPVWEGGQYEGDDTTRFETLRLAMELGVDYVDIELKVADKFMSFIAGHKPEKCKLIVSSHNYEYTPSCEEITNLVASIQAVGADIVKVATTAKDIVDVSRMFQVMVHCQVPMIGLVMSEKGLMSRVLAPKFGGYLTFGILNATKTSASGQPTVEDLLDIYNIKCIGPDTKILGLIANPVKQSKSPILHNKCLQSIGYNAVYLPLLGDNLASFLETYSSPDFSGFSCSLPFKVDAVQCCDEHDPVAKSIGAINTIIRRPDGKLVGYNTDYIGAISAIEDGIGGPGSKDAVISPLAGRLIVVVGAGGAGKAIAYGAKEKGARVVIANRTYEKAVRLANAIGGQALRLEDLETFRPEEGMILANATSLGMYPNVDGTPIPKKALGFYDVVFDAVYAPKVTRLLREAEECGVKVVSGVEMFIRQAMGQFEHFTGGIEAPESLMREIAAKYT

SEQ ID NO: 13879 - DNA, 1422 bp, Zea mays subsp. mays; identical to SEQ ID NO: 9592
  misc_feature (1)..(1422): Ceres Seq. ID no. 13492589
  misc_feature: MA Experiment ID: 108523 Result: Up-regulated in Transcription
  misc_feature: MA Experiment 108523 PARAMETER Experiment Name: Zm_42deg_Heat_P Parameter: Age (day) Value: 8
  misc_feature: MA Experiment 108523 PARAMETER Experiment Name: Zm_42deg_Heat_P Parameter: Organism Value: Zea mays
  misc_feature: MA Experiment 108523 PARAMETER Experiment Name: Zm_42deg_Heat_P Parameter: Plant Line Value: 35A19
  misc_feature: MA Experiment 108523 PARAMETER Experiment Name: Zm_42deg_Heat_P Parameter: Temperature (deg C) Value: 42 vs. 22
  misc_feature: MA Experiment 108523 PARAMETER Experiment Name: Zm_42deg_Heat_P Parameter: Timepoint (hr) Value: 6
  misc_feature: MA Experiment 108523 PARAMETER Experiment Name: Zm_42deg_Heat_P Parameter: Tissue Value: Aerial

SEQ ID NO: 13880 - protein, 149 aa, Zea mays subsp. mays; identical to SEQ ID NO: 9593
  peptide (1)..(149): Ceres Seq. ID no. 13492590
  misc_feature (1)..(142): Homolog of NCBI NO: 21741991 NR Description: OSJNBa0060P14.12 [Oryza sativa (japonica
  misc_feature (1)..(86): Homolog of NCBI NO: 34907580 NR Description: B1078G07.31 [Oryza sativa (japonica
  misc_feature (1)..(77): Homolog of NCBI NO: 37535590 NR Description: hypothetical protein [Oryza sativa (japonica group)] >gi|22726005|gb|AAN05005.1| hypothetical protein [Oryza
  misc_feature (1)..(77): Homolog of NCBI NO: 37535236 NR Description: hypothetical protein [Oryza sativa (japonica group)] >gi|13489169|gb|AAK27803.1| hypothetical protein [Oryza
  misc_feature (1)..(77): Homolog of NCBI NO: 34915330 NR Description: hypothetical protein~similar to Oryza sativa
  misc_feature (50)..(89): Homolog of NCBI NO: 38344751 NR Description: OSJNBa0089K21.9 [Oryza sativa (japonica
  misc_feature (1)..(77): Homolog of NCBI NO: 34394471 NR Description: unknown protein [Oryza sativa (japonica
  misc_feature (1)..(70): Homolog of NCBI NO: 15224652 NR Description: hypothetical protein [Arabidopsis thaliana]
  misc_feature (1)..(66): Homolog of NCBI NO: 25371570 NR Description: hypothetical protein AT4g02210 [imported] - thaliana >gi|3912927|gb|AAC78711.1| hypothetical protein thaliana] >gi|7268981|emb|CAB80714.1| hypothetical protein
  misc_feature (1)..(66): Homolog of NCBI NO: 15293059 NR Description: unknown protein [Arabidopsis thaliana]
  misc_feature (1)..(77): Homolog of NCBI NO: 37535236 NR Description: hypothetical protein [Oryza sativa (japonica group)] >gi|13489169|gb|AAK27803.1| hypothetical protein [Oryza
  misc_feature (1)..(77): Homolog of NCBI NO: 34915330 NR Description: hypothetical protein~similar to Oryza sativa
  misc_feature (50)..(89): Homolog of NCBI NO: 38344751 NR Description: OSJNBa0089K21.9 [Oryza sativa (japonica
  misc_feature (1)..(77): Homolog of NCBI NO: 34394471 NR Description: unknown protein [Oryza sativa (japonica
  misc_feature (1)..(70): Homolog of NCBI NO: 15224652 NR Description: hypothetical protein [Arabidopsis thaliana]
  misc_feature (1)..(66): Homolog of NCBI NO: 25371570 NR Description: hypothetical protein AT4g02210 [imported] - thaliana >gi|3912927|gb|AAC78711.1| hypothetical protein thaliana] >gi|7268981|emb|CAB80714.1| hypothetical protein
  misc_feature (1)..(66): Homolog of NCBI NO: 15293059 NR Description: unknown protein [Arabidopsis thaliana]
  misc_feature (1)..(142): Homolog of NCBI NO: 21741991 NR Description: OSJNBa0060P14.12 [Oryza sativa (japonica
  misc_feature (1)..(86): Homolog of NCBI NO: 34907580 NR Description: B1078G07.31 [Oryza sativa (japonica
  misc_feature (1)..(77): Homolog of NCBI NO: 37535590 NR Description: hypothetical protein [Oryza sativa (japonica group)] >gi|22726005|gb|AAN05005.1| hypothetical protein [Oryza

SEQ ID NO: 13881 - protein, 125 aa, Zea mays subsp. mays; identical to SEQ ID NO: 9594
  peptide (1)..(125): Ceres Seq. ID no. 13492591
  misc_feature (1)..(82): Homolog of NCBI NO: 21741991 NR Description: OSJNBa0060P14.12 [Oryza sativa (japonica
  misc_feature (11)..(74): Homolog of NCBI NO: 34907580 NR Description: B1078G07.31 [Oryza sativa (japonica
  misc_feature (1)..(80): Homolog of NCBI NO: 37535236 NR Description: hypothetical protein [Oryza sativa (japonica group)] >gi|13489169|gb|AAK27803.1| hypothetical protein [Oryza
  misc_feature (1)..(80): Homolog of NCBI NO: 34915330 NR Description: hypothetical protein~similar to Oryza sativa
  misc_feature (1)..(77): Homolog of NCBI NO: 38344751 NR Description: OSJNBa0089K21.9 [Oryza sativa (japonica
  misc_feature (27)..(77): Homolog of NCBI NO: 15224652 NR Description: hypothetical protein [Arabidopsis thaliana]
  misc_feature (15)..(77): Homolog of NCBI NO: 25371570 NR Description: hypothetical protein AT4g02210 [imported] - thaliana >gi|3912927|gb|AAC78711.1| hypothetical protein thaliana] >gi|7268981|emb|CAB80714.1| hypothetical protein
  misc_feature (15)..(77): Homolog of NCBI NO: 15293059 NR Description: unknown protein [Arabidopsis thaliana]
  misc_feature (15)..(77): Homolog of NCBI NO: 18411878 NR Description: expressed protein [Arabidopsis thaliana]
  misc_feature (1)..(77): Homolog of NCBI NO: 37535088 NR Description: hypothetical protein [Oryza sativa (japonica group)] >gi|22165102|gb|AAM93719.1| hypothetical protein [Oryza
  misc_feature (1)..(82): Homolog of NCBI NO: 21741991 NR Description: OSJNBa0060P14.12 [Oryza sativa (japonica
  misc_feature (11)..(74): Homolog of NCBI NO: 34907580 NR Description: B1078G07.31 [Oryza sativa (japonica
  misc_feature (1)..(80): Homolog of NCBI NO: 37535236 NR Description: hypothetical protein [Oryza sativa (japonica group)] >gi|13489169|gb|AAK27803.1| hypothetical protein [Oryza
  misc_feature (1)..(80): Homolog of NCBI NO: 34915330 NR Description: hypothetical protein~similar to Oryza sativa
  misc_feature (1)..(77): Homolog of NCBI NO: 38344751 NR Description: OSJNBa0089K21.9 [Oryza sativa (japonica
  misc_feature (27)..(77): Homolog of NCBI NO: 15224652 NR Description: hypothetical protein [Arabidopsis thaliana]
  misc_feature (15)..(77): Homolog of NCBI NO: 25371570 NR Description: hypothetical protein AT4g02210 [imported] - thaliana >gi|3912927|gb|AAC78711.1| hypothetical protein thaliana] >gi|7268981|emb|CAB80714.1| hypothetical protein
  misc_feature (15)..(77): Homolog of NCBI NO: 15293059 NR Description: unknown protein [Arabidopsis thaliana]
  misc_feature (15)..(77): Homolog of NCBI NO: 18411878 NR Description: expressed protein [Arabidopsis thaliana]
  misc_feature (1)..(77): Homolog of NCBI NO: 37535088 NR Description: hypothetical protein [Oryza sativa (japonica group)] >gi|22165102|gb|AAM93719.1| hypothetical protein [Oryza

SEQ ID NO: 13882 - protein, 121 aa, Zea mays subsp. mays; identical to SEQ ID NO: 9595
  peptide (1)..(121): Ceres Seq. ID no. 13492592
  misc_feature (1)..(78): Homolog of NCBI NO: 21741991 NR Description: OSJNBa0060P14.12 [Oryza sativa (japonica
  misc_feature (7)..(70): Homolog of NCBI NO: 34907580 NR Description: B1078G07.31 [Oryza sativa (japonica
  misc_feature (1)..(76): Homolog of NCBI NO: 37535236 NR Description: hypothetical protein [Oryza sativa (japonica group)] >gi|13489169|gb|AAK27803.1| hypothetical protein [Oryza
  misc_feature (1)..(76): Homolog of NCBI NO: 34915330 NR Description: hypothetical protein~similar to Oryza sativa
  misc_feature (1)..(73): Homolog of NCBI NO: 38344751 NR Description: OSJNBa0089K21.9 [Oryza sativa (japonica
  misc_feature (23)..(73): Homolog of NCBI NO: 15224652 NR Description: hypothetical protein [Arabidopsis thaliana]
  misc_feature (11)..(73): Homolog of NCBI NO: 25371570 NR Description: hypothetical protein AT4g02210 [imported] - thaliana >gi|3912927|gb|AAC78711.1| hypothetical protein thaliana] >gi|7268981|emb|CAB80714.1| hypothetical protein
  misc_feature (11)..(73): Homolog of NCBI NO: 15293059 NR Description: unknown protein [Arabidopsis thaliana]
  misc_feature (11)..(73): Homolog of NCBI NO: 18411878 NR Description: expressed protein [Arabidopsis thaliana]
  misc_feature (1)..(73): Homolog of NCBI NO: 37535088 NR Description: hypothetical protein [Oryza sativa (japonica group)] >gi|22165102|gb|AAM93719.1| hypothetical protein [Oryza
  misc_feature (1)..(78): Homolog of NCBI NO: 21741991 NR Description: OSJNBa0060P14.12 [Oryza sativa (japonica
  misc_feature (7)..(70): Homolog of NCBI NO: 34907580 NR Description: B1078G07.31 [Oryza sativa (japonica
  misc_feature (1)..(76): Homolog of NCBI NO: 37535236 NR Description: hypothetical protein [Oryza sativa (japonica group)] >gi|13489169|gb|AAK27803.1| hypothetical protein [Oryza
  misc_feature (1)..(76): Homolog of NCBI NO: 34915330 NR Description: hypothetical protein~similar to Oryza sativa
  misc_feature (1)..(73): Homolog of NCBI NO: 38344751 NR Description: OSJNBa0089K21.9 [Oryza sativa (japonica
  misc_feature (23)..(73): Homolog of NCBI NO: 15224652 NR Description: hypothetical protein [Arabidopsis thaliana]
  misc_feature (11)..(73): Homolog of NCBI NO: 25371570 NR Description: hypothetical protein AT4g02210 [imported] - thaliana >gi|3912927|gb|AAC78711.1| hypothetical protein thaliana] >gi|7268981|emb|CAB80714.1| hypothetical protein
  misc_feature (11)..(73): Homolog of NCBI NO: 15293059 NR Description: unknown protein [Arabidopsis thaliana]
  misc_feature (11)..(73): Homolog of NCBI NO: 18411878 NR Description: expressed protein [Arabidopsis thaliana]
  misc_feature (1)..(73): Homolog of NCBI NO: 37535088 NR Description: hypothetical protein [Oryza sativa (japonica group)] >gi|22165102|gb|AAM93719.1| hypothetical protein [Oryza

SEQ ID NO: 13883 - DNA, 990 bp, Zea mays subsp. mays
  misc_feature (1)..(990): Ceres Seq. ID no. 14309633
  misc_feature: MA Experiment ID: 108543 Result: Up-regulated in Transcription
aacgcactctccactccttcgcggcgggggtttaggcgcacggcggcaggccaattaacgccgctgcggcgagcgccgggggggaaatgggcggcgacggcacgagggcgctggaccagacgccgacgtgggccgtggccgccgtctgcgctgtcatcgtcgcggcgtccatactcctcgagggcttcctccaccacctcggtcagttgctcaacaagaagcggaagaaggcgctgtttgacgctctggagaaggttaaatcggagctgatgactctggggttcatatcgcctctgctgaccgtgacgggaaggtacatcgcgcgcatctgcatcccggagggagccgcaaacaccatgctgccctgccgcctgtccggtcactcggtggcggaagagcccaagggccatggccgacggcacctatctgaagatccaaccaaccttttttcctgccgcaaaggcatggtgtcgcttgtttcagccgacggcatgcatcagctgcacattttcgtgttcttcttggccgtcttccatgttaccttcagtttcttcacaatgtccttgggtagagcaaagactcgtatatggaaggtgtgggaaaaggaaacttgctcccctcagtataattatttaaatgacccctcaaagttcaggcttacgcaccaaacatcttttgtgaggcaacatgcaagttgttggagcaaaagcacaatcacgctctattttgtgagcttctttaggcagttcttcagatccgtccgtaagacagaactttgaggggtctgtggcgtgttttgctctggtgcggcatgcctgtgtatcccattgagattctgtacaattgcaaacagagagcggtacctttttagttaattatcagagatgactgtagaaagaaactgattgtggtgaggttgagtggacgaataaatggcgagtctgcctcattggatgcatcatgaaacgggcacttttgaggagggatggt

SEQ ID NO: 13884 - protein, 230 aa, Zea mays subsp. mays
  peptide (1)..(230): Ceres Seq. ID no. 14309634
  misc_feature (4)..(229): Pfam Name: Mlo family Pfam Description: Mlo family
  misc_feature (1)..(229): Homolog of NCBI NO: 13784977 NR Description: seven transmembrane protein Mlo2 [Zea mays]
  misc_feature (1)..(229): Homolog of NCBI NO: 37536520 NR Description: putative Mlo (pathogen resistance) protein [Oryza
  misc_feature (108)..(229): Homolog of NCBI NO: 13784985 NR Description: seven transmembrane protein Mlo6 [Zea mays]
  misc_feature (1)..(110): Homolog of NCBI NO: 13784985 NR Description: seven transmembrane protein Mlo6 [Zea mays]
  misc_feature (1)..(229): Homolog of NCBI NO: 14091580 NR Description: membrane protein Mlo5 [Arabidopsis thaliana]
  misc_feature (1)..(229): Homolog of NCBI NO: 15226140 NR Description: seven transmembrane MLO protein family (MLO5)
  misc_feature (1)..(229): Homolog of NCBI NO: 15217453 NR Description: seven transmembrane MLO protein family (MLO9)
  misc_feature (1)..(229): Homolog of NCBI NO: 33112390 NR Description: MLO-like protein 9 (AtMlo9)
  misc_feature (1)..(229): Homolog of NCBI NO: 25346293 NR Description: hypothetical protein F8D11.2 [imported] - thaliana >gi|12322423|gb|AAG51234.1|AC035249_9 disease resistance
  misc_feature (1)..(229): Homolog of NCBI NO: 15239213 NR Description: seven transmembrane MLO protein family (MLO10)
MGGDGTRALDQTPTWAVAAVCAVIVAASILLEGFLHHLGQLLNKKRKKALFDALEKVKSELMTLGFISPLLTVTGRYIARICIPEGAANTMLPCRLSGHSVAEEPKGHGRRHLSEDPTNLFSCRKGMVSLVSADGMHQLHIFVFFLAVFHVTFSFFTMSLGRAKTRIWKVWEKETCSPQYNYLNDPSKFRLTHQTSFVRQHASCWSKSTITLYFVSFFRQFFRSVRKTEL

SEQ ID NO: 13885 - protein, 169 aa, Zea mays subsp. mays
  peptide (1)..(169): Ceres Seq. ID no. 14309635
  misc_feature (1)..(168): Pfam Name: Mlo family Pfam Description: Mlo family
  misc_feature (1)..(168): Homolog of NCBI NO: 13784977 NR Description: seven transmembrane protein Mlo2 [Zea mays]
  misc_feature (1)..(168): Homolog of NCBI NO: 37536520 NR Description: putative Mlo (pathogen resistance) protein [Oryza
  misc_feature (47)..(168): Homolog of NCBI NO: 13784985 NR Description: seven transmembrane protein Mlo6 [Zea mays]
  misc_feature (1)..(49): Homolog of NCBI NO: 13784985 NR Description: seven transmembrane protein Mlo6 [Zea mays]
  misc_feature (1)..(168): Homolog of NCBI NO: 14091580 NR Description: membrane protein Mlo5 [Arabidopsis thaliana]
  misc_feature (1)..(168): Homolog of NCBI NO: 15226140 NR Description: seven transmembrane MLO protein family (MLO5)
  misc_feature (1)..(168): Homolog of NCBI NO: 15217453 NR Description: seven transmembrane MLO protein family (MLO9)
  misc_feature (1)..(168): Homolog of NCBI NO: 33112390 NR Description: MLO-like protein 9 (AtMlo9)
  misc_feature (1)..(168): Homolog of NCBI NO: 25346293 NR Description: hypothetical protein F8D11.2 [imported] - thaliana >gi|12322423|gb|AAG51234.1|AC035249_9 disease resistance
  misc_feature (1)..(168): Homolog of NCBI NO: 15239213 NR Description: seven transmembrane MLO protein family (MLO10)
MTLGFISPLLTVTGRYIARICIPEGAANTMLPCRLSGHSVAEEPKGHGRRHLSEDPTNLFSCRKGMVSLVSADGMHQLHIFVFFLAVFHVTFSFFTMSLGRAKTRIWKVWEKETCSPQYNYLNDPSKFRLTHQTSFVRQHASCWSKSTITLYFVSFFRQFFRSVRKTEL

SEQ ID NO: 13886 - protein, 140 aa, Zea mays subsp. mays
  peptide (1)..(140): Ceres Seq. ID no. 14309636
  misc_feature (1)..(139): Pfam Name: Mlo family Pfam Description: Mlo family
  misc_feature (1)..(139): Homolog of NCBI NO: 13784977 NR Description: seven transmembrane protein Mlo2 [Zea mays]
  misc_feature (1)..(139): Homolog of NCBI NO: 37536520 NR Description: putative Mlo (pathogen resistance) protein [Oryza
  misc_feature (18)..(139): Homolog of NCBI NO: 13784985 NR Description: seven transmembrane protein Mlo6 [Zea mays]
  misc_feature (1)..(20): Homolog of NCBI NO: 13784985 NR Description: seven transmembrane protein Mlo6 [Zea mays]
  misc_feature (1)..(139): Homolog of NCBI NO: 14091580 NR Description: membrane protein Mlo5 [Arabidopsis thaliana]
  misc_feature (1)..(139): Homolog of NCBI NO: 15226140 NR Description: seven transmembrane MLO protein family (MLO5)
  misc_feature (1)..(139): Homolog of NCBI NO: 15217453 NR Description: seven transmembrane MLO protein family (MLO9)
  misc_feature (1)..(139): Homolog of NCBI NO: 33112390 NR Description: MLO-like protein 9 (AtMlo9)
  misc_feature (1)..(139): Homolog of NCBI NO: 25346293 NR Description: hypothetical protein F8D11.2 [imported] - thaliana >gi|12322423|gb|AAG51234.1|AC035249_9 disease resistance
  misc_feature (1)..(139): Homolog of NCBI NO: 15239213 NR Description: seven transmembrane MLO protein family (MLO10)
MLPCRLSGHSVAEEPKGHGRRHLSEDPTNLFSCRKGMVSLVSADGMHQLHIFVFFLAVFHVTFSFFTMSLGRAKTRIWKVWEKETCSPQYNYLNDPSKFRLTHQTSFVRQHASCWSKSTITLYFVSFFRQFFRSVRKTEL

SEQ ID NO: 13887 - DNA, 438 bp, Zea mays subsp. mays
  misc_feature (1)..(438): Ceres Seq. ID no. 2872073
  misc_feature: MA Experiment ID: 108535 Result: Down-regulated in Transcription
  misc_feature: MA Experiment 108535 PARAMETER Experiment Name: Zm_Meristem_P Parameter: Age (day) Value: 8
  misc_feature: MA Experiment 108535 PARAMETER Experiment Name: Zm_Meristem_P Parameter: Organism Value: Zea mays
  misc_feature: MA Experiment 108535 PARAMETER Experiment Name: Zm_Meristem_P Parameter: Plant Line Value: 35A19
  misc_feature: MA Experiment 108535 PARAMETER Experiment Name: Zm_Meristem_P Parameter: Tissue Value: Root Meristem vs. Above Root Meristem
acacggcgtgccgcggtgggcgaccttttttgcaccgggagataaatcgacagcaccctgacctcaagtcctcaacccgcaggccgcagctgctcccgcccgccgcgcaagcggccaagcgccgccggttcttctcgagcaagagtacatgacttttgagctaagtgtttttcgtgagttctcataaatcattgtcctcataacttgtaatgggtggaagccagtatgatgatgactgggtgttgcccagtgccgatatcactcttgttctggttgggaaacttggctatggcaagagtgcaactggaaatagcatccttggacgggaagcatttgtatcagaatattcacatgccagtgttactaatacttgtcagttgggaagcactaccctgaaggacggccgcaccatcaatgttattgatacaccagggttat

SEQ ID NO: 13888 - protein, 76 aa, Zea mays subsp. mays
  peptide (1)..(76): Ceres Seq. ID no. 2872074
  misc_feature (18)..(75): Pfam Name: AIG1 family Pfam Description: AIG1 family
  misc_feature (7)..(75): Homolog of NCBI NO: 38346576 NR Description: OSJNBa0064D20.7 [Oryza sativa (japonica
  misc_feature (7)..(75): Homolog of NCBI NO: 32479674 NR Description: P0076O17.7 [Oryza sativa (japonica
  misc_feature (1)..(75): Homolog of NCBI NO: 4097585 NR Description: NTGP4 [Nicotiana tabacum]
  misc_feature (1)..(75): Homolog of NCBI NO: 18399081 NR Description: expressed protein; protein id: At1g33970.1,
  misc_feature (1)..(75): Homolog of NCBI NO: 24417378 NR Description: unknown [Arabidopsis thaliana]
  misc_feature (1)..(75): Homolog of NCBI NO: 25373414 NR Description: hypothetical protein F12G12.21 - Arabidopsis >gi|10086478|gb|AAG12538.1|AC015446_19 Similar to AIG1 protein thaliana] >gi|10092443|gb|AAG12846.1|AC079286_3 disease
  misc_feature (18)..(75): Homolog of NCBI NO: 15234855 NR Description: AIG1-like protein; protein id: At4g09940.1
  misc_feature (8)..(75): Homolog of NCBI NO: 15217724 NR Description: AIG1-like protein; protein id: At1g33930.1
  misc_feature (18)..(75): Homolog of NCBI NO: 15234852 NR Description: AIG1-like protein; protein id: At4g09930.1
  misc_feature (7)..(75): Homolog of NCBI NO: 15234871 NR Description: AIG1-like protein; protein id: At4g09950.1
MGGSQYDDDWVLPSADITLVLVGKLGYGKSATGNSILGREAFVSEYSHASVTNTCQLGSTTLKDGRTINVIDTPGL

SEQ ID NO: 13889 - protein, 56 aa, Zea mays subsp. mays
  peptide (1)..(56): Ceres Seq. ID no. 2872075
MMMTGCCPVPISLLFWLGNLAMARVQLEIASLDGKHLYQNIHMPVLLILVSWEALP

SEQ ID NO: 13890 - protein, 55 aa, Zea mays subsp. mays
  peptide (1)..(55): Ceres Seq. ID no. 2872076
MMTGCCPVPISLLFWLGNLAMARVQLEIASLDGKHLYQNIHMPVLLILVSWEALP

SEQ ID NO: 13891 - DNA, 1376 bp, Zea mays subsp. mays; identical to SEQ ID NO: 5542
  misc_feature (1)..(1376): Ceres Seq. ID no. 13491083
  misc_feature: MA Experiment ID: 20000492 Result: Up-regulated in Transcription
  misc_feature: MA Experiment 20000492 PARAMETER Experiment Name: Zm_Hybrid_Seed_Dev_P Parameter: DAP Value: 12
  misc_feature: MA Experiment 20000492 PARAMETER Experiment Name: Zm_Hybrid_Seed_Dev_P Parameter: Organism Value: Zea mays
  misc_feature: MA Experiment 20000492 PARAMETER Experiment Name: Zm_Hybrid_Seed_Dev_P Parameter: Plant Line Value: 35A19
  misc_feature: MA Experiment 20000492 PARAMETER Experiment Name: Zm_Hybrid_Seed_Dev_P Parameter: Tissue Value: Fert Kernel vs. Unfert Floret

SEQ ID NO: 13892 - protein, 364 aa, Zea mays subsp. mays; identical to SEQ ID NO: 5543
  peptide (1)..(364): Ceres Seq. ID no. 13491084
  misc_feature (1)..(112): Pfam Name: Poly(A) polymerase predicted RNA binding domain Pfam Description: Poly(A) polymerase predicted RNA binding domain
  misc_feature (1)..(112): Pfam Name: Poly(A) polymerase predicted RNA binding domain Pfam Description: Poly(A) polymerase predicted RNA binding domain
  misc_feature (1)..(128): Homolog of NCBI NO: 15220913 NR Description: nuclear poly(A) polymerase -related [Arabidopsis
  misc_feature (1)..(128): Homolog of NCBI NO: 25348464 NR Description: F2H15.20 protein - Arabidopsis thaliana Strong similarity to nuclear poly(A) polymerase from Arabidopsis gb|AF255297 and contains a Nucleotidyltransferase PF|01909
  misc_feature (1)..(118): Homolog of NCBI NO: 7488023 NR Description: polynucleotide adenylyltransferase homolog - Arabidopsis thaliana >gi|7270232|emb|CAB80002.1| putative
  misc_feature (1)..(118): Homolog of NCBI NO: 30689510 NR Description: poly(A) polymerase -related [Arabidopsis >gi|17978937|gb|AAL47435.1| AT4g32850/T16I18_60 [Arabidopsis >gi|23308169|gb|AAN18054.1| At4g32850/T16I18_60 [Arabidopsis
  misc_feature (1)..(128): Homolog of NCBI NO: 25348464 NR Description: F2H15.20 protein - Arabidopsis thaliana Strong similarity to nuclear poly(A) polymerase from Arabidopsis gb|AF255297 and contains a Nucleotidyltransferase PF|01909
  misc_feature (1)..(118): Homolog of NCBI NO: 30689510 NR Description: poly(A) polymerase -related [Arabidopsis >gi|17978937|gb|AAL47435.1| AT4g32850/T16I18_60 [Arabidopsis >gi|23308169|gb|AAN18054.1| At4g32850/T16I18_60 [Arabidopsis
  misc_feature (1)..(118): Homolog of NCBI NO: 32527646 NR Description: poly(A) polymerase [Arabidopsis thaliana]
  misc_feature (1)..(136): Homolog of NCBI NO: 18400958 NR Description: poly(A) polymerase -related [Arabidopsis >gi|14532700|gb|AAK64151.1| putative poly(A) polymerase thaliana] >gi|18491197|gb|AAL69501.1| putative poly(A) polymerase
  misc_feature (1)..(136): Homolog of NCBI NO: 30682917 NR Description: poly(A) polymerase -related [Arabidopsis thaliana]
  misc_feature (1)..(118): Homolog of NCBI NO: 30689513 NR Description: poly(A) polymerase -related [Arabidopsis thaliana]
  misc_feature (1)..(118): Homolog of NCBI NO: 7488023 NR Description: polynucleotide adenylyltransferase homolog - Arabidopsis thaliana >gi|7270232|emb|CAB80002.1| putative
  misc_feature (1)..(128): Homolog of NCBI NO: 15220913 NR Description: nuclear poly(A) polymerase -related [Arabidopsis
  misc_feature (1)..(118): Homolog of NCBI NO: 30689513 NR Description: poly(A) polymerase -related [Arabidopsis thaliana]
  misc_feature (1)..(118): Homolog of NCBI NO: 32527646 NR Description: poly(A) polymerase [Arabidopsis thaliana]
  misc_feature (1)..(136): Homolog of NCBI NO: 30682917 NR Description: poly(A) polymerase -related [Arabidopsis thaliana]
  misc_feature (1)..(136): Homolog of NCBI NO: 18400958 NR Description: poly(A) polymerase -related [Arabidopsis >gi|14532700|gb|AAK64151.1| putative poly(A) polymerase thaliana] >gi|18491197|gb|AAL69501.1| putative poly(A) polymerase

SEQ ID NO: 13893 - protein, 342 aa, Zea mays subsp. mays; identical to SEQ ID NO: 5544
  peptide (1)..(342): Ceres Seq. ID no. 13491085
  misc_feature (1)..(90): Pfam Name: Poly(A) polymerase predicted RNA binding domain Pfam Description: Poly(A) polymerase predicted RNA binding domain
  misc_feature (1)..(90): Pfam Name: Poly(A) polymerase predicted RNA binding domain Pfam Description: Poly(A) polymerase predicted RNA binding domain
  misc_feature (1)..(114): Homolog of NCBI NO: 30682917 NR Description: poly(A) polymerase -related [Arabidopsis thaliana]
  misc_feature (1)..(114): Homolog of NCBI NO: 18400958 NR Description: poly(A) polymerase -related [Arabidopsis >gi|14532700|gb|AAK64151.1| putative poly(A) polymerase thaliana] >gi|18491197|gb|AAL69501.1| putative poly(A) polymerase
  misc_feature (1)..(106): Homolog of NCBI NO: 15220913 NR Description: nuclear poly(A) polymerase -related [Arabidopsis
  misc_feature (1)..(96): Homolog of NCBI NO: 7488023 NR Description: polynucleotide adenylyltransferase homolog - Arabidopsis thaliana >gi|7270232|emb|CAB80002.1| putative
  misc_feature (1)..(106): Homolog of NCBI NO: 25348464 NR Description: F2H15.20 protein - Arabidopsis thaliana Strong similarity to nuclear poly(A) polymerase from Arabidopsis gb|AF255297 and contains a Nucleotidyltransferase PF|01909
  misc_feature (1)..(96): Homolog of NCBI NO: 30689510 NR Description: poly(A) polymerase -related [Arabidopsis >gi|17978937|gb|AAL47435.1| AT4g32850/T16I18_60 [Arabidopsis >gi|23308169|gb|AAN18054.1| At4g32850/T16I18_60 [Arabidopsis
  misc_feature (1)..(96): Homolog of NCBI NO: 32527646 NR Description: poly(A) polymerase [Arabidopsis thaliana]
  misc_feature (1)..(114): Homolog of NCBI NO: 18400958 NR Description: poly(A) polymerase -related [Arabidopsis >gi|14532700|gb|AAK64151.1| putative poly(A) polymerase thaliana] >gi|18491197|gb|AAL69501.1| putative poly(A) polymerase
  misc_feature (1)..(114): Homolog of NCBI NO: 30682917 NR Description: poly(A) polymerase -related [Arabidopsis thaliana]
  misc_feature (1)..(96): Homolog of NCBI NO: 30689513 NR Description: poly(A) polymerase -related [Arabidopsis thaliana]
  misc_feature (1)..(96): Homolog of NCBI NO: 7488023 NR Description: polynucleotide adenylyltransferase homolog - Arabidopsis thaliana >gi|7270232|emb|CAB80002.1| putative
  misc_feature (1)..(106): Homolog of NCBI NO: 15220913 NR Description: nuclear poly(A) polymerase -related [Arabidopsis
  misc_feature (1)..(96): Homolog of NCBI NO: 30689510 NR Description: poly(A) polymerase -related [Arabidopsis >gi|17978937|gb|AAL47435.1| AT4g32850/T16I18_60 [Arabidopsis >gi|23308169|gb|AAN18054.1| At4g32850/T16I18_60 [Arabidopsis
  misc_feature (1)..(106): Homolog of NCBI NO: 25348464 NR Description: F2H15.20 protein - Arabidopsis thaliana Strong similarity to nuclear poly(A) polymerase from Arabidopsis gb|AF255297 and contains a Nucleotidyltransferase PF|01909
  misc_feature (1)..(96): Homolog of NCBI NO: 30689513 NR Description: poly(A) polymerase -related [Arabidopsis thaliana]
  misc_feature (1)..(96): Homolog of NCBI NO: 32527646 NR Description: poly(A) polymerase [Arabidopsis thaliana]

SEQ ID NO: 13894 - protein, 319 aa, Zea mays subsp. mays; identical to SEQ ID NO: 5545
  peptide (1)..(319): Ceres Seq. ID no. 13491086
  misc_feature (1)..(67): Pfam Name: Poly(A) polymerase predicted RNA binding domain Pfam Description: Poly(A) polymerase predicted RNA binding domain
  misc_feature (1)..(67): Pfam Name: Poly(A) polymerase predicted RNA binding domain Pfam Description: Poly(A) polymerase predicted RNA binding domain
  misc_feature (1)..(83): Homolog of NCBI NO: 15220913 NR Description: nuclear poly(A) polymerase -related [Arabidopsis
  misc_feature (1)..(83): Homolog of NCBI NO: 25348464 NR Description: F2H15.20 protein - Arabidopsis thaliana Strong similarity to nuclear poly(A) polymerase from Arabidopsis gb|AF255297 and contains a Nucleotidyltransferase PF|01909
  misc_feature (1)..(73): Homolog of NCBI NO: 7488023 NR Description: polynucleotide adenylyltransferase homolog - Arabidopsis thaliana >gi|7270232|emb|CAB80002.1| putative
  misc_feature (1)..(73): Homolog of NCBI NO: 30689510 NR Description: poly(A) polymerase -related [Arabidopsis >gi|17978937|gb|AAL47435.1| AT4g32850/T16I18_60 [Arabidopsis >gi|23308169|gb|AAN18054.1| At4g32850/T16I18_60 [Arabidopsis
  misc_feature (1)..(83): Homolog of NCBI NO: 25348464 NR Description: F2H15.20 protein - Arabidopsis thaliana Strong similarity to nuclear poly(A) polymerase from Arabidopsis gb|AF255297 and contains a Nucleotidyltransferase PF|01909
  misc_feature (1)..(73): Homolog of NCBI NO: 30689510 NR Description: poly(A) polymerase -related [Arabidopsis >gi|17978937|gb|AAL47435.1| AT4g32850/T16I18_60 [Arabidopsis >gi|23308169|gb|AAN18054.1| At4g32850/T16I18_60 [Arabidopsis
  misc_feature (1)..(73): Homolog of NCBI NO: 32527646 NR Description: poly(A) polymerase [Arabidopsis thaliana]
  misc_feature (1)..(91): Homolog of NCBI NO: 18400958 NR Description: poly(A) polymerase -related [Arabidopsis >gi|14532700|gb|AAK64151.1| putative poly(A) polymerase thaliana] >gi|18491197|gb|AAL69501.1| putative poly(A) polymerase
  misc_feature (1)..(91): Homolog of NCBI NO: 30682917 NR Description: poly(A) polymerase -related [Arabidopsis thaliana]
  misc_feature (1)..(73): Homolog of NCBI NO: 30689513 NR Description: poly(A) polymerase -related [Arabidopsis thaliana]
  misc_feature (1)..(73): Homolog of NCBI NO: 7488023 NR Description: polynucleotide adenylyltransferase homolog - Arabidopsis thaliana >gi|7270232|emb|CAB80002.1| putative
  misc_feature (1)..(83): Homolog of NCBI NO: 15220913 NR Description: nuclear poly(A) polymerase -related [Arabidopsis
  misc_feature (1)..(73): Homolog of NCBI NO: 30689513 NR Description: poly(A) polymerase -related [Arabidopsis thaliana]
  misc_feature (1)..(73): Homolog of NCBI NO: 32527646 NR Description: poly(A) polymerase [Arabidopsis thaliana]
  misc_feature (1)..(91): Homolog of NCBI NO: 30682917 NR Description: poly(A) polymerase -related [Arabidopsis thaliana]
  misc_feature (1)..(91): Homolog of NCBI NO: 18400958 NR Description: poly(A) polymerase -related [Arabidopsis >gi|14532700|gb|AAK64151.1| putative poly(A) polymerase thaliana] >gi|18491197|gb|AAL69501.1| putative poly(A) polymerase

SEQ ID NO: 13895 - DNA, 1402 bp, Zea mays subsp. mays
  misc_feature (1)..(1402): Ceres Seq. ID no. 12389013
  misc_feature: MA Experiment ID: 108527 Result: Up-regulated in Transcription
  misc_feature: MA Experiment 108527 PARAMETER Experiment Name: Zm_5mM_NO_P Parameter: Age (day) Value: 8
  misc_feature: MA Experiment 108527 PARAMETER Experiment Name: Zm_5mM_NO_P Parameter: Organism Value: Zea mays
  misc_feature: MA Experiment 108527 PARAMETER Experiment Name: Zm_5mM_NO_P Parameter: Plant Line Value: 35A19
  misc_feature: MA Experiment 108527 PARAMETER Experiment Name: Zm_5mM_NO_P Parameter: Timepoint (hr) Value: 6
  misc_feature: MA Experiment 108527 PARAMETER Experiment Name: Zm_5mM_NO_P Parameter: Tissue Value: Aerial
  misc_feature: MA Experiment 108527 PARAMETER Experiment Name: Zm_5mM_NO_P Parameter: Treatment Value: 5mM NO vs. No Treatment
  misc_feature: MA Experiment ID: 108543 Result: Down-regulated in Transcription
  misc_feature: MA Experiment ID: 108559 Result: Up-regulated in Transcription
  misc_feature: MA Experiment 108559 PARAMETER Experiment Name: Zm_5mM_NO_P Parameter: Age (day) Value: 8
  misc_feature: MA Experiment 108559 PARAMETER Experiment Name: Zm_5mM_NO_P Parameter: Organism Value: Zea mays
  misc_feature: MA Experiment 108559 PARAMETER Experiment Name: Zm_5mM_NO_P Parameter: Plant Line Value: 35A19
  misc_feature: MA Experiment 108559 PARAMETER Experiment Name: Zm_5mM_NO_P Parameter: Timepoint (hr) Value: 12
  misc_feature: MA Experiment 108559 PARAMETER Experiment Name: Zm_5mM_NO_P Parameter: Tissue Value: Aerial
  misc_feature: MA Experiment 108559 PARAMETER Experiment Name: Zm_5mM_NO_P Parameter: Treatment Value: 5mM NO vs. No Treatment
actccctcctcgtcgcttgccacaagtcctcgggcgtccgtcgatcataccgcataccgccggcgcagtcctcgccggcgctggacggggtgaagttttagatcaccagaggggcatttttctctcatcgggcagtagaagttttggatcttatccagctagcctccaatccatcatggatcatgacggcacgaacctggctgtcaatgaggctgtgcgctcggtgcagctgctcaagattgacggctacagcgccaccgctaccatgagcgagttggatttcatcaaatccagaaggaacctcgctggccacgagtgggaggtccttttctatcctcagttcagccgttacggtggctgcatagctttgaagctcgtccttgtcagtgaacccccgagggacaaggacaagctgctgagggcgagcctgagatgccgccttgtatgccctagccagccgcatctccatgcctccatagagaagagcgtgtcccatgtatttaccagtgactctagatgctcgtctgaagttatcctcatcccaaaatatgagctaccatcatcaggttacctcgtgaacgattcactgaccgtggaatgcacggtcaccgtgctacgcgacttggacgccacggctaaggtgctgtccctgccagtgccactgccaccaccctccgacctacaccagcacttcgatgagctgttgcagagcaagaatggagcggacgtcacgttccgtgtctccgggaagtcattcgccgcccacaaggccattctcgccgcaaggtccccggttttcatggctcagttcttcggaggcatgaaggaaagaagctctgctcatgtggagatcagagacatggactctgctgcgttcagttccatgcttcacttcatctataccgacatggtcccagagctcgacggtgcccaggagcctgaggcggcagcgatcatggctcagcacctactggtagctgctgacatgtatgggctgaacaggctgaagctgatatgtgaatgcaagctctctggtggcatcgacatcggcacggcggcttcgacgttggctctcgccgaacagcacgactgctcgctgctcaaagccaagtgtctcgagttcatcaccaggtcgcctgagacacttgaagctgtcctggcaactgatggatacgcgcatctggcggcaagctgtcccttggttctggctgaactactgatggctgcgcgtggaaggaagatctgagctggatgatggttttcgttgacagtcctattattactagtttttaattatcccttcctcgtatgatgagttgctttggcttctcatattttggttatggtttcccaagatgtatggcctaaagcatgatgaactagtgcttgcagttgatttccc

SEQ ID NO: 13896 - protein, 414 aa, Zea mays subsp. mays
  peptide (1)..(414): Ceres Seq. ID no. 12389014
  misc_feature (234)..(347): Pfam Name: BTB/POZ domain Pfam Description: BTB/POZ domain
  misc_feature (50)..(406): Homolog of NCBI NO: 32488782 NR Description: OSJNBb0060E08.3 [Oryza sativa (japonica
  misc_feature (61)..(414): Homolog of NCBI NO: 37534478 NR Description: hypothetical protein [Oryza sativa (japonica group)] >gi|31432166|gb|AAP53828.1| hypothetical protein [Oryza
  misc_feature (61)..(406): Homolog of NCBI NO: 37534474 NR Description: hypothetical protein [Oryza sativa (japonica group)] >gi|31432164|gb|AAP53826.1| hypothetical protein [Oryza
  misc_feature (68)..(407): Homolog of NCBI NO: 37534558 NR Description: putative speckle-type protein [Oryza sativa
  misc_feature (70)..(405): Homolog of NCBI NO: 38636858 NR Description: zinc finger POZ domain protein-like [Oryza sativa
  misc_feature (68)..(407): Homolog of NCBI NO: 37534570 NR Description: putative speckle-type protein [Oryza sativa
  misc_feature (71)..(406): Homolog of NCBI NO: 37534588 NR Description: putative speckle-type protein [Oryza sativa
  misc_feature (68)..(407): Homolog of NCBI NO: 37534574 NR Description: putative speckle-type protein [Oryza sativa
  misc_feature (95)..(406): Homolog of NCBI NO: 37534534 NR Description: putative speckle-type protein [Oryza sativa
  misc_feature (185)..(412): Homolog of NCBI NO: 37534476 NR Description: hypothetical protein [Oryza sativa (japonica group)] >gi|31432165|gb|AAP53827.1| hypothetical protein [Oryza
LPPRRLPQVLGRPSIIPHTAGAVLAGAGRGEVLDHQRGIFLSSGSRSFGSYPASLQSIMDHDGTNLAVNEAVRSVQLLKIDGYSATATMSELDFIKSRRNLAGHEWEVLFYPQFSRYGGCIALKLVLVSEPPRDKDKLLRASLRCRLVCPSQPHLHASIEKSVSHVFTSDSRCSSEVILIPKYELPSSGYLVNDSLTVECTVTVLRDLDATAKVLSLPVPLPPPSDLHQHFDELLQSKNGADVTFRVSGKSFAAHKAILAARSPVFMAQFFGGMKERSSAHVEIRDMDSAAFSSMLHFIYTDMVPELDGAQEPEAAAIMAQHLLVAADMYGLNRLKLICECKLSGGIDIGTAASTLALAEQHDCSLLKAKCLEFITRSPETLEAVLATDGYAHLAASCPLVLAELLMAARGRKI

SEQ ID NO: 13897 - protein, 356 aa, Zea mays subsp. mays
  peptide (1)..(356): Ceres Seq. ID no. 12389015
  misc_feature (176)..(289): Pfam Name: BTB/POZ domain Pfam Description: BTB/POZ domain
  misc_feature (1)..(348): Homolog of NCBI NO: 32488782 NR Description: OSJNBb0060E08.3 [Oryza sativa (japonica
  misc_feature (3)..(356): Homolog of NCBI NO: 37534478 NR Description: hypothetical protein [Oryza sativa (japonica group)] >gi|31432166|gb|AAP53828.1| hypothetical protein [Oryza
  misc_feature (3)..(348): Homolog of NCBI NO: 37534474 NR Description: hypothetical protein [Oryza sativa (japonica group)] >gi|31432164|gb|AAP53826.1| hypothetical protein [Oryza
  misc_feature (10)..(349): Homolog of NCBI NO: 37534558 NR Description: putative speckle-type protein [Oryza sativa
  misc_feature (12)..(347): Homolog of NCBI NO: 38636858 NR Description: zinc finger POZ domain protein-like [Oryza sativa
  misc_feature (10)..(349): Homolog of NCBI NO: 37534570 NR Description: putative speckle-type protein [Oryza sativa
  misc_feature (13)..(348): Homolog of NCBI NO: 37534588 NR Description: putative speckle-type protein [Oryza sativa
  misc_feature (10)..(349): Homolog of NCBI NO: 37534574 NR Description: putative speckle-type protein [Oryza sativa
  misc_feature (37)..(348): Homolog of NCBI NO: 37534534 NR Description: putative speckle-type protein [Oryza sativa
  misc_feature (127)..(354): Homolog of NCBI NO: 37534476 NR Description: hypothetical protein [Oryza sativa (japonica group)] >gi|31432165|gb|AAP53827.1| hypothetical protein [Oryza
MDHDGTNLAVNEAVRSVQLLKIDGYSATATMSELDFIKSRRNLAGHEWEVLFYPQFSRYGGCIALKLVLVSEPPRDKDKLLRASLRCRLVCPSQPHLHASIEKSVSHVFTSDSRCSSEVILIPKYELPSSGYLVNDSLTVECTVTVLRDLDATAKVLSLPVPLPPPSDLHQHFDELLQSKNGADVTFRVSGKSFAAHKAILAARSPVFMAQFFGGMKERSSAHVEIRDMDSAAFSSMLHFIYTDMVPELDGAQEPEAAAIMAQHLLVAADMYGLNRLKLICECKLSGGIDIGTAASTLALAEQHDCSLLKAKCLEFITRSPETLEAVLATDGYAHLAASCPLVLAELLMAARGRKI

SEQ ID NO: 13898 - protein, 326 aa, Zea mays subsp. mays
  peptide (1)..(326): Ceres Seq. ID no. 12389016
  misc_feature (146)..(259): Pfam Name: BTB/POZ domain Pfam Description: BTB/POZ domain
  misc_feature (1)..(318): Homolog of NCBI NO: 32488782 NR Description: OSJNBb0060E08.3 [Oryza sativa (japonica
  misc_feature (1)..(326): Homolog of NCBI NO: 37534478 NR Description: hypothetical protein [Oryza sativa (japonica group)] >gi|31432166|gb|AAP53828.1| hypothetical protein [Oryza
  misc_feature (1)..(318): Homolog of NCBI NO: 37534474 NR Description: hypothetical protein [Oryza sativa (japonica group)] >gi|31432164|gb|AAP53826.1| hypothetical protein [Oryza
  misc_feature (1)..(319): Homolog of NCBI NO: 37534558 NR Description: putative speckle-type protein [Oryza sativa
  misc_feature (1)..(317): Homolog of NCBI NO: 38636858 NR Description: zinc finger POZ domain protein-like [Oryza sativa
  misc_feature (1)..(319): Homolog of NCBI NO: 37534570 NR Description: putative speckle-type protein [Oryza sativa
  misc_feature (1)..(318): Homolog of NCBI NO: 37534588 NR Description: putative speckle-type protein [Oryza sativa
  misc_feature (1)..(319): Homolog of NCBI NO: 37534574 NR Description: putative speckle-type protein [Oryza sativa
  misc_feature (7)..(318): Homolog of NCBI NO: 37534534 NR Description: putative speckle-type protein [Oryza sativa
  misc_feature (97)..(324): Homolog of NCBI NO: 37534476 NR Description: hypothetical protein [Oryza sativa (japonica group)] >gi|31432165|gb|AAP53827.1| hypothetical protein [Oryza
MSELDFIKSRRNLAGHEWEVLFYPQFSRYGGCIALKLVLVSEPPRDKDKLLRASLRCRLVCPSQPHLHASIEKSVSHVFTSDSRCSSEVILIPKYELPSSGYLVNDSLTVECTVTVLRDLDATAKVLSLPVPLPPPSDLHQHFDELLQSKNGADVTFRVSGKSFAAHKAILAARSPVFMAQFFGGMKERSSAHVEIRDMDSAAFSSMLHFIYTDMVPELDGAQEPEAAAIMAQHLLVAADMYGLNRLKLICECKLSGGIDIGTAASTLALAEQHDCSLLKAKCLEFITRSPETLEAVLATDGYAHLAASCPLVLAELLMAARGRKI

SEQ ID NO: 13899 - DNA, 1448 bp, Zea mays subsp. mays; identical to SEQ ID NO: 7069
  misc_feature (1)..(1448): Ceres Seq. ID no. 13494789
  misc_feature: MA Experiment ID: 108504 Result: Down-regulated in Transcription
  misc_feature: MA Experiment 108504 PARAMETER Experiment Name: Zm_Drought_P Parameter: Age (day) Value: 8
  misc_feature: MA Experiment 108504 PARAMETER Experiment Name: Zm_Drought_P Parameter: Organism Value: Zea mays
  misc_feature: MA Experiment 108504 PARAMETER Experiment Name: Zm_Drought_P Parameter: Plant Line Value: 35A19
  misc_feature: MA Experiment 108504 PARAMETER Experiment Name: Zm_Drought_P Parameter: Timepoint (hr) Value: 12
  misc_feature: MA Experiment 108504 PARAMETER Experiment Name: Zm_Drought_P Parameter: Tissue Value: Aerial
  misc_feature: MA Experiment 108504 PARAMETER Experiment Name: Zm_Drought_P Parameter: Treatment Value: Drought vs. No Drought
  misc_feature: MA Experiment ID: 108527 Result: Down-regulated in Transcription
  misc_feature: MA Experiment 108527 PARAMETER Experiment Name: Zm_5mM_NO_P Parameter: Age (day) Value: 8
  misc_feature: MA Experiment 108527 PARAMETER Experiment Name: Zm_5mM_NO_P Parameter: Organism Value: Zea mays
  misc_feature: MA Experiment 108527 PARAMETER Experiment Name: Zm_5mM_NO_P Parameter: Plant Line Value: 35A19
  misc_feature: MA Experiment 108527 PARAMETER Experiment Name: Zm_5mM_NO_P Parameter: Timepoint (hr) Value: 6
  misc_feature: MA Experiment 108527 PARAMETER Experiment Name: Zm_5mM_NO_P Parameter: Tissue Value: Aerial
  misc_feature: MA Experiment 108527 PARAMETER Experiment Name: Zm_5mM_NO_P Parameter: Treatment Value: 5mM NO vs. No Treatment
  misc_feature: MA Experiment ID: 108536 Result: Up-regulated in Transcription
  misc_feature: MA Experiment 108536 PARAMETER Experiment Name: Zm_Meristem_P Parameter: Age (day) Value: 8
  misc_feature: MA Experiment 108536 PARAMETER Experiment Name: Zm_Meristem_P Parameter: Organism Value: Zea mays
  misc_feature: MA Experiment 108536 PARAMETER Experiment Name: Zm_Meristem_P Parameter: Plant Line Value: 35A19
  misc_feature: MA Experiment 108536 PARAMETER Experiment Name: Zm_Meristem_P Parameter: Tissue Value: Shoot Meristem vs. Above Shoot Meristem
  misc_feature: MA Experiment ID: 108540 Result: Down-regulated in Transcription
  misc_feature: MA Experiment 108540 PARAMETER Experiment Name: Zm_20percent_PEG_P Parameter: Age (day) Value: 8
  misc_feature: MA Experiment 108540 PARAMETER Experiment Name: Zm_20percent_PEG_P Parameter: Organism Value: Zea mays
  misc_feature: MA Experiment 108540 PARAMETER Experiment Name: Zm_20percent_PEG_P Parameter: Plant Line Value: 35A19
  misc_feature: MA Experiment 108540 PARAMETER Experiment Name: Zm_20percent_PEG_P Parameter: Timepoint (hr) Value: 6
  misc_feature: MA Experiment 108540 PARAMETER Experiment Name: Zm_20percent_PEG_P Parameter: Tissue Value: Aerial
  misc_feature: MA Experiment 108540 PARAMETER Experiment Name: Zm_20percent_PEG_P Parameter: Treatment Value: 20percent PEG vs. No Treatment
  misc_feature: MA Experiment ID: 108543 Result: Down-regulated in Transcription
  misc_feature: MA Experiment ID: 108556 Result: Down-regulated in Transcription
  misc_feature: MA Experiment 108556 PARAMETER Experiment Name: Zm_Drought_P Parameter: Age (day) Value: 9
  misc_feature: MA Experiment 108556 PARAMETER Experiment Name: Zm_Drought_P Parameter: Organism Value: Zea mays
  misc_feature: MA Experiment 108556 PARAMETER Experiment Name: Zm_Drought_P Parameter: Plant Line Value: 35A19
  misc_feature: MA Experiment 108556 PARAMETER Experiment Name: Zm_Drought_P Parameter: Timepoint (hr) Value: 24
  misc_feature: MA Experiment 108556 PARAMETER Experiment Name: Zm_Drought_P Parameter: Tissue Value: Aerial
  misc_feature: MA Experiment 108556 PARAMETER Experiment Name: Zm_Drought_P Parameter: Treatment Value: Drought vs. No Drought
  misc_feature: MA Experiment ID: 108559 Result: Down-regulated in Transcription
  misc_feature: MA Experiment 108559 PARAMETER Experiment Name: Zm_5mM_NO_P Parameter: Age (day) Value: 8
  misc_feature: MA Experiment 108559 PARAMETER Experiment Name: Zm_5mM_NO_P Parameter: Organism Value: Zea mays
  misc_feature: MA Experiment 108559 PARAMETER Experiment Name: Zm_5mM_NO_P Parameter: Plant Line Value: 35A19
  misc_feature: MA Experiment 108559 PARAMETER Experiment Name: Zm_5mM_NO_P Parameter: Timepoint (hr) Value: 12
  misc_feature: MA Experiment 108559 PARAMETER Experiment Name: Zm_5mM_NO_P Parameter: Tissue Value: Aerial
  misc_feature: MA Experiment 108559 PARAMETER Experiment Name: Zm_5mM_NO_P Parameter: Treatment Value: 5mM NO vs. No Treatment
  misc_feature: MA Experiment ID: 108597 Result: Down-regulated in Transcription
  misc_feature: MA Experiment 108597 PARAMETER Experiment Name: Zm_100uM_ABA_P Parameter: Age (day) Value: 9
  misc_feature: MA Experiment 108597 PARAMETER Experiment Name: Zm_100uM_ABA_P Parameter: Organism Value: Zea mays
  misc_feature: MA Experiment 108597 PARAMETER Experiment Name: Zm_100uM_ABA_P Parameter: Plant Line Value: 35A19
  misc_feature: MA Experiment 108597 PARAMETER Experiment Name: Zm_100uM_ABA_P Parameter: Timepoint (hr) Value: 24
  misc_feature: MA Experiment 108597 PARAMETER Experiment Name: Zm_100uM_ABA_P Parameter: Tissue Value: Aerial
  misc_feature: MA Experiment 108597 PARAMETER Experiment Name: Zm_100uM_ABA_P Parameter: Treatment Value: 100uM ABA vs. No Treatment
  misc_feature: MA Experiment ID: 108689 Result: Down-regulated in Transcription
  misc_feature: MA Experiment 108689 PARAMETER Experiment Name: Zm_Drought_Roots_P Parameter: Age (day) Value: 9
  misc_feature: MA Experiment 108689 PARAMETER Experiment Name: Zm_Drought_Roots_P Parameter: Organism Value: Zea mays
  misc_feature: MA Experiment 108689 PARAMETER Experiment Name: Zm_Drought_Roots_P Parameter: Plant Line Value: 35A19
  misc_feature: MA Experiment 108689 PARAMETER Experiment Name: Zm_Drought_Roots_P Parameter: Timepoint (hr) Value: 24
  misc_feature: MA Experiment 108689 PARAMETER Experiment Name: Zm_Drought_Roots_P Parameter: Tissue Value: Roots
  misc_feature: MA Experiment 108689 PARAMETER Experiment Name: Zm_Drought_Roots_P Parameter: Treatment Value: Drought vs. No Drought
  misc_feature: MA Experiment ID: 20000535 Result: Down-regulated in Transcription
  misc_feature: MA Experiment 20000535 PARAMETER Experiment Name: Zm_Hybrid_Seed_Dev_P Parameter: DAP Value: 30 vs. 12
  misc_feature: MA Experiment 20000535 PARAMETER Experiment Name: Zm_Hybrid_Seed_Dev_P Parameter: Organism Value: Zea mays
  misc_feature: MA Experiment 20000535 PARAMETER Experiment Name: Zm_Hybrid_Seed_Dev_P Parameter: Plant Line Value: 35A19
  misc_feature: MA Experiment 20000535 PARAMETER Experiment Name: Zm_Hybrid_Seed_Dev_P Parameter: Tissue Value: Embryo vs. Unfert Floret
  misc_feature: MA Experiment ID: 20000629 Result: Up-regulated in Transcription
  misc_feature: MA Experiment 20000629 PARAMETER Experiment Name: Zm_Herbicide-Treatments_P Parameter: Timepoint (hr) Value: 12
  misc_feature: MA Experiment 20000629 PARAMETER Experiment Name: Zm_Herbicide-Treatments_P Parameter: Tissue Value: Aerial
  misc_feature: MA Experiment 20000629 PARAMETER Experiment Name: Zm_Herbicide-Treatments_P Parameter: Treatment Value: Trimec vs. No Treatment
  misc_feature: MA Experiment ID: 20001608 Result: Down-regulated in Transcription
  misc_feature: MA Experiment 20001608 PARAMETER Experiment Name: Zm_50ppm_KNO3_L-to-H_P Parameter: Age (day) Value: 21
  misc_feature: MA Experiment 20001608 PARAMETER Experiment Name: Zm_50ppm_KNO3_L-to-H_P Parameter: Organism Value: Zea mays
  misc_feature: MA Experiment 20001608 PARAMETER Experiment Name: Zm_50ppm_KNO3_L-to-H_P Parameter: Plant Line Value: 35A19
  misc_feature: MA Experiment 20001608 PARAMETER Experiment Name: Zm_50ppm_KNO3_L-to-H_P Parameter: Timepoint (hr) Value: 48
  misc_feature: MA Experiment 20001608 PARAMETER Experiment Name: Zm_50ppm_KNO3_L-to-H_P Parameter: Tissue Value: Shoots
  misc_feature: MA Experiment 20001608 PARAMETER Experiment Name: Zm_50ppm_KNO3_L-to-H_P Parameter: Treatment Value: 50ppm KNO3 vs. 50ppm KCl
  misc_feature: MA Experiment ID: 20001613 Result: Down-regulated in Transcription
  misc_feature: MA Experiment 20001613 PARAMETER Experiment Name: Zm_50ppm_KNO3_L-to-H_P Parameter: Age (day) Value: 20
  misc_feature: MA Experiment 20001613 PARAMETER Experiment Name: Zm_50ppm_KNO3_L-to-H_P Parameter: Organism Value: Zea mays
  misc_feature: MA Experiment 20001613 PARAMETER Experiment Name: Zm_50ppm_KNO3_L-to-H_P Parameter: Plant Line Value: 35A19
  misc_feature: MA Experiment 20001613 PARAMETER Experiment Name: Zm_50ppm_KNO3_L-to-H_P Parameter: Timepoint (hr) Value: 24
  misc_feature: MA Experiment 20001613 PARAMETER Experiment Name: Zm_50ppm_KNO3_L-to-H_P Parameter: Tissue Value: Roots
  misc_feature: MA Experiment 20001613 PARAMETER Experiment Name: Zm_50ppm_KNO3_L-to-H_P Parameter: Treatment Value: 50ppm KNO3 vs. 50ppm KCl

SEQ ID NO: 13900 - protein, 332 aa, Zea mays subsp. mays; identical to SEQ ID NO: 7070
  peptide (1)..(332): Ceres Seq. ID no. 13494790
  misc_feature (146)..(332): Homolog of NCBI NO: 18412668 NR Description: expressed protein [Arabidopsis thaliana]
  misc_feature (173)..(311): Homolog of NCBI NO: 15241290 NR Description: expressed protein [Arabidopsis thaliana]
  misc_feature (174)..(332): Homolog of NCBI NO: 14532728 NR Description: unknown protein [Arabidopsis thaliana]
  misc_feature (174)..(332): Homolog of NCBI NO: 15236755 NR Description: expressed protein [Arabidopsis thaliana]
  misc_feature (179)..(311): Homolog of NCBI NO: 7487766 NR Description: hypothetical protein T6K21.120 - Arabidopsis >gi|2894603|emb|CAA17137.1| putative protein [Arabidopsis >gi|7268546|emb|CAB78796.1| putative protein [Arabidopsis
  misc_feature (179)..(311): Homolog of NCBI NO: 18414994 NR Description: expressed protein [Arabidopsis thaliana]
  misc_feature (179)..(311): Homolog of NCBI NO: 21592868 NR Description: unknown [Arabidopsis thaliana]
  misc_feature (130)..(316): Homolog of NCBI NO: 37537130 NR Description: unknown protein [Oryza sativa (japonica
  misc_feature (123)..(273): Homolog of NCBI NO: 38345382 NR Description: OSJNBa0067K08.11 [Oryza sativa (japonica
  misc_feature (207)..(311): Homolog of NCBI NO: 18390404 NR Description: expressed protein [Arabidopsis thaliana] unknown protein [Arabidopsis thaliana]
  misc_feature (146)..(332): Homolog of NCBI NO: 18412668 NR Description: expressed protein [Arabidopsis thaliana]
  misc_feature (173)..(311): Homolog of NCBI NO: 15241290 NR Description: expressed protein [Arabidopsis thaliana]
  misc_feature (174)..(332): Homolog of NCBI NO: 14532728 NR Description: unknown protein [Arabidopsis thaliana]
  misc_feature (174)..(332): Homolog of NCBI NO: 15236755 NR Description: expressed protein [Arabidopsis thaliana]
  misc_feature (179)..(311): Homolog of NCBI NO: 7487766 NR Description: hypothetical protein T6K21.120 - Arabidopsis >gi|2894603|emb|CAA17137.1| putative protein [Arabidopsis >gi|7268546|emb|CAB78796.1| putative protein [Arabidopsis
  misc_feature (179)..(311): Homolog of NCBI NO: 18414994 NR Description: expressed protein [Arabidopsis thaliana]
  misc_feature (179)..(311): Homolog of NCBI NO: 21592868 NR Description: unknown [Arabidopsis thaliana]
  misc_feature (130)..(316): Homolog of NCBI NO: 37537130 NR Description: unknown protein [Oryza sativa (japonica
  misc_feature (123)..(273): Homolog of NCBI NO: 38345382 NR Description: OSJNBa0067K08.11 [Oryza sativa (japonica
  misc_feature (207)..(311): Homolog of NCBI NO: 18390404 NR Description: expressed protein [Arabidopsis thaliana] unknown protein [Arabidopsis thaliana]
  misc_feature (60)..(60): Xaa is any aa, unknown or other
  misc_feature (85)..(85): Xaa is any aa, unknown or other
  misc_feature (100)..(100): Xaa is any aa, unknown or other
  misc_feature (104)..(104): Xaa is any aa, unknown or other
  misc_feature (293)..(293): Xaa is any aa, unknown or other

SEQ ID NO: 13901 - protein, 297 aa, Zea mays subsp. mays; identical to SEQ ID NO: 7071
  peptide (1)..(297): Ceres Seq. ID no. 13494791
  misc_feature (111)..(297): Homolog of NCBI NO: 18412668 NR Description: expressed protein [Arabidopsis thaliana]
  misc_feature (138)..(276): Homolog of NCBI NO: 15241290 NR Description: expressed protein [Arabidopsis thaliana]
  misc_feature (139)..(297): Homolog of NCBI NO: 14532728 NR Description: unknown protein [Arabidopsis thaliana]
  misc_feature (139)..(297): Homolog of NCBI NO: 15236755 NR Description: expressed protein [Arabidopsis thaliana]
  misc_feature (144)..(276): Homolog of NCBI NO: 7487766 NR Description: hypothetical protein T6K21.120 - Arabidopsis >gi|2894603|emb|CAA17137.1| putative protein [Arabidopsis >gi|7268546|emb|CAB78796.1| putative protein [Arabidopsis
  misc_feature (144)..(276): Homolog of NCBI NO: 21592868 NR Description: unknown [Arabidopsis thaliana]
  misc_feature (144)..(276): Homolog of NCBI NO: 18414994 NR Description: expressed protein [Arabidopsis thaliana]
  misc_feature (95)..(281): Homolog of NCBI NO: 37537130 NR Description: unknown protein [Oryza sativa (japonica
  misc_feature (88)..(238): Homolog of NCBI NO: 38345382 NR Description: OSJNBa0067K08.11 [Oryza sativa (japonica
  misc_feature (172)..(276): Homolog of NCBI NO: 18390404 NR Description: expressed protein [Arabidopsis thaliana] unknown protein [Arabidopsis thaliana]
  misc_feature (111)..(297): Homolog of NCBI NO: 18412668 NR Description: expressed protein [Arabidopsis thaliana]
  misc_feature (138)..(276): Homolog of NCBI NO: 15241290 NR Description: expressed protein [Arabidopsis thaliana]
  misc_feature (139)..(297): Homolog of NCBI NO: 14532728 NR Description: unknown protein [Arabidopsis thaliana]
  misc_feature (139)..(297): Homolog of NCBI NO: 15236755 NR Description: expressed protein [Arabidopsis thaliana]
  misc_feature (144)..(276): Homolog of NCBI NO: 7487766 NR Description: hypothetical protein T6K21.120 - Arabidopsis >gi|2894603|emb|CAA17137.1| putative protein [Arabidopsis >gi|7268546|emb|CAB78796.1| putative protein [Arabidopsis
  misc_feature (144)..(276): Homolog of NCBI NO: 21592868 NR Description: unknown [Arabidopsis thaliana]
  misc_feature (144)..(276): Homolog of NCBI NO: 18414994 NR Description: expressed protein [Arabidopsis thaliana]
  misc_feature (95)..(281): Homolog of NCBI NO: 37537130 NR Description: unknown protein [Oryza sativa (japonica
  misc_feature (88)..(238): Homolog of NCBI NO: 38345382 NR Description: OSJNBa0067K08.11 [Oryza sativa (japonica
  misc_feature (172)..(276): Homolog of NCBI NO: 18390404 NR Description: expressed protein [Arabidopsis thaliana] unknown protein [Arabidopsis thaliana]
  misc_feature (25)..(25): Xaa is any aa, unknown or other
  misc_feature (50)..(50): Xaa is any aa, unknown or other
  misc_feature (65)..(65): Xaa is any aa, unknown or other
  misc_feature (69)..(69): Xaa is any aa, unknown or other
  misc_feature (258)..(258): Xaa is any aa, unknown or other

SEQ ID NO: 13902 - DNA, 1152 bp, Zea mays subsp. mays
  misc_feature (1)..(1152): Ceres Seq. ID no. 12455003
  misc_feature: MA Experiment ID: 108504 Result: Up-regulated in Transcription
  misc_feature: MA Experiment 108504 PARAMETER Experiment Name: Zm_Drought_P Parameter: Age (day) Value: 8
  misc_feature: MA Experiment 108504 PARAMETER Experiment Name: Zm_Drought_P Parameter: Organism Value: Zea mays
  misc_feature: MA Experiment 108504 PARAMETER Experiment Name: Zm_Drought_P Parameter: Plant Line Value: 35A19
  misc_feature: MA Experiment 108504 PARAMETER Experiment Name: Zm_Drought_P Parameter: Timepoint (hr) Value: 12
  misc_feature: MA Experiment 108504 PARAMETER Experiment Name: Zm_Drought_P Parameter: Tissue Value: Aerial
  misc_feature: MA Experiment 108504 PARAMETER Experiment Name: Zm_Drought_P Parameter: Treatment Value: Drought vs. No Drought
  misc_feature: MA Experiment ID: 108527 Result: Up-regulated in Transcription
  misc_feature: MA Experiment 108527 PARAMETER Experiment Name: Zm_5mM_NO_P Parameter: Age (day) Value: 8
  misc_feature: MA Experiment 108527 PARAMETER Experiment Name: Zm_5mM_NO_P Parameter: Organism Value: Zea mays
  misc_feature: MA Experiment 108527 PARAMETER Experiment Name: Zm_5mM_NO_P Parameter: Plant Line Value: 35A19
  misc_feature: MA Experiment 108527 PARAMETER Experiment Name: Zm_5mM_NO_P Parameter: Timepoint (hr) Value: 6
  misc_feature: MA Experiment 108527 PARAMETER Experiment Name: Zm_5mM_NO_P Parameter: Tissue Value: Aerial
  misc_feature: MA Experiment 108527 PARAMETER Experiment Name: Zm_5mM_NO_P Parameter: Treatment Value: 5mM NO vs. No Treatment
  misc_feature: MA Experiment ID: 108536 Result: Up-regulated in Transcription
  misc_feature: MA Experiment 108536 PARAMETER Experiment Name: Zm_Meristem_P Parameter: Age (day) Value: 8
  misc_feature: MA Experiment 108536 PARAMETER Experiment Name: Zm_Meristem_P Parameter: Organism Value: Zea mays
  misc_feature: MA Experiment 108536 PARAMETER Experiment Name: Zm_Meristem_P Parameter: Plant Line Value: 35A19
  misc_feature: MA Experiment 108536 PARAMETER Experiment Name: Zm_Meristem_P Parameter: Tissue Value: Shoot Meristem vs. Above Shoot Meristem
  misc_feature: MA Experiment ID: 108556 Result: Up-regulated in Transcription
  misc_feature: MA Experiment 108556 PARAMETER Experiment Name: Zm_Drought_P Parameter: Age (day) Value: 9
  misc_feature: MA Experiment 108556 PARAMETER Experiment Name: Zm_Drought_P Parameter: Organism Value: Zea mays
  misc_feature: MA Experiment 108556 PARAMETER Experiment Name: Zm_Drought_P Parameter: Plant Line Value: 35A19
  misc_feature: MA Experiment 108556 PARAMETER Experiment Name: Zm_Drought_P Parameter: Timepoint (hr) Value: 24
  misc_feature: MA Experiment 108556 PARAMETER Experiment Name: Zm_Drought_P Parameter: Tissue Value: Aerial
  misc_feature: MA Experiment 108556 PARAMETER Experiment Name: Zm_Drought_P Parameter: Treatment Value: Drought vs. No Drought
  misc_feature: MA Experiment ID: 108559 Result: Up-regulated in Transcription
  misc_feature: MA Experiment 108559 PARAMETER Experiment Name: Zm_5mM_NO_P Parameter: Age (day) Value: 8
  misc_feature: MA Experiment 108559 PARAMETER Experiment Name: Zm_5mM_NO_P Parameter: Organism Value: Zea mays
  misc_feature: MA Experiment 108559 PARAMETER Experiment Name: Zm_5mM_NO_P Parameter: Plant Line Value: 35A19
  misc_feature: MA Experiment 108559 PARAMETER Experiment Name: Zm_5mM_NO_P Parameter: Timepoint (hr) Value: 12
  misc_feature: MA Experiment 108559 PARAMETER Experiment Name: Zm_5mM_NO_P Parameter: Tissue Value: Aerial
  misc_feature: MA Experiment 108559 PARAMETER Experiment Name: Zm_5mM_NO_P Parameter: Treatment Value: 5mM NO vs. No Treatment
  misc_feature: MA Experiment ID: 20000478 Result: Up-regulated in Transcription
  misc_feature: MA Experiment 20000478 PARAMETER Experiment Name: Zm_5mM_SA_P Parameter: Age (day) Value: 11
  misc_feature: MA Experiment 20000478 PARAMETER Experiment Name: Zm_5mM_SA_P Parameter: Organism Value: Zea mays
  misc_feature: MA Experiment 20000478 PARAMETER Experiment Name: Zm_5mM_SA_P Parameter: Plant Line Value: 35A19
  misc_feature: MA Experiment 20000478 PARAMETER Experiment Name: Zm_5mM_SA_P Parameter: Timepoint (hr) Value: 72
  misc_feature: MA Experiment 20000478 PARAMETER Experiment Name: Zm_5mM_SA_P Parameter: Tissue Value: Aerial
  misc_feature: MA Experiment 20000478 PARAMETER Experiment Name: Zm_5mM_SA_P Parameter: Treatment Value: 5mM SA vs. No Treatment
  misc_feature: MA Experiment ID: 20000479 Result: Up-regulated in Transcription
  misc_feature: MA Experiment 20000479 PARAMETER Experiment Name: Zm_Drought_P Parameter: Age (day) Value: 10
  misc_feature: MA Experiment 20000479 PARAMETER Experiment Name: Zm_Drought_P Parameter: Organism Value: Zea mays
  misc_feature: MA Experiment 20000479 PARAMETER Experiment Name: Zm_Drought_P Parameter: Plant Line Value: 35A19
  misc_feature: MA Experiment 20000479 PARAMETER Experiment Name: Zm_Drought_P Parameter: Timepoint (hr) Value: 48
  misc_feature: MA Experiment 20000479 PARAMETER Experiment Name: Zm_Drought_P Parameter: Tissue Value: Aerial
  misc_feature: MA Experiment 20000479 PARAMETER Experiment Name: Zm_Drought_P Parameter: Treatment Value: Drought vs. No Drought
  misc_feature: MA Experiment ID: 20000480 Result: Up-regulated in Transcription
  misc_feature: MA Experiment 20000480 PARAMETER Experiment Name: Zm_Drought_P Parameter: Age (day) Value: 11
  misc_feature: MA Experiment 20000480 PARAMETER Experiment Name: Zm_Drought_P Parameter: Organism Value: Zea mays
  misc_feature: MA Experiment 20000480 PARAMETER Experiment Name: Zm_Drought_P Parameter: Plant Line Value: 35A19
  misc_feature: MA Experiment 20000480 PARAMETER Experiment Name: Zm_Drought_P Parameter: Timepoint (hr) Value: 72
  misc_feature: MA Experiment 20000480 PARAMETER Experiment Name: Zm_Drought_P Parameter: Tissue Value: Aerial
  misc_feature: MA Experiment 20000480 PARAMETER Experiment Name: Zm_Drought_P Parameter: Treatment Value: Drought vs. No Drought
  misc_feature: MA Experiment ID: 20000535 Result: Down-regulated in Transcription
  misc_feature: MA Experiment 20000535 PARAMETER Experiment Name: Zm_Hybrid_Seed_Dev_P Parameter: DAP Value: 30 vs. 12
  misc_feature: MA Experiment 20000535 PARAMETER Experiment Name: Zm_Hybrid_Seed_Dev_P Parameter: Organism Value: Zea mays
  misc_feature: MA Experiment 20000535 PARAMETER Experiment Name: Zm_Hybrid_Seed_Dev_P Parameter: Plant Line Value: 35A19
  misc_feature: MA Experiment 20000535 PARAMETER Experiment Name: Zm_Hybrid_Seed_Dev_P Parameter: Tissue Value: Embryo vs. Unfert Floret
attaaagaaaaaggaaattttcttgggcgttcttcggcttcattgtcacaaggttcgagttcgtcaccgtctagtacgactgtgcgagggaggaagaggcgaggagaagatgcagatcttcgtgaagaccctgacggggaagaccatcaccctcgaggtggagagcagcgacaccgtcgacaacgtcaaggccaaaatccaggacaaggaagctgcatgggagtcgagctattcgagtccgcggcaagaatggaagcacatcgctgaacctgtcatgcaggtatacaccgagacaacagacggatcttcagtcgagtcgaaggagagcgctctagtgtggcactatttggatgcagaccatgatttcggttccttccaagcgaaggagctaaaggatcatcttgagagggtgctatcaaatgagcccgttgttgtgaagtgtggccattatatcgtagaagtaaagccgcagggagttagcaagggtcgtgctgtcgacaagctgattcaagcactggccaacaacaacgggaaggcacaggatttcctgatgtgcgtcggcaacgacagatctgacgaggacatgttcgaatgcatcaacggtatggcctccaacgatgtctcatcgaccacagtaccggaggtgtttgcctgttcggtcggccagaagcccagcaaagcaaaatactatgtggacgacaccagcgaagtgatcagattgctcagggatgcaacccgcttctcatcgtcgcagcggagggaggacgtcaacgccagccgcgggcgtgtgaccttcagagacgcactcgattacgtggactaggcaccagcagcaattcttagttactcgaaatgattagctgcggagcttgtaaattccgctgtcttctgtctgccaatggttttcgttctagagaattgtagtgtagccgacatcgacatggatcgtcgtcaccgatacacgaacagcggaaatatgagttgaagttcgtcgtttcgaggctcagaattggtacatttatagaattgtagtgtaggcaattttttggtagggaatagtaattggtacatttatagaattgtcaattgtttttcttctaccgctgataatactatagcttcgctaaattaatattattgtttcacttagcg

SEQ ID NO: 13903 - protein, 273 aa, Zea mays subsp. mays
  peptide (1)..(273): Ceres Seq. ID no. 12455004
  misc_feature (68)..(234): Pfam Name: Trehalose-phosphatase Pfam Description: Trehalose-phosphatase
  misc_feature (68)..(269): Homolog of NCBI NO: 14596155 NR Description: Unknown protein [Arabidopsis thaliana]
  misc_feature (68)..(269): Homolog of NCBI NO: 15224213 NR Description: putative trehalose-6-phosphate synthase; protein
  misc_feature (73)..(254): Homolog of NCBI NO: 15220891 NR Description: trehalose 6-phosphate synthase, putative; protein At1g23870.1, supported by cDNA: gi_18176366, supported by cDNA: [Arabidopsis thaliana] >gi|9369388|gb|AAF87136.1|AC002423_1
  misc_feature (68)..(269): Homolog of NCBI NO: 15219002 NR Description: trehalose-6-phosphate synthase, putative; protein
  misc_feature (73)..(250): Homolog of NCBI NO: 7488401 NR Description: trehalose-6-phosphate synthase homolog F17O7.18 -
  misc_feature (73)..(250): Homolog of NCBI NO: 30698024 NR Description: alpha,alpha-trehalose-phosphate synthase,
  misc_feature (73)..(241): Homolog of NCBI NO: 7488400 NR Description: trehalose-6-phosphate synthase homolog DL4920W -
  misc_feature (73)..(241): Homolog of NCBI NO: 18414960 NR Description: trehalose-6-phosphate synthase like protein;
  misc_feature (73)..(254): Homolog of NCBI NO: 15221478 NR Description: trehalose-6-phosphate synthase, putative; protein At1g06410.1 [Arabidopsis thaliana] >gi|25347117|pir||A86200
  misc_feature (69)..(241): Homolog of NCBI NO: 25347119 NR Description: hypothetical protein T23K23.13 [imported] -
LKKKEIFLGVLRLHCHKVRVRHRLVRLCEGGRGEEKMQIFVKTLTGKTITLEVESSDTVDNVKAKIQDKEAAWESSYSSPRQEWKHIAEPVMQVYTETTDGSSVESKESALVWHYLDADHDFGSFQAKELKDHLERVLSNEPVVVKCGHYIVEVKPQGVSKGRAVDKLIQALANNNGKAQDFLMCVGNDRSDEDMFECINGMASNDVSSTTVPEVFACSVGQKPSKAKYYVDDTSEVIRLLRDATRFSSSQRREDVNASRGRVTFRDALDYVD

SEQ ID NO: 13904 - protein, 237 aa, Zea mays subsp. mays
  peptide (1)..(237): Ceres Seq. ID no. 12455005
  misc_feature (32)..(198): Pfam Name: Trehalose-phosphatase Pfam Description: Trehalose-phosphatase
  misc_feature (32)..(233): Homolog of NCBI NO: 14596155 NR Description: Unknown protein [Arabidopsis thaliana]
  misc_feature (32)..(233): Homolog of NCBI NO: 15224213 NR Description: putative trehalose-6-phosphate synthase; protein
  misc_feature (37)..(218): Homolog of NCBI NO: 15220891 NR Description: trehalose 6-phosphate synthase, putative; protein At1g23870.1, supported by cDNA: gi_18176366, supported by cDNA: [Arabidopsis thaliana] >gi|9369388|gb|AAF87136.1|AC002423_1
  misc_feature (32)..(233): Homolog of NCBI NO: 15219002 NR Description: trehalose-6-phosphate synthase, putative; protein
  misc_feature (37)..(214): Homolog of NCBI NO: 7488401 NR Description: trehalose-6-phosphate synthase homolog F17O7.18 -
  misc_feature (37)..(214): Homolog of NCBI NO: 30698024 NR Description: alpha,alpha-trehalose-phosphate synthase,
  misc_feature (37)..(205): Homolog of NCBI NO: 7488400 NR Description: trehalose-6-phosphate synthase homolog DL4920W -
  misc_feature (37)..(205): Homolog of NCBI NO: 18414960 NR Description: trehalose-6-phosphate synthase like protein;
  misc_feature (37)..(218): Homolog of NCBI NO: 15221478 NR Description: trehalose-6-phosphate synthase, putative; protein At1g06410.1 [Arabidopsis thaliana] >gi|25347117|pir||A86200
  misc_feature (33)..(205): Homolog of NCBI NO: 25347119 NR Description: hypothetical protein T23K23.13 [imported] -
MQIFVKTLTGKTITLEVESSDTVDNVKAKIQDKEAAWESSYSSPRQEWKHIAEPVMQVYTETTDGSSVESKESALVWHYLDADHDFGSFQAKELKDHLERVLSNEPVVVKCGHYIVEVKPQGVSKGRAVDKLIQALANNNGKAQDFLMCVGNDRSDEDMFECINGMASNDVSSTTVPEVFACSVGQKPSKAKYYVDDTSEVIRLLRDATRFSSSQRREDVNASRGRVTFRDALDYVD

SEQ ID NO: 13905 - protein, 182 aa, Zea mays subsp. mays
  peptide (1)..(182): Ceres Seq. ID no. 12455006
  misc_feature (1)..(143): Pfam Name: Trehalose-phosphatase Pfam Description: Trehalose-phosphatase
  misc_feature (1)..(178): Homolog of NCBI NO: 14596155 NR Description: Unknown protein [Arabidopsis thaliana]
  misc_feature (1)..(178): Homolog of NCBI NO: 15224213 NR Description: putative trehalose-6-phosphate synthase; protein
  misc_feature (1)..(163): Homolog of NCBI NO: 15220891 NR Description: trehalose 6-phosphate synthase, putative; protein At1g23870.1, supported by cDNA: gi_18176366, supported by cDNA: [Arabidopsis thaliana] >gi|9369388|gb|AAF87136.1|AC002423_1
  misc_feature (1)..(178): Homolog of NCBI NO: 15219002 NR Description: trehalose-6-phosphate synthase, putative; protein
  misc_feature (1)..(159): Homolog of NCBI NO: 7488401 NR Description: trehalose-6-phosphate synthase homolog F17O7.18 -
  misc_feature (1)..(159): Homolog of NCBI NO: 30698024 NR Description: alpha,alpha-trehalose-phosphate synthase,
  misc_feature (1)..(150): Homolog of NCBI NO: 7488400 NR Description: trehalose-6-phosphate synthase homolog DL4920W -
  misc_feature (1)..(150): Homolog of NCBI NO: 18414960 NR Description: trehalose-6-phosphate synthase like protein;
  misc_feature (1)..(163): Homolog of NCBI NO: 15221478 NR Description: trehalose-6-phosphate synthase, putative; protein At1g06410.1 [Arabidopsis thaliana] >gi|25347117|pir||A86200
  misc_feature (1)..(150): Homolog of NCBI NO: 25347119 NR Description: hypothetical protein T23K23.13 [imported] -
MQVYTETTDGSSVESKESALVWHYLDADHDFGSFQAKELKDHLERVLSNEPVVVKCGHYIVEVKPQGVSKGRAVDKLIQALANNNGKAQDFLMCVGNDRSDEDMFECINGMASNDVSSTTVPEVFACSVGQKPSKAKYYVDDTSEVIRLLRDATRFSSSQRREDVNASRGRVTFRDALDYVD

SEQ ID NO: 13906 - DNA, 595 bp, Zea mays subsp. mays
  misc_feature (1)..(595): Ceres Seq. ID no. 2924141
  misc_feature: MA Experiment ID: 20000487 Result: Up-regulated in Transcription
  misc_feature: MA Experiment 20000487 PARAMETER Experiment Name: Zm_50mM_NH4NO3_L_to_H_P Parameter: Organism Value: Zea mays
  misc_feature: MA Experiment 20000487 PARAMETER Experiment Name: Zm_50mM_NH4NO3_L_to_H_P Parameter: Timepoint (hr) Value: 4
  misc_feature: MA Experiment 20000487 PARAMETER Experiment Name: Zm_50mM_NH4NO3_L_to_H_P Parameter: Tissue Value: Leaves
  misc_feature: MA Experiment 20000487 PARAMETER Experiment Name: Zm_50mM_NH4NO3_L_to_H_P Parameter: Treatment Value: 50mM NH4NO3 vs. 100mM Mannitol
aaaaaacaaagcaagtagctcctcacagtttgtgaaaaagatgatgacgtcattaccttacacttgccaatcacaaagtccttcaccgtacttcgacctgtctctttttaggtatgatgagaagctgatttcagcaattgatcggcatcggcattgcacagagcatccaataaaatttatgtcagtgaggcaaaatgttgtcaaatttaagatcaagccaggttcagattctggtgcttctgacagcagagcaaaaagaatctcgtccttcttgtttcacccatttttcccgcttgcactttcgattcagcagacttatatgcagccaactgttgtcaacatccatttcaggagatagaaaaggtataacggttgccttagttgtatttgtgtcattagtgaacttgcagcattgctggtggcaaagttttggccatatgtgctctagtagatatgctggaacaagatccattgctggcggtgaggatggctagttngatttntcttccaaaacaaagacaaaatgcaaatgggctatnttctctatngatgtgggctcatgggctcatcagtattatcattgtgcttcacagtg

SEQ ID NO: 13907 - protein, 118 aa, Zea mays subsp. mays
  peptide (1)..(118): Ceres Seq. ID no. 2924142
  misc_feature (1)..(118): Homolog of NCBI NO: 34894070 NR Description: putative tDET1 protein [Oryza sativa (japonica group)] >gi|10697205|dbj|BAB16336.1| putative tDET1 protein
  misc_feature (1)..(118): Homolog of NCBI NO: 28439620 NR Description: deetiolated 1-like protein [Solanum tuberosum]
  misc_feature (1)..(118): Homolog of NCBI NO: 4038594 NR Description: tDET1 protein [Lycopersicon esculentum]
  misc_feature (1)..(118): Homolog of NCBI NO: 30421060 NR Description: deetiolated 1-like protein [Capsicum annuum]
  misc_feature (1)..(118): Homolog of NCBI NO: 15234958 NR Description: Deetiolated1 (DET1) light signal transduction protein id: At4g10180.1 [Arabidopsis thaliana]
  misc_feature (3)..(117): Homolog of NCBI NO: 7021956 NR Description: unnamed protein product [Homo sapiens]
  misc_feature (3)..(117): Homolog of NCBI NO: 33416951 NR Description: Unknown (protein for MGC:66486) [Danio rerio]
  misc_feature (3)..(117): Homolog of NCBI NO: 27677500 NR Description: similar to RIKEN cDNA 2610034H20 [Mus musculus]
  misc_feature (3)..(117): Homolog of NCBI NO: 27229232 NR Description: RIKEN cDNA 2610034H20 [Mus musculus] RIKEN cDNA 2610034H20 [Mus musculus] >gi|26374889|dbj|BAB27766.2|
  misc_feature (3)..(117): Homolog of NCBI NO: 33354283 NR Description: hypothetical protein FLJ10103 [Homo sapiens]
KNKASSSSQFVKKMMTSLPYTCQSQSPSPYFDLSLFRYDEKLISAIDRHRHCTEHPIKFMSVRQNVVKFKIKPGSDSGASDSRAKRISSFLFHPFFPLALSIQQTYMQPTVVNIHFRR

SEQ ID NO: 13908 - protein, 105 aa, Zea mays subsp. mays
  peptide (1)..(105): Ceres Seq. ID no. 2924143
  misc_feature (1)..(105): Homolog of NCBI NO: 15234958 NR Description: Deetiolated1 (DET1) light signal transduction protein id: At4g10180.1 [Arabidopsis thaliana]
  misc_feature (1)..(104): Homolog of NCBI NO: 7021956 NR Description: unnamed protein product [Homo sapiens]
  misc_feature (1)..(104): Homolog of NCBI NO: 33416951 NR Description: Unknown (protein for MGC:66486) [Danio rerio]
  misc_feature (1)..(104): Homolog of NCBI NO: 27677500 NR Description: similar to RIKEN cDNA 2610034H20 [Mus musculus]
  misc_feature (1)..(104): Homolog of NCBI NO: 27229232 NR Description: RIKEN cDNA 2610034H20 [Mus musculus] RIKEN cDNA 2610034H20 [Mus musculus] >gi|26374889|dbj|BAB27766.2|
  misc_feature (1)..(104): Homolog of NCBI NO: 33354283 NR Description: hypothetical protein FLJ10103 [Homo sapiens]
  misc_feature (1)..(105): Homolog of NCBI NO: 34894070 NR Description: putative tDET1 protein [Oryza sativa (japonica group)] >gi|10697205|dbj|BAB16336.1| putative tDET1 protein
  misc_feature (1)..(105): Homolog of NCBI NO: 28439620 NR Description: deetiolated 1-like protein [Solanum tuberosum]
  misc_feature (1)..(105): Homolog of NCBI NO: 4038594 NR Description: tDET1 protein [Lycopersicon esculentum]
  misc_feature (1)..(105): Homolog of NCBI NO: 30421060 NR Description: deetiolated 1-like protein [Capsicum annuum]
MMTSLPYTCQSQSPSPYFDLSLFRYDEKLISAIDRHRHCTEHPIKFMSVRQNVVKFKIKPGSDSGASDSRAKRISSFLFHPFFPLALSIQQTYMQPTVVNIHFRR

SEQ ID NO: 13909 - protein, 104 aa, Zea mays subsp. mays
  peptide (1)..(104): Ceres Seq. ID no. 2924144
  misc_feature (1)..(104): Homolog of NCBI NO: 34894070 NR Description: putative tDET1 protein [Oryza sativa (japonica group)] >gi|10697205|dbj|BAB16336.1| putative tDET1 protein
  misc_feature (1)..(104): Homolog of NCBI NO: 28439620 NR Description: deetiolated 1-like protein [Solanum tuberosum]
  misc_feature (1)..(104): Homolog of NCBI NO: 4038594 NR Description: tDET1 protein [Lycopersicon esculentum]
  misc_feature (1)..(104): Homolog of NCBI NO: 30421060 NR Description: deetiolated 1-like protein [Capsicum annuum]
  misc_feature (1)..(104): Homolog of NCBI NO: 15234958 NR Description: Deetiolated1 (DET1) light signal transduction protein id: At4g10180.1 [Arabidopsis thaliana]
  misc_feature (1)..(103): Homolog of NCBI NO: 7021956 NR Description: unnamed protein product [Homo sapiens]
  misc_feature (1)..(103): Homolog of NCBI NO: 33416951 NR Description: Unknown (protein for MGC:66486) [Danio rerio]
  misc_feature (1)..(103): Homolog of NCBI NO: 27677500 NR Description: similar to RIKEN cDNA 2610034H20 [Mus musculus]
  misc_feature (1)..(103): Homolog of NCBI NO: 27229232 NR Description: RIKEN cDNA 2610034H20 [Mus musculus] RIKEN cDNA 2610034H20 [Mus musculus] >gi|26374889|dbj|BAB27766.2|
  misc_feature (1)..(103): Homolog of NCBI NO: 33354283 NR Description: hypothetical protein FLJ10103 [Homo sapiens]
MTSLPYTCQSQSPSPYFDLSLFRYDEKLISAIDRHRHCTEHPIKFMSVRQNVVKFKIKPGSDSGASDSRAKRISSFLFHPFFPLALSIQQTYMQPTVVNIHFRR

SEQ ID NO: 13910 - DNA, 1111 bp, Zea mays subsp. mays
  misc_feature (1)..(1111): Ceres Seq. ID no. 12436364
  misc_feature: MA Experiment ID: 108544 Result: Down-regulated in Transcription
  misc_feature: MA Experiment ID: 108597 Result: Down-regulated in Transcription
  misc_feature: MA Experiment 108597 PARAMETER Experiment Name: Zm_100uM_ABA_P Parameter: Age (day) Value: 9
  misc_feature: MA Experiment 108597 PARAMETER Experiment Name: Zm_100uM_ABA_P Parameter: Organism Value: Zea mays
  misc_feature: MA Experiment 108597 PARAMETER Experiment Name: Zm_100uM_ABA_P Parameter: Plant Line Value: 35A19
  misc_feature: MA Experiment 108597 PARAMETER Experiment Name: Zm_100uM_ABA_P Parameter: Timepoint (hr) Value: 24
  misc_feature: MA Experiment 108597 PARAMETER Experiment Name: Zm_100uM_ABA_P Parameter: Tissue Value: Aerial
  misc_feature: MA Experiment 108597 PARAMETER Experiment Name: Zm_100uM_ABA_P Parameter: Treatment Value: 100uM ABA vs. No Treatment
  misc_feature: MA Experiment ID: 20000477 Result: Down-regulated in Transcription
  misc_feature: MA Experiment 20000477 PARAMETER Experiment Name: Zm_5mM_SA_P Parameter: Age (day) Value: 10
  misc_feature: MA Experiment 20000477 PARAMETER Experiment Name: Zm_5mM_SA_P Parameter: Organism Value: Zea mays
  misc_feature: MA Experiment 20000477 PARAMETER Experiment Name: Zm_5mM_SA_P Parameter: Plant Line Value: 35A19
  misc_feature: MA Experiment 20000477 PARAMETER Experiment Name: Zm_5mM_SA_P Parameter: Timepoint (hr) Value: 48
  misc_feature: MA Experiment 20000477 PARAMETER Experiment Name: Zm_5mM_SA_P Parameter: Tissue Value: Aerial
  misc_feature: MA Experiment 20000477 PARAMETER Experiment Name: Zm_5mM_SA_P Parameter: Treatment Value: 5mM SA vs. No Treatment
  misc_feature: MA Experiment ID: 20000478 Result: Down-regulated in Transcription
  misc_feature: MA Experiment 20000478 PARAMETER Experiment Name: Zm_5mM_SA_P Parameter: Age (day) Value: 11
  misc_feature: MA Experiment 20000478 PARAMETER Experiment Name: Zm_5mM_SA_P Parameter: Organism Value: Zea mays
  misc_feature: MA Experiment 20000478 PARAMETER Experiment Name: Zm_5mM_SA_P Parameter: Plant Line Value: 35A19
  misc_feature: MA Experiment 20000478 PARAMETER Experiment Name: Zm_5mM_SA_P Parameter: Timepoint (hr) Value: 72
  misc_feature: MA Experiment 20000478 PARAMETER Experiment Name: Zm_5mM_SA_P Parameter: Tissue Value: Aerial
  misc_feature: MA Experiment 20000478 PARAMETER Experiment Name: Zm_5mM_SA_P Parameter: Treatment Value: 5mM SA vs. No Treatment
  misc_feature: MA Experiment ID: 20000479 Result: Down-regulated in Transcription
  misc_feature: MA Experiment 20000479 PARAMETER Experiment Name: Zm_Drought_P Parameter: Age (day) Value: 10
  misc_feature: MA Experiment 20000479 PARAMETER Experiment Name: Zm_Drought_P Parameter: Organism Value: Zea mays
  misc_feature: MA Experiment 20000479 PARAMETER Experiment Name: Zm_Drought_P Parameter: Plant Line Value: 35A19
  misc_feature: MA Experiment 20000479 PARAMETER Experiment Name: Zm_Drought_P Parameter: Timepoint (hr) Value: 48
  misc_feature: MA Experiment 20000479 PARAMETER Experiment Name: Zm_Drought_P Parameter: Tissue Value: Aerial
  misc_feature: MA Experiment 20000479 PARAMETER Experiment Name: Zm_Drought_P Parameter: Treatment Value: Drought vs. No Drought
atcccgtctcgtttcgtctcggtctcgcacctctcacgacggcaccaccccagcgcggcgcgagtggagacgccgctgctccgtgcttcgccgcgcctacctaacccaagacctgctagacctgagtggctgagtgttcgtgttcggtcaaaacccaccgcgcgagcgcctccagagtccaaacccgctacaaatctcgcgctgcgcattctccccgtacgatacggcggcacggcccacgagccaggcggtggcggcagctagctagctgcggagtagcaccagccaccggagggaagtgggcggcgcgatgggggacgagccggacggggaggcggaggagtacctcttcaaggtggtgatcatcggcgacagcgcggtggggaagagcaacctgctgtcccgctacgcgcgcaacgagttcaacccccactccaaggccaccatcggggtggagttccagacgcagagcatggccatcgaaggcaaggaggtcaaggcccagatctgggacaccgccggccaggagcgcttccgcgccgtcacctccgcctactaccgcggcgccttcggcgcgctcctcgtctatgacattacccgccgctccaccttcgacaacgtcggccgctggctccaggagctcaacacacattcggacacgacggtggccaagatgctggtgggcaacaagtgtgacctgggcgacatccgccaggtgcccgtggaggaaggcaaggcgctggccgaggccgagggcctcttcttcatggagacgtcggccctggacgccaccaacgtgaggacggccttcgagatcgtgatcagggagatctacagcaacgtgagccgcaaggtcctgaactcggactcgtacaaggccgagctgtccctcaacagggtgagcatcgacggcgactcaaaagacgagcagaagcaggggagccggttcgggtgctgctagaagtggtcggggggtagcggtacattattggatcgggttggatttgaaccggagatgatgctttttcatttttttttgggtggcgggtgggggcttgcttgtaaactgtaatacaaggtttgactctttgtttgctgttacgttacactc

SEQ ID NO: 13911 - protein, 216 aa, Zea mays subsp. mays
  peptide (1)..(216): Ceres Seq. ID no. 12436365
  misc_feature (15)..(176): Pfam Name: Ras family Pfam Description: Ras family
  misc_feature (1)..(216): Homolog of NCBI NO: 29647488 NR Description: putative GTP-binding protein Rab11e [Oryza sativa
  misc_feature (1)..(216): Homolog of NCBI NO: 15224226 NR Description: Ras-related GTP-binding protein (ARA-4); protein
  misc_feature (1)..(216): Homolog of NCBI NO: 15225121 NR Description: GTP-binding protein, putative; protein id: supported by cDNA: 15416. [Arabidopsis thaliana]
  misc_feature (10)..(216): Homolog of NCBI NO: 7438404 NR Description: GTP-binding protein Rab11e - common tobacco
  misc_feature (1)..(216): Homolog of NCBI NO: 1370154 NR Description: RAB11G [Lotus japonicus]
  misc_feature (1)..(216): Homolog of NCBI NO: 29893534 NR Description: putative RAS-related protein ARA-1 [Arabidopsis
  misc_feature (1)..(216): Homolog of NCBI NO: 18390575 NR Description: RAS-related GTP-binding protein (ARA-1); protein At1g05810.1, supported by cDNA: gi_12083321 [Arabidopsis
MGDEPDGEAEEYLFKVVIIGDSAVGKSNLLSRYARNEFNPHSKATIGVEFQTQSMAIEGKEVKAQIWDTAGQERFRAVTSAYYRGAFGALLVYDITRRSTFDNVGRWLQELNTHSDTTVAKMLVGNKCDLGDIRQVPVEEGKALAEAEGLFFMETSALDATNVRTAFEIVIREIYSNVSRKVLNSDSYKAELSLNRVSIDGDSKDEQKQGSRFGCC

SEQ ID NO: 13912 - protein, 162 aa, Zea mays subsp. mays
  peptide (1)..(162): Ceres Seq. ID no. 12436366
  misc_feature (1)..(122): Pfam Name: Ras family Pfam Description: Ras family
  misc_feature (1)..(162): Homolog of NCBI NO: 29647488 NR Description: putative GTP-binding protein Rab11e [Oryza sativa
  misc_feature (1)..(162): Homolog of NCBI NO: 15224226 NR Description: Ras-related GTP-binding protein (ARA-4); protein
  misc_feature (1)..(162): Homolog of NCBI NO: 15225121 NR Description: GTP-binding protein, putative; protein id: supported by cDNA: 15416. [Arabidopsis thaliana]
  misc_feature (1)..(162): Homolog of NCBI NO: 7438404 NR Description: GTP-binding protein Rab11e - common tobacco
  misc_feature (1)..(162): Homolog of NCBI NO: 1370154 NR Description: RAB11G [Lotus japonicus]
  misc_feature (1)..(162): Homolog of NCBI NO: 29893534 NR Description: putative RAS-related protein ARA-1 [Arabidopsis
  misc_feature (1)..(162): Homolog of NCBI NO: 18390575 NR Description: RAS-related GTP-binding protein (ARA-1); protein At1g05810.1, supported by cDNA: gi_12083321 [Arabidopsis
MAIEGKEVKAQIWDTAGQERFRAVTSAYYRGAFGALLVYDITRRSTFDNVGRWLQELNTHSDTTVAKMLVGNKCDLGDIRQVPVEEGKALAEAEGLFFMETSALDATNVRTAFEIVIREIYSNVSRKVLNSDSYKAELSLNRVSIDGDSKDEQKQGSRFGCC

SEQ ID NO: 13913 - DNA, 978 bp, Zea mays subsp. mays
  misc_feature (1)..(978): Ceres Seq. ID no. 13622791
  misc_feature: MA Experiment ID: 108543 Result: Up-regulated in Transcription
  misc_feature: MA Experiment ID: 20000632 Result: Down-regulated in Transcription
  misc_feature: MA Experiment 20000632 PARAMETER Experiment Name: Zm_Herbicide-Treatments_P Parameter: Timepoint (hr) Value: 4
  misc_feature: MA Experiment 20000632 PARAMETER Experiment Name: Zm_Herbicide-Treatments_P Parameter: Tissue Value: Aerial
  misc_feature: MA Experiment 20000632 PARAMETER Experiment Name: Zm_Herbicide-Treatments_P Parameter: Treatment Value: Glean vs. No Treatment
accaaccaaccaaccaacccacagttcccatataggcagccatcggctacacagcctcgcctccgtaagcagagtttgtcgttgtggaggcaggaagagagacgacggcggccatggcgacctccttccaggggacgaccaccaagcgcaccgcctgcgacaagacggtgtaccttgtggacaagctcaccgccgacaaccgcatctaccacaaggcctgcttccgctgccaccactgcaagggcaccctcaagctcgccaactacaactccttcgagggagtgctctactgcaggcctcacttcgaccagctgttcaagaggacagggagcttggacaagagcttcgaaggaactccgaaggttgtcaagccagaaagaaacgttgggaatgagaatgctactaaagtctcaagcgcctttgctggcaccagagagaaatgtgttggatgcagcaagacagtctatccaactgagagggtcactgttaacaacactatgtaccacaagagctgcttcaagtgctgccatggagggtgcaccatcagcccttctaactacattgcgcacgaggggaagctgtactgcaagcaccaccacatccagctgatcaaggaaaggggaacttcagccagcttgagaatgaccacgagaagacatcacaggctgggtcactggaggaggatgaacatgagtattgatcactgagcacaaccacagatgaataatgaatcctcttgcatttccctagagcactatgtatttctgtggcgtggttcgatttcagttttaccaatggaggtcatgtgtgttcagagaacaatgatattgttgtcttgtatctgcatgtaaacgttgttatctttgagtcagatactctacctggtttcaccattttcattggtcagaagatgcctctgcacctacaagacagaactgtaagctcttggtccatcttttgtttaagatgatgtttggc

SEQ ID NO: 13914 - protein, 202 aa, Zea mays subsp. mays
  peptide (1)..(202): Ceres Seq. ID no. 13622792
  misc_feature (40)..(130): Pfam Name: Mucin-like glycoprotein Pfam Description: Mucin-like glycoprotein
TNQPTNPQFPYRQPSATQPRLRKQSLSLWRQEERRRRPWRPPSRGRPPSAPPATRRCTLWTSSPPTTASTTRPASAATTARAPSSSPTTTPSRECSTAGLTSTSCSRGQGAWTRASKELRRLSSQKETLGMRMLLKSQAPLLAPERNVLDAARQSIQLRGSLLTTLCTTRAASSAAMEGAPSALLTTLRTRGSCTASTTTSS

SEQ ID NO: 13915 - protein, 197 aa, Zea mays subsp. mays
  peptide (1)..(197): Ceres Seq. ID no. 13622793
  misc_feature (110)..(167): Pfam Name: LIM domain Pfam Description: LIM domain
  misc_feature (1)..(197): Homolog of NCBI NO: 7715037 NR Description: LIM transcription factor homolog [Zea mays]
  misc_feature (4)..(175): Homolog of NCBI NO: 18565112 NR Description: transcription factor LIM [Populus kitakamiensis]
  misc_feature (4)..(175): Homolog of NCBI NO: 18565116 NR Description: transcription factor LIM [Populus kitakamiensis]
  misc_feature (4)..(175): Homolog of NCBI NO: 15218450 NR Description: transcription factor -related [Arabidopsis >gi|13926190|gb|AAK49575.1|AF370569_1 similar to transcription SF3 (pir|IS37656) [Arabidopsis thaliana]
  misc_feature (4)..(175): Homolog of NCBI NO: 6467903 NR Description: pollen specific LIM domain protein 1a [Nicotiana
  misc_feature (4)..(175): Homolog of NCBI NO: 5932413 NR Description: LIM domain protein WLIM1 [Nicotiana tabacum]
  misc_feature (4)..(175): Homolog of NCBI NO: 5932418 NR Description: LIM domain protein PLIM1 [Nicotiana tabacum]
  misc_feature (4)..(175): Homolog of NCBI NO: 18565124 NR Description: transcription factor LIM [Nicotiana tabacum]
  misc_feature (4)..(175): Homolog of NCBI NO: 6467905 NR Description: pollen specific LIM domain protein 1b [Nicotiana
  misc_feature (4)..(175): Homolog of NCBI NO: 5689136 NR Description: transcription factor Ntlim1 [Nicotiana tabacum]
MATSFQGTTTKRTACDKTVYLVDKLTADNRIYHKACFRCHHCKGTLKLANYNSFEGVLYCRPHFDQLFKRTGSLDKSFEGTPKVVKPERNVGNENATKVSSAFAGTREKCVGCSKTVYPTERVTVNNTMYHKSCFKCCHGGCTISPSNYIAHEGKLYCKHHHIQLIKERGTSASLRMTTRRHHRLGHWRRMNMSIDH

SEQ ID NO: 13916 - protein, 130 aa, Zea mays subsp. mays
  peptide (1)..(130): Ceres Seq. ID no. 13622794
PTNQPTHSSHIGSHRLHSLASVSRVCRCGGRKRDDGGHGDLLPGDDHQAHRLRQDGVPCGQAHRRQPHLPQGLLPLPPLQGHPQARQLQLLRGSALLQASLRPAVQEDRELGQELRRNSEGCQARKKRWE

SEQ ID NO: 13917 - DNA, 2017 bp, Zea mays subsp. mays
  misc_feature (1)..(2017): Ceres Seq. ID no. 13622795
  misc_feature: MA Experiment ID: 108528 Result: Down-regulated in Transcription
  misc_feature: MA Experiment 108528 PARAMETER Experiment Name: Zm_Imbibed_Seeds_P Parameter: Age (day) Value: 5 vs. 2
  misc_feature: MA Experiment 108528 PARAMETER Experiment Name: Zm_Imbibed_Seeds_P Parameter: Organism Value: Zea mays
  misc_feature: MA Experiment 108528 PARAMETER Experiment Name: Zm_Imbibed_Seeds_P Parameter: Plant Line Value: 35A19
  misc_feature: MA Experiment 108528 PARAMETER Experiment Name: Zm_Imbibed_Seeds_P Parameter: Tissue Value: Aerial vs. Embryo
  misc_feature: MA Experiment ID: 108543 Result: Up-regulated in Transcription
  misc_feature: MA Experiment ID: 108687 Result: Up-regulated in Transcription
  misc_feature: MA Experiment 108687 PARAMETER Experiment Name: Zm_Embryos-Flowers__P Parameter: Tissue Value: Embryo vs. Aerial+
atccttctagcttcgatctctatatacctctgtatgtgagtgaggccaatgagagccctcgtagtcgtaagtttcgcttcggcgtgcttgctgctgctgttgcagctcgcaggagcgtcgcatgtcgtctacaactacaaggacctcgaagccgaggctgctgcggcgacggaccaggtgccgccgtccatcgtcaaccccctgctcaggacggggtaccacttccagccccccaagaactggatcaatgatcccaacgcgcccatgtactacaaggggtggtaccatttcttctaccaatacaatcccaagggcgccgtatggggcaacatcgtgtgggcgcactcggtgtcgcgagacctcatcaactgggtggcgctagagccggcgctcagaccaagcatcccgggcgacaggtacggctgctggtccgggtcggcgacggtgctgcccgacggcggcggcccggtgatcatgtacacgggcgtggaccacccggacatcaactaccaggtccagaacgtggcgtacccgaagaacgtgtcggacccgctgctccgggagtgggtgaagccctcgcacaaccccgtcatcgtccccgagggcggcatcaacgcgacgcagttccgcgacccgaccacggcctggcgcggccccggccccgagcagtggcggctgctcgtcggcagcgcggcggggtcgtcgccgccccgcggcgtggcgtacgtgtaccgtagccgcgacttccggcggtggaggcgggtgcggcggccgctgcactcggcgcccacggggatgtgggagtgccctgacttctacccggtgagcaagggcggcgcgccgcgcgcggggctcgagacgtccgtgccgcccggcccaagggtcaagcacgtgctcaagaacagcctcgacctccggcggtacgactactacaccgtgggcacgtaccacccgagggccgagcggtacgtgccggacgaccccgccggcgacgagcaccgcctgcgctacgactacggcaacttctacgcgtccaagacgttctacgacccggccaagcggcgccgcatcctgtggggctgggctaacgagtccgacaccgccgccgacgatgtggctaaaggctgggctggaatccaggcgattccaaggacggtgtggctggaccccagtgggaagcagctgctgcagtggcctatcgaggaggtggaggcgctgagagcaaagtcggtcactctcaggaacagggtaatcaaggcaggacatcacgtcgaggtgaccgggatacaaacggcacaggctgacgtggaggtgagcttcgaagtgtcgccggcggccctggccggtgccgagacgctggacccggcgctggcctacgacgcggagaggctgtgcggcgtgaagcgcgcggacgtgaggggcggcgtggggccgttcgggctgtgggtgctggcctccgccaaccgcaaggagagaaccgcggtgttcttcagggtgttcaagcccgccgccggcgacaagcccgtggtgctcatgtgcaccgaccctaccaagtcgtccctgaacccgaacctgtaccgcccgacatttgcaggatttgtcgacacggacatctcgaacggcaagatatccctgagaagcctgatcgaccggtcggtcgttgagagcttcggagccgggggcaagacctgcatcctctccagggtctacccgtcgctggccatcggcaaggacgctcgcctctacgtgttcaacaacgggagggcgcacgtcaaggtgtcccgtctcaccgcgtgggagatgaagaagccggtcatgaacggggcctgaagatcttgaataaatatatcactcatgcatgacatatagtggcgcctgagaaatctttccttatatatatatatattttagatatatcgtttaagaattcattttctacactaaaagggcgccccgttatgttacaatggtaccagctgcacttctagtaacaaagacaattgactatttgttgttc

SEQ ID NO: 13918 - protein, 593 aa, Zea mays subsp. mays
  peptide (1)..(593): Ceres Seq. ID no. 13622796
  misc_feature (58)..(545): Pfam Name: Glycosyl hydrolases family 32 Pfam Description: Glycosyl hydrolases family 32
  misc_feature (14)..(593): Homolog of NCBI NO: 33694260 NR Description: cell wall invertase 2 [Oryza sativa (indica
  misc_feature (51)..(593): Homolog of NCBI NO: 26986190 NR Description: apoplastic invertase 1 [Hordeum vulgare subsp.
  misc_feature (6)..(593): Homolog of NCBI NO: 33694262 NR Description: cell wall invertase 1 [Oryza sativa (indica
  misc_feature (6)..(593): Homolog of NCBI NO: 20196210 NR Description: cell wall invertase [Oryza sativa (japonica
  misc_feature (1)..(593): Homolog of NCBI NO: 1352469 NR Description: BETA-FRUCTOFURANOSIDASE, CELL WALL ISOZYME
  misc_feature (1)..(593): Homolog of NCBI NO: 4105721 NR Description: cell wall invertase Incw1; beta-fructosidase [Zea
  misc_feature (53)..(593): Homolog of NCBI NO: 31872120 NR Description: cell wall invertase [Saccharum hybrid cultivar]
  misc_feature (2)..(591): Homolog of NCBI NO: 33694264 NR Description: cell wall invertase 3 [Oryza sativa (indica
  misc_feature (54)..(591): Homolog of NCBI NO: 32488653 NR Description: OSJNBa0087O24.3 [Oryza sativa (japonica
  misc_feature (54)..(585): Homolog of NCBI NO: 1352468 NR Description: Beta-fructofuranosidase 1 precursor
MRALVVVSFASACLLLLLQLAGASHVVYNYKDLEAEAAAATDQVPPSIVNPLLRTGYHFQPPKNWINDPNAPMYYKGWYHFFYQYNPKGAVWGNIVWAHSVSRDLINWVALEPALRPSIPGDRYGCWSGSATVLPDGGGPVIMYTGVDHPDINYQVQNVAYPKNVSDPLLREWVKPSHNPVIVPEGGINATQFRDPTTAWRGPGPEQWRLLVGSAAGSSPPRGVAYVYRSRDFRRWRRVRRPLHSAPTGMWECPDFYPVSKGGAPRAGLETSVPPGPRVKHVLKNSLDLRRYDYYTVGTYHPRAERYVPDDPAGDEHRLRYDYGNFYASKTFYDPAKRRRILWGWANESDTAADDVAKGWAGIQAIPRTVWLDPSGKQLLQWPIEEVEALRAKSVTLRNRVIKAGHHVEVTGIQTAQADVEVSFEVSPAALAGAETLDPALAYDAERLCGVKRADVRGGVGPFGLWVLASANRKERTAVFFRVFKPAAGDKPVVLMCTDPTKSSLNPNLYRPTFAGFVDTDISNGKISLRSLIDRSVVESFGAGGKTCILSRVYPSLAIGKDARLYVFNNGRAHVKVSRLTAWEMKKPVMNGA

SEQ ID NO: 13919 - protein, 521 aa, Zea mays subsp. mays
  peptide (1)..(521): Ceres Seq. ID no. 13622797
  misc_feature (1)..(473): Pfam Name: Glycosyl hydrolases family 32 Pfam Description: Glycosyl hydrolases family 32
  misc_feature (1)..(521): Homolog of NCBI NO: 33694260 NR Description: cell wall invertase 2 [Oryza sativa (indica
  misc_feature (1)..(521): Homolog of NCBI NO: 26986190 NR Description: apoplastic invertase 1 [Hordeum vulgare subsp.
  misc_feature (1)..(521): Homolog of NCBI NO: 33694262 NR Description: cell wall invertase 1 [Oryza sativa (indica
  misc_feature (1)..(521): Homolog of NCBI NO: 20196210 NR Description: cell wall invertase [Oryza sativa (japonica
  misc_feature (1)..(521): Homolog of NCBI NO: 1352469 NR Description: BETA-FRUCTOFURANOSIDASE, CELL WALL ISOZYME
  misc_feature (1)..(521): Homolog of NCBI NO: 4105721 NR Description: cell wall invertase Incw1; beta-fructosidase [Zea
  misc_feature (1)..(521): Homolog of NCBI NO: 31872120 NR Description: cell wall invertase [Saccharum hybrid cultivar]
  misc_feature (1)..(519): Homolog of NCBI NO: 33694264 NR Description: cell wall invertase 3 [Oryza sativa (indica
  misc_feature (1)..(519): Homolog of NCBI NO: 32488653 NR Description: OSJNBa0087O24.3 [Oryza sativa (japonica
  misc_feature (1)..(513): Homolog of NCBI NO: 1352468 NR Description: Beta-fructofuranosidase 1 precursor
MYYKGWYHFFYQYNPKGAVWGNIVWAHSVSRDLINWVALEPALRPSIPGDRYGCWSGSATVLPDGGGPVIMYTGVDHPDINYQVQNVAYPKNVSDPLLREWVKPSHNPVIVPEGGINATQFRDPTTAWRGPGPEQWRLLVGSAAGSSPPRGVAYVYRSRDFRRWRRVRRPLHSAPTGMWECPDFYPVSKGGAPRAGLETSVPPGPRVKHVLKNSLDLRRYDYYTVGTYHPRAERYVPDDPAGDEHRLRYDYGNFYASKTFYDPAKRRRILWGWANESDTAADDVAKGWAGIQAIPRTVWLDPSGKQLLQWPIEEVEALRAKSVTLRNRVIKAGHHVEVTGIQTAQADVEVSFEVSPAALAGAETLDPALAYDAERLCGVKRADVRGGVGPFGLWVLASANRKERTAVFFRVFKPAAGDKPVVLMCTDPTKSSLNPNLYRPTFAGFVDTDISNGKISLRSLIDRSVVESFGAGGKTCILSRVYPSLAIGKDARLYVFNNGRAHVKVSRLTAWEMKKPVMNGA

SEQ ID NO: 13920 - protein, 451 aa, Zea mays subsp. mays
  peptide (1)..(451): Ceres Seq. ID no. 13622798
  misc_feature (1)..(403): Pfam Name: Glycosyl hydrolases family 32 Pfam Description: Glycosyl hydrolases family 32
  misc_feature (1)..(451): Homolog of NCBI NO: 33694260 NR Description: cell wall invertase 2 [Oryza sativa (indica
  misc_feature (1)..(451): Homolog of NCBI NO: 26986190 NR Description: apoplastic invertase 1 [Hordeum vulgare subsp.
  misc_feature (1)..(451): Homolog of NCBI NO: 33694262 NR Description: cell wall invertase 1 [Oryza sativa (indica
  misc_feature (1)..(451): Homolog of NCBI NO: 20196210 NR Description: cell wall invertase [Oryza sativa (japonica
  misc_feature (1)..(451): Homolog of NCBI NO: 1352469 NR Description: BETA-FRUCTOFURANOSIDASE, CELL WALL ISOZYME
  misc_feature (1)..(451): Homolog of NCBI NO: 4105721 NR Description: cell wall invertase Incw1; beta-fructosidase [Zea
  misc_feature (1)..(451): Homolog of NCBI NO: 31872120 NR Description: cell wall invertase [Saccharum hybrid cultivar]
  misc_feature (1)..(449): Homolog of NCBI NO: 33694264 NR Description: cell wall invertase 3 [Oryza sativa (indica
  misc_feature (1)..(449): Homolog of NCBI NO: 32488653 NR Description: OSJNBa0087O24.3 [Oryza sativa (japonica
  misc_feature (1)..(443): Homolog of NCBI NO: 1352468 NR Description: Beta-fructofuranosidase 1 precursor
MYTGVDHPDINYQVQNVAYPKNVSDPLLREWVKPSHNPVIVPEGGINATQFRDPTTAWRGPGPEQWRLLVGSAAGSSPPRGVAYVYRSRDFRRWRRVRRPLHSAPTGMWECPDFYPVSKGGAPRAGLETSVPPGPRVKHVLKNSLDLRRYDYYTVGTYHPRAERYVPDDPAGDEHRLRYDYGNFYASKTFYDPAKRRRILWGWANESDTAADDVAKGWAGIQAIPRTVWLDPSGKQLLQWPIEEVEALRAKSVTLRNRVIKAGHHVEVTGIQTAQADVEVSFEVSPAALAGAETLDPALAYDAERLCGVKRADVRGGVGPFGLWVLASANRKERTAVFFRVFKPAAGDKPVVLMCTDPTKSSLNPNLYRPTFAGFVDTDISNGKISLRSLIDRSVVESFGAGGKTCILSRVYPSLAIGKDARLYVFNNGRAHVKVSRLTAWEMKKPVMNGA

SEQ ID NO: 13921 - DNA, 1239 bp, Zea mays subsp. mays
  misc_feature (1)..(1239): Ceres Seq. ID no. 12379187
  misc_feature: MA Experiment ID: 108522 Result: Down-regulated in Transcription
  misc_feature: MA Experiment 108522 PARAMETER Experiment Name: Zm_42deg_Heat_P Parameter: Age (day) Value: 8
  misc_feature: MA Experiment 108522 PARAMETER Experiment Name: Zm_42deg_Heat_P Parameter: Organism Value: Zea mays
  misc_feature: MA Experiment 108522 PARAMETER Experiment Name: Zm_42deg_Heat_P Parameter: Plant Line Value: 35A19
  misc_feature: MA Experiment 108522 PARAMETER Experiment Name: Zm_42deg_Heat_P Parameter: Temperature (deg C) Value: 42 vs. 22
  misc_feature: MA Experiment 108522 PARAMETER Experiment Name: Zm_42deg_Heat_P Parameter: Timepoint (hr) Value: 1
  misc_feature: MA Experiment 108522 PARAMETER Experiment Name: Zm_42deg_Heat_P Parameter: Tissue Value: Aerial
  misc_feature: MA Experiment ID: 20000535 Result: Up-regulated in Transcription
  misc_feature: MA Experiment 20000535 PARAMETER Experiment Name: Zm_Hybrid_Seed_Dev_P Parameter: DAP Value: 30 vs. 12
  misc_feature: MA Experiment 20000535 PARAMETER Experiment Name: Zm_Hybrid_Seed_Dev_P Parameter: Organism Value: Zea mays
  misc_feature: MA Experiment 20000535 PARAMETER Experiment Name: Zm_Hybrid_Seed_Dev_P Parameter: Plant Line Value: 35A19
  misc_feature: MA Experiment 20000535 PARAMETER Experiment Name: Zm_Hybrid_Seed_Dev_P Parameter: Tissue Value: Embryo vs. Unfert Floret
acgagccttacgacatcagcaacaaaccaaacaaaaggacacttcgtgagagaacacgtcggtggctcggtgtcagcagcgagccagcgacggagccccaccagacaccgcagtaccgcaccgcactgcccatggacgcacgcctcccggcgcgcccaccccgcccgcgtgcgcgtgcccctgtccgcctcccgtttgccgcctccaccgcaacgcggcgcgcggggtggtggtgccctcgcgatcctcgtgtcgatcccagcggcaggggtgcctgtgcctttgcttctcctggccgttgcccgcgcctcgcggtcgcgcacctgaaccggagccccgcgtcaaatctagggttgcatccgcgccgccccctcctcccgagactcccagcggctggaaccagaacgagggtgacaggcgacgaaagctgcgagggacgcccctcgtcgaatgcactggcgaccgttccgtcgaggagcagccggagcacgcaggagttgagggaaaagcttggaaaatgtcatccaccgtgccgaagtcatcaaatatcttctggcacgattgtccagttggcaagactgatcgccagaacgtactcaagcagaaaggctgtgttgtctggattacaggccttagtggttcaggtaaaagtaccttggcatgtacattaggccgtgagctccacacaagagggaagcttgcatatgtccttgacggtgataacttaagacatggtctgaacaaggatcttggcttcaaagctgaagaccgtgctgaaaatataaggagagttgtagcaaagttatttgcagatgcgggccttgtatgtattgcaagtttgatatctccacataggagagaccgtgaatcttgccgtgcattgttgtctgatagtagcttcattgaagttttcttgaacatgtccttggaattatgtgaagcaagagatccaaagggcctctataagcttgctcgtgcaggaaaaataaagggttttacaggaatagatgacccttatgaagcaccactgaattgtgagattgagatcaaagaggtagatggtgtatgccctccgcctgctgagatggcagggcaagttgttacttaccttgaggagaaaggcttcctgcacgagtaggctgaatccaagcaacatctggggaagatttcagtaagactagcgcagaataagtcaaaggcgctggcagttacggtatagcagttgcatagattggcctc

SEQ ID NO: 13922 - protein, 222 aa, Zea mays subsp. mays
  peptide (1)..(222): Ceres Seq. ID no. 12379188
EPYDISNKPNKRTLRERTRRWLGVSSEPATEPHQTPQYRTALPMDARLPARPPRPRARAPVRLPFAASTATRRAGWWCPRDPRVDPSGRGACAFASPGRCPRLAVAHLNRSPASNLGLHPRRPLLPRLPAAGTRTRVTGDESCEGRPSSNALATVPSRSSRSTQELREKLGKCHPPCRSHQISSGTIVQLARLIARTYSSRKAVLSGLQALVVQVKVPWHVH

SEQ ID NO: 13923 - protein, 206 aa, Zea mays subsp. mays
  peptide (1)..(206): Ceres Seq. ID no. 12379189
  misc_feature (30)..(183): Pfam Name: Adenylylsulphate kinase Pfam Description: Adenylylsulphate kinase
  misc_feature (1)..(206): Homolog of NCBI NO: 6563285 NR Description: adenosine-5'-phosphosulfate kinase [Zea mays]
  misc_feature (1)..(206): Homolog of NCBI NO: 34393551 NR Description: putative adenosine-5'-phosphosulfate kinase
  misc_feature (3)..(204): Homolog of NCBI NO: 15228666 NR Description: putative adenylylsulfate kinase; protein id: [Arabidopsis thaliana] >gi|6006852|gb|AAF00628.1|AC009540_5
  misc_feature (1)..(204): Homolog of NCBI NO: 15225999 NR Description: putative adenosine phosphosulfate kinase; protein At2g14750.1, supported by cDNA: 14216., supported by cDNA: supported by cDNA: gi_450234 [Arabidopsis thaliana]
  misc_feature (1)..(204): Homolog of NCBI NO: 21553403 NR Description: putative adenosine phosphosulfate kinase
  misc_feature (1)..(204): Homolog of NCBI NO: 7387809 NR Description: Adenylylsulfate kinase, chloroplast precursor
  misc_feature (1)..(204): Homolog of NCBI NO: 9757873 NR Description: adenylylsulfate kinase-like protein [Arabidopsis
  misc_feature (7)..(204): Homolog of NCBI NO: 15236087 NR Description: adenosine-5-phosphosulfate-kinase; protein id: supported by cDNA: gi_18087562, supported by cDNA: gi_20453396, by cDNA: gi_2829132 [Arabidopsis thaliana]
  misc_feature (1)..(178): Homolog of NCBI NO: 18425199 NR Description: adenylylsulfate kinase-like protein; protein id: supported by cDNA: 125039. [Arabidopsis thaliana] putative adenylylsulfate kinase [Arabidopsis thaliana]
  misc_feature (1)..(178): Homolog of NCBI NO: 21537248 NR Description: adenylylsulfate kinase-like protein [Arabidopsis
MSSTVPKSSNIFWHDCPVGKTDRQNVLKQKGCVVWITGLSGSGKSTLACTLGRELHTRGKLAYVLDGDNLRHGLNKDLGFKAEDRAENIRRVVAKLFADAGLVCIASLISPHRRDRESCRALLSDSSFIEVFLNMSLELCEARDPKGLYKLARAGKIKGFTGIDDPYEAPLNCEIEIKEVDGVCPPPAEMAGQVVTYLEEKGFLHE

SEQ ID NO: 13924 - protein, 179 aa, Zea mays subsp. mays
  peptide (1)..(179): Ceres Seq. ID no. 12379190
MDARLPARPPRPRARAPVRLPFAASTATRRAGWWCPRDPRVDPSGRGACAFASPGRCPRLAVAHLNRSPASNLGLHPRRPLLPRLPAAGTRTRVTGDESCEGRPSSNALATVPSRSSRSTQELREKLGKCHPPCRSHQISSGTIVQLARLIARTYSSRKAVLSGLQALVVQVKVPWHVH

SEQ ID NO: 13925 - DNA, 2059 bp, Zea mays subsp. mays
  misc_feature (1)..(2059): Ceres Seq. ID no. 12450527
  misc_feature: MA Experiment ID: 108522 Result: Down-regulated in Transcription
  misc_feature: MA Experiment 108522 PARAMETER Experiment Name: Zm_42deg_Heat_P Parameter: Age (day) Value: 8
  misc_feature: MA Experiment 108522 PARAMETER Experiment Name: Zm_42deg_Heat_P Parameter: Organism Value: Zea mays
  misc_feature: MA Experiment 108522 PARAMETER Experiment Name: Zm_42deg_Heat_P Parameter: Plant Line Value: 35A19
  misc_feature: MA Experiment 108522 PARAMETER Experiment Name: Zm_42deg_Heat_P Parameter: Temperature (deg C) Value: 42 vs. 22
  misc_feature: MA Experiment 108522 PARAMETER Experiment Name: Zm_42deg_Heat_P Parameter: Timepoint (hr) Value: 1
  misc_feature: MA Experiment 108522 PARAMETER Experiment Name: Zm_42deg_Heat_P Parameter: Tissue Value: Aerial
  misc_feature: MA Experiment ID: 108523 Result: Up-regulated in Transcription
  misc_feature: MA Experiment 108523 PARAMETER Experiment Name: Zm_42deg_Heat_P Parameter: Age (day) Value: 8
  misc_feature: MA Experiment 108523 PARAMETER Experiment Name: Zm_42deg_Heat_P Parameter: Organism Value: Zea mays
  misc_feature: MA Experiment 108523 PARAMETER Experiment Name: Zm_42deg_Heat_P Parameter: Plant Line Value: 35A19
  misc_feature: MA Experiment 108523 PARAMETER Experiment Name: Zm_42deg_Heat_P Parameter: Temperature (deg C) Value: 42 vs. 22
  misc_feature: MA Experiment 108523 PARAMETER Experiment Name: Zm_42deg_Heat_P Parameter: Timepoint (hr) Value: 6
  misc_feature: MA Experiment 108523 PARAMETER Experiment Name: Zm_42deg_Heat_P Parameter: Tissue Value: Aerial
  misc_feature: MA Experiment ID: 108534 Result: Down-regulated in Transcription
  misc_feature: MA Experiment 108534 PARAMETER Experiment Name: Zm_4deg_Cold_P Parameter: Age (hr) Value: 8
  misc_feature: MA Experiment 108534 PARAMETER Experiment Name: Zm_4deg_Cold_P Parameter: Organism Value: Zea mays
  misc_feature: MA Experiment 108534 PARAMETER Experiment Name: Zm_4deg_Cold_P Parameter: Plant Line Value: 35A19
  misc_feature: MA Experiment 108534 PARAMETER Experiment Name: Zm_4deg_Cold_P Parameter: Temperature (deg C) Value: 4 vs. 22
  misc_feature: MA Experiment 108534 PARAMETER Experiment Name: Zm_4deg_Cold_P Parameter: Timepoint (hr) Value: 6
  misc_feature: MA Experiment 108534 PARAMETER Experiment Name: Zm_4deg_Cold_P Parameter: Tissue Value: Aerial
  misc_feature: MA Experiment ID: 108535 Result: Up-regulated in Transcription
  misc_feature: MA Experiment 108535 PARAMETER Experiment Name: Zm_Meristem_P Parameter: Age (day) Value: 8
  misc_feature: MA Experiment 108535 PARAMETER Experiment Name: Zm_Meristem_P Parameter: Organism Value: Zea mays
  misc_feature: MA Experiment 108535 PARAMETER Experiment Name: Zm_Meristem_P Parameter: Plant Line Value: 35A19
  misc_feature: MA Experiment 108535 PARAMETER Experiment Name: Zm_Meristem_P Parameter: Tissue Value: Root Meristem vs. Above Root Meristem
  misc_feature: MA Experiment ID: 108544 Result: Down-regulated in Transcription
  misc_feature: MA Experiment ID: 20000487 Result: Up-regulated in Transcription
  misc_feature: MA Experiment 20000487 PARAMETER Experiment Name: Zm_50mM_NH4NO3_L_to_H_P Parameter: Organism Value: Zea mays
  misc_feature: MA Experiment 20000487 PARAMETER Experiment Name: Zm_50mM_NH4NO3_L_to_H_P Parameter: Timepoint (hr) Value: 4
  misc_feature: MA Experiment 20000487 PARAMETER Experiment Name: Zm_50mM_NH4NO3_L_to_H_P Parameter: Tissue Value: Leaves
  misc_feature: MA Experiment 20000487 PARAMETER Experiment Name: Zm_50mM_NH4NO3_L_to_H_P Parameter: Treatment Value: 50mM NH4NO3 vs. 100mM Mannitol
  misc_feature: MA Experiment ID: 20000488 Result: Up-regulated in Transcription
  misc_feature: MA Experiment 20000488 PARAMETER Experiment Name: Zm_50mM_NH4NO3_L_to_H_P Parameter: Organism Value: Zea mays
  misc_feature: MA Experiment 20000488 PARAMETER Experiment Name: Zm_50mM_NH4NO3_L_to_H_P Parameter: Timepoint (hr) Value: 8
  misc_feature: MA Experiment 20000488 PARAMETER Experiment Name: Zm_50mM_NH4NO3_L_to_H_P Parameter: Tissue Value: Leaves
  misc_feature: MA Experiment 20000488 PARAMETER Experiment Name: Zm_50mM_NH4NO3_L_to_H_P Parameter: Treatment Value: 50mM NH4NO3 vs. 100mM Mannitol
  misc_feature: MA Experiment ID: 20000492 Result: Up-regulated in Transcription
  misc_feature: MA Experiment 20000492 PARAMETER Experiment Name: Zm_Hybrid_Seed_Dev_P Parameter: DAP Value: 12
  misc_feature: MA Experiment 20000492 PARAMETER Experiment Name: Zm_Hybrid_Seed_Dev_P Parameter: Organism Value: Zea mays
  misc_feature: MA Experiment 20000492 PARAMETER Experiment Name: Zm_Hybrid_Seed_Dev_P Parameter: Plant Line Value: 35A19
  misc_feature: MA Experiment 20000492 PARAMETER Experiment Name: Zm_Hybrid_Seed_Dev_P Parameter: Tissue Value: Fert Kernel vs. Unfert Floret
  misc_feature: MA Experiment ID: 20000626 Result: Up-regulated in Transcription
  misc_feature: MA Experiment 20000626 PARAMETER Experiment Name: Zm_Herbicide-Treatments_P Parameter: Timepoint (hr) Value: 12
  misc_feature: MA Experiment 20000626 PARAMETER Experiment Name: Zm_Herbicide-Treatments_P Parameter: Tissue Value: Aerial
  misc_feature: MA Experiment 20000626 PARAMETER Experiment Name: Zm_Herbicide-Treatments_P Parameter: Treatment Value: Roundup vs. No Treatment
  misc_feature: MA Experiment ID: 20000632 Result: Down-regulated in Transcription
  misc_feature: MA Experiment 20000632 PARAMETER Experiment Name: Zm_Herbicide-Treatments_P Parameter: Timepoint (hr) Value: 4
  misc_feature: MA Experiment 20000632 PARAMETER Experiment Name: Zm_Herbicide-Treatments_P Parameter: Tissue Value: Aerial
  misc_feature: MA Experiment 20000632 PARAMETER Experiment Name: Zm_Herbicide-Treatments_P Parameter: Treatment Value: Glean vs. No Treatment
  misc_feature: MA Experiment ID: 20001605 Result: Up-regulated in Transcription
  misc_feature: MA Experiment 20001605 PARAMETER Experiment Name: Zm_50ppm_KNO3_L-to-H_P Parameter: Age (day) Value: 19
  misc_feature: MA Experiment 20001605 PARAMETER Experiment Name: Zm_50ppm_KNO3_L-to-H_P Parameter: Organism Value: Zea mays
  misc_feature: MA Experiment 20001605 PARAMETER Experiment Name: Zm_50ppm_KNO3_L-to-H_P Parameter: Plant Line Value: 35A19
  misc_feature: MA Experiment 20001605 PARAMETER Experiment Name: Zm_50ppm_KNO3_L-to-H_P Parameter: Timepoint (hr) Value: 4
  misc_feature: MA Experiment 20001605 PARAMETER Experiment Name: Zm_50ppm_KNO3_L-to-H_P Parameter: Tissue Value: Shoots
  misc_feature: MA Experiment 20001605 PARAMETER Experiment Name: Zm_50ppm_KNO3_L-to-H_P Parameter: Treatment Value: 50ppm KNO3 vs. 50ppm KCl
aaaaaagttaaaccctagtatctccccgcgtcgccgcacacatcgcccgttcgcacgcgccgtccccctggaggatcgagccaccctcctcacctggaatggaggacggcctggaggagccgccgcccgcggggagcgcggccgccaacgccagctccacctccggcggcggcagcggcgggagcaaggggtccccgtgcgaggagtgtggggagcagccgtggaagtaccggtgccccgggtgcggccgcctcacctgcagcctcccctgcgtgcaggcccacaagcgccgtaccgcctgcacgggcaagcgcccacgcacggaccccgtcccgctcgcccgattcgacgacaaccagctcatatccgattacaacttgctggaggaggtgaagcaggcccacgattccgcgcacaggctcatcggcggcttcggccgcaactacgggggacggggatcaggcggcgcccagctgcccagatggctgttctacctcagcaaggcggcgcaccgccgtggtgtcaagctctgctttctccccaggggcatggccaggagagagcagaatcgatcgcaacacaattacaggaaggattgcatattctggacacttgagtggaaattcaattcaactgatgttgtcctaactgatcatgggatagatgagcacacaaccttgctctctctattggaaaaacatcttattcctggcccttggaaagatcagcttacacaatatcggaacaccaaattacatgatctgaaactgttcattcaaaagtgtgccaagcaatcagagtcaccgtaccgcctactcaatatagaagagccattgcgcccacagctgaggggtatacttgttgtggagtacccaactatcaatgtatttcttccgtcagacaattgtgactttgaaatggagaaaatggtgaacagacttcctaaagatggaaaaggccctggcagcatgactgacgagccacctgtagagggcagcaagtttcatgaggaggaaatagaggaaggcgaactttcacctgaaactgagattatagatctcaaggaccatggaacttcaaatgcctgcaaaatttctccagcagatgttacaagtgaatcaaagatagttaacaatgtcgattcttctgtgctctcataccccggttgtcaagctcaagcattacatggtcagccgaaaggactgaatcaatatagcaagatatcaccaaatggtacctctgggcctgcagaaactaaatcccgcatggaagtctgtcctctggatatggagaagacaagggaaagcgggttgtcctcagagggacgcgttgtagatctgaaggggtatggaatttcatatcctgtcagcactgcagaggcaggaggtgcagctctatcgaagatagacaccaaggcaacatatcccttagtaccatcttccaccagcattgtagtatctgatggcgcgacgggtcctcagctggaacacagtcagcaaaacaaacggacgccaagctcgactcctgaagcgctgaaaaggaaatcttgcatgaaagtttatccgctggacattgacgagggattgttccccgaggtacccgacttggcctttgagcaagagatgttggatacctacccagagctcttcgagaacatggatgtcgatgacttcttaagctgcgattttgcaatggtgaacagggacgaaccagtagatgcaacgtctgggttaccgagggacgacttggaggaaggggagattccaacattgtgaaggaagaacgtgatgcttcacaggatgttgcactcgagcggaagagtctgtgtcgtgcttttctaggacatgtcatgcgacgtaatggtagaacactcacatgtacctagcttgtatagctgcaacttgaaactatgcagcctcttttattctttatcgttttctttagtctcgctgttgtgttatgtagctctgccagagcagcaagaaattttggggttctaattttgtaagagatgatggctgtttggggatatggatgtcgaggatttctcaagctgtgc

SEQ ID NO: 13926 - protein, 558 aa, Zea mays subsp. mays
  peptide (1)..(558): Ceres Seq. ID no. 12450528
  misc_feature (233)..(351): Homolog of NCBI NO: 25406822 NR Description: hypothetical protein [imported] - Arabidopsis >gi|7211996|gb|AAF40467.1|AC004809_25 #ESTs gb|N96604, gb|T75857 and gb|H77171 come from this gene. [Arabidopsis
  misc_feature (89)..(202): Homolog of NCBI NO: 25406822 NR Description: hypothetical protein [imported] - Arabidopsis >gi|7211996|gb|AAF40467.1|AC004809_25 #ESTs gb|N96604, gb|T75857 and gb|H77171 come from this gene. [Arabidopsis
  misc_feature (32)..(274): Homolog of NCBI NO: 7021009 NR Description: unnamed protein product [Homo sapiens]
  misc_feature (32)..(274): Homolog of NCBI NO: 7021062 NR Description: unnamed protein product [Homo sapiens]
  misc_feature (32)..(274): Homolog of NCBI NO: 20149643 NR Description: hypothetical protein FLJ20729 [Homo sapiens]
  misc_feature (32)..(200): Homolog of NCBI NO: 12060843 NR Description: serologically defined breast cancer antigen
  misc_feature (161)..(351): Homolog of NCBI NO: 15220356 NR Description: unknown protein; protein id: At1g04940.1
  misc_feature (32)..(157): Homolog of NCBI NO: 34860945 NR Description: similar to hypothetical protein FLJ20729 [Rattus
  misc_feature (132)..(264): Homolog of NCBI NO: 28829432 NR Description: hypothetical protein [Dictyostelium discoideum]
  misc_feature (28)..(91): Homolog of NCBI NO: 28829432 NR Description: hypothetical protein [Dictyostelium discoideum]
MEDGLEEPPPAGSAAANASSTSGGGSGGSKGSPCEECGEQPWKYRCPGCGRLTCSLPCVQAHKRRTACTGKRPRTDPVPLARFDDNQLISDYNLLEEVKQAHDSAHRLIGGFGRNYGGRGSGGAQLPRWLFYLSKAAHRRGVKLCFLPRGMARREQNRSQHNYRKDCIFWTLEWKFNSTDVVLTDHGIDEHTTLLSLLEKHLIPGPWKDQLTQYRNTKLHDLKLFIQKCAKQSESPYRLLNIEEPLRPQLRGILVVEYPTINVFLPSDNCDFEMEKMVNRLPKDGKGPGSMTDEPPVEGSKFHEEEIEEGELSPETEIIDLKDHGTSNACKISPADVTSESKIVNNVDSSVLSYPGCQAQALHGQPKGLNQYSKISPNGTSGPAETKSRMEVCPLDMEKTRESGLSSEGRVVDLKGYGISYPVSTAEAGGAALSKIDTKATYPLVPSSTSIVVSDGATGPQLEHSQQNKRTPSSTPEALKRKSCMKVYPLDIDEGLFPEVPDLAFEQEMLDTYPELFENMDVDDFLSCDFAMVNRDEPVDATSGLPRDDLEEGEIPTL

SEQ ID NO: 13927 - protein, 408 aa, Zea mays subsp. mays
  peptide (1)..(408): Ceres Seq. ID no. 12450529
  misc_feature (83)..(201): Homolog of NCBI NO: 25406822 NR Description: hypothetical protein [imported] - Arabidopsis >gi|7211996|gb|AAF40467.1|AC004809_25 #ESTs gb|N96604, gb|T75857 and gb|H77171 come from this gene. [Arabidopsis
  misc_feature (1)..(52): Homolog of NCBI NO: 25406822 NR Description: hypothetical protein [imported] - Arabidopsis >gi|7211996|gb|AAF40467.1|AC004809_25 #ESTs gb|N96604, gb|T75857 and gb|H77171 come from this gene. [Arabidopsis
  misc_feature (1)..(124): Homolog of NCBI NO: 7021009 NR Description: unnamed protein product [Homo sapiens]
  misc_feature (1)..(124): Homolog of NCBI NO: 7021062 NR Description: unnamed protein product [Homo sapiens]
  misc_feature (1)..(124): Homolog of NCBI NO: 20149643 NR Description: hypothetical protein FLJ20729 [Homo sapiens]
  misc_feature (1)..(50): Homolog of NCBI NO: 12060843 NR Description: serologically defined breast cancer antigen
  misc_feature (11)..(201): Homolog of NCBI NO: 15220356 NR Description: unknown protein; protein id: At1g04940.1
  misc_feature (1)..(114): Homolog of NCBI NO: 28829432 NR Description: hypothetical protein [Dictyostelium discoideum]
  misc_feature (1)..(204): Homolog of NCBI NO: 19075195 NR Description: possible zinc-finger protein [Schizosaccharomyces
  misc_feature (1)..(113): Homolog of NCBI NO: 24641569 NR Description: CG1463-PA [Drosophila melanogaster]
MARREQNRSQHNYRKDCIFWTLEWKFNSTDVVLTDHGIDEHTTLLSLLEKHLIPGPWKDQLTQYRNTKLHDLKLFIQKCAKQSESPYRLLNIEEPLRPQLRGILVVEYPTINVFLPSDNCDFEMEKMVNRLPKDGKGPGSMTDEPPVEGSKFHEEEIEEGELSPETEIIDLKDHGTSNACKISPADVTSESKIVNNVDSSVLSYPGCQAQALHGQPKGLNQYSKISPNGTSGPAETKSRMEVCPLDMEKTRESGLSSEGRVVDLKGYGISYPVSTAEAGGAALSKIDTKATYPLVPSSTSIVVSDGATGPQLEHSQQNKRTPSSTPEALKRKSCMKVYPLDIDEGLFPEVPDLAFEQEMLDTYPELFENMDVDDFLSCDFAMVNRDEPVDATSGLPRDDLEEGEIPTL

SEQ ID NO: 13928 - protein, 285 aa, Zea mays subsp. mays
  peptide (1)..(285): Ceres Seq. ID no. 12450530
  misc_feature (1)..(78): Homolog of NCBI NO: 25406822 NR Description: hypothetical protein [imported] - Arabidopsis >gi|7211996|gb|AAF40467.1|AC004809_25 #ESTs gb|N96604, gb|T75857 and gb|H77171 come from this gene. [Arabidopsis
  misc_feature (1)..(78): Homolog of NCBI NO: 15220356 NR Description: unknown protein; protein id: At1g04940.1
  misc_feature (1)..(81): Homolog of NCBI NO: 19075195 NR Description: possible zinc-finger protein [Schizosaccharomyces
MEKMVNRLPKDGKGPGSMTDEPPVEGSKFHEEEIEEGELSPETEIIDLKDHGTSNACKISPADVTSESKIVNNVDSSVLSYPGCQAQALHGQPKGLNQYSKISPNGTSGPAETKSRMEVCPLDMEKTRESGLSSEGRVVDLKGYGISYPVSTAEAGGAALSKIDTKATYPLVPSSTSIVVSDGATGPQLEHSQQNKRTPSSTPEALKRKSCMKVYPLDIDEGLFPEVPDLAFEQEMLDTYPELFENMDVDDFLSCDFAMVNRDEPVDATSGLPRDDLEEGEIPTL

SEQ ID NO: 13929 - DNA, 2160 bp, Zea mays subsp. mays
  misc_feature (1)..(2160): Ceres Seq. ID no. 12435948
  misc_feature: MA Experiment ID: 108528 Result: Down-regulated in Transcription
  misc_feature: MA Experiment 108528 PARAMETER Experiment Name: Zm_Imbibed_Seeds_P Parameter: Age (day) Value: 5 vs. 2
  misc_feature: MA Experiment 108528 PARAMETER Experiment Name: Zm_Imbibed_Seeds_P Parameter: Organism Value: Zea mays
  misc_feature: MA Experiment 108528 PARAMETER Experiment Name: Zm_Imbibed_Seeds_P Parameter: Plant Line Value: 35A19
  misc_feature: MA Experiment 108528 PARAMETER Experiment Name: Zm_Imbibed_Seeds_P Parameter: Tissue Value: Aerial vs. Embryo
  misc_feature: MA Experiment ID: 108535 Result: Down-regulated in Transcription
  misc_feature: MA Experiment 108535 PARAMETER Experiment Name: Zm_Meristem_P Parameter: Age (day) Value: 8
  misc_feature: MA Experiment 108535 PARAMETER Experiment Name: Zm_Meristem_P Parameter: Organism Value: Zea mays
  misc_feature: MA Experiment 108535 PARAMETER Experiment Name: Zm_Meristem_P Parameter: Plant Line Value: 35A19
  misc_feature: MA Experiment 108535 PARAMETER Experiment Name: Zm_Meristem_P Parameter: Tissue Value: Root Meristem vs. Above Root Meristem
  misc_feature: MA Experiment ID: 108536 Result: Up-regulated in Transcription
  misc_feature: MA Experiment 108536 PARAMETER Experiment Name: Zm_Meristem_P Parameter: Age (day) Value: 8
  misc_feature: MA Experiment 108536 PARAMETER Experiment Name: Zm_Meristem_P Parameter: Organism Value: Zea mays
  misc_feature: MA Experiment 108536 PARAMETER Experiment Name: Zm_Meristem_P Parameter: Plant Line Value: 35A19
  misc_feature: MA Experiment 108536 PARAMETER Experiment Name: Zm_Meristem_P Parameter: Tissue Value: Shoot Meristem vs. Above Shoot Meristem
  misc_feature: MA Experiment ID: 108543 Result: Up-regulated in Transcription
  misc_feature: MA Experiment ID: 108545 Result: Down-regulated in Transcription
  misc_feature: MA Experiment 108545 PARAMETER Experiment Name: Zm_Imbibed_Seeds_P Parameter: Age (day) Value: 3 vs. 2
  misc_feature: MA Experiment 108545 PARAMETER Experiment Name: Zm_Imbibed_Seeds_P Parameter: Organism Value: Zea mays
  misc_feature: MA Experiment 108545 PARAMETER Experiment Name: Zm_Imbibed_Seeds_P Parameter: Plant Line Value: 35A19
  misc_feature: MA Experiment 108545 PARAMETER Experiment Name: Zm_Imbibed_Seeds_P Parameter: Tissue Value: Aerial vs. Embryo
  misc_feature: MA Experiment ID: 108689 Result: Down-regulated in Transcription
  misc_feature: MA Experiment 108689 PARAMETER Experiment Name: Zm_Drought_Roots_P Parameter: Age (day) Value: 9
  misc_feature: MA Experiment 108689 PARAMETER Experiment Name: Zm_Drought_Roots_P Parameter: Organism Value: Zea mays
  misc_feature: MA Experiment 108689 PARAMETER Experiment Name: Zm_Drought_Roots_P Parameter: Plant Line Value: 35A19
  misc_feature: MA Experiment 108689 PARAMETER Experiment Name: Zm_Drought_Roots_P Parameter: Timepoint (hr) Value: 24
  misc_feature: MA Experiment 108689 PARAMETER Experiment Name: Zm_Drought_Roots_P Parameter: Tissue Value: Roots
  misc_feature: MA Experiment 108689 PARAMETER Experiment Name: Zm_Drought_Roots_P Parameter: Treatment Value: Drought vs. No Drought
  misc_feature: MA Experiment ID: 20000487 Result: Up-regulated in Transcription
  misc_feature: MA Experiment 20000487 PARAMETER Experiment Name: Zm_50mM_NH4NO3_L_to_H_P Parameter: Organism Value: Zea mays
  misc_feature: MA Experiment 20000487 PARAMETER Experiment Name: Zm_50mM_NH4NO3_L_to_H_P Parameter: Timepoint (hr) Value: 4
  misc_feature: MA Experiment 20000487 PARAMETER Experiment Name: Zm_50mM_NH4NO3_L_to_H_P Parameter: Tissue Value: Leaves
  misc_feature: MA Experiment 20000487 PARAMETER Experiment Name: Zm_50mM_NH4NO3_L_to_H_P Parameter: Treatment Value: 50mM NH4NO3 vs. 100mM Mannitol
atcctttccactactctcgtcagcttgctcagctcagctagctagctagctttcccctccctgctgcaatgcaagcttgcccaacccaataagctaagcaagcactcatcacacactctctacttgctagctagccgcccttagcttcggacgcgacatctatcatcggccaagaaacggagcagatcggtcggccgccgacatgggggatcacgctgagatgttgcatgccactccggccatatacaacggcgccggcgctgcccctcgtggtggctggtggagtacggccgtgcccgcgaccacgtgctcgacggagctggccggcttcaccacgtggtcgtccgccctggctgctagctacgacctggcggcggagggggcaaaggccaacaagagcgccaccaccgcctcgtcggagtcgcccgggaacaacagctccgtgaccttccaagaaccggccggcggcgtcggaaccgccgtggtgcagcagcctcttgctggttgcgctgactggacgcatccctatttgagcagcggcgctgctactttgcatgggtttatgcaagatggtcaccagcaggacatgagctcatcgacaactgagcagagccccatggccgcatcaagcctgataatgaacccttcatccaataacctagccctggccctgcaacaaggtcaccatcaccaagagccggaccaccagcagatgctgtccaacttcggcggctccgaggccgagctgctcctgtcgccgacgacctcaccctacgggttccagtcgtctctgctgagaagcttcatggagccgacagcggcggcggcgaagccggctttgccggggtaccggcagcagtatgaccagtaccagcagatgggcatgggccaggcgaggtttgcaccggccggcggagctgccagcagggaggcactccagttcaccaacgacgcgccgtcctggaacccttctgctgctgcggctgggttcggcgtgccgccggcgccggcgccggttgaccaagctagcagcagcgtacgttctgtgaaaccatcgccggcggcgcgtgctactgcaacccttgcattaaagactgcgttggaaggagtaggagagtctgctagctccatcatcaccaagaagaaggcaaacggagagctggcgccggccttcaagaaatcgaggctccagacgccgtcgccgttgccaacgttcaaggttaggaaggagaaggtaggggacagggtcactgcactccaacaactcgtcgccccttttggaaagacggatacagcatcggtgctccatgagaccatcgagtacatcaagttcctccacgaccaggtcggggtccttagtgctccatacttgaagaacaacggccatcaagtgccctacctgaagagatcaagtcctgacaggtccgaggacgacagcagccatgccggcgagagatcactcaagggccgggggctgtgcctggtcccgatatcgagcacgttcgcggtagccagcgaggtgcccgtcgatttcgggtggagtactgcatttgctgccagctttaggtagaagagaaggctgggaacgaagagcgcgccaaagctctgatcagaggcgtcgaacgagtatataactagctagctagccagctaccacagatcgatcgacctgccctgctgacgatattatatgcatatgtcgatgcgtttctgatctagtgagtctagcagtgtatggttatgcgtggttatctctctctcataactatagtacgtactaagcatgcatgcagcagctctggcaacgaaaaaggattgcagattgagcttgcattgcttgcttgctagctcgagatgaacctttggaatgagtcctgaagacttggattcattctccaggttcatctatccatcagggaataagctacttaagaggtggtcatctaataggtttgagaggacacacaacaagtctctactgatcgtcatcatcagcttctaactattacggttgttggttgttggattgcatcattgggtagttgtcgaaggatttgttaaatatgtgtaatgatttctagtttaatttagtatggatcaaagtgtgtagcaggtctctattgattgtactaccaaataaattaaagtgtcatctctttg

SEQ ID NO: 13930 - protein, 455 aa, Zea mays subsp. mays
  peptide (1)..(455): Ceres Seq. ID no. 12435949
  misc_feature (341)..(378): Pfam Name: Helix-loop-helix DNA-binding domain Pfam Description: Helix-loop-helix DNA-binding domain
  misc_feature (245)..(455): Homolog of NCBI NO: 9294343 NR Description: gene_id:F3H11.2~unknown protein [Arabidopsis
  misc_feature (245)..(455): Homolog of NCBI NO: 15232315 NR Description: hypothetical protein; protein id: At3g20640.1 thaliana] >gi|26451163|dbj|BAC42685.1| putative bHLH
  misc_feature (271)..(455): Homolog of NCBI NO: 18407276 NR Description: expressed protein; protein id: At1g61660.1, by cDNA: 159557., supported by cDNA: gi_14190498 [Arabidopsis >gi|14190499|gb|AAK55730.1|AF380649_1 At1g61660/T13M11_21
  misc_feature (271)..(455): Homolog of NCBI NO: 21553730 NR Description: unknown [Arabidopsis thaliana]
  misc_feature (271)..(397): Homolog of NCBI NO: 25404333 NR Description: hypothetical protein T13M11.1 [imported] -
  misc_feature (403)..(455): Homolog of NCBI NO: 25404333 NR Description: hypothetical protein T13M11.1 [imported] -
  misc_feature (305)..(435): Homolog of NCBI NO: 22328848 NR Description: hypothetical protein; protein id: At4g21340.1, by cDNA: gi_17529153 [Arabidopsis thaliana] unknown protein [Arabidopsis thaliana]
  misc_feature (297)..(438): Homolog of NCBI NO: 15234636 NR Description: putative protein; protein id: At4g05170.1
  misc_feature (240)..(382): Homolog of NCBI NO: 34910130 NR Description: B1070A12.8 [Oryza sativa (japonica
  misc_feature (154)..(433): Homolog of NCBI NO: 22093671 NR Description: similar to bHLH (Basic-helix-loop-helix)
MGDHAEMLHATPAIYNGAGAAPRGGWWSTAVPATTCSTELAGFTTWSSALAASYDLAAEGAKANKSATTASSESPGNNSSVTFQEPAGGVGTAVVQQPLAGCADWTHPYLSSGAATLHGFMQDGHQQDMSSSTTEQSPMAASSLIMNPSSNNLALALQQGHHHQEPDHQQMLSNFGGSEAELLLSPTTSPYGFQSSLLRSFMEPTAAAAKPALPGYRQQYDQYQQMGMGQARFAPAGGAASREALQFTNDAPSWNPSAAAAGFGVPPAPAPVDQASSSVRSVKPSPAARATATLALKTALEGVGESASSIITKKKANGELAPAFKKSRLQTPSPLPTFKVRKEKVGDRVTALQQLVAPFGKTDTASVLHETIEYIKFLHDQVGVLSAPYLKNNGHQVPYLKRSSPDRSEDDSSHAGERSLKGRGLCLVPISSTFAVASEVPVDFGWSTAFAASFR

SEQ ID NO: 13931 - protein, 449 aa, Zea mays subsp. mays
  peptide (1)..(449): Ceres Seq. ID no. 12435950
  misc_feature (335)..(372): Pfam Name: Helix-loop-helix DNA-binding domain Pfam Description: Helix-loop-helix DNA-binding domain
  misc_feature (239)..(449): Homolog of NCBI NO: 9294343 NR Description: gene_id:F3H11.2~unknown protein [Arabidopsis
  misc_feature (239)..(449): Homolog of NCBI NO: 15232315 NR Description: hypothetical protein; protein id: At3g20640.1 thaliana] >gi|26451163|dbj|BAC42685.1| putative bHLH
  misc_feature (265)..(449): Homolog of NCBI NO: 18407276 NR Description: expressed protein; protein id: At1g61660.1, by cDNA: 159557., supported by cDNA: gi_14190498 [Arabidopsis >gi|14190499|gb|AAK55730.1|AF380649_1 At1g61660/T13M11_21
  misc_feature (265)..(449): Homolog of NCBI NO: 21553730 NR Description: unknown [Arabidopsis thaliana]
  misc_feature (265)..(391): Homolog of NCBI NO: 25404333 NR Description: hypothetical protein T13M11.1 [imported] -
  misc_feature (397)..(449): Homolog of NCBI NO: 25404333 NR Description: hypothetical protein T13M11.1 [imported] -
  misc_feature (299)..(429): Homolog of NCBI NO: 22328848 NR Description: hypothetical protein; protein id: At4g21340.1, by cDNA: gi_17529153 [Arabidopsis thaliana] unknown protein [Arabidopsis thaliana]
  misc_feature (291)..(432): Homolog of NCBI NO: 15234636 NR Description: putative protein; protein id: At4g05170.1
  misc_feature (234)..(376): Homolog of NCBI NO: 34910130 NR Description: B1070A12.8 [Oryza sativa (japonica
  misc_feature (148)..(427): Homolog of NCBI NO: 22093671 NR Description: similar to bHLH (Basic-helix-loop-helix)
MLHATPAIYNGAGAAPRGGWWSTAVPATTCSTELAGFTTWSSALAASYDLAAEGAKANKSATTASSESPGNNSSVTFQEPAGGVGTAVVQQPLAGCADWTHPYLSSGAATLHGFMQDGHQQDMSSSTTEQSPMAASSLIMNPSSNNLALALQQGHHHQEPDHQQMLSNFGGSEAELLLSPTTSPYGFQSSLLRSFMEPTAAAAKPALPGYRQQYDQYQQMGMGQARFAPAGGAASREALQFTNDAPSWNPSAAAAGFGVPPAPAPVDQASSSVRSVKPSPAARATATLALKTALEGVGESASSIITKKKANGELAPAFKKSRLQTPSPLPTFKVRKEKVGDRVTALQQLVAPFGKTDTASVLHETIEYIKFLHDQVGVLSAPYLKNNGHQVPYLKRSSPDRSEDDSSHAGERSLKGRGLCLVPISSTFAVASEVPVDFGWSTAFAASFR

SEQ ID NO: 13932 - protein, 335 aa, Zea mays subsp. mays
  peptide (1)..(335): Ceres Seq. ID no. 12435951
  misc_feature (221)..(258): Pfam Name: Helix-loop-helix DNA-binding domain Pfam Description: Helix-loop-helix DNA-binding domain
  misc_feature (125)..(335): Homolog of NCBI NO: 9294343 NR Description: gene_id:F3H11.2~unknown protein [Arabidopsis
  misc_feature (125)..(335): Homolog of NCBI NO: 15232315 NR Description: hypothetical protein; protein id: At3g20640.1 thaliana] >gi|26451163|dbj|BAC42685.1| putative bHLH
  misc_feature (151)..(335): Homolog of NCBI NO: 18407276 NR Description: expressed protein; protein id: At1g61660.1, by cDNA: 159557., supported by cDNA: gi_14190498 [Arabidopsis >gi|14190499|gb|AAK55730.1|AF380649_1 At1g61660/T13M11_21
  misc_feature (151)..(335): Homolog of NCBI NO: 21553730 NR Description: unknown [Arabidopsis thaliana]
  misc_feature (151)..(277): Homolog of NCBI NO: 25404333 NR Description: hypothetical protein T13M11.1 [imported] -
  misc_feature (283)..(335): Homolog of NCBI NO: 25404333 NR Description: hypothetical protein T13M11.1 [imported] -
  misc_feature (185)..(315): Homolog of NCBI NO: 22328848 NR Description: hypothetical protein; protein id: At4g21340.1, by cDNA: gi_17529153 [Arabidopsis thaliana] unknown protein [Arabidopsis thaliana]
  misc_feature (177)..(318): Homolog of NCBI NO: 15234636 NR Description: putative protein; protein id: At4g05170.1
  misc_feature (120)..(262): Homolog of NCBI NO: 34910130 NR Description: B1070A12.8 [Oryza sativa (japonica
  misc_feature (34)..(313): Homolog of NCBI NO: 22093671 NR Description: similar to bHLH (Basic-helix-loop-helix)
MQDGHQQDMSSSTTEQSPMAASSLIMNPSSNNLALALQQGHHHQEPDHQQMLSNFGGSEAELLLSPTTSPYGFQSSLLRSFMEPTAAAAKPALPGYRQQYDQYQQMGMGQARFAPAGGAASREALQFTNDAPSWNPSAAAAGFGVPPAPAPVDQASSSVRSVKPSPAARATATLALKTALEGVGESASSIITKKKANGELAPAFKKSRLQTPSPLPTFKVRKEKVGDRVTALQQLVAPFGKTDTASVLHETIEYIKFLHDQVGVLSAPYLKNNGHQVPYLKRSSPDRSEDDSSHAGERSLKGRGLCLVPISSTFAVASEVPVDFGWSTAFAASFR

SEQ ID NO: 13933 - DNA, 1943 bp, Zea mays subsp. mays; identical to SEQ ID NO: 4442
  misc_feature (1)..(1943): Ceres Seq. ID no. 12387936
  misc_feature: MA Experiment ID: 20000535 Result: Up-regulated in Transcription
  misc_feature: MA Experiment 20000535 PARAMETER Experiment Name: Zm_Hybrid_Seed_Dev_P Parameter: DAP Value: 30 vs. 12
  misc_feature: MA Experiment 20000535 PARAMETER Experiment Name: Zm_Hybrid_Seed_Dev_P Parameter: Organism Value: Zea mays
  misc_feature: MA Experiment 20000535 PARAMETER Experiment Name: Zm_Hybrid_Seed_Dev_P Parameter: Plant Line Value: 35A19
  misc_feature: MA Experiment 20000535 PARAMETER Experiment Name: Zm_Hybrid_Seed_Dev_P Parameter: Tissue Value: Embryo vs. Unfert Floret

SEQ ID NO: 13934 - protein, 576 aa, Zea mays subsp. mays; identical to SEQ ID NO: 4443
  peptide (1)..(576): Ceres Seq. ID no. 12387937
  misc_feature (139)..(545): Pfam Name: Serine carboxypeptidase S28 Pfam Description: Serine carboxypeptidase S28
  misc_feature (139)..(574): Homolog of NCBI NO: 37535976 NR Description: putative serine peptidase [Oryza sativa (japonica group)] >gi|10140733|gb|AAG13566.1| putative serine peptidase sativa] >gi|31433013|gb|AAP54577.1| putative serine peptidase
  misc_feature (81)..(558): Homolog of NCBI NO: 37535980 NR Description: putative serine peptidase [Oryza sativa (japonica group)] >gi|10140734|gb|AAG13567.1| putative serine peptidase sativa] >gi|31433015|gb|AAP54579.1| putative serine peptidase
  misc_feature (82)..(557): Homolog of NCBI NO: 18419800 NR Description: Expressed protein; protein id: At4g36195.1, by cDNA: gi_14334573 [Arabidopsis thaliana] unknown protein [Arabidopsis thaliana]
  misc_feature (189)..(557): Homolog of NCBI NO: 18419798 NR Description: putative protein; protein id: At4g36190.1
  misc_feature (114)..(232): Homolog of NCBI NO: 18419798 NR Description: putative protein; protein id: At4g36190.1
  misc_feature (226)..(558): Homolog of NCBI NO: 15227960 NR Description: unknown protein; protein id: At2g18080.1
  misc_feature (151)..(179): Homolog of NCBI NO: 15227960 NR Description: unknown protein; protein id: At2g18080.1
  misc_feature (139)..(374): Homolog of NCBI NO: 15144318 NR Description: putative serine peptidase [Oryza sativa (japonica
  misc_feature (139)..(374): Homolog of NCBI NO: 7486037 NR Description: hypothetical protein F23E13.80 - Arabidopsis >gi|2961378|emb|CAA18125.1| putative protein [Arabidopsis >gi|7270572|emb|CAB80290.1| putative protein [Arabidopsis
  misc_feature (497)..(557): Homolog of NCBI NO: 7486037 NR Description: hypothetical protein F23E13.80 - Arabidopsis >gi|2961378|emb|CAA18125.1| putative protein [Arabidopsis >gi|7270572|emb|CAB80290.1| putative protein [Arabidopsis

SEQ ID NO: 13935 - protein, 509 aa, Zea mays subsp. mays; identical to SEQ ID NO: 4444
  peptide (1)..(509): Ceres Seq. ID no. 12387938
  misc_feature (72)..(478): Pfam Name: Serine carboxypeptidase S28 Pfam Description: Serine carboxypeptidase S28
  misc_feature (72)..(507): Homolog of NCBI NO: 37535976 NR Description: putative serine peptidase [Oryza sativa (japonica group)] >gi|10140733|gb|AAG13566.1| putative serine peptidase sativa] >gi|31433013|gb|AAP54577.1| putative serine peptidase
  misc_feature (14)..(491): Homolog of NCBI NO: 37535980 NR Description: putative serine peptidase [Oryza sativa (japonica group)] >gi|10140734|gb|AAG13567.1| putative serine peptidase sativa] >gi|31433015|gb|AAP54579.1| putative serine peptidase
  misc_feature (15)..(490): Homolog of NCBI NO: 18419800 NR Description: Expressed protein; protein id: At4g36195.1, by cDNA: gi_14334573 [Arabidopsis thaliana] unknown protein [Arabidopsis thaliana]
  misc_feature (122)..(490): Homolog of NCBI NO: 18419798 NR Description: putative protein; protein id: At4g36190.1
  misc_feature (47)..(165): Homolog of NCBI NO: 18419798 NR Description: putative protein; protein id: At4g36190.1
  misc_feature (159)..(491): Homolog of NCBI NO: 15227960 NR Description: unknown protein; protein id: At2g18080.1
  misc_feature (84)..(112): Homolog of NCBI NO: 15227960 NR Description: unknown protein; protein id: At2g18080.1
  misc_feature (72)..(307): Homolog of NCBI NO: 15144318 NR Description: putative serine peptidase [Oryza sativa (japonica
  misc_feature (72)..(307): Homolog of NCBI NO: 7486037 NR Description: hypothetical protein F23E13.80 - Arabidopsis >gi|2961378|emb|CAA18125.1| putative protein [Arabidopsis >gi|7270572|emb|CAB80290.1| putative protein [Arabidopsis
  misc_feature (430)..(490): Homolog of NCBI NO: 7486037 NR Description: hypothetical protein F23E13.80 - Arabidopsis >gi|2961378|emb|CAA18125.1| putative protein [Arabidopsis >gi|7270572|emb|CAB80290.1| putative protein [Arabidopsis

SEQ ID NO: 13936 - protein, 486 aa, Zea mays subsp. mays; identical to SEQ ID NO: 4445
  peptide (1)..(486): Ceres Seq. ID no. 12387939
  misc_feature (49)..(455): Pfam Name: Serine carboxypeptidase S28 Pfam Description: Serine carboxypeptidase S28
  misc_feature (49)..(484): Homolog of NCBI NO: 37535976 NR Description: putative serine peptidase [Oryza sativa (japonica group)] >gi|10140733|gb|AAG13566.1| putative serine peptidase sativa] >gi|31433013|gb|AAP54577.1| putative serine peptidase
  misc_feature (1)..(468): Homolog of NCBI NO: 37535980 NR Description: putative serine peptidase [Oryza sativa (japonica group)] >gi|10140734|gb|AAG13567.1| putative serine peptidase sativa] >gi|31433015|gb|AAP54579.1| putative serine peptidase
  misc_feature (1)..(467): Homolog of NCBI NO: 18419800 NR Description: Expressed protein; protein id: At4g36195.1, by cDNA: gi_14334573 [Arabidopsis thaliana] unknown protein [Arabidopsis thaliana]
  misc_feature (99)..(467): Homolog of NCBI NO: 18419798 NR Description: putative protein; protein id: At4g36190.1
  misc_feature (24)..(142): Homolog of NCBI NO: 18419798 NR Description: putative protein; protein id: At4g36190.1
  misc_feature (136)..(468): Homolog of NCBI NO: 15227960 NR Description: unknown protein; protein id: At2g18080.1
  misc_feature (61)..(89): Homolog of NCBI NO: 15227960 NR Description: unknown protein; protein id: At2g18080.1
  misc_feature (49)..(284): Homolog of NCBI NO: 15144318 NR Description: putative serine peptidase [Oryza sativa (japonica
  misc_feature (49)..(284): Homolog of NCBI NO: 7486037 NR Description: hypothetical protein F23E13.80 - Arabidopsis >gi|2961378|emb|CAA18125.1| putative protein [Arabidopsis >gi|7270572|emb|CAB80290.1| putative protein [Arabidopsis
  misc_feature (407)..(467): Homolog of NCBI NO: 7486037 NR Description: hypothetical protein F23E13.80 - Arabidopsis >gi|2961378|emb|CAA18125.1| putative protein [Arabidopsis >gi|7270572|emb|CAB80290.1| putative protein [Arabidopsis

SEQ ID NO: 13937 - DNA, 413 bp, Zea mays subsp. mays
  misc_feature (1)..(413): Ceres Seq. ID no. 11023056
  misc_feature: MA Experiment ID: 20000534 Result: Down-regulated in Transcription
  misc_feature: MA Experiment 20000534 PARAMETER Experiment Name: Zm_Hybrid_Pollen_P Parameter: Age (day) Value: 8
  misc_feature: MA Experiment 20000534 PARAMETER Experiment Name: Zm_Hybrid_Pollen_P Parameter: Organism Value: Zea mays
  misc_feature: MA Experiment 20000534 PARAMETER Experiment Name: Zm_Hybrid_Pollen_P Parameter: Plant Line Value: 35A19
  misc_feature: MA Experiment 20000534 PARAMETER Experiment Name: Zm_Hybrid_Pollen_P Parameter: Tissue Value: Pollen vs. Aerial
attcgcccacacgagcctacccaaagagcccagagcccgggaggttacttcgctgcctgatgagtccccggcaccggaggtcttgctaccggctggcggcttcttcttccgttcctccccaagtcctcttcccggaggaatcatgatcgtctgcgtcgccgttgtcggccaccagaacaatctgtacctgcagagcttcacggaggcggacgacgccctcaagctccaccacatcgtccactgctctctcgacgtcatcgacgagcgagtgagcaatcctaagaggagtgcacctacattgaatgagacatttttgggtcttctatacccaactgagaactacaaagtgtatggctatttgacaaacacaaaggtcaaatttatcatggtcacgactgatcttgatgtcaaag

SEQ ID NO: 13938 - protein, 137 aa, Zea mays subsp. mays
  peptide (1)..(137): Ceres Seq. ID no. 11023057
  misc_feature (48)..(136): Homolog of NCBI NO: 18399520 NR Description: expressed protein; protein id: At2g20930.1, by cDNA: 27566. [Arabidopsis thaliana]
  misc_feature (48)..(136): Homolog of NCBI NO: 25338945 NR Description: hypothetical protein At2g20930 [imported] -
  misc_feature (48)..(136): Homolog of NCBI NO: 21555278 NR Description: unknown [Arabidopsis thaliana]
  misc_feature (48)..(130): Homolog of NCBI NO: 6841572 NR Description: HSPC176 [Homo sapiens] Similar to unknown [Homo sapiens]
  misc_feature (48)..(130): Homolog of NCBI NO: 27659496 NR Description: similar to hypothetical protein, 2-6 [Mus
  misc_feature (48)..(130): Homolog of NCBI NO: 7706429 NR Description: unknown [Homo sapiens]
  misc_feature (48)..(130): Homolog of NCBI NO: 10946914 NR Description: hypothetical protein, 2-6 [Mus musculus] expression of this gene product inhibits the growth of E. coli musculus] >gi|12841129|dbj|BAB25089.1| unnamed protein product
  misc_feature (50)..(130): Homolog of NCBI NO: 34851319 NR Description: similar to hypothetical protein, 2-6 [Rattus
  misc_feature (48)..(136): Homolog of NCBI NO: 24652658 NR Description: CG9067-PA [Drosophila melanogaster]
FAHTSLPKEPRAREVTSLPDESPAPEVLLPAGGFFFRSSPSPLPGGIMIVCVAVVGHQNNLYLQSFTEADDALKLHHIVHCSLDVIDERVSNPKRSAPTLNETFLGLLYPTENYKVYGYLTNTKVKFIMVTTDLDVK

SEQ ID NO: 13939 - protein, 90 aa, Zea mays subsp. mays
  peptide (1)..(90): Ceres Seq. ID no. 11023058
  misc_feature (1)..(89): Homolog of NCBI NO: 18399520 NR Description: expressed protein; protein id: At2g20930.1, by cDNA: 27566. [Arabidopsis thaliana]
  misc_feature (1)..(89): Homolog of NCBI NO: 25338945 NR Description: hypothetical protein At2g20930 [imported] -
  misc_feature (1)..(89): Homolog of NCBI NO: 21555278 NR Description: unknown [Arabidopsis thaliana]
  misc_feature (1)..(83): Homolog of NCBI NO: 6841572 NR Description: HSPC176 [Homo sapiens] Similar to unknown [Homo sapiens]
  misc_feature (1)..(83): Homolog of NCBI NO: 7706429 NR Description: unknown [Homo sapiens]
  misc_feature (1)..(83): Homolog of NCBI NO: 27659496 NR Description: similar to hypothetical protein, 2-6 [Mus
  misc_feature (1)..(83): Homolog of NCBI NO: 10946914 NR Description: hypothetical protein, 2-6 [Mus musculus] expression of this gene product inhibits the growth of E. coli musculus] >gi|12841129|dbj|BAB25089.1| unnamed protein product
  misc_feature (3)..(83): Homolog of NCBI NO: 34851319 NR Description: similar to hypothetical protein, 2-6 [Rattus
  misc_feature (1)..(89): Homolog of NCBI NO: 24652658 NR Description: CG9067-PA [Drosophila melanogaster]
MIVCVAVVGHQNNLYLQSFTEADDALKLHHIVHCSLDVIDERVSNPKRSAPTLNETFLGLLYPTENYKVYGYLTNTKVKFIMVTTDLDVK

SEQ ID NO: 13940 - DNA, 1017 bp, Zea mays subsp. mays
  misc_feature (1)..(1017): Ceres Seq. ID no. 12382656
  misc_feature: MA Experiment ID: 108528 Result: Up-regulated in Transcription
  misc_feature: MA Experiment 108528 PARAMETER Experiment Name: Zm_Imbibed_Seeds_P Parameter: Age (day) Value: 5 vs. 2
  misc_feature: MA Experiment 108528 PARAMETER Experiment Name: Zm_Imbibed_Seeds_P Parameter: Organism Value: Zea mays
  misc_feature: MA Experiment 108528 PARAMETER Experiment Name: Zm_Imbibed_Seeds_P Parameter: Plant Line Value: 35A19
  misc_feature: MA Experiment 108528 PARAMETER Experiment Name: Zm_Imbibed_Seeds_P Parameter: Tissue Value: Aerial vs. Embryo
  misc_feature: MA Experiment ID: 108530 Result: Up-regulated in Transcription
  misc_feature: MA Experiment 108530 PARAMETER Experiment Name: Zm_Imbibed_Seeds_P Parameter: Age (day) Value: 6 vs. 2
  misc_feature: MA Experiment 108530 PARAMETER Experiment Name: Zm_Imbibed_Seeds_P Parameter: Organism Value: Zea mays
  misc_feature: MA Experiment 108530 PARAMETER Experiment Name: Zm_Imbibed_Seeds_P Parameter: Plant Line Value: 35A19
  misc_feature: MA Experiment 108530 PARAMETER Experiment Name: Zm_Imbibed_Seeds_P Parameter: Tissue Value: Aerial vs. Embryo
  misc_feature: MA Experiment ID: 108534 Result: Up-regulated in Transcription
  misc_feature: MA Experiment 108534 PARAMETER Experiment Name: Zm_4deg_Cold_P Parameter: Age (hr) Value: 8
  misc_feature: MA Experiment 108534 PARAMETER Experiment Name: Zm_4deg_Cold_P Parameter: Organism Value: Zea mays
  misc_feature: MA Experiment 108534 PARAMETER Experiment Name: Zm_4deg_Cold_P Parameter: Plant Line Value: 35A19
  misc_feature: MA Experiment 108534 PARAMETER Experiment Name: Zm_4deg_Cold_P Parameter: Temperature (deg C) Value: 4 vs. 22
  misc_feature: MA Experiment 108534 PARAMETER Experiment Name: Zm_4deg_Cold_P Parameter: Timepoint (hr) Value: 6
  misc_feature: MA Experiment 108534 PARAMETER Experiment Name: Zm_4deg_Cold_P Parameter: Tissue Value: Aerial
  misc_feature: MA Experiment ID: 108535 Result: Down-regulated in Transcription
  misc_feature: MA Experiment 108535 PARAMETER Experiment Name: Zm_Meristem_P Parameter: Age (day) Value: 8
  misc_feature: MA Experiment 108535 PARAMETER Experiment Name: Zm_Meristem_P Parameter: Organism Value: Zea mays
  misc_feature: MA Experiment 108535 PARAMETER Experiment Name: Zm_Meristem_P Parameter: Plant Line Value: 35A19
  misc_feature: MA Experiment 108535 PARAMETER Experiment Name: Zm_Meristem_P Parameter: Tissue Value: Root Meristem vs. Above Root Meristem
  misc_feature: MA Experiment ID: 108543 Result: Down-regulated in Transcription
  misc_feature: MA Experiment ID: 108545 Result: Down-regulated in Transcription
  misc_feature: MA Experiment 108545 PARAMETER Experiment Name: Zm_Imbibed_Seeds_P Parameter: Age (day) Value: 3 vs. 2
  misc_feature: MA Experiment 108545 PARAMETER Experiment Name: Zm_Imbibed_Seeds_P Parameter: Organism Value: Zea mays
  misc_feature: MA Experiment 108545 PARAMETER Experiment Name: Zm_Imbibed_Seeds_P Parameter: Plant Line Value: 35A19
  misc_feature: MA Experiment 108545 PARAMETER Experiment Name: Zm_Imbibed_Seeds_P Parameter: Tissue Value: Aerial vs. Embryo
  misc_feature: MA Experiment ID: 108547 Result: Up-regulated in Transcription
  misc_feature: MA Experiment 108547 PARAMETER Experiment Name: Zm_Imbibed_Seeds_P Parameter: Age (day) Value: 4 vs. 2
  misc_feature: MA Experiment 108547 PARAMETER Experiment Name: Zm_Imbibed_Seeds_P Parameter: Organism Value: Zea mays
  misc_feature: MA Experiment 108547 PARAMETER Experiment Name: Zm_Imbibed_Seeds_P Parameter: Plant Line Value: 35A19
  misc_feature: MA Experiment 108547 PARAMETER Experiment Name: Zm_Imbibed_Seeds_P Parameter: Tissue Value: Aerial vs. Embryo
  misc_feature: MA Experiment ID: 108687 Result: Down-regulated in Transcription
  misc_feature: MA Experiment 108687 PARAMETER Experiment Name: Zm_Embryos-Flowers__P Parameter: Tissue Value: Embryo vs. Aerial+
  misc_feature: MA Experiment ID: 108688 Result: Down-regulated in Transcription
  misc_feature: MA Experiment 108688 PARAMETER Experiment Name: Zm_Embryos-Flowers__P Parameter: Tissue Value: Immature Flowers vs. Aerial+
  misc_feature: MA Experiment ID: 20000487 Result: Up-regulated in Transcription
  misc_feature: MA Experiment 20000487 PARAMETER Experiment Name: Zm_50mM_NH4NO3_L_to_H_P Parameter: Organism Value: Zea mays
  misc_feature: MA Experiment 20000487 PARAMETER Experiment Name: Zm_50mM_NH4NO3_L_to_H_P Parameter: Timepoint (hr) Value: 4
  misc_feature: MA Experiment 20000487 PARAMETER Experiment Name: Zm_50mM_NH4NO3_L_to_H_P Parameter: Tissue Value: Leaves
  misc_feature: MA Experiment 20000487 PARAMETER Experiment Name: Zm_50mM_NH4NO3_L_to_H_P Parameter: Treatment Value: 50mM NH4NO3 vs. 100mM Mannitol
  misc_feature: MA Experiment ID: 20000492 Result: Down-regulated in Transcription
  misc_feature: MA Experiment 20000492 PARAMETER Experiment Name: Zm_Hybrid_Seed_Dev_P Parameter: DAP Value: 12
  misc_feature: MA Experiment 20000492 PARAMETER Experiment Name: Zm_Hybrid_Seed_Dev_P Parameter: Organism Value: Zea mays
  misc_feature: MA Experiment 20000492 PARAMETER Experiment Name: Zm_Hybrid_Seed_Dev_P Parameter: Plant Line Value: 35A19
  misc_feature: MA Experiment 20000492 PARAMETER Experiment Name: Zm_Hybrid_Seed_Dev_P Parameter: Tissue Value: Fert Kernel vs. Unfert Floret
  misc_feature: MA Experiment ID: 20000534 Result: Down-regulated in Transcription
  misc_feature: MA Experiment 20000534 PARAMETER Experiment Name: Zm_Hybrid_Pollen_P Parameter: Age (day) Value: 8
  misc_feature: MA Experiment 20000534 PARAMETER Experiment Name: Zm_Hybrid_Pollen_P Parameter: Organism Value: Zea mays
  misc_feature: MA Experiment 20000534 PARAMETER Experiment Name: Zm_Hybrid_Pollen_P Parameter: Plant Line Value: 35A19
  misc_feature: MA Experiment 20000534 PARAMETER Experiment Name: Zm_Hybrid_Pollen_P Parameter: Tissue Value: Pollen vs. Aerial
  misc_feature: MA Experiment ID: 20000535 Result: Down-regulated in Transcription
  misc_feature: MA Experiment 20000535 PARAMETER Experiment Name: Zm_Hybrid_Seed_Dev_P Parameter: DAP Value: 30 vs. 12
  misc_feature: MA Experiment 20000535 PARAMETER Experiment Name: Zm_Hybrid_Seed_Dev_P Parameter: Organism Value: Zea mays
  misc_feature: MA Experiment 20000535 PARAMETER Experiment Name: Zm_Hybrid_Seed_Dev_P Parameter: Plant Line Value: 35A19
  misc_feature: MA Experiment 20000535 PARAMETER Experiment Name: Zm_Hybrid_Seed_Dev_P Parameter: Tissue Value: Embryo vs. Unfert Floret
  misc_feature: MA Experiment ID: 20001610 Result: Up-regulated in Transcription
  misc_feature: MA Experiment 20001610 PARAMETER Experiment Name: Zm_50ppm_KNO3_L-to-H_P Parameter: Age (day) Value: 19
  misc_feature: MA Experiment 20001610 PARAMETER Experiment Name: Zm_50ppm_KNO3_L-to-H_P Parameter: Organism Value: Zea mays
  misc_feature: MA Experiment 20001610 PARAMETER Experiment Name: Zm_50ppm_KNO3_L-to-H_P Parameter: Plant Line Value: 35A19
  misc_feature: MA Experiment 20001610 PARAMETER Experiment Name: Zm_50ppm_KNO3_L-to-H_P Parameter: Timepoint (hr) Value: 2
  misc_feature: MA Experiment 20001610 PARAMETER Experiment Name: Zm_50ppm_KNO3_L-to-H_P Parameter: Tissue Value: Roots
  misc_feature: MA Experiment 20001610 PARAMETER Experiment Name: Zm_50ppm_KNO3_L-to-H_P Parameter: Treatment Value: 50ppm KNO3 vs. 50ppm KCl
  misc_feature: MA Experiment ID: 20001612 Result: Up-regulated in Transcription
  misc_feature: MA Experiment 20001612 PARAMETER Experiment Name: Zm_50ppm_KNO3_L-to-H_P Parameter: Age (day) Value: 19
  misc_feature: MA Experiment 20001612 PARAMETER Experiment Name: Zm_50ppm_KNO3_L-to-H_P Parameter: Organism Value: Zea mays
  misc_feature: MA Experiment 20001612 PARAMETER Experiment Name: Zm_50ppm_KNO3_L-to-H_P Parameter: Plant Line Value: 35A19
  misc_feature: MA Experiment 20001612 PARAMETER Experiment Name: Zm_50ppm_KNO3_L-to-H_P Parameter: Timepoint (hr) Value: 8
  misc_feature: MA Experiment 20001612 PARAMETER Experiment Name: Zm_50ppm_KNO3_L-to-H_P Parameter: Tissue Value: Roots
  misc_feature: MA Experiment 20001612 PARAMETER Experiment Name: Zm_50ppm_KNO3_L-to-H_P Parameter: Treatment Value: 50ppm KNO3 vs. 50ppm KCl
  misc_feature: MA Experiment ID: 20001613 Result: Up-regulated in Transcription
  misc_feature: MA Experiment 20001613 PARAMETER Experiment Name: Zm_50ppm_KNO3_L-to-H_P Parameter: Age (day) Value: 20
  misc_feature: MA Experiment 20001613 PARAMETER Experiment Name: Zm_50ppm_KNO3_L-to-H_P Parameter: Organism Value: Zea mays
  misc_feature: MA Experiment 20001613 PARAMETER Experiment Name: Zm_50ppm_KNO3_L-to-H_P Parameter: Plant Line Value: 35A19
  misc_feature: MA Experiment 20001613 PARAMETER Experiment Name: Zm_50ppm_KNO3_L-to-H_P Parameter: Timepoint (hr) Value: 24
  misc_feature: MA Experiment 20001613 PARAMETER Experiment Name: Zm_50ppm_KNO3_L-to-H_P Parameter: Tissue Value: Roots
  misc_feature: MA Experiment 20001613 PARAMETER Experiment Name: Zm_50ppm_KNO3_L-to-H_P Parameter: Treatment Value: 50ppm KNO3 vs. 50ppm KCl
atccatccatccatagatccctcacctcactcactcgtgaagaaccagagaacccacccaccctccttcatctcctacatccacatctatccaagaaggtccgttctctcctccccgctcccctcagcaataatctccgcacggcaacctcgctcctccgttttggttttcctctgtgtgccatgggcgacgccgtggagcacctcaagagcgggttccagaagttcaagaccgaggtgtatgacaagaagccggagctgttcgagcctctcaaggccggtcaggcccccaagtacatggttttcgcctgctccgactcccgcgtgtgcccgtcggtgaccctgggcctgcagcccggcgaggccttcaccgtgcgcaacatcgccgccatggtcccggcctacgacaagaccaagtacaccggcatcgggtccgccatcgagtacgccgtgtgcgccctcaaggtggaggtcctcgtggtcatcggccacagctgctgcggtggcatccgggcgctgctctccctccaggacggtgcacccgacaacttccacttcgtcgagaactgggtcaagatcggcttccctgccaaggtcaaggtgaagaaagagcacgcctccgtgcccttcgatgaccagtgctccatcctggagaaggaggccgtgaacgtgtccctggagaacctcaagacctaccccttngtccaggaagggctggccaaggggaccctcaagctggtcggcgcccactacgacttcgtgtccgggaacttcctcgtatgggaaacttagccacacccgccgctcagcgcgcggcttngtcgtcacaactcctatatcttcataaatatatatatccnctacctatatatacctaccgatatgtgaatgcgaggagtactattacctgcatgttttcagcagtatgcagctacgtacatatatatgtaccggatcgcctaacgacgtgaatgtaataagcaataatattttctaccgcttttttttatttctttcc

SEQ ID NO: 13941 - protein, 262 aa, Zea mays subsp. mays
  peptide (1)..(262): Ceres Seq. ID no. 12382657
  misc_feature (63)..(261): Homolog of NCBI NO: 7489809 NR Description: probable carbonate dehydratase (EC 4.2.1.1) -
  misc_feature (26)..(262): Homolog of NCBI NO: 7489810 NR Description: probable carbonate dehydratase (EC 4.2.1.1) -
  misc_feature (63)..(261): Homolog of NCBI NO: 7489810 NR Description: probable carbonate dehydratase (EC 4.2.1.1) -
  misc_feature (61)..(262): Homolog of NCBI NO: 7489809 NR Description: probable carbonate dehydratase (EC 4.2.1.1) -
  misc_feature (63)..(262): Homolog of NCBI NO: 7489810 NR Description: probable carbonate dehydratase (EC 4.2.1.1) -
  misc_feature (35)..(261): Homolog of NCBI NO: 7436816 NR Description: probable carbonate dehydratase (EC 4.2.1.1), - rice >gi|606817|gb|AAA86943.1| carbonic anhydrase
  misc_feature (35)..(261): Homolog of NCBI NO: 34911604 NR Description: carbonic anhydrase [Oryza sativa (japonica >gi|3345477|dbj|BAA31953.1| carbonic anhydrase [Oryza sativa]
  misc_feature (61)..(261): Homolog of NCBI NO: 729003 NR Description: CARBONIC ANHYDRASE, CHLOROPLAST PRECURSOR DEHYDRATASE) >gi|7436817|pir||T04478 probable carbonate
  misc_feature (63)..(261): Homolog of NCBI NO: 882246 NR Description: carbonic anhydrase 2
  misc_feature (63)..(261): Homolog of NCBI NO: 882248 NR Description: carbonic anhydrase 1
  misc_feature (233)..(233): Xaa is any aa, unknown or other
PSIHRSLTSLTREEPENPPTLLHLLHPHLSKKVRSLLPAPLSNNLRTATSLLRFGFPLCAMGDAVEHLKSGFQKFKTEVYDKKPELFEPLKAGQAPKYMVFACSDSRVCPSVTLGLQPGEAFTVRNIAAMVPAYDKTKYTGIGSAIEYAVCALKVEVLVVIGHSCCGGIRALLSLQDGAPDNFHFVENWVKIGFPAKVKVKKEHASVPFDDQCSILEKEAVNVSLENLKTYPXVQEGLAKGTLKLVGAHYDFVSGNFLVWET

SEQ ID NO: 13942 - protein, 202 aa, Zea mays subsp. mays
  peptide (1)..(202): Ceres Seq. ID no. 12382658
  misc_feature (3)..(201): Homolog of NCBI NO: 7489809 NR Description: probable carbonate dehydratase (EC 4.2.1.1) -
  misc_feature (1)..(202): Homolog of NCBI NO: 7489810 NR Description: probable carbonate dehydratase (EC 4.2.1.1) -
  misc_feature (3)..(201): Homolog of NCBI NO: 7489810 NR Description: probable carbonate dehydratase (EC 4.2.1.1) -
  misc_feature (1)..(202): Homolog of NCBI NO: 7489809 NR Description: probable carbonate dehydratase (EC 4.2.1.1) -
  misc_feature (3)..(202): Homolog of NCBI NO: 7489810 NR Description: probable carbonate dehydratase (EC 4.2.1.1) -
  misc_feature (1)..(201): Homolog of NCBI NO: 7436816 NR Description: probable carbonate dehydratase (EC 4.2.1.1), - rice >gi|606817|gb|AAA86943.1| carbonic anhydrase
  misc_feature (1)..(201): Homolog of NCBI NO: 34911604 NR Description: carbonic anhydrase [Oryza sativa (japonica >gi|3345477|dbj|BAA31953.1| carbonic anhydrase [Oryza sativa]
  misc_feature (1)..(201): Homolog of NCBI NO: 729003 NR Description: CARBONIC ANHYDRASE, CHLOROPLAST PRECURSOR DEHYDRATASE) >gi|7436817|pir||T04478 probable carbonate
  misc_feature (3)..(201): Homolog of NCBI NO: 882246 NR Description: carbonic anhydrase 2
  misc_feature (3)..(201): Homolog of NCBI NO: 882248 NR Description: carbonic anhydrase 1
  misc_feature (173)..(173): Xaa is any aa, unknown or other
MGDAVEHLKSGFQKFKTEVYDKKPELFEPLKAGQAPKYMVFACSDSRVCPSVTLGLQPGEAFTVRNIAAMVPAYDKTKYTGIGSAIEYAVCALKVEVLVVIGHSCCGGIRALLSLQDGAPDNFHFVENWVKIGFPAKVKVKKEHASVPFDDQCSILEKEAVNVSLENLKTYPXVQEGLAKGTLKLVGAHYDFVSGNFLVWET

SEQ ID NO: 13943 - protein, 164 aa, Zea mays subsp. mays
  peptide (1)..(164): Ceres Seq. ID no. 12382659
  misc_feature (1)..(163): Homolog of NCBI NO: 7436816 NR Description: probable carbonate dehydratase (EC 4.2.1.1), - rice >gi|606817|gb|AAA86943.1| carbonic anhydrase
  misc_feature (1)..(163): Homolog of NCBI NO: 34911604 NR Description: carbonic anhydrase [Oryza sativa (japonica >gi|3345477|dbj|BAA31953.1| carbonic anhydrase [Oryza sativa]
  misc_feature (1)..(163): Homolog of NCBI NO: 729003 NR Description: CARBONIC ANHYDRASE, CHLOROPLAST PRECURSOR DEHYDRATASE) >gi|7436817|pir||T04478 probable carbonate
  misc_feature (1)..(163): Homolog of NCBI NO: 882246 NR Description: carbonic anhydrase 2
  misc_feature (1)..(163): Homolog of NCBI NO: 882248 NR Description: carbonic anhydrase 1
  misc_feature (1)..(163): Homolog of NCBI NO: 7489809 NR Description: probable carbonate dehydratase (EC 4.2.1.1) -
  misc_feature (1)..(164): Homolog of NCBI NO: 7489810 NR Description: probable carbonate dehydratase (EC 4.2.1.1) -
  misc_feature (1)..(163): Homolog of NCBI NO: 7489810 NR Description: probable carbonate dehydratase (EC 4.2.1.1) -
  misc_feature (1)..(164): Homolog of NCBI NO: 7489809 NR Description: probable carbonate dehydratase (EC 4.2.1.1) -
  misc_feature (1)..(164): Homolog of NCBI NO: 7489810 NR Description: probable carbonate dehydratase (EC 4.2.1.1) -
  misc_feature (135)..(135): Xaa is any aa, unknown or other
MVFACSDSRVCPSVTLGLQPGEAFTVRNIAAMVPAYDKTKYTGIGSAIEYAVCALKVEVLVVIGHSCCGGIRALLSLQDGAPDNFHFVENWVKIGFPAKVKVKKEHASVPFDDQCSILEKEAVNVSLENLKTYPXVQEGLAKGTLKLVGAHYDFVSGNFLVWET

SEQ ID NO: 13944 - DNA, 1476 bp, Zea mays subsp. mays
  misc_feature (1)..(1476): Ceres Seq. ID no. 15180020
  misc_feature: MA Experiment ID: 108543 Result: Up-regulated in Transcription
  misc_feature: MA Experiment ID: 108544 Result: Up-regulated in Transcription
  misc_feature: MA Experiment ID: 108687 Result: Down-regulated in Transcription
  misc_feature: MA Experiment 108687 PARAMETER Experiment Name: Zm_Embryos-Flowers__P Parameter: Tissue Value: Embryo vs. Aerial+
  misc_feature: MA Experiment ID: 20000535 Result: Down-regulated in Transcription
  misc_feature: MA Experiment 20000535 PARAMETER Experiment Name: Zm_Hybrid_Seed_Dev_P Parameter: DAP Value: 30 vs. 12
  misc_feature: MA Experiment 20000535 PARAMETER Experiment Name: Zm_Hybrid_Seed_Dev_P Parameter: Organism Value: Zea mays
  misc_feature: MA Experiment 20000535 PARAMETER Experiment Name: Zm_Hybrid_Seed_Dev_P Parameter: Plant Line Value: 35A19
  misc_feature: MA Experiment 20000535 PARAMETER Experiment Name: Zm_Hybrid_Seed_Dev_P Parameter: Tissue Value: Embryo vs. Unfert Floret
gcgcaaaaaaacaaaccatcctcgattcgaccggaggggaaggagacgcgccgggagaagggggaagagacgcggcgaccatgtctccgatctgggtgttcgggtacggctcgctgatctggaacccaggcttcgcctacgacgaccgcgtcgtcggctttgtcagggactaccgccgcgtcttctaccaagggagcacggaccacaggggcacgccgcagttccccgggaggaccgtcacgctcgagcaccagcccgaagcgacttgcgtaggccctttctcatgtccaccctcctactctgtcaatgtaactgctaaggacagactgattactaggacacgcaaaccaaatgaattagtaaattcatggttgatgacatgtcactcccactacgtcatgttatcatgtagtacatcttttttacttatcgttttggatagcctggtaatcctcttcgcagtccatgcgattgattttgcgagctaatctgtctattttacatctttcagtggggagttgcttacagaataaaggaggaagataaggagatagctttggaggtatgtttattgcaagccaggcagatgcagatatgttttgttcactagtactgatcgcgcacaaatatcccatgatgatactcagattgtttgatgattgggatattgctgatgttacttgtcattatggagatttagagattggtcgatgtaccaaaactcatatgttctttcctacaaattgattatatctagatactatgacgatttaagtcatgaatgggcttatgaaatttcggtatatatatcaacttatatgtgtttatcgcgatggtatacgtagcagcaaatctctgcacattctgatactccgttgcttacagctttatattgcttctactggcatttatcttcagatttaaatttgcagtatcttgaggtcagggagaagcaatatgatgagaaggtttaccttgacttgtatactgtaagatacgagggctggatctatttccctttggataatgttcgatatgtaactattacggagtattaagttgtaataactttcaggattcatcgcccaaagtaccagctgtcgaaaatgtgatggtatacttcgccaccagtaacaaggagaacaatcaaaactatcttggtcctgcacctctggaagaaatgaccaggcaaatttaccttgctcaaggcccatctggacctaacaaagagtatgtgttcaaactcgaggacgcgttacacaaattaggagttgtagaccaacatgtccaagaactggcaaatgctctgcgtgagtattctgacaccgagttatctaagtgaaagatcacatttaccccttgtttggagggtaaggatttataaataaagttagaattcattcatgcatgtcccaacatggatatattcttgtaagctgcgttttgagtgactacattacgattatattcctgtac

SEQ ID NO: 13945 - protein, 161 aa, Zea mays subsp. mays
  peptide (1)..(161): Ceres Seq. ID no. 15180021
  misc_feature (30)..(91): Pfam Name: ChaC-like protein Pfam Description: ChaC-like protein
  misc_feature (30)..(120): Homolog of NCBI NO: 38344831 NR Description: OSJNBa0064H22.12 [Oryza sativa (japonica
  misc_feature (30)..(91): Homolog of NCBI NO: 12083292 NR Description: unknown protein [Arabidopsis thaliana]
  misc_feature (30)..(91): Homolog of NCBI NO: 18401334 NR Description: expressed protein [Arabidopsis thaliana]
  misc_feature (30)..(89): Homolog of NCBI NO: 25349686 NR Description: hypothetical protein T12C22.6 [imported] - thaliana >gi|8655989|gb|AAF78262.1|AC020576_6 Contains similarity cation transport protein CHAC from Escherichia coli gi|2506988.
  misc_feature (30)..(95): Homolog of NCBI NO: 18417778 NR Description: expressed protein [Arabidopsis thaliana]
  misc_feature (30)..(95): Homolog of NCBI NO: 21593515 NR Description: unknown [Arabidopsis thaliana]
  misc_feature (30)..(95): Homolog of NCBI NO: 15239626 NR Description: expressed protein [Arabidopsis thaliana] unknown protein [Arabidopsis thaliana]
  misc_feature (30)..(95): Homolog of NCBI NO: 7486723 NR Description: hypothetical protein F9D12.14 - Arabidopsis >gi|3319340|gb|AAC26229.1| contains similarity to E. coli cation
  misc_feature (31)..(95): Homolog of NCBI NO: 27525010 NR Description: putative cation transporter [Beta procumbens]
  misc_feature (30)..(95): Homolog of NCBI NO: 7486662 NR Description: hypothetical protein F8F16.110 - Arabidopsis >gi|2827524|emb|CAA16532.1| predicted protein [Arabidopsis >gi|7270031|emb|CAB79847.1| predicted protein [Arabidopsis
AKKQTILDSTGGEGDAPGEGGRDAATMSPIWVFGYGSLIWNPGFAYDDRVVGFVRDYRRVFYQGSTDHRGTPQFPGRTVTLEHQPEATCVGPFSCPPSYSVNVTAKDRLITRTRKPNELVNSWLMTCHSHYVMLSCSTSFLLIVLDSLVILFAVHAIDFAS

SEQ ID NO: 13946 - protein, 135 aa, Zea mays subsp. mays
  peptide (1)..(135): Ceres Seq. ID no. 15180022
  misc_feature (4)..(65): Pfam Name: ChaC-like protein Pfam Description: ChaC-like protein
  misc_feature (4)..(94): Homolog of NCBI NO: 38344831 NR Description: OSJNBa0064H22.12 [Oryza sativa (japonica
  misc_feature (4)..(65): Homolog of NCBI NO: 12083292 NR Description: unknown protein [Arabidopsis thaliana]
  misc_feature (4)..(65): Homolog of NCBI NO: 18401334 NR Description: expressed protein [Arabidopsis thaliana]
  misc_feature (4)..(63): Homolog of NCBI NO: 25349686 NR Description: hypothetical protein T12C22.6 [imported] - thaliana >gi|8655989|gb|AAF78262.1|AC020576_6 Contains similarity cation transport protein CHAC from Escherichia coli gi|2506988.
  misc_feature (4)..(69): Homolog of NCBI NO: 18417778 NR Description: expressed protein [Arabidopsis thaliana]
  misc_feature (4)..(69): Homolog of NCBI NO: 21593515 NR Description: unknown [Arabidopsis thaliana]
  misc_feature (4)..(69): Homolog of NCBI NO: 15239626 NR Description: expressed protein [Arabidopsis thaliana] unknown protein [Arabidopsis thaliana]
  misc_feature (4)..(69): Homolog of NCBI NO: 7486723 NR Description: hypothetical protein F9D12.14 - Arabidopsis >gi|3319340|gb|AAC26229.1| contains similarity to E. coli cation
  misc_feature (5)..(69): Homolog of NCBI NO: 27525010 NR Description: putative cation transporter [Beta procumbens]
  misc_feature (4)..(69): Homolog of NCBI NO: 7486662 NR Description: hypothetical protein F8F16.110 - Arabidopsis >gi|2827524|emb|CAA16532.1| predicted protein [Arabidopsis >gi|7270031|emb|CAB79847.1| predicted protein [Arabidopsis
MSPIWVFGYGSLIWNPGFAYDDRVVGFVRDYRRVFYQGSTDHRGTPQFPGRTVTLEHQPEATCVGPFSCPPSYSVNVTAKDRLITRTRKPNELVNSWLMTCHSHYVMLSCSTSFLLIVLDSLVILFAVHAIDFAS

SEQ ID NO: 13947 - protein, 105 aa, Zea mays subsp. mays
  peptide (1)..(105): Ceres Seq. ID no. 15180023
RKKTNHPRFDRRGRRRAGRRGKRRGDHVSDLGVRVRLADLEPRLRLRRPRRRLCQGLPPRLLPREHGPQGHAAVPREDRHARAPARSDLRRPFLMSTLLLCQCNC

SEQ ID NO: 13948 - DNA, 592 bp, Zea mays subsp. mays; identical to SEQ ID NO: 11605
  misc_feature (1)..(592): Ceres Seq. ID no. 12566495
  misc_feature: MA Experiment ID: 108535 Result: Up-regulated in Transcription
  misc_feature: MA Experiment 108535 PARAMETER Experiment Name: Zm_Meristem_P Parameter: Age (day) Value: 8
  misc_feature: MA Experiment 108535 PARAMETER Experiment Name: Zm_Meristem_P Parameter: Organism Value: Zea mays
  misc_feature: MA Experiment 108535 PARAMETER Experiment Name: Zm_Meristem_P Parameter: Plant Line Value: 35A19
  misc_feature: MA Experiment 108535 PARAMETER Experiment Name: Zm_Meristem_P Parameter: Tissue Value: Root Meristem vs. Above Root Meristem
  misc_feature: MA Experiment ID: 20000534 Result: Down-regulated in Transcription
  misc_feature: MA Experiment 20000534 PARAMETER Experiment Name: Zm_Hybrid_Pollen_P Parameter: Age (day) Value: 8
  misc_feature: MA Experiment 20000534 PARAMETER Experiment Name: Zm_Hybrid_Pollen_P Parameter: Organism Value: Zea mays
  misc_feature: MA Experiment 20000534 PARAMETER Experiment Name: Zm_Hybrid_Pollen_P Parameter: Plant Line Value: 35A19
  misc_feature: MA Experiment 20000534 PARAMETER Experiment Name: Zm_Hybrid_Pollen_P Parameter: Tissue Value: Pollen vs. Aerial

SEQ ID NO: 13949 - protein, 156 aa, Zea mays subsp. mays; identical to SEQ ID NO: 11606
  peptide (1)..(156): Ceres Seq. ID no. 12566496

SEQ ID NO: 13950 - protein, 131 aa, Zea mays subsp. mays; identical to SEQ ID NO: 11607
  peptide (1)..(131): Ceres Seq. ID no. 12566497
  misc_feature (18)..(125): Pfam Name: KE2 family protein Pfam Description: KE2 family protein
  misc_feature (18)..(125): Pfam Name: KE2 family protein Pfam Description: KE2 family protein
  misc_feature (4)..(129): Homolog of NCBI NO: 30691134 NR Description: hydrophilic protein -related [Arabidopsis
  misc_feature (4)..(129): Homolog of NCBI NO: 26450257 NR Description: unknown protein [Arabidopsis thaliana]
  misc_feature (4)..(96): Homolog of NCBI NO: 25403096 NR Description: probable hydrophilic protein, 29542-30030 - Arabidopsis thaliana >gi|12324172|gb|AAG52059.1|AC022455_13
  misc_feature (14)..(131): Homolog of NCBI NO: 33585747 NR Description: Unknown (protein for MGC:66282) [Danio rerio]
  misc_feature (14)..(131): Homolog of NCBI NO: 27704620 NR Description: similar to H2-K region expressed gene 2 [Mus
  misc_feature (4)..(129): Homolog of NCBI NO: 26450257 NR Description: unknown protein [Arabidopsis thaliana]
  misc_feature (14)..(131): Homolog of NCBI NO: 33585747 NR Description: Unknown (protein for MGC:66282) [Danio rerio]
  misc_feature (13)..(130): Homolog of NCBI NO: 39582756 NR Description: Hypothetical protein CBG21902 [Caenorhabditis
  misc_feature (14)..(129): Homolog of NCBI NO: 38048503 NR Description: similar to Drosophila melanogaster CG7770
  misc_feature (14)..(129): Homolog of NCBI NO: 24667085 NR Description: CG7770-PA [Drosophila melanogaster]
  misc_feature (14)..(129): Homolog of NCBI NO: 7657162 NR Description: HLA class II region expressed gene KE2; KE2 [Homo sapiens] >gi|6016432|sp|O15212|PFD6_HUMAN Prefoldin subunit (Protein Ke2) >gi|2648022|emb|CAB09993.1| cICF0811.5.1 (HLA class
  misc_feature (14)..(129): Homolog of NCBI NO: 6754128 NR Description: H2-K region expressed gene 2 [Mus musculus]
  misc_feature (14)..(131): Homolog of NCBI NO: 27704620 NR Description: similar to H2-K region expressed gene 2 [Mus
  misc_feature (4)..(96): Homolog of NCBI NO: 25403096 NR Description: probable hydrophilic protein, 29542-30030 - Arabidopsis thaliana >gi|12324172|gb|AAG52059.1|AC022455_13
  misc_feature (4)..(129): Homolog of NCBI NO: 30691134 NR Description: hydrophilic protein -related [Arabidopsis
  misc_feature (14)..(129): Homolog of NCBI NO: 6754128 NR Description: H2-K region expressed gene 2 [Mus musculus]
  misc_feature (14)..(129): Homolog of NCBI NO: 7657162 NR Description: HLA class II region expressed gene KE2; KE2 [Homo sapiens] >gi|6016432|sp|O15212|PFD6_HUMAN Prefoldin subunit (Protein Ke2) >gi|2648022|emb|CAB09993.1| cICF0811.5.1 (HLA class
  misc_feature (14)..(129): Homolog of NCBI NO: 24667085 NR Description: CG7770-PA [Drosophila melanogaster]
  misc_feature (14)..(129): Homolog of NCBI NO: 38048503 NR Description: similar to Drosophila melanogaster CG7770
  misc_feature (13)..(130): Homolog of NCBI NO: 39582756 NR Description: Hypothetical protein CBG21902 [Caenorhabditis

SEQ ID NO: 13951 - protein, 123 aa, Zea mays subsp. mays; identical to SEQ ID NO: 11608
  peptide (1)..(123): Ceres Seq. ID no. 12566498
  misc_feature (1)..(122): Pfam Name: Cupin Pfam Description: Cupin
  misc_feature (1)..(122): Pfam Name: Cupin Pfam Description: Cupin
  misc_feature (6)..(120): Homolog of NCBI NO: 29250446 NR Description: GLP_39_87477_88058 [Giardia lamblia ATCC 50803]
  misc_feature (1)..(123): Homolog of NCBI NO: 14017923 NR Description: KIAA1853 protein [Homo sapiens]
  misc_feature (8)..(123): Homolog of NCBI NO: 23490106 NR Description: FHA domain, putative [Plasmodium yoelii yoelii]
  misc_feature (8)..(123): Homolog of NCBI NO: 17137528 NR Description: CG4602-PA [Drosophila melanogaster]
  misc_feature (6)..(120): Homolog of NCBI NO: 29250446 NR Description: GLP_39_87477_88058 [Giardia lamblia ATCC 50803]
  misc_feature (8)..(123): Homolog of NCBI NO: 23490106 NR Description: FHA domain, putative [Plasmodium yoelii yoelii]
  misc_feature (19)..(123): Homolog of NCBI NO: 7949115 NR Description: Ser/Arg-related nuclear matrix protein;
  misc_feature (19)..(123): Homolog of NCBI NO: 23274133 NR Description: Similar to serine/arginine repetitive matrix 1
  misc_feature (10)..(123): Homolog of NCBI NO: 5821143 NR Description: RNA binding protein [Homo sapiens]
  misc_feature (10)..(123): Homolog of NCBI NO: 5821145 NR Description: RNA binding protein [Homo sapiens]
  misc_feature (8)..(123): Homolog of NCBI NO: 7532408 NR Description: splicing factor SRp54 [Drosophila melanogaster]
  misc_feature (8)..(123): Homolog of NCBI NO: 17137528 NR Description: CG4602-PA [Drosophila melanogaster]
  misc_feature (1)..(123): Homolog of NCBI NO: 14017923 NR Description: KIAA1853 protein [Homo sapiens]
  misc_feature (19)..(123): Homolog of NCBI NO: 7949115 NR Description: Ser/Arg-related nuclear matrix protein;
  misc_feature (8)..(123): Homolog of NCBI NO: 7532408 NR Description: splicing factor SRp54 [Drosophila melanogaster]
  misc_feature (10)..(123): Homolog of NCBI NO: 5821145 NR Description: RNA binding protein [Homo sapiens]
  misc_feature (10)..(123): Homolog of NCBI NO: 5821143 NR Description: RNA binding protein [Homo sapiens]
  misc_feature (19)..(123): Homolog of NCBI NO: 23274133 NR Description: Similar to serine/arginine repetitive matrix 1

SEQ ID NO: 13952 - DNA, 1885 bp, Zea mays subsp. mays
  misc_feature (1)..(1885): Ceres Seq. ID no. 12435283
  misc_feature: MA Experiment ID: 108504 Result: Down-regulated in Transcription
  misc_feature: MA Experiment 108504 PARAMETER Experiment Name: Zm_Drought_P Parameter: Age (day) Value: 8
  misc_feature: MA Experiment 108504 PARAMETER Experiment Name: Zm_Drought_P Parameter: Organism Value: Zea mays
  misc_feature: MA Experiment 108504 PARAMETER Experiment Name: Zm_Drought_P Parameter: Plant Line Value: 35A19
  misc_feature: MA Experiment 108504 PARAMETER Experiment Name: Zm_Drought_P Parameter: Timepoint (hr) Value: 12
  misc_feature: MA Experiment 108504 PARAMETER Experiment Name: Zm_Drought_P Parameter: Tissue Value: Aerial
  misc_feature: MA Experiment 108504 PARAMETER Experiment Name: Zm_Drought_P Parameter: Treatment Value: Drought vs. No Drought
  misc_feature: MA Experiment ID: 108535 Result: Down-regulated in Transcription
  misc_feature: MA Experiment 108535 PARAMETER Experiment Name: Zm_Meristem_P Parameter: Age (day) Value: 8
  misc_feature: MA Experiment 108535 PARAMETER Experiment Name: Zm_Meristem_P Parameter: Organism Value: Zea mays
  misc_feature: MA Experiment 108535 PARAMETER Experiment Name: Zm_Meristem_P Parameter: Plant Line Value: 35A19
  misc_feature: MA Experiment 108535 PARAMETER Experiment Name: Zm_Meristem_P Parameter: Tissue Value: Root Meristem vs. Above Root Meristem
  misc_feature: MA Experiment ID: 108544 Result: Down-regulated in Transcription
  misc_feature: MA Experiment ID: 108687 Result: Down-regulated in Transcription
  misc_feature: MA Experiment 108687 PARAMETER Experiment Name: Zm_Embryos-Flowers__P Parameter: Tissue Value: Embryo vs. Aerial+
  misc_feature: MA Experiment ID: 108689 Result: Down-regulated in Transcription
  misc_feature: MA Experiment 108689 PARAMETER Experiment Name: Zm_Drought_Roots_P Parameter: Age (day) Value: 9
  misc_feature: MA Experiment 108689 PARAMETER Experiment Name: Zm_Drought_Roots_P Parameter: Organism Value: Zea mays
  misc_feature: MA Experiment 108689 PARAMETER Experiment Name: Zm_Drought_Roots_P Parameter: Plant Line Value: 35A19
  misc_feature: MA Experiment 108689 PARAMETER Experiment Name: Zm_Drought_Roots_P Parameter: Timepoint (hr) Value: 24
  misc_feature: MA Experiment 108689 PARAMETER Experiment Name: Zm_Drought_Roots_P Parameter: Tissue Value: Roots
  misc_feature: MA Experiment 108689 PARAMETER Experiment Name: Zm_Drought_Roots_P Parameter: Treatment Value: Drought vs. No Drought
  misc_feature: MA Experiment ID: 20000477 Result: Down-regulated in Transcription
  misc_feature: MA Experiment 20000477 PARAMETER Experiment Name: Zm_5mM_SA_P Parameter: Age (day) Value: 10
  misc_feature: MA Experiment 20000477 PARAMETER Experiment Name: Zm_5mM_SA_P Parameter: Organism Value: Zea mays
  misc_feature: MA Experiment 20000477 PARAMETER Experiment Name: Zm_5mM_SA_P Parameter: Plant Line Value: 35A19
  misc_feature: MA Experiment 20000477 PARAMETER Experiment Name: Zm_5mM_SA_P Parameter: Timepoint (hr) Value: 48
  misc_feature: MA Experiment 20000477 PARAMETER Experiment Name: Zm_5mM_SA_P Parameter: Tissue Value: Aerial
  misc_feature: MA Experiment 20000477 PARAMETER Experiment Name: Zm_5mM_SA_P Parameter: Treatment Value: 5mM SA vs. No Treatment
  misc_feature: MA Experiment ID: 20000478 Result: Down-regulated in Transcription
  misc_feature: MA Experiment 20000478 PARAMETER Experiment Name: Zm_5mM_SA_P Parameter: Age (day) Value: 11
  misc_feature: MA Experiment 20000478 PARAMETER Experiment Name: Zm_5mM_SA_P Parameter: Organism Value: Zea mays
  misc_feature: MA Experiment 20000478 PARAMETER Experiment Name: Zm_5mM_SA_P Parameter: Plant Line Value: 35A19
  misc_feature: MA Experiment 20000478 PARAMETER Experiment Name: Zm_5mM_SA_P Parameter: Timepoint (hr) Value: 72
  misc_feature: MA Experiment 20000478 PARAMETER Experiment Name: Zm_5mM_SA_P Parameter: Tissue Value: Aerial
  misc_feature: MA Experiment 20000478 PARAMETER Experiment Name: Zm_5mM_SA_P Parameter: Treatment Value: 5mM SA vs. No Treatment
  misc_feature: MA Experiment ID: 20000535 Result: Down-regulated in Transcription
  misc_feature: MA Experiment 20000535 PARAMETER Experiment Name: Zm_Hybrid_Seed_Dev_P Parameter: DAP Value: 30 vs. 12
  misc_feature: MA Experiment 20000535 PARAMETER Experiment Name: Zm_Hybrid_Seed_Dev_P Parameter: Organism Value: Zea mays
  misc_feature: MA Experiment 20000535 PARAMETER Experiment Name: Zm_Hybrid_Seed_Dev_P Parameter: Plant Line Value: 35A19
  misc_feature: MA Experiment 20000535 PARAMETER Experiment Name: Zm_Hybrid_Seed_Dev_P Parameter: Tissue Value: Embryo vs. Unfert Floret
  misc_feature: MA Experiment ID: 20001613 Result: Down-regulated in Transcription
  misc_feature: MA Experiment 20001613 PARAMETER Experiment Name: Zm_50ppm_KNO3_L-to-H_P Parameter: Age (day) Value: 20
  misc_feature: MA Experiment 20001613 PARAMETER Experiment Name: Zm_50ppm_KNO3_L-to-H_P Parameter: Organism Value: Zea mays
  misc_feature: MA Experiment 20001613 PARAMETER Experiment Name: Zm_50ppm_KNO3_L-to-H_P Parameter: Plant Line Value: 35A19
  misc_feature: MA Experiment 20001613 PARAMETER Experiment Name: Zm_50ppm_KNO3_L-to-H_P Parameter: Timepoint (hr) Value: 24
  misc_feature: MA Experiment 20001613 PARAMETER Experiment Name: Zm_50ppm_KNO3_L-to-H_P Parameter: Tissue Value: Roots
  misc_feature: MA Experiment 20001613 PARAMETER Experiment Name: Zm_50ppm_KNO3_L-to-H_P Parameter: Treatment Value: 50ppm KNO3 vs. 50ppm KCl
actgccagtgctcggtgcccgtgcccgcgcgcgctagcctagctgctcctgcctggttcgccgtagcccgtagcccgtagcacaacaacaacaaaaaaaatctccgcggcgcggggggaggtggtctgttcaccttggggagcagcggcgggccgtcggccgagaaatgcccggtggcgccttcctcctcaacggcagcggcggcggcatggcggactacggcggcggcctcaccgtccccgtcgtcgtgacctgcctcatcggcggcctccggcggcctcatcttcggctacgacattggcatctcaggaggtgtgtcggagatggaggatttcctgaacaagttcttccccgggttgctcaagaggacggcgcgcgccaacaaggacgtgtactgcatttacaacaaccaggcgctgacggccttcacgtcgtcgctgtacgcgttcggcatggtggggacgctgctggcgagccgcgtgacccggcggctggggcggcaggccgtcatgctgatcggcggcggcctgttcttggccggcgccctcgtcaacgccgccgcggccaacatcgccatgctcatcgtcgggaggatgctgctcggcctggggctcggcttctccggccaggccacgccggtgtacctcgccgaggtgtcgcccccgcgctggcgcggcggcttcatctcggccttccccctcttcatcagcgtcgggtacctggtggccaacctcatcaactacggcacctcgcggatcccgggctggggctggcgcctctcgctcggcctcgcctccgtcccggccgccgtcatggtggtcggcgccgcgttcatcccggacacccccagcagcctcgtcctgcgcgggaagcacgacgacgcccgcgccgcgctccagcgggtgcgcggcaagggcgtggacatcggccccgagttcgcggacatcctcgccgcggcggagaacgaccgccggaacgaggagggcgcgttccgccggatcctgcgccgggagtaccggccctacctggtgatggccgtggcgttcccggtgttcctcaacctcacaggggtggccgtcaccgccttcttctcgccgatactgttccggaccgtcggcttcgagagcgacgccgcgctcatgggcgccgtcatcctgggcctcatgaacatcggcggcatcctcgcgtcgggcttcgccatggaccgctacggccggaagctgctcttcatgatcggtggcgcgctcatgttcacgtgccaggtggcgatggcgagcataatcggatcacacctcggcaacgggagcaagatgcccaaggggtacgcggtgacggtgctggtggtggcgctgatcttctcggcgagcttcagctggtcgtggggcgcgctgtactggaccatccccggcgagatataccccgtggaggtgcggtcggcggggcagggcgcggccgtggcgctcaacctggggctcaacttcttgcaggcgcagttcttcctggccatgctgtgctgcttcaagtacggcaccttcctcttctacgcgtcgtggctggttgtcatgaccgccttcgccgtggcgttcgtgccggagaccaagggcgtgccgctcgagtccatggctcacgtcttcgcgcgccactggtactggggcaggttcgtcaaggaccaccagaagttgggcgaagagtccacctagctaagctaataattcggaatcagcgaacgacgtaccctactaccagtagcagattattgataagggagtcaaacacatattgcgtgtgtgtgtcttttaaagtgttcgtttagaatggcttgagaagctcatccgtgtagtaaatttggagacttcgaaatataataaatatgttcgtagttggc

SEQ ID NO: 13953 - protein, 548 aa, Zea mays subsp. mays
  peptide (1)..(548): Ceres Seq. ID no. 12435284
  misc_feature (100)..(328): Pfam Name: HlyD family secretion protein Pfam Description: HlyD family secretion protein
  misc_feature (1)..(35): Homolog of NCBI NO: 11991110 NR Description: monosaccharide transporter 1 [Oryza sativa]
MPGGAFLLNGSGGGMADYGGGLTVPVVVTCLIGGLRRPHLRLRHWHLRRCVGDGGFPEQVLPRVAQEDGARQQGRVLHLQQPGADGLHVVAVRVRHGGDAAGEPRDPAAGAAGRHADRRRPVLGRRPRQRRRGQHRHAHRREDAARPGARLLRPGHAGVPRRGVAPALARRLHLGLPPLHQRRVPGGQPHQLRHLADPGLGLAPLARPRLRPGRRHGGRRRVHPGHPQQPRPAREARRRPRRAPAGARQGRGHRPRVRGHPRRGGERPPERGGRVPPDPAPGVPALPGDGRGVPGVPQPHRGGRHRLLLADTVPDRRLRERRRAHGRRHPGPHEHRRHPRVGLRHGPLRPEAALHDRWRAHVHVPGGDGEHNRITPRQREQDAQGVRGDGAGGGADLLGELQLVVGRAVLDHPRRDIPRGGAVGGAGRGRGAQPGAQLLAGAVLPGHAVLLQVRHLPLLRVVAGCHDRLRRGVRAGDQGRAARVHGSRLRAPLVLGQVRQGPPEVGRRVHLAKLIIRNQRTTYPTTSSRLLIRESNTYCVCVSFKVFV

SEQ ID NO: 13954 - protein, 534 aa, Zea mays subsp. mays
  peptide (1)..(534): Ceres Seq. ID no. 12435285
  misc_feature (86)..(314): Pfam Name: HlyD family secretion protein Pfam Description: HlyD family secretion protein
  misc_feature (1)..(21): Homolog of NCBI NO: 11991110 NR Description: monosaccharide transporter 1 [Oryza sativa]
MADYGGGLTVPVVVTCLIGGLRRPHLRLRHWHLRRCVGDGGFPEQVLPRVAQEDGARQQGRVLHLQQPGADGLHVVAVRVRHGGDAAGEPRDPAAGAAGRHADRRRPVLGRRPRQRRRGQHRHAHRREDAARPGARLLRPGHAGVPRRGVAPALARRLHLGLPPLHQRRVPGGQPHQLRHLADPGLGLAPLARPRLRPGRRHGGRRRVHPGHPQQPRPAREARRRPRRAPAGARQGRGHRPRVRGHPRRGGERPPERGGRVPPDPAPGVPALPGDGRGVPGVPQPHRGGRHRLLLADTVPDRRLRERRRAHGRRHPGPHEHRRHPRVGLRHGPLRPEAALHDRWRAHVHVPGGDGEHNRITPRQREQDAQGVRGDGAGGGADLLGELQLVVGRAVLDHPRRDIPRGGAVGGAGRGRGAQPGAQLLAGAVLPGHAVLLQVRHLPLLRVVAGCHDRLRRGVRAGDQGRAARVHGSRLRAPLVLGQVRQGPPEVGRRVHLAKLIIRNQRTTYPTTSSRLLIRESNTYCVCVSFKVFV

SEQ ID NO: 13955 - protein, 458 aa, Zea mays subsp. mays
  peptide (1)..(458): Ceres Seq. ID no. 12435286
  misc_feature (1)..(437): Pfam Name: Sugar (and other) transporter Pfam Description: Sugar (and other) transporter
  misc_feature (1)..(448): Homolog of NCBI NO: 32489200 NR Description: OSJNBa0027G07.27 [Oryza sativa (japonica
  misc_feature (1)..(458): Homolog of NCBI NO: 11991110 NR Description: monosaccharide transporter 1 [Oryza sativa]
  misc_feature (1)..(449): Homolog of NCBI NO: 21741620 NR Description: OSJNBa0027G07.12 [Oryza sativa (japonica
  misc_feature (1)..(447): Homolog of NCBI NO: 21740734 NR Description: OSJNBa0086B14.28 [Oryza sativa (japonica
  misc_feature (1)..(448): Homolog of NCBI NO: 15218693 NR Description: monosaccharide transporter, putative; protein id: [Arabidopsis thaliana] >gi|16945177|emb|CAC69071.2| STP5 protein thaliana] >gi|26452050|dbj|BAC43115.1| putative monosaccharide
  misc_feature (1)..(453): Homolog of NCBI NO: 30349813 NR Description: putative monosaccharide-H+ symporter [Medicago
  misc_feature (1)..(450): Homolog of NCBI NO: 34915514 NR Description: monosaccharide transporter 3 [Oryza sativa
  misc_feature (1)..(449): Homolog of NCBI NO: 30349804 NR Description: monosaccharide-H+ symporter [Datisca glomerata]
  misc_feature (1)..(449): Homolog of NCBI NO: 3915039 NR Description: Sugar carrier protein C >gi|7446731|pir||T10122
  misc_feature (1)..(449): Homolog of NCBI NO: 81619 NR Description: glucose transport protein STP1 - Arabidopsis >gi|16520|emb|CAA39037.1| glucose transporter [Arabidopsis
MEDFLNKFFPGLLKRTARANKDVYCIYNNQALTAFTSSLYAFGMVGTLLASRVTRRLGRQAVMLIGGGLFLAGALVNAAAANIAMLIVGRMLLGLGLGFSGQATPVYLAEVSPPRWRGGFISAFPLFISVGYLVANLINYGTSRIPGWGWRLSLGLASVPAAVMVVGAAFIPDTPSSLVLRGKHDDARAALQRVRGKGVDIGPEFADILAAAENDRRNEEGAFRRILRREYRPYLVMAVAFPVFLNLTGVAVTAFFSPILFRTVGFESDAALMGAVILGLMNIGGILASGFAMDRYGRKLLFMIGGALMFTCQVAMASIIGSHLGNGSKMPKGYAVTVLVVALIFSASFSWSWGALYWTIPGEIYPVEVRSAGQGAAVALNLGLNFLQAQFFLAMLCCFKYGTFLFYASWLVVMTAFAVAFVPETKGVPLESMAHVFARHWYWGRFVKDHQKLGEEST

SEQ ID NO: 13956 - DNA, 903 bp, Zea mays subsp. mays
  misc_feature (1)..(903): Ceres Seq. ID no. 12443307
  misc_feature: MA Experiment ID: 108523 Result: Up-regulated in Transcription
  misc_feature: MA Experiment 108523 PARAMETER Experiment Name: Zm_42deg_Heat_P Parameter: Age (day) Value: 8
  misc_feature: MA Experiment 108523 PARAMETER Experiment Name: Zm_42deg_Heat_P Parameter: Organism Value: Zea mays
  misc_feature: MA Experiment 108523 PARAMETER Experiment Name: Zm_42deg_Heat_P Parameter: Plant Line Value: 35A19
  misc_feature: MA Experiment 108523 PARAMETER Experiment Name: Zm_42deg_Heat_P Parameter: Temperature (deg C) Value: 42 vs. 22
  misc_feature: MA Experiment 108523 PARAMETER Experiment Name: Zm_42deg_Heat_P Parameter: Timepoint (hr) Value: 6
  misc_feature: MA Experiment 108523 PARAMETER Experiment Name: Zm_42deg_Heat_P Parameter: Tissue Value: Aerial
  misc_feature: MA Experiment ID: 108528 Result: Up-regulated in Transcription
  misc_feature: MA Experiment 108528 PARAMETER Experiment Name: Zm_Imbibed_Seeds_P Parameter: Age (day) Value: 5 vs. 2
  misc_feature: MA Experiment 108528 PARAMETER Experiment Name: Zm_Imbibed_Seeds_P Parameter: Organism Value: Zea mays
  misc_feature: MA Experiment 108528 PARAMETER Experiment Name: Zm_Imbibed_Seeds_P Parameter: Plant Line Value: 35A19
  misc_feature: MA Experiment 108528 PARAMETER Experiment Name: Zm_Imbibed_Seeds_P Parameter: Tissue Value: Aerial vs. Embryo
  misc_feature: MA Experiment ID: 108530 Result: Up-regulated in Transcription
  misc_feature: MA Experiment 108530 PARAMETER Experiment Name: Zm_Imbibed_Seeds_P Parameter: Age (day) Value: 6 vs. 2
  misc_feature: MA Experiment 108530 PARAMETER Experiment Name: Zm_Imbibed_Seeds_P Parameter: Organism Value: Zea mays
  misc_feature: MA Experiment 108530 PARAMETER Experiment Name: Zm_Imbibed_Seeds_P Parameter: Plant Line Value: 35A19
  misc_feature: MA Experiment 108530 PARAMETER Experiment Name: Zm_Imbibed_Seeds_P Parameter: Tissue Value: Aerial vs. Embryo
  misc_feature: MA Experiment ID: 108543 Result: Up-regulated in Transcription
  misc_feature: MA Experiment ID: 108546 Result: Down-regulated in Transcription
  misc_feature: MA Experiment 108546 PARAMETER Experiment Name: Zm_Imbibed_Seeds_P Parameter: Age (day) Value: 3 vs. 2
  misc_feature: MA Experiment 108546 PARAMETER Experiment Name: Zm_Imbibed_Seeds_P Parameter: Organism Value: Zea mays
  misc_feature: MA Experiment 108546 PARAMETER Experiment Name: Zm_Imbibed_Seeds_P Parameter: Plant Line Value: 35A19
  misc_feature: MA Experiment 108546 PARAMETER Experiment Name: Zm_Imbibed_Seeds_P Parameter: Tissue Value: Roots vs. Embryo
  misc_feature: MA Experiment ID: 108547 Result: Up-regulated in Transcription
  misc_feature: MA Experiment 108547 PARAMETER Experiment Name: Zm_Imbibed_Seeds_P Parameter: Age (day) Value: 4 vs. 2
  misc_feature: MA Experiment 108547 PARAMETER Experiment Name: Zm_Imbibed_Seeds_P Parameter: Organism Value: Zea mays
  misc_feature: MA Experiment 108547 PARAMETER Experiment Name: Zm_Imbibed_Seeds_P Parameter: Plant Line Value: 35A19
  misc_feature: MA Experiment 108547 PARAMETER Experiment Name: Zm_Imbibed_Seeds_P Parameter: Tissue Value: Aerial vs. Embryo
  misc_feature: MA Experiment ID: 108556 Result: Down-regulated in Transcription
  misc_feature: MA Experiment 108556 PARAMETER Experiment Name: Zm_Drought_P Parameter: Age (day) Value: 9
  misc_feature: MA Experiment 108556 PARAMETER Experiment Name: Zm_Drought_P Parameter: Organism Value: Zea mays
  misc_feature: MA Experiment 108556 PARAMETER Experiment Name: Zm_Drought_P Parameter: Plant Line Value: 35A19
  misc_feature: MA Experiment 108556 PARAMETER Experiment Name: Zm_Drought_P Parameter: Timepoint (hr) Value: 24
  misc_feature: MA Experiment 108556 PARAMETER Experiment Name: Zm_Drought_P Parameter: Tissue Value: Aerial
  misc_feature: MA Experiment 108556 PARAMETER Experiment Name: Zm_Drought_P Parameter: Treatment Value: Drought vs. No Drought
  misc_feature: MA Experiment ID: 108689 Result: Down-regulated in Transcription
  misc_feature: MA Experiment 108689 PARAMETER Experiment Name: Zm_Drought_Roots_P Parameter: Age (day) Value: 9
  misc_feature: MA Experiment 108689 PARAMETER Experiment Name: Zm_Drought_Roots_P Parameter: Organism Value: Zea mays
  misc_feature: MA Experiment 108689 PARAMETER Experiment Name: Zm_Drought_Roots_P Parameter: Plant Line Value: 35A19
  misc_feature: MA Experiment 108689 PARAMETER Experiment Name: Zm_Drought_Roots_P Parameter: Timepoint (hr) Value: 24
  misc_feature: MA Experiment 108689 PARAMETER Experiment Name: Zm_Drought_Roots_P Parameter: Tissue Value: Roots
  misc_feature: MA Experiment 108689 PARAMETER Experiment Name: Zm_Drought_Roots_P Parameter: Treatment Value: Drought vs. No Drought
  misc_feature: MA Experiment ID: 20000480 Result: Down-regulated in Transcription
  misc_feature: MA Experiment 20000480 PARAMETER Experiment Name: Zm_Drought_P Parameter: Age (day) Value: 11
  misc_feature: MA Experiment 20000480 PARAMETER Experiment Name: Zm_Drought_P Parameter: Organism Value: Zea mays
  misc_feature: MA Experiment 20000480 PARAMETER Experiment Name: Zm_Drought_P Parameter: Plant Line Value: 35A19
  misc_feature: MA Experiment 20000480 PARAMETER Experiment Name: Zm_Drought_P Parameter: Timepoint (hr) Value: 72
  misc_feature: MA Experiment 20000480 PARAMETER Experiment Name: Zm_Drought_P Parameter: Tissue Value: Aerial
  misc_feature: MA Experiment 20000480 PARAMETER Experiment Name: Zm_Drought_P Parameter: Treatment Value: Drought vs. No Drought
  misc_feature: MA Experiment ID: 20000488 Result: Up-regulated in Transcription
  misc_feature: MA Experiment 20000488 PARAMETER Experiment Name: Zm_50mM_NH4NO3_L_to_H_P Parameter: Organism Value: Zea mays
  misc_feature: MA Experiment 20000488 PARAMETER Experiment Name: Zm_50mM_NH4NO3_L_to_H_P Parameter: Timepoint (hr) Value: 8
  misc_feature: MA Experiment 20000488 PARAMETER Experiment Name: Zm_50mM_NH4NO3_L_to_H_P Parameter: Tissue Value: Leaves
  misc_feature: MA Experiment 20000488 PARAMETER Experiment Name: Zm_50mM_NH4NO3_L_to_H_P Parameter: Treatment Value: 50mM NH4NO3 vs. 100mM Mannitol
  misc_feature: MA Experiment ID: 20000534 Result: Down-regulated in Transcription
  misc_feature: MA Experiment 20000534 PARAMETER Experiment Name: Zm_Hybrid_Pollen_P Parameter: Age (day) Value: 8
  misc_feature: MA Experiment 20000534 PARAMETER Experiment Name: Zm_Hybrid_Pollen_P Parameter: Organism Value: Zea mays
  misc_feature: MA Experiment 20000534 PARAMETER Experiment Name: Zm_Hybrid_Pollen_P Parameter: Plant Line Value: 35A19
  misc_feature: MA Experiment 20000534 PARAMETER Experiment Name: Zm_Hybrid_Pollen_P Parameter: Tissue Value: Pollen vs. Aerial
gcaccgctcaacgtctcaacctgagaagctagctagagctagctagctccgggcgcccgcagcatggccacgaacagccaccgcattattgcgcccggcctcctgctggtcgcggccacgacgctagtcgtcgtcgtcgtcgcgcagctcgcggcgccggctgccgcctgcccctactgcccgacgccgacgccgccccctccgccaccgcccccgcccccggtggtgaacccgccgccgtcgtccacgccgtgccctccgcctccctactcgccgtccacgccgacgggcaagtgccccgtggacacgctgaagctgctggcgtgcgtggacgcgctcaacggcctcgtgcacgccgtcgtcgggaccaacgccagcgacacctgctgcccgctgctgtccggcgtggccgacctcgacgccgcgctctgcctctgcaccaccatcaaggccaaggcgctcagcgtcagcctcgtgctccccgtcgccatctccgtgctcgtcaacgagtgcggcaagcacgtgccctccagcttccagtgcccgtaataactatattagggcgcgtacttactgatcgatcatcatctgcatatgtactgctactctactgtatatatatgatgtatcgtcactaaactatatacatcatatatgtacacgtacggtcaagttatatatacatccatatataacacaaacatatacataagcatgcatgtgcagcttcatatgcataagctctgccggcttgtgatatacatggagctgcgggggttgtgcatttttttgtaaccatgtaccagtattattgtatcataaaccagtgtgagagttgtggccttggtggggtcgatcgcttgtagtagtcattaaggaaacttatgaataaagtgcgtctgt

SEQ ID NO: 13957 - protein, 161 aa, Zea mays subsp. mays
  peptide (1)..(161): Ceres Seq. ID no. 12443308
  misc_feature (78)..(160): Pfam Name: Protease inhibitor/seed storage/LTP family Pfam Description: Protease inhibitor/seed storage/LTP family
  misc_feature (12)..(161): Homolog of NCBI NO: 38568019 NR Description: OSJNBa0070C17.11 [Oryza sativa (japonica
  misc_feature (32)..(161): Homolog of NCBI NO: 38568018 NR Description: OSJNBa0070C17.10 [Oryza sativa (japonica
  misc_feature (32)..(161): Homolog of NCBI NO: 7446487 NR Description: proline rich protein homolog WCOR518 - wheat >gi|1657851|gb|AAB18205.1| cold acclimation protein WCOR518
  misc_feature (31)..(161): Homolog of NCBI NO: 7446487 NR Description: proline rich protein homolog WCOR518 - wheat >gi|1657851|gb|AAB18205.1| cold acclimation protein WCOR518
  misc_feature (37)..(161): Homolog of NCBI NO: 283044 NR Description: hybrid proline-rich protein - maize
  misc_feature (32)..(161): Homolog of NCBI NO: 34898430 NR Description: Similar to Zea mays PRP gene.(X60432) [Oryza
  misc_feature (8)..(161): Homolog of NCBI NO: 19521 NR Description: proline rich protein [Lycopersicon esculentum]
  misc_feature (8)..(161): Homolog of NCBI NO: 1709767 NR Description: 36.4 KD PROLINE-RICH PROTEIN
  misc_feature (37)..(161): Homolog of NCBI NO: 1076501 NR Description: cell wall protein - alfalfa
  misc_feature (32)..(161): Homolog of NCBI NO: 7446488 NR Description: cytokinin-induced proline rich protein - southern
MATNSHRIIAPGLLLVAATTLVVVVVAQLAAPAAACPYCPTPTPPPPPPPPPPVVNPPPSSTPCPPPPYSPSTPTGKCPVDTLKLLACVDALNGLVHAVVGTNASDTCCPLLSGVADLDAALCLCTTIKAKALSVSLVLPVAISVLVNECGKHVPSSFQCP

SEQ ID NO: 13958 - DNA, 2487 bp, Zea mays subsp. mays
  misc_feature (1)..(2487): Ceres Seq. ID no. 12435918
  misc_feature: MA Experiment ID: 108504 Result: Up-regulated in Transcription
  misc_feature: MA Experiment 108504 PARAMETER Experiment Name: Zm_Drought_P Parameter: Age (day) Value: 8
  misc_feature: MA Experiment 108504 PARAMETER Experiment Name: Zm_Drought_P Parameter: Organism Value: Zea mays
  misc_feature: MA Experiment 108504 PARAMETER Experiment Name: Zm_Drought_P Parameter: Plant Line Value: 35A19
  misc_feature: MA Experiment 108504 PARAMETER Experiment Name: Zm_Drought_P Parameter: Timepoint (hr) Value: 12
  misc_feature: MA Experiment 108504 PARAMETER Experiment Name: Zm_Drought_P Parameter: Tissue Value: Aerial
  misc_feature: MA Experiment 108504 PARAMETER Experiment Name: Zm_Drought_P Parameter: Treatment Value: Drought vs. No Drought
  misc_feature: MA Experiment ID: 108528 Result: Down-regulated in Transcription
  misc_feature: MA Experiment 108528 PARAMETER Experiment Name: Zm_Imbibed_Seeds_P Parameter: Age (day) Value: 5 vs. 2
  misc_feature: MA Experiment 108528 PARAMETER Experiment Name: Zm_Imbibed_Seeds_P Parameter: Organism Value: Zea mays
  misc_feature: MA Experiment 108528 PARAMETER Experiment Name: Zm_Imbibed_Seeds_P Parameter: Plant Line Value: 35A19
  misc_feature: MA Experiment 108528 PARAMETER Experiment Name: Zm_Imbibed_Seeds_P Parameter: Tissue Value: Aerial vs. Embryo
  misc_feature: MA Experiment ID: 108535 Result: Down-regulated in Transcription
  misc_feature: MA Experiment 108535 PARAMETER Experiment Name: Zm_Meristem_P Parameter: Age (day) Value: 8
  misc_feature: MA Experiment 108535 PARAMETER Experiment Name: Zm_Meristem_P Parameter: Organism Value: Zea mays
  misc_feature: MA Experiment 108535 PARAMETER Experiment Name: Zm_Meristem_P Parameter: Plant Line Value: 35A19
  misc_feature: MA Experiment 108535 PARAMETER Experiment Name: Zm_Meristem_P Parameter: Tissue Value: Root Meristem vs. Above Root Meristem
  misc_feature: MA Experiment ID: 108543 Result: Up-regulated in Transcription
  misc_feature: MA Experiment ID: 108544 Result: Up-regulated in Transcription
  misc_feature: MA Experiment ID: 108545 Result: Down-regulated in Transcription
  misc_feature: MA Experiment 108545 PARAMETER Experiment Name: Zm_Imbibed_Seeds_P Parameter: Age (day) Value: 3 vs. 2
  misc_feature: MA Experiment 108545 PARAMETER Experiment Name: Zm_Imbibed_Seeds_P Parameter: Organism Value: Zea mays
  misc_feature: MA Experiment 108545 PARAMETER Experiment Name: Zm_Imbibed_Seeds_P Parameter: Plant Line Value: 35A19
  misc_feature: MA Experiment 108545 PARAMETER Experiment Name: Zm_Imbibed_Seeds_P Parameter: Tissue Value: Aerial vs. Embryo
  misc_feature: MA Experiment ID: 108597 Result: Up-regulated in Transcription
  misc_feature: MA Experiment 108597 PARAMETER Experiment Name: Zm_100uM_ABA_P Parameter: Age (day) Value: 9
  misc_feature: MA Experiment 108597 PARAMETER Experiment Name: Zm_100uM_ABA_P Parameter: Organism Value: Zea mays
  misc_feature: MA Experiment 108597 PARAMETER Experiment Name: Zm_100uM_ABA_P Parameter: Plant Line Value: 35A19
  misc_feature: MA Experiment 108597 PARAMETER Experiment Name: Zm_100uM_ABA_P Parameter: Timepoint (hr) Value: 24
  misc_feature: MA Experiment 108597 PARAMETER Experiment Name: Zm_100uM_ABA_P Parameter: Tissue Value: Aerial
  misc_feature: MA Experiment 108597 PARAMETER Experiment Name: Zm_100uM_ABA_P Parameter: Treatment Value: 100uM ABA vs. No Treatment
  misc_feature: MA Experiment ID: 108687 Result: Down-regulated in Transcription
  misc_feature: MA Experiment 108687 PARAMETER Experiment Name: Zm_Embryos-Flowers__P Parameter: Tissue Value: Embryo vs. Aerial+
  misc_feature: MA Experiment ID: 20000477 Result: Up-regulated in Transcription
  misc_feature: MA Experiment 20000477 PARAMETER Experiment Name: Zm_5mM_SA_P Parameter: Age (day) Value: 10
  misc_feature: MA Experiment 20000477 PARAMETER Experiment Name: Zm_5mM_SA_P Parameter: Organism Value: Zea mays
  misc_feature: MA Experiment 20000477 PARAMETER Experiment Name: Zm_5mM_SA_P Parameter: Plant Line Value: 35A19
  misc_feature: MA Experiment 20000477 PARAMETER Experiment Name: Zm_5mM_SA_P Parameter: Timepoint (hr) Value: 48
  misc_feature: MA Experiment 20000477 PARAMETER Experiment Name: Zm_5mM_SA_P Parameter: Tissue Value: Aerial
  misc_feature: MA Experiment 20000477 PARAMETER Experiment Name: Zm_5mM_SA_P Parameter: Treatment Value: 5mM SA vs. No Treatment
  misc_feature: MA Experiment ID: 20000478 Result: Up-regulated in Transcription
  misc_feature: MA Experiment 20000478 PARAMETER Experiment Name: Zm_5mM_SA_P Parameter: Age (day) Value: 11
  misc_feature: MA Experiment 20000478 PARAMETER Experiment Name: Zm_5mM_SA_P Parameter: Organism Value: Zea mays
  misc_feature: MA Experiment 20000478 PARAMETER Experiment Name: Zm_5mM_SA_P Parameter: Plant Line Value: 35A19
  misc_feature: MA Experiment 20000478 PARAMETER Experiment Name: Zm_5mM_SA_P Parameter: Timepoint (hr) Value: 72
  misc_feature: MA Experiment 20000478 PARAMETER Experiment Name: Zm_5mM_SA_P Parameter: Tissue Value: Aerial
  misc_feature: MA Experiment 20000478 PARAMETER Experiment Name: Zm_5mM_SA_P Parameter: Treatment Value: 5mM SA vs. No Treatment
  misc_feature: MA Experiment ID: 20000479 Result: Up-regulated in Transcription
  misc_feature: MA Experiment 20000479 PARAMETER Experiment Name: Zm_Drought_P Parameter: Age (day) Value: 10
  misc_feature: MA Experiment 20000479 PARAMETER Experiment Name: Zm_Drought_P Parameter: Organism Value: Zea mays
  misc_feature: MA Experiment 20000479 PARAMETER Experiment Name: Zm_Drought_P Parameter: Plant Line Value: 35A19
  misc_feature: MA Experiment 20000479 PARAMETER Experiment Name: Zm_Drought_P Parameter: Timepoint (hr) Value: 48
  misc_feature: MA Experiment 20000479 PARAMETER Experiment Name: Zm_Drought_P Parameter: Tissue Value: Aerial
  misc_feature: MA Experiment 20000479 PARAMETER Experiment Name: Zm_Drought_P Parameter: Treatment Value: Drought vs. No Drought
  misc_feature: MA Experiment ID: 20000480 Result: Up-regulated in Transcription
  misc_feature: MA Experiment 20000480 PARAMETER Experiment Name: Zm_Drought_P Parameter: Age (day) Value: 11
  misc_feature: MA Experiment 20000480 PARAMETER Experiment Name: Zm_Drought_P Parameter: Organism Value: Zea mays
  misc_feature: MA Experiment 20000480 PARAMETER Experiment Name: Zm_Drought_P Parameter: Plant Line Value: 35A19
  misc_feature: MA Experiment 20000480 PARAMETER Experiment Name: Zm_Drought_P Parameter: Timepoint (hr) Value: 72
  misc_feature: MA Experiment 20000480 PARAMETER Experiment Name: Zm_Drought_P Parameter: Tissue Value: Aerial
  misc_feature: MA Experiment 20000480 PARAMETER Experiment Name: Zm_Drought_P Parameter: Treatment Value: Drought vs. No Drought
  misc_feature: MA Experiment ID: 20000535 Result: Down-regulated in Transcription
  misc_feature: MA Experiment 20000535 PARAMETER Experiment Name: Zm_Hybrid_Seed_Dev_P Parameter: DAP Value: 30 vs. 12
  misc_feature: MA Experiment 20000535 PARAMETER Experiment Name: Zm_Hybrid_Seed_Dev_P Parameter: Organism Value: Zea mays
  misc_feature: MA Experiment 20000535 PARAMETER Experiment Name: Zm_Hybrid_Seed_Dev_P Parameter: Plant Line Value: 35A19
  misc_feature: MA Experiment 20000535 PARAMETER Experiment Name: Zm_Hybrid_Seed_Dev_P Parameter: Tissue Value: Embryo vs. Unfert Floret
agaagatggaatcttctagagaatggtgaaaaatggaatttagaggtatataaagagaatccctccggttaatcattgatcacccaagccagtggagccttggcctcgaacagaatagaaccaaccaatcgcgcgggcgcacacagtcggcttccaccaaccacgttgccagcaggcagcggcagcctccacttgctccatgtctccatccaaccctcttccgccgccgggcgagacgcgcgtcggctgctcgttgccctcaccagtcacccctcaggccatgggcgggggccccgctcgtcatgtggccatgcgcgcccttcgcgctcgcttcctctcgcggcagcgggagggaggaccagcggcagcgtcgacctggtggtggtgcgcttcgggttcggcgaagggcgacatggagagcacgctcaaggggatacgcggcagcgatgcgccgtgcgttctggacctggacgacgcggccaccgtggcgggcggcgtcgaggacacctacggcgaggatcgcgccaccgaggagcagctcgtcacgccctggaccgtctccgtcgccagcggttacaatctgcttagggatccccgttacaacaagggacttgcgttcacagagagggaacgtgagacgcactacctccgtggccttctgccaccagctattgtatcccaggagctccaggaaagaaagatcatgaataatattcgacaataccagttgcctttgcagcgctacatggcactcatggatctccaggaagggaacgagaggcttttctacaagttgctcattgacaacgtcgaggagttacttccaatcgtgtacactccaaccgttggcgaggcctgccaaaagtatggatccatatttagtcgccctcagggtctttatatcagtttgaaggagaagggaaagatccttgaggtgttgaagaactggccagagaggagcattcaggttatagttgttactgatggtgaacgtattttggggcttggagatctcggatgccaggggatggggattcctgttggtaaactttccctttacactgccctgggaggagttcgtccatctgcttgcttgccgatcacattggatgttggtacaaataacgaggagctgcttaatgacgaattttacattggcttgagacaaagaagagccactggccaggagtacactgattttctgcaagaatttatgagtgctgtgaaacaaaactatggggagaaagtgcttattcagtttgaggattttgccaaccataatgcttttgatcttcttgcaagatatggcaccactcaccttgtattcaatgatgatattcagggaacagcttctgtggttcttgctgggcttattgcagcacaaacattacttggtggttcattggcagatcacacttaccttttccttggtgctggagaggctgggacaggtatcgctgaacttatagctcttgagatctcacgtcagacgaaagctcctatagaggagtgccgcaagaaaatctggcttgttgattcaaagggcttgattgtcagtacacgaaaggagtcccttcaacacttcaagaaaccatgggctcatgagcataaaccactcagcaacctcttagatgctgttaatgctatcaaaccaacagtgttgattggcacatccgggaaggggcaaactttcacaaaagacgttgttgaagcaatctcctcatttaacgagagaccaatcattcttgccctatcgaacccaacatcacaatctgaatgcacagctgagcaagcttacacatggagcaagggacaagcagtgtttgcgactgggagtccatttgatcctgtggagtacaatggcaagatacatgttcccggacaggcaaacaatgcctatatcttcccagggtttggcctcggcgtggtgatgtctggagctatccgcgttcatgatgacatgcttctggcagcatcggaggctctggcccagcaggtcacagaagaaaattttgagaaggggctgatttatcctcccttctcaaacataaggaagatctctgcccacattgcagccagcgttgcagcaaaggcatatgaacttggtttggcaagtaggcgccctcggccaaaggacctggtgaaatatgcagagagctgcatgtacagccccatctaccgcaactaccgttgaattcggatcaactccagttatgtgcaaatcagcagcagccttgcgtcaactgcaagatttcctaagaatataactcgtttcagtctttcatactgtaataccctaagccctctagcaatagctgtttcacgtccttttctgcccctacatattccgcagcgtttatctcttgcgatgtcatgtaaatcagctccggttaggcttttggatgctagtcagtcatggtgctgctgccgtccttccggttccggacaaggataaatttggaataaagtttgagtcgacgattcctc

SEQ ID NO: 13959 - protein, 664 aa, Zea mays subsp. mays
  peptide (1)..(664): Ceres Seq. ID no. 12435919
  misc_feature (380)..(633): Pfam Name: Malic enzyme, NAD binding domain Pfam Description: Malic enzyme, NAD binding domain
  misc_feature (72)..(664): Homolog of NCBI NO: 8118507 NR Description: NADP-dependent malic protein [Ricinus communis]
  misc_feature (72)..(664): Homolog of NCBI NO: 1708924 NR Description: NADP-DEPENDENT MALIC ENZYME (NADP-ME)
  misc_feature (72)..(664): Homolog of NCBI NO: 7431234 NR Description: malate dehydrogenase
  misc_feature (72)..(664): Homolog of NCBI NO: 1346485 NR Description: NADP-DEPENDENT MALIC ENZYME (NADP-ME)
  misc_feature (82)..(664): Homolog of NCBI NO: 4239891 NR Description: NADP-malic enzyme [Aloe arborescens]
  misc_feature (72)..(664): Homolog of NCBI NO: 1561774 NR Description: malate dehydrogenase [Vitis vinifera]
  misc_feature (72)..(664): Homolog of NCBI NO: 228412 NR Description: malic enzyme
  misc_feature (72)..(664): Homolog of NCBI NO: 282848 NR Description: malate dehydrogenase
  misc_feature (72)..(664): Homolog of NCBI NO: 15077107 NR Description: putative cytosolic NADP-malic enzyme [Flaveria
  misc_feature (91)..(664): Homolog of NCBI NO: 1170871 NR Description: NADP-DEPENDENT MALIC ENZYME, CHLOROPLAST
MSPSNPLPPPGETRVGCSLPSPVTPQAMGGGPARHVAMRALRARFLSRQREGGPAAASTWWWCASGSAKGDMESTLKGIRGSDAPCVLDLDDAATVAGGVEDTYGEDRATEEQLVTPWTVSVASGYNLLRDPRYNKGLAFTERERETHYLRGLLPPAIVSQELQERKIMNNIRQYQLPLQRYMALMDLQEGNERLFYKLLIDNVEELLPIVYTPTVGEACQKYGSIFSRPQGLYISLKEKGKILEVLKNWPERSIQVIVVTDGERILGLGDLGCQGMGIPVGKLSLYTALGGVRPSACLPITLDVGTNNEELLNDEFYIGLRQRRATGQEYTDFLQEFMSAVKQNYGEKVLIQFEDFANHNAFDLLARYGTTHLVFNDDIQGTASVVLAGLIAAQTLLGGSLADHTYLFLGAGEAGTGIAELIALEISRQTKAPIEECRKKIWLVDSKGLIVSTRKESLQHFKKPWAHEHKPLSNLLDAVNAIKPTVLIGTSGKGQTFTKDVVEAISSFNERPIILALSNPTSQSECTAEQAYTWSKGQAVFATGSPFDPVEYNGKIHVPGQANNAYIFPGFGLGVVMSGAIRVHDDMLLAASEALAQQVTEENFEKGLIYPPFSNIRKISAHIAASVAAKAYELGLASRRPRPKDLVKYAESCMYSPIYRNYR

SEQ ID NO: 13960 - protein, 637 aa, Zea mays subsp. mays
  peptide (1)..(637): Ceres Seq. ID no. 12435920
  misc_feature (353)..(606): Pfam Name: Malic enzyme, NAD binding domain Pfam Description: Malic enzyme, NAD binding domain
  misc_feature (45)..(637): Homolog of NCBI NO: 8118507 NR Description: NADP-dependent malic protein [Ricinus communis]
  misc_feature (45)..(637): Homolog of NCBI NO: 1708924 NR Description: NADP-DEPENDENT MALIC ENZYME (NADP-ME)
  misc_feature (45)..(637): Homolog of NCBI NO: 7431234 NR Description: malate dehydrogenase
  misc_feature (45)..(637): Homolog of NCBI NO: 1346485 NR Description: NADP-DEPENDENT MALIC ENZYME (NADP-ME)
  misc_feature (55)..(637): Homolog of NCBI NO: 4239891 NR Description: NADP-malic enzyme [Aloe arborescens]
  misc_feature (45)..(637): Homolog of NCBI NO: 1561774 NR Description: malate dehydrogenase [Vitis vinifera]
  misc_feature (45)..(637): Homolog of NCBI NO: 228412 NR Description: malic enzyme
  misc_feature (45)..(637): Homolog of NCBI NO: 282848 NR Description: malate dehydrogenase
  misc_feature (45)..(637): Homolog of NCBI NO: 15077107 NR Description: putative cytosolic NADP-malic enzyme [Flaveria
  misc_feature (64)..(637): Homolog of NCBI NO: 1170871 NR Description: NADP-DEPENDENT MALIC ENZYME, CHLOROPLAST
MGGGPARHVAMRALRARFLSRQREGGPAAASTWWWCASGSAKGDMESTLKGIRGSDAPCVLDLDDAATVAGGVEDTYGEDRATEEQLVTPWTVSVASGYNLLRDPRYNKGLAFTERERETHYLRGLLPPAIVSQELQERKIMNNIRQYQLPLQRYMALMDLQEGNERLFYKLLIDNVEELLPIVYTPTVGEACQKYGSIFSRPQGLYISLKEKGKILEVLKNWPERSIQVIVVTDGERILGLGDLGCQGMGIPVGKLSLYTALGGVRPSACLPITLDVGTNNEELLNDEFYIGLRQRRATGQEYTDFLQEFMSAVKQNYGEKVLIQFEDFANHNAFDLLARYGTTHLVFNDDIQGTASVVLAGLIAAQTLLGGSLADHTYLFLGAGEAGTGIAELIALEISRQTKAPIEECRKKIWLVDSKGLIVSTRKESLQHFKKPWAHEHKPLSNLLDAVNAIKPTVLIGTSGKGQTFTKDVVEAISSFNERPIILALSNPTSQSECTAEQAYTWSKGQAVFATGSPFDPVEYNGKIHVPGQANNAYIFPGFGLGVVMSGAIRVHDDMLLAASEALAQQVTEENFEKGLIYPPFSNIRKISAHIAASVAAKAYELGLASRRPRPKDLVKYAESCMYSPIYRNYR

SEQ ID NO: 13961 - protein, 627 aa, Zea mays subsp. mays
  peptide (1)..(627): Ceres Seq. ID no. 12435921
  misc_feature (343)..(596): Pfam Name: Malic enzyme, NAD binding domain Pfam Description: Malic enzyme, NAD binding domain
  misc_feature (35)..(627): Homolog of NCBI NO: 8118507 NR Description: NADP-dependent malic protein [Ricinus communis]
  misc_feature (35)..(627): Homolog of NCBI NO: 1708924 NR Description: NADP-DEPENDENT MALIC ENZYME (NADP-ME)
  misc_feature (35)..(627): Homolog of NCBI NO: 7431234 NR Description: malate dehydrogenase
  misc_feature (35)..(627): Homolog of NCBI NO: 1346485 NR Description: NADP-DEPENDENT MALIC ENZYME (NADP-ME)
  misc_feature (45)..(627): Homolog of NCBI NO: 4239891 NR Description: NADP-malic enzyme [Aloe arborescens]
  misc_feature (35)..(627): Homolog of NCBI NO: 1561774 NR Description: malate dehydrogenase [Vitis vinifera]
  misc_feature (35)..(627): Homolog of NCBI NO: 228412 NR Description: malic enzyme
  misc_feature (35)..(627): Homolog of NCBI NO: 282848 NR Description: malate dehydrogenase
  misc_feature (35)..(627): Homolog of NCBI NO: 15077107 NR Description: putative cytosolic NADP-malic enzyme [Flaveria
  misc_feature (54)..(627): Homolog of NCBI NO: 1170871 NR Description: NADP-DEPENDENT MALIC ENZYME, CHLOROPLAST
MRALRARFLSRQREGGPAAASTWWWCASGSAKGDMESTLKGIRGSDAPCVLDLDDAATVAGGVEDTYGEDRATEEQLVTPWTVSVASGYNLLRDPRYNKGLAFTERERETHYLRGLLPPAIVSQELQERKIMNNIRQYQLPLQRYMALMDLQEGNERLFYKLLIDNVEELLPIVYTPTVGEACQKYGSIFSRPQGLYISLKEKGKILEVLKNWPERSIQVIVVTDGERILGLGDLGCQGMGIPVGKLSLYTALGGVRPSACLPITLDVGTNNEELLNDEFYIGLRQRRATGQEYTDFLQEFMSAVKQNYGEKVLIQFEDFANHNAFDLLARYGTTHLVFNDDIQGTASVVLAGLIAAQTLLGGSLADHTYLFLGAGEAGTGIAELIALEISRQTKAPIEECRKKIWLVDSKGLIVSTRKESLQHFKKPWAHEHKPLSNLLDAVNAIKPTVLIGTSGKGQTFTKDVVEAISSFNERPIILALSNPTSQSECTAEQAYTWSKGQAVFATGSPFDPVEYNGKIHVPGQANNAYIFPGFGLGVVMSGAIRVHDDMLLAASEALAQQVTEENFEKGLIYPPFSNIRKISAHIAASVAAKAYELGLASRRPRPKDLVKYAESCMYSPIYRNYR

SEQ ID NO: 13962 - DNA, 474 bp, Zea mays subsp. mays
  misc_feature (1)..(474): Ceres Seq. ID no. 4615028
  misc_feature: MA Experiment ID: 108522 Result: Up-regulated in Transcription
  misc_feature: MA Experiment 108522 PARAMETER Experiment Name: Zm_42deg_Heat_P Parameter: Age (day) Value: 8
  misc_feature: MA Experiment 108522 PARAMETER Experiment Name: Zm_42deg_Heat_P Parameter: Organism Value: Zea mays
  misc_feature: MA Experiment 108522 PARAMETER Experiment Name: Zm_42deg_Heat_P Parameter: Plant Line Value: 35A19
  misc_feature: MA Experiment 108522 PARAMETER Experiment Name: Zm_42deg_Heat_P Parameter: Temperature (deg C) Value: 42 vs. 22
  misc_feature: MA Experiment 108522 PARAMETER Experiment Name: Zm_42deg_Heat_P Parameter: Timepoint (hr) Value: 1
  misc_feature: MA Experiment 108522 PARAMETER Experiment Name: Zm_42deg_Heat_P Parameter: Tissue Value: Aerial
  misc_feature: MA Experiment ID: 108689 Result: Up-regulated in Transcription
  misc_feature: MA Experiment 108689 PARAMETER Experiment Name: Zm_Drought_Roots_P Parameter: Age (day) Value: 9
  misc_feature: MA Experiment 108689 PARAMETER Experiment Name: Zm_Drought_Roots_P Parameter: Organism Value: Zea mays
  misc_feature: MA Experiment 108689 PARAMETER Experiment Name: Zm_Drought_Roots_P Parameter: Plant Line Value: 35A19
  misc_feature: MA Experiment 108689 PARAMETER Experiment Name: Zm_Drought_Roots_P Parameter: Timepoint (hr) Value: 24
  misc_feature: MA Experiment 108689 PARAMETER Experiment Name: Zm_Drought_Roots_P Parameter: Tissue Value: Roots
  misc_feature: MA Experiment 108689 PARAMETER Experiment Name: Zm_Drought_Roots_P Parameter: Treatment Value: Drought vs. No Drought
  misc_feature: MA Experiment ID: 20000480 Result: Up-regulated in Transcription
  misc_feature: MA Experiment 20000480 PARAMETER Experiment Name: Zm_Drought_P Parameter: Age (day) Value: 11
  misc_feature: MA Experiment 20000480 PARAMETER Experiment Name: Zm_Drought_P Parameter: Organism Value: Zea mays
  misc_feature: MA Experiment 20000480 PARAMETER Experiment Name: Zm_Drought_P Parameter: Plant Line Value: 35A19
  misc_feature: MA Experiment 20000480 PARAMETER Experiment Name: Zm_Drought_P Parameter: Timepoint (hr) Value: 72
  misc_feature: MA Experiment 20000480 PARAMETER Experiment Name: Zm_Drought_P Parameter: Tissue Value: Aerial
  misc_feature: MA Experiment 20000480 PARAMETER Experiment Name: Zm_Drought_P Parameter: Treatment Value: Drought vs. No Drought
atcagaaccgatccttacagagagacacccccagcgcgcgaggtatctacatcgatcatcaccagcgagccagccggccgaacgagcagcaccgatggcggcgtacatgcgcgtgacgcaccgcgacgagaaaggcaagaaggtgacggakaagatgccggtcccggagacgcggcgcccggacacggccaagcacttcgagcgcaagctggaggagcagggcctacaccgcttcgagcggcacccggcgaacgcgccccggggcgtgggcatcggcgccccgccgcccaagtccgggcgcggcggcmagtacacgtgggagggccccggcggcctcgtcgaggaccagctcgacccggcgccgcccgccatcgacccmaacgaccccaactacgaggaggcggaggakggaggggcggcggacgaggacgacgaggcggccagggaggtggtcgtcggggaggtggaggtcgc

SEQ ID NO: 13963 - protein, 158 aa, Zea mays subsp. mays
  peptide (1)..(158): Ceres Seq. ID no. 4615029
  misc_feature (50)..(157): Pfam Name: 7 transmembrane receptor (rhodopsin family) Pfam Description: 7 transmembrane receptor (rhodopsin family)
  misc_feature (26)..(157): Homolog of NCBI NO: 32141270 NR Description: probable translational initiation factor coelicolor A3(2)] >gi|24413891|emb|CAD55362.1| probable
  misc_feature (22)..(157): Homolog of NCBI NO: 22960558 NR Description: hypothetical protein [Rhodobacter sphaeroides]
  misc_feature (24)..(157): Homolog of NCBI NO: 32141270 NR Description: probable translational initiation factor coelicolor A3(2)] >gi|24413891|emb|CAD55362.1| probable
  misc_feature (25)..(157): Homolog of NCBI NO: 7494125 NR Description: myosin-IA - Acanthamoeba castellanii
  misc_feature (28)..(157): Homolog of NCBI NO: 29829093 NR Description: putative translation initiation factor IF-2
  misc_feature (29)..(156): Homolog of NCBI NO: 23019271 NR Description: hypothetical protein [Thermobifida fusca]
  misc_feature (45)..(156): Homolog of NCBI NO: 105270 NR Description: alpha-2A-adrenergic receptor - human
  misc_feature (45)..(156): Homolog of NCBI NO: 178192 NR Description: alpha-2-adrenergic receptor old gene name 'ADRA2R'
  misc_feature (20)..(157): Homolog of NCBI NO: 27380286 NR Description: bll5175 [Bradyrhizobium japonicum]
  misc_feature (50)..(157): Homolog of NCBI NO: 127749 NR Description: Myosin IC heavy chain >gi|71609|pir||MWAXIC
  misc_feature (51)..(51): Xaa is any aa, unknown or other
  misc_feature (103)..(103): Xaa is any aa, unknown or other
  misc_feature (127)..(127): Xaa is any aa, unknown or other
  misc_feature (137)..(137): Xaa is any aa, unknown or other
IRTDPYRETPPAREVSTSIITSEPAGRTSSTDGGVHARDAPRRERQEGDGXDAGPGDAAPGHGQALRAQAGGAGPTPLRAAPGERAPGRGHRRPAAQVRARRXVHVGGPRRPRRGPARPGAARHRPXRPQLRGGGGXRGGGRGRRGGQGGGRRGGGGR

SEQ ID NO: 13964 - protein, 157 aa, Zea mays subsp. mays
  peptide (1)..(157): Ceres Seq. ID no. 4615030
  misc_feature (36)..(156): Homolog of NCBI NO: 18398726 NR Description: expressed protein; protein id: At3g10020.1, by cDNA: 7073., supported by cDNA: gi_15081659, supported by gi_15529275, supported by cDNA: gi_15809811, supported by cDNA:
  misc_feature (50)..(50): Xaa is any aa, unknown or other
  misc_feature (103)..(103): Xaa is any aa, unknown or other
  misc_feature (126)..(126): Xaa is any aa, unknown or other
  misc_feature (136)..(136): Xaa is any aa, unknown or other
SEPILTERHPQRARYLHRSSPASQPAERAAPMAAYMRVTHRDEKGKKVTXKMPVPETRRPDTAKHFERKLEEQGLHRFERHPANAPRGVGIGAPPPKSGRGGXYTWEGPGGLVEDQLDPAPPAIDXNDPNYEEAEXGGAADEDDEAAREVVVGEVEV

SEQ ID NO: 13965 - protein, 126 aa, Zea mays subsp. mays
  peptide (1)..(126): Ceres Seq. ID no. 4615031
  misc_feature (5)..(125): Homolog of NCBI NO: 18398726 NR Description: expressed protein; protein id: At3g10020.1, by cDNA: 7073., supported by cDNA: gi_15081659, supported by gi_15529275, supported by cDNA: gi_15809811, supported by cDNA:
  misc_feature (19)..(19): Xaa is any aa, unknown or other
  misc_feature (72)..(72): Xaa is any aa, unknown or other
  misc_feature (95)..(95): Xaa is any aa, unknown or other
  misc_feature (105)..(105): Xaa is any aa, unknown or other
MAAYMRVTHRDEKGKKVTXKMPVPETRRPDTAKHFERKLEEQGLHRFERHPANAPRGVGIGAPPPKSGRGGXYTWEGPGGLVEDQLDPAPPAIDXNDPNYEEAEXGGAADEDDEAAREVVVGEVEV

SEQ ID NO: 13966 - DNA, 1100 bp, Zea mays subsp. mays
  misc_feature (1)..(1100): Ceres Seq. ID no. 13494902
  misc_feature: MA Experiment ID: 108504 Result: Down-regulated in Transcription
  misc_feature: MA Experiment 108504 PARAMETER Experiment Name: Zm_Drought_P Parameter: Age (day) Value: 8
  misc_feature: MA Experiment 108504 PARAMETER Experiment Name: Zm_Drought_P Parameter: Organism Value: Zea mays
  misc_feature: MA Experiment 108504 PARAMETER Experiment Name: Zm_Drought_P Parameter: Plant Line Value: 35A19
  misc_feature: MA Experiment 108504 PARAMETER Experiment Name: Zm_Drought_P Parameter: Timepoint (hr) Value: 12
  misc_feature: MA Experiment 108504 PARAMETER Experiment Name: Zm_Drought_P Parameter: Tissue Value: Aerial
  misc_feature: MA Experiment 108504 PARAMETER Experiment Name: Zm_Drought_P Parameter: Treatment Value: Drought vs. No Drought
  misc_feature: MA Experiment ID: 108535 Result: Up-regulated in Transcription
  misc_feature: MA Experiment 108535 PARAMETER Experiment Name: Zm_Meristem_P Parameter: Age (day) Value: 8
  misc_feature: MA Experiment 108535 PARAMETER Experiment Name: Zm_Meristem_P Parameter: Organism Value: Zea mays
  misc_feature: MA Experiment 108535 PARAMETER Experiment Name: Zm_Meristem_P Parameter: Plant Line Value: 35A19
  misc_feature: MA Experiment 108535 PARAMETER Experiment Name: Zm_Meristem_P Parameter: Tissue Value: Root Meristem vs. Above Root Meristem
  misc_feature: MA Experiment ID: 108540 Result: Down-regulated in Transcription
  misc_feature: MA Experiment 108540 PARAMETER Experiment Name: Zm_20percent_PEG_P Parameter: Age (day) Value: 8
  misc_feature: MA Experiment 108540 PARAMETER Experiment Name: Zm_20percent_PEG_P Parameter: Organism Value: Zea mays
  misc_feature: MA Experiment 108540 PARAMETER Experiment Name: Zm_20percent_PEG_P Parameter: Plant Line Value: 35A19
  misc_feature: MA Experiment 108540 PARAMETER Experiment Name: Zm_20percent_PEG_P Parameter: Timepoint (hr) Value: 6
  misc_feature: MA Experiment 108540 PARAMETER Experiment Name: Zm_20percent_PEG_P Parameter: Tissue Value: Aerial
  misc_feature: MA Experiment 108540 PARAMETER Experiment Name: Zm_20percent_PEG_P Parameter: Treatment Value: 20percent PEG vs. No Treatment
  misc_feature: MA Experiment ID: 108544 Result: Down-regulated in Transcription
  misc_feature: MA Experiment ID: 108556 Result: Down-regulated in Transcription
  misc_feature: MA Experiment 108556 PARAMETER Experiment Name: Zm_Drought_P Parameter: Age (day) Value: 9
  misc_feature: MA Experiment 108556 PARAMETER Experiment Name: Zm_Drought_P Parameter: Organism Value: Zea mays
  misc_feature: MA Experiment 108556 PARAMETER Experiment Name: Zm_Drought_P Parameter: Plant Line Value: 35A19
  misc_feature: MA Experiment 108556 PARAMETER Experiment Name: Zm_Drought_P Parameter: Timepoint (hr) Value: 24
  misc_feature: MA Experiment 108556 PARAMETER Experiment Name: Zm_Drought_P Parameter: Tissue Value: Aerial
  misc_feature: MA Experiment 108556 PARAMETER Experiment Name: Zm_Drought_P Parameter: Treatment Value: Drought vs. No Drought
  misc_feature: MA Experiment ID: 108687 Result: Down-regulated in Transcription
  misc_feature: MA Experiment 108687 PARAMETER Experiment Name: Zm_Embryos-Flowers__P Parameter: Tissue Value: Embryo vs. Aerial+
  misc_feature: MA Experiment ID: 20000477 Result: Down-regulated in Transcription
  misc_feature: MA Experiment 20000477 PARAMETER Experiment Name: Zm_5mM_SA_P Parameter: Age (day) Value: 10
  misc_feature: MA Experiment 20000477 PARAMETER Experiment Name: Zm_5mM_SA_P Parameter: Organism Value: Zea mays
  misc_feature: MA Experiment 20000477 PARAMETER Experiment Name: Zm_5mM_SA_P Parameter: Plant Line Value: 35A19
  misc_feature: MA Experiment 20000477 PARAMETER Experiment Name: Zm_5mM_SA_P Parameter: Timepoint (hr) Value: 48
  misc_feature: MA Experiment 20000477 PARAMETER Experiment Name: Zm_5mM_SA_P Parameter: Tissue Value: Aerial
  misc_feature: MA Experiment 20000477 PARAMETER Experiment Name: Zm_5mM_SA_P Parameter: Treatment Value: 5mM SA vs. No Treatment
  misc_feature: MA Experiment ID: 20000478 Result: Down-regulated in Transcription
  misc_feature: MA Experiment 20000478 PARAMETER Experiment Name: Zm_5mM_SA_P Parameter: Age (day) Value: 11
  misc_feature: MA Experiment 20000478 PARAMETER Experiment Name: Zm_5mM_SA_P Parameter: Organism Value: Zea mays
  misc_feature: MA Experiment 20000478 PARAMETER Experiment Name: Zm_5mM_SA_P Parameter: Plant Line Value: 35A19
  misc_feature: MA Experiment 20000478 PARAMETER Experiment Name: Zm_5mM_SA_P Parameter: Timepoint (hr) Value: 72
  misc_feature: MA Experiment 20000478 PARAMETER Experiment Name: Zm_5mM_SA_P Parameter: Tissue Value: Aerial
  misc_feature: MA Experiment 20000478 PARAMETER Experiment Name: Zm_5mM_SA_P Parameter: Treatment Value: 5mM SA vs. No Treatment
  misc_feature: MA Experiment ID: 20000479 Result: Down-regulated in Transcription
  misc_feature: MA Experiment 20000479 PARAMETER Experiment Name: Zm_Drought_P Parameter: Age (day) Value: 10
  misc_feature: MA Experiment 20000479 PARAMETER Experiment Name: Zm_Drought_P Parameter: Organism Value: Zea mays
  misc_feature: MA Experiment 20000479 PARAMETER Experiment Name: Zm_Drought_P Parameter: Plant Line Value: 35A19
  misc_feature: MA Experiment 20000479 PARAMETER Experiment Name: Zm_Drought_P Parameter: Timepoint (hr) Value: 48
  misc_feature: MA Experiment 20000479 PARAMETER Experiment Name: Zm_Drought_P Parameter: Tissue Value: Aerial
  misc_feature: MA Experiment 20000479 PARAMETER Experiment Name: Zm_Drought_P Parameter: Treatment Value: Drought vs. No Drought
  misc_feature: MA Experiment ID: 20000492 Result: Up-regulated in Transcription
  misc_feature: MA Experiment 20000492 PARAMETER Experiment Name: Zm_Hybrid_Seed_Dev_P Parameter: DAP Value: 12
  misc_feature: MA Experiment 20000492 PARAMETER Experiment Name: Zm_Hybrid_Seed_Dev_P Parameter: Organism Value: Zea mays
  misc_feature: MA Experiment 20000492 PARAMETER Experiment Name: Zm_Hybrid_Seed_Dev_P Parameter: Plant Line Value: 35A19
  misc_feature: MA Experiment 20000492 PARAMETER Experiment Name: Zm_Hybrid_Seed_Dev_P Parameter: Tissue Value: Fert Kernel vs. Unfert Floret
  misc_feature: MA Experiment ID: 20000534 Result: Down-regulated in Transcription
  misc_feature: MA Experiment 20000534 PARAMETER Experiment Name: Zm_Hybrid_Pollen_P Parameter: Age (day) Value: 8
  misc_feature: MA Experiment 20000534 PARAMETER Experiment Name: Zm_Hybrid_Pollen_P Parameter: Organism Value: Zea mays
  misc_feature: MA Experiment 20000534 PARAMETER Experiment Name: Zm_Hybrid_Pollen_P Parameter: Plant Line Value: 35A19
  misc_feature: MA Experiment 20000534 PARAMETER Experiment Name: Zm_Hybrid_Pollen_P Parameter: Tissue Value: Pollen vs. Aerial
  misc_feature: MA Experiment ID: 20000632 Result: Down-regulated in Transcription
  misc_feature: MA Experiment 20000632 PARAMETER Experiment Name: Zm_Herbicide-Treatments_P Parameter: Timepoint (hr) Value: 4
  misc_feature: MA Experiment 20000632 PARAMETER Experiment Name: Zm_Herbicide-Treatments_P Parameter: Tissue Value: Aerial
  misc_feature: MA Experiment 20000632 PARAMETER Experiment Name: Zm_Herbicide-Treatments_P Parameter: Treatment Value: Glean vs. No Treatment
  misc_feature: MA Experiment ID: 20000633 Result: Down-regulated in Transcription
  misc_feature: MA Experiment 20000633 PARAMETER Experiment Name: Zm_Herbicide-Treatments_P Parameter: Timepoint (hr) Value: 4
  misc_feature: MA Experiment 20000633 PARAMETER Experiment Name: Zm_Herbicide-Treatments_P Parameter: Tissue Value: Aerial
  misc_feature: MA Experiment 20000633 PARAMETER Experiment Name: Zm_Herbicide-Treatments_P Parameter: Treatment Value: Trimec vs. No Treatment
ccccaaacgcctccctattaatctccccgcgttccccttccctcgcgccgccgctctcccctcccaaagctcgccccgctcccagctagggtttcctcttcccatccacagccgccgagcgccgccgacgaggacagcgccgccacgatgttggagttgcgtctggtgcaggggagcctcctcaagaaggtcttggaggcgatccgcgagctggtcacggacgccaacttcgactgctccgggaccgggttctcgctgcaggccatggactcgagccacgtcgcgctcgtcgcgctgctccttcgcgccgagggcttcgagcactaccgctgcgaccgcaacctctccatgggcatgaacctcaacaacatggccaagatgctccgctgcgccggcaacgaggacatcatcaccatcaaggccgacgacggctccgacaccgtcactttcatgttcgagtcgcccaagcaagataagatcgcggatttcgagatgaaactgatggacattgatagcgagcacctcggaatcccggattccgagtaccaggccatcgtccgcatgccttctgctgagtttatgaggatctgcaaagatcttagcagcatcggagacacagtcgtcatctcggtgactaaggagggcgtgaagttctccacatctggagaaattgggagtgcaaacattgtctgcaggcagaaccaaactattgacaagccagaagaggctaccattatagagatgcaggagccggtttccctgacctttgccctgcggtacatgaactcctttaccaaggcgtcttcactgtctgagcaagtcactatcagcctgtcgtccgagcttccagtggtggtcgagtacaagatcgctgagatgggttacattagattttacctggcccccaagatcgacgatgacgaggagatgaagccctgatggcctgtgacgacataatgctcgtgttgcctgctcttccttccagccgttgtttgcttagctactctttgcaagcgaagggatgtgatgtgtatctcttaggctagactgcttcacgtagttttctgtgactgcttcatgaatccatggattactgattt

SEQ ID NO: 13967 - protein, 263 aa, Zea mays subsp. mays
  peptide (1)..(263): Ceres Seq. ID no. 13494903
  misc_feature (1)..(125): Pfam Name: Proliferating cell nuclear antigen, N-terminal domain Pfam Description: Proliferating cell nuclear antigen, N-terminal
  misc_feature (1)..(263): Homolog of NCBI NO: 3608175 NR Description: proliferating cell nuclear antigen [Pisum >gi|3821259|emb|CAA77062.1| PCNA protein [Nicotiana tabacum]
  misc_feature (1)..(263): Homolog of NCBI NO: 6225836 NR Description: Proliferating cell nuclear antigen (PCNA) proliferating cell nuclear antigen [Nicotiana tabacum] proliferating cell nuclear antigen [Nicotiana tabacum]
  misc_feature (1)..(263): Homolog of NCBI NO: 129692 NR Description: PROLIFERATING CELL NUCLEAR ANTIGEN (PCNA) (CYCLIN)
  misc_feature (1)..(263): Homolog of NCBI NO: 2499442 NR Description: PROLIFERATING CELL NUCLEAR ANTIGEN (PCNA)
  misc_feature (1)..(263): Homolog of NCBI NO: 10946427 NR Description: proliferating cell nuclear antigen [Nicotiana
  misc_feature (1)..(263): Homolog of NCBI NO: 25005275 NR Description: proliferating cell nuclear antigen [Lycopersicon
  misc_feature (1)..(262): Homolog of NCBI NO: 129697 NR Description: PROLIFERATING CELL NUCLEAR ANTIGEN (PCNA) (CYCLIN)
  misc_feature (1)..(263): Homolog of NCBI NO: 4099508 NR Description: proliferating cell nuclear antigen [Zea mays]
  misc_feature (1)..(263): Homolog of NCBI NO: 3947727 NR Description: proliferating cell nuclear antigen [Nicotiana
  misc_feature (1)..(260): Homolog of NCBI NO: 129691 NR Description: PROLIFERATING CELL NUCLEAR ANTIGEN (PCNA) (CYCLIN)
MLELRLVQGSLLKKVLEAIRELVTDANFDCSGTGFSLQAMDSSHVALVALLLRAEGFEHYRCDRNLSMGMNLNNMAKMLRCAGNEDIITIKADDGSDTVTFMFESPKQDKIADFEMKLMDIDSEHLGIPDSEYQAIVRMPSAEFMRICKDLSSIGDTVVISVTKEGVKFSTSGEIGSANIVCRQNQTIDKPEEATIIEMQEPVSLTFALRYMNSFTKASSLSEQVTISLSSELPVVVEYKIAEMGYIRFYLAPKIDDDEEMKP

SEQ ID NO: 13968 - protein, 224 aa, Zea mays subsp. mays
  peptide (1)..(224): Ceres Seq. ID no. 13494904
  misc_feature (1)..(86): Pfam Name: Proliferating cell nuclear antigen, N-terminal domain Pfam Description: Proliferating cell nuclear antigen, N-terminal
  misc_feature (1)..(224): Homolog of NCBI NO: 4099508 NR Description: proliferating cell nuclear antigen [Zea mays]
  misc_feature (1)..(224): Homolog of NCBI NO: 2499442 NR Description: PROLIFERATING CELL NUCLEAR ANTIGEN (PCNA)
  misc_feature (1)..(223): Homolog of NCBI NO: 129697 NR Description: PROLIFERATING CELL NUCLEAR ANTIGEN (PCNA) (CYCLIN)
  misc_feature (1)..(224): Homolog of NCBI NO: 10946427 NR Description: proliferating cell nuclear antigen [Nicotiana
  misc_feature (1)..(224): Homolog of NCBI NO: 25005275 NR Description: proliferating cell nuclear antigen [Lycopersicon
  misc_feature (1)..(224): Homolog of NCBI NO: 3608175 NR Description: proliferating cell nuclear antigen [Pisum >gi|3821259|emb|CAA77062.1| PCNA protein [Nicotiana tabacum]
  misc_feature (1)..(224): Homolog of NCBI NO: 6225836 NR Description: Proliferating cell nuclear antigen (PCNA) proliferating cell nuclear antigen [Nicotiana tabacum] proliferating cell nuclear antigen [Nicotiana tabacum]
  misc_feature (1)..(224): Homolog of NCBI NO: 129692 NR Description: PROLIFERATING CELL NUCLEAR ANTIGEN (PCNA) (CYCLIN)
  misc_feature (1)..(224): Homolog of NCBI NO: 3947727 NR Description: proliferating cell nuclear antigen [Nicotiana
  misc_feature (1)..(221): Homolog of NCBI NO: 129691 NR Description: PROLIFERATING CELL NUCLEAR ANTIGEN (PCNA) (CYCLIN)
MDSSHVALVALLLRAEGFEHYRCDRNLSMGMNLNNMAKMLRCAGNEDIITIKADDGSDTVTFMFESPKQDKIADFEMKLMDIDSEHLGIPDSEYQAIVRMPSAEFMRICKDLSSIGDTVVISVTKEGVKFSTSGEIGSANIVCRQNQTIDKPEEATIIEMQEPVSLTFALRYMNSFTKASSLSEQVTISLSSELPVVVEYKIAEMGYIRFYLAPKIDDDEEMKP

SEQ ID NO: 13969 - protein, 196 aa, Zea mays subsp. mays
  peptide (1)..(196): Ceres Seq. ID no. 13494905
  misc_feature (1)..(58): Pfam Name: Proliferating cell nuclear antigen, N-terminal domain Pfam Description: Proliferating cell nuclear antigen, N-terminal
  misc_feature (1)..(196): Homolog of NCBI NO: 4099508 NR Description: proliferating cell nuclear antigen [Zea mays]
  misc_feature (1)..(196): Homolog of NCBI NO: 2499442 NR Description: PROLIFERATING CELL NUCLEAR ANTIGEN (PCNA)
  misc_feature (1)..(195): Homolog of NCBI NO: 129697 NR Description: PROLIFERATING CELL NUCLEAR ANTIGEN (PCNA) (CYCLIN)
  misc_feature (1)..(196): Homolog of NCBI NO: 10946427 NR Description: proliferating cell nuclear antigen [Nicotiana
  misc_feature (1)..(196): Homolog of NCBI NO: 25005275 NR Description: proliferating cell nuclear antigen [Lycopersicon
  misc_feature (1)..(196): Homolog of NCBI NO: 3608175 NR Description: proliferating cell nuclear antigen [Pisum >gi|3821259|emb|CAA77062.1| PCNA protein [Nicotiana tabacum]
  misc_feature (1)..(196): Homolog of NCBI NO: 6225836 NR Description: Proliferating cell nuclear antigen (PCNA) proliferating cell nuclear antigen [Nicotiana tabacum] proliferating cell nuclear antigen [Nicotiana tabacum]
  misc_feature (1)..(196): Homolog of NCBI NO: 129692 NR Description: PROLIFERATING CELL NUCLEAR ANTIGEN (PCNA) (CYCLIN)
  misc_feature (1)..(196): Homolog of NCBI NO: 3947727 NR Description: proliferating cell nuclear antigen [Nicotiana
  misc_feature (1)..(193): Homolog of NCBI NO: 129691 NR Description: PROLIFERATING CELL NUCLEAR ANTIGEN (PCNA) (CYCLIN)
MGMNLNNMAKMLRCAGNEDIITIKADDGSDTVTFMFESPKQDKIADFEMKLMDIDSEHLGIPDSEYQAIVRMPSAEFMRICKDLSSIGDTVVISVTKEGVKFSTSGEIGSANIVCRQNQTIDKPEEATIIEMQEPVSLTFALRYMNSFTKASSLSEQVTISLSSELPVVVEYKIAEMGYIRFYLAPKIDDDEEMKP

SEQ ID NO: 13970 - DNA, 478 bp, Zea mays subsp. mays
  misc_feature (1)..(478): Ceres Seq. ID no. 4615295
  misc_feature: MA Experiment ID: 108523 Result: Down-regulated in Transcription
  misc_feature: MA Experiment 108523 PARAMETER Experiment Name: Zm_42deg_Heat_P Parameter: Age (day) Value: 8
  misc_feature: MA Experiment 108523 PARAMETER Experiment Name: Zm_42deg_Heat_P Parameter: Organism Value: Zea mays
  misc_feature: MA Experiment 108523 PARAMETER Experiment Name: Zm_42deg_Heat_P Parameter: Plant Line Value: 35A19
  misc_feature: MA Experiment 108523 PARAMETER Experiment Name: Zm_42deg_Heat_P Parameter: Temperature (deg C) Value: 42 vs. 22
  misc_feature: MA Experiment 108523 PARAMETER Experiment Name: Zm_42deg_Heat_P Parameter: Timepoint (hr) Value: 6
  misc_feature: MA Experiment 108523 PARAMETER Experiment Name: Zm_42deg_Heat_P Parameter: Tissue Value: Aerial
  misc_feature: MA Experiment ID: 108527 Result: Down-regulated in Transcription
  misc_feature: MA Experiment 108527 PARAMETER Experiment Name: Zm_5mM_NO_P Parameter: Age (day) Value: 8
  misc_feature: MA Experiment 108527 PARAMETER Experiment Name: Zm_5mM_NO_P Parameter: Organism Value: Zea mays
  misc_feature: MA Experiment 108527 PARAMETER Experiment Name: Zm_5mM_NO_P Parameter: Plant Line Value: 35A19
  misc_feature: MA Experiment 108527 PARAMETER Experiment Name: Zm_5mM_NO_P Parameter: Timepoint (hr) Value: 6
  misc_feature: MA Experiment 108527 PARAMETER Experiment Name: Zm_5mM_NO_P Parameter: Tissue Value: Aerial
  misc_feature: MA Experiment 108527 PARAMETER Experiment Name: Zm_5mM_NO_P Parameter: Treatment Value: 5mM NO vs. No Treatment
  misc_feature: MA Experiment ID: 108528 Result: Up-regulated in Transcription
  misc_feature: MA Experiment 108528 PARAMETER Experiment Name: Zm_Imbibed_Seeds_P Parameter: Age (day) Value: 5 vs. 2
  misc_feature: MA Experiment 108528 PARAMETER Experiment Name: Zm_Imbibed_Seeds_P Parameter: Organism Value: Zea mays
  misc_feature: MA Experiment 108528 PARAMETER Experiment Name: Zm_Imbibed_Seeds_P Parameter: Plant Line Value: 35A19
  misc_feature: MA Experiment 108528 PARAMETER Experiment Name: Zm_Imbibed_Seeds_P Parameter: Tissue Value: Aerial vs. Embryo
  misc_feature: MA Experiment ID: 108530 Result: Up-regulated in Transcription
  misc_feature: MA Experiment 108530 PARAMETER Experiment Name: Zm_Imbibed_Seeds_P Parameter: Age (day) Value: 6 vs. 2
  misc_feature: MA Experiment 108530 PARAMETER Experiment Name: Zm_Imbibed_Seeds_P Parameter: Organism Value: Zea mays
  misc_feature: MA Experiment 108530 PARAMETER Experiment Name: Zm_Imbibed_Seeds_P Parameter: Plant Line Value: 35A19
  misc_feature: MA Experiment 108530 PARAMETER Experiment Name: Zm_Imbibed_Seeds_P Parameter: Tissue Value: Aerial vs. Embryo
  misc_feature: MA Experiment ID: 108534 Result: Up-regulated in Transcription
  misc_feature: MA Experiment 108534 PARAMETER Experiment Name: Zm_4deg_Cold_P Parameter: Age (hr) Value: 8
  misc_feature: MA Experiment 108534 PARAMETER Experiment Name: Zm_4deg_Cold_P Parameter: Organism Value: Zea mays
  misc_feature: MA Experiment 108534 PARAMETER Experiment Name: Zm_4deg_Cold_P Parameter: Plant Line Value: 35A19
  misc_feature: MA Experiment 108534 PARAMETER Experiment Name: Zm_4deg_Cold_P Parameter: Temperature (deg C) Value: 4 vs. 22
  misc_feature: MA Experiment 108534 PARAMETER Experiment Name: Zm_4deg_Cold_P Parameter: Timepoint (hr) Value: 6
  misc_feature: MA Experiment 108534 PARAMETER Experiment Name: Zm_4deg_Cold_P Parameter: Tissue Value: Aerial
  misc_feature: MA Experiment ID: 108547 Result: Up-regulated in Transcription
  misc_feature: MA Experiment 108547 PARAMETER Experiment Name: Zm_Imbibed_Seeds_P Parameter: Age (day) Value: 4 vs. 2
  misc_feature: MA Experiment 108547 PARAMETER Experiment Name: Zm_Imbibed_Seeds_P Parameter: Organism Value: Zea mays
  misc_feature: MA Experiment 108547 PARAMETER Experiment Name: Zm_Imbibed_Seeds_P Parameter: Plant Line Value: 35A19
  misc_feature: MA Experiment 108547 PARAMETER Experiment Name: Zm_Imbibed_Seeds_P Parameter: Tissue Value: Aerial vs. Embryo
  misc_feature: MA Experiment ID: 108556 Result: Down-regulated in Transcription
  misc_feature: MA Experiment 108556 PARAMETER Experiment Name: Zm_Drought_P Parameter: Age (day) Value: 9
  misc_feature: MA Experiment 108556 PARAMETER Experiment Name: Zm_Drought_P Parameter: Organism Value: Zea mays
  misc_feature: MA Experiment 108556 PARAMETER Experiment Name: Zm_Drought_P Parameter: Plant Line Value: 35A19
  misc_feature: MA Experiment 108556 PARAMETER Experiment Name: Zm_Drought_P Parameter: Timepoint (hr) Value: 24
  misc_feature: MA Experiment 108556 PARAMETER Experiment Name: Zm_Drought_P Parameter: Tissue Value: Aerial
  misc_feature: MA Experiment 108556 PARAMETER Experiment Name: Zm_Drought_P Parameter: Treatment Value: Drought vs. No Drought
  misc_feature: MA Experiment ID: 20000477 Result: Down-regulated in Transcription
  misc_feature: MA Experiment 20000477 PARAMETER Experiment Name: Zm_5mM_SA_P Parameter: Age (day) Value: 10
  misc_feature: MA Experiment 20000477 PARAMETER Experiment Name: Zm_5mM_SA_P Parameter: Organism Value: Zea mays
  misc_feature: MA Experiment 20000477 PARAMETER Experiment Name: Zm_5mM_SA_P Parameter: Plant Line Value: 35A19
  misc_feature: MA Experiment 20000477 PARAMETER Experiment Name: Zm_5mM_SA_P Parameter: Timepoint (hr) Value: 48
  misc_feature: MA Experiment 20000477 PARAMETER Experiment Name: Zm_5mM_SA_P Parameter: Tissue Value: Aerial
  misc_feature: MA Experiment 20000477 PARAMETER Experiment Name: Zm_5mM_SA_P Parameter: Treatment Value: 5mM SA vs. No Treatment
  misc_feature: MA Experiment ID: 20000478 Result: Down-regulated in Transcription
  misc_feature: MA Experiment 20000478 PARAMETER Experiment Name: Zm_5mM_SA_P Parameter: Age (day) Value: 11
  misc_feature: MA Experiment 20000478 PARAMETER Experiment Name: Zm_5mM_SA_P Parameter: Organism Value: Zea mays
  misc_feature: MA Experiment 20000478 PARAMETER Experiment Name: Zm_5mM_SA_P Parameter: Plant Line Value: 35A19
  misc_feature: MA Experiment 20000478 PARAMETER Experiment Name: Zm_5mM_SA_P Parameter: Timepoint (hr) Value: 72
  misc_feature: MA Experiment 20000478 PARAMETER Experiment Name: Zm_5mM_SA_P Parameter: Tissue Value: Aerial
  misc_feature: MA Experiment 20000478 PARAMETER Experiment Name: Zm_5mM_SA_P Parameter: Treatment Value: 5mM SA vs. No Treatment
  misc_feature: MA Experiment ID: 20000479 Result: Down-regulated in Transcription
  misc_feature: MA Experiment 20000479 PARAMETER Experiment Name: Zm_Drought_P Parameter: Age (day) Value: 10
  misc_feature: MA Experiment 20000479 PARAMETER Experiment Name: Zm_Drought_P Parameter: Organism Value: Zea mays
  misc_feature: MA Experiment 20000479 PARAMETER Experiment Name: Zm_Drought_P Parameter: Plant Line Value: 35A19
  misc_feature: MA Experiment 20000479 PARAMETER Experiment Name: Zm_Drought_P Parameter: Timepoint (hr) Value: 48
  misc_feature: MA Experiment 20000479 PARAMETER Experiment Name: Zm_Drought_P Parameter: Tissue Value: Aerial
  misc_feature: MA Experiment 20000479 PARAMETER Experiment Name: Zm_Drought_P Parameter: Treatment Value: Drought vs. No Drought
  misc_feature: MA Experiment ID: 20000480 Result: Down-regulated in Transcription
  misc_feature: MA Experiment 20000480 PARAMETER Experiment Name: Zm_Drought_P Parameter: Age (day) Value: 11
  misc_feature: MA Experiment 20000480 PARAMETER Experiment Name: Zm_Drought_P Parameter: Organism Value: Zea mays
  misc_feature: MA Experiment 20000480 PARAMETER Experiment Name: Zm_Drought_P Parameter: Plant Line Value: 35A19
  misc_feature: MA Experiment 20000480 PARAMETER Experiment Name: Zm_Drought_P Parameter: Timepoint (hr) Value: 72
  misc_feature: MA Experiment 20000480 PARAMETER Experiment Name: Zm_Drought_P Parameter: Tissue Value: Aerial
  misc_feature: MA Experiment 20000480 PARAMETER Experiment Name: Zm_Drought_P Parameter: Treatment Value: Drought vs. No Drought
  misc_feature: MA Experiment ID: 20000626 Result: Down-regulated in Transcription
  misc_feature: MA Experiment 20000626 PARAMETER Experiment Name: Zm_Herbicide-Treatments_P Parameter: Timepoint (hr) Value: 12
  misc_feature: MA Experiment 20000626 PARAMETER Experiment Name: Zm_Herbicide-Treatments_P Parameter: Tissue Value: Aerial
  misc_feature: MA Experiment 20000626 PARAMETER Experiment Name: Zm_Herbicide-Treatments_P Parameter: Treatment Value: Roundup vs. No Treatment
  misc_feature: MA Experiment ID: 20001608 Result: Up-regulated in Transcription
  misc_feature: MA Experiment 20001608 PARAMETER Experiment Name: Zm_50ppm_KNO3_L-to-H_P Parameter: Age (day) Value: 21
  misc_feature: MA Experiment 20001608 PARAMETER Experiment Name: Zm_50ppm_KNO3_L-to-H_P Parameter: Organism Value: Zea mays
  misc_feature: MA Experiment 20001608 PARAMETER Experiment Name: Zm_50ppm_KNO3_L-to-H_P Parameter: Plant Line Value: 35A19
  misc_feature: MA Experiment 20001608 PARAMETER Experiment Name: Zm_50ppm_KNO3_L-to-H_P Parameter: Timepoint (hr) Value: 48
  misc_feature: MA Experiment 20001608 PARAMETER Experiment Name: Zm_50ppm_KNO3_L-to-H_P Parameter: Tissue Value: Shoots
  misc_feature: MA Experiment 20001608 PARAMETER Experiment Name: Zm_50ppm_KNO3_L-to-H_P Parameter: Treatment Value: 50ppm KNO3 vs. 50ppm KCl
aacagccatcacacgcacgcatacacagcacagagtgaggtaagcatccgaaaaaagctgtgatctgatcgacatggccgccgccaccatggctctcacctcccgcgcgctcgtcggcaagccggcgaccagcaccagggacgtcttcggcgaggggcgcatcaccatgcgtaagactgctggcaagcccaagccagcggcgtccggcagcccctggtacggggccgaccgcgtcctgtacctgggcccgctgtccggccaccccccaagctacctgaccggcgagttccccggcgactacggctgggacaccgcggggctgtccgccgacccggagactttcgccaagaaccgcgagctggaggtgatccactgccgctgggccatgctgggcgcgctcgggtgcgtgttcccggagctgctcgcycgcaacggcgtcaagttcggcgaggccgtgtggttcaaggccgggtcccag

SEQ ID NO: 13971 - protein, 135 aa, Zea mays subsp. mays
  peptide (1)..(135): Ceres Seq. ID no. 4615296
  misc_feature (64)..(134): Pfam Name: Chlorophyll A-B binding protein Pfam Description: Chlorophyll A-B binding protein
  misc_feature (1)..(134): Homolog of NCBI NO: 543938 NR Description: Chlorophyll A-B binding protein 48, chloroplast
  misc_feature (1)..(134): Homolog of NCBI NO: 34912356 NR Description: putative chlorophyll a/b-binding protein 2 [Oryza
  misc_feature (1)..(134): Homolog of NCBI NO: 34910682 NR Description: chlorophyll a/b binding protein [Oryza sativa
  misc_feature (1)..(134): Homolog of NCBI NO: 7443224 NR Description: chlorophyll a/b-binding protein precursor kcdl895 rice >gi|1661160|gb|AAB18404.1| chlorophyll a/b binding protein
  misc_feature (1)..(134): Homolog of NCBI NO: 115787 NR Description: Chlorophyll A-B binding protein 2, chloroplast
  misc_feature (1)..(134): Homolog of NCBI NO: 115786 NR Description: Chlorophyll A-B binding protein, chloroplast
  misc_feature (1)..(134): Homolog of NCBI NO: 320618 NR Description: chlorophyll a/b-binding protein I precursor - rice
  misc_feature (1)..(134): Homolog of NCBI NO: 115772 NR Description: Chlorophyll A-B binding protein 1, chloroplast
  misc_feature (1)..(134): Homolog of NCBI NO: 115815 NR Description: Chlorophyll A-B binding protein M9, chloroplast
  misc_feature (1)..(134): Homolog of NCBI NO: 115771 NR Description: Chlorophyll A-B binding protein 1, chloroplast
  misc_feature (118)..(118): Xaa is any aa, unknown or other
MAAATMALTSRALVGKPATSTRDVFGEGRITMRKTAGKPKPAASGSPWYGADRVLYLGPLSGHPPSYLTGEFPGDYGWDTAGLSADPETFAKNRELEVIHCRWAMLGALGCVFPELLXRNGVKFGEAVWFKAGSQ

SEQ ID NO: 13972 - protein, 130 aa, Zea mays subsp. mays
  peptide (1)..(130): Ceres Seq. ID no. 4615297
  misc_feature (59)..(129): Pfam Name: Chlorophyll A-B binding protein Pfam Description: Chlorophyll A-B binding protein
  misc_feature (1)..(129): Homolog of NCBI NO: 543938 NR Description: Chlorophyll A-B binding protein 48, chloroplast
  misc_feature (1)..(129): Homolog of NCBI NO: 34912356 NR Description: putative chlorophyll a/b-binding protein 2 [Oryza
  misc_feature (1)..(129): Homolog of NCBI NO: 34910682 NR Description: chlorophyll a/b binding protein [Oryza sativa
  misc_feature (1)..(129): Homolog of NCBI NO: 7443224 NR Description: chlorophyll a/b-binding protein precursor kcdl895 rice >gi|1661160|gb|AAB18404.1| chlorophyll a/b binding protein
  misc_feature (1)..(129): Homolog of NCBI NO: 115787 NR Description: Chlorophyll A-B binding protein 2, chloroplast
  misc_feature (1)..(129): Homolog of NCBI NO: 115786 NR Description: Chlorophyll A-B binding protein, chloroplast
  misc_feature (1)..(129): Homolog of NCBI NO: 320618 NR Description: chlorophyll a/b-binding protein I precursor - rice
  misc_feature (1)..(129): Homolog of NCBI NO: 115772 NR Description: Chlorophyll A-B binding protein 1, chloroplast
  misc_feature (1)..(129): Homolog of NCBI NO: 115815 NR Description: Chlorophyll A-B binding protein M9, chloroplast
  misc_feature (1)..(129): Homolog of NCBI NO: 115771 NR Description: Chlorophyll A-B binding protein 1, chloroplast
  misc_feature (113)..(113): Xaa is any aa, unknown or other
MALTSRALVGKPATSTRDVFGEGRITMRKTAGKPKPAASGSPWYGADRVLYLGPLSGHPPSYLTGEFPGDYGWDTAGLSADPETFAKNRELEVIHCRWAMLGALGCVFPELLXRNGVKFGEAVWFKAGSQ

SEQ ID NO: 13973 - protein, 104 aa, Zea mays subsp. mays
  peptide (1)..(104): Ceres Seq. ID no. 4615298
  misc_feature (33)..(103): Pfam Name: Chlorophyll A-B binding protein Pfam Description: Chlorophyll A-B binding protein
  misc_feature (1)..(103): Homolog of NCBI NO: 543938 NR Description: Chlorophyll A-B binding protein 48, chloroplast
  misc_feature (1)..(103): Homolog of NCBI NO: 34912356 NR Description: putative chlorophyll a/b-binding protein 2 [Oryza
  misc_feature (1)..(103): Homolog of NCBI NO: 34910682 NR Description: chlorophyll a/b binding protein [Oryza sativa
  misc_feature (1)..(103): Homolog of NCBI NO: 7443224 NR Description: chlorophyll a/b-binding protein precursor kcdl895 rice >gi|1661160|gb|AAB18404.1| chlorophyll a/b binding protein
  misc_feature (1)..(103): Homolog of NCBI NO: 115787 NR Description: Chlorophyll A-B binding protein 2, chloroplast
  misc_feature (1)..(103): Homolog of NCBI NO: 115786 NR Description: Chlorophyll A-B binding protein, chloroplast
  misc_feature (1)..(103): Homolog of NCBI NO: 320618 NR Description: chlorophyll a/b-binding protein I precursor - rice
  misc_feature (1)..(103): Homolog of NCBI NO: 115772 NR Description: Chlorophyll A-B binding protein 1, chloroplast
  misc_feature (1)..(103): Homolog of NCBI NO: 115815 NR Description: Chlorophyll A-B binding protein M9, chloroplast
  misc_feature (1)..(103): Homolog of NCBI NO: 115771 NR Description: Chlorophyll A-B binding protein 1, chloroplast
  misc_feature (87)..(87): Xaa is any aa, unknown or other
MRKTAGKPKPAASGSPWYGADRVLYLGPLSGHPPSYLTGEFPGDYGWDTAGLSADPETFAKNRELEVIHCRWAMLGALGCVFPELLXRNGVKFGEAVWFKAGSQ

SEQ ID NO: 13974 - DNA, 1606 bp, Zea mays subsp. mays
  misc_feature (1)..(1606): Ceres Seq. ID no. 12450558
  misc_feature: MA Experiment ID: 108528 Result: Down-regulated in Transcription
  misc_feature: MA Experiment 108528 PARAMETER Experiment Name: Zm_Imbibed_Seeds_P Parameter: Age (day) Value: 5 vs. 2
  misc_feature: MA Experiment 108528 PARAMETER Experiment Name: Zm_Imbibed_Seeds_P Parameter: Organism Value: Zea mays
  misc_feature: MA Experiment 108528 PARAMETER Experiment Name: Zm_Imbibed_Seeds_P Parameter: Plant Line Value: 35A19
  misc_feature: MA Experiment 108528 PARAMETER Experiment Name: Zm_Imbibed_Seeds_P Parameter: Tissue Value: Aerial vs. Embryo
  misc_feature: MA Experiment ID: 108529 Result: Down-regulated in Transcription
  misc_feature: MA Experiment 108529 PARAMETER Experiment Name: Zm_Imbibed_Seeds_P Parameter: Age (day) Value: 5 vs. 2
  misc_feature: MA Experiment 108529 PARAMETER Experiment Name: Zm_Imbibed_Seeds_P Parameter: Organism Value: Zea mays
  misc_feature: MA Experiment 108529 PARAMETER Experiment Name: Zm_Imbibed_Seeds_P Parameter: Plant Line Value: 35A19
  misc_feature: MA Experiment 108529 PARAMETER Experiment Name: Zm_Imbibed_Seeds_P Parameter: Tissue Value: Roots vs. Embryo
  misc_feature: MA Experiment ID: 108535 Result: Up-regulated in Transcription
  misc_feature: MA Experiment 108535 PARAMETER Experiment Name: Zm_Meristem_P Parameter: Age (day) Value: 8
  misc_feature: MA Experiment 108535 PARAMETER Experiment Name: Zm_Meristem_P Parameter: Organism Value: Zea mays
  misc_feature: MA Experiment 108535 PARAMETER Experiment Name: Zm_Meristem_P Parameter: Plant Line Value: 35A19
  misc_feature: MA Experiment 108535 PARAMETER Experiment Name: Zm_Meristem_P Parameter: Tissue Value: Root Meristem vs. Above Root Meristem
  misc_feature: MA Experiment ID: 108544 Result: Up-regulated in Transcription
atcgctgcgtccaccttctgtagtccagttgtagccgcttgccgatggcgcggccggcggcgaaggcgcgggtgccgaagcacttggtggcgctcgccgtcgtcgccatcctcggcctcgtactcgtcgctgactacctctgggcttcgtcctccgcgtcgtcctcggccgtctggtcctccaggcttaatctccacaccggacccgccggttcgacgccgcccgtcgcgaagaagattaaggaggacaagaaatctgtaggttcgactggcataaatgcaacttttgcggacttgccagctccagaactgaaatgggaggagatggctgaagcacctgtggcccgtttggatggcgctgctatacagattaagaatctcttatatgtatttgctgggtatggcaccattaaccatgtgcattctcatgttgatatatacaatttctcggataatacatggggtggaagatttgacatgcccgaagacatggcacattcacatttggggatggttactgatggaagattcatctatgtggtaactggacagtatggtccacaatgtaggggaccaacaactcgaaattttgtattggacacagaaacaaaagaatggcgtggcatgccaccattgccagttcctagatatgctccagcaacacaactttggagaggcagacttcatgtgatgggtggcagcaaggaggataggcatgaacctgcgcttgaacactggagtctcgcggtaaaggatgggaaagcattggagaaagagtggaggagcgagaaaccaataccgcgtggaggtcctcatagggcttgtgtagttgcaaatgataaactccttgttattggtggtcaagaaggtgatttcatggccaagcctgggtctcctatatttaaatgtgttagaagaagtgaggttgtgtatagtaatgtttatatgcttgatgatggaacgacttggaaggaacttccacctatgccaaaaccagattcacatatagaatttgcttgggtgaatgtcaacaattctcttgttattgctggaggaacgacagataagcacccaataactaaaaagatggtgttggttggtgaagtatttcggttcaatctgggtacgctggaatggagtgtgattgggcggttacctttccgaatcaagaccacattggtaggatactgggatggctggctgtatttcacttctgggcaacgagacaaaggaccaaaagacccgtctcctaaaaaggttgttgggtgcatgtggagaactaaattgcacttgtgatttcctttaaaagaactaagccgttctttggttttatggtttacaaaactgtttcaatcccctcatgggcgagttctttcttggttatatatcgtaggtgaaatgggtggcgttggggactgtctgccattgccaccggtgtgttgtatgtttattcttttagttaggatcaccaacttttgcaccattttgtacagagagaatcgatctgtccaggtgctgtcgcaatcttgtaagttgtagcgtgtaccttttttttattgagctcttacactcatcttctaaaattaatcacaacttcaacttgagcc

SEQ ID NO: 13975 - protein, 416 aa, Zea mays subsp. mays
  peptide (1)..(416): Ceres Seq. ID no. 12450559
  misc_feature (254)..(315): Pfam Name: Kelch motif Pfam Description: Kelch motif
  misc_feature (1)..(416): Homolog of NCBI NO: 29150199 NR Description: hypothetical protein [Oryza sativa (indica
  misc_feature (1)..(416): Homolog of NCBI NO: 38344229 NR Description: OJ991113_30.6 [Oryza sativa (japonica
  misc_feature (14)..(416): Homolog of NCBI NO: 15217949 NR Description: unknown protein; protein id: At1g51540.1
  misc_feature (14)..(416): Homolog of NCBI NO: 28416695 NR Description: At1g51540 [Arabidopsis thaliana]
  misc_feature (14)..(414): Homolog of NCBI NO: 18405273 NR Description: expressed protein; protein id: At3g27220.1, by cDNA: gi_15081754, supported by cDNA: gi_15912244 [Arabidopsis >gi|9294215|dbj|BAB02117.1| gene_id:K17E12.4~unknown protein
  misc_feature (14)..(414): Homolog of NCBI NO: 15912245 NR Description: AT3g27220/K17E12_4 [Arabidopsis thaliana]
  misc_feature (73)..(337): Homolog of NCBI NO: 34932909 NR Description: similar to hypothetical protein MGC35097 [Rattus
MARPAAKARVPKHLVALAVVAILGLVLVADYLWASSSASSSAVWSSRLNLHTGPAGSTPPVAKKIKEDKKSVGSTGINATFADLPAPELKWEEMAEAPVARLDGAAIQIKNLLYVFAGYGTINHVHSHVDIYNFSDNTWGGRFDMPEDMAHSHLGMVTDGRFIYVVTGQYGPQCRGPTTRNFVLDTETKEWRGMPPLPVPRYAPATQLWRGRLHVMGGSKEDRHEPALEHWSLAVKDGKALEKEWRSEKPIPRGGPHRACVVANDKLLVIGGQEGDFMAKPGSPIFKCVRRSEVVYSNVYMLDDGTTWKELPPMPKPDSHIEFAWVNVNNSLVIAGGTTDKHPITKKMVLVGEVFRFNLGTLEWSVIGRLPFRIKTTLVGYWDGWLYFTSGQRDKGPKDPSPKKVVGCMWRTKLHL

SEQ ID NO: 13976 - protein, 323 aa, Zea mays subsp. mays
  peptide (1)..(323): Ceres Seq. ID no. 12450560
  misc_feature (161)..(222): Pfam Name: Kelch motif Pfam Description: Kelch motif
  misc_feature (1)..(323): Homolog of NCBI NO: 29150199 NR Description: hypothetical protein [Oryza sativa (indica
  misc_feature (1)..(323): Homolog of NCBI NO: 38344229 NR Description: OJ991113_30.6 [Oryza sativa (japonica
  misc_feature (1)..(323): Homolog of NCBI NO: 15217949 NR Description: unknown protein; protein id: At1g51540.1
  misc_feature (1)..(323): Homolog of NCBI NO: 28416695 NR Description: At1g51540 [Arabidopsis thaliana]
  misc_feature (1)..(321): Homolog of NCBI NO: 18405273 NR Description: expressed protein; protein id: At3g27220.1, by cDNA: gi_15081754, supported by cDNA: gi_15912244 [Arabidopsis >gi|9294215|dbj|BAB02117.1| gene_id:K17E12.4~unknown protein
  misc_feature (1)..(321): Homolog of NCBI NO: 15912245 NR Description: AT3g27220/K17E12_4 [Arabidopsis thaliana]
  misc_feature (1)..(244): Homolog of NCBI NO: 34932909 NR Description: similar to hypothetical protein MGC35097 [Rattus
MAEAPVARLDGAAIQIKNLLYVFAGYGTINHVHSHVDIYNFSDNTWGGRFDMPEDMAHSHLGMVTDGRFIYVVTGQYGPQCRGPTTRNFVLDTETKEWRGMPPLPVPRYAPATQLWRGRLHVMGGSKEDRHEPALEHWSLAVKDGKALEKEWRSEKPIPRGGPHRACVVANDKLLVIGGQEGDFMAKPGSPIFKCVRRSEVVYSNVYMLDDGTTWKELPPMPKPDSHIEFAWVNVNNSLVIAGGTTDKHPITKKMVLVGEVFRFNLGTLEWSVIGRLPFRIKTTLVGYWDGWLYFTSGQRDKGPKDPSPKKVVGCMWRTKLHL

SEQ ID NO: 13977 - protein, 272 aa, Zea mays subsp. mays
  peptide (1)..(272): Ceres Seq. ID no. 12450561
  misc_feature (110)..(171): Pfam Name: Kelch motif Pfam Description: Kelch motif
  misc_feature (1)..(272): Homolog of NCBI NO: 29150199 NR Description: hypothetical protein [Oryza sativa (indica
  misc_feature (1)..(272): Homolog of NCBI NO: 38344229 NR Description: OJ991113_30.6 [Oryza sativa (japonica
  misc_feature (1)..(272): Homolog of NCBI NO: 15217949 NR Description: unknown protein; protein id: At1g51540.1
  misc_feature (1)..(272): Homolog of NCBI NO: 28416695 NR Description: At1g51540 [Arabidopsis thaliana]
  misc_feature (1)..(270): Homolog of NCBI NO: 18405273 NR Description: expressed protein; protein id: At3g27220.1, by cDNA: gi_15081754, supported by cDNA: gi_15912244 [Arabidopsis >gi|9294215|dbj|BAB02117.1| gene_id:K17E12.4~unknown protein
  misc_feature (1)..(270): Homolog of NCBI NO: 15912245 NR Description: AT3g27220/K17E12_4 [Arabidopsis thaliana]
  misc_feature (1)..(193): Homolog of NCBI NO: 34932909 NR Description: similar to hypothetical protein MGC35097 [Rattus
MPEDMAHSHLGMVTDGRFIYVVTGQYGPQCRGPTTRNFVLDTETKEWRGMPPLPVPRYAPATQLWRGRLHVMGGSKEDRHEPALEHWSLAVKDGKALEKEWRSEKPIPRGGPHRACVVANDKLLVIGGQEGDFMAKPGSPIFKCVRRSEVVYSNVYMLDDGTTWKELPPMPKPDSHIEFAWVNVNNSLVIAGGTTDKHPITKKMVLVGEVFRFNLGTLEWSVIGRLPFRIKTTLVGYWDGWLYFTSGQRDKGPKDPSPKKVVGCMWRTKLHL

SEQ ID NO: 13978 - DNA, 815 bp, Zea mays subsp. mays
  misc_feature (1)..(815): Ceres Seq. ID no. 12435907
  misc_feature: MA Experiment ID: 108522 Result: Up-regulated in Transcription
  misc_feature: MA Experiment 108522 PARAMETER Experiment Name: Zm_42deg_Heat_P Parameter: Age (day) Value: 8
  misc_feature: MA Experiment 108522 PARAMETER Experiment Name: Zm_42deg_Heat_P Parameter: Organism Value: Zea mays
  misc_feature: MA Experiment 108522 PARAMETER Experiment Name: Zm_42deg_Heat_P Parameter: Plant Line Value: 35A19
  misc_feature: MA Experiment 108522 PARAMETER Experiment Name: Zm_42deg_Heat_P Parameter: Temperature (deg C) Value: 42 vs. 22
  misc_feature: MA Experiment 108522 PARAMETER Experiment Name: Zm_42deg_Heat_P Parameter: Timepoint (hr) Value: 1
  misc_feature: MA Experiment 108522 PARAMETER Experiment Name: Zm_42deg_Heat_P Parameter: Tissue Value: Aerial
acttttctttttaacgactgagagcctcgaatcctcctattattatgcaatagagtttttctgactgctccacgcgctgttccccttggaaatttcgaccgctttctcgatcgccacctacacgtctgtggttgcagtgaaaactagaagggaagaacagcctcctaatggataggaacaacgaactggaagaggtggtcccaaatgactcggaccctcttattgggagggataacagggagtcagagtcatcagtagagatgtcaccgccacagccagcaactgtgaacctgctggagattgaggatgaagagaccgacggctcttctgctgcgtgttgccgcatttgccttgaggctgagtctgagataggtgatgagctaatatcaccttgcatgtgcaagggaactcagcagtttgttcaccgttcttgtcttgaccactggcgatntgttaaggaaggatttgcattttcacactgcacaacttgcaaagctcagtttcatcttcgagtggaaacctgggaggataactcatggcgtaaaatgaagttcaggatctttgttgcaagggatgttctactcgtatttcttgctgtacagcttactattgctatcatcggtgcgattgcatactttttagacngggatggaagtttccggaacagttttagcgatggttgggaccgcttcttgtcaaagcacccaatacccttctactattgcataggtgttgtgattttctttgtgctgcttggattcttcgggctgatagtacactgctcatccttcnacgacaaccaggatccatgcagc

SEQ ID NO: 13979 - protein, 216 aa, Zea mays subsp. mays
  peptide (1)..(216): Ceres Seq. ID no. 12435908
  misc_feature (58)..(108): Pfam Name: Zinc finger, C3HC4 type (RING finger) Pfam Description: Zinc finger, C3HC4 type (RING finger)
  misc_feature (1)..(215): Homolog of NCBI NO: 40253895 NR Description: zinc finger (C3HC4-type RING finger) protein
  misc_feature (13)..(214): Homolog of NCBI NO: 18391230 NR Description: expressed protein; protein id: At1g11020.1, by cDNA: 40765. [Arabidopsis thaliana] unknown protein [Arabidopsis thaliana]
  misc_feature (13)..(211): Homolog of NCBI NO: 21593635 NR Description: unknown [Arabidopsis thaliana]
  misc_feature (13)..(151): Homolog of NCBI NO: 25402638 NR Description: hypothetical protein [imported] - Arabidopsis
  misc_feature (187)..(214): Homolog of NCBI NO: 25402638 NR Description: hypothetical protein [imported] - Arabidopsis
  misc_feature (34)..(145): Homolog of NCBI NO: 34912564 NR Description: P0410E03.20 [Oryza sativa (japonica
  misc_feature (34)..(205): Homolog of NCBI NO: 28393273 NR Description: unknown protein [Arabidopsis thaliana]
  misc_feature (34)..(151): Homolog of NCBI NO: 15227153 NR Description: hypothetical protein; protein id: At2g22120.1
  misc_feature (42)..(203): Homolog of NCBI NO: 18403075 NR Description: expressed protein; protein id: At1g50440.1, by cDNA: 126074. [Arabidopsis thaliana] >gi|25371331|pir||G96540
  misc_feature (42)..(203): Homolog of NCBI NO: 26450547 NR Description: unknown protein [Arabidopsis thaliana]
  misc_feature (95)..(95): Xaa is any aa, unknown or other
  misc_feature (160)..(160): Xaa is any aa, unknown or other
  misc_feature (209)..(209): Xaa is any aa, unknown or other
MDRNNELEEVVPNDSDPLIGRDNRESESSVEMSPPQPATVNLLEIEDEETDGSSAACCRICLEAESEIGDELISPCMCKGTQQFVHRSCLDHWRXVKEGFAFSHCTTCKAQFHLRVETWEDNSWRKMKFRIFVARDVLLVFLAVQLTIAIIGAIAYFLDXDGSFRNSFSDGWDRFLSKHPIPFYYCIGVVIFFVLLGFFGLIVHCSSFXDNQDPCS

SEQ ID NO: 13980 - protein, 185 aa, Zea mays subsp. mays
  peptide (1)..(185): Ceres Seq. ID no. 12435909
  misc_feature (27)..(77): Pfam Name: Zinc finger, C3HC4 type (RING finger) Pfam Description: Zinc finger, C3HC4 type (RING finger)
  misc_feature (1)..(184): Homolog of NCBI NO: 40253895 NR Description: zinc finger (C3HC4-type RING finger) protein
  misc_feature (1)..(183): Homolog of NCBI NO: 18391230 NR Description: expressed protein; protein id: At1g11020.1, by cDNA: 40765. [Arabidopsis thaliana] unknown protein [Arabidopsis thaliana]
  misc_feature (1)..(180): Homolog of NCBI NO: 21593635 NR Description: unknown [Arabidopsis thaliana]
  misc_feature (1)..(120): Homolog of NCBI NO: 25402638 NR Description: hypothetical protein [imported] - Arabidopsis
  misc_feature (156)..(183): Homolog of NCBI NO: 25402638 NR Description: hypothetical protein [imported] - Arabidopsis
  misc_feature (3)..(114): Homolog of NCBI NO: 34912564 NR Description: P0410E03.20 [Oryza sativa (japonica
  misc_feature (3)..(174): Homolog of NCBI NO: 28393273 NR Description: unknown protein [Arabidopsis thaliana]
  misc_feature (3)..(120): Homolog of NCBI NO: 15227153 NR Description: hypothetical protein; protein id: At2g22120.1
  misc_feature (11)..(172): Homolog of NCBI NO: 18403075 NR Description: expressed protein; protein id: At1g50440.1, by cDNA: 126074. [Arabidopsis thaliana] >gi|25371331|pir||G96540
  misc_feature (11)..(172): Homolog of NCBI NO: 26450547 NR Description: unknown protein [Arabidopsis thaliana]
  misc_feature (64)..(64): Xaa is any aa, unknown or other
  misc_feature (129)..(129): Xaa is any aa, unknown or other
  misc_feature (178)..(178): Xaa is any aa, unknown or other
MSPPQPATVNLLEIEDEETDGSSAACCRICLEAESEIGDELISPCMCKGTQQFVHRSCLDHWRXVKEGFAFSHCTTCKAQFHLRVETWEDNSWRKMKFRIFVARDVLLVFLAVQLTIAIIGAIAYFLDXDGSFRNSFSDGWDRFLSKHPIPFYYCIGVVIFFVLLGFFGLIVHCSSFXDNQDPCS

SEQ ID NO: 13981 - protein, 140 aa, Zea mays subsp. mays
  peptide (1)..(140): Ceres Seq. ID no. 12435910
  misc_feature (1)..(139): Homolog of NCBI NO: 40253895 NR Description: zinc finger (C3HC4-type RING finger) protein
  misc_feature (1)..(138): Homolog of NCBI NO: 18391230 NR Description: expressed protein; protein id: At1g11020.1, by cDNA: 40765. [Arabidopsis thaliana] unknown protein [Arabidopsis thaliana]
  misc_feature (1)..(135): Homolog of NCBI NO: 21593635 NR Description: unknown [Arabidopsis thaliana]
  misc_feature (1)..(75): Homolog of NCBI NO: 25402638 NR Description: hypothetical protein [imported] - Arabidopsis
  misc_feature (111)..(138): Homolog of NCBI NO: 25402638 NR Description: hypothetical protein [imported] - Arabidopsis
  misc_feature (1)..(69): Homolog of NCBI NO: 34912564 NR Description: P0410E03.20 [Oryza sativa (japonica
  misc_feature (1)..(129): Homolog of NCBI NO: 28393273 NR Description: unknown protein [Arabidopsis thaliana]
  misc_feature (1)..(75): Homolog of NCBI NO: 15227153 NR Description: hypothetical protein; protein id: At2g22120.1
  misc_feature (1)..(127): Homolog of NCBI NO: 18403075 NR Description: expressed protein; protein id: At1g50440.1, by cDNA: 126074. [Arabidopsis thaliana] >gi|25371331|pir||G96540
  misc_feature (1)..(127): Homolog of NCBI NO: 26450547 NR Description: unknown protein [Arabidopsis thaliana]
  misc_feature (19)..(19): Xaa is any aa, unknown or other
  misc_feature (84)..(84): Xaa is any aa, unknown or other
  misc_feature (133)..(133): Xaa is any aa, unknown or other
MCKGTQQFVHRSCLDHWRXVKEGFAFSHCTTCKAQFHLRVETWEDNSWRKMKFRIFVARDVLLVFLAVQLTIAIIGAIAYFLDXDGSFRNSFSDGWDRFLSKHPIPFYYCIGVVIFFVLLGFFGLIVHCSSFXDNQDPCS

SEQ ID NO: 13982 - DNA, 1521 bp, Zea mays subsp. mays; identical to SEQ ID NO: 4155
  misc_feature (1)..(1521): Ceres Seq. ID no. 13495297
  misc_feature: MA Experiment ID: 108523 Result: Down-regulated in Transcription
  misc_feature: MA Experiment 108523 PARAMETER Experiment Name: Zm_42deg_Heat_P Parameter: Age (day) Value: 8
  misc_feature: MA Experiment 108523 PARAMETER Experiment Name: Zm_42deg_Heat_P Parameter: Organism Value: Zea mays
  misc_feature: MA Experiment 108523 PARAMETER Experiment Name: Zm_42deg_Heat_P Parameter: Plant Line Value: 35A19
  misc_feature: MA Experiment 108523 PARAMETER Experiment Name: Zm_42deg_Heat_P Parameter: Temperature (deg C) Value: 42 vs. 22
  misc_feature: MA Experiment 108523 PARAMETER Experiment Name: Zm_42deg_Heat_P Parameter: Timepoint (hr) Value: 6
  misc_feature: MA Experiment 108523 PARAMETER Experiment Name: Zm_42deg_Heat_P Parameter: Tissue Value: Aerial
  misc_feature: MA Experiment ID: 108527 Result: Down-regulated in Transcription
  misc_feature: MA Experiment 108527 PARAMETER Experiment Name: Zm_5mM_NO_P Parameter: Age (day) Value: 8
  misc_feature: MA Experiment 108527 PARAMETER Experiment Name: Zm_5mM_NO_P Parameter: Organism Value: Zea mays
  misc_feature: MA Experiment 108527 PARAMETER Experiment Name: Zm_5mM_NO_P Parameter: Plant Line Value: 35A19
  misc_feature: MA Experiment 108527 PARAMETER Experiment Name: Zm_5mM_NO_P Parameter: Timepoint (hr) Value: 6
  misc_feature: MA Experiment 108527 PARAMETER Experiment Name: Zm_5mM_NO_P Parameter: Tissue Value: Aerial
  misc_feature: MA Experiment 108527 PARAMETER Experiment Name: Zm_5mM_NO_P Parameter: Treatment Value: 5mM NO vs. No Treatment
  misc_feature: MA Experiment ID: 108528 Result: Up-regulated in Transcription
  misc_feature: MA Experiment 108528 PARAMETER Experiment Name: Zm_Imbibed_Seeds_P Parameter: Age (day) Value: 5 vs. 2
  misc_feature: MA Experiment 108528 PARAMETER Experiment Name: Zm_Imbibed_Seeds_P Parameter: Organism Value: Zea mays
  misc_feature: MA Experiment 108528 PARAMETER Experiment Name: Zm_Imbibed_Seeds_P Parameter: Plant Line Value: 35A19
  misc_feature: MA Experiment 108528 PARAMETER Experiment Name: Zm_Imbibed_Seeds_P Parameter: Tissue Value: Aerial vs. Embryo
  misc_feature: MA Experiment ID: 108529 Result: Down-regulated in Transcription
  misc_feature: MA Experiment 108529 PARAMETER Experiment Name: Zm_Imbibed_Seeds_P Parameter: Age (day) Value: 5 vs. 2
  misc_feature: MA Experiment 108529 PARAMETER Experiment Name: Zm_Imbibed_Seeds_P Parameter: Organism Value: Zea mays
  misc_feature: MA Experiment 108529 PARAMETER Experiment Name: Zm_Imbibed_Seeds_P Parameter: Plant Line Value: 35A19
  misc_feature: MA Experiment 108529 PARAMETER Experiment Name: Zm_Imbibed_Seeds_P Parameter: Tissue Value: Roots vs. Embryo
  misc_feature: MA Experiment ID: 108530 Result: Up-regulated in Transcription
  misc_feature: MA Experiment 108530 PARAMETER Experiment Name: Zm_Imbibed_Seeds_P Parameter: Age (day) Value: 6 vs. 2
  misc_feature: MA Experiment 108530 PARAMETER Experiment Name: Zm_Imbibed_Seeds_P Parameter: Organism Value: Zea mays
  misc_feature: MA Experiment 108530 PARAMETER Experiment Name: Zm_Imbibed_Seeds_P Parameter: Plant Line Value: 35A19
  misc_feature: MA Experiment 108530 PARAMETER Experiment Name: Zm_Imbibed_Seeds_P Parameter: Tissue Value: Aerial vs. Embryo
  misc_feature: MA Experiment ID: 108536 Result: Down-regulated in Transcription
  misc_feature: MA Experiment 108536 PARAMETER Experiment Name: Zm_Meristem_P Parameter: Age (day) Value: 8
  misc_feature: MA Experiment 108536 PARAMETER Experiment Name: Zm_Meristem_P Parameter: Organism Value: Zea mays
  misc_feature: MA Experiment 108536 PARAMETER Experiment Name: Zm_Meristem_P Parameter: Plant Line Value: 35A19
  misc_feature: MA Experiment 108536 PARAMETER Experiment Name: Zm_Meristem_P Parameter: Tissue Value: Shoot Meristem vs. Above Shoot Meristem
  misc_feature: MA Experiment ID: 108543 Result: Up-regulated in Transcription
  misc_feature: MA Experiment ID: 108545 Result: Up-regulated in Transcription
  misc_feature: MA Experiment 108545 PARAMETER Experiment Name: Zm_Imbibed_Seeds_P Parameter: Age (day) Value: 3 vs. 2
  misc_feature: MA Experiment 108545 PARAMETER Experiment Name: Zm_Imbibed_Seeds_P Parameter: Organism Value: Zea mays
  misc_feature: MA Experiment 108545 PARAMETER Experiment Name: Zm_Imbibed_Seeds_P Parameter: Plant Line Value: 35A19
  misc_feature: MA Experiment 108545 PARAMETER Experiment Name: Zm_Imbibed_Seeds_P Parameter: Tissue Value: Aerial vs. Embryo
  misc_feature: MA Experiment ID: 108546 Result: Down-regulated in Transcription
  misc_feature: MA Experiment 108546 PARAMETER Experiment Name: Zm_Imbibed_Seeds_P Parameter: Age (day) Value: 3 vs. 2
  misc_feature: MA Experiment 108546 PARAMETER Experiment Name: Zm_Imbibed_Seeds_P Parameter: Organism Value: Zea mays
  misc_feature: MA Experiment 108546 PARAMETER Experiment Name: Zm_Imbibed_Seeds_P Parameter: Plant Line Value: 35A19
  misc_feature: MA Experiment 108546 PARAMETER Experiment Name: Zm_Imbibed_Seeds_P Parameter: Tissue Value: Roots vs. Embryo
  misc_feature: MA Experiment ID: 108547 Result: Up-regulated in Transcription
  misc_feature: MA Experiment 108547 PARAMETER Experiment Name: Zm_Imbibed_Seeds_P Parameter: Age (day) Value: 4 vs. 2
  misc_feature: MA Experiment 108547 PARAMETER Experiment Name: Zm_Imbibed_Seeds_P Parameter: Organism Value: Zea mays
  misc_feature: MA Experiment 108547 PARAMETER Experiment Name: Zm_Imbibed_Seeds_P Parameter: Plant Line Value: 35A19
  misc_feature: MA Experiment 108547 PARAMETER Experiment Name: Zm_Imbibed_Seeds_P Parameter: Tissue Value: Aerial vs. Embryo
  misc_feature: MA Experiment ID: 108559 Result: Down-regulated in Transcription
  misc_feature: MA Experiment 108559 PARAMETER Experiment Name: Zm_5mM_NO_P Parameter: Age (day) Value: 8
  misc_feature: MA Experiment 108559 PARAMETER Experiment Name: Zm_5mM_NO_P Parameter: Organism Value: Zea mays
  misc_feature: MA Experiment 108559 PARAMETER Experiment Name: Zm_5mM_NO_P Parameter: Plant Line Value: 35A19
  misc_feature: MA Experiment 108559 PARAMETER Experiment Name: Zm_5mM_NO_P Parameter: Timepoint (hr) Value: 12
  misc_feature: MA Experiment 108559 PARAMETER Experiment Name: Zm_5mM_NO_P Parameter: Tissue Value: Aerial
  misc_feature: MA Experiment 108559 PARAMETER Experiment Name: Zm_5mM_NO_P Parameter: Treatment Value: 5mM NO vs. No Treatment
  misc_feature: MA Experiment ID: 20000478 Result: Down-regulated in Transcription
  misc_feature: MA Experiment 20000478 PARAMETER Experiment Name: Zm_5mM_SA_P Parameter: Age (day) Value: 11
  misc_feature: MA Experiment 20000478 PARAMETER Experiment Name: Zm_5mM_SA_P Parameter: Organism Value: Zea mays
  misc_feature: MA Experiment 20000478 PARAMETER Experiment Name: Zm_5mM_SA_P Parameter: Plant Line Value: 35A19
  misc_feature: MA Experiment 20000478 PARAMETER Experiment Name: Zm_5mM_SA_P Parameter: Timepoint (hr) Value: 72
  misc_feature: MA Experiment 20000478 PARAMETER Experiment Name: Zm_5mM_SA_P Parameter: Tissue Value: Aerial
  misc_feature: MA Experiment 20000478 PARAMETER Experiment Name: Zm_5mM_SA_P Parameter: Treatment Value: 5mM SA vs. No Treatment
  misc_feature: MA Experiment ID: 20000480 Result: Down-regulated in Transcription
  misc_feature: MA Experiment 20000480 PARAMETER Experiment Name: Zm_Drought_P Parameter: Age (day) Value: 11
  misc_feature: MA Experiment 20000480 PARAMETER Experiment Name: Zm_Drought_P Parameter: Organism Value: Zea mays
  misc_feature: MA Experiment 20000480 PARAMETER Experiment Name: Zm_Drought_P Parameter: Plant Line Value: 35A19
  misc_feature: MA Experiment 20000480 PARAMETER Experiment Name: Zm_Drought_P Parameter: Timepoint (hr) Value: 72
  misc_feature: MA Experiment 20000480 PARAMETER Experiment Name: Zm_Drought_P Parameter: Tissue Value: Aerial
  misc_feature: MA Experiment 20000480 PARAMETER Experiment Name: Zm_Drought_P Parameter: Treatment Value: Drought vs. No Drought
  misc_feature: MA Experiment ID: 20000626 Result: Down-regulated in Transcription
  misc_feature: MA Experiment 20000626 PARAMETER Experiment Name: Zm_Herbicide-Treatments_P Parameter: Timepoint (hr) Value: 12
  misc_feature: MA Experiment 20000626 PARAMETER Experiment Name: Zm_Herbicide-Treatments_P Parameter: Tissue Value: Aerial
  misc_feature: MA Experiment 20000626 PARAMETER Experiment Name: Zm_Herbicide-Treatments_P Parameter: Treatment Value: Roundup vs. No Treatment

SEQ ID NO: 13983 - protein, 374 aa, Zea mays subsp. mays; identical to SEQ ID NO: 4156
  peptide (1)..(374): Ceres Seq. ID no. 13495298
  misc_feature (41)..(360): Pfam Name: Uroporphyrinogen decarboxylase (URO-D) Pfam Description: Uroporphyrinogen decarboxylase (URO-D)
  misc_feature (5)..(360): Homolog of NCBI NO: 34912796 NR Description: putative uroporphyrinogen decarboxylase [Oryza
  misc_feature (39)..(360): Homolog of NCBI NO: 16323119 NR Description: AT3g14930/K15M2_7 [Arabidopsis thaliana]
  misc_feature (39)..(360): Homolog of NCBI NO: 18400577 NR Description: uroporphyrinogen decarboxylase (UPD), putative thaliana] >gi|30683381|ref|NP_850587.1| uroporphyrinogen
  misc_feature (63)..(360): Homolog of NCBI NO: 8777476 NR Description: uroporphyrinogen decarboxylase [Arabidopsis >gi|22531275|gb|AAM97141.1| putative uroporphyrinogen
  misc_feature (41)..(360): Homolog of NCBI NO: 23041382 NR Description: hypothetical protein [Trichodesmium erythraeum
  misc_feature (39)..(360): Homolog of NCBI NO: 14334768 NR Description: putative uroporphyrinogen decarboxylase
  misc_feature (39)..(360): Homolog of NCBI NO: 15226690 NR Description: uroporphyrinogen decarboxylase (UPD), putative thaliana] >gi|6014937|sp|O22886|DCUP_ARATH Uroporphyrinogen
  misc_feature (16)..(360): Homolog of NCBI NO: 2501647 NR Description: Uroporphyrinogen decarboxylase, chloroplast
  misc_feature (36)..(360): Homolog of NCBI NO: 16975230 NR Description: Chain A, Crystal Structure And Substrate Binding
  misc_feature (44)..(360): Homolog of NCBI NO: 33240529 NR Description: Uroporphyrinogen decarboxylase [Prochlorococcus subsp. marinus str. CCMP1375] >gi|33238057|gb|AAQ00124.1| decarboxylase [Prochlorococcus marinus subsp. marinus str.

SEQ ID NO: 13984 - protein, 373 aa, Zea mays subsp. mays; identical to SEQ ID NO: 4157
  peptide (1)..(373): Ceres Seq. ID no. 13495299
  misc_feature (40)..(359): Pfam Name: Uroporphyrinogen decarboxylase (URO-D) Pfam Description: Uroporphyrinogen decarboxylase (URO-D)
  misc_feature (4)..(359): Homolog of NCBI NO: 34912796 NR Description: putative uroporphyrinogen decarboxylase [Oryza
  misc_feature (38)..(359): Homolog of NCBI NO: 16323119 NR Description: AT3g14930/K15M2_7 [Arabidopsis thaliana]
  misc_feature (38)..(359): Homolog of NCBI NO: 18400577 NR Description: uroporphyrinogen decarboxylase (UPD), putative thaliana] >gi|30683381|ref|NP_850587.1| uroporphyrinogen
  misc_feature (62)..(359): Homolog of NCBI NO: 8777476 NR Description: uroporphyrinogen decarboxylase [Arabidopsis >gi|22531275|gb|AAM97141.1| putative uroporphyrinogen
  misc_feature (40)..(359): Homolog of NCBI NO: 23041382 NR Description: hypothetical protein [Trichodesmium erythraeum
  misc_feature (38)..(359): Homolog of NCBI NO: 14334768 NR Description: putative uroporphyrinogen decarboxylase
  misc_feature (38)..(359): Homolog of NCBI NO: 15226690 NR Description: uroporphyrinogen decarboxylase (UPD), putative thaliana] >gi|6014937|sp|O22886|DCUP_ARATH Uroporphyrinogen
  misc_feature (15)..(359): Homolog of NCBI NO: 2501647 NR Description: Uroporphyrinogen decarboxylase, chloroplast
  misc_feature (35)..(359): Homolog of NCBI NO: 16975230 NR Description: Chain A, Crystal Structure And Substrate Binding
  misc_feature (43)..(359): Homolog of NCBI NO: 33240529 NR Description: Uroporphyrinogen decarboxylase [Prochlorococcus subsp. marinus str. CCMP1375] >gi|33238057|gb|AAQ00124.1| decarboxylase [Prochlorococcus marinus subsp. marinus str.

SEQ ID NO: 13985 - protein, 312 aa, Zea mays subsp. mays; identical to SEQ ID NO: 4158
  peptide (1)..(312): Ceres Seq. ID no. 13495300
  misc_feature (1)..(298): Pfam Name: Uroporphyrinogen decarboxylase (URO-D) Pfam Description: Uroporphyrinogen decarboxylase (URO-D)
  misc_feature (1)..(298): Homolog of NCBI NO: 34912796 NR Description: putative uroporphyrinogen decarboxylase [Oryza
  misc_feature (1)..(298): Homolog of NCBI NO: 16323119 NR Description: AT3g14930/K15M2_7 [Arabidopsis thaliana]
  misc_feature (1)..(298): Homolog of NCBI NO: 18400577 NR Description: uroporphyrinogen decarboxylase (UPD), putative thaliana] >gi|30683381|ref|NP_850587.1| uroporphyrinogen
  misc_feature (1)..(298): Homolog of NCBI NO: 8777476 NR Description: uroporphyrinogen decarboxylase [Arabidopsis >gi|22531275|gb|AAM97141.1| putative uroporphyrinogen
  misc_feature (1)..(298): Homolog of NCBI NO: 23041382 NR Description: hypothetical protein [Trichodesmium erythraeum
  misc_feature (1)..(298): Homolog of NCBI NO: 14334768 NR Description: putative uroporphyrinogen decarboxylase
  misc_feature (1)..(298): Homolog of NCBI NO: 15226690 NR Description: uroporphyrinogen decarboxylase (UPD), putative thaliana] >gi|6014937|sp|O22886|DCUP_ARATH Uroporphyrinogen
  misc_feature (1)..(298): Homolog of NCBI NO: 2501647 NR Description: Uroporphyrinogen decarboxylase, chloroplast
  misc_feature (1)..(298): Homolog of NCBI NO: 16975230 NR Description: Chain A, Crystal Structure And Substrate Binding
  misc_feature (1)..(298): Homolog of NCBI NO: 33240529 NR Description: Uroporphyrinogen decarboxylase [Prochlorococcus subsp. marinus str. CCMP1375] >gi|33238057|gb|AAQ00124.1| decarboxylase [Prochlorococcus marinus subsp. marinus str.

SEQ ID NO: 13986 - DNA, 1041 bp, Zea mays subsp. mays; identical to SEQ ID NO: 5616
  misc_feature (1)..(1041): Ceres Seq. ID no. 13498730
  misc_feature: MA Experiment ID: 108529 Result: Up-regulated in Transcription
  misc_feature: MA Experiment 108529 PARAMETER Experiment Name: Zm_Imbibed_Seeds_P Parameter: Age (day) Value: 5 vs. 2
  misc_feature: MA Experiment 108529 PARAMETER Experiment Name: Zm_Imbibed_Seeds_P Parameter: Organism Value: Zea mays
  misc_feature: MA Experiment 108529 PARAMETER Experiment Name: Zm_Imbibed_Seeds_P Parameter: Plant Line Value: 35A19
  misc_feature: MA Experiment 108529 PARAMETER Experiment Name: Zm_Imbibed_Seeds_P Parameter: Tissue Value: Roots vs. Embryo
  misc_feature: MA Experiment ID: 108548 Result: Down-regulated in Transcription
  misc_feature: MA Experiment 108548 PARAMETER Experiment Name: Zm_20uM_KNO3_H-to-L_P Parameter: Age (day) Value: 11
  misc_feature: MA Experiment 108548 PARAMETER Experiment Name: Zm_20uM_KNO3_H-to-L_P Parameter: Organism Value: Zea mays
  misc_feature: MA Experiment 108548 PARAMETER Experiment Name: Zm_20uM_KNO3_H-to-L_P Parameter: Plant Line Value: 35A19
  misc_feature: MA Experiment 108548 PARAMETER Experiment Name: Zm_20uM_KNO3_H-to-L_P Parameter: Timepoint (hr) Value: 4
  misc_feature: MA Experiment 108548 PARAMETER Experiment Name: Zm_20uM_KNO3_H-to-L_P Parameter: Tissue Value: Roots
  misc_feature: MA Experiment 108548 PARAMETER Experiment Name: Zm_20uM_KNO3_H-to-L_P Parameter: Treatment Value: 20uM KNO3 vs. 60mM KNO3
  misc_feature: MA Experiment ID: 20000535 Result: Up-regulated in Transcription
  misc_feature: MA Experiment 20000535 PARAMETER Experiment Name: Zm_Hybrid_Seed_Dev_P Parameter: DAP Value: 30 vs. 12
  misc_feature: MA Experiment 20000535 PARAMETER Experiment Name: Zm_Hybrid_Seed_Dev_P Parameter: Organism Value: Zea mays
  misc_feature: MA Experiment 20000535 PARAMETER Experiment Name: Zm_Hybrid_Seed_Dev_P Parameter: Plant Line Value: 35A19
  misc_feature: MA Experiment 20000535 PARAMETER Experiment Name: Zm_Hybrid_Seed_Dev_P Parameter: Tissue Value: Embryo vs. Unfert Floret

SEQ ID NO: 13987 - protein, 252 aa, Zea mays subsp. mays; identical to SEQ ID NO: 5617
  peptide (1)..(252): Ceres Seq. ID no. 13498731

SEQ ID NO: 13988 - protein, 220 aa, Zea mays subsp. mays; identical to SEQ ID NO: 5618
  peptide (1)..(220): Ceres Seq. ID no. 13498732
  misc_feature (41)..(105): Pfam Name: AP2 domain Pfam Description: AP2 domain
  misc_feature (41)..(105): Pfam Name: AP2 domain Pfam Description: AP2 domain
  misc_feature (1)..(220): Homolog of NCBI NO: 38605848 NR Description: OSJNBb0034G17.6 [Oryza sativa (japonica
  misc_feature (1)..(220): Homolog of NCBI NO: 14140163 NR Description: putative AP2 domain containing protein [Oryza
  misc_feature (1)..(219): Homolog of NCBI NO: 21908034 NR Description: DRE binding factor 2 [Zea mays]
  misc_feature (1)..(219): Homolog of NCBI NO: 25990951 NR Description: DREB-like protein [Zea mays]
  misc_feature (1)..(220): Homolog of NCBI NO: 14140155 NR Description: putative AP2 domain transcription factor [Oryza
  misc_feature (1)..(220): Homolog of NCBI NO: 14140163 NR Description: putative AP2 domain containing protein [Oryza
  misc_feature (1)..(219): Homolog of NCBI NO: 25990951 NR Description: DREB-like protein [Zea mays]
  misc_feature (15)..(165): Homolog of NCBI NO: 15227471 NR Description: AP2 domain transcription factor, putative thaliana] >gi|25350648|pir||H84771 probable AP2 domain
  misc_feature (2)..(188): Homolog of NCBI NO: 15225381 NR Description: AP2 domain transcription factor TINY, putative thaliana] >gi|7488386|pir||T00399 probable AP2 domain
  misc_feature (1)..(218): Homolog of NCBI NO: 38605844 NR Description: OSJNBb0034G17.2 [Oryza sativa (japonica
  misc_feature (14)..(220): Homolog of NCBI NO: 38605845 NR Description: OSJNBb0034G17.3 [Oryza sativa (japonica
  misc_feature (1)..(219): Homolog of NCBI NO: 37536842 NR Description: putative DNA binding protein [Oryza sativa
  misc_feature (1)..(220): Homolog of NCBI NO: 14140155 NR Description: putative AP2 domain transcription factor [Oryza
  misc_feature (1)..(219): Homolog of NCBI NO: 21908034 NR Description: DRE binding factor 2 [Zea mays]
  misc_feature (1)..(220): Homolog of NCBI NO: 38605848 NR Description: OSJNBb0034G17.6 [Oryza sativa (japonica
  misc_feature (1)..(219): Homolog of NCBI NO: 37536842 NR Description: putative DNA binding protein [Oryza sativa
  misc_feature (14)..(220): Homolog of NCBI NO: 38605845 NR Description: OSJNBb0034G17.3 [Oryza sativa (japonica
  misc_feature (1)..(218): Homolog of NCBI NO: 38605844 NR Description: OSJNBb0034G17.2 [Oryza sativa (japonica
  misc_feature (2)..(188): Homolog of NCBI NO: 15225381 NR Description: AP2 domain transcription factor TINY, putative thaliana] >gi|7488386|pir||T00399 probable AP2 domain
  misc_feature (15)..(165): Homolog of NCBI NO: 15227471 NR Description: AP2 domain transcription factor, putative thaliana] >gi|25350648|pir||H84771 probable AP2 domain

SEQ ID NO: 13989 - protein, 172 aa, Zea mays subsp. mays; identical to SEQ ID NO: 5619
  peptide (1)..(172): Ceres Seq. ID no. 13498733
  misc_feature (1)..(57): Pfam Name: AP2 domain Pfam Description: AP2 domain
  misc_feature (1)..(57): Pfam Name: AP2 domain Pfam Description: AP2 domain
  misc_feature (1)..(172): Homolog of NCBI NO: 38605848 NR Description: OSJNBb0034G17.6 [Oryza sativa (japonica
  misc_feature (1)..(172): Homolog of NCBI NO: 14140163 NR Description: putative AP2 domain containing protein [Oryza
  misc_feature (1)..(171): Homolog of NCBI NO: 21908034 NR Description: DRE binding factor 2 [Zea mays]
  misc_feature (1)..(171): Homolog of NCBI NO: 25990951 NR Description: DREB-like protein [Zea mays]
  misc_feature (1)..(172): Homolog of NCBI NO: 14140155 NR Description: putative AP2 domain transcription factor [Oryza
  misc_feature (1)..(172): Homolog of NCBI NO: 14140163 NR Description: putative AP2 domain containing protein [Oryza
  misc_feature (1)..(171): Homolog of NCBI NO: 25990951 NR Description: DREB-like protein [Zea mays]
  misc_feature (1)..(117): Homolog of NCBI NO: 15227471 NR Description: AP2 domain transcription factor, putative thaliana] >gi|25350648|pir||H84771 probable AP2 domain
  misc_feature (1)..(140): Homolog of NCBI NO: 15225381 NR Description: AP2 domain transcription factor TINY, putative thaliana] >gi|7488386|pir||T00399 probable AP2 domain
  misc_feature (1)..(170): Homolog of NCBI NO: 38605844 NR Description: OSJNBb0034G17.2 [Oryza sativa (japonica
  misc_feature (1)..(172): Homolog of NCBI NO: 38605845 NR Description: OSJNBb0034G17.3 [Oryza sativa (japonica
  misc_feature (1)..(171): Homolog of NCBI NO: 37536842 NR Description: putative DNA binding protein [Oryza sativa
  misc_feature (1)..(172): Homolog of NCBI NO: 14140155 NR Description: putative AP2 domain transcription factor [Oryza
  misc_feature (1)..(171): Homolog of NCBI NO: 21908034 NR Description: DRE binding factor 2 [Zea mays]
  misc_feature (1)..(172): Homolog of NCBI NO: 38605848 NR Description: OSJNBb0034G17.6 [Oryza sativa (japonica
  misc_feature (1)..(171): Homolog of NCBI NO: 37536842 NR Description: putative DNA binding protein [Oryza sativa
  misc_feature (1)..(172): Homolog of NCBI NO: 38605845 NR Description: OSJNBb0034G17.3 [Oryza sativa (japonica
  misc_feature (1)..(170): Homolog of NCBI NO: 38605844 NR Description: OSJNBb0034G17.2 [Oryza sativa (japonica
  misc_feature (1)..(140): Homolog of NCBI NO: 15225381 NR Description: AP2 domain transcription factor TINY, putative thaliana] >gi|7488386|pir||T00399 probable AP2 domain
  misc_feature (1)..(117): Homolog of NCBI NO: 15227471 NR Description: AP2 domain transcription factor, putative thaliana] >gi|25350648|pir||H84771 probable AP2 domain

SEQ ID NO: 13990 - DNA, 1144 bp, Zea mays subsp. mays
  misc_feature (1)..(1144): Ceres Seq. ID no. 13598993
  misc_feature: MA Experiment ID: 108547 Result: Up-regulated in Transcription
  misc_feature: MA Experiment 108547 PARAMETER Experiment Name: Zm_Imbibed_Seeds_P Parameter: Age (day) Value: 4 vs. 2
  misc_feature: MA Experiment 108547 PARAMETER Experiment Name: Zm_Imbibed_Seeds_P Parameter: Organism Value: Zea mays
  misc_feature: MA Experiment 108547 PARAMETER Experiment Name: Zm_Imbibed_Seeds_P Parameter: Plant Line Value: 35A19
  misc_feature: MA Experiment 108547 PARAMETER Experiment Name: Zm_Imbibed_Seeds_P Parameter: Tissue Value: Aerial vs. Embryo
  misc_feature: MA Experiment ID: 20000479 Result: Up-regulated in Transcription
  misc_feature: MA Experiment 20000479 PARAMETER Experiment Name: Zm_Drought_P Parameter: Age (day) Value: 10
  misc_feature: MA Experiment 20000479 PARAMETER Experiment Name: Zm_Drought_P Parameter: Organism Value: Zea mays
  misc_feature: MA Experiment 20000479 PARAMETER Experiment Name: Zm_Drought_P Parameter: Plant Line Value: 35A19
  misc_feature: MA Experiment 20000479 PARAMETER Experiment Name: Zm_Drought_P Parameter: Timepoint (hr) Value: 48
  misc_feature: MA Experiment 20000479 PARAMETER Experiment Name: Zm_Drought_P Parameter: Tissue Value: Aerial
  misc_feature: MA Experiment 20000479 PARAMETER Experiment Name: Zm_Drought_P Parameter: Treatment Value: Drought vs. No Drought
  misc_feature: MA Experiment ID: 20000630 Result: Down-regulated in Transcription
  misc_feature: MA Experiment 20000630 PARAMETER Experiment Name: Zm_Herbicide-Treatments_P Parameter: Timepoint (hr) Value: 4
  misc_feature: MA Experiment 20000630 PARAMETER Experiment Name: Zm_Herbicide-Treatments_P Parameter: Tissue Value: Aerial
  misc_feature: MA Experiment 20000630 PARAMETER Experiment Name: Zm_Herbicide-Treatments_P Parameter: Treatment Value: Roundup vs. No Treatment
gtagcgcaactccgcaagcaaatcctcctatctccaagcctccaatctgtgaacggtgaaccccaatcgaatgacgccgacggcgagcctcctcctcccggctcccccattcgtctctatctccgatgtgcgccgcctccagctccccccgcgcggcggccaccggcctcgcccctgctggaagggcttggagtgcggctccgtacagacgcggatggtctcttctttcgttgggagcagaacacgccgcagaaacgttatatgtgcttccctgttcggagttggagctcccgaagcactggtcattggagtagtcgccttgttggtgttcggccccaagggtctagcagaggtagccaggaatttggggaagactttgcgtgctttccaaccaaccattagagagatacaggatgtatcaagggagttcaggagcactcttgaacgagaaatcggaattgatgaggtttcccagtcgacgaattatacacccacgaccatgaataacaaccaacaacctgctgccgactcaaatatcaagcctgcacctgcaccttacaccagcgatgaacttgtgaaagtaactgaagaacaaattgctgcatcagctgctgcagcttggaacccgcaacaacctgcatcgtcgcaacagcaagaagtgtacactactccgagtgaggacgctcctacatcaggaggaagcgatggtcctgctgctccagctcttgctgcgagtgactcggatccaaagcaagtgaatctggacaaggcggaaacacagagatgactccgcttaacagcttgacactggatgggatgagcagcactgaacacgtcaggacgagcagtcttattttaattttgtaggcgatggacttcagattaaagccagttatttggactgctgcagctataatctatagagacataacactgtaaaaatagtagaatccgttttagattaaagccaaacgagatgagagcgttttctgtgtttactaggcttgttctgtagcagcatgcatgggcaggttcatacaaaaaggctatgtgtatgcgtaacataaccacgagtttatatggattaaatatatttagccacgttgaaaaaccggttcagttaataaaataatgtcagttggtt

SEQ ID NO: 13991 - protein, 238 aa, Zea mays subsp. mays
  peptide (1)..(238): Ceres Seq. ID no. 13598994
  misc_feature (71)..(153): Pfam Name: mttA/Hcf106 family Pfam Description: mttA/Hcf106 family
  misc_feature (71)..(153): Pfam Name: mttA/Hcf106 family Pfam Description: mttA/Hcf106 family
  misc_feature (1)..(238): Homolog of NCBI NO: 7542514 NR Description: HCF106C precursor protein [Zea mays]
  misc_feature (1)..(238): Homolog of NCBI NO: 7489747 NR Description: HCF106 protein precursor, chloroplast - maize
  misc_feature (4)..(197): Homolog of NCBI NO: 15277532 NR Description: HCF106 [Pisum sativum]
  misc_feature (2)..(228): Homolog of NCBI NO: 15237156 NR Description: HCF106 (gb|AAD32652.1) [Arabidopsis thaliana] HCF106 [Arabidopsis thaliana] >gi|10177410|dbj|BAB10541.1| HCF106 thaliana] >gi|26452484|dbj|BAC43327.1| putative HCF106
  misc_feature (67)..(127): Homolog of NCBI NO: 22298928 NR Description: ORF_ID:tsl1385~hypothetical protein
  misc_feature (1)..(238): Homolog of NCBI NO: 7489747 NR Description: HCF106 protein precursor, chloroplast - maize
  misc_feature (2)..(228): Homolog of NCBI NO: 15237156 NR Description: HCF106 (gb|AAD32652.1) [Arabidopsis thaliana] HCF106 [Arabidopsis thaliana] >gi|10177410|dbj|BAB10541.1| HCF106 thaliana] >gi|26452484|dbj|BAC43327.1| putative HCF106
  misc_feature (65)..(155): Homolog of NCBI NO: 4877984 NR Description: THA4 [Zea mays]
  misc_feature (68)..(217): Homolog of NCBI NO: 22960273 NR Description: hypothetical protein [Rhodobacter sphaeroides]
  misc_feature (67)..(159): Homolog of NCBI NO: 33864103 NR Description: mttA/Hcf106 family [Prochlorococcus marinus str.
  misc_feature (67)..(149): Homolog of NCBI NO: 16329622 NR Description: hypothetical protein [Synechocystis sp. PCC 6803]
  misc_feature (68)..(162): Homolog of NCBI NO: 37522572 NR Description: hypothetical protein gsr3003 [Gloeobacter
  misc_feature (67)..(127): Homolog of NCBI NO: 22298928 NR Description: ORF_ID:tsl1385~hypothetical protein
  misc_feature (4)..(197): Homolog of NCBI NO: 15277532 NR Description: HCF106 [Pisum sativum]
  misc_feature (1)..(238): Homolog of NCBI NO: 7542514 NR Description: HCF106C precursor protein [Zea mays]
  misc_feature (68)..(162): Homolog of NCBI NO: 37522572 NR Description: hypothetical protein gsr3003 [Gloeobacter
  misc_feature (67)..(149): Homolog of NCBI NO: 16329622 NR Description: hypothetical protein [Synechocystis sp. PCC 6803]
  misc_feature (67)..(159): Homolog of NCBI NO: 33864103 NR Description: mttA/Hcf106 family [Prochlorococcus marinus str.
  misc_feature (68)..(217): Homolog of NCBI NO: 22960273 NR Description: hypothetical protein [Rhodobacter sphaeroides]
  misc_feature (65)..(155): Homolog of NCBI NO: 4877984 NR Description: THA4 [Zea mays]
MTPTASLLLPAPPFVSISDVRRLQLPPRGGHRPRPCWKGLECGSVQTRMVSSFVGSRTRRRNVICASLFGVGAPEALVIGVVALLVFGPKGLAEVARNLGKTLRAFQPTIREIQDVSREFRSTLEREIGIDEVSQSTNYTPTTMNNNQQPAADSNIKPAPAPYTSDELVKVTEEQIAASAAAAWNPQQPASSQQQEVYTTPSEDAPTSGGSDGPAAPALAASDSDPKQVNLDKAETQR

SEQ ID NO: 13992 - protein, 190 aa, Zea mays subsp. mays
  peptide (1)..(190): Ceres Seq. ID no. 13598995
  misc_feature (23)..(105): Pfam Name: mttA/Hcf106 family Pfam Description: mttA/Hcf106 family
  misc_feature (23)..(105): Pfam Name: mttA/Hcf106 family Pfam Description: mttA/Hcf106 family
  misc_feature (1)..(190): Homolog of NCBI NO: 7542514 NR Description: HCF106C precursor protein [Zea mays]
  misc_feature (1)..(190): Homolog of NCBI NO: 7489747 NR Description: HCF106 protein precursor, chloroplast - maize
  misc_feature (1)..(149): Homolog of NCBI NO: 15277532 NR Description: HCF106 [Pisum sativum]
  misc_feature (1)..(180): Homolog of NCBI NO: 15237156 NR Description: HCF106 (gb|AAD32652.1) [Arabidopsis thaliana] HCF106 [Arabidopsis thaliana] >gi|10177410|dbj|BAB10541.1| HCF106 thaliana] >gi|26452484|dbj|BAC43327.1| putative HCF106
  misc_feature (19)..(79): Homolog of NCBI NO: 22298928 NR Description: ORF_ID:tsl1385~hypothetical protein
  misc_feature (1)..(190): Homolog of NCBI NO: 7489747 NR Description: HCF106 protein precursor, chloroplast - maize
  misc_feature (1)..(180): Homolog of NCBI NO: 15237156 NR Description: HCF106 (gb|AAD32652.1) [Arabidopsis thaliana] HCF106 [Arabidopsis thaliana] >gi|10177410|dbj|BAB10541.1| HCF106 thaliana] >gi|26452484|dbj|BAC43327.1| putative HCF106
  misc_feature (17)..(107): Homolog of NCBI NO: 4877984 NR Description: THA4 [Zea mays]
  misc_feature (20)..(169): Homolog of NCBI NO: 22960273 NR Description: hypothetical protein [Rhodobacter sphaeroides]
  misc_feature (19)..(111): Homolog of NCBI NO: 33864103 NR Description: mttA/Hcf106 family [Prochlorococcus marinus str.
  misc_feature (19)..(101): Homolog of NCBI NO: 16329622 NR Description: hypothetical protein [Synechocystis sp. PCC 6803]
  misc_feature (20)..(114): Homolog of NCBI NO: 37522572 NR Description: hypothetical protein gsr3003 [Gloeobacter
  misc_feature (19)..(79): Homolog of NCBI NO: 22298928 NR Description: ORF_ID:tsl1385~hypothetical protein
  misc_feature (1)..(149): Homolog of NCBI NO: 15277532 NR Description: HCF106 [Pisum sativum]
  misc_feature (1)..(190): Homolog of NCBI NO: 7542514 NR Description: HCF106C precursor protein [Zea mays]
  misc_feature (20)..(114): Homolog of NCBI NO: 37522572 NR Description: hypothetical protein gsr3003 [Gloeobacter
  misc_feature (19)..(101): Homolog of NCBI NO: 16329622 NR Description: hypothetical protein [Synechocystis sp. PCC 6803]
  misc_feature (19)..(111): Homolog of NCBI NO: 33864103 NR Description: mttA/Hcf106 family [Prochlorococcus marinus str.
  misc_feature (20)..(169): Homolog of NCBI NO: 22960273 NR Description: hypothetical protein [Rhodobacter sphaeroides]
  misc_feature (17)..(107): Homolog of NCBI NO: 4877984 NR Description: THA4 [Zea mays]
MVSSFVGSRTRRRNVICASLFGVGAPEALVIGVVALLVFGPKGLAEVARNLGKTLRAFQPTIREIQDVSREFRSTLEREIGIDEVSQSTNYTPTTMNNNQQPAADSNIKPAPAPYTSDELVKVTEEQIAASAAAAWNPQQPASSQQQEVYTTPSEDAPTSGGSDGPAAPALAASDSDPKQVNLDKAETQR

SEQ ID NO: 13993 - protein, 133 aa, Zea mays subsp. mays
  peptide (1)..(133): Ceres Seq. ID no. 13598996
VAQLRKQILLSPSLQSVNGEPQSNDADGEPPPPGSPIRLYLRCAPPPAPPARRPPASPLLEGLGVRLRTDADGLFFRWEQNTPQKRYMCFPVRSWSSRSTGHWSSRLVGVRPQGSSRGSQEFGEDFACFPTNH

SEQ ID NO: 13994 - DNA, 486 bp, Zea mays subsp. mays
  misc_feature (1)..(486): Ceres Seq. ID no. 4615923
  misc_feature: MA Experiment ID: 108527 Result: Up-regulated in Transcription
  misc_feature: MA Experiment 108527 PARAMETER Experiment Name: Zm_5mM_NO_P Parameter: Age (day) Value: 8
  misc_feature: MA Experiment 108527 PARAMETER Experiment Name: Zm_5mM_NO_P Parameter: Organism Value: Zea mays
  misc_feature: MA Experiment 108527 PARAMETER Experiment Name: Zm_5mM_NO_P Parameter: Plant Line Value: 35A19
  misc_feature: MA Experiment 108527 PARAMETER Experiment Name: Zm_5mM_NO_P Parameter: Timepoint (hr) Value: 6
  misc_feature: MA Experiment 108527 PARAMETER Experiment Name: Zm_5mM_NO_P Parameter: Tissue Value: Aerial
  misc_feature: MA Experiment 108527 PARAMETER Experiment Name: Zm_5mM_NO_P Parameter: Treatment Value: 5mM NO vs. No Treatment
  misc_feature: MA Experiment ID: 108528 Result: Down-regulated in Transcription
  misc_feature: MA Experiment 108528 PARAMETER Experiment Name: Zm_Imbibed_Seeds_P Parameter: Age (day) Value: 5 vs. 2
  misc_feature: MA Experiment 108528 PARAMETER Experiment Name: Zm_Imbibed_Seeds_P Parameter: Organism Value: Zea mays
  misc_feature: MA Experiment 108528 PARAMETER Experiment Name: Zm_Imbibed_Seeds_P Parameter: Plant Line Value: 35A19
  misc_feature: MA Experiment 108528 PARAMETER Experiment Name: Zm_Imbibed_Seeds_P Parameter: Tissue Value: Aerial vs. Embryo
  misc_feature: MA Experiment ID: 108530 Result: Down-regulated in Transcription
  misc_feature: MA Experiment 108530 PARAMETER Experiment Name: Zm_Imbibed_Seeds_P Parameter: Age (day) Value: 6 vs. 2
  misc_feature: MA Experiment 108530 PARAMETER Experiment Name: Zm_Imbibed_Seeds_P Parameter: Organism Value: Zea mays
  misc_feature: MA Experiment 108530 PARAMETER Experiment Name: Zm_Imbibed_Seeds_P Parameter: Plant Line Value: 35A19
  misc_feature: MA Experiment 108530 PARAMETER Experiment Name: Zm_Imbibed_Seeds_P Parameter: Tissue Value: Aerial vs. Embryo
  misc_feature: MA Experiment ID: 108542 Result: Up-regulated in Transcription
  misc_feature: MA Experiment 108542 PARAMETER Experiment Name: Zm_150mM_NaCl_P Parameter: Age (day) Value: 8
  misc_feature: MA Experiment 108542 PARAMETER Experiment Name: Zm_150mM_NaCl_P Parameter: Organism Value: Zea mays
  misc_feature: MA Experiment 108542 PARAMETER Experiment Name: Zm_150mM_NaCl_P Parameter: Plant Line Value: 35A19
  misc_feature: MA Experiment 108542 PARAMETER Experiment Name: Zm_150mM_NaCl_P Parameter: Timepoint (hr) Value: 6
  misc_feature: MA Experiment 108542 PARAMETER Experiment Name: Zm_150mM_NaCl_P Parameter: Tissue Value: Aerial
  misc_feature: MA Experiment 108542 PARAMETER Experiment Name: Zm_150mM_NaCl_P Parameter: Treatment Value: 150mM NaCl vs. No Treatment
  misc_feature: MA Experiment ID: 108544 Result: Down-regulated in Transcription
  misc_feature: MA Experiment ID: 108547 Result: Down-regulated in Transcription
  misc_feature: MA Experiment 108547 PARAMETER Experiment Name: Zm_Imbibed_Seeds_P Parameter: Age (day) Value: 4 vs. 2
  misc_feature: MA Experiment 108547 PARAMETER Experiment Name: Zm_Imbibed_Seeds_P Parameter: Organism Value: Zea mays
  misc_feature: MA Experiment 108547 PARAMETER Experiment Name: Zm_Imbibed_Seeds_P Parameter: Plant Line Value: 35A19
  misc_feature: MA Experiment 108547 PARAMETER Experiment Name: Zm_Imbibed_Seeds_P Parameter: Tissue Value: Aerial vs. Embryo
  misc_feature: MA Experiment ID: 108559 Result: Up-regulated in Transcription
  misc_feature: MA Experiment 108559 PARAMETER Experiment Name: Zm_5mM_NO_P Parameter: Age (day) Value: 8
  misc_feature: MA Experiment 108559 PARAMETER Experiment Name: Zm_5mM_NO_P Parameter: Organism Value: Zea mays
  misc_feature: MA Experiment 108559 PARAMETER Experiment Name: Zm_5mM_NO_P Parameter: Plant Line Value: 35A19
  misc_feature: MA Experiment 108559 PARAMETER Experiment Name: Zm_5mM_NO_P Parameter: Timepoint (hr) Value: 12
  misc_feature: MA Experiment 108559 PARAMETER Experiment Name: Zm_5mM_NO_P Parameter: Tissue Value: Aerial
  misc_feature: MA Experiment 108559 PARAMETER Experiment Name: Zm_5mM_NO_P Parameter: Treatment Value: 5mM NO vs. No Treatment
  misc_feature: MA Experiment ID: 20000108 Result: Up-regulated in Transcription
  misc_feature: MA Experiment 20000108 PARAMETER Experiment Name: Zm_Root-Tips_P Parameter: Age (day) Value: 12
  misc_feature: MA Experiment 20000108 PARAMETER Experiment Name: Zm_Root-Tips_P Parameter: Organism Value: Zea mays
  misc_feature: MA Experiment 20000108 PARAMETER Experiment Name: Zm_Root-Tips_P Parameter: Tissue Value: Root tips vs. Root mid region    35
  misc_feature: MA Experiment 20000108 PARAMETER Experiment Name: Zm_Root-Tips_P Parameter: Tissue Value: Root tips vs. Root mid region   Sequence Listing-Misc Features (4)
  misc_feature: MA Experiment ID: 20000479 Result: Down-regulated in Transcription
  misc_feature: MA Experiment 20000479 PARAMETER Experiment Name: Zm_Drought_P Parameter: Age (day) Value: 10
  misc_feature: MA Experiment 20000479 PARAMETER Experiment Name: Zm_Drought_P Parameter: Organism Value: Zea mays
  misc_feature: MA Experiment 20000479 PARAMETER Experiment Name: Zm_Drought_P Parameter: Plant Line Value: 35A19
  misc_feature: MA Experiment 20000479 PARAMETER Experiment Name: Zm_Drought_P Parameter: Timepoint (hr) Value: 48
  misc_feature: MA Experiment 20000479 PARAMETER Experiment Name: Zm_Drought_P Parameter: Tissue Value: Aerial
  misc_feature: MA Experiment 20000479 PARAMETER Experiment Name: Zm_Drought_P Parameter: Treatment Value: Drought vs. No Drought
  misc_feature: MA Experiment ID: 20000480 Result: Down-regulated in Transcription
  misc_feature: MA Experiment 20000480 PARAMETER Experiment Name: Zm_Drought_P Parameter: Age (day) Value: 11
  misc_feature: MA Experiment 20000480 PARAMETER Experiment Name: Zm_Drought_P Parameter: Organism Value: Zea mays
  misc_feature: MA Experiment 20000480 PARAMETER Experiment Name: Zm_Drought_P Parameter: Plant Line Value: 35A19
  misc_feature: MA Experiment 20000480 PARAMETER Experiment Name: Zm_Drought_P Parameter: Timepoint (hr) Value: 72
  misc_feature: MA Experiment 20000480 PARAMETER Experiment Name: Zm_Drought_P Parameter: Tissue Value: Aerial
  misc_feature: MA Experiment 20000480 PARAMETER Experiment Name: Zm_Drought_P Parameter: Treatment Value: Drought vs. No Drought
actcgtcactcacgaacgcacgaattcaccaaccaaactccactgtctccaactctccatcgcgtctgctacgcctctcctgcaggacgaccaatggcttccaggaagttcttcgtgggtggcaactggaaatgcaacggtactggcgaggacgtgaagaagatcgtcaccgtgctcaaccaagccgaggtgccctctgaagacgtcgtcgaggtggtggtgagtccgccgttcgtttttctgcagcaggtcaaggggctgctgcggctggacttcgccgtcgcagcgcagaactgctgggtgcgcaagggcggcgccttcaccggcgagatcagtgctgagatgctggtaaacctgcaggttccctgggtcattttggggcattctgagcgcagagctctgttgggtgaatccagtgattttgttgctgataaagttgcatatgcactcactcaaggtctcaaggtaattgcttgcattggtgag

SEQ ID NO: 13995 - protein, 162 aa, Zea mays subsp. mays
  peptide (1)..(162): Ceres Seq. ID no. 4615924
  misc_feature (35)..(161): Pfam Name: Triosephosphate isomerase Pfam Description: Triosephosphate isomerase
  misc_feature (32)..(161): Homolog of NCBI NO: 34908172 NR Description: putative triosephosphate isomerase [Oryza sativa
  misc_feature (35)..(161): Homolog of NCBI NO: 136057 NR Description: TRIOSEPHOSPHATE ISOMERASE, CYTOSOLIC (TIM)
  misc_feature (34)..(161): Homolog of NCBI NO: 11270444 NR Description: triose-phosphate isomerase (EC 5.3.1.1), cytosolic
  misc_feature (34)..(161): Homolog of NCBI NO: 15233272 NR Description: cytosolic triosephosphatisomerase; protein id: supported by cDNA: 28516., supported by cDNA: gi_14030670, by cDNA: gi_18491102, supported by cDNA: gi_414549 [Arabidopsis
  misc_feature (35)..(161): Homolog of NCBI NO: 1351279 NR Description: Triosephosphate isomerase, cytosolic (TIM)
  misc_feature (35)..(161): Homolog of NCBI NO: 38112662 NR Description: triose phosphate isomerase cytosolic isoform
  misc_feature (35)..(161): Homolog of NCBI NO: 136063 NR Description: TRIOSEPHOSPHATE ISOMERASE, CYTOSOLIC (TIM)
  misc_feature (35)..(161): Homolog of NCBI NO: 553107 NR Description: triosephosphate isomerase [Oryza sativa]
  misc_feature (35)..(161): Homolog of NCBI NO: 34895792 NR Description: putative triose-phosphate isomerase [Oryza sativa
  misc_feature (35)..(161): Homolog of NCBI NO: 11124572 NR Description: triosephosphat-isomerase [Triticum aestivum]
TRHSRTHEFTNQTPLSPTLHRVCYASPAGRPMASRKFFVGGNWKCNGTGEDVKKIVTVLNQAEVPSEDVVEVVVSPPFVFLQQVKGLLRLDFAVAAQNCWVRKGGAFTGEISAEMLVNLQVPWVILGHSERRALLGESSDFVADKVAYALTQGLKVIACIGE

SEQ ID NO: 13996 - protein, 131 aa, Zea mays subsp. mays
  peptide (1)..(131): Ceres Seq. ID no. 4615925
  misc_feature (4)..(130): Pfam Name: Triosephosphate isomerase Pfam Description: Triosephosphate isomerase
  misc_feature (1)..(130): Homolog of NCBI NO: 34908172 NR Description: putative triosephosphate isomerase [Oryza sativa
  misc_feature (4)..(130): Homolog of NCBI NO: 136057 NR Description: TRIOSEPHOSPHATE ISOMERASE, CYTOSOLIC (TIM)
  misc_feature (3)..(130): Homolog of NCBI NO: 11270444 NR Description: triose-phosphate isomerase (EC 5.3.1.1), cytosolic
  misc_feature (3)..(130): Homolog of NCBI NO: 15233272 NR Description: cytosolic triosephosphatisomerase; protein id: supported by cDNA: 28516., supported by cDNA: gi_14030670, by cDNA: gi_18491102, supported by cDNA: gi_414549 [Arabidopsis
  misc_feature (4)..(130): Homolog of NCBI NO: 1351279 NR Description: Triosephosphate isomerase, cytosolic (TIM)
  misc_feature (4)..(130): Homolog of NCBI NO: 38112662 NR Description: triose phosphate isomerase cytosolic isoform
  misc_feature (4)..(130): Homolog of NCBI NO: 136063 NR Description: TRIOSEPHOSPHATE ISOMERASE, CYTOSOLIC (TIM)
  misc_feature (4)..(130): Homolog of NCBI NO: 553107 NR Description: triosephosphate isomerase [Oryza sativa]
  misc_feature (4)..(130): Homolog of NCBI NO: 34895792 NR Description: putative triose-phosphate isomerase [Oryza sativa
  misc_feature (4)..(130): Homolog of NCBI NO: 11124572 NR Description: triosephosphat-isomerase [Triticum aestivum]
MASRKFFVGGNWKCNGTGEDVKKIVTVLNQAEVPSEDVVEVVVSPPFVFLQQVKGLLRLDFAVAAQNCWVRKGGAFTGEISAEMLVNLQVPWVILGHSERRALLGESSDFVADKVAYALTQGLKVIACIGE

SEQ ID NO: 13997 - DNA, 713 bp, Zea mays subsp. mays
  misc_feature (1)..(713): Ceres Seq. ID no. 12483013
  misc_feature: MA Experiment ID: 108522 Result: Up-regulated in Transcription
  misc_feature: MA Experiment 108522 PARAMETER Experiment Name: Zm_42deg_Heat_P Parameter: Age (day) Value: 8
  misc_feature: MA Experiment 108522 PARAMETER Experiment Name: Zm_42deg_Heat_P Parameter: Organism Value: Zea mays
  misc_feature: MA Experiment 108522 PARAMETER Experiment Name: Zm_42deg_Heat_P Parameter: Plant Line Value: 35A19
  misc_feature: MA Experiment 108522 PARAMETER Experiment Name: Zm_42deg_Heat_P Parameter: Temperature (deg C) Value: 42 vs. 22
  misc_feature: MA Experiment 108522 PARAMETER Experiment Name: Zm_42deg_Heat_P Parameter: Timepoint (hr) Value: 1
  misc_feature: MA Experiment 108522 PARAMETER Experiment Name: Zm_42deg_Heat_P Parameter: Tissue Value: Aerial
  misc_feature: MA Experiment ID: 108689 Result: Up-regulated in Transcription
  misc_feature: MA Experiment 108689 PARAMETER Experiment Name: Zm_Drought_Roots_P Parameter: Age (day) Value: 9
  misc_feature: MA Experiment 108689 PARAMETER Experiment Name: Zm_Drought_Roots_P Parameter: Organism Value: Zea mays
  misc_feature: MA Experiment 108689 PARAMETER Experiment Name: Zm_Drought_Roots_P Parameter: Plant Line Value: 35A19
  misc_feature: MA Experiment 108689 PARAMETER Experiment Name: Zm_Drought_Roots_P Parameter: Timepoint (hr) Value: 24
  misc_feature: MA Experiment 108689 PARAMETER Experiment Name: Zm_Drought_Roots_P Parameter: Tissue Value: Roots
  misc_feature: MA Experiment 108689 PARAMETER Experiment Name: Zm_Drought_Roots_P Parameter: Treatment Value: Drought vs. No Drought
cactattggtgttgtctattattcccctattcaattcttttttcttaggaatacctatggtcagcatgctcctttatgtctggagccgagagaatccaaatgctcagataaatatatacggcctcgtccaattgaggtccttttatcttccatgggctatgctcttattggatgtgatatttgggtcatcattaatgcctggacttctgggtatcatggttggacatctctactacttctttgcagtgttgcaccctcttgccaccgggaagaactacctcaagactcctaaatgggnttacataagattgtttctcgattcagggataggcatgcaagcaaactcacccgtccgtccaccagccaatggcaacagcgggtctggtgtgtttagaggaagaagctataggctcaatcaatagattcacccacctcgtaatgtgatccatggtcggagtggcaatgtagaagcaaagaccagaacgcatagtagggtcaatcaaaattaagggttacccgtcagagattttcttaaaaaacctggacggacggaatggagaaccctttcatttgctcatttagttgctaacaatgttcatcgtccatgtttacacatgaatataattctgtaatgacaatttgtgtacacttatgctggacttattgtcgcctctttttagctaggataagaacaaaagatgatgagtttgccc

SEQ ID NO: 13998 - protein, 139 aa, Zea mays subsp. mays
  peptide (1)..(139): Ceres Seq. ID no. 12483014
  misc_feature (1)..(97): Pfam Name: Der1-like family Pfam Description: Der1-like family
  misc_feature (1)..(139): Homolog of NCBI NO: 9187743 NR Description: putative NADH oxidoreductase [Zea mays]
  misc_feature (1)..(98): Homolog of NCBI NO: 22329014 NR Description: putative protein; protein id: At4g29330.1, by cDNA: gi_17380685, supported by cDNA: gi_20465888 [Arabidopsis >gi|17380686|gb|AAL36173.1| unknown protein [Arabidopsis
  misc_feature (1)..(98): Homolog of NCBI NO: 25407607 NR Description: hypothetical protein AT4g29330 [imported] - thaliana >gi|7269831|emb|CAB79691.1| putative protein
  misc_feature (2)..(107): Homolog of NCBI NO: 35505512 NR Description: FLJ43842 protein [Homo sapiens]
  misc_feature (2)..(106): Homolog of NCBI NO: 13435738 NR Description: RIKEN cDNA 1810063P04 gene [Mus musculus]
  misc_feature (2)..(106): Homolog of NCBI NO: 18859601 NR Description: RIKEN cDNA 1810063P04 [Mus musculus] unnamed protein product [Mus musculus]
  misc_feature (2)..(96): Homolog of NCBI NO: 15777933 NR Description: putative NADH oxidoreductase complex I subunit
  misc_feature (1)..(104): Homolog of NCBI NO: 7506746 NR Description: hypothetical protein R151.6 - Caenorhabditis >gi|13559645|gb|AAK29854.1| Hypothetical protein R151.6
  misc_feature (1)..(104): Homolog of NCBI NO: 25149181 NR Description: Putative NADH oxidoreductase complex I subunit kD) [Caenorhabditis elegans] >gi|5019819|gb|AAD37863.1|AF143152_1
  misc_feature (2)..(98): Homolog of NCBI NO: 34852394 NR Description: similar to carcinoma related gene [Rattus
  misc_feature (99)..(99): Xaa is any aa, unknown or other
LLVLSIIPLFNSFFLGIPMVSMLLYVWSRENPNAQINIYGLVQLRSFYLPWAMLLLDVIFGSSLMPGLLGIMVGHLYYFFAVLHPLATGKNYLKTPKWXYIRLFLDSGIGMQANSPVRPPANGNSGSGVFRGRSYRLNQ

SEQ ID NO: 13999 - protein, 121 aa, Zea mays subsp. mays
  peptide (1)..(121): Ceres Seq. ID no. 12483015
  misc_feature (1)..(79): Pfam Name: Der1-like family Pfam Description: Der1-like family
  misc_feature (1)..(121): Homolog of NCBI NO: 9187743 NR Description: putative NADH oxidoreductase [Zea mays]
  misc_feature (1)..(80): Homolog of NCBI NO: 22329014 NR Description: putative protein; protein id: At4g29330.1, by cDNA: gi_17380685, supported by cDNA: gi_20465888 [Arabidopsis >gi|17380686|gb|AAL36173.1| unknown protein [Arabidopsis
  misc_feature (1)..(80): Homolog of NCBI NO: 25407607 NR Description: hypothetical protein AT4g29330 [imported] - thaliana >gi|7269831|emb|CAB79691.1| putative protein
  misc_feature (1)..(89): Homolog of NCBI NO: 35505512 NR Description: FLJ43842 protein [Homo sapiens]
  misc_feature (1)..(88): Homolog of NCBI NO: 13435738 NR Description: RIKEN cDNA 1810063P04 gene [Mus musculus]
  misc_feature (1)..(88): Homolog of NCBI NO: 18859601 NR Description: RIKEN cDNA 1810063P04 [Mus musculus] unnamed protein product [Mus musculus]
  misc_feature (1)..(78): Homolog of NCBI NO: 15777933 NR Description: putative NADH oxidoreductase complex I subunit
  misc_feature (1)..(86): Homolog of NCBI NO: 7506746 NR Description: hypothetical protein R151.6 - Caenorhabditis >gi|13559645|gb|AAK29854.1| Hypothetical protein R151.6
  misc_feature (1)..(86): Homolog of NCBI NO: 25149181 NR Description: Putative NADH oxidoreductase complex I subunit kD) [Caenorhabditis elegans] >gi|5019819|gb|AAD37863.1|AF143152_1
  misc_feature (1)..(80): Homolog of NCBI NO: 34852394 NR Description: similar to carcinoma related gene [Rattus
  misc_feature (81)..(81): Xaa is any aa, unknown or other
MVSMLLYVWSRENPNAQINIYGLVQLRSFYLPWAMLLLDVIFGSSLMPGLLGIMVGHLYYFFAVLHPLATGKNYLKTPKWXYIRLFLDSGIGMQANSPVRPPANGNSGSGVFRGRSYRLNQ

SEQ ID NO: 14000 - protein, 118 aa, Zea mays subsp. mays
  peptide (1)..(118): Ceres Seq. ID no. 12483016
  misc_feature (1)..(76): Pfam Name: Der1-like family Pfam Description: Der1-like family
  misc_feature (1)..(83): Homolog of NCBI NO: 25149181 NR Description: Putative NADH oxidoreductase complex I subunit kD) [Caenorhabditis elegans] >gi|5019819|gb|AAD37863.1|AF143152_1
  misc_feature (1)..(118): Homolog of NCBI NO: 9187743 NR Description: putative NADH oxidoreductase [Zea mays]
  misc_feature (1)..(77): Homolog of NCBI NO: 25407607 NR Description: hypothetical protein AT4g29330 [imported] - thaliana >gi|7269831|emb|CAB79691.1| putative protein
  misc_feature (1)..(85): Homolog of NCBI NO: 13435738 NR Description: RIKEN cDNA 1810063P04 gene [Mus musculus]
  misc_feature (1)..(75): Homolog of NCBI NO: 15777933 NR Description: putative NADH oxidoreductase complex I subunit
  misc_feature (1)..(83): Homolog of NCBI NO: 7506746 NR Description: hypothetical protein R151.6 - Caenorhabditis >gi|13559645|gb|AAK29854.1| Hypothetical protein R151.6
  misc_feature (1)..(85): Homolog of NCBI NO: 18859601 NR Description: RIKEN cDNA 1810063P04 [Mus musculus] unnamed protein product [Mus musculus]
  misc_feature (1)..(86): Homolog of NCBI NO: 35505512 NR Description: FLJ43842 protein [Homo sapiens]
  misc_feature (1)..(77): Homolog of NCBI NO: 22329014 NR Description: putative protein; protein id: At4g29330.1, by cDNA: gi_17380685, supported by cDNA: gi_20465888 [Arabidopsis >gi|17380686|gb|AAL36173.1| unknown protein [Arabidopsis
  misc_feature (1)..(77): Homolog of NCBI NO: 34852394 NR Description: similar to carcinoma related gene [Rattus
  misc_feature (78)..(78): Xaa is any aa, unknown or other
MLLYVWSRENPNAQINIYGLVQLRSFYLPWAMLLLDVIFGSSLMPGLLGIMVGHLYYFFAVLHPLATGKNYLKTPKWXYIRLFLDSGIGMQANSPVRPPANGNSGSGVFRGRSYRLNQ

SEQ ID NO: 14001 - DNA, 445 bp, Zea mays subsp. mays
  misc_feature (1)..(445): Ceres Seq. ID no. 3008311
  misc_feature: MA Experiment ID: 108522 Result: Up-regulated in Transcription
  misc_feature: MA Experiment 108522 PARAMETER Experiment Name: Zm_42deg_Heat_P Parameter: Age (day) Value: 8
  misc_feature: MA Experiment 108522 PARAMETER Experiment Name: Zm_42deg_Heat_P Parameter: Organism Value: Zea mays
  misc_feature: MA Experiment 108522 PARAMETER Experiment Name: Zm_42deg_Heat_P Parameter: Plant Line Value: 35A19
  misc_feature: MA Experiment 108522 PARAMETER Experiment Name: Zm_42deg_Heat_P Parameter: Temperature (deg C) Value: 42 vs. 22
  misc_feature: MA Experiment 108522 PARAMETER Experiment Name: Zm_42deg_Heat_P Parameter: Timepoint (hr) Value: 1
  misc_feature: MA Experiment 108522 PARAMETER Experiment Name: Zm_42deg_Heat_P Parameter: Tissue Value: Aerial
  misc_feature: MA Experiment ID: 108523 Result: Up-regulated in Transcription
  misc_feature: MA Experiment 108523 PARAMETER Experiment Name: Zm_42deg_Heat_P Parameter: Age (day) Value: 8
  misc_feature: MA Experiment 108523 PARAMETER Experiment Name: Zm_42deg_Heat_P Parameter: Organism Value: Zea mays
  misc_feature: MA Experiment 108523 PARAMETER Experiment Name: Zm_42deg_Heat_P Parameter: Plant Line Value: 35A19
  misc_feature: MA Experiment 108523 PARAMETER Experiment Name: Zm_42deg_Heat_P Parameter: Temperature (deg C) Value: 42 vs. 22
  misc_feature: MA Experiment 108523 PARAMETER Experiment Name: Zm_42deg_Heat_P Parameter: Timepoint (hr) Value: 6
  misc_feature: MA Experiment 108523 PARAMETER Experiment Name: Zm_42deg_Heat_P Parameter: Tissue Value: Aerial
  misc_feature: MA Experiment ID: 108526 Result: Up-regulated in Transcription
  misc_feature: MA Experiment 108526 PARAMETER Experiment Name: Zm_5mM_NO_P Parameter: Age (day) Value: 8
  misc_feature: MA Experiment 108526 PARAMETER Experiment Name: Zm_5mM_NO_P Parameter: Organism Value: Zea mays
  misc_feature: MA Experiment 108526 PARAMETER Experiment Name: Zm_5mM_NO_P Parameter: Plant Line Value: 35A19
  misc_feature: MA Experiment 108526 PARAMETER Experiment Name: Zm_5mM_NO_P Parameter: Timepoint (hr) Value: 1
  misc_feature: MA Experiment 108526 PARAMETER Experiment Name: Zm_5mM_NO_P Parameter: Tissue Value: Aerial
  misc_feature: MA Experiment 108526 PARAMETER Experiment Name: Zm_5mM_NO_P Parameter: Treatment Value: 5mM NO vs. No Treatment
  misc_feature: MA Experiment ID: 108527 Result: Up-regulated in Transcription
  misc_feature: MA Experiment 108527 PARAMETER Experiment Name: Zm_5mM_NO_P Parameter: Age (day) Value: 8
  misc_feature: MA Experiment 108527 PARAMETER Experiment Name: Zm_5mM_NO_P Parameter: Organism Value: Zea mays
  misc_feature: MA Experiment 108527 PARAMETER Experiment Name: Zm_5mM_NO_P Parameter: Plant Line Value: 35A19
  misc_feature: MA Experiment 108527 PARAMETER Experiment Name: Zm_5mM_NO_P Parameter: Timepoint (hr) Value: 6
  misc_feature: MA Experiment 108527 PARAMETER Experiment Name: Zm_5mM_NO_P Parameter: Tissue Value: Aerial
  misc_feature: MA Experiment 108527 PARAMETER Experiment Name: Zm_5mM_NO_P Parameter: Treatment Value: 5mM NO vs. No Treatment
  misc_feature: MA Experiment ID: 108529 Result: Down-regulated in Transcription
  misc_feature: MA Experiment 108529 PARAMETER Experiment Name: Zm_Imbibed_Seeds_P Parameter: Age (day) Value: 5 vs. 2
  misc_feature: MA Experiment 108529 PARAMETER Experiment Name: Zm_Imbibed_Seeds_P Parameter: Organism Value: Zea mays
  misc_feature: MA Experiment 108529 PARAMETER Experiment Name: Zm_Imbibed_Seeds_P Parameter: Plant Line Value: 35A19
  misc_feature: MA Experiment 108529 PARAMETER Experiment Name: Zm_Imbibed_Seeds_P Parameter: Tissue Value: Roots vs. Embryo
  misc_feature: MA Experiment ID: 108530 Result: Down-regulated in Transcription
  misc_feature: MA Experiment 108530 PARAMETER Experiment Name: Zm_Imbibed_Seeds_P Parameter: Age (day) Value: 6 vs. 2
  misc_feature: MA Experiment 108530 PARAMETER Experiment Name: Zm_Imbibed_Seeds_P Parameter: Organism Value: Zea mays
  misc_feature: MA Experiment 108530 PARAMETER Experiment Name: Zm_Imbibed_Seeds_P Parameter: Plant Line Value: 35A19
  misc_feature: MA Experiment 108530 PARAMETER Experiment Name: Zm_Imbibed_Seeds_P Parameter: Tissue Value: Aerial vs. Embryo
  misc_feature: MA Experiment ID: 108534 Result: Up-regulated in Transcription
  misc_feature: MA Experiment 108534 PARAMETER Experiment Name: Zm_4deg_Cold_P Parameter: Age (hr) Value: 8
  misc_feature: MA Experiment 108534 PARAMETER Experiment Name: Zm_4deg_Cold_P Parameter: Organism Value: Zea mays
  misc_feature: MA Experiment 108534 PARAMETER Experiment Name: Zm_4deg_Cold_P Parameter: Plant Line Value: 35A19
  misc_feature: MA Experiment 108534 PARAMETER Experiment Name: Zm_4deg_Cold_P Parameter: Temperature (deg C) Value: 4 vs. 22
  misc_feature: MA Experiment 108534 PARAMETER Experiment Name: Zm_4deg_Cold_P Parameter: Timepoint (hr) Value: 6
  misc_feature: MA Experiment 108534 PARAMETER Experiment Name: Zm_4deg_Cold_P Parameter: Tissue Value: Aerial
  misc_feature: MA Experiment ID: 108559 Result: Up-regulated in Transcription
  misc_feature: MA Experiment 108559 PARAMETER Experiment Name: Zm_5mM_NO_P Parameter: Age (day) Value: 8
  misc_feature: MA Experiment 108559 PARAMETER Experiment Name: Zm_5mM_NO_P Parameter: Organism Value: Zea mays
  misc_feature: MA Experiment 108559 PARAMETER Experiment Name: Zm_5mM_NO_P Parameter: Plant Line Value: 35A19
  misc_feature: MA Experiment 108559 PARAMETER Experiment Name: Zm_5mM_NO_P Parameter: Timepoint (hr) Value: 12
  misc_feature: MA Experiment 108559 PARAMETER Experiment Name: Zm_5mM_NO_P Parameter: Tissue Value: Aerial
  misc_feature: MA Experiment 108559 PARAMETER Experiment Name: Zm_5mM_NO_P Parameter: Treatment Value: 5mM NO vs. No Treatment
  misc_feature: MA Experiment ID: 20000477 Result: Up-regulated in Transcription
  misc_feature: MA Experiment 20000477 PARAMETER Experiment Name: Zm_5mM_SA_P Parameter: Age (day) Value: 10
  misc_feature: MA Experiment 20000477 PARAMETER Experiment Name: Zm_5mM_SA_P Parameter: Organism Value: Zea mays
  misc_feature: MA Experiment 20000477 PARAMETER Experiment Name: Zm_5mM_SA_P Parameter: Plant Line Value: 35A19
  misc_feature: MA Experiment 20000477 PARAMETER Experiment Name: Zm_5mM_SA_P Parameter: Timepoint (hr) Value: 48
  misc_feature: MA Experiment 20000477 PARAMETER Experiment Name: Zm_5mM_SA_P Parameter: Tissue Value: Aerial
  misc_feature: MA Experiment 20000477 PARAMETER Experiment Name: Zm_5mM_SA_P Parameter: Treatment Value: 5mM SA vs. No Treatment
  misc_feature: MA Experiment ID: 20000478 Result: Up-regulated in Transcription
  misc_feature: MA Experiment 20000478 PARAMETER Experiment Name: Zm_5mM_SA_P Parameter: Age (day) Value: 11
  misc_feature: MA Experiment 20000478 PARAMETER Experiment Name: Zm_5mM_SA_P Parameter: Organism Value: Zea mays
  misc_feature: MA Experiment 20000478 PARAMETER Experiment Name: Zm_5mM_SA_P Parameter: Plant Line Value: 35A19
  misc_feature: MA Experiment 20000478 PARAMETER Experiment Name: Zm_5mM_SA_P Parameter: Timepoint (hr) Value: 72
  misc_feature: MA Experiment 20000478 PARAMETER Experiment Name: Zm_5mM_SA_P Parameter: Tissue Value: Aerial
  misc_feature: MA Experiment 20000478 PARAMETER Experiment Name: Zm_5mM_SA_P Parameter: Treatment Value: 5mM SA vs. No Treatment
  misc_feature: MA Experiment ID: 20000535 Result: Down-regulated in Transcription
  misc_feature: MA Experiment 20000535 PARAMETER Experiment Name: Zm_Hybrid_Seed_Dev_P Parameter: DAP Value: 30 vs. 12
  misc_feature: MA Experiment 20000535 PARAMETER Experiment Name: Zm_Hybrid_Seed_Dev_P Parameter: Organism Value: Zea mays
  misc_feature: MA Experiment 20000535 PARAMETER Experiment Name: Zm_Hybrid_Seed_Dev_P Parameter: Plant Line Value: 35A19
  misc_feature: MA Experiment 20000535 PARAMETER Experiment Name: Zm_Hybrid_Seed_Dev_P Parameter: Tissue Value: Embryo vs. Unfert Floret
ctgggccacaagcttcgtgcttataacttacaggatgatgggcgtgatactgtggaagctaatgaggaacttggtcttcctgtggactcacgggaatatgggattggcgcacagatattgcgggatctaggagtccgttcaatgaagctgatgactaataaccctgcgaaatatagtggtctcaagggctatggattgagcattgcgggcagggtgcccttgattacgccaattaccagtgagaaccgtaggtacctggagactaaaagaacaaagatgggacatgtatatgggttggccaatgcgcaggccaacctagcaaatggcagccagagcacagaagagaatcattaggcccccaagcatgtttccattattattccagcaatccagcttggtgacacaaaagagtgatatgattcttcgtttggggagttcctgaaat

SEQ ID NO: 14002 - protein, 117 aa, Zea mays subsp. mays
  peptide (1)..(117): Ceres Seq. ID no. 3008312
  misc_feature (1)..(99): Homolog of NCBI NO: 1084339 NR Description: GTP cyclohydrolase II (EC 3.5.4.25) - Arabidopsis >gi|940383|dbj|BAA08113.1| GTP cyclohydrolase II [Arabidopsis
  misc_feature (1)..(99): Homolog of NCBI NO: 27735197 NR Description: Riboflavin biosynthesis protein ribA [Includes:
  misc_feature (1)..(99): Homolog of NCBI NO: 30697989 NR Description: GTP cyclohydrolase II;
  misc_feature (1)..(98): Homolog of NCBI NO: 29367375 NR Description: GTP cyclohydrolase
  misc_feature (1)..(107): Homolog of NCBI NO: 18424277 NR Description: GTP cyclohydrolase II /
  misc_feature (1)..(117): Homolog of NCBI NO: 7436011 NR Description: GTP cyclohydrolase II (EC 3.5.4.25) / 3,
  misc_feature (1)..(102): Homolog of NCBI NO: 15614119 NR Description: GTP cyclohydrolase II / 3, 4-dihydroxy-2-butanone phosphate synthase [Bacillus halodurans] >gi|25290325|pir||D83844
  misc_feature (3)..(106): Homolog of NCBI NO: 21674409 NR Description: 3,4-dihydroxy-2-butanone 4-phosphate synthase/GTP
  misc_feature (1)..(95): Homolog of NCBI NO: 15608553 NR Description: ribA2 [Mycobacterium tuberculosis H37Rv]
  misc_feature (1)..(95): Homolog of NCBI NO: 2183211 NR Description: RibA [Mycobacterium tuberculosis]
LGHKLRAYNLQDDGRDTVEANEELGLPVDSREYGIGAQILRDLGVRSMKLMTNNPAKYSGLKGYGLSIAGRVPLITPITSENRRYLETKRTKMGHVYGLANAQANLANGSQSTEENH

SEQ ID NO: 14003 - protein, 70 aa, Zea mays subsp. mays
  peptide (1)..(70): Ceres Seq. ID no. 3008313
  misc_feature (1)..(52): Homolog of NCBI NO: 1084339 NR Description: GTP cyclohydrolase II (EC 3.5.4.25) - Arabidopsis >gi|940383|dbj|BAA08113.1| GTP cyclohydrolase II [Arabidopsis
  misc_feature (1)..(52): Homolog of NCBI NO: 27735197 NR Description: Riboflavin biosynthesis protein ribA [Includes:
  misc_feature (1)..(52): Homolog of NCBI NO: 30697989 NR Description: GTP cyclohydrolase II;
  misc_feature (1)..(51): Homolog of NCBI NO: 29367375 NR Description: GTP cyclohydrolase
  misc_feature (1)..(60): Homolog of NCBI NO: 18424277 NR Description: GTP cyclohydrolase II /
  misc_feature (1)..(70): Homolog of NCBI NO: 7436011 NR Description: GTP cyclohydrolase II (EC 3.5.4.25) / 3,
  misc_feature (1)..(55): Homolog of NCBI NO: 15614119 NR Description: GTP cyclohydrolase II / 3, 4-dihydroxy-2-butanone phosphate synthase [Bacillus halodurans] >gi|25290325|pir||D83844
  misc_feature (1)..(59): Homolog of NCBI NO: 21674409 NR Description: 3,4-dihydroxy-2-butanone 4-phosphate synthase/GTP
  misc_feature (1)..(48): Homolog of NCBI NO: 15608553 NR Description: ribA2 [Mycobacterium tuberculosis H37Rv]
  misc_feature (1)..(48): Homolog of NCBI NO: 2183211 NR Description: RibA [Mycobacterium tuberculosis]
MKLMTNNPAKYSGLKGYGLSIAGRVPLITPITSENRRYLETKRTKMGHVYGLANAQANLANGSQSTEENH

SEQ ID NO: 14004 - protein, 67 aa, Zea mays subsp. mays
  peptide (1)..(67): Ceres Seq. ID no. 3008314
  misc_feature (1)..(49): Homolog of NCBI NO: 1084339 NR Description: GTP cyclohydrolase II (EC 3.5.4.25) - Arabidopsis >gi|940383|dbj|BAA08113.1| GTP cyclohydrolase II [Arabidopsis
  misc_feature (1)..(49): Homolog of NCBI NO: 27735197 NR Description: Riboflavin biosynthesis protein ribA [Includes:
  misc_feature (1)..(49): Homolog of NCBI NO: 30697989 NR Description: GTP cyclohydrolase II;
  misc_feature (1)..(48): Homolog of NCBI NO: 29367375 NR Description: GTP cyclohydrolase
  misc_feature (1)..(57): Homolog of NCBI NO: 18424277 NR Description: GTP cyclohydrolase II /
  misc_feature (1)..(67): Homolog of NCBI NO: 7436011 NR Description: GTP cyclohydrolase II (EC 3.5.4.25) / 3,
  misc_feature (1)..(52): Homolog of NCBI NO: 15614119 NR Description: GTP cyclohydrolase II / 3, 4-dihydroxy-2-butanone phosphate synthase [Bacillus halodurans] >gi|25290325|pir||D83844
  misc_feature (1)..(56): Homolog of NCBI NO: 21674409 NR Description: 3,4-dihydroxy-2-butanone 4-phosphate synthase/GTP
  misc_feature (1)..(45): Homolog of NCBI NO: 15608553 NR Description: ribA2 [Mycobacterium tuberculosis H37Rv]
  misc_feature (1)..(45): Homolog of NCBI NO: 2183211 NR Description: RibA [Mycobacterium tuberculosis]
MTNNPAKYSGLKGYGLSIAGRVPLITPITSENRRYLETKRTKMGHVYGLANAQANLANGSQSTEENH

SEQ ID NO: 14005 - DNA, 1441 bp, Zea mays subsp. mays
  misc_feature (1)..(1441): Ceres Seq. ID no. 13587836
  misc_feature: MA Experiment ID: 108535 Result: Down-regulated in Transcription
  misc_feature: MA Experiment 108535 PARAMETER Experiment Name: Zm_Meristem_P Parameter: Age (day) Value: 8
  misc_feature: MA Experiment 108535 PARAMETER Experiment Name: Zm_Meristem_P Parameter: Organism Value: Zea mays
  misc_feature: MA Experiment 108535 PARAMETER Experiment Name: Zm_Meristem_P Parameter: Plant Line Value: 35A19
  misc_feature: MA Experiment 108535 PARAMETER Experiment Name: Zm_Meristem_P Parameter: Tissue Value: Root Meristem vs. Above Root Meristem
  misc_feature: MA Experiment ID: 108536 Result: Up-regulated in Transcription
  misc_feature: MA Experiment 108536 PARAMETER Experiment Name: Zm_Meristem_P Parameter: Age (day) Value: 8
  misc_feature: MA Experiment 108536 PARAMETER Experiment Name: Zm_Meristem_P Parameter: Organism Value: Zea mays
  misc_feature: MA Experiment 108536 PARAMETER Experiment Name: Zm_Meristem_P Parameter: Plant Line Value: 35A19
  misc_feature: MA Experiment 108536 PARAMETER Experiment Name: Zm_Meristem_P Parameter: Tissue Value: Shoot Meristem vs. Above Shoot Meristem
  misc_feature: MA Experiment ID: 108543 Result: Up-regulated in Transcription
  misc_feature: MA Experiment ID: 108544 Result: Up-regulated in Transcription
  misc_feature: MA Experiment ID: 108556 Result: Down-regulated in Transcription
  misc_feature: MA Experiment 108556 PARAMETER Experiment Name: Zm_Drought_P Parameter: Age (day) Value: 9
  misc_feature: MA Experiment 108556 PARAMETER Experiment Name: Zm_Drought_P Parameter: Organism Value: Zea mays
  misc_feature: MA Experiment 108556 PARAMETER Experiment Name: Zm_Drought_P Parameter: Plant Line Value: 35A19
  misc_feature: MA Experiment 108556 PARAMETER Experiment Name: Zm_Drought_P Parameter: Timepoint (hr) Value: 24
  misc_feature: MA Experiment 108556 PARAMETER Experiment Name: Zm_Drought_P Parameter: Tissue Value: Aerial
  misc_feature: MA Experiment 108556 PARAMETER Experiment Name: Zm_Drought_P Parameter: Treatment Value: Drought vs. No Drought
  misc_feature: MA Experiment ID: 108687 Result: Down-regulated in Transcription
  misc_feature: MA Experiment 108687 PARAMETER Experiment Name: Zm_Embryos-Flowers__P Parameter: Tissue Value: Embryo vs. Aerial+
  misc_feature: MA Experiment ID: 20000108 Result: Down-regulated in Transcription
  misc_feature: MA Experiment 20000108 PARAMETER Experiment Name: Zm_Root-Tips_P Parameter: Age (day) Value: 12
  misc_feature: MA Experiment 20000108 PARAMETER Experiment Name: Zm_Root-Tips_P Parameter: Organism Value: Zea mays
  misc_feature: MA Experiment 20000108 PARAMETER Experiment Name: Zm_Root-Tips_P Parameter: Tissue Value: Root tips vs. Root mid region    35
  misc_feature: MA Experiment 20000108 PARAMETER Experiment Name: Zm_Root-Tips_P Parameter: Tissue Value: Root tips vs. Root mid region   Sequence Listing-Misc Features (4)
  misc_feature: MA Experiment ID: 20000488 Result: Up-regulated in Transcription
  misc_feature: MA Experiment 20000488 PARAMETER Experiment Name: Zm_50mM_NH4NO3_L_to_H_P Parameter: Organism Value: Zea mays
  misc_feature: MA Experiment 20000488 PARAMETER Experiment Name: Zm_50mM_NH4NO3_L_to_H_P Parameter: Timepoint (hr) Value: 8
  misc_feature: MA Experiment 20000488 PARAMETER Experiment Name: Zm_50mM_NH4NO3_L_to_H_P Parameter: Tissue Value: Leaves
  misc_feature: MA Experiment 20000488 PARAMETER Experiment Name: Zm_50mM_NH4NO3_L_to_H_P Parameter: Treatment Value: 50mM NH4NO3 vs. 100mM Mannitol
  misc_feature: MA Experiment ID: 20000492 Result: Down-regulated in Transcription
  misc_feature: MA Experiment 20000492 PARAMETER Experiment Name: Zm_Hybrid_Seed_Dev_P Parameter: DAP Value: 12
  misc_feature: MA Experiment 20000492 PARAMETER Experiment Name: Zm_Hybrid_Seed_Dev_P Parameter: Organism Value: Zea mays
  misc_feature: MA Experiment 20000492 PARAMETER Experiment Name: Zm_Hybrid_Seed_Dev_P Parameter: Plant Line Value: 35A19
  misc_feature: MA Experiment 20000492 PARAMETER Experiment Name: Zm_Hybrid_Seed_Dev_P Parameter: Tissue Value: Fert Kernel vs. Unfert Floret
  misc_feature: MA Experiment ID: 20000535 Result: Down-regulated in Transcription
  misc_feature: MA Experiment 20000535 PARAMETER Experiment Name: Zm_Hybrid_Seed_Dev_P Parameter: DAP Value: 30 vs. 12
  misc_feature: MA Experiment 20000535 PARAMETER Experiment Name: Zm_Hybrid_Seed_Dev_P Parameter: Organism Value: Zea mays
  misc_feature: MA Experiment 20000535 PARAMETER Experiment Name: Zm_Hybrid_Seed_Dev_P Parameter: Plant Line Value: 35A19
  misc_feature: MA Experiment 20000535 PARAMETER Experiment Name: Zm_Hybrid_Seed_Dev_P Parameter: Tissue Value: Embryo vs. Unfert Floret
  misc_feature: MA Experiment ID: 20001610 Result: Up-regulated in Transcription
  misc_feature: MA Experiment 20001610 PARAMETER Experiment Name: Zm_50ppm_KNO3_L-to-H_P Parameter: Age (day) Value: 19
  misc_feature: MA Experiment 20001610 PARAMETER Experiment Name: Zm_50ppm_KNO3_L-to-H_P Parameter: Organism Value: Zea mays
  misc_feature: MA Experiment 20001610 PARAMETER Experiment Name: Zm_50ppm_KNO3_L-to-H_P Parameter: Plant Line Value: 35A19
  misc_feature: MA Experiment 20001610 PARAMETER Experiment Name: Zm_50ppm_KNO3_L-to-H_P Parameter: Timepoint (hr) Value: 2
  misc_feature: MA Experiment 20001610 PARAMETER Experiment Name: Zm_50ppm_KNO3_L-to-H_P Parameter: Tissue Value: Roots
  misc_feature: MA Experiment 20001610 PARAMETER Experiment Name: Zm_50ppm_KNO3_L-to-H_P Parameter: Treatment Value: 50ppm KNO3 vs. 50ppm KCl
  misc_feature: MA Experiment ID: 20001613 Result: Up-regulated in Transcription
  misc_feature: MA Experiment 20001613 PARAMETER Experiment Name: Zm_50ppm_KNO3_L-to-H_P Parameter: Age (day) Value: 20
  misc_feature: MA Experiment 20001613 PARAMETER Experiment Name: Zm_50ppm_KNO3_L-to-H_P Parameter: Organism Value: Zea mays
  misc_feature: MA Experiment 20001613 PARAMETER Experiment Name: Zm_50ppm_KNO3_L-to-H_P Parameter: Plant Line Value: 35A19
  misc_feature: MA Experiment 20001613 PARAMETER Experiment Name: Zm_50ppm_KNO3_L-to-H_P Parameter: Timepoint (hr) Value: 24
  misc_feature: MA Experiment 20001613 PARAMETER Experiment Name: Zm_50ppm_KNO3_L-to-H_P Parameter: Tissue Value: Roots
  misc_feature: MA Experiment 20001613 PARAMETER Experiment Name: Zm_50ppm_KNO3_L-to-H_P Parameter: Treatment Value: 50ppm KNO3 vs. 50ppm KCl
accatccactgcgatacttcagacagctcttcttgcgttgcctactaagctctctctctctctctttctctcttgtgttcttgccttctgcctactacgagtgatggccagcctcactgacctcgtcaacctcgacctgagtgactgcacagacaggatcatcgccgagtacatctgggttggaggatccggcatagacctcaggagcaaagcaaggacggtgaaaggccccatcaccgatccgagccagctgccaaaatggaactacgacggctccagcaccgggcaggctcccggagaggacagcgaagtcatcctctaccctcaagtcattttcaaggacccgttcaggaagtgtaacaacatccttgtgatgtgtgactgctacacgccacaaggcgagccaatccccagtaacaagaggtacaaagctgccacggttttcagccaccccgatgttgcagctgaggtgccatggtacggtattgagcaggagtacactctccttcagaaggatgtgagctggccccttggctggcctgttggtggataccctggtccccagggaccatactactgtgctgccggtgccgataaggcctttgggcgcgacgtggttgacgcccactacaaagcctgcctctacgccggcatcaacatcagcggcatcaacggcgaagtcatgcctggacagtgggagttccaagtcgggccgtccgttgggatctctgccggcgacgagatatgggtcgcccgctacattctcgagaggatcactgagatggccggaatcgttctctccctcgacccgaagccgatcaagggtgactggaacggcgccggcgctcacaccaactacagcaccaagtcgatgagggaggccggtggctacgaggtgatcaaggaggcgatcgagaagctggggaagaggcacagggagcacatcgccgcgtacgacgggggcaacgagcgccgcctcacgggccgccacgagaccgccgacatcaacaccttcaaatggggcgtggcgaaccgcggcggctccatccgcgtcggccgcgacaccgagaaggagggcaagggatatttcgaggaccgcaggccggcttccaacatggacccctacgtcgtcaccggcatgatcgccgacaccaccatcctgtggaagggaaactgataaaaccactgttcttctcctgcacgcatgcatccgccccgtgctgtcactttttgttttttcaaatttcgattcccgtcctaaagtttgttaccacttattattacggtctccagtgtactgctcggaaagtccgaataaaaacggctctaatgattttgttttttttaaaaaaaaatttgccttcgccataggtgtacgattggctgcgcttcccgtttattgggtactagtacaattgatatgaatcaattgccattaacg

SEQ ID NO: 14006 - protein, 391 aa, Zea mays subsp. mays
  peptide (1)..(391): Ceres Seq. ID no. 13587837
  misc_feature (137)..(389): Pfam Name: Glutamine synthetase, catalytic domain Pfam Description: Glutamine synthetase, catalytic domain
  misc_feature (35)..(391): Homolog of NCBI NO: 699621 NR Description: glutamine synthetase [Zea mays]
  misc_feature (35)..(391): Homolog of NCBI NO: 1169926 NR Description: GLUTAMINE SYNTHETASE ROOT ISOZYME 5
  misc_feature (35)..(391): Homolog of NCBI NO: 699623 NR Description: glutamine synthetase [Zea mays]
  misc_feature (35)..(391): Homolog of NCBI NO: 585201 NR Description: GLUTAMINE SYNTHETASE ROOT ISOZYME 1
  misc_feature (35)..(391): Homolog of NCBI NO: 121332 NR Description: GLUTAMINE SYNTHETASE ROOT ISOZYME
  misc_feature (35)..(389): Homolog of NCBI NO: 121368 NR Description: Glutamine synthetase, cytosolic isozyme
  misc_feature (35)..(389): Homolog of NCBI NO: 1835156 NR Description: glutamine synthetase [Medicago truncatula]
  misc_feature (35)..(389): Homolog of NCBI NO: 13924490 NR Description: cytosolic glutamine synthetase [Populus x
  misc_feature (35)..(389): Homolog of NCBI NO: 417060 NR Description: Glutamine synthetase nodule isozyme ligase) (GS) >gi|170637|gb|AAA34239.1| glutamine synthetase
PSTAILQTALLALPTKLSLSLFLSCVLAFCLLRVMASLTDLVNLDLSDCTDRIIAEYIWVGGSGIDLRSKARTVKGPITDPSQLPKWNYDGSSTGQAPGEDSEVILYPQVIFKDPFRKCNNILVMCDCYTPQGEPIPSNKRYKAATVFSHPDVAAEVPWYGIEQEYTLLQKDVSWPLGWPVGGYPGPQGPYYCAAGADKAFGRDVVDAHYKACLYAGINISGINGEVMPGQWEFQVGPSVGISAGDEIWVARYILERITEMAGIVLSLDPKPIKGDWNGAGAHTNYSTKSMREAGGYEVIKEAIEKLGKRHREHIAAYDGGNERRLTGRHETADINTFKWGVANRGGSIRVGRDTEKEGKGYFEDRRPASNMDPYVVTGMIADTTILWKGN

SEQ ID NO: 14007 - protein, 357 aa, Zea mays subsp. mays
  peptide (1)..(357): Ceres Seq. ID no. 13587838
  misc_feature (103)..(355): Pfam Name: Glutamine synthetase, catalytic domain Pfam Description: Glutamine synthetase, catalytic domain
  misc_feature (1)..(357): Homolog of NCBI NO: 699621 NR Description: glutamine synthetase [Zea mays]
  misc_feature (1)..(357): Homolog of NCBI NO: 1169926 NR Description: GLUTAMINE SYNTHETASE ROOT ISOZYME 5
  misc_feature (1)..(357): Homolog of NCBI NO: 699623 NR Description: glutamine synthetase [Zea mays]
  misc_feature (1)..(357): Homolog of NCBI NO: 585201 NR Description: GLUTAMINE SYNTHETASE ROOT ISOZYME 1
  misc_feature (1)..(357): Homolog of NCBI NO: 121332 NR Description: GLUTAMINE SYNTHETASE ROOT ISOZYME
  misc_feature (1)..(355): Homolog of NCBI NO: 121368 NR Description: Glutamine synthetase, cytosolic isozyme
  misc_feature (1)..(355): Homolog of NCBI NO: 1835156 NR Description: glutamine synthetase [Medicago truncatula]
  misc_feature (1)..(355): Homolog of NCBI NO: 13924490 NR Description: cytosolic glutamine synthetase [Populus x
  misc_feature (1)..(355): Homolog of NCBI NO: 417060 NR Description: Glutamine synthetase nodule isozyme ligase) (GS) >gi|170637|gb|AAA34239.1| glutamine synthetase
MASLTDLVNLDLSDCTDRIIAEYIWVGGSGIDLRSKARTVKGPITDPSQLPKWNYDGSSTGQAPGEDSEVILYPQVIFKDPFRKCNNILVMCDCYTPQGEPIPSNKRYKAATVFSHPDVAAEVPWYGIEQEYTLLQKDVSWPLGWPVGGYPGPQGPYYCAAGADKAFGRDVVDAHYKACLYAGINISGINGEVMPGQWEFQVGPSVGISAGDEIWVARYILERITEMAGIVLSLDPKPIKGDWNGAGAHTNYSTKSMREAGGYEVIKEAIEKLGKRHREHIAAYDGGNERRLTGRHETADINTFKWGVANRGGSIRVGRDTEKEGKGYFEDRRPASNMDPYVVTGMIADTTILWKGN

SEQ ID NO: 14008 - protein, 267 aa, Zea mays subsp. mays
  peptide (1)..(267): Ceres Seq. ID no. 13587839
  misc_feature (13)..(265): Pfam Name: Glutamine synthetase, catalytic domain Pfam Description: Glutamine synthetase, catalytic domain
  misc_feature (1)..(267): Homolog of NCBI NO: 699621 NR Description: glutamine synthetase [Zea mays]
  misc_feature (1)..(267): Homolog of NCBI NO: 1169926 NR Description: GLUTAMINE SYNTHETASE ROOT ISOZYME 5
  misc_feature (1)..(267): Homolog of NCBI NO: 699623 NR Description: glutamine synthetase [Zea mays]
  misc_feature (1)..(267): Homolog of NCBI NO: 585201 NR Description: GLUTAMINE SYNTHETASE ROOT ISOZYME 1
  misc_feature (1)..(267): Homolog of NCBI NO: 121332 NR Description: GLUTAMINE SYNTHETASE ROOT ISOZYME
  misc_feature (1)..(265): Homolog of NCBI NO: 121368 NR Description: Glutamine synthetase, cytosolic isozyme
  misc_feature (1)..(265): Homolog of NCBI NO: 1835156 NR Description: glutamine synthetase [Medicago truncatula]
  misc_feature (1)..(265): Homolog of NCBI NO: 13924490 NR Description: cytosolic glutamine synthetase [Populus x
  misc_feature (1)..(265): Homolog of NCBI NO: 417060 NR Description: Glutamine synthetase nodule isozyme ligase) (GS) >gi|170637|gb|AAA34239.1| glutamine synthetase
MCDCYTPQGEPIPSNKRYKAATVFSHPDVAAEVPWYGIEQEYTLLQKDVSWPLGWPVGGYPGPQGPYYCAAGADKAFGRDVVDAHYKACLYAGINISGINGEVMPGQWEFQVGPSVGISAGDEIWVARYILERITEMAGIVLSLDPKPIKGDWNGAGAHTNYSTKSMREAGGYEVIKEAIEKLGKRHREHIAAYDGGNERRLTGRHETADINTFKWGVANRGGSIRVGRDTEKEGKGYFEDRRPASNMDPYVVTGMIADTTILWKGN

SEQ ID NO: 14009 - DNA, 2424 bp, Zea mays subsp. mays
  misc_feature (1)..(2424): Ceres Seq. ID no. 12465500
  misc_feature: MA Experiment ID: 108528 Result: Up-regulated in Transcription
  misc_feature: MA Experiment 108528 PARAMETER Experiment Name: Zm_Imbibed_Seeds_P Parameter: Age (day) Value: 5 vs. 2
  misc_feature: MA Experiment 108528 PARAMETER Experiment Name: Zm_Imbibed_Seeds_P Parameter: Organism Value: Zea mays
  misc_feature: MA Experiment 108528 PARAMETER Experiment Name: Zm_Imbibed_Seeds_P Parameter: Plant Line Value: 35A19
  misc_feature: MA Experiment 108528 PARAMETER Experiment Name: Zm_Imbibed_Seeds_P Parameter: Tissue Value: Aerial vs. Embryo
  misc_feature: MA Experiment ID: 108530 Result: Up-regulated in Transcription
  misc_feature: MA Experiment 108530 PARAMETER Experiment Name: Zm_Imbibed_Seeds_P Parameter: Age (day) Value: 6 vs. 2
  misc_feature: MA Experiment 108530 PARAMETER Experiment Name: Zm_Imbibed_Seeds_P Parameter: Organism Value: Zea mays
  misc_feature: MA Experiment 108530 PARAMETER Experiment Name: Zm_Imbibed_Seeds_P Parameter: Plant Line Value: 35A19
  misc_feature: MA Experiment 108530 PARAMETER Experiment Name: Zm_Imbibed_Seeds_P Parameter: Tissue Value: Aerial vs. Embryo
  misc_feature: MA Experiment ID: 108535 Result: Down-regulated in Transcription
  misc_feature: MA Experiment 108535 PARAMETER Experiment Name: Zm_Meristem_P Parameter: Age (day) Value: 8
  misc_feature: MA Experiment 108535 PARAMETER Experiment Name: Zm_Meristem_P Parameter: Organism Value: Zea mays
  misc_feature: MA Experiment 108535 PARAMETER Experiment Name: Zm_Meristem_P Parameter: Plant Line Value: 35A19
  misc_feature: MA Experiment 108535 PARAMETER Experiment Name: Zm_Meristem_P Parameter: Tissue Value: Root Meristem vs. Above Root Meristem
  misc_feature: MA Experiment ID: 108547 Result: Up-regulated in Transcription
  misc_feature: MA Experiment 108547 PARAMETER Experiment Name: Zm_Imbibed_Seeds_P Parameter: Age (day) Value: 4 vs. 2
  misc_feature: MA Experiment 108547 PARAMETER Experiment Name: Zm_Imbibed_Seeds_P Parameter: Organism Value: Zea mays
  misc_feature: MA Experiment 108547 PARAMETER Experiment Name: Zm_Imbibed_Seeds_P Parameter: Plant Line Value: 35A19
  misc_feature: MA Experiment 108547 PARAMETER Experiment Name: Zm_Imbibed_Seeds_P Parameter: Tissue Value: Aerial vs. Embryo
  misc_feature: MA Experiment ID: 20000108 Result: Down-regulated in Transcription
  misc_feature: MA Experiment 20000108 PARAMETER Experiment Name: Zm_Root-Tips_P Parameter: Age (day) Value: 12
  misc_feature: MA Experiment 20000108 PARAMETER Experiment Name: Zm_Root-Tips_P Parameter: Organism Value: Zea mays
  misc_feature: MA Experiment 20000108 PARAMETER Experiment Name: Zm_Root-Tips_P Parameter: Tissue Value: Root tips vs. Root mid region    35
  misc_feature: MA Experiment 20000108 PARAMETER Experiment Name: Zm_Root-Tips_P Parameter: Tissue Value: Root tips vs. Root mid region   Sequence Listing-Misc Features (4)
caccaaaatgtaagaacacacgcccggcgctgtggacgcctacgctactagtcagtactcggtagtcacccccaaagctccgcctccgcacctcttcccactcgcccggccgcggctatggcggccaccacgtccacgacgccggccgtctccttctccctcccctcgcccccgcaccgccaaggggccccgcgccgccgcgcgcctttcctcctccgtgccgcctccaccgcggcgcccccctcccccgacctctccatccagctctcgccccgcgcgtccccgcccgcgtcgacaaacggcgccgccaccgcgcttggacgccccgtggccgcctccttcgcccgtgaccgcgccgaagacctgcaggccgaggcccgcgccatggcccgcgccgccggcgccacagtctacagccccgagctcctcgcctcccgttacggttcccgccccttcaaggtggcgctccgggcagcggaggtgctgtccaagctgacgtcgttcggggtgaaggtcctgctggacgagcggagaggggagtcgtcctcggagaggagacgcgccagagcggtggagttgcgcagcatcctcaccagactgggcccaaccttcgtcaaaattgggcagggtctgtccacacgccccgacctctgcccggtcgagtacctcgaggagctcgccgagctgcaggattcacttcccacatttccggatgaggatgcatttgcatgtattgagagagagcttggcttcacgcttgattcaatctactcgtcaatttcaccttcccccattgcagccgctagtttaggtcaagtttataaagcacagttgaaatactctgggaagctggtagctgtgaaggtgcagagacctggtatcgaggatgctattgggcttgatttttatctacttagaggactcgggtttcttataaataagtatgttgacattgtaaccagcgatgttgttgcccttatggatgaatttgcacggagagttttccaagagcttaattatgttcaggaaggccaaaatgcaagaaggtttaaaaaactatatgccgataagcaagatatcttagtgcctgatatattttgggattacacaagtgctaaggttctaacaatggagtggattgagggtgtaaaattaaaccaacaagcagctattgaaagtcaaggattgaaggttctggatttggtcaacattggtatccagtgtagcttgaggcagcttctggagtatggttactttcatgctgaccctcatcctggtaatatattggcaacacctgaggggaagctggcttttcttgattttggcatgatgagtgaaacaccagaggatgcgagggtagccattataggacatgttgtccacttagtcaacagggactatgaagcaatggctcgtgattattatgcactagatttcttgggaccggatgtagatgtttccccgattgtgcctgctctcaagaatttctttgatgatgcactaaatgcaacagtgagtgagctgaacttcaagacaatagttgatggcctaggtgctgttctctatcagtacccgttcaatgtaccggcatactatgcattgatactacgatcgctcactgtactggaaggtttagcactctatgctgaccctgattttaaggtgcttgctgcatcgtatccttactttgcgaaaaggctactcactgatcccaatccatacctcagagacgctttagttgagcttctattcaaggatggaagattcagatggaataggcttgaaaatcttcttgttcaagggcgccaagatagagagtttgcagccaaagatgcattacagcctgttctaaagcttctcctgggtcctgatggggaggaattgcgtgtgttggttgtgaaagaggcagttcgtgtaacagaagccatcactattggaacactgatcgattcatacaatgcatctccagcgtttttgaagccattaatttccagtggcaatccagccggacccttcaagtttagtgaggctgaacaagaacagatgttggagctccgagaccaggttttcagagtatggggtcttttgagatcctcaaataactttgatccgagccttttgcaaccaatcgttcaggtgctacaagaaccagaggcccgcgtcttgggttctcgtgtcgcaggtggtgtaacacagcgccttgcggcacgtctgctgcaacagcttctcaggatcccttctcctggatcttcgtaacagattatatagagatgggctcgtatgaagcatgtaaattgacacgatacttttgacaggaaactgaggtgccatttgattcaagaaatgtaaatatagatatgggctcgtatgaagcatgtaaattgacacgatacttttcacaggaaacaggatttcatttgattc

SEQ ID NO: 14010 - protein, 712 aa, Zea mays subsp. mays
  peptide (1)..(712): Ceres Seq. ID no. 12465501
  misc_feature (208)..(327): Pfam Name: ABC1 family Pfam Description: ABC1 family
  misc_feature (26)..(712): Homolog of NCBI NO: 18412437 NR Description: expressed protein; protein id: At1g79600.1, by cDNA: gi_14532489, supported by cDNA: gi_18086324 [Arabidopsis >gi|7715610|gb|AAF68128.1|AC010793_23 F20B17.3 [Arabidopsis
  misc_feature (148)..(712): Homolog of NCBI NO: 14532490 NR Description: At1g79600/F20B17_3 [Arabidopsis thaliana]
  misc_feature (99)..(707): Homolog of NCBI NO: 23042448 NR Description: hypothetical protein [Trichodesmium erythraeum
  misc_feature (99)..(704): Homolog of NCBI NO: 22298493 NR Description: ORF_ID:tll0950~hypothetical protein
  misc_feature (98)..(712): Homolog of NCBI NO: 17232452 NR Description: hypothetical protein [Nostoc sp. PCC 7120]
  misc_feature (99)..(702): Homolog of NCBI NO: 16331408 NR Description: ABC1-like [Synechocystis sp. PCC 6803]
  misc_feature (83)..(701): Homolog of NCBI NO: 33241332 NR Description: Predicted protein kinase [Prochlorococcus marinus marinus str. CCMP1375] >gi|33238862|gb|AAQ00927.1| Predicted
  misc_feature (99)..(616): Homolog of NCBI NO: 37522693 NR Description: hypothetical protein glr3124 [Gloeobacter
  misc_feature (83)..(701): Homolog of NCBI NO: 33867054 NR Description: possible protein kinase: ABC1 family sp. WH 8102] >gi|33639655|emb|CAE09039.1| possible protein
  misc_feature (83)..(701): Homolog of NCBI NO: 33864536 NR Description: possible protein kinase:ABC1 family marinus str. MIT 9313] >gi|33641316|emb|CAE22446.1| possible
MAATTSTTPAVSFSLPSPPHRQGAPRRRAPFLLRAASTAAPPSPDLSIQLSPRASPPASTNGAATALGRPVAASFARDRAEDLQAEARAMARAAGATVYSPELLASRYGSRPFKVALRAAEVLSKLTSFGVKVLLDERRGESSSERRRARAVELRSILTRLGPTFVKIGQGLSTRPDLCPVEYLEELAELQDSLPTFPDEDAFACIERELGFTLDSIYSSISPSPIAAASLGQVYKAQLKYSGKLVAVKVQRPGIEDAIGLDFYLLRGLGFLINKYVDIVTSDVVALMDEFARRVFQELNYVQEGQNARRFKKLYADKQDILVPDIFWDYTSAKVLTMEWIEGVKLNQQAAIESQGLKVLDLVNIGIQCSLRQLLEYGYFHADPHPGNILATPEGKLAFLDFGMMSETPEDARVAIIGHVVHLVNRDYEAMARDYYALDFLGPDVDVSPIVPALKNFFDDALNATVSELNFKTIVDGLGAVLYQYPFNVPAYYALILRSLTVLEGLALYADPDFKVLAASYPYFAKRLLTDPNPYLRDALVELLFKDGRFRWNRLENLLVQGRQDREFAAKDALQPVLKLLLGPDGEELRVLVVKEAVRVTEAITIGTLIDSYNASPAFLKPLISSGNPAGPFKFSEAEQEQMLELRDQVFRVWGLLRSSNNFDPSLLQPIVQVLQEPEARVLGSRVAGGVTQRLAARLLQQLLRIPSPGSS

SEQ ID NO: 14011 - protein, 623 aa, Zea mays subsp. mays
  peptide (1)..(623): Ceres Seq. ID no. 12465502
  misc_feature (119)..(238): Pfam Name: ABC1 family Pfam Description: ABC1 family
  misc_feature (1)..(623): Homolog of NCBI NO: 18412437 NR Description: expressed protein; protein id: At1g79600.1, by cDNA: gi_14532489, supported by cDNA: gi_18086324 [Arabidopsis >gi|7715610|gb|AAF68128.1|AC010793_23 F20B17.3 [Arabidopsis
  misc_feature (59)..(623): Homolog of NCBI NO: 14532490 NR Description: At1g79600/F20B17_3 [Arabidopsis thaliana]
  misc_feature (10)..(618): Homolog of NCBI NO: 23042448 NR Description: hypothetical protein [Trichodesmium erythraeum
  misc_feature (10)..(615): Homolog of NCBI NO: 22298493 NR Description: ORF_ID:tll0950~hypothetical protein
  misc_feature (9)..(623): Homolog of NCBI NO: 17232452 NR Description: hypothetical protein [Nostoc sp. PCC 7120]
  misc_feature (10)..(613): Homolog of NCBI NO: 16331408 NR Description: ABC1-like [Synechocystis sp. PCC 6803]
  misc_feature (1)..(612): Homolog of NCBI NO: 33241332 NR Description: Predicted protein kinase [Prochlorococcus marinus marinus str. CCMP1375] >gi|33238862|gb|AAQ00927.1| Predicted
  misc_feature (10)..(527): Homolog of NCBI NO: 37522693 NR Description: hypothetical protein glr3124 [Gloeobacter
  misc_feature (1)..(612): Homolog of NCBI NO: 33867054 NR Description: possible protein kinase: ABC1 family sp. WH 8102] >gi|33639655|emb|CAE09039.1| possible protein
  misc_feature (1)..(612): Homolog of NCBI NO: 33864536 NR Description: possible protein kinase:ABC1 family marinus str. MIT 9313] >gi|33641316|emb|CAE22446.1| possible
MARAAGATVYSPELLASRYGSRPFKVALRAAEVLSKLTSFGVKVLLDERRGESSSERRRARAVELRSILTRLGPTFVKIGQGLSTRPDLCPVEYLEELAELQDSLPTFPDEDAFACIERELGFTLDSIYSSISPSPIAAASLGQVYKAQLKYSGKLVAVKVQRPGIEDAIGLDFYLLRGLGFLINKYVDIVTSDVVALMDEFARRVFQELNYVQEGQNARRFKKLYADKQDILVPDIFWDYTSAKVLTMEWIEGVKLNQQAAIESQGLKVLDLVNIGIQCSLRQLLEYGYFHADPHPGNILATPEGKLAFLDFGMMSETPEDARVAIIGHVVHLVNRDYEAMARDYYALDFLGPDVDVSPIVPALKNFFDDALNATVSELNFKTIVDGLGAVLYQYPFNVPAYYALILRSLTVLEGLALYADPDFKVLAASYPYFAKRLLTDPNPYLRDALVELLFKDGRFRWNRLENLLVQGRQDREFAAKDALQPVLKLLLGPDGEELRVLVVKEAVRVTEAITIGTLIDSYNASPAFLKPLISSGNPAGPFKFSEAEQEQMLELRDQVFRVWGLLRSSNNFDPSLLQPIVQVLQEPEARVLGSRVAGGVTQRLAARLLQQLLRIPSPGSS

SEQ ID NO: 14012 - protein, 425 aa, Zea mays subsp. mays
  peptide (1)..(425): Ceres Seq. ID no. 12465503
  misc_feature (1)..(425): Homolog of NCBI NO: 18412437 NR Description: expressed protein; protein id: At1g79600.1, by cDNA: gi_14532489, supported by cDNA: gi_18086324 [Arabidopsis >gi|7715610|gb|AAF68128.1|AC010793_23 F20B17.3 [Arabidopsis
  misc_feature (1)..(425): Homolog of NCBI NO: 14532490 NR Description: At1g79600/F20B17_3 [Arabidopsis thaliana]
  misc_feature (1)..(420): Homolog of NCBI NO: 23042448 NR Description: hypothetical protein [Trichodesmium erythraeum
  misc_feature (1)..(417): Homolog of NCBI NO: 22298493 NR Description: ORF_ID:tll0950~hypothetical protein
  misc_feature (1)..(425): Homolog of NCBI NO: 17232452 NR Description: hypothetical protein [Nostoc sp. PCC 7120]
  misc_feature (1)..(415): Homolog of NCBI NO: 16331408 NR Description: ABC1-like [Synechocystis sp. PCC 6803]
  misc_feature (1)..(414): Homolog of NCBI NO: 33241332 NR Description: Predicted protein kinase [Prochlorococcus marinus marinus str. CCMP1375] >gi|33238862|gb|AAQ00927.1| Predicted
  misc_feature (1)..(329): Homolog of NCBI NO: 37522693 NR Description: hypothetical protein glr3124 [Gloeobacter
  misc_feature (1)..(414): Homolog of NCBI NO: 33867054 NR Description: possible protein kinase: ABC1 family sp. WH 8102] >gi|33639655|emb|CAE09039.1| possible protein
  misc_feature (1)..(414): Homolog of NCBI NO: 33864536 NR Description: possible protein kinase:ABC1 family marinus str. MIT 9313] >gi|33641316|emb|CAE22446.1| possible
MDEFARRVFQELNYVQEGQNARRFKKLYADKQDILVPDIFWDYTSAKVLTMEWIEGVKLNQQAAIESQGLKVLDLVNIGIQCSLRQLLEYGYFHADPHPGNILATPEGKLAFLDFGMMSETPEDARVAIIGHVVHLVNRDYEAMARDYYALDFLGPDVDVSPIVPALKNFFDDALNATVSELNFKTIVDGLGAVLYQYPFNVPAYYALILRSLTVLEGLALYADPDFKVLAASYPYFAKRLLTDPNPYLRDALVELLFKDGRFRWNRLENLLVQGRQDREFAAKDALQPVLKLLLGPDGEELRVLVVKEAVRVTEAITIGTLIDSYNASPAFLKPLISSGNPAGPFKFSEAEQEQMLELRDQVFRVWGLLRSSNNFDPSLLQPIVQVLQEPEARVLGSRVAGGVTQRLAARLLQQLLRIPSPGSS

SEQ ID NO: 14013 - DNA, 1141 bp, Zea mays subsp. mays
  misc_feature (1)..(1141): Ceres Seq. ID no. 12436346
  misc_feature: MA Experiment ID: 108504 Result: Down-regulated in Transcription
  misc_feature: MA Experiment 108504 PARAMETER Experiment Name: Zm_Drought_P Parameter: Age (day) Value: 8
  misc_feature: MA Experiment 108504 PARAMETER Experiment Name: Zm_Drought_P Parameter: Organism Value: Zea mays
  misc_feature: MA Experiment 108504 PARAMETER Experiment Name: Zm_Drought_P Parameter: Plant Line Value: 35A19
  misc_feature: MA Experiment 108504 PARAMETER Experiment Name: Zm_Drought_P Parameter: Timepoint (hr) Value: 12
  misc_feature: MA Experiment 108504 PARAMETER Experiment Name: Zm_Drought_P Parameter: Tissue Value: Aerial
  misc_feature: MA Experiment 108504 PARAMETER Experiment Name: Zm_Drought_P Parameter: Treatment Value: Drought vs. No Drought
  misc_feature: MA Experiment ID: 108523 Result: Down-regulated in Transcription
  misc_feature: MA Experiment 108523 PARAMETER Experiment Name: Zm_42deg_Heat_P Parameter: Age (day) Value: 8
  misc_feature: MA Experiment 108523 PARAMETER Experiment Name: Zm_42deg_Heat_P Parameter: Organism Value: Zea mays
  misc_feature: MA Experiment 108523 PARAMETER Experiment Name: Zm_42deg_Heat_P Parameter: Plant Line Value: 35A19
  misc_feature: MA Experiment 108523 PARAMETER Experiment Name: Zm_42deg_Heat_P Parameter: Temperature (deg C) Value: 42 vs. 22
  misc_feature: MA Experiment 108523 PARAMETER Experiment Name: Zm_42deg_Heat_P Parameter: Timepoint (hr) Value: 6
  misc_feature: MA Experiment 108523 PARAMETER Experiment Name: Zm_42deg_Heat_P Parameter: Tissue Value: Aerial
  misc_feature: MA Experiment ID: 108527 Result: Down-regulated in Transcription
  misc_feature: MA Experiment 108527 PARAMETER Experiment Name: Zm_5mM_NO_P Parameter: Age (day) Value: 8
  misc_feature: MA Experiment 108527 PARAMETER Experiment Name: Zm_5mM_NO_P Parameter: Organism Value: Zea mays
  misc_feature: MA Experiment 108527 PARAMETER Experiment Name: Zm_5mM_NO_P Parameter: Plant Line Value: 35A19
  misc_feature: MA Experiment 108527 PARAMETER Experiment Name: Zm_5mM_NO_P Parameter: Timepoint (hr) Value: 6
  misc_feature: MA Experiment 108527 PARAMETER Experiment Name: Zm_5mM_NO_P Parameter: Tissue Value: Aerial
  misc_feature: MA Experiment 108527 PARAMETER Experiment Name: Zm_5mM_NO_P Parameter: Treatment Value: 5mM NO vs. No Treatment
  misc_feature: MA Experiment ID: 108528 Result: Up-regulated in Transcription
  misc_feature: MA Experiment 108528 PARAMETER Experiment Name: Zm_Imbibed_Seeds_P Parameter: Age (day) Value: 5 vs. 2
  misc_feature: MA Experiment 108528 PARAMETER Experiment Name: Zm_Imbibed_Seeds_P Parameter: Organism Value: Zea mays
  misc_feature: MA Experiment 108528 PARAMETER Experiment Name: Zm_Imbibed_Seeds_P Parameter: Plant Line Value: 35A19
  misc_feature: MA Experiment 108528 PARAMETER Experiment Name: Zm_Imbibed_Seeds_P Parameter: Tissue Value: Aerial vs. Embryo
  misc_feature: MA Experiment ID: 108530 Result: Up-regulated in Transcription
  misc_feature: MA Experiment 108530 PARAMETER Experiment Name: Zm_Imbibed_Seeds_P Parameter: Age (day) Value: 6 vs. 2
  misc_feature: MA Experiment 108530 PARAMETER Experiment Name: Zm_Imbibed_Seeds_P Parameter: Organism Value: Zea mays
  misc_feature: MA Experiment 108530 PARAMETER Experiment Name: Zm_Imbibed_Seeds_P Parameter: Plant Line Value: 35A19
  misc_feature: MA Experiment 108530 PARAMETER Experiment Name: Zm_Imbibed_Seeds_P Parameter: Tissue Value: Aerial vs. Embryo
  misc_feature: MA Experiment ID: 108535 Result: Down-regulated in Transcription
  misc_feature: MA Experiment 108535 PARAMETER Experiment Name: Zm_Meristem_P Parameter: Age (day) Value: 8
  misc_feature: MA Experiment 108535 PARAMETER Experiment Name: Zm_Meristem_P Parameter: Organism Value: Zea mays
  misc_feature: MA Experiment 108535 PARAMETER Experiment Name: Zm_Meristem_P Parameter: Plant Line Value: 35A19
  misc_feature: MA Experiment 108535 PARAMETER Experiment Name: Zm_Meristem_P Parameter: Tissue Value: Root Meristem vs. Above Root Meristem
  misc_feature: MA Experiment ID: 108536 Result: Down-regulated in Transcription
  misc_feature: MA Experiment 108536 PARAMETER Experiment Name: Zm_Meristem_P Parameter: Age (day) Value: 8
  misc_feature: MA Experiment 108536 PARAMETER Experiment Name: Zm_Meristem_P Parameter: Organism Value: Zea mays
  misc_feature: MA Experiment 108536 PARAMETER Experiment Name: Zm_Meristem_P Parameter: Plant Line Value: 35A19
  misc_feature: MA Experiment 108536 PARAMETER Experiment Name: Zm_Meristem_P Parameter: Tissue Value: Shoot Meristem vs. Above Shoot Meristem
  misc_feature: MA Experiment ID: 108540 Result: Down-regulated in Transcription
  misc_feature: MA Experiment 108540 PARAMETER Experiment Name: Zm_20percent_PEG_P Parameter: Age (day) Value: 8
  misc_feature: MA Experiment 108540 PARAMETER Experiment Name: Zm_20percent_PEG_P Parameter: Organism Value: Zea mays
  misc_feature: MA Experiment 108540 PARAMETER Experiment Name: Zm_20percent_PEG_P Parameter: Plant Line Value: 35A19
  misc_feature: MA Experiment 108540 PARAMETER Experiment Name: Zm_20percent_PEG_P Parameter: Timepoint (hr) Value: 6
  misc_feature: MA Experiment 108540 PARAMETER Experiment Name: Zm_20percent_PEG_P Parameter: Tissue Value: Aerial
  misc_feature: MA Experiment 108540 PARAMETER Experiment Name: Zm_20percent_PEG_P Parameter: Treatment Value: 20percent PEG vs. No Treatment
  misc_feature: MA Experiment ID: 108543 Result: Up-regulated in Transcription
  misc_feature: MA Experiment ID: 108546 Result: Up-regulated in Transcription
  misc_feature: MA Experiment 108546 PARAMETER Experiment Name: Zm_Imbibed_Seeds_P Parameter: Age (day) Value: 3 vs. 2
  misc_feature: MA Experiment 108546 PARAMETER Experiment Name: Zm_Imbibed_Seeds_P Parameter: Organism Value: Zea mays
  misc_feature: MA Experiment 108546 PARAMETER Experiment Name: Zm_Imbibed_Seeds_P Parameter: Plant Line Value: 35A19
  misc_feature: MA Experiment 108546 PARAMETER Experiment Name: Zm_Imbibed_Seeds_P Parameter: Tissue Value: Roots vs. Embryo
  misc_feature: MA Experiment ID: 108547 Result: Up-regulated in Transcription
  misc_feature: MA Experiment 108547 PARAMETER Experiment Name: Zm_Imbibed_Seeds_P Parameter: Age (day) Value: 4 vs. 2
  misc_feature: MA Experiment 108547 PARAMETER Experiment Name: Zm_Imbibed_Seeds_P Parameter: Organism Value: Zea mays
  misc_feature: MA Experiment 108547 PARAMETER Experiment Name: Zm_Imbibed_Seeds_P Parameter: Plant Line Value: 35A19
  misc_feature: MA Experiment 108547 PARAMETER Experiment Name: Zm_Imbibed_Seeds_P Parameter: Tissue Value: Aerial vs. Embryo
  misc_feature: MA Experiment ID: 108556 Result: Down-regulated in Transcription
  misc_feature: MA Experiment 108556 PARAMETER Experiment Name: Zm_Drought_P Parameter: Age (day) Value: 9
  misc_feature: MA Experiment 108556 PARAMETER Experiment Name: Zm_Drought_P Parameter: Organism Value: Zea mays
  misc_feature: MA Experiment 108556 PARAMETER Experiment Name: Zm_Drought_P Parameter: Plant Line Value: 35A19
  misc_feature: MA Experiment 108556 PARAMETER Experiment Name: Zm_Drought_P Parameter: Timepoint (hr) Value: 24
  misc_feature: MA Experiment 108556 PARAMETER Experiment Name: Zm_Drought_P Parameter: Tissue Value: Aerial
  misc_feature: MA Experiment 108556 PARAMETER Experiment Name: Zm_Drought_P Parameter: Treatment Value: Drought vs. No Drought
  misc_feature: MA Experiment ID: 108559 Result: Down-regulated in Transcription
  misc_feature: MA Experiment 108559 PARAMETER Experiment Name: Zm_5mM_NO_P Parameter: Age (day) Value: 8
  misc_feature: MA Experiment 108559 PARAMETER Experiment Name: Zm_5mM_NO_P Parameter: Organism Value: Zea mays
  misc_feature: MA Experiment 108559 PARAMETER Experiment Name: Zm_5mM_NO_P Parameter: Plant Line Value: 35A19
  misc_feature: MA Experiment 108559 PARAMETER Experiment Name: Zm_5mM_NO_P Parameter: Timepoint (hr) Value: 12
  misc_feature: MA Experiment 108559 PARAMETER Experiment Name: Zm_5mM_NO_P Parameter: Tissue Value: Aerial
  misc_feature: MA Experiment 108559 PARAMETER Experiment Name: Zm_5mM_NO_P Parameter: Treatment Value: 5mM NO vs. No Treatment
  misc_feature: MA Experiment ID: 108687 Result: Down-regulated in Transcription
  misc_feature: MA Experiment 108687 PARAMETER Experiment Name: Zm_Embryos-Flowers__P Parameter: Tissue Value: Embryo vs. Aerial+
  misc_feature: MA Experiment ID: 108688 Result: Down-regulated in Transcription
  misc_feature: MA Experiment 108688 PARAMETER Experiment Name: Zm_Embryos-Flowers__P Parameter: Tissue Value: Immature Flowers vs. Aerial+
  misc_feature: MA Experiment ID: 20000108 Result: Down-regulated in Transcription
  misc_feature: MA Experiment 20000108 PARAMETER Experiment Name: Zm_Root-Tips_P Parameter: Age (day) Value: 12
  misc_feature: MA Experiment 20000108 PARAMETER Experiment Name: Zm_Root-Tips_P Parameter: Organism Value: Zea mays
  misc_feature: MA Experiment 20000108 PARAMETER Experiment Name: Zm_Root-Tips_P Parameter: Tissue Value: Root tips vs. Root mid region    35
  misc_feature: MA Experiment 20000108 PARAMETER Experiment Name: Zm_Root-Tips_P Parameter: Tissue Value: Root tips vs. Root mid region   Sequence Listing-Misc Features (4)
  misc_feature: MA Experiment ID: 20000477 Result: Down-regulated in Transcription
  misc_feature: MA Experiment 20000477 PARAMETER Experiment Name: Zm_5mM_SA_P Parameter: Age (day) Value: 10
  misc_feature: MA Experiment 20000477 PARAMETER Experiment Name: Zm_5mM_SA_P Parameter: Organism Value: Zea mays
  misc_feature: MA Experiment 20000477 PARAMETER Experiment Name: Zm_5mM_SA_P Parameter: Plant Line Value: 35A19
  misc_feature: MA Experiment 20000477 PARAMETER Experiment Name: Zm_5mM_SA_P Parameter: Timepoint (hr) Value: 48
  misc_feature: MA Experiment 20000477 PARAMETER Experiment Name: Zm_5mM_SA_P Parameter: Tissue Value: Aerial
  misc_feature: MA Experiment 20000477 PARAMETER Experiment Name: Zm_5mM_SA_P Parameter: Treatment Value: 5mM SA vs. No Treatment
  misc_feature: MA Experiment ID: 20000480 Result: Down-regulated in Transcription
  misc_feature: MA Experiment 20000480 PARAMETER Experiment Name: Zm_Drought_P Parameter: Age (day) Value: 11
  misc_feature: MA Experiment 20000480 PARAMETER Experiment Name: Zm_Drought_P Parameter: Organism Value: Zea mays
  misc_feature: MA Experiment 20000480 PARAMETER Experiment Name: Zm_Drought_P Parameter: Plant Line Value: 35A19
  misc_feature: MA Experiment 20000480 PARAMETER Experiment Name: Zm_Drought_P Parameter: Timepoint (hr) Value: 72
  misc_feature: MA Experiment 20000480 PARAMETER Experiment Name: Zm_Drought_P Parameter: Tissue Value: Aerial
  misc_feature: MA Experiment 20000480 PARAMETER Experiment Name: Zm_Drought_P Parameter: Treatment Value: Drought vs. No Drought
  misc_feature: MA Experiment ID: 20000535 Result: Down-regulated in Transcription
  misc_feature: MA Experiment 20000535 PARAMETER Experiment Name: Zm_Hybrid_Seed_Dev_P Parameter: DAP Value: 30 vs. 12
  misc_feature: MA Experiment 20000535 PARAMETER Experiment Name: Zm_Hybrid_Seed_Dev_P Parameter: Organism Value: Zea mays
  misc_feature: MA Experiment 20000535 PARAMETER Experiment Name: Zm_Hybrid_Seed_Dev_P Parameter: Plant Line Value: 35A19
  misc_feature: MA Experiment 20000535 PARAMETER Experiment Name: Zm_Hybrid_Seed_Dev_P Parameter: Tissue Value: Embryo vs. Unfert Floret
caactgaaggtgccggactagtagctccgtgtcaccaaccagagccagagccatgggggccagcctgagcctggtgccggtgctcgactacttcgcccgccgcgagtgcctgcgcgccggcctccaccagaacgccgtcacgctcccgtaccccgacggcggcggcggggcgacctgcaccgtccagtactgggctccgcagggggagcctgagctcccgccgctcctgctggtccacggcttcgggccccgggccgactggcagtggcgctgccaggtggggccgctctcgcgccacttccacgtcatcatccccgacctcctgggcttcggcggcagcgcgtacccgtccgagacggcgccgccgccgacggaggcgacgcaggccgcggtgctggcggcgctgctgggcgcgctgcccgggatggagcgccggcgcgtggccgtggcgggcaccagctacggcgggttcgtggcgtactggctggcccgcgaggcggggcccgccagggtcggccccgtggtgatcgccagctccgacctgctcaagacggctgccgacgacagggcgttcctgaagcgcgccggcgaagggtggggcggcgtggacgagatcctcctccccgccgagcccgccgcgctgcggaagctcctggagctggcctcctgccgcccgccgccgcggctggtgacgccggacttcctgctccgtgacttcatccagaaactcttcacgcagaacagggagcggcttgtccatctgctgaaggggattacggtcgggacagagaagttccaagtgacgccaatatctcaggaagtgctgattgtatggggagaccacgaccagctgttcccggtggagaaggcgtttgcggttcagagggctctgaacgggaccgctaggctggaggtgataccgaagacaggccacgctcctcagctggaggatccggctcgcttcaacaaggtcatgctggacttcttgctggcttctcacaagcctgacccctcggttagtggtagcgcgcaataatttaccaaggtgcattggcgattggtcagtggtagccgactcgattgtttgtaataagatcgctggacaggttcagttcattccattaaatcaatggtaaatttc

SEQ ID NO: 14014 - protein, 327 aa, Zea mays subsp. mays
  peptide (1)..(327): Ceres Seq. ID no. 12436347
  misc_feature (83)..(310): Pfam Name: alpha/beta hydrolase fold Pfam Description: alpha/beta hydrolase fold
  misc_feature (1)..(327): Homolog of NCBI NO: 27436746 NR Description: Unknown protein [Oryza sativa (japonica
  misc_feature (7)..(321): Homolog of NCBI NO: 27436745 NR Description: Hypothetical protein [Oryza sativa (japonica
  misc_feature (4)..(229): Homolog of NCBI NO: 24059850 NR Description: hydrolase-like protein [Oryza sativa (japonica
  misc_feature (223)..(322): Homolog of NCBI NO: 24059850 NR Description: hydrolase-like protein [Oryza sativa (japonica
  misc_feature (25)..(327): Homolog of NCBI NO: 34896168 NR Description: contains ESTs
  misc_feature (1)..(315): Homolog of NCBI NO: 30689631 NR Description: hydrolase, alpha/beta fold family [Arabidopsis
  misc_feature (58)..(315): Homolog of NCBI NO: 21592805 NR Description: unknown [Arabidopsis thaliana]
  misc_feature (22)..(224): Homolog of NCBI NO: 27436747 NR Description: Hypothetical protein [Oryza sativa (japonica
  misc_feature (229)..(315): Homolog of NCBI NO: 27436747 NR Description: Hypothetical protein [Oryza sativa (japonica
  misc_feature (22)..(322): Homolog of NCBI NO: 37533664 NR Description: putative hydrolase [Oryza sativa (japonica >gi|19920100|gb|AAM08532.1| Putative hydrolase [Oryza sativa]
MGASLSLVPVLDYFARRECLRAGLHQNAVTLPYPDGGGGATCTVQYWAPQGEPELPPLLLVHGFGPRADWQWRCQVGPLSRHFHVIIPDLLGFGGSAYPSETAPPPTEATQAAVLAALLGALPGMERRRVAVAGTSYGGFVAYWLAREAGPARVGPVVIASSDLLKTAADDRAFLKRAGEGWGGVDEILLPAEPAALRKLLELASCRPPPRLVTPDFLLRDFIQKLFTQNRERLVHLLKGITVGTEKFQVTPISQEVLIVWGDHDQLFPVEKAFAVQRALNGTARLEVIPKTGHAPQLEDPARFNKVMLDFLLASHKPDPSVSGSAQ

SEQ ID NO: 14015 - protein, 203 aa, Zea mays subsp. mays
  peptide (1)..(203): Ceres Seq. ID no. 12436348
  misc_feature (1)..(186): Pfam Name: alpha/beta hydrolase fold Pfam Description: alpha/beta hydrolase fold
  misc_feature (1)..(203): Homolog of NCBI NO: 27436746 NR Description: Unknown protein [Oryza sativa (japonica
  misc_feature (1)..(197): Homolog of NCBI NO: 27436745 NR Description: Hypothetical protein [Oryza sativa (japonica
  misc_feature (1)..(105): Homolog of NCBI NO: 24059850 NR Description: hydrolase-like protein [Oryza sativa (japonica
  misc_feature (99)..(198): Homolog of NCBI NO: 24059850 NR Description: hydrolase-like protein [Oryza sativa (japonica
  misc_feature (1)..(203): Homolog of NCBI NO: 34896168 NR Description: contains ESTs
  misc_feature (1)..(191): Homolog of NCBI NO: 30689631 NR Description: hydrolase, alpha/beta fold family [Arabidopsis
  misc_feature (1)..(191): Homolog of NCBI NO: 21592805 NR Description: unknown [Arabidopsis thaliana]
  misc_feature (1)..(100): Homolog of NCBI NO: 27436747 NR Description: Hypothetical protein [Oryza sativa (japonica
  misc_feature (105)..(191): Homolog of NCBI NO: 27436747 NR Description: Hypothetical protein [Oryza sativa (japonica
  misc_feature (1)..(198): Homolog of NCBI NO: 37533664 NR Description: putative hydrolase [Oryza sativa (japonica >gi|19920100|gb|AAM08532.1| Putative hydrolase [Oryza sativa]
MERRRVAVAGTSYGGFVAYWLAREAGPARVGPVVIASSDLLKTAADDRAFLKRAGEGWGGVDEILLPAEPAALRKLLELASCRPPPRLVTPDFLLRDFIQKLFTQNRERLVHLLKGITVGTEKFQVTPISQEVLIVWGDHDQLFPVEKAFAVQRALNGTARLEVIPKTGHAPQLEDPARFNKVMLDFLLASHKPDPSVSGSAQ

SEQ ID NO: 14016 - DNA, 1802 bp, Zea mays subsp. mays
  misc_feature (1)..(1802): Ceres Seq. ID no. 12484069
  misc_feature: MA Experiment ID: 108522 Result: Up-regulated in Transcription
  misc_feature: MA Experiment 108522 PARAMETER Experiment Name: Zm_42deg_Heat_P Parameter: Age (day) Value: 8
  misc_feature: MA Experiment 108522 PARAMETER Experiment Name: Zm_42deg_Heat_P Parameter: Organism Value: Zea mays
  misc_feature: MA Experiment 108522 PARAMETER Experiment Name: Zm_42deg_Heat_P Parameter: Plant Line Value: 35A19
  misc_feature: MA Experiment 108522 PARAMETER Experiment Name: Zm_42deg_Heat_P Parameter: Temperature (deg C) Value: 42 vs. 22
  misc_feature: MA Experiment 108522 PARAMETER Experiment Name: Zm_42deg_Heat_P Parameter: Timepoint (hr) Value: 1
  misc_feature: MA Experiment 108522 PARAMETER Experiment Name: Zm_42deg_Heat_P Parameter: Tissue Value: Aerial
  misc_feature: MA Experiment ID: 108530 Result: Up-regulated in Transcription
  misc_feature: MA Experiment 108530 PARAMETER Experiment Name: Zm_Imbibed_Seeds_P Parameter: Age (day) Value: 6 vs. 2
  misc_feature: MA Experiment 108530 PARAMETER Experiment Name: Zm_Imbibed_Seeds_P Parameter: Organism Value: Zea mays
  misc_feature: MA Experiment 108530 PARAMETER Experiment Name: Zm_Imbibed_Seeds_P Parameter: Plant Line Value: 35A19
  misc_feature: MA Experiment 108530 PARAMETER Experiment Name: Zm_Imbibed_Seeds_P Parameter: Tissue Value: Aerial vs. Embryo
  misc_feature: MA Experiment ID: 108535 Result: Down-regulated in Transcription
  misc_feature: MA Experiment 108535 PARAMETER Experiment Name: Zm_Meristem_P Parameter: Age (day) Value: 8
  misc_feature: MA Experiment 108535 PARAMETER Experiment Name: Zm_Meristem_P Parameter: Organism Value: Zea mays
  misc_feature: MA Experiment 108535 PARAMETER Experiment Name: Zm_Meristem_P Parameter: Plant Line Value: 35A19
  misc_feature: MA Experiment 108535 PARAMETER Experiment Name: Zm_Meristem_P Parameter: Tissue Value: Root Meristem vs. Above Root Meristem
  misc_feature: MA Experiment ID: 108536 Result: Up-regulated in Transcription
  misc_feature: MA Experiment 108536 PARAMETER Experiment Name: Zm_Meristem_P Parameter: Age (day) Value: 8
  misc_feature: MA Experiment 108536 PARAMETER Experiment Name: Zm_Meristem_P Parameter: Organism Value: Zea mays
  misc_feature: MA Experiment 108536 PARAMETER Experiment Name: Zm_Meristem_P Parameter: Plant Line Value: 35A19
  misc_feature: MA Experiment 108536 PARAMETER Experiment Name: Zm_Meristem_P Parameter: Tissue Value: Shoot Meristem vs. Above Shoot Meristem
  misc_feature: MA Experiment ID: 108544 Result: Up-regulated in Transcription
  misc_feature: MA Experiment ID: 108687 Result: Down-regulated in Transcription
  misc_feature: MA Experiment 108687 PARAMETER Experiment Name: Zm_Embryos-Flowers__P Parameter: Tissue Value: Embryo vs. Aerial+
  misc_feature: MA Experiment ID: 20000535 Result: Down-regulated in Transcription
  misc_feature: MA Experiment 20000535 PARAMETER Experiment Name: Zm_Hybrid_Seed_Dev_P Parameter: DAP Value: 30 vs. 12
  misc_feature: MA Experiment 20000535 PARAMETER Experiment Name: Zm_Hybrid_Seed_Dev_P Parameter: Organism Value: Zea mays
  misc_feature: MA Experiment 20000535 PARAMETER Experiment Name: Zm_Hybrid_Seed_Dev_P Parameter: Plant Line Value: 35A19
  misc_feature: MA Experiment 20000535 PARAMETER Experiment Name: Zm_Hybrid_Seed_Dev_P Parameter: Tissue Value: Embryo vs. Unfert Floret
aacaacactcgcctgccctgccctctcatctcgcttcgcttccattccatcgcgccagtcgccagactcaccagggagacagggagagtagggggaaatatcaattagaaacaacgaggaactagcaaagaaagaaggataactcccataagaaaaatcgccaaatacgccattcatcttctccgcccgggtttcagaacgtgcggcagtttagccaggatggtggcgatcgagaaccagaaccagagccaggccgcggtggcggtggcggcggaggcggtgccggcgccggcgtcgcggatccccagggaggcgcggcgcctgctgcacgagctggcggcggcgtgggcggacgtggccgactgccgcgcgctggaggtcgtgccgctcaagggggccatgaccaacgaggtctaccaggcgcgctggctcactgcaggccctgccggccagaaggaggagcccagggcggagagggaggtgaggaaggtgctcgtgcggatttacggcgacggcgtcgacctcttcttcgaccgcgaggacgaggtgcgcaccttcgagtgcatgtcacgccatggccagggtccccgcctcctcggccgcttcccgaacggccgcgtcgaggagttcatccacgcaaggacattgtcagctgccgaccttcgcgatcctgaaatttcagctctggtggcttccaagctgagggagttccacaaccttgacatgcctggtcccaaatctgtgctcatttgggacagacttaggaactggctcagaactgccaagagcttgtgtccacctgaagaagccaaggaatttcggttggacagtctggagaaccagattactgcattggagaacgagtgttcaggtgattaccagtggattggtttctgtcacaatgatcttcagtatggcaatatcatgattgatgaagagaccaacgtgctgaccatcattgattatgagtatgcaagcttcaacccagttgcatatgacattgctaaccatttctgtgagatggcagcagactatcattcatcaaagcctcatatactggactacagcagatatccagatgttgatgagcagaagcgttttgttaagacctacctgaacatttctggtgaggaacctgatgcggaagttgtagagaacctgctccaaagcattgagaagcacacgctctccagccatctagtatggggcctctggggaataatttcggaccatgttaacgacattgacttcgactacaaggagtatgcgaggcagagattcgagcagtactggcacaagtctgcgatcttaacatcttgaacatgtgtataaacacccgtacgtggtctcaggaactccctgagggcctgtggctgcacacacgaaattgtgcagtgccactgacacatagataagctgtgaaagaagaaatactgacgacgacgacgaataatcccgttttgggctcgggaggttatttctccgcaactcgatgagcttcaggcttcagcttcaggaaggaaggaaggagctatggggatttggctgcccgcttatgctgtaccaatgcaattaaaagataaagatccggtccggtgttgcgtgtgctatgtttagttttggctagcaccgccgagagccgtggtcctgttgtggtgtttctagtttctgtatgcttgatgttgttagtgtgctggataatttggttttgtgcttggggagtccttagctttgggacaacgcatacattgtatactgggtagatgtataaacataaaacagctatgggaatttggttctct

SEQ ID NO: 14017 - protein, 366 aa, Zea mays subsp. mays
  peptide (1)..(366): Ceres Seq. ID no. 12484070
  misc_feature (87)..(348): Pfam Name: Choline/ethanolamine kinase Pfam Description: Choline/ethanolamine kinase
  misc_feature (14)..(364): Homolog of NCBI NO: 15217543 NR Description: choline kinase, putative; protein id: At1g71697.1
  misc_feature (31)..(364): Homolog of NCBI NO: 12311795 NR Description: choline kinase [Pisum sativum]
  misc_feature (1)..(366): Homolog of NCBI NO: 33149685 NR Description: choline kinase [Oryza sativa (indica
  misc_feature (25)..(364): Homolog of NCBI NO: 7488654 NR Description: choline kinase (EC 2.7.1.32) CK3 - soybean
  misc_feature (27)..(358): Homolog of NCBI NO: 25348157 NR Description: protein choline kinase F1O17.1 [imported] -
  misc_feature (31)..(366): Homolog of NCBI NO: 7488653 NR Description: choline kinase (EC 2.7.1.32) CK2 - soybean
  misc_feature (27)..(358): Homolog of NCBI NO: 22330627 NR Description: putative choline kinase; protein id: At1g74320.1, by cDNA: gi_20453121 [Arabidopsis thaliana] At1g74320/F1O17_1 [Arabidopsis thaliana]
  misc_feature (1)..(348): Homolog of NCBI NO: 34910612 NR Description: putative choline kinase [Oryza sativa (japonica group)] >gi|20160889|dbj|BAB89827.1| putative choline kinase
  misc_feature (24)..(366): Homolog of NCBI NO: 15234032 NR Description: choline kinase GmCK2p -like protein; protein id: supported by cDNA: 126037., supported by cDNA: 7395. [Arabidopsis >gi|7484868|pir||T04023 choline kinase 2 homolog [Arabidopsis
  misc_feature (24)..(366): Homolog of NCBI NO: 21537276 NR Description: choline kinase GmCK2p-like protein [Arabidopsis
MVAIENQNQSQAAVAVAAEAVPAPASRIPREARRLLHELAAAWADVADCRALEVVPLKGAMTNEVYQARWLTAGPAGQKEEPRAEREVRKVLVRIYGDGVDLFFDREDEVRTFECMSRHGQGPRLLGRFPNGRVEEFIHARTLSAADLRDPEISALVASKLREFHNLDMPGPKSVLIWDRLRNWLRTAKSLCPPEEAKEFRLDSLENQITALENECSGDYQWIGFCHNDLQYGNIMIDEETNVLTIIDYEYASFNPVAYDIANHFCEMAADYHSSKPHILDYSRYPDVDEQKRFVKTYLNISGEEPDAEVVENLLQSIEKHTLSSHLVWGLWGIISDHVNDIDFDYKEYARQRFEQYWHKSAILTS

SEQ ID NO: 14018 - protein, 306 aa, Zea mays subsp. mays
  peptide (1)..(306): Ceres Seq. ID no. 12484071
  misc_feature (27)..(288): Pfam Name: Choline/ethanolamine kinase Pfam Description: Choline/ethanolamine kinase
  misc_feature (1)..(306): Homolog of NCBI NO: 33149685 NR Description: choline kinase [Oryza sativa (indica
  misc_feature (1)..(288): Homolog of NCBI NO: 34910612 NR Description: putative choline kinase [Oryza sativa (japonica group)] >gi|20160889|dbj|BAB89827.1| putative choline kinase
  misc_feature (1)..(304): Homolog of NCBI NO: 7488654 NR Description: choline kinase (EC 2.7.1.32) CK3 - soybean
  misc_feature (1)..(298): Homolog of NCBI NO: 22330627 NR Description: putative choline kinase; protein id: At1g74320.1, by cDNA: gi_20453121 [Arabidopsis thaliana] At1g74320/F1O17_1 [Arabidopsis thaliana]
  misc_feature (1)..(298): Homolog of NCBI NO: 25348157 NR Description: protein choline kinase F1O17.1 [imported] -
  misc_feature (1)..(306): Homolog of NCBI NO: 7488653 NR Description: choline kinase (EC 2.7.1.32) CK2 - soybean
  misc_feature (1)..(304): Homolog of NCBI NO: 15217543 NR Description: choline kinase, putative; protein id: At1g71697.1
  misc_feature (1)..(304): Homolog of NCBI NO: 12311795 NR Description: choline kinase [Pisum sativum]
  misc_feature (1)..(306): Homolog of NCBI NO: 15234032 NR Description: choline kinase GmCK2p -like protein; protein id: supported by cDNA: 126037., supported by cDNA: 7395. [Arabidopsis >gi|7484868|pir||T04023 choline kinase 2 homolog [Arabidopsis
  misc_feature (1)..(306): Homolog of NCBI NO: 21537276 NR Description: choline kinase GmCK2p-like protein [Arabidopsis
MTNEVYQARWLTAGPAGQKEEPRAEREVRKVLVRIYGDGVDLFFDREDEVRTFECMSRHGQGPRLLGRFPNGRVEEFIHARTLSAADLRDPEISALVASKLREFHNLDMPGPKSVLIWDRLRNWLRTAKSLCPPEEAKEFRLDSLENQITALENECSGDYQWIGFCHNDLQYGNIMIDEETNVLTIIDYEYASFNPVAYDIANHFCEMAADYHSSKPHILDYSRYPDVDEQKRFVKTYLNISGEEPDAEVVENLLQSIEKHTLSSHLVWGLWGIISDHVNDIDFDYKEYARQRFEQYWHKSAILTS

SEQ ID NO: 14019 - protein, 251 aa, Zea mays subsp. mays
  peptide (1)..(251): Ceres Seq. ID no. 12484072
  misc_feature (1)..(233): Pfam Name: Choline/ethanolamine kinase Pfam Description: Choline/ethanolamine kinase
  misc_feature (1)..(251): Homolog of NCBI NO: 33149685 NR Description: choline kinase [Oryza sativa (indica
  misc_feature (1)..(233): Homolog of NCBI NO: 34910612 NR Description: putative choline kinase [Oryza sativa (japonica group)] >gi|20160889|dbj|BAB89827.1| putative choline kinase
  misc_feature (1)..(249): Homolog of NCBI NO: 7488654 NR Description: choline kinase (EC 2.7.1.32) CK3 - soybean
  misc_feature (1)..(243): Homolog of NCBI NO: 22330627 NR Description: putative choline kinase; protein id: At1g74320.1, by cDNA: gi_20453121 [Arabidopsis thaliana] At1g74320/F1O17_1 [Arabidopsis thaliana]
  misc_feature (1)..(243): Homolog of NCBI NO: 25348157 NR Description: protein choline kinase F1O17.1 [imported] -
  misc_feature (1)..(251): Homolog of NCBI NO: 7488653 NR Description: choline kinase (EC 2.7.1.32) CK2 - soybean
  misc_feature (1)..(249): Homolog of NCBI NO: 15217543 NR Description: choline kinase, putative; protein id: At1g71697.1
  misc_feature (1)..(249): Homolog of NCBI NO: 12311795 NR Description: choline kinase [Pisum sativum]
  misc_feature (1)..(251): Homolog of NCBI NO: 15234032 NR Description: choline kinase GmCK2p -like protein; protein id: supported by cDNA: 126037., supported by cDNA: 7395. [Arabidopsis >gi|7484868|pir||T04023 choline kinase 2 homolog [Arabidopsis
  misc_feature (1)..(251): Homolog of NCBI NO: 21537276 NR Description: choline kinase GmCK2p-like protein [Arabidopsis
MSRHGQGPRLLGRFPNGRVEEFIHARTLSAADLRDPEISALVASKLREFHNLDMPGPKSVLIWDRLRNWLRTAKSLCPPEEAKEFRLDSLENQITALENECSGDYQWIGFCHNDLQYGNIMIDEETNVLTIIDYEYASFNPVAYDIANHFCEMAADYHSSKPHILDYSRYPDVDEQKRFVKTYLNISGEEPDAEVVENLLQSIEKHTLSSHLVWGLWGIISDHVNDIDFDYKEYARQRFEQYWHKSAILTS

SEQ ID NO: 14020 - DNA, 494 bp, Zea mays subsp. mays
  misc_feature (1)..(494): Ceres Seq. ID no. 3008609
  misc_feature: MA Experiment ID: 20000108 Result: Up-regulated in Transcription
  misc_feature: MA Experiment 20000108 PARAMETER Experiment Name: Zm_Root-Tips_P Parameter: Age (day) Value: 12
  misc_feature: MA Experiment 20000108 PARAMETER Experiment Name: Zm_Root-Tips_P Parameter: Organism Value: Zea mays
  misc_feature: MA Experiment 20000108 PARAMETER Experiment Name: Zm_Root-Tips_P Parameter: Tissue Value: Root tips vs. Root mid region    35
  misc_feature: MA Experiment 20000108 PARAMETER Experiment Name: Zm_Root-Tips_P Parameter: Tissue Value: Root tips vs. Root mid region   Sequence Listing-Misc Features (4)
aactacccccacgctggctcgccaccgccgccgcagcaggcgtgggaatctgggcagcgccccgcggagaagaggaggcagcgcgctctccgtccgccatggcgggctcttccgaccccgacaagctcatgagcaaagccgacaaactaacaaaattgagttttacaagatggaatgctgattggaaaagcgctacctccttgtatgagcaagctgcaattgcgtataggttcagaaaggataatgagaaagcaaaagatgcttttgagaaggcctcaaaaggacaggaaatgatctcctcaccatgggacgctgctaagcatatggaatctgctgctgctttagcaaaggagcttgggcgctggaatgaagtatctgatttctatcacagagcttcagaattataccgtgaatgtggaaggccacaacctgcatctgatgctctagcaaagggtgccagtgcattggcggcgacnaggcagccacctacttgt

SEQ ID NO: 14021 - protein, 164 aa, Zea mays subsp. mays
  peptide (1)..(164): Ceres Seq. ID no. 3008610
  misc_feature (34)..(155): Homolog of NCBI NO: 38344323 NR Description: OSJNBa0058K23.5 [Oryza sativa (japonica
  misc_feature (36)..(155): Homolog of NCBI NO: 21554919 NR Description: unknown [Arabidopsis thaliana]
  misc_feature (36)..(155): Homolog of NCBI NO: 7486759 NR Description: hypothetical protein F9F13.60 - Arabidopsis >gi|5262164|emb|CAB45807.1| putative protein [Arabidopsis >gi|7268837|emb|CAB79041.1| putative protein [Arabidopsis
  misc_feature (36)..(155): Homolog of NCBI NO: 18415496 NR Description: putative protein; protein id: At4g20410.1, by cDNA: 267158., supported by cDNA: gi_6013205 [Arabidopsis
  misc_feature (97)..(155): Homolog of NCBI NO: 5852090 NR Description: zwh13.1 [Oryza sativa (indica cultivar-group)]
  misc_feature (37)..(161): Homolog of NCBI NO: 17137734 NR Description: gamma-soluble NSF attachment protein CG3988-PA
  misc_feature (40)..(155): Homolog of NCBI NO: 5639862 NR Description: soluble NSF attachment protein gamma isoform
  misc_feature (1)..(155): Homolog of NCBI NO: 34932055 NR Description: similar to Gamma-soluble NSF attachment protein
  misc_feature (43)..(155): Homolog of NCBI NO: 18272359 NR Description: Gamma-soluble NSF attachment protein (SNAP-gamma)
  misc_feature (43)..(155): Homolog of NCBI NO: 423252 NR Description: gamma-SNAP protein - bovine
  misc_feature (158)..(158): Xaa is any aa, unknown or other
LPPRWLATAAAAGVGIWAAPRGEEEAARSPSAMAGSSDPDKLMSKADKLTKLSFTRWNADWKSATSLYEQAAIAYRFRKDNEKAKDAFEKASKGQEMISSPWDAAKHMESAAALAKELGRWNEVSDFYHRASELYRECGRPQPASDALAKGASALAAXRQPPTC

SEQ ID NO: 14022 - protein, 132 aa, Zea mays subsp. mays
  peptide (1)..(132): Ceres Seq. ID no. 3008611
  misc_feature (2)..(123): Homolog of NCBI NO: 38344323 NR Description: OSJNBa0058K23.5 [Oryza sativa (japonica
  misc_feature (4)..(123): Homolog of NCBI NO: 21554919 NR Description: unknown [Arabidopsis thaliana]
  misc_feature (4)..(123): Homolog of NCBI NO: 7486759 NR Description: hypothetical protein F9F13.60 - Arabidopsis >gi|5262164|emb|CAB45807.1| putative protein [Arabidopsis >gi|7268837|emb|CAB79041.1| putative protein [Arabidopsis
  misc_feature (4)..(123): Homolog of NCBI NO: 18415496 NR Description: putative protein; protein id: At4g20410.1, by cDNA: 267158., supported by cDNA: gi_6013205 [Arabidopsis
  misc_feature (65)..(123): Homolog of NCBI NO: 5852090 NR Description: zwh13.1 [Oryza sativa (indica cultivar-group)]
  misc_feature (5)..(129): Homolog of NCBI NO: 17137734 NR Description: gamma-soluble NSF attachment protein CG3988-PA
  misc_feature (8)..(123): Homolog of NCBI NO: 5639862 NR Description: soluble NSF attachment protein gamma isoform
  misc_feature (1)..(123): Homolog of NCBI NO: 34932055 NR Description: similar to Gamma-soluble NSF attachment protein
  misc_feature (11)..(123): Homolog of NCBI NO: 18272359 NR Description: Gamma-soluble NSF attachment protein (SNAP-gamma)
  misc_feature (11)..(123): Homolog of NCBI NO: 423252 NR Description: gamma-SNAP protein - bovine
  misc_feature (126)..(126): Xaa is any aa, unknown or other
MAGSSDPDKLMSKADKLTKLSFTRWNADWKSATSLYEQAAIAYRFRKDNEKAKDAFEKASKGQEMISSPWDAAKHMESAAALAKELGRWNEVSDFYHRASELYRECGRPQPASDALAKGASALAAXRQPPTC

SEQ ID NO: 14023 - protein, 122 aa, Zea mays subsp. mays
  peptide (1)..(122): Ceres Seq. ID no. 3008612
  misc_feature (1)..(113): Homolog of NCBI NO: 38344323 NR Description: OSJNBa0058K23.5 [Oryza sativa (japonica
  misc_feature (1)..(113): Homolog of NCBI NO: 21554919 NR Description: unknown [Arabidopsis thaliana]
  misc_feature (1)..(113): Homolog of NCBI NO: 7486759 NR Description: hypothetical protein F9F13.60 - Arabidopsis >gi|5262164|emb|CAB45807.1| putative protein [Arabidopsis >gi|7268837|emb|CAB79041.1| putative protein [Arabidopsis
  misc_feature (1)..(113): Homolog of NCBI NO: 18415496 NR Description: putative protein; protein id: At4g20410.1, by cDNA: 267158., supported by cDNA: gi_6013205 [Arabidopsis
  misc_feature (55)..(113): Homolog of NCBI NO: 5852090 NR Description: zwh13.1 [Oryza sativa (indica cultivar-group)]
  misc_feature (1)..(119): Homolog of NCBI NO: 17137734 NR Description: gamma-soluble NSF attachment protein CG3988-PA
  misc_feature (1)..(113): Homolog of NCBI NO: 5639862 NR Description: soluble NSF attachment protein gamma isoform
  misc_feature (1)..(113): Homolog of NCBI NO: 34932055 NR Description: similar to Gamma-soluble NSF attachment protein
  misc_feature (1)..(113): Homolog of NCBI NO: 18272359 NR Description: Gamma-soluble NSF attachment protein (SNAP-gamma)
  misc_feature (1)..(113): Homolog of NCBI NO: 423252 NR Description: gamma-SNAP protein - bovine
  misc_feature (116)..(116): Xaa is any aa, unknown or other
MSKADKLTKLSFTRWNADWKSATSLYEQAAIAYRFRKDNEKAKDAFEKASKGQEMISSPWDAAKHMESAAALAKELGRWNEVSDFYHRASELYRECGRPQPASDALAKGASALAAXRQPPTC

SEQ ID NO: 14024 - DNA, 424 bp, Zea mays subsp. mays
  misc_feature (1)..(424): Ceres Seq. ID no. 4616227
  misc_feature: MA Experiment ID: 108544 Result: Up-regulated in Transcription
  misc_feature: MA Experiment ID: 20000478 Result: Up-regulated in Transcription
  misc_feature: MA Experiment 20000478 PARAMETER Experiment Name: Zm_5mM_SA_P Parameter: Age (day) Value: 11
  misc_feature: MA Experiment 20000478 PARAMETER Experiment Name: Zm_5mM_SA_P Parameter: Organism Value: Zea mays
  misc_feature: MA Experiment 20000478 PARAMETER Experiment Name: Zm_5mM_SA_P Parameter: Plant Line Value: 35A19
  misc_feature: MA Experiment 20000478 PARAMETER Experiment Name: Zm_5mM_SA_P Parameter: Timepoint (hr) Value: 72
  misc_feature: MA Experiment 20000478 PARAMETER Experiment Name: Zm_5mM_SA_P Parameter: Tissue Value: Aerial
  misc_feature: MA Experiment 20000478 PARAMETER Experiment Name: Zm_5mM_SA_P Parameter: Treatment Value: 5mM SA vs. No Treatment
  misc_feature: MA Experiment ID: 20000479 Result: Up-regulated in Transcription
  misc_feature: MA Experiment 20000479 PARAMETER Experiment Name: Zm_Drought_P Parameter: Age (day) Value: 10
  misc_feature: MA Experiment 20000479 PARAMETER Experiment Name: Zm_Drought_P Parameter: Organism Value: Zea mays
  misc_feature: MA Experiment 20000479 PARAMETER Experiment Name: Zm_Drought_P Parameter: Plant Line Value: 35A19
  misc_feature: MA Experiment 20000479 PARAMETER Experiment Name: Zm_Drought_P Parameter: Timepoint (hr) Value: 48
  misc_feature: MA Experiment 20000479 PARAMETER Experiment Name: Zm_Drought_P Parameter: Tissue Value: Aerial
  misc_feature: MA Experiment 20000479 PARAMETER Experiment Name: Zm_Drought_P Parameter: Treatment Value: Drought vs. No Drought
  misc_feature: MA Experiment ID: 20000480 Result: Up-regulated in Transcription
  misc_feature: MA Experiment 20000480 PARAMETER Experiment Name: Zm_Drought_P Parameter: Age (day) Value: 11
  misc_feature: MA Experiment 20000480 PARAMETER Experiment Name: Zm_Drought_P Parameter: Organism Value: Zea mays
  misc_feature: MA Experiment 20000480 PARAMETER Experiment Name: Zm_Drought_P Parameter: Plant Line Value: 35A19
  misc_feature: MA Experiment 20000480 PARAMETER Experiment Name: Zm_Drought_P Parameter: Timepoint (hr) Value: 72
  misc_feature: MA Experiment 20000480 PARAMETER Experiment Name: Zm_Drought_P Parameter: Tissue Value: Aerial
  misc_feature: MA Experiment 20000480 PARAMETER Experiment Name: Zm_Drought_P Parameter: Treatment Value: Drought vs. No Drought
  misc_feature: MA Experiment ID: 20000492 Result: Down-regulated in Transcription
  misc_feature: MA Experiment 20000492 PARAMETER Experiment Name: Zm_Hybrid_Seed_Dev_P Parameter: DAP Value: 12
  misc_feature: MA Experiment 20000492 PARAMETER Experiment Name: Zm_Hybrid_Seed_Dev_P Parameter: Organism Value: Zea mays
  misc_feature: MA Experiment 20000492 PARAMETER Experiment Name: Zm_Hybrid_Seed_Dev_P Parameter: Plant Line Value: 35A19
  misc_feature: MA Experiment 20000492 PARAMETER Experiment Name: Zm_Hybrid_Seed_Dev_P Parameter: Tissue Value: Fert Kernel vs. Unfert Floret
aaaatcacctcacaacaagctgccccgcagcaacgaacacgaaccttggcagaacgaagctgaagtagttcgttgtgaacccagtatggcaaacgcgccgaggatcctggccctcggcctgctgctagcgctcctgtgcgctgccgccggcccggccgccgcgcagaactgcggctgccagcctaacttctgctgcagcaagttcggctactgcggcacgaccgacgactactgcggcgacgggtgccagtcgggcccgtgccgctcgggcggcggcggcggcggcggcggaggcggaggcagtggcggtgcgaacgtggctaacgtggtcagcgacgcgttcttcaacggcatcaagaaccaggccgggagcgggtgcgagggcaagaacttctacacccggagcgcgttcctgagcgccgtc

SEQ ID NO: 14025 - protein, 141 aa, Zea mays subsp. mays
  peptide (1)..(141): Ceres Seq. ID no. 4616228
  misc_feature (54)..(87): Pfam Name: Chitin recognition protein Pfam Description: Chitin recognition protein
  misc_feature (29)..(140): Homolog of NCBI NO: 116329 NR Description: ENDOCHITINASE A PRECURSOR (SEED CHITINASE A)
  misc_feature (29)..(140): Homolog of NCBI NO: 283037 NR Description: chitinase (EC 3.2.1.14) A - maize
  misc_feature (33)..(140): Homolog of NCBI NO: 116333 NR Description: ENDOCHITINASE B PRECURSOR (SEED CHITINASE B)
  misc_feature (34)..(140): Homolog of NCBI NO: 482985 NR Description: chitinase (EC 3.2.1.14) precursor - maize
  misc_feature (29)..(140): Homolog of NCBI NO: 15529119 NR Description: chitinase-B1 [Sorghum bicolor]
  misc_feature (35)..(140): Homolog of NCBI NO: 15213848 NR Description: chitinase-B [Saccharum officinarum]
  misc_feature (35)..(140): Homolog of NCBI NO: 15213852 NR Description: chitinase-B [Sorghum halepense]
  misc_feature (35)..(140): Homolog of NCBI NO: 15529121 NR Description: chitinase-B [Sorghum bicolor]
  misc_feature (35)..(140): Homolog of NCBI NO: 15213850 NR Description: chitinase-B [Sorghum arundinaceum]
  misc_feature (35)..(140): Homolog of NCBI NO: 15529117 NR Description: chitinase-B [Sorghum bicolor]
KSPHNKLPRSNEHEPWQNEAEVVRCEPSMANAPRILALGLLLALLCAAAGPAAAQNCGCQPNFCCSKFGYCGTTDDYCGDGCQSGPCRSGGGGGGGGGGGSGGANVANVVSDAFFNGIKNQAGSGCEGKNFYTRSAFLSAV

SEQ ID NO: 14026 - protein, 113 aa, Zea mays subsp. mays
  peptide (1)..(113): Ceres Seq. ID no. 4616229
  misc_feature (26)..(59): Pfam Name: Chitin recognition protein Pfam Description: Chitin recognition protein
  misc_feature (1)..(112): Homolog of NCBI NO: 116329 NR Description: ENDOCHITINASE A PRECURSOR (SEED CHITINASE A)
  misc_feature (1)..(112): Homolog of NCBI NO: 283037 NR Description: chitinase (EC 3.2.1.14) A - maize
  misc_feature (5)..(112): Homolog of NCBI NO: 116333 NR Description: ENDOCHITINASE B PRECURSOR (SEED CHITINASE B)
  misc_feature (6)..(112): Homolog of NCBI NO: 482985 NR Description: chitinase (EC 3.2.1.14) precursor - maize
  misc_feature (1)..(112): Homolog of NCBI NO: 15529119 NR Description: chitinase-B1 [Sorghum bicolor]
  misc_feature (7)..(112): Homolog of NCBI NO: 15213848 NR Description: chitinase-B [Saccharum officinarum]
  misc_feature (7)..(112): Homolog of NCBI NO: 15213852 NR Description: chitinase-B [Sorghum halepense]
  misc_feature (7)..(112): Homolog of NCBI NO: 15529121 NR Description: chitinase-B [Sorghum bicolor]
  misc_feature (7)..(112): Homolog of NCBI NO: 15213850 NR Description: chitinase-B [Sorghum arundinaceum]
  misc_feature (7)..(112): Homolog of NCBI NO: 15529117 NR Description: chitinase-B [Sorghum bicolor]
MANAPRILALGLLLALLCAAAGPAAAQNCGCQPNFCCSKFGYCGTTDDYCGDGCQSGPCRSGGGGGGGGGGGSGGANVANVVSDAFFNGIKNQAGSGCEGKNFYTRSAFLSAV

SEQ ID NO: 14027 - DNA, 2566 bp, Zea mays subsp. mays
  misc_feature (1)..(2566): Ceres Seq. ID no. 12450470
  misc_feature: MA Experiment ID: 108528 Result: Up-regulated in Transcription
  misc_feature: MA Experiment 108528 PARAMETER Experiment Name: Zm_Imbibed_Seeds_P Parameter: Age (day) Value: 5 vs. 2
  misc_feature: MA Experiment 108528 PARAMETER Experiment Name: Zm_Imbibed_Seeds_P Parameter: Organism Value: Zea mays
  misc_feature: MA Experiment 108528 PARAMETER Experiment Name: Zm_Imbibed_Seeds_P Parameter: Plant Line Value: 35A19
  misc_feature: MA Experiment 108528 PARAMETER Experiment Name: Zm_Imbibed_Seeds_P Parameter: Tissue Value: Aerial vs. Embryo
  misc_feature: MA Experiment ID: 108529 Result: Down-regulated in Transcription
  misc_feature: MA Experiment 108529 PARAMETER Experiment Name: Zm_Imbibed_Seeds_P Parameter: Age (day) Value: 5 vs. 2
  misc_feature: MA Experiment 108529 PARAMETER Experiment Name: Zm_Imbibed_Seeds_P Parameter: Organism Value: Zea mays
  misc_feature: MA Experiment 108529 PARAMETER Experiment Name: Zm_Imbibed_Seeds_P Parameter: Plant Line Value: 35A19
  misc_feature: MA Experiment 108529 PARAMETER Experiment Name: Zm_Imbibed_Seeds_P Parameter: Tissue Value: Roots vs. Embryo
  misc_feature: MA Experiment ID: 108535 Result: Up-regulated in Transcription
  misc_feature: MA Experiment 108535 PARAMETER Experiment Name: Zm_Meristem_P Parameter: Age (day) Value: 8
  misc_feature: MA Experiment 108535 PARAMETER Experiment Name: Zm_Meristem_P Parameter: Organism Value: Zea mays
  misc_feature: MA Experiment 108535 PARAMETER Experiment Name: Zm_Meristem_P Parameter: Plant Line Value: 35A19
  misc_feature: MA Experiment 108535 PARAMETER Experiment Name: Zm_Meristem_P Parameter: Tissue Value: Root Meristem vs. Above Root Meristem
  misc_feature: MA Experiment ID: 108536 Result: Down-regulated in Transcription
  misc_feature: MA Experiment 108536 PARAMETER Experiment Name: Zm_Meristem_P Parameter: Age (day) Value: 8
  misc_feature: MA Experiment 108536 PARAMETER Experiment Name: Zm_Meristem_P Parameter: Organism Value: Zea mays
  misc_feature: MA Experiment 108536 PARAMETER Experiment Name: Zm_Meristem_P Parameter: Plant Line Value: 35A19
  misc_feature: MA Experiment 108536 PARAMETER Experiment Name: Zm_Meristem_P Parameter: Tissue Value: Shoot Meristem vs. Above Shoot Meristem
  misc_feature: MA Experiment ID: 108544 Result: Down-regulated in Transcription
  misc_feature: MA Experiment ID: 108545 Result: Up-regulated in Transcription
  misc_feature: MA Experiment 108545 PARAMETER Experiment Name: Zm_Imbibed_Seeds_P Parameter: Age (day) Value: 3 vs. 2
  misc_feature: MA Experiment 108545 PARAMETER Experiment Name: Zm_Imbibed_Seeds_P Parameter: Organism Value: Zea mays
  misc_feature: MA Experiment 108545 PARAMETER Experiment Name: Zm_Imbibed_Seeds_P Parameter: Plant Line Value: 35A19
  misc_feature: MA Experiment 108545 PARAMETER Experiment Name: Zm_Imbibed_Seeds_P Parameter: Tissue Value: Aerial vs. Embryo
  misc_feature: MA Experiment ID: 108546 Result: Down-regulated in Transcription
  misc_feature: MA Experiment 108546 PARAMETER Experiment Name: Zm_Imbibed_Seeds_P Parameter: Age (day) Value: 3 vs. 2
  misc_feature: MA Experiment 108546 PARAMETER Experiment Name: Zm_Imbibed_Seeds_P Parameter: Organism Value: Zea mays
  misc_feature: MA Experiment 108546 PARAMETER Experiment Name: Zm_Imbibed_Seeds_P Parameter: Plant Line Value: 35A19
  misc_feature: MA Experiment 108546 PARAMETER Experiment Name: Zm_Imbibed_Seeds_P Parameter: Tissue Value: Roots vs. Embryo
  misc_feature: MA Experiment ID: 108547 Result: Up-regulated in Transcription
  misc_feature: MA Experiment 108547 PARAMETER Experiment Name: Zm_Imbibed_Seeds_P Parameter: Age (day) Value: 4 vs. 2
  misc_feature: MA Experiment 108547 PARAMETER Experiment Name: Zm_Imbibed_Seeds_P Parameter: Organism Value: Zea mays
  misc_feature: MA Experiment 108547 PARAMETER Experiment Name: Zm_Imbibed_Seeds_P Parameter: Plant Line Value: 35A19
  misc_feature: MA Experiment 108547 PARAMETER Experiment Name: Zm_Imbibed_Seeds_P Parameter: Tissue Value: Aerial vs. Embryo
  misc_feature: MA Experiment ID: 20000477 Result: Down-regulated in Transcription
  misc_feature: MA Experiment 20000477 PARAMETER Experiment Name: Zm_5mM_SA_P Parameter: Age (day) Value: 10
  misc_feature: MA Experiment 20000477 PARAMETER Experiment Name: Zm_5mM_SA_P Parameter: Organism Value: Zea mays
  misc_feature: MA Experiment 20000477 PARAMETER Experiment Name: Zm_5mM_SA_P Parameter: Plant Line Value: 35A19
  misc_feature: MA Experiment 20000477 PARAMETER Experiment Name: Zm_5mM_SA_P Parameter: Timepoint (hr) Value: 48
  misc_feature: MA Experiment 20000477 PARAMETER Experiment Name: Zm_5mM_SA_P Parameter: Tissue Value: Aerial
  misc_feature: MA Experiment 20000477 PARAMETER Experiment Name: Zm_5mM_SA_P Parameter: Treatment Value: 5mM SA vs. No Treatment
  misc_feature: MA Experiment ID: 20000534 Result: Down-regulated in Transcription
  misc_feature: MA Experiment 20000534 PARAMETER Experiment Name: Zm_Hybrid_Pollen_P Parameter: Age (day) Value: 8
  misc_feature: MA Experiment 20000534 PARAMETER Experiment Name: Zm_Hybrid_Pollen_P Parameter: Organism Value: Zea mays
  misc_feature: MA Experiment 20000534 PARAMETER Experiment Name: Zm_Hybrid_Pollen_P Parameter: Plant Line Value: 35A19
  misc_feature: MA Experiment 20000534 PARAMETER Experiment Name: Zm_Hybrid_Pollen_P Parameter: Tissue Value: Pollen vs. Aerial
  misc_feature: MA Experiment ID: 20000626 Result: Down-regulated in Transcription
  misc_feature: MA Experiment 20000626 PARAMETER Experiment Name: Zm_Herbicide-Treatments_P Parameter: Timepoint (hr) Value: 12
  misc_feature: MA Experiment 20000626 PARAMETER Experiment Name: Zm_Herbicide-Treatments_P Parameter: Tissue Value: Aerial
  misc_feature: MA Experiment 20000626 PARAMETER Experiment Name: Zm_Herbicide-Treatments_P Parameter: Treatment Value: Roundup vs. No Treatment
acctctgtccatccatcacagcttcgagactcgtcctccatgggttctggcggcgtcagatggaaggctctgccgctgtgcctagctctcgtggctctgcaagcatgcctccctgctcgcggggcagctcccaagacttacatcgttcagatggccgcgtctgagatgccgagctcgttcgatttccaccacgaatggtacgcatccactgtgaaatccgtgagctctgtgcagctggaaggagacgcggacgaccattacgccgcgaggatcgtctacaactacgagacggcgttccacggcttcgcggcgaagctggacgaggacgaggccgagcggatggccgaggcggacggcgtggtggccgtgctcccggagacggtcctgcagctgcacaccaccaggagcccggacttcctgggcatcagcccggagatcagcgacagcatatggtccgccggcctggccgaccacgacgtcgtcgtcggcgtgctcgacaccggcatctggcccgagagccccagctttagcgacaagggcctcggccctgtcccggccaggtggaagggcctgtgccagaccggccgcggcttcaccgtagccagctgcaaccgcaagatcatcggcgcgcgcatcttctacaacggctacgaggcctcgtcgggccccatcaacgagacggccgagctcaaatctccgcgggaccaggacggccacggcacgcacaccgcggccaccgccgcgggcgcgcccgtgccggacgccagcctcttcggctacgccagcggcgtcgcccgtggcatggcgccccgcgcccgcgtcgcggcgtacaaggtgtgctggacggggggctgcttcagctccgacatcctggcggccgtcgaccgcgccgtggcggacggcgtcgacgtgctctccatctcgctcggcggcggctcgtccccctacttccgcgacagcctggccatcgcgtcgttcggtgccatgcagatgggcgtgttcgtcgcctgctcgggcggcaacggcggcccggaccccataagcctcaccaacctgtcgccgtggataaccacggtgggcgcgagcaccatggaccgggacttcccggccacggtgacgctcggcaatggcgcaaacctcaccggggtttcgctctacaaaggccggcgaggtctttcgtccaaggagcagtacccgttagtctacatgggcggcaactcgagcatccctgaccccaggtccctgtgcctggaggggacactccagccccacgaggtcgctggaaagattgtgatctgcgaccgcggcattagtcctcgggtgcagaagggtcaggttgtcaagaacgccggtgccgcgggcatgatactcgccaacacaccggcaaacggcgaggagcttgtcgccgacagccacctcctgccagcagtggccgttgggcagtctgaaggcattgccgccaagaagtacagcaaaaccgccccgaaaccaacggccacgctcagcttcgacgggacgaagctcgggatccgcccatcgccagtcgtagccgcgttctcgtcccggggaccaaacttcctgaccctggagatcctcaagccggatgtcatcgcgcccggcgtgaacatcttggcggcatggagcggcgacgccagcccgtcgagcttgtccagcgaccgccggcgggtcggcttcaacatcctgtcggggacgtccatgtcgtgcccgcacgtcgccggcgtggctgcgctgatcaaggccagccacccggactggagccccgcgaagatcaagtccgcgctgatgaccaccgcgtacgtccacgacaacacgtaccggtcgctgaaggacgcggccaccggcaaggcgtccacgccgttcgatcacggagctgggcacatacacccgctgcgtgccctcaaccctggcctggtctacgacatcggccaggacgactacctggagttcctctgcgtggagaacctgacgccgttgcagctcaggtccttcaccaagaactcgagcaagacatgcaagcacaccttcagctcgccgggtgacttgaattattcggccatctccgcggtcttcgcggagcagccatctgctgcgcttacggtgcgtcgcaccgtgacgaacgtcggcccgccgtcttcgacttaccatgtcaaggttacagagttcaaaggcgcagacattgtcgtcgaaccaagcaccctgcacttcacaagttcgaaccagaagctaacctacaaggtgacgatgacaaccaaggctgcccagaagacaccggagttcggagcgctgtcttggagcgacggcgtccacatcgtccggagcccccttgtcctcacatggctgccaccgatgtgagcttcgtttatttaccgtgcgtttagagcaagcaatggagcaggaacctctgggcctgggtaatcaagccagagatccgttgtgtcgcagcggcagcggcagcggcagaacaggttcactaaccaacggaaaaatactgtcaaagctccacatgagaaccgcctttattcttcaatgtattcatgcttattcc

SEQ ID NO: 14028 - protein, 790 aa, Zea mays subsp. mays
  peptide (1)..(790): Ceres Seq. ID no. 12450471
  misc_feature (140)..(365): Pfam Name: Subtilase family Pfam Description: Subtilase family
  misc_feature (26)..(790): Homolog of NCBI NO: 18423316 NR Description: subtilisin-like serine protease; protein id:
  misc_feature (26)..(787): Homolog of NCBI NO: 7435656 NR Description: subtilisin-like proteinase (EC 3.4.21.-) 2 -
  misc_feature (30)..(786): Homolog of NCBI NO: 18425181 NR Description: subtilisin-like serine protease ARA12; protein At5g67360.1, supported by cDNA: gi_13430745, supported by cDNA:
  misc_feature (30)..(786): Homolog of NCBI NO: 20147211 NR Description: AT5g67360/K8K14_8 [Arabidopsis thaliana]
  misc_feature (26)..(786): Homolog of NCBI NO: 7435657 NR Description: subtilisin-like proteinase (EC 3.4.21.-) 1 -
  misc_feature (26)..(786): Homolog of NCBI NO: 14488360 NR Description: putative serine protease [Oryza sativa (japonica
  misc_feature (88)..(786): Homolog of NCBI NO: 1076414 NR Description: subtilisin-like proteinase (EC 3.4.21.-),
  misc_feature (46)..(790): Homolog of NCBI NO: 21536632 NR Description: subtilisin-like serine protease [Arabidopsis
  misc_feature (46)..(790): Homolog of NCBI NO: 13430434 NR Description: putative subtilisin serine protease [Arabidopsis
  misc_feature (91)..(784): Homolog of NCBI NO: 22325457 NR Description: subtilisin-like serine protease AIR3; protein id:
TSVHPSQLRDSSSMGSGGVRWKALPLCLALVALQACLPARGAAPKTYIVQMAASEMPSSFDFHHEWYASTVKSVSSVQLEGDADDHYAARIVYNYETAFHGFAAKLDEDEAERMAEADGVVAVLPETVLQLHTTRSPDFLGISPEISDSIWSAGLADHDVVVGVLDTGIWPESPSFSDKGLGPVPARWKGLCQTGRGFTVASCNRKIIGARIFYNGYEASSGPINETAELKSPRDQDGHGTHTAATAAGAPVPDASLFGYASGVARGMAPRARVAAYKVCWTGGCFSSDILAAVDRAVADGVDVLSISLGGGSSPYFRDSLAIASFGAMQMGVFVACSGGNGGPDPISLTNLSPWITTVGASTMDRDFPATVTLGNGANLTGVSLYKGRRGLSSKEQYPLVYMGGNSSIPDPRSLCLEGTLQPHEVAGKIVICDRGISPRVQKGQVVKNAGAAGMILANTPANGEELVADSHLLPAVAVGQSEGIAAKKYSKTAPKPTATLSFDGTKLGIRPSPVVAAFSSRGPNFLTLEILKPDVIAPGVNILAAWSGDASPSSLSSDRRRVGFNILSGTSMSCPHVAGVAALIKASHPDWSPAKIKSALMTTAYVHDNTYRSLKDAATGKASTPFDHGAGHIHPLRALNPGLVYDIGQDDYLEFLCVENLTPLQLRSFTKNSSKTCKHTFSSPGDLNYSAISAVFAEQPSAALTVRRTVTNVGPPSSTYHVKVTEFKGADIVVEPSTLHFTSSNQKLTYKVTMTTKAAQKTPEFGALSWSDGVHIVRSPLVLTWLPPM

SEQ ID NO: 14029 - protein, 777 aa, Zea mays subsp. mays
  peptide (1)..(777): Ceres Seq. ID no. 12450472
  misc_feature (127)..(352): Pfam Name: Subtilase family Pfam Description: Subtilase family
  misc_feature (13)..(777): Homolog of NCBI NO: 18423316 NR Description: subtilisin-like serine protease; protein id:
  misc_feature (13)..(774): Homolog of NCBI NO: 7435656 NR Description: subtilisin-like proteinase (EC 3.4.21.-) 2 -
  misc_feature (17)..(773): Homolog of NCBI NO: 18425181 NR Description: subtilisin-like serine protease ARA12; protein At5g67360.1, supported by cDNA: gi_13430745, supported by cDNA:
  misc_feature (17)..(773): Homolog of NCBI NO: 20147211 NR Description: AT5g67360/K8K14_8 [Arabidopsis thaliana]
  misc_feature (13)..(773): Homolog of NCBI NO: 7435657 NR Description: subtilisin-like proteinase (EC 3.4.21.-) 1 -
  misc_feature (13)..(773): Homolog of NCBI NO: 14488360 NR Description: putative serine protease [Oryza sativa (japonica
  misc_feature (75)..(773): Homolog of NCBI NO: 1076414 NR Description: subtilisin-like proteinase (EC 3.4.21.-),
  misc_feature (33)..(777): Homolog of NCBI NO: 21536632 NR Description: subtilisin-like serine protease [Arabidopsis
  misc_feature (33)..(777): Homolog of NCBI NO: 13430434 NR Description: putative subtilisin serine protease [Arabidopsis
  misc_feature (78)..(771): Homolog of NCBI NO: 22325457 NR Description: subtilisin-like serine protease AIR3; protein id:
MGSGGVRWKALPLCLALVALQACLPARGAAPKTYIVQMAASEMPSSFDFHHEWYASTVKSVSSVQLEGDADDHYAARIVYNYETAFHGFAAKLDEDEAERMAEADGVVAVLPETVLQLHTTRSPDFLGISPEISDSIWSAGLADHDVVVGVLDTGIWPESPSFSDKGLGPVPARWKGLCQTGRGFTVASCNRKIIGARIFYNGYEASSGPINETAELKSPRDQDGHGTHTAATAAGAPVPDASLFGYASGVARGMAPRARVAAYKVCWTGGCFSSDILAAVDRAVADGVDVLSISLGGGSSPYFRDSLAIASFGAMQMGVFVACSGGNGGPDPISLTNLSPWITTVGASTMDRDFPATVTLGNGANLTGVSLYKGRRGLSSKEQYPLVYMGGNSSIPDPRSLCLEGTLQPHEVAGKIVICDRGISPRVQKGQVVKNAGAAGMILANTPANGEELVADSHLLPAVAVGQSEGIAAKKYSKTAPKPTATLSFDGTKLGIRPSPVVAAFSSRGPNFLTLEILKPDVIAPGVNILAAWSGDASPSSLSSDRRRVGFNILSGTSMSCPHVAGVAALIKASHPDWSPAKIKSALMTTAYVHDNTYRSLKDAATGKASTPFDHGAGHIHPLRALNPGLVYDIGQDDYLEFLCVENLTPLQLRSFTKNSSKTCKHTFSSPGDLNYSAISAVFAEQPSAALTVRRTVTNVGPPSSTYHVKVTEFKGADIVVEPSTLHFTSSNQKLTYKVTMTTKAAQKTPEFGALSWSDGVHIVRSPLVLTWLPPM

SEQ ID NO: 14030 - protein, 740 aa, Zea mays subsp. mays
  peptide (1)..(740): Ceres Seq. ID no. 12450473
  misc_feature (90)..(315): Pfam Name: Subtilase family Pfam Description: Subtilase family
  misc_feature (1)..(740): Homolog of NCBI NO: 18423316 NR Description: subtilisin-like serine protease; protein id:
  misc_feature (1)..(737): Homolog of NCBI NO: 7435656 NR Description: subtilisin-like proteinase (EC 3.4.21.-) 2 -
  misc_feature (1)..(736): Homolog of NCBI NO: 18425181 NR Description: subtilisin-like serine protease ARA12; protein At5g67360.1, supported by cDNA: gi_13430745, supported by cDNA:
  misc_feature (1)..(736): Homolog of NCBI NO: 20147211 NR Description: AT5g67360/K8K14_8 [Arabidopsis thaliana]
  misc_feature (1)..(736): Homolog of NCBI NO: 7435657 NR Description: subtilisin-like proteinase (EC 3.4.21.-) 1 -
  misc_feature (1)..(736): Homolog of NCBI NO: 14488360 NR Description: putative serine protease [Oryza sativa (japonica
  misc_feature (38)..(736): Homolog of NCBI NO: 1076414 NR Description: subtilisin-like proteinase (EC 3.4.21.-),
  misc_feature (1)..(740): Homolog of NCBI NO: 21536632 NR Description: subtilisin-like serine protease [Arabidopsis
  misc_feature (1)..(740): Homolog of NCBI NO: 13430434 NR Description: putative subtilisin serine protease [Arabidopsis
  misc_feature (41)..(734): Homolog of NCBI NO: 22325457 NR Description: subtilisin-like serine protease AIR3; protein id:
MAASEMPSSFDFHHEWYASTVKSVSSVQLEGDADDHYAARIVYNYETAFHGFAAKLDEDEAERMAEADGVVAVLPETVLQLHTTRSPDFLGISPEISDSIWSAGLADHDVVVGVLDTGIWPESPSFSDKGLGPVPARWKGLCQTGRGFTVASCNRKIIGARIFYNGYEASSGPINETAELKSPRDQDGHGTHTAATAAGAPVPDASLFGYASGVARGMAPRARVAAYKVCWTGGCFSSDILAAVDRAVADGVDVLSISLGGGSSPYFRDSLAIASFGAMQMGVFVACSGGNGGPDPISLTNLSPWITTVGASTMDRDFPATVTLGNGANLTGVSLYKGRRGLSSKEQYPLVYMGGNSSIPDPRSLCLEGTLQPHEVAGKIVICDRGISPRVQKGQVVKNAGAAGMILANTPANGEELVADSHLLPAVAVGQSEGIAAKKYSKTAPKPTATLSFDGTKLGIRPSPVVAAFSSRGPNFLTLEILKPDVIAPGVNILAAWSGDASPSSLSSDRRRVGFNILSGTSMSCPHVAGVAALIKASHPDWSPAKIKSALMTTAYVHDNTYRSLKDAATGKASTPFDHGAGHIHPLRALNPGLVYDIGQDDYLEFLCVENLTPLQLRSFTKNSSKTCKHTFSSPGDLNYSAISAVFAEQPSAALTVRRTVTNVGPPSSTYHVKVTEFKGADIVVEPSTLHFTSSNQKLTYKVTMTTKAAQKTPEFGALSWSDGVHIVRSPLVLTWLPPM

SEQ ID NO: 14031 - DNA, 1433 bp, Zea mays subsp. mays
  misc_feature (1)..(1433): Ceres Seq. ID no. 13494861
  misc_feature: MA Experiment ID: 108544 Result: Down-regulated in Transcription
  misc_feature: MA Experiment ID: 108556 Result: Down-regulated in Transcription
  misc_feature: MA Experiment 108556 PARAMETER Experiment Name: Zm_Drought_P Parameter: Age (day) Value: 9
  misc_feature: MA Experiment 108556 PARAMETER Experiment Name: Zm_Drought_P Parameter: Organism Value: Zea mays
  misc_feature: MA Experiment 108556 PARAMETER Experiment Name: Zm_Drought_P Parameter: Plant Line Value: 35A19
  misc_feature: MA Experiment 108556 PARAMETER Experiment Name: Zm_Drought_P Parameter: Timepoint (hr) Value: 24
  misc_feature: MA Experiment 108556 PARAMETER Experiment Name: Zm_Drought_P Parameter: Tissue Value: Aerial
  misc_feature: MA Experiment 108556 PARAMETER Experiment Name: Zm_Drought_P Parameter: Treatment Value: Drought vs. No Drought
  misc_feature: MA Experiment ID: 20000535 Result: Up-regulated in Transcription
  misc_feature: MA Experiment 20000535 PARAMETER Experiment Name: Zm_Hybrid_Seed_Dev_P Parameter: DAP Value: 30 vs. 12
  misc_feature: MA Experiment 20000535 PARAMETER Experiment Name: Zm_Hybrid_Seed_Dev_P Parameter: Organism Value: Zea mays
  misc_feature: MA Experiment 20000535 PARAMETER Experiment Name: Zm_Hybrid_Seed_Dev_P Parameter: Plant Line Value: 35A19
  misc_feature: MA Experiment 20000535 PARAMETER Experiment Name: Zm_Hybrid_Seed_Dev_P Parameter: Tissue Value: Embryo vs. Unfert Floret
  misc_feature: MA Experiment ID: 20000632 Result: Down-regulated in Transcription
  misc_feature: MA Experiment 20000632 PARAMETER Experiment Name: Zm_Herbicide-Treatments_P Parameter: Timepoint (hr) Value: 4
  misc_feature: MA Experiment 20000632 PARAMETER Experiment Name: Zm_Herbicide-Treatments_P Parameter: Tissue Value: Aerial
  misc_feature: MA Experiment 20000632 PARAMETER Experiment Name: Zm_Herbicide-Treatments_P Parameter: Treatment Value: Glean vs. No Treatment
agggctcatctctctcttcctcttctcccgccgcccagcttctctcttctctcggcggcgccaccacggcgatcaagcgcgatacgggcgtaaccgaagaatcgacaatgggcggcgagaaggaaacctttgatacgtccgacctcaacgcctccctccccgcggccgctgcagccctcagcgccgaggaccgcgccggcctcgtcaatgcccttaaggataagctgcagagcctggcgggccagcacgccgatgtgttagagacgctgtcgcccaatgttaggaagcgggttgagtttttgagagagatccagagtcaacacgatgaaattgaggccaagttttttgaagaacgagctgcccttgaggcaaagtaccagaagctttatgaacctttatacacaaagaggtatggaattgtaaatggagaagtggaggtagatggtgtttgtgatgaaccggccagtgagaatactgttgagggaaaagaaccagacgctaaaggagttccagacttttggcttactgccatgaaaacaaacgaggttttgtctgaggagatacaagagcgcgatgaagccgctttgaaatatctaaaagatatcaagtggtctagaatcgaggatcctaagggtttcaagctggattttttctttgatacaaacccattcttcaagaattctgtcctgacaaaaacgtaccacatggttgatgaagatgacccaattttggagaaagctattggaactgaaatcgagtggtatcctgggaaaaacctaacacagaagattctaaaaaagaaacctaaaaaaggttcaaagaatacgaagcctatcactaaaaccgaggactgtgagagtttcttcaactttttcaatcccccgcaggtccctgaagatgatgatgacatcgatgaagacactgctgatgagctgcagagtcaaatggagcatgattatgacattgggaccaccataagggataagattatccctcacgcagtttcctggtttactggtgaggctgtgcaaggtgaggattttggtgagttgggcgatgatgatgaagatgatgatgatgaagacgatgacgaagatgatgaggatgaagaagaggatgatgatgaggaagaggatgatgaggaagaaagcaagccagcaaggaagtcaggatctggtcgcagacataaggcgccacagaaggtgtcgcagggaaatgcggaacaaccagcggagtgcaagcagcagtagaatggcctgttgatgttggttgatgcagtattttccattgagctgcctagaggttatgtgtgcgcaggccagatgttggtgttgatatctcaagtgtggtttttattagtaggcggtgagggtgttgtctggagcactttggtgctgcgttggtggatggatattggtttgcaacttgtctgc

SEQ ID NO: 14032 - protein, 415 aa, Zea mays subsp. mays
  peptide (1)..(415): Ceres Seq. ID no. 13494862
  misc_feature (94)..(343): Pfam Name: Nucleosome assembly protein (NAP) Pfam Description: Nucleosome assembly protein (NAP)
  misc_feature (36)..(415): Homolog of NCBI NO: 29569109 NR Description: nucleosome/chromatin assembly factor group A [Zea
  misc_feature (36)..(415): Homolog of NCBI NO: 15224782 NR Description: nucleosome assembly protein -related [Arabidopsis
  misc_feature (45)..(415): Homolog of NCBI NO: 2129840 NR Description: nucleosome assembly protein 1 - soybean
  misc_feature (36)..(415): Homolog of NCBI NO: 18423918 NR Description: nucleosome assembly protein [Arabidopsis >gi|13877573|gb|AAK43864.1|AF370487_1 nucleosome assembly protein thaliana] >gi|17978721|gb|AAL47354.1| nucleosome assembly protein
  misc_feature (36)..(415): Homolog of NCBI NO: 8777435 NR Description: nucleosome assembly protein [Arabidopsis thaliana]
  misc_feature (36)..(415): Homolog of NCBI NO: 549975 NR Description: nucleosome assembly protein I-like protein;
  misc_feature (36)..(415): Homolog of NCBI NO: 15236115 NR Description: nucleosome assembly protein I-related protein
  misc_feature (36)..(415): Homolog of NCBI NO: 7488816 NR Description: nucleosome assembly protein 1 - garden pea
  misc_feature (36)..(403): Homolog of NCBI NO: 21898560 NR Description: nucleosome/chromatin assembly factor group A [Zea
  misc_feature (30)..(366): Homolog of NCBI NO: 15231361 NR Description: nucleosome assembly protein -related [Arabidopsis
GSSLSSSSPAAQLLSSLGGATTAIKRDTGVTEESTMGGEKETFDTSDLNASLPAAAAALSAEDRAGLVNALKDKLQSLAGQHADVLETLSPNVRKRVEFLREIQSQHDEIEAKFFEERAALEAKYQKLYEPLYTKRYGIVNGEVEVDGVCDEPASENTVEGKEPDAKGVPDFWLTAMKTNEVLSEEIQERDEAALKYLKDIKWSRIEDPKGFKLDFFFDTNPFFKNSVLTKTYHMVDEDDPILEKAIGTEIEWYPGKNLTQKILKKKPKKGSKNTKPITKTEDCESFFNFFNPPQVPEDDDDIDEDTADELQSQMEHDYDIGTTIRDKIIPHAVSWFTGEAVQGEDFGELGDDDEDDDDEDDDEDDEDEEEDDDEEEDDEEESKPARKSGSGRRHKAPQKVSQGNAEQPAECKQQ

SEQ ID NO: 14033 - protein, 380 aa, Zea mays subsp. mays
  peptide (1)..(380): Ceres Seq. ID no. 13494863
  misc_feature (59)..(308): Pfam Name: Nucleosome assembly protein (NAP) Pfam Description: Nucleosome assembly protein (NAP)
  misc_feature (1)..(380): Homolog of NCBI NO: 8777435 NR Description: nucleosome assembly protein [Arabidopsis thaliana]
  misc_feature (1)..(380): Homolog of NCBI NO: 549975 NR Description: nucleosome assembly protein I-like protein;
  misc_feature (1)..(380): Homolog of NCBI NO: 15236115 NR Description: nucleosome assembly protein I-related protein
  misc_feature (1)..(380): Homolog of NCBI NO: 29569109 NR Description: nucleosome/chromatin assembly factor group A [Zea
  misc_feature (10)..(380): Homolog of NCBI NO: 2129840 NR Description: nucleosome assembly protein 1 - soybean
  misc_feature (1)..(380): Homolog of NCBI NO: 18423918 NR Description: nucleosome assembly protein [Arabidopsis >gi|13877573|gb|AAK43864.1|AF370487_1 nucleosome assembly protein thaliana] >gi|17978721|gb|AAL47354.1| nucleosome assembly protein
  misc_feature (1)..(380): Homolog of NCBI NO: 15224782 NR Description: nucleosome assembly protein -related [Arabidopsis
  misc_feature (1)..(380): Homolog of NCBI NO: 7488816 NR Description: nucleosome assembly protein 1 - garden pea
  misc_feature (1)..(368): Homolog of NCBI NO: 21898560 NR Description: nucleosome/chromatin assembly factor group A [Zea
  misc_feature (1)..(331): Homolog of NCBI NO: 15231361 NR Description: nucleosome assembly protein -related [Arabidopsis
MGGEKETFDTSDLNASLPAAAAALSAEDRAGLVNALKDKLQSLAGQHADVLETLSPNVRKRVEFLREIQSQHDEIEAKFFEERAALEAKYQKLYEPLYTKRYGIVNGEVEVDGVCDEPASENTVEGKEPDAKGVPDFWLTAMKTNEVLSEEIQERDEAALKYLKDIKWSRIEDPKGFKLDFFFDTNPFFKNSVLTKTYHMVDEDDPILEKAIGTEIEWYPGKNLTQKILKKKPKKGSKNTKPITKTEDCESFFNFFNPPQVPEDDDDIDEDTADELQSQMEHDYDIGTTIRDKIIPHAVSWFTGEAVQGEDFGELGDDDEDDDDEDDDEDDEDEEEDDDEEEDDEEESKPARKSGSGRRHKAPQKVSQGNAEQPAECKQQ

SEQ ID NO: 14034 - protein, 239 aa, Zea mays subsp. mays
  peptide (1)..(239): Ceres Seq. ID no. 13494864
  misc_feature (1)..(167): Pfam Name: Nucleosome assembly protein (NAP) Pfam Description: Nucleosome assembly protein (NAP)
  misc_feature (1)..(239): Homolog of NCBI NO: 29569109 NR Description: nucleosome/chromatin assembly factor group A [Zea
  misc_feature (1)..(239): Homolog of NCBI NO: 15224782 NR Description: nucleosome assembly protein -related [Arabidopsis
  misc_feature (1)..(239): Homolog of NCBI NO: 2129840 NR Description: nucleosome assembly protein 1 - soybean
  misc_feature (1)..(239): Homolog of NCBI NO: 18423918 NR Description: nucleosome assembly protein [Arabidopsis >gi|13877573|gb|AAK43864.1|AF370487_1 nucleosome assembly protein thaliana] >gi|17978721|gb|AAL47354.1| nucleosome assembly protein
  misc_feature (1)..(239): Homolog of NCBI NO: 8777435 NR Description: nucleosome assembly protein [Arabidopsis thaliana]
  misc_feature (1)..(239): Homolog of NCBI NO: 549975 NR Description: nucleosome assembly protein I-like protein;
  misc_feature (1)..(239): Homolog of NCBI NO: 15236115 NR Description: nucleosome assembly protein I-related protein
  misc_feature (1)..(239): Homolog of NCBI NO: 7488816 NR Description: nucleosome assembly protein 1 - garden pea
  misc_feature (1)..(227): Homolog of NCBI NO: 21898560 NR Description: nucleosome/chromatin assembly factor group A [Zea
  misc_feature (1)..(190): Homolog of NCBI NO: 15231361 NR Description: nucleosome assembly protein -related [Arabidopsis
MKTNEVLSEEIQERDEAALKYLKDIKWSRIEDPKGFKLDFFFDTNPFFKNSVLTKTYHMVDEDDPILEKAIGTEIEWYPGKNLTQKILKKKPKKGSKNTKPITKTEDCESFFNFFNPPQVPEDDDDIDEDTADELQSQMEHDYDIGTTIRDKIIPHAVSWFTGEAVQGEDFGELGDDDEDDDDEDDDEDDEDEEEDDDEEEDDEEESKPARKSGSGRRHKAPQKVSQGNAEQPAECKQQ

SEQ ID NO: 14035 - DNA, 998 bp, Zea mays subsp. mays
  misc_feature (1)..(998): Ceres Seq. ID no. 12420272
  misc_feature: MA Experiment ID: 108530 Result: Down-regulated in Transcription
  misc_feature: MA Experiment 108530 PARAMETER Experiment Name: Zm_Imbibed_Seeds_P Parameter: Age (day) Value: 6 vs. 2
  misc_feature: MA Experiment 108530 PARAMETER Experiment Name: Zm_Imbibed_Seeds_P Parameter: Organism Value: Zea mays
  misc_feature: MA Experiment 108530 PARAMETER Experiment Name: Zm_Imbibed_Seeds_P Parameter: Plant Line Value: 35A19
  misc_feature: MA Experiment 108530 PARAMETER Experiment Name: Zm_Imbibed_Seeds_P Parameter: Tissue Value: Aerial vs. Embryo
  misc_feature: MA Experiment ID: 108535 Result: Up-regulated in Transcription
  misc_feature: MA Experiment 108535 PARAMETER Experiment Name: Zm_Meristem_P Parameter: Age (day) Value: 8
  misc_feature: MA Experiment 108535 PARAMETER Experiment Name: Zm_Meristem_P Parameter: Organism Value: Zea mays
  misc_feature: MA Experiment 108535 PARAMETER Experiment Name: Zm_Meristem_P Parameter: Plant Line Value: 35A19
  misc_feature: MA Experiment 108535 PARAMETER Experiment Name: Zm_Meristem_P Parameter: Tissue Value: Root Meristem vs. Above Root Meristem
  misc_feature: MA Experiment ID: 108544 Result: Down-regulated in Transcription
  misc_feature: MA Experiment ID: 20000487 Result: Up-regulated in Transcription
  misc_feature: MA Experiment 20000487 PARAMETER Experiment Name: Zm_50mM_NH4NO3_L_to_H_P Parameter: Organism Value: Zea mays
  misc_feature: MA Experiment 20000487 PARAMETER Experiment Name: Zm_50mM_NH4NO3_L_to_H_P Parameter: Timepoint (hr) Value: 4
  misc_feature: MA Experiment 20000487 PARAMETER Experiment Name: Zm_50mM_NH4NO3_L_to_H_P Parameter: Tissue Value: Leaves
  misc_feature: MA Experiment 20000487 PARAMETER Experiment Name: Zm_50mM_NH4NO3_L_to_H_P Parameter: Treatment Value: 50mM NH4NO3 vs. 100mM Mannitol
  misc_feature: MA Experiment ID: 20000488 Result: Up-regulated in Transcription
  misc_feature: MA Experiment 20000488 PARAMETER Experiment Name: Zm_50mM_NH4NO3_L_to_H_P Parameter: Organism Value: Zea mays
  misc_feature: MA Experiment 20000488 PARAMETER Experiment Name: Zm_50mM_NH4NO3_L_to_H_P Parameter: Timepoint (hr) Value: 8
  misc_feature: MA Experiment 20000488 PARAMETER Experiment Name: Zm_50mM_NH4NO3_L_to_H_P Parameter: Tissue Value: Leaves
  misc_feature: MA Experiment 20000488 PARAMETER Experiment Name: Zm_50mM_NH4NO3_L_to_H_P Parameter: Treatment Value: 50mM NH4NO3 vs. 100mM Mannitol
  misc_feature: MA Experiment ID: 20000534 Result: Down-regulated in Transcription
  misc_feature: MA Experiment 20000534 PARAMETER Experiment Name: Zm_Hybrid_Pollen_P Parameter: Age (day) Value: 8
  misc_feature: MA Experiment 20000534 PARAMETER Experiment Name: Zm_Hybrid_Pollen_P Parameter: Organism Value: Zea mays
  misc_feature: MA Experiment 20000534 PARAMETER Experiment Name: Zm_Hybrid_Pollen_P Parameter: Plant Line Value: 35A19
  misc_feature: MA Experiment 20000534 PARAMETER Experiment Name: Zm_Hybrid_Pollen_P Parameter: Tissue Value: Pollen vs. Aerial
  misc_feature: MA Experiment ID: 20000535 Result: Up-regulated in Transcription
  misc_feature: MA Experiment 20000535 PARAMETER Experiment Name: Zm_Hybrid_Seed_Dev_P Parameter: DAP Value: 30 vs. 12
  misc_feature: MA Experiment 20000535 PARAMETER Experiment Name: Zm_Hybrid_Seed_Dev_P Parameter: Organism Value: Zea mays
  misc_feature: MA Experiment 20000535 PARAMETER Experiment Name: Zm_Hybrid_Seed_Dev_P Parameter: Plant Line Value: 35A19
  misc_feature: MA Experiment 20000535 PARAMETER Experiment Name: Zm_Hybrid_Seed_Dev_P Parameter: Tissue Value: Embryo vs. Unfert Floret
  misc_feature: MA Experiment ID: 20001605 Result: Up-regulated in Transcription
  misc_feature: MA Experiment 20001605 PARAMETER Experiment Name: Zm_50ppm_KNO3_L-to-H_P Parameter: Age (day) Value: 19
  misc_feature: MA Experiment 20001605 PARAMETER Experiment Name: Zm_50ppm_KNO3_L-to-H_P Parameter: Organism Value: Zea mays
  misc_feature: MA Experiment 20001605 PARAMETER Experiment Name: Zm_50ppm_KNO3_L-to-H_P Parameter: Plant Line Value: 35A19
  misc_feature: MA Experiment 20001605 PARAMETER Experiment Name: Zm_50ppm_KNO3_L-to-H_P Parameter: Timepoint (hr) Value: 4
  misc_feature: MA Experiment 20001605 PARAMETER Experiment Name: Zm_50ppm_KNO3_L-to-H_P Parameter: Tissue Value: Shoots
  misc_feature: MA Experiment 20001605 PARAMETER Experiment Name: Zm_50ppm_KNO3_L-to-H_P Parameter: Treatment Value: 50ppm KNO3 vs. 50ppm KCl
  misc_feature: MA Experiment ID: 20001606 Result: Up-regulated in Transcription
  misc_feature: MA Experiment 20001606 PARAMETER Experiment Name: Zm_50ppm_KNO3_L-to-H_P Parameter: Age (day) Value: 19
  misc_feature: MA Experiment 20001606 PARAMETER Experiment Name: Zm_50ppm_KNO3_L-to-H_P Parameter: Organism Value: Zea mays
  misc_feature: MA Experiment 20001606 PARAMETER Experiment Name: Zm_50ppm_KNO3_L-to-H_P Parameter: Plant Line Value: 35A19
  misc_feature: MA Experiment 20001606 PARAMETER Experiment Name: Zm_50ppm_KNO3_L-to-H_P Parameter: Timepoint (hr) Value: 8
  misc_feature: MA Experiment 20001606 PARAMETER Experiment Name: Zm_50ppm_KNO3_L-to-H_P Parameter: Tissue Value: Shoots
  misc_feature: MA Experiment 20001606 PARAMETER Experiment Name: Zm_50ppm_KNO3_L-to-H_P Parameter: Treatment Value: 50ppm KNO3 vs. 50ppm KCl
  misc_feature: MA Experiment ID: 20001612 Result: Up-regulated in Transcription
  misc_feature: MA Experiment 20001612 PARAMETER Experiment Name: Zm_50ppm_KNO3_L-to-H_P Parameter: Age (day) Value: 19
  misc_feature: MA Experiment 20001612 PARAMETER Experiment Name: Zm_50ppm_KNO3_L-to-H_P Parameter: Organism Value: Zea mays
  misc_feature: MA Experiment 20001612 PARAMETER Experiment Name: Zm_50ppm_KNO3_L-to-H_P Parameter: Plant Line Value: 35A19
  misc_feature: MA Experiment 20001612 PARAMETER Experiment Name: Zm_50ppm_KNO3_L-to-H_P Parameter: Timepoint (hr) Value: 8
  misc_feature: MA Experiment 20001612 PARAMETER Experiment Name: Zm_50ppm_KNO3_L-to-H_P Parameter: Tissue Value: Roots
  misc_feature: MA Experiment 20001612 PARAMETER Experiment Name: Zm_50ppm_KNO3_L-to-H_P Parameter: Treatment Value: 50ppm KNO3 vs. 50ppm KCl
agcctctcttactctccgccgtcgccctgctcgcccgaagcagctgccggcaaaatggccccgaagagaggcggtagggcgccggtccccgccaagaagaaggcggtggtgacgaacccgctcttcgagaagaggccgaagcagtttgggatcggcggcgcccttccgcccaagaaggacctccaccgcttcgtcaagtggcccaaggtcgtgcgcatccagcgccagcgccgcatcctcaagcagcgcctcaaggtgcccccggcgctcaaccagttcacacgtaccctcgacaagaaccttgcaacaaacttgttcaagatgcttcttaagtaccgccccgaggacaaagctgccaagaaggagaggctcttgaagagggcccaggctgaaaacgaggggaaaactgttgagtcaaagaaaccaattgttgtgaagtacggccttaaccatgtgacttacctcatcgagcagagcaaggcccagctggttgtcatagctcatgatgttgatccgatcgagctggttgtgtggctcccggccctttgcaggaaaatggaggttccatactgcattgtcaagggaaaagcacgccttggatcgatcgttcacaagaagactgcatctgttctttgcttgaccaccgtcaagaacgaggacaagcttgagttcagcaaaatcttggaggctatcaaggctaacttcaacgacaagtttgatgaggtcaggaagaagtggggtggtggtatcatgggctccaaatcacaggcgaaaaccaggccagggaaaagctgcttgccaaggaagctgcccagcggatgacctaagtcttgccctgttaaattaaaattttcttgtacttgcgatcgtgtgcaatcccggtggttgtcagatctagtttttgagagttttgcttgagaaagaccgagtcaccgaccatgacagaaagacatcatgtaagaattcaagttttggttctgtaccatctagttcatgtg

SEQ ID NO: 14036 - protein, 273 aa, Zea mays subsp. mays
  peptide (1)..(273): Ceres Seq. ID no. 12420273
  misc_feature (130)..(225): Pfam Name: Ribosomal protein L7Ae/L30e/S12e/Gadd45 family Pfam Description: Ribosomal protein L7Ae/L30e/S12e/Gadd45 family
  misc_feature (19)..(269): Homolog of NCBI NO: 548774 NR Description: 60S RIBOSOMAL PROTEIN L7A >gi|542158|pir||S38360
  misc_feature (19)..(260): Homolog of NCBI NO: 15226635 NR Description: 60S ribosomal protein L7A; protein id: supported by cDNA: 6394., supported by cDNA: gi_14326530, by cDNA: gi_15450612 [Arabidopsis thaliana]
  misc_feature (19)..(260): Homolog of NCBI NO: 15229338 NR Description: 60S RIBOSOMAL PROTEIN L7A protein; protein id: supported by cDNA: 24272., supported by cDNA: gi_15529279, by cDNA: gi_16974412, supported by cDNA: gi_17065363 [Arabidopsis
  misc_feature (7)..(269): Homolog of NCBI NO: 20161741 NR Description: putative 60S ribosomal protein [Oryza sativa
  misc_feature (18)..(258): Homolog of NCBI NO: 17530825 NR Description: Ribosomal protein L7A CG3314-PD
  misc_feature (18)..(258): Homolog of NCBI NO: 1173062 NR Description: 60S RIBOSOMAL PROTEIN L7A
  misc_feature (19)..(257): Homolog of NCBI NO: 19112624 NR Description: 60s ribosomal protein L7a (L8) pombe] >gi|6094099|sp|O13672|RL8_SCHPO 60S ribosomal protein L8
  misc_feature (2)..(258): Homolog of NCBI NO: 34853132 NR Description: similar to 60S ribosomal protein L7a (Surfeit
  misc_feature (17)..(258): Homolog of NCBI NO: 4506661 NR Description: ribosomal protein L7a; 60S ribosomal protein L7a;
  misc_feature (17)..(258): Homolog of NCBI NO: 7305443 NR Description: ribosomal protein L7a; surfeit 3 [Mus musculus]
SLSYSPPSPCSPEAAAGKMAPKRGGRAPVPAKKKAVVTNPLFEKRPKQFGIGGALPPKKDLHRFVKWPKVVRIQRQRRILKQRLKVPPALNQFTRTLDKNLATNLFKMLLKYRPEDKAAKKERLLKRAQAENEGKTVESKKPIVVKYGLNHVTYLIEQSKAQLVVIAHDVDPIELVVWLPALCRKMEVPYCIVKGKARLGSIVHKKTASVLCLTTVKNEDKLEFSKILEAIKANFNDKFDEVRKKWGGGIMGSKSQAKTRPGKSCLPRKLPSG

SEQ ID NO: 14037 - protein, 255 aa, Zea mays subsp. mays
  peptide (1)..(255): Ceres Seq. ID no. 12420274
  misc_feature (112)..(207): Pfam Name: Ribosomal protein L7Ae/L30e/S12e/Gadd45 family Pfam Description: Ribosomal protein L7Ae/L30e/S12e/Gadd45 family
  misc_feature (1)..(251): Homolog of NCBI NO: 548774 NR Description: 60S RIBOSOMAL PROTEIN L7A >gi|542158|pir||S38360
  misc_feature (1)..(242): Homolog of NCBI NO: 15226635 NR Description: 60S ribosomal protein L7A; protein id: supported by cDNA: 6394., supported by cDNA: gi_14326530, by cDNA: gi_15450612 [Arabidopsis thaliana]
  misc_feature (1)..(242): Homolog of NCBI NO: 15229338 NR Description: 60S RIBOSOMAL PROTEIN L7A protein; protein id: supported by cDNA: 24272., supported by cDNA: gi_15529279, by cDNA: gi_16974412, supported by cDNA: gi_17065363 [Arabidopsis
  misc_feature (1)..(251): Homolog of NCBI NO: 20161741 NR Description: putative 60S ribosomal protein [Oryza sativa
  misc_feature (1)..(240): Homolog of NCBI NO: 17530825 NR Description: Ribosomal protein L7A CG3314-PD
  misc_feature (1)..(240): Homolog of NCBI NO: 1173062 NR Description: 60S RIBOSOMAL PROTEIN L7A
  misc_feature (1)..(239): Homolog of NCBI NO: 19112624 NR Description: 60s ribosomal protein L7a (L8) pombe] >gi|6094099|sp|O13672|RL8_SCHPO 60S ribosomal protein L8
  misc_feature (1)..(240): Homolog of NCBI NO: 34853132 NR Description: similar to 60S ribosomal protein L7a (Surfeit
  misc_feature (1)..(240): Homolog of NCBI NO: 4506661 NR Description: ribosomal protein L7a; 60S ribosomal protein L7a;
  misc_feature (1)..(240): Homolog of NCBI NO: 7305443 NR Description: ribosomal protein L7a; surfeit 3 [Mus musculus]
MAPKRGGRAPVPAKKKAVVTNPLFEKRPKQFGIGGALPPKKDLHRFVKWPKVVRIQRQRRILKQRLKVPPALNQFTRTLDKNLATNLFKMLLKYRPEDKAAKKERLLKRAQAENEGKTVESKKPIVVKYGLNHVTYLIEQSKAQLVVIAHDVDPIELVVWLPALCRKMEVPYCIVKGKARLGSIVHKKTASVLCLTTVKNEDKLEFSKILEAIKANFNDKFDEVRKKWGGGIMGSKSQAKTRPGKSCLPRKLPSG

SEQ ID NO: 14038 - protein, 166 aa, Zea mays subsp. mays
  peptide (1)..(166): Ceres Seq. ID no. 12420275
  misc_feature (23)..(118): Pfam Name: Ribosomal protein L7Ae/L30e/S12e/Gadd45 family Pfam Description: Ribosomal protein L7Ae/L30e/S12e/Gadd45 family
  misc_feature (1)..(162): Homolog of NCBI NO: 548774 NR Description: 60S RIBOSOMAL PROTEIN L7A >gi|542158|pir||S38360
  misc_feature (1)..(153): Homolog of NCBI NO: 15226635 NR Description: 60S ribosomal protein L7A; protein id: supported by cDNA: 6394., supported by cDNA: gi_14326530, by cDNA: gi_15450612 [Arabidopsis thaliana]
  misc_feature (1)..(153): Homolog of NCBI NO: 15229338 NR Description: 60S RIBOSOMAL PROTEIN L7A protein; protein id: supported by cDNA: 24272., supported by cDNA: gi_15529279, by cDNA: gi_16974412, supported by cDNA: gi_17065363 [Arabidopsis
  misc_feature (1)..(162): Homolog of NCBI NO: 20161741 NR Description: putative 60S ribosomal protein [Oryza sativa
  misc_feature (1)..(151): Homolog of NCBI NO: 17530825 NR Description: Ribosomal protein L7A CG3314-PD
  misc_feature (1)..(151): Homolog of NCBI NO: 1173062 NR Description: 60S RIBOSOMAL PROTEIN L7A
  misc_feature (1)..(150): Homolog of NCBI NO: 19112624 NR Description: 60s ribosomal protein L7a (L8) pombe] >gi|6094099|sp|O13672|RL8_SCHPO 60S ribosomal protein L8
  misc_feature (1)..(151): Homolog of NCBI NO: 34853132 NR Description: similar to 60S ribosomal protein L7a (Surfeit
  misc_feature (1)..(151): Homolog of NCBI NO: 4506661 NR Description: ribosomal protein L7a; 60S ribosomal protein L7a;
  misc_feature (1)..(151): Homolog of NCBI NO: 7305443 NR Description: ribosomal protein L7a; surfeit 3 [Mus musculus]
MLLKYRPEDKAAKKERLLKRAQAENEGKTVESKKPIVVKYGLNHVTYLIEQSKAQLVVIAHDVDPIELVVWLPALCRKMEVPYCIVKGKARLGSIVHKKTASVLCLTTVKNEDKLEFSKILEAIKANFNDKFDEVRKKWGGGIMGSKSQAKTRPGKSCLPRKLPSG

SEQ ID NO: 14039 - DNA, 855 bp, Zea mays subsp. mays
  misc_feature (1)..(855): Ceres Seq. ID no. 12420264
  misc_feature: MA Experiment ID: 108534 Result: Up-regulated in Transcription
  misc_feature: MA Experiment 108534 PARAMETER Experiment Name: Zm_4deg_Cold_P Parameter: Age (hr) Value: 8
  misc_feature: MA Experiment 108534 PARAMETER Experiment Name: Zm_4deg_Cold_P Parameter: Organism Value: Zea mays
  misc_feature: MA Experiment 108534 PARAMETER Experiment Name: Zm_4deg_Cold_P Parameter: Plant Line Value: 35A19
  misc_feature: MA Experiment 108534 PARAMETER Experiment Name: Zm_4deg_Cold_P Parameter: Temperature (deg C) Value: 4 vs. 22
  misc_feature: MA Experiment 108534 PARAMETER Experiment Name: Zm_4deg_Cold_P Parameter: Timepoint (hr) Value: 6
  misc_feature: MA Experiment 108534 PARAMETER Experiment Name: Zm_4deg_Cold_P Parameter: Tissue Value: Aerial
  misc_feature: MA Experiment ID: 20000478 Result: Down-regulated in Transcription
  misc_feature: MA Experiment 20000478 PARAMETER Experiment Name: Zm_5mM_SA_P Parameter: Age (day) Value: 11
  misc_feature: MA Experiment 20000478 PARAMETER Experiment Name: Zm_5mM_SA_P Parameter: Organism Value: Zea mays
  misc_feature: MA Experiment 20000478 PARAMETER Experiment Name: Zm_5mM_SA_P Parameter: Plant Line Value: 35A19
  misc_feature: MA Experiment 20000478 PARAMETER Experiment Name: Zm_5mM_SA_P Parameter: Timepoint (hr) Value: 72
  misc_feature: MA Experiment 20000478 PARAMETER Experiment Name: Zm_5mM_SA_P Parameter: Tissue Value: Aerial
  misc_feature: MA Experiment 20000478 PARAMETER Experiment Name: Zm_5mM_SA_P Parameter: Treatment Value: 5mM SA vs. No Treatment
aatttctttattctacttgtacattctgaataatctcatgtatcttgcagctctgaatgatgcactaaagcaggagctggagaggcttaagcttgttactgggtgagatgaccaattccagtgagacatataacatgagatttcagcatattccatacaactcttccttctttccgctttcccagcaaaatgcatctccacaccctggtaccacccagttgccaccaccgttccacccaccccatcccaatgtgccaaaccaccagatgctgtcccacccaaacgctctcccagacataatgcagcaagagtctcttggacggctgcagggtttggacattggaaaggggccactggttgtcaagtcagagagcagctcgatctctgctagtgaaagcagcagcaccttctaacgaggcctaccaatgagaatctgccgtttcaatacgtcccattgttcataatagcctgacatccttgtgctgcttcctgctctgtaagcttatttgttatttaattcattcaattagttgaaattgttccttgtcgcactggcagatcgatccatgttgtagaatgatccaggaacccttctagtctgtttatgttttgggaccatttcatgtttatgtgttcggtattagggcatttggattttggagtgaaattctctgatgatacttttgttgtgttgagccatgttgactgcatgaatcctcttttgaacatactcactctgtaccaaattcgttttaggccaatggtggattcatgaaagacttgttgaatgtattttatgtgtctatattcatcctcactcatttgaatatagacaaaaactactcctttcgttcc

SEQ ID NO: 14040 - protein, 101 aa, Zea mays subsp. mays
  peptide (1)..(101): Ceres Seq. ID no. 12420265
  misc_feature (1)..(101): Homolog of NCBI NO: 39579226 NR Description: bZIP transcription factor RF2b [Oryza sativa
  misc_feature (1)..(101): Homolog of NCBI NO: 34394739 NR Description: putative transcription activator RF2a [Oryza
MTNSSETYNMRFQHIPYNSSFFPLSQQNASPHPGTTQLPPPFHPPHPNVPNHQMLSHPNALPDIMQQESLGRLQGLDIGKGPLVVKSESSSISASESSSTF

SEQ ID NO: 14041 - protein, 92 aa, Zea mays subsp. mays
  peptide (1)..(92): Ceres Seq. ID no. 12420266
  misc_feature (1)..(92): Homolog of NCBI NO: 39579226 NR Description: bZIP transcription factor RF2b [Oryza sativa
  misc_feature (1)..(92): Homolog of NCBI NO: 34394739 NR Description: putative transcription activator RF2a [Oryza
MRFQHIPYNSSFFPLSQQNASPHPGTTQLPPPFHPPHPNVPNHQMLSHPNALPDIMQQESLGRLQGLDIGKGPLVVKSESSSISASESSSTF

SEQ ID NO: 14042 - protein, 56 aa, Zea mays subsp. mays
  peptide (1)..(56): Ceres Seq. ID no. 12420267
MFWDHFMFMCSVLGHLDFGVKFSDDTFVVLSHVDCMNPLLNILTLYQIRFRPMVDS

SEQ ID NO: 14043 - DNA, 637 bp, Zea mays subsp. mays
  misc_feature (1)..(637): Ceres Seq. ID no. 12420260
  misc_feature: MA Experiment ID: 108535 Result: Up-regulated in Transcription
  misc_feature: MA Experiment 108535 PARAMETER Experiment Name: Zm_Meristem_P Parameter: Age (day) Value: 8
  misc_feature: MA Experiment 108535 PARAMETER Experiment Name: Zm_Meristem_P Parameter: Organism Value: Zea mays
  misc_feature: MA Experiment 108535 PARAMETER Experiment Name: Zm_Meristem_P Parameter: Plant Line Value: 35A19
  misc_feature: MA Experiment 108535 PARAMETER Experiment Name: Zm_Meristem_P Parameter: Tissue Value: Root Meristem vs. Above Root Meristem
  misc_feature: MA Experiment ID: 20000534 Result: Down-regulated in Transcription
  misc_feature: MA Experiment 20000534 PARAMETER Experiment Name: Zm_Hybrid_Pollen_P Parameter: Age (day) Value: 8
  misc_feature: MA Experiment 20000534 PARAMETER Experiment Name: Zm_Hybrid_Pollen_P Parameter: Organism Value: Zea mays
  misc_feature: MA Experiment 20000534 PARAMETER Experiment Name: Zm_Hybrid_Pollen_P Parameter: Plant Line Value: 35A19
  misc_feature: MA Experiment 20000534 PARAMETER Experiment Name: Zm_Hybrid_Pollen_P Parameter: Tissue Value: Pollen vs. Aerial
aaagatccagatttgacaacttttgtatgtgtttgtatcccggaatttctttcattgtatgaaacagagagatggtgcaagagttagcaaagtttgagattgattcgcacaacattattattaatcaagttatatttgatgaggaagttgtcgagtcaaaattgctaaaagcacggataaaaatgcaacagaaatacattgaccagttccatatgttatatgatgacttcaacatcaccaaacttcccttgctttcagaagaggtttgtggtgttcaagctctacaaaacttttcccaccgcttccttacaccatacaagtctgctcgtaaaaggggcaccatcgaggagctggaggagagaataactatactaaaatctgcattgcaagaagctgaggcagaattagataggattaggaaaggaaagcagtcagcgtgatccttttcccccataggttaaggtatgtaaagcctggcagaagctactaagaaaacagagttagagagacgctcaaatgtcattacactcttgttgatttcactaccatgtttcctcatcgaaatgtttagatttgtcatagctatcggaagagaagtgtttgattcacacgagatatatataggtccattcttttt

SEQ ID NO: 14044 - protein, 122 aa, Zea mays subsp. mays
  peptide (1)..(122): Ceres Seq. ID no. 12420261
  misc_feature (1)..(80): Pfam Name: Anion-transporting ATPase Pfam Description: Anion-transporting ATPase
  misc_feature (1)..(118): Homolog of NCBI NO: 18378897 NR Description: arsA homolog (hASNA-I), putative; protein id:
  misc_feature (1)..(118): Homolog of NCBI NO: 25290846 NR Description: hypothetical protein F22M8.4 [imported] - thaliana >gi|8570442|gb|AAF76469.1|AC020622_3 Contains similarity
  misc_feature (1)..(83): Homolog of NCBI NO: 4757796 NR Description: arsA arsenite transporter, ATP-binding, homolog
  misc_feature (1)..(83): Homolog of NCBI NO: 26358207 NR Description: unnamed protein product [Mus musculus]
  misc_feature (1)..(83): Homolog of NCBI NO: 17391018 NR Description: Unknown (protein for MGC:28999) [Mus musculus]
  misc_feature (1)..(83): Homolog of NCBI NO: 2905657 NR Description: arsenite translocating ATPase [Homo sapiens]
  misc_feature (1)..(83): Homolog of NCBI NO: 12025542 NR Description: arsA (bacterial) arsenite transporter,
  misc_feature (1)..(83): Homolog of NCBI NO: 6647417 NR Description: Arsenical pump-driving ATPase
  misc_feature (1)..(82): Homolog of NCBI NO: 40744304 NR Description: conserved hypothetical protein [Aspergillus
  misc_feature (1)..(82): Homolog of NCBI NO: 24586297 NR Description: CG1598-PA [Drosophila melanogaster]
MVQELAKFEIDSHNIIINQVIFDEEVVESKLLKARIKMQQKYIDQFHMLYDDFNITKLPLLSEEVCGVQALQNFSHRFLTPYKSARKRGTIEELEERITILKSALQEAEAELDRIRKGKQSA

SEQ ID NO: 14045 - protein, 85 aa, Zea mays subsp. mays
  peptide (1)..(85): Ceres Seq. ID no. 12420262
  misc_feature (1)..(81): Homolog of NCBI NO: 18378897 NR Description: arsA homolog (hASNA-I), putative; protein id:
  misc_feature (1)..(81): Homolog of NCBI NO: 25290846 NR Description: hypothetical protein F22M8.4 [imported] - thaliana >gi|8570442|gb|AAF76469.1|AC020622_3 Contains similarity
  misc_feature (1)..(46): Homolog of NCBI NO: 4757796 NR Description: arsA arsenite transporter, ATP-binding, homolog
  misc_feature (1)..(46): Homolog of NCBI NO: 17391018 NR Description: Unknown (protein for MGC:28999) [Mus musculus]
  misc_feature (1)..(46): Homolog of NCBI NO: 26358207 NR Description: unnamed protein product [Mus musculus]
  misc_feature (1)..(46): Homolog of NCBI NO: 2905657 NR Description: arsenite translocating ATPase [Homo sapiens]
  misc_feature (1)..(46): Homolog of NCBI NO: 6647417 NR Description: Arsenical pump-driving ATPase
  misc_feature (1)..(46): Homolog of NCBI NO: 12025542 NR Description: arsA (bacterial) arsenite transporter,
  misc_feature (1)..(45): Homolog of NCBI NO: 40744304 NR Description: conserved hypothetical protein [Aspergillus
  misc_feature (1)..(45): Homolog of NCBI NO: 24586297 NR Description: CG1598-PA [Drosophila melanogaster]
MQQKYIDQFHMLYDDFNITKLPLLSEEVCGVQALQNFSHRFLTPYKSARKRGTIEELEERITILKSALQEAEAELDRIRKGKQSA

SEQ ID NO: 14046 - protein, 75 aa, Zea mays subsp. mays
  peptide (1)..(75): Ceres Seq. ID no. 12420263
  misc_feature (1)..(71): Homolog of NCBI NO: 18378897 NR Description: arsA homolog (hASNA-I), putative; protein id:
  misc_feature (1)..(71): Homolog of NCBI NO: 25290846 NR Description: hypothetical protein F22M8.4 [imported] - thaliana >gi|8570442|gb|AAF76469.1|AC020622_3 Contains similarity
  misc_feature (1)..(36): Homolog of NCBI NO: 4757796 NR Description: arsA arsenite transporter, ATP-binding, homolog
  misc_feature (1)..(36): Homolog of NCBI NO: 17391018 NR Description: Unknown (protein for MGC:28999) [Mus musculus]
  misc_feature (1)..(36): Homolog of NCBI NO: 26358207 NR Description: unnamed protein product [Mus musculus]
  misc_feature (1)..(36): Homolog of NCBI NO: 2905657 NR Description: arsenite translocating ATPase [Homo sapiens]
  misc_feature (1)..(36): Homolog of NCBI NO: 12025542 NR Description: arsA (bacterial) arsenite transporter,
  misc_feature (1)..(36): Homolog of NCBI NO: 6647417 NR Description: Arsenical pump-driving ATPase
  misc_feature (1)..(35): Homolog of NCBI NO: 40744304 NR Description: conserved hypothetical protein [Aspergillus
  misc_feature (1)..(35): Homolog of NCBI NO: 24586297 NR Description: CG1598-PA [Drosophila melanogaster]
MLYDDFNITKLPLLSEEVCGVQALQNFSHRFLTPYKSARKRGTIEELEERITILKSALQEAEAELDRIRKGKQSA

SEQ ID NO: 14047 - DNA, 1063 bp, Zea mays subsp. mays
  misc_feature (1)..(1063): Ceres Seq. ID no. 12467899
  misc_feature: MA Experiment ID: 108523 Result: Down-regulated in Transcription
  misc_feature: MA Experiment 108523 PARAMETER Experiment Name: Zm_42deg_Heat_P Parameter: Age (day) Value: 8
  misc_feature: MA Experiment 108523 PARAMETER Experiment Name: Zm_42deg_Heat_P Parameter: Organism Value: Zea mays
  misc_feature: MA Experiment 108523 PARAMETER Experiment Name: Zm_42deg_Heat_P Parameter: Plant Line Value: 35A19
  misc_feature: MA Experiment 108523 PARAMETER Experiment Name: Zm_42deg_Heat_P Parameter: Temperature (deg C) Value: 42 vs. 22
  misc_feature: MA Experiment 108523 PARAMETER Experiment Name: Zm_42deg_Heat_P Parameter: Timepoint (hr) Value: 6
  misc_feature: MA Experiment 108523 PARAMETER Experiment Name: Zm_42deg_Heat_P Parameter: Tissue Value: Aerial
  misc_feature: MA Experiment ID: 108535 Result: Up-regulated in Transcription
  misc_feature: MA Experiment 108535 PARAMETER Experiment Name: Zm_Meristem_P Parameter: Age (day) Value: 8
  misc_feature: MA Experiment 108535 PARAMETER Experiment Name: Zm_Meristem_P Parameter: Organism Value: Zea mays
  misc_feature: MA Experiment 108535 PARAMETER Experiment Name: Zm_Meristem_P Parameter: Plant Line Value: 35A19
  misc_feature: MA Experiment 108535 PARAMETER Experiment Name: Zm_Meristem_P Parameter: Tissue Value: Root Meristem vs. Above Root Meristem
  misc_feature: MA Experiment ID: 108543 Result: Up-regulated in Transcription
  misc_feature: MA Experiment ID: 20000478 Result: Down-regulated in Transcription
  misc_feature: MA Experiment 20000478 PARAMETER Experiment Name: Zm_5mM_SA_P Parameter: Age (day) Value: 11
  misc_feature: MA Experiment 20000478 PARAMETER Experiment Name: Zm_5mM_SA_P Parameter: Organism Value: Zea mays
  misc_feature: MA Experiment 20000478 PARAMETER Experiment Name: Zm_5mM_SA_P Parameter: Plant Line Value: 35A19
  misc_feature: MA Experiment 20000478 PARAMETER Experiment Name: Zm_5mM_SA_P Parameter: Timepoint (hr) Value: 72
  misc_feature: MA Experiment 20000478 PARAMETER Experiment Name: Zm_5mM_SA_P Parameter: Tissue Value: Aerial
  misc_feature: MA Experiment 20000478 PARAMETER Experiment Name: Zm_5mM_SA_P Parameter: Treatment Value: 5mM SA vs. No Treatment
gaagccctgcaacgatacgaatgatattccaacagtccagtcgtcggtgtccgtgagagatgtgggcacagagatgactccaatacctagccaggaaccttcaagaactggaactccactagggtcaaggacaccaactcgaagccctaactgttcagtaccgtcaacacctgtaggggggaggtcaatagcatctcctcctggagaagactgcacagacgatggcccatttttccacaggaaatgcggcgtacatgcaaatgaattgtcagatactgagacgaggcttaaaacaaggcaagaaatcgctgcgcttggcatacagctaggaaagatgaacattgctacgtgggccagcaaagaggagctagagctagtctctgcggcaccgagcatcgctgatttggagcgcatcaggaaggaatatgctgctcgtgctgcatcgtatgaggaggcagaaaatactaaacatacagcaagattcaaaaaagaagaggtgaagattgaagcttgggagggtcgtcaaagagcaaaaattgaatatgaaatgagaagaatagaggaatttgctgagagaatgagaagtgaggccatggaaaagatggccgaaaagctagagatgacgcgccgcatagccgaagagaaacgagcttcggccaacgccaaaatgaaccagcaagcagctatagcggttcagaaggccgagaagattcgccaaacgggacgagtcccaggatcgagtatcctacgctgcggtggctgcttctgtggaccgtagtagatcatacataggattcgacagctagtatgttggtctgggatatatagtggtgggaaacctgaactccaccctccaacaagtcagcattccttgattttagcatgaaaaaaggaatgtctctaaggtattcagatgcaaacgtgttcttgtttgtcatgtatgtaaattattccaatgattttaacttgggtcggtgtacaaggtaaccagctgttcgttggttaacgaagaagtcacgaatcgttcaaacattatgtttattattaaaaaaaaaaaaaaaaa

SEQ ID NO: 14048 - protein, 258 aa, Zea mays subsp. mays
  peptide (1)..(258): Ceres Seq. ID no. 12467900
  misc_feature (141)..(247): Pfam Name: Remorin, C-terminal region Pfam Description: Remorin, C-terminal region
  misc_feature (1)..(256): Homolog of NCBI NO: 38344336 NR Description: OSJNBa0058K23.18 [Oryza sativa (japonica
  misc_feature (15)..(255): Homolog of NCBI NO: 15220725 NR Description: hypothetical protein; protein id: At1g30320.1
  misc_feature (10)..(256): Homolog of NCBI NO: 18395321 NR Description: expressed protein; protein id: At2g02170.1, by cDNA: gi_14326557 [Arabidopsis thaliana]
  misc_feature (144)..(256): Homolog of NCBI NO: 18408804 NR Description: expressed protein; protein id: At1g67590.1, by cDNA: 10212. [Arabidopsis thaliana] F12A21.28 [Arabidopsis thaliana]
  misc_feature (144)..(256): Homolog of NCBI NO: 21536537 NR Description: unknown [Arabidopsis thaliana]
  misc_feature (144)..(256): Homolog of NCBI NO: 28393368 NR Description: unknown protein [Arabidopsis thaliana]
  misc_feature (10)..(49): Homolog of NCBI NO: 18408804 NR Description: expressed protein; protein id: At1g67590.1, by cDNA: 10212. [Arabidopsis thaliana] F12A21.28 [Arabidopsis thaliana]
  misc_feature (10)..(49): Homolog of NCBI NO: 28393368 NR Description: unknown protein [Arabidopsis thaliana]
  misc_feature (10)..(49): Homolog of NCBI NO: 21536537 NR Description: unknown [Arabidopsis thaliana]
  misc_feature (13)..(256): Homolog of NCBI NO: 34902218 NR Description: Unknown protein [Oryza sativa (japonica
KPCNDTNDIPTVQSSVSVRDVGTEMTPIPSQEPSRTGTPLGSRTPTRSPNCSVPSTPVGGRSIASPPGEDCTDDGPFFHRKCGVHANELSDTETRLKTRQEIAALGIQLGKMNIATWASKEELELVSAAPSIADLERIRKEYAARAASYEEAENTKHTARFKKEEVKIEAWEGRQRAKIEYEMRRIEEFAERMRSEAMEKMAEKLEMTRRIAEEKRASANAKMNQQAAIAVQKAEKIRQTGRVPGSSILRCGGCFCGP

SEQ ID NO: 14049 - protein, 234 aa, Zea mays subsp. mays
  peptide (1)..(234): Ceres Seq. ID no. 12467901
  misc_feature (117)..(223): Pfam Name: Remorin, C-terminal region Pfam Description: Remorin, C-terminal region
  misc_feature (1)..(232): Homolog of NCBI NO: 38344336 NR Description: OSJNBa0058K23.18 [Oryza sativa (japonica
  misc_feature (1)..(231): Homolog of NCBI NO: 15220725 NR Description: hypothetical protein; protein id: At1g30320.1
  misc_feature (1)..(232): Homolog of NCBI NO: 18395321 NR Description: expressed protein; protein id: At2g02170.1, by cDNA: gi_14326557 [Arabidopsis thaliana]
  misc_feature (120)..(232): Homolog of NCBI NO: 18408804 NR Description: expressed protein; protein id: At1g67590.1, by cDNA: 10212. [Arabidopsis thaliana] F12A21.28 [Arabidopsis thaliana]
  misc_feature (120)..(232): Homolog of NCBI NO: 21536537 NR Description: unknown [Arabidopsis thaliana]
  misc_feature (120)..(232): Homolog of NCBI NO: 28393368 NR Description: unknown protein [Arabidopsis thaliana]
  misc_feature (1)..(25): Homolog of NCBI NO: 18408804 NR Description: expressed protein; protein id: At1g67590.1, by cDNA: 10212. [Arabidopsis thaliana] F12A21.28 [Arabidopsis thaliana]
  misc_feature (1)..(25): Homolog of NCBI NO: 21536537 NR Description: unknown [Arabidopsis thaliana]
  misc_feature (1)..(25): Homolog of NCBI NO: 28393368 NR Description: unknown protein [Arabidopsis thaliana]
  misc_feature (1)..(232): Homolog of NCBI NO: 34902218 NR Description: Unknown protein [Oryza sativa (japonica
MTPIPSQEPSRTGTPLGSRTPTRSPNCSVPSTPVGGRSIASPPGEDCTDDGPFFHRKCGVHANELSDTETRLKTRQEIAALGIQLGKMNIATWASKEELELVSAAPSIADLERIRKEYAARAASYEEAENTKHTARFKKEEVKIEAWEGRQRAKIEYEMRRIEEFAERMRSEAMEKMAEKLEMTRRIAEEKRASANAKMNQQAAIAVQKAEKIRQTGRVPGSSILRCGGCFCGP

SEQ ID NO: 14050 - protein, 147 aa, Zea mays subsp. mays
  peptide (1)..(147): Ceres Seq. ID no. 12467902
  misc_feature (30)..(136): Pfam Name: Remorin, C-terminal region Pfam Description: Remorin, C-terminal region
  misc_feature (1)..(145): Homolog of NCBI NO: 38344336 NR Description: OSJNBa0058K23.18 [Oryza sativa (japonica
  misc_feature (1)..(144): Homolog of NCBI NO: 15220725 NR Description: hypothetical protein; protein id: At1g30320.1
  misc_feature (1)..(145): Homolog of NCBI NO: 18395321 NR Description: expressed protein; protein id: At2g02170.1, by cDNA: gi_14326557 [Arabidopsis thaliana]
  misc_feature (33)..(145): Homolog of NCBI NO: 18408804 NR Description: expressed protein; protein id: At1g67590.1, by cDNA: 10212. [Arabidopsis thaliana] F12A21.28 [Arabidopsis thaliana]
  misc_feature (33)..(145): Homolog of NCBI NO: 21536537 NR Description: unknown [Arabidopsis thaliana]
  misc_feature (33)..(145): Homolog of NCBI NO: 28393368 NR Description: unknown protein [Arabidopsis thaliana]
  misc_feature (1)..(145): Homolog of NCBI NO: 34902218 NR Description: Unknown protein [Oryza sativa (japonica
  misc_feature (21)..(144): Homolog of NCBI NO: 601843 NR Description: DNA-binding protein
  misc_feature (21)..(144): Homolog of NCBI NO: 15225899 NR Description: remorin; protein id: At2g45820.1, supported by gi_15028386, supported by cDNA: gi_19310658 [Arabidopsis
  misc_feature (1)..(133): Homolog of NCBI NO: 30103007 NR Description: remorin-like protein [Oryza sativa (japonica
MNIATWASKEELELVSAAPSIADLERIRKEYAARAASYEEAENTKHTARFKKEEVKIEAWEGRQRAKIEYEMRRIEEFAERMRSEAMEKMAEKLEMTRRIAEEKRASANAKMNQQAAIAVQKAEKIRQTGRVPGSSILRCGGCFCGP

SEQ ID NO: 14051 - DNA, 2238 bp, Zea mays subsp. mays
  misc_feature (1)..(2238): Ceres Seq. ID no. 12436409
  misc_feature: MA Experiment ID: 108535 Result: Up-regulated in Transcription
  misc_feature: MA Experiment 108535 PARAMETER Experiment Name: Zm_Meristem_P Parameter: Age (day) Value: 8
  misc_feature: MA Experiment 108535 PARAMETER Experiment Name: Zm_Meristem_P Parameter: Organism Value: Zea mays
  misc_feature: MA Experiment 108535 PARAMETER Experiment Name: Zm_Meristem_P Parameter: Plant Line Value: 35A19
  misc_feature: MA Experiment 108535 PARAMETER Experiment Name: Zm_Meristem_P Parameter: Tissue Value: Root Meristem vs. Above Root Meristem
  misc_feature: MA Experiment ID: 108545 Result: Down-regulated in Transcription
  misc_feature: MA Experiment 108545 PARAMETER Experiment Name: Zm_Imbibed_Seeds_P Parameter: Age (day) Value: 3 vs. 2
  misc_feature: MA Experiment 108545 PARAMETER Experiment Name: Zm_Imbibed_Seeds_P Parameter: Organism Value: Zea mays
  misc_feature: MA Experiment 108545 PARAMETER Experiment Name: Zm_Imbibed_Seeds_P Parameter: Plant Line Value: 35A19
  misc_feature: MA Experiment 108545 PARAMETER Experiment Name: Zm_Imbibed_Seeds_P Parameter: Tissue Value: Aerial vs. Embryo
  misc_feature: MA Experiment ID: 108547 Result: Down-regulated in Transcription
  misc_feature: MA Experiment 108547 PARAMETER Experiment Name: Zm_Imbibed_Seeds_P Parameter: Age (day) Value: 4 vs. 2
  misc_feature: MA Experiment 108547 PARAMETER Experiment Name: Zm_Imbibed_Seeds_P Parameter: Organism Value: Zea mays
  misc_feature: MA Experiment 108547 PARAMETER Experiment Name: Zm_Imbibed_Seeds_P Parameter: Plant Line Value: 35A19
  misc_feature: MA Experiment 108547 PARAMETER Experiment Name: Zm_Imbibed_Seeds_P Parameter: Tissue Value: Aerial vs. Embryo
aaaaataatcatacctggtatgctaaatcgaaacaggagggagtctgtagtagtccagttcacaagtagcggcagctagctgctgttggctgttgcccttctccgaaagaaaactactcgagctgaggcggagtagccaaggagaagtcaatgccgttctagcagtccagctttcacatggagcaggtcaaacaccttattacgcttgacgctttgcagcagcgatctcgatctgtggaggattgcatcaacctgacaatctctcgagttcttcacctcctctctcccaacggcatccattcagcccttggatgaccaggcatggccgtgggaggcccctcctggcccaatttgcagtgcctggtgcggcggaagccggcgaccgctggctgggccgaagacgctgacaggggaggtgtccagcgcctcgccaagacgctatctattccccacctcgtcgccatcggtgtcggctcgacgattggcgccggcatctatgtcctggttggaaccgtggctcgtgagcacaccgggccgggactgacgctctcctttctgatagccggcgtcgccgcggctctttcagcattgtgctatgccgagctctcctgccgtttcccttcggcagggagtgcctatcactactcctacatctgcattggggagagtgttgcttggctgattgggtgggccttgatccttgagtacaccattggggggtcatcagtggcacgtggcatgtcaccaaacttggctctatttttcggtggccaagataagttgccattctttctagcacaggtgcatgtcaaaggcctcgacaccccagttgatccatgtgctgctattcttgtcctgatagttactgcattactctgtctgggaattaaagagagctcatctgtggaaggcatcatcaccactgcaaatatcatagtgatgctctttgtcatctgcgctggtggatggctaggattcaggaatggctgggttggttataaagtgccagaaggttatttccctaatggtatcagcggagttctctctggatcagcaacccctcttcttcgcattcattggcttcgacacagttgctagtacggccgaggaggtgaagaatcctcgacgcgatcttccattgggtatgggcctgaccttatccctgtgttgcttcctatatatgatggtttctgctgttgtggtcggtttggtgccgtaccacgcgatggatccggacacccctatttnttctgtgtttgcgcgatatgggatgcagtgggccgagtatgttgtttccagtggagctgttcttgctcttgtggcatccttgataggtggtattcttccccagccaagaattataatggccatggctagagatggattgctcccgccactgttctcagatgttaatcgaaaaactcaagtgccaatcttgagcacagtcttaattggcacatgtgcttctgtcctggcctttttcatggatgtctcccaattggcagggatggtaagcgtgggaaccttattggcatttactgcggttgccatttctgttttagtagtaagatatgctcctccgtatgagatgccaatggaagtggcccttgcagtagcttcattctctgggcacttagagcatgatgagcaaaattcagaagatccttttagcaatgttcaagaagcgcttgatgtcagtgaggtagccagagaagtaaggcgacagaaagccattggaagcatagtgttgatatgcgttggagccatcatcttgatttctgcggtttctgtctcctttttgccattttatgtgcaaaggatcgcatgcactgtaggcgggctggcagtgttgggttcttctattgtgcttttgtgcattggacaagacaagaagttcttgggacaaactggaggtttcatgtgcccgttggtcccatttcttccagtctgttgcatcatggtcaacttatacctgcttatgaacgtcgggagtcacacgtggattcgtgtttccatatggctggtggctggggccctcatatacatcttctatggcatgaagcatagttcactggcaagcatggcctaccatcgcatatcacctttgtagttcaacgtttggctagaggtcttttgcattttgatagcagaaaatgagaacacgtggcggctacagaagctgtttctcaaaggtgtcgggggcgggggtttcttaggctatccgcaagcgttaacccc

SEQ ID NO: 14052 - protein, 375 aa, Zea mays subsp. mays
  peptide (1)..(375): Ceres Seq. ID no. 12436410
  misc_feature (27)..(256): Homolog of NCBI NO: 30696198 NR Description: expressed protein [Arabidopsis thaliana]
  misc_feature (228)..(369): Homolog of NCBI NO: 30696198 NR Description: expressed protein [Arabidopsis thaliana]
  misc_feature (27)..(256): Homolog of NCBI NO: 23306414 NR Description: Unknown protein [Arabidopsis thaliana]
  misc_feature (228)..(369): Homolog of NCBI NO: 23306414 NR Description: Unknown protein [Arabidopsis thaliana]
  misc_feature (27)..(223): Homolog of NCBI NO: 29244640 NR Description: putative cationic amino acid transporter [Oryza
  misc_feature (223)..(369): Homolog of NCBI NO: 29244640 NR Description: putative cationic amino acid transporter [Oryza
  misc_feature (27)..(369): Homolog of NCBI NO: 30693001 NR Description: cationic amino acid transporter -related protein thaliana] >gi|26450566|dbj|BAC42395.1| putative cationic amino
  misc_feature (27)..(369): Homolog of NCBI NO: 10178213 NR Description: cationic amino acid transporter-like protein
  misc_feature (27)..(369): Homolog of NCBI NO: 22330822 NR Description: putative cationic amino acid transporter; protein At3g03720.1, supported by cDNA: gi_17064863 [Arabidopsis >gi|17064864|gb|AAL32586.1| putative cationic amino acid
  misc_feature (27)..(374): Homolog of NCBI NO: 37534696 NR Description: putative cationic amino acid transporter -like
  misc_feature (89)..(89): Xaa is any aa, unknown or other
MAGLVIKCQKVISLMVSAEFSLDQQPLFFAFIGFDTVASTAEEVKNPRRDLPLGMGLTLSLCCFLYMMVSAVVVGLVPYHAMDPDTPIXSVFARYGMQWAEYVVSSGAVLALVASLIGGILPQPRIIMAMARDGLLPPLFSDVNRKTQVPILSTVLIGTCASVLAFFMDVSQLAGMVSVGTLLAFTAVAISVLVVRYAPPYEMPMEVALAVASFSGHLEHDEQNSEDPFSNVQEALDVSEVAREVRRQKAIGSIVLICVGAIILISAVSVSFLPFYVQRIACTVGGLAVLGSSIVLLCIGQDKKFLGQTGGFMCPLVPFLPVCCIMVNLYLLMNVGSHTWIRVSIWLVAGALIYIFYGMKHSSLASMAYHRISPL

SEQ ID NO: 14053 - protein, 361 aa, Zea mays subsp. mays
  peptide (1)..(361): Ceres Seq. ID no. 12436411
  misc_feature (13)..(360): Homolog of NCBI NO: 37534696 NR Description: putative cationic amino acid transporter -like
  misc_feature (13)..(242): Homolog of NCBI NO: 30696198 NR Description: expressed protein [Arabidopsis thaliana]
  misc_feature (214)..(355): Homolog of NCBI NO: 30696198 NR Description: expressed protein [Arabidopsis thaliana]
  misc_feature (13)..(242): Homolog of NCBI NO: 23306414 NR Description: Unknown protein [Arabidopsis thaliana]
  misc_feature (214)..(355): Homolog of NCBI NO: 23306414 NR Description: Unknown protein [Arabidopsis thaliana]
  misc_feature (13)..(209): Homolog of NCBI NO: 29244640 NR Description: putative cationic amino acid transporter [Oryza
  misc_feature (209)..(355): Homolog of NCBI NO: 29244640 NR Description: putative cationic amino acid transporter [Oryza
  misc_feature (13)..(355): Homolog of NCBI NO: 30693001 NR Description: cationic amino acid transporter -related protein thaliana] >gi|26450566|dbj|BAC42395.1| putative cationic amino
  misc_feature (13)..(355): Homolog of NCBI NO: 10178213 NR Description: cationic amino acid transporter-like protein
  misc_feature (13)..(355): Homolog of NCBI NO: 22330822 NR Description: putative cationic amino acid transporter; protein At3g03720.1, supported by cDNA: gi_17064863 [Arabidopsis >gi|17064864|gb|AAL32586.1| putative cationic amino acid
  misc_feature (75)..(75): Xaa is any aa, unknown or other
MVSAEFSLDQQPLFFAFIGFDTVASTAEEVKNPRRDLPLGMGLTLSLCCFLYMMVSAVVVGLVPYHAMDPDTPIXSVFARYGMQWAEYVVSSGAVLALVASLIGGILPQPRIIMAMARDGLLPPLFSDVNRKTQVPILSTVLIGTCASVLAFFMDVSQLAGMVSVGTLLAFTAVAISVLVVRYAPPYEMPMEVALAVASFSGHLEHDEQNSEDPFSNVQEALDVSEVAREVRRQKAIGSIVLICVGAIILISAVSVSFLPFYVQRIACTVGGLAVLGSSIVLLCIGQDKKFLGQTGGFMCPLVPFLPVCCIMVNLYLLMNVGSHTWIRVSIWLVAGALIYIFYGMKHSSLASMAYHRISPL

SEQ ID NO: 14054 - protein, 321 aa, Zea mays subsp. mays
  peptide (1)..(321): Ceres Seq. ID no. 12436412
  misc_feature (1)..(320): Homolog of NCBI NO: 37534696 NR Description: putative cationic amino acid transporter -like
  misc_feature (1)..(202): Homolog of NCBI NO: 30696198 NR Description: expressed protein [Arabidopsis thaliana]
  misc_feature (174)..(315): Homolog of NCBI NO: 30696198 NR Description: expressed protein [Arabidopsis thaliana]
  misc_feature (1)..(202): Homolog of NCBI NO: 23306414 NR Description: Unknown protein [Arabidopsis thaliana]
  misc_feature (174)..(315): Homolog of NCBI NO: 23306414 NR Description: Unknown protein [Arabidopsis thaliana]
  misc_feature (1)..(169): Homolog of NCBI NO: 29244640 NR Description: putative cationic amino acid transporter [Oryza
  misc_feature (169)..(315): Homolog of NCBI NO: 29244640 NR Description: putative cationic amino acid transporter [Oryza
  misc_feature (1)..(315): Homolog of NCBI NO: 30693001 NR Description: cationic amino acid transporter -related protein thaliana] >gi|26450566|dbj|BAC42395.1| putative cationic amino
  misc_feature (1)..(315): Homolog of NCBI NO: 10178213 NR Description: cationic amino acid transporter-like protein
  misc_feature (1)..(315): Homolog of NCBI NO: 22330822 NR Description: putative cationic amino acid transporter; protein At3g03720.1, supported by cDNA: gi_17064863 [Arabidopsis >gi|17064864|gb|AAL32586.1| putative cationic amino acid
  misc_feature (35)..(35): Xaa is any aa, unknown or other
MGLTLSLCCFLYMMVSAVVVGLVPYHAMDPDTPIXSVFARYGMQWAEYVVSSGAVLALVASLIGGILPQPRIIMAMARDGLLPPLFSDVNRKTQVPILSTVLIGTCASVLAFFMDVSQLAGMVSVGTLLAFTAVAISVLVVRYAPPYEMPMEVALAVASFSGHLEHDEQNSEDPFSNVQEALDVSEVAREVRRQKAIGSIVLICVGAIILISAVSVSFLPFYVQRIACTVGGLAVLGSSIVLLCIGQDKKFLGQTGGFMCPLVPFLPVCCIMVNLYLLMNVGSHTWIRVSIWLVAGALIYIFYGMKHSSLASMAYHRISPL

SEQ ID NO: 14055 - DNA, 2161 bp, Zea mays subsp. mays
  misc_feature (1)..(2161): Ceres Seq. ID no. 12435871
  misc_feature: MA Experiment ID: 20000492 Result: Down-regulated in Transcription
  misc_feature: MA Experiment 20000492 PARAMETER Experiment Name: Zm_Hybrid_Seed_Dev_P Parameter: DAP Value: 12
  misc_feature: MA Experiment 20000492 PARAMETER Experiment Name: Zm_Hybrid_Seed_Dev_P Parameter: Organism Value: Zea mays
  misc_feature: MA Experiment 20000492 PARAMETER Experiment Name: Zm_Hybrid_Seed_Dev_P Parameter: Plant Line Value: 35A19
  misc_feature: MA Experiment 20000492 PARAMETER Experiment Name: Zm_Hybrid_Seed_Dev_P Parameter: Tissue Value: Fert Kernel vs. Unfert Floret
  misc_feature: MA Experiment ID: 20000535 Result: Down-regulated in Transcription
  misc_feature: MA Experiment 20000535 PARAMETER Experiment Name: Zm_Hybrid_Seed_Dev_P Parameter: DAP Value: 30 vs. 12
  misc_feature: MA Experiment 20000535 PARAMETER Experiment Name: Zm_Hybrid_Seed_Dev_P Parameter: Organism Value: Zea mays
  misc_feature: MA Experiment 20000535 PARAMETER Experiment Name: Zm_Hybrid_Seed_Dev_P Parameter: Plant Line Value: 35A19
  misc_feature: MA Experiment 20000535 PARAMETER Experiment Name: Zm_Hybrid_Seed_Dev_P Parameter: Tissue Value: Embryo vs. Unfert Floret
cttttattagggtttttttgtctccttagatttgcgcctgttctcacctgtgcgcatactagtctctgcatcagagagtagagacctcggagccgatcttcaacacgcagattgggcagagctgcctgccggagggagagtggagagagagagagagagagagagagagagagctcaaggggggcaaaaggagtttttttttatccagcttgttagcttgattctctttgatccgggagagcagccgccagtccaactaatcctagctattggtgtgccggggctttgattgttctccagatccgagccacctgctgggtggactccaggaatccgagcacgaagttgacaggggagttctcagggaaaagttgcgcaggggaggaaggaagagcctgaaagggcggtgcggagagaaagactataagagcgacctgggtcccttgaggatgccgtcaagaaaccgcgtggagaggagggcgatgagatgagggatgctggccgcggtgatggactatttcagctcctgctggggcccgcgatcgggtgacgggcacagggggaagggccccgacgccgccggccggcaggacggtctcctctggtacaaggacgccggtcagctcgtcactggggagttctccatggccgtggtgcaggccaaccagctgcttgaggaccagagccaagtggagtccggatcgctctccctggctgacccgggcccgcagggcaccttcgtcggcgtctatgatggccatggcggtcctgagacgtcccggttcatcaatgaccacctcttcaaccatctcagaaggtttgcaactgagcacaagtttatgtcagcggacgtgatccggaaagctttccaagcaactgaggagggctttctttctctagtcagcaaggaatggtctttgaagcctcagattgcttcagtgggctcctgctgccttgttggtgtaatctgtgctgggactctctatgttgcaaacctgggtgactcacgtgcagttcttggaaggcttgttaaggcaactggagaggtcgtggccatgcagttgtcatcggagcacaatgcatgctatgaggaagttagacaagaactgcagtcatcacatcctgacgatccacatattgtggttctcaaacacaatgtttggcgagtgaagggtctcatccagatctcaagatctattggagatgtatatctaaagaaaccagagtataacagagaaccacttcacagcaagtttcggcttcgagaaaccttccagaggccgatccttagttctgaacctcaaattactgaacatcgaatacagccaaatgatcaatttgttatatttgcttctgatggtctatgggagcacctcaccaataaggaagcagttgaccttgtccaaagtagtccacgcaatggaattgctcggagactagtgaaagcggcgatgcaagaagctgccaagaagagggagatgagatactcagacctcaagaagatcgaccgtggtgtgagaaggcatttcctcgacgatataacggtcgtcgtggtattccttgatttgaatgccatgagcaaagctagctggagcaaaagcccctcggtttctctccgagggggcggtgtcaccgtccctgccaagtccctcgcacctttctcagctccggcacggctgaacagcacctactgaagttgctaccactcttgaaaggaagaacacggtgcagatctgcagtggtgagagaaaaaaaaaacagcaatcaagtgtagcgttacacttacacctgctgtgctgttgctctttgcaaaactactgtctagactcctggtaattagtgtactgatagcgaggtaaaaaaaagttagattatttgttagcagcggcagtgatttgacatctaaggaacaacaacacggtgcccaccgattctgctatcctgatggctcgcggcagcctggctggtcggcacacgacacgaagtgaagctgttttactggcggcatctggctttgttttctcatgggacagtgatccacaagagtaagggatcagctcaatccaaagtcaatagatgttccttataaaaaatagaggtacagatgttcccatcggctatgtgtatttggggaaaaaatcaatataaggggtgtttggtg

SEQ ID NO: 14056 - protein, 399 aa, Zea mays subsp. mays
  peptide (1)..(399): Ceres Seq. ID no. 12435872
  misc_feature (47)..(328): Pfam Name: Protein phosphatase 2C Pfam Description: Protein phosphatase 2C
  misc_feature (1)..(392): Homolog of NCBI NO: 37536574 NR Description: putative protein phosphatase 2C [Oryza sativa
  misc_feature (6)..(392): Homolog of NCBI NO: 13357263 NR Description: putative protein phosphatase 2C [Oryza sativa
  misc_feature (1)..(398): Homolog of NCBI NO: 11282004 NR Description: protein phosphatase 2C homolog [imported] - ice plant >gi|4206122|gb|AAD11430.1| protein phosphatase 2C
  misc_feature (1)..(398): Homolog of NCBI NO: 7768153 NR Description: protein phosphatase 2C (PP2C) [Fagus sylvatica]
  misc_feature (1)..(391): Homolog of NCBI NO: 18855039 NR Description: putative protein phosphatase [Oryza sativa]
  misc_feature (1)..(384): Homolog of NCBI NO: 20340237 NR Description: protein phosphatase 2c-like protein
  misc_feature (1)..(384): Homolog of NCBI NO: 11282001 NR Description: protein phosphatase 2C-like protein - Arabidopsis
  misc_feature (1)..(384): Homolog of NCBI NO: 15239244 NR Description: protein phosphatase 2C-like protein; protein id:
  misc_feature (1)..(394): Homolog of NCBI NO: 22329238 NR Description: putative protein phosphatase-2c; protein id:
  misc_feature (1)..(394): Homolog of NCBI NO: 17064756 NR Description: putative protein phosphatase-2c [Arabidopsis
MLAAVMDYFSSCWGPRSGDGHRGKGPDAAGRQDGLLWYKDAGQLVTGEFSMAVVQANQLLEDQSQVESGSLSLADPGPQGTFVGVYDGHGGPETSRFINDHLFNHLRRFATEHKFMSADVIRKAFQATEEGFLSLVSKEWSLKPQIASVGSCCLVGVICAGTLYVANLGDSRAVLGRLVKATGEVVAMQLSSEHNACYEEVRQELQSSHPDDPHIVVLKHNVWRVKGLIQISRSIGDVYLKKPEYNREPLHSKFRLRETFQRPILSSEPQITEHRIQPNDQFVIFASDGLWEHLTNKEAVDLVQSSPRNGIARRLVKAAMQEAAKKREMRYSDLKKIDRGVRRHFLDDITVVVVFLDLNAMSKASWSKSPSVSLRGGGVTVPAKSLAPFSAPARLNSTY

SEQ ID NO: 14057 - protein, 394 aa, Zea mays subsp. mays
  peptide (1)..(394): Ceres Seq. ID no. 12435873
  misc_feature (42)..(323): Pfam Name: Protein phosphatase 2C Pfam Description: Protein phosphatase 2C
  misc_feature (1)..(387): Homolog of NCBI NO: 37536574 NR Description: putative protein phosphatase 2C [Oryza sativa
  misc_feature (1)..(387): Homolog of NCBI NO: 13357263 NR Description: putative protein phosphatase 2C [Oryza sativa
  misc_feature (1)..(393): Homolog of NCBI NO: 11282004 NR Description: protein phosphatase 2C homolog [imported] - ice plant >gi|4206122|gb|AAD11430.1| protein phosphatase 2C
  misc_feature (1)..(393): Homolog of NCBI NO: 7768153 NR Description: protein phosphatase 2C (PP2C) [Fagus sylvatica]
  misc_feature (1)..(386): Homolog of NCBI NO: 18855039 NR Description: putative protein phosphatase [Oryza sativa]
  misc_feature (1)..(379): Homolog of NCBI NO: 20340237 NR Description: protein phosphatase 2c-like protein
  misc_feature (1)..(379): Homolog of NCBI NO: 11282001 NR Description: protein phosphatase 2C-like protein - Arabidopsis
  misc_feature (1)..(379): Homolog of NCBI NO: 15239244 NR Description: protein phosphatase 2C-like protein; protein id:
  misc_feature (1)..(389): Homolog of NCBI NO: 22329238 NR Description: putative protein phosphatase-2c; protein id:
  misc_feature (1)..(389): Homolog of NCBI NO: 17064756 NR Description: putative protein phosphatase-2c [Arabidopsis
MDYFSSCWGPRSGDGHRGKGPDAAGRQDGLLWYKDAGQLVTGEFSMAVVQANQLLEDQSQVESGSLSLADPGPQGTFVGVYDGHGGPETSRFINDHLFNHLRRFATEHKFMSADVIRKAFQATEEGFLSLVSKEWSLKPQIASVGSCCLVGVICAGTLYVANLGDSRAVLGRLVKATGEVVAMQLSSEHNACYEEVRQELQSSHPDDPHIVVLKHNVWRVKGLIQISRSIGDVYLKKPEYNREPLHSKFRLRETFQRPILSSEPQITEHRIQPNDQFVIFASDGLWEHLTNKEAVDLVQSSPRNGIARRLVKAAMQEAAKKREMRYSDLKKIDRGVRRHFLDDITVVVVFLDLNAMSKASWSKSPSVSLRGGGVTVPAKSLAPFSAPARLNSTY

SEQ ID NO: 14058 - protein, 349 aa, Zea mays subsp. mays
  peptide (1)..(349): Ceres Seq. ID no. 12435874
  misc_feature (1)..(278): Pfam Name: Protein phosphatase 2C Pfam Description: Protein phosphatase 2C
  misc_feature (1)..(342): Homolog of NCBI NO: 37536574 NR Description: putative protein phosphatase 2C [Oryza sativa
  misc_feature (1)..(342): Homolog of NCBI NO: 13357263 NR Description: putative protein phosphatase 2C [Oryza sativa
  misc_feature (1)..(348): Homolog of NCBI NO: 11282004 NR Description: protein phosphatase 2C homolog [imported] - ice plant >gi|4206122|gb|AAD11430.1| protein phosphatase 2C
  misc_feature (1)..(348): Homolog of NCBI NO: 7768153 NR Description: protein phosphatase 2C (PP2C) [Fagus sylvatica]
  misc_feature (1)..(341): Homolog of NCBI NO: 18855039 NR Description: putative protein phosphatase [Oryza sativa]
  misc_feature (1)..(334): Homolog of NCBI NO: 20340237 NR Description: protein phosphatase 2c-like protein
  misc_feature (1)..(334): Homolog of NCBI NO: 11282001 NR Description: protein phosphatase 2C-like protein - Arabidopsis
  misc_feature (1)..(334): Homolog of NCBI NO: 15239244 NR Description: protein phosphatase 2C-like protein; protein id:
  misc_feature (1)..(344): Homolog of NCBI NO: 22329238 NR Description: putative protein phosphatase-2c; protein id:
  misc_feature (1)..(344): Homolog of NCBI NO: 17064756 NR Description: putative protein phosphatase-2c [Arabidopsis
MAVVQANQLLEDQSQVESGSLSLADPGPQGTFVGVYDGHGGPETSRFINDHLFNHLRRFATEHKFMSADVIRKAFQATEEGFLSLVSKEWSLKPQIASVGSCCLVGVICAGTLYVANLGDSRAVLGRLVKATGEVVAMQLSSEHNACYEEVRQELQSSHPDDPHIVVLKHNVWRVKGLIQISRSIGDVYLKKPEYNREPLHSKFRLRETFQRPILSSEPQITEHRIQPNDQFVIFASDGLWEHLTNKEAVDLVQSSPRNGIARRLVKAAMQEAAKKREMRYSDLKKIDRGVRRHFLDDITVVVVFLDLNAMSKASWSKSPSVSLRGGGVTVPAKSLAPFSAPARLNSTY

SEQ ID NO: 14059 - DNA, 450 bp, Zea mays subsp. mays
  misc_feature (1)..(450): Ceres Seq. ID no. 13635772
  misc_feature: MA Experiment ID: 20000492 Result: Up-regulated in Transcription
  misc_feature: MA Experiment 20000492 PARAMETER Experiment Name: Zm_Hybrid_Seed_Dev_P Parameter: DAP Value: 12
  misc_feature: MA Experiment 20000492 PARAMETER Experiment Name: Zm_Hybrid_Seed_Dev_P Parameter: Organism Value: Zea mays
  misc_feature: MA Experiment 20000492 PARAMETER Experiment Name: Zm_Hybrid_Seed_Dev_P Parameter: Plant Line Value: 35A19
  misc_feature: MA Experiment 20000492 PARAMETER Experiment Name: Zm_Hybrid_Seed_Dev_P Parameter: Tissue Value: Fert Kernel vs. Unfert Floret
gcttcatttaacgctgtcgctttcgctttcgcttccactcgcactccatgggtgcgcgggcgacgatgggatgttcgcccttgctgcccttccaagcgctctggctcacagcggccgttgtcgcggcgctcgcgctcgcggccggcgcgcagccgtcgccgtcgctgtcgccggggttctacgacgcgacgtgcccggggctgcagcccatcgtgcgccgcggcgtggcgcgcgccgtccgggcggagccgcgcatgggggcgtccctcctccgcctcttcttccacgactgcttcgtcaatggctgcgacgcctccgtcttgctggacgacgtgcccggtaacttcaccggggagaagaacgcggggcccaacgccaactcgctgcgcgggtacgaggtcatcgacgccatcaaggcccaggtggaggcgtcctgcaaggccaccgtct

SEQ ID NO: 14060 - protein, 150 aa, Zea mays subsp. mays
  peptide (1)..(150): Ceres Seq. ID no. 13635773
ASFNAVAFAFASTRTPWVRGRRWDVRPCCPSKRSGSQRPLSRRSRSRPARSRRRRCRRGSTTRRARGCSPSCAAAWRAPSGRSRAWGRPSSASSSTTASSMAATPPSCWTTCPVTSPGRRTRGPTPTRCAGTRSSTPSRPRWRRPARPPS

SEQ ID NO: 14061 - protein, 134 aa, Zea mays subsp. mays
  peptide (1)..(134): Ceres Seq. ID no. 13635774
  misc_feature (56)..(133): Pfam Name: Peroxidase Pfam Description: Peroxidase
  misc_feature (56)..(133): Pfam Name: Peroxidase Pfam Description: Peroxidase
  misc_feature (22)..(133): Homolog of NCBI NO: 34903770 NR Description: unnamed protein product [Oryza sativa (japonica group)] >gi|7340877|dbj|BAA92967.1| unnamed protein product
  misc_feature (20)..(133): Homolog of NCBI NO: 5453379 NR Description: bacterial-induced peroxidase precursor [Gossypium
  misc_feature (17)..(133): Homolog of NCBI NO: 2117619 NR Description: peroxidase (EC 1.11.1.7) 4 precursor - wheat
  misc_feature (20)..(133): Homolog of NCBI NO: 34393249 NR Description: putative peroxidase precursor [Oryza sativa
  misc_feature (22)..(133): Homolog of NCBI NO: 15237190 NR Description: peroxidase, putative [Arabidopsis thaliana] Peroxidase 68 precursor (Atperox P68) >gi|8777341|dbj|BAA96931.1| [Arabidopsis thaliana] >gi|26451590|dbj|BAC42892.1| putative
  misc_feature (20)..(133): Homolog of NCBI NO: 5453379 NR Description: bacterial-induced peroxidase precursor [Gossypium
  misc_feature (20)..(133): Homolog of NCBI NO: 34393249 NR Description: putative peroxidase precursor [Oryza sativa
  misc_feature (31)..(133): Homolog of NCBI NO: 34015359 NR Description: putative peroxidase [Oryza sativa (japonica
  misc_feature (27)..(133): Homolog of NCBI NO: 7433049 NR Description: peroxidase (EC 1.11.1.7) - flax (fragment)
  misc_feature (40)..(130): Homolog of NCBI NO: 4760704 NR Description: peroxidase 3 [Scutellaria baicalensis]
  misc_feature (20)..(133): Homolog of NCBI NO: 34393250 NR Description: peroxidase [Oryza sativa (japonica
  misc_feature (20)..(133): Homolog of NCBI NO: 2429288 NR Description: peroxidase [Oryza sativa]
  misc_feature (22)..(133): Homolog of NCBI NO: 15237190 NR Description: peroxidase, putative [Arabidopsis thaliana] Peroxidase 68 precursor (Atperox P68) >gi|8777341|dbj|BAA96931.1| [Arabidopsis thaliana] >gi|26451590|dbj|BAC42892.1| putative
  misc_feature (17)..(133): Homolog of NCBI NO: 2117619 NR Description: peroxidase (EC 1.11.1.7) 4 precursor - wheat
  misc_feature (22)..(133): Homolog of NCBI NO: 34903770 NR Description: unnamed protein product [Oryza sativa (japonica group)] >gi|7340877|dbj|BAA92967.1| unnamed protein product
  misc_feature (20)..(133): Homolog of NCBI NO: 2429288 NR Description: peroxidase [Oryza sativa]
  misc_feature (20)..(133): Homolog of NCBI NO: 34393250 NR Description: peroxidase [Oryza sativa (japonica
  misc_feature (40)..(130): Homolog of NCBI NO: 4760704 NR Description: peroxidase 3 [Scutellaria baicalensis]
  misc_feature (27)..(133): Homolog of NCBI NO: 7433049 NR Description: peroxidase (EC 1.11.1.7) - flax (fragment)
  misc_feature (31)..(133): Homolog of NCBI NO: 34015359 NR Description: putative peroxidase [Oryza sativa (japonica
MGARATMGCSPLLPFQALWLTAAVVAALALAAGAQPSPSLSPGFYDATCPGLQPIVRRGVARAVRAEPRMGASLLRLFFHDCFVNGCDASVLLDDVPGNFTGEKNAGPNANSLRGYEVIDAIKAQVEASCKATV

SEQ ID NO: 14062 - protein, 128 aa, Zea mays subsp. mays
  peptide (1)..(128): Ceres Seq. ID no. 13635775
  misc_feature (50)..(127): Pfam Name: Peroxidase Pfam Description: Peroxidase
  misc_feature (50)..(127): Pfam Name: Peroxidase Pfam Description: Peroxidase
  misc_feature (16)..(127): Homolog of NCBI NO: 34903770 NR Description: unnamed protein product [Oryza sativa (japonica group)] >gi|7340877|dbj|BAA92967.1| unnamed protein product
  misc_feature (14)..(127): Homolog of NCBI NO: 5453379 NR Description: bacterial-induced peroxidase precursor [Gossypium
  misc_feature (11)..(127): Homolog of NCBI NO: 2117619 NR Description: peroxidase (EC 1.11.1.7) 4 precursor - wheat
  misc_feature (14)..(127): Homolog of NCBI NO: 34393249 NR Description: putative peroxidase precursor [Oryza sativa
  misc_feature (16)..(127): Homolog of NCBI NO: 15237190 NR Description: peroxidase, putative [Arabidopsis thaliana] Peroxidase 68 precursor (Atperox P68) >gi|8777341|dbj|BAA96931.1| [Arabidopsis thaliana] >gi|26451590|dbj|BAC42892.1| putative
  misc_feature (14)..(127): Homolog of NCBI NO: 5453379 NR Description: bacterial-induced peroxidase precursor [Gossypium
  misc_feature (14)..(127): Homolog of NCBI NO: 34393249 NR Description: putative peroxidase precursor [Oryza sativa
  misc_feature (25)..(127): Homolog of NCBI NO: 34015359 NR Description: putative peroxidase [Oryza sativa (japonica
  misc_feature (21)..(127): Homolog of NCBI NO: 7433049 NR Description: peroxidase (EC 1.11.1.7) - flax (fragment)
  misc_feature (34)..(124): Homolog of NCBI NO: 4760704 NR Description: peroxidase 3 [Scutellaria baicalensis]
  misc_feature (14)..(127): Homolog of NCBI NO: 34393250 NR Description: peroxidase [Oryza sativa (japonica
  misc_feature (14)..(127): Homolog of NCBI NO: 2429288 NR Description: peroxidase [Oryza sativa]
  misc_feature (16)..(127): Homolog of NCBI NO: 15237190 NR Description: peroxidase, putative [Arabidopsis thaliana] Peroxidase 68 precursor (Atperox P68) >gi|8777341|dbj|BAA96931.1| [Arabidopsis thaliana] >gi|26451590|dbj|BAC42892.1| putative
  misc_feature (11)..(127): Homolog of NCBI NO: 2117619 NR Description: peroxidase (EC 1.11.1.7) 4 precursor - wheat
  misc_feature (16)..(127): Homolog of NCBI NO: 34903770 NR Description: unnamed protein product [Oryza sativa (japonica group)] >gi|7340877|dbj|BAA92967.1| unnamed protein product
  misc_feature (14)..(127): Homolog of NCBI NO: 2429288 NR Description: peroxidase [Oryza sativa]
  misc_feature (14)..(127): Homolog of NCBI NO: 34393250 NR Description: peroxidase [Oryza sativa (japonica
  misc_feature (34)..(124): Homolog of NCBI NO: 4760704 NR Description: peroxidase 3 [Scutellaria baicalensis]
  misc_feature (21)..(127): Homolog of NCBI NO: 7433049 NR Description: peroxidase (EC 1.11.1.7) - flax (fragment)
  misc_feature (25)..(127): Homolog of NCBI NO: 34015359 NR Description: putative peroxidase [Oryza sativa (japonica
MGCSPLLPFQALWLTAAVVAALALAAGAQPSPSLSPGFYDATCPGLQPIVRRGVARAVRAEPRMGASLLRLFFHDCFVNGCDASVLLDDVPGNFTGEKNAGPNANSLRGYEVIDAIKAQVEASCKATV

SEQ ID NO: 14063 - DNA, 1057 bp, Zea mays subsp. mays
  misc_feature (1)..(1057): Ceres Seq. ID no. 12435854
  misc_feature: MA Experiment ID: 108529 Result: Up-regulated in Transcription
  misc_feature: MA Experiment 108529 PARAMETER Experiment Name: Zm_Imbibed_Seeds_P Parameter: Age (day) Value: 5 vs. 2
  misc_feature: MA Experiment 108529 PARAMETER Experiment Name: Zm_Imbibed_Seeds_P Parameter: Organism Value: Zea mays
  misc_feature: MA Experiment 108529 PARAMETER Experiment Name: Zm_Imbibed_Seeds_P Parameter: Plant Line Value: 35A19
  misc_feature: MA Experiment 108529 PARAMETER Experiment Name: Zm_Imbibed_Seeds_P Parameter: Tissue Value: Roots vs. Embryo
  misc_feature: MA Experiment ID: 108530 Result: Down-regulated in Transcription
  misc_feature: MA Experiment 108530 PARAMETER Experiment Name: Zm_Imbibed_Seeds_P Parameter: Age (day) Value: 6 vs. 2
  misc_feature: MA Experiment 108530 PARAMETER Experiment Name: Zm_Imbibed_Seeds_P Parameter: Organism Value: Zea mays
  misc_feature: MA Experiment 108530 PARAMETER Experiment Name: Zm_Imbibed_Seeds_P Parameter: Plant Line Value: 35A19
  misc_feature: MA Experiment 108530 PARAMETER Experiment Name: Zm_Imbibed_Seeds_P Parameter: Tissue Value: Aerial vs. Embryo
  misc_feature: MA Experiment ID: 108535 Result: Down-regulated in Transcription
  misc_feature: MA Experiment 108535 PARAMETER Experiment Name: Zm_Meristem_P Parameter: Age (day) Value: 8
  misc_feature: MA Experiment 108535 PARAMETER Experiment Name: Zm_Meristem_P Parameter: Organism Value: Zea mays
  misc_feature: MA Experiment 108535 PARAMETER Experiment Name: Zm_Meristem_P Parameter: Plant Line Value: 35A19
  misc_feature: MA Experiment 108535 PARAMETER Experiment Name: Zm_Meristem_P Parameter: Tissue Value: Root Meristem vs. Above Root Meristem
  misc_feature: MA Experiment ID: 108545 Result: Down-regulated in Transcription
  misc_feature: MA Experiment 108545 PARAMETER Experiment Name: Zm_Imbibed_Seeds_P Parameter: Age (day) Value: 3 vs. 2
  misc_feature: MA Experiment 108545 PARAMETER Experiment Name: Zm_Imbibed_Seeds_P Parameter: Organism Value: Zea mays
  misc_feature: MA Experiment 108545 PARAMETER Experiment Name: Zm_Imbibed_Seeds_P Parameter: Plant Line Value: 35A19
  misc_feature: MA Experiment 108545 PARAMETER Experiment Name: Zm_Imbibed_Seeds_P Parameter: Tissue Value: Aerial vs. Embryo
  misc_feature: MA Experiment ID: 108688 Result: Down-regulated in Transcription
  misc_feature: MA Experiment 108688 PARAMETER Experiment Name: Zm_Embryos-Flowers__P Parameter: Tissue Value: Immature Flowers vs. Aerial+
aacgaagccacaagcagcgccgcgagccacagctagcaccaccaccttgcaccgcacccgcaccgagacgaacagatctatcgatcgatagctagatccatggctgccggcggcgacgacaccaccatcgcgcaggtccacagcggcatcgacagcagcaacaagacgctgctcaagagcgaggccctctacaagtacgtgctggacacgtcggtgctgccgcacgagccggagagcatgcgtgagctgcggctggtgaccgacaagcacgagtgggggttcatgcagtcgtccccggacgaggcgtcgctgctgcggatgctgatcaagctgagcggcgcgcggcggacgctggaggtgggcgtgttcacgggctactcgctgctggcgacggcgctggcgctgcccgccgacggcaaggtcatcgcattcgacgtgagccgcgagtactacgacatcggccgccccttcatcgagcgcgccggggtggcgggcaaggtggacttccgggagggcccggcgctggagcagctggacgagctcctcgccgacccggccaaccacggcgccttcgacttcgcgttcgtcgacgccgacaagcctaactacgtccggtaccacgagcagctgctccgcctggtgcgcgtcgggggtaccgtcgtgtacgacaacacgctgtgggccggtactgtggcgcttccccccgacgcgccgctcagcgacctcgaccgcaggttctccgccgccatcagggaactcaacgtccggctttctcaggatccccgcgtcgaggtctgccagctcgccatcgccgacggcgtcaccatctgccgccgcgtcgtctgatgtgatgatgatccgacgaccaagatcgtatatcattcgctcgtcgtctctgtcatctttcaactgcctgcccgctgccgtcgtcaactaataatgcatggttctgctggttctttttttttattttcttttgtgcttgcattgtgtgtgttgagttgaacatcccccgcgatgtactgcaacaactggnatgcaatgcaacatcatgcgt

SEQ ID NO: 14064 - protein, 248 aa, Zea mays subsp. mays
  peptide (1)..(248): Ceres Seq. ID no. 12435855
  misc_feature (35)..(247): Pfam Name: O-methyltransferase Pfam Description: O-methyltransferase
  misc_feature (1)..(248): Homolog of NCBI NO: 5257275 NR Description: ESTs AU030740(E60171),AU030739(E60171) correspond
  misc_feature (1)..(247): Homolog of NCBI NO: 15235213 NR Description: caffeoyl-CoA 3-O-methyltransferase; protein id: supported by cDNA: 8049., supported by cDNA: gi_15982892, by cDNA: gi_17065107, supported by cDNA: gi_20148256 [Arabidopsis
  misc_feature (1)..(247): Homolog of NCBI NO: 30580385 NR Description: Caffeoyl-CoA O-methyltransferase 1
  misc_feature (1)..(247): Homolog of NCBI NO: 37221545 NR Description: caffeoyl-CoA 3-O-methyltransferase 1 [Zea mays]
  misc_feature (1)..(247): Homolog of NCBI NO: 21595512 NR Description: caffeoyl-CoA O-methyltransferase-like protein
  misc_feature (1)..(248): Homolog of NCBI NO: 40363753 NR Description: putative caffeoyl CoA O-methyltransferase
  misc_feature (14)..(247): Homolog of NCBI NO: 30580384 NR Description: Caffeoyl-CoA O-methyltransferase 2
  misc_feature (21)..(247): Homolog of NCBI NO: 30580324 NR Description: Caffeoyl-CoA O-methyltransferase 5
  misc_feature (21)..(247): Homolog of NCBI NO: 2511737 NR Description: caffeoyl-CoA 3-O-methyltransferase 5 [Nicotiana
  misc_feature (1)..(247): Homolog of NCBI NO: 30580381 NR Description: Caffeoyl-CoA O-methyltransferase 2
MAAGGDDTTIAQVHSGIDSSNKTLLKSEALYKYVLDTSVLPHEPESMRELRLVTDKHEWGFMQSSPDEASLLRMLIKLSGARRTLEVGVFTGYSLLATALALPADGKVIAFDVSREYYDIGRPFIERAGVAGKVDFREGPALEQLDELLADPANHGAFDFAFVDADKPNYVRYHEQLLRLVRVGGTVVYDNTLWAGTVALPPDAPLSDLDRRFSAAIRELNVRLSQDPRVEVCQLAIADGVTICRRVV

SEQ ID NO: 14065 - protein, 202 aa, Zea mays subsp. mays
  peptide (1)..(202): Ceres Seq. ID no. 12435856
  misc_feature (1)..(201): Pfam Name: O-methyltransferase Pfam Description: O-methyltransferase
  misc_feature (1)..(202): Homolog of NCBI NO: 5257275 NR Description: ESTs AU030740(E60171),AU030739(E60171) correspond
  misc_feature (1)..(201): Homolog of NCBI NO: 15235213 NR Description: caffeoyl-CoA 3-O-methyltransferase; protein id: supported by cDNA: 8049., supported by cDNA: gi_15982892, by cDNA: gi_17065107, supported by cDNA: gi_20148256 [Arabidopsis
  misc_feature (1)..(201): Homolog of NCBI NO: 30580385 NR Description: Caffeoyl-CoA O-methyltransferase 1
  misc_feature (1)..(201): Homolog of NCBI NO: 37221545 NR Description: caffeoyl-CoA 3-O-methyltransferase 1 [Zea mays]
  misc_feature (1)..(201): Homolog of NCBI NO: 21595512 NR Description: caffeoyl-CoA O-methyltransferase-like protein
  misc_feature (1)..(202): Homolog of NCBI NO: 40363753 NR Description: putative caffeoyl CoA O-methyltransferase
  misc_feature (1)..(201): Homolog of NCBI NO: 30580384 NR Description: Caffeoyl-CoA O-methyltransferase 2
  misc_feature (1)..(201): Homolog of NCBI NO: 30580324 NR Description: Caffeoyl-CoA O-methyltransferase 5
  misc_feature (1)..(201): Homolog of NCBI NO: 2511737 NR Description: caffeoyl-CoA 3-O-methyltransferase 5 [Nicotiana
  misc_feature (1)..(201): Homolog of NCBI NO: 30580381 NR Description: Caffeoyl-CoA O-methyltransferase 2
MRELRLVTDKHEWGFMQSSPDEASLLRMLIKLSGARRTLEVGVFTGYSLLATALALPADGKVIAFDVSREYYDIGRPFIERAGVAGKVDFREGPALEQLDELLADPANHGAFDFAFVDADKPNYVRYHEQLLRLVRVGGTVVYDNTLWAGTVALPPDAPLSDLDRRFSAAIRELNVRLSQDPRVEVCQLAIADGVTICRRVV

SEQ ID NO: 14066 - protein, 187 aa, Zea mays subsp. mays
  peptide (1)..(187): Ceres Seq. ID no. 12435857
  misc_feature (1)..(186): Pfam Name: O-methyltransferase Pfam Description: O-methyltransferase
  misc_feature (1)..(187): Homolog of NCBI NO: 5257275 NR Description: ESTs AU030740(E60171),AU030739(E60171) correspond
  misc_feature (1)..(186): Homolog of NCBI NO: 15235213 NR Description: caffeoyl-CoA 3-O-methyltransferase; protein id: supported by cDNA: 8049., supported by cDNA: gi_15982892, by cDNA: gi_17065107, supported by cDNA: gi_20148256 [Arabidopsis
  misc_feature (1)..(186): Homolog of NCBI NO: 30580385 NR Description: Caffeoyl-CoA O-methyltransferase 1
  misc_feature (1)..(186): Homolog of NCBI NO: 37221545 NR Description: caffeoyl-CoA 3-O-methyltransferase 1 [Zea mays]
  misc_feature (1)..(186): Homolog of NCBI NO: 21595512 NR Description: caffeoyl-CoA O-methyltransferase-like protein
  misc_feature (1)..(187): Homolog of NCBI NO: 40363753 NR Description: putative caffeoyl CoA O-methyltransferase
  misc_feature (1)..(186): Homolog of NCBI NO: 30580384 NR Description: Caffeoyl-CoA O-methyltransferase 2
  misc_feature (1)..(186): Homolog of NCBI NO: 30580324 NR Description: Caffeoyl-CoA O-methyltransferase 5
  misc_feature (1)..(186): Homolog of NCBI NO: 2511737 NR Description: caffeoyl-CoA 3-O-methyltransferase 5 [Nicotiana
  misc_feature (1)..(186): Homolog of NCBI NO: 30580381 NR Description: Caffeoyl-CoA O-methyltransferase 2
MQSSPDEASLLRMLIKLSGARRTLEVGVFTGYSLLATALALPADGKVIAFDVSREYYDIGRPFIERAGVAGKVDFREGPALEQLDELLADPANHGAFDFAFVDADKPNYVRYHEQLLRLVRVGGTVVYDNTLWAGTVALPPDAPLSDLDRRFSAAIRELNVRLSQDPRVEVCQLAIADGVTICRRVV

SEQ ID NO: 14067 - DNA, 999 bp, Zea mays subsp. mays
  misc_feature (1)..(999): Ceres Seq. ID no. 13624677
  misc_feature: MA Experiment ID: 20000535 Result: Up-regulated in Transcription
  misc_feature: MA Experiment 20000535 PARAMETER Experiment Name: Zm_Hybrid_Seed_Dev_P Parameter: DAP Value: 30 vs. 12
  misc_feature: MA Experiment 20000535 PARAMETER Experiment Name: Zm_Hybrid_Seed_Dev_P Parameter: Organism Value: Zea mays
  misc_feature: MA Experiment 20000535 PARAMETER Experiment Name: Zm_Hybrid_Seed_Dev_P Parameter: Plant Line Value: 35A19
  misc_feature: MA Experiment 20000535 PARAMETER Experiment Name: Zm_Hybrid_Seed_Dev_P Parameter: Tissue Value: Embryo vs. Unfert Floret
acccatcacacgacaaaatccctcaccctcgtgagtcctgacgtcctcgcccgtgctcgcagttggtagggttctagccatggcgtggagcgccgccgccgtctccaggttcgcagccgcctccccacccgcggctagaacccgaccaactgctgaaacacgtgcaattctggacctcagtgtccagtattggacaagtagagggtgggcatatgtcgatgtcaactatggaggaagcactggttatggaagagagtatcgggagagactattgaacaaatggggtattgttgatgttgatgattgctgcggctgtgcgagattcctggtggagagtgggaaagtagatgggcagcgcctttgtattactggtagatcagcaggtggatacactactttagcttcacttgcattcagagacacgttcaaggctggagcttctctctatggtgttggggacttgactctgttgagagcggagacgcacaaatttgagtctcattatatggacaatcttgtaggaaatgaaagagcttactacgagagatcaccaatcaactttgtcaaccagtttacttgtccagtcattttgtttcaagggttggaggataaggttgtgccaccagatcaggcacgcaaaatatacagtgccttgaaagagaaaggtttgcctgttgctttggttgaatatgaaggagagcagcatgggttccgtaaggcggagaacatcaagttcacctagatctctctgatctggtctgttctgccctccctccgtcatcgtcgactccccctgcgtccgttcctttggatctgaataagatggtggtgatctgagtggtggtcttagtttatcatgtatcgctcgcagtttaatttagcggtttaggtgtggatctgtgaaccccatggcgcctctgcttgattcgtgtttcacctgttatgttctgagattcatgataatgctatgagaactgaaattcccgtttcatgcttctc

SEQ ID NO: 14068 - protein, 220 aa, Zea mays subsp. mays
  peptide (1)..(220): Ceres Seq. ID no. 13624678
  misc_feature (41)..(105): Pfam Name: Prolyl oligopeptidase family Pfam Description: Prolyl oligopeptidase family
  misc_feature (23)..(212): Homolog of NCBI NO: 33864859 NR Description: putative peptidase [Synechococcus sp. WH 8102]
  misc_feature (2)..(218): Homolog of NCBI NO: 33863869 NR Description: Dienelactone hydrolase [Prochlorococcus marinus MIT 9313] >gi|33635452|emb|CAE21777.1| Dienelactone hydrolase
  misc_feature (23)..(220): Homolog of NCBI NO: 15239342 NR Description: acyl-peptide hydrolase-related [Arabidopsis
  misc_feature (23)..(218): Homolog of NCBI NO: 37521039 NR Description: probable peptidase [Gloeobacter violaceus]
  misc_feature (23)..(217): Homolog of NCBI NO: 22972830 NR Description: hypothetical protein [Chloroflexus aurantiacus]
  misc_feature (23)..(218): Homolog of NCBI NO: 29654820 NR Description: prolyl oligopeptidase family protein [Coxiella RSA 493] >gi|29542088|gb|AAO91026.1| prolyl oligopeptidase family
  misc_feature (23)..(218): Homolog of NCBI NO: 16331709 NR Description: hypothetical protein [Synechocystis sp. PCC 6803]
  misc_feature (23)..(218): Homolog of NCBI NO: 23043087 NR Description: hypothetical protein [Trichodesmium erythraeum
  misc_feature (23)..(218): Homolog of NCBI NO: 23029170 NR Description: hypothetical protein [Microbulbifer degradans
  misc_feature (23)..(217): Homolog of NCBI NO: 22299228 NR Description: ORF_ID:tlr1685~probable peptidase
MAWSAAAVSRFAAASPPAARTRPTAETRAILDLSVQYWTSRGWAYVDVNYGGSTGYGREYRERLLNKWGIVDVDDCCGCARFLVESGKVDGQRLCITGRSAGGYTTLASLAFRDTFKAGASLYGVGDLTLLRAETHKFESHYMDNLVGNERAYYERSPINFVNQFTCPVILFQGLEDKVVPPDQARKIYSALKEKGLPVALVEYEGEQHGFRKAENIKFT

SEQ ID NO: 14069 - DNA, 446 bp, Zea mays subsp. mays
  misc_feature (1)..(446): Ceres Seq. ID no. 4614880
  misc_feature: MA Experiment ID: 108522 Result: Up-regulated in Transcription
  misc_feature: MA Experiment 108522 PARAMETER Experiment Name: Zm_42deg_Heat_P Parameter: Age (day) Value: 8
  misc_feature: MA Experiment 108522 PARAMETER Experiment Name: Zm_42deg_Heat_P Parameter: Organism Value: Zea mays
  misc_feature: MA Experiment 108522 PARAMETER Experiment Name: Zm_42deg_Heat_P Parameter: Plant Line Value: 35A19
  misc_feature: MA Experiment 108522 PARAMETER Experiment Name: Zm_42deg_Heat_P Parameter: Temperature (deg C) Value: 42 vs. 22
  misc_feature: MA Experiment 108522 PARAMETER Experiment Name: Zm_42deg_Heat_P Parameter: Timepoint (hr) Value: 1
  misc_feature: MA Experiment 108522 PARAMETER Experiment Name: Zm_42deg_Heat_P Parameter: Tissue Value: Aerial
acttttttcgtgcgttcgcgttcgacgcctcgctcggctggttccttccttccttccgctgtgttcccttctgtttctcgggcggagacgggaaggccgtgcgctcaaggatggcgcgcgagcagctggaggagtccatcgtggccgacggcaacggcaaggaggaagaggtcggggtcatgggcatcggcgccgcggacggcgccgacgaccagcacggcggcggcaagctcagcatgaagagcctgctgtggcacggcggctccgtctgggacgcgtggttcagctgcgcctccaaccaggtggcgcaggtgctcctgacgctgccgtactccttctcccagctggggatgctgtccggcgtgctgctgcagatcttctacggcttcctgggcagctggaccgcgtacctcatcagcgtcctctacgtcgagtaccgctcccgc

SEQ ID NO: 14070 - protein, 148 aa, Zea mays subsp. mays
  peptide (1)..(148): Ceres Seq. ID no. 4614881
LFSCVRVRRLARLVPSFLPLCSLLFLGRRREGRALKDGARAAGGVHRGRRQRQGGRGRGHGHRRRGRRRRPARRRQAQHEEPAVARRLRLGRVVQLRLQPGGAGAPDAAVLLLPAGDAVRRAAADLLRLPGQLDRVPHQRPLRRVPLP

SEQ ID NO: 14071 - protein, 148 aa, Zea mays subsp. mays
  peptide (1)..(148): Ceres Seq. ID no. 4614882
  misc_feature (39)..(147): Homolog of NCBI NO: 34908418 NR Description: putative AUX1-like permease [Oryza sativa
  misc_feature (40)..(147): Homolog of NCBI NO: 15240927 NR Description: LAX1 / AUX1 -like permease; protein id:
  misc_feature (40)..(147): Homolog of NCBI NO: 5881784 NR Description: putative AUX1-like permease [Arabidopsis thaliana]
  misc_feature (37)..(147): Homolog of NCBI NO: 10800920 NR Description: putative AUX1-like permease [Medicago truncatula]
  misc_feature (37)..(147): Homolog of NCBI NO: 37651177 NR Description: AUX1-like auxin influx carrier protein [Pisum
  misc_feature (37)..(147): Homolog of NCBI NO: 21586468 NR Description: auxin influx carrier protein [Medicago truncatula]
  misc_feature (44)..(147): Homolog of NCBI NO: 18404642 NR Description: expressed protein; protein id: At2g38120.1, by cDNA: 31586., supported by cDNA: gi_15450815, supported by gi_20259903 [Arabidopsis thaliana] >gi|7485590|pir||T01244
  misc_feature (37)..(147): Homolog of NCBI NO: 25956260 NR Description: AUX1-like auxin transport protein [Cucumis
  misc_feature (37)..(147): Homolog of NCBI NO: 6650716 NR Description: AUX1-like protein [Populus tremula x Populus
  misc_feature (43)..(147): Homolog of NCBI NO: 10441742 NR Description: putative AUX1-like permease [Populus tremula x
FFRAFAFDASLGWFLPSFRCVPFCFSGGDGKAVRSRMAREQLEESIVADGNGKEEEVGVMGIGAADGADDQHGGGKLSMKSLLWHGGSVWDAWFSCASNQVAQVLLTLPYSFSQLGMLSGVLLQIFYGFLGSWTAYLISVLYVEYRSR

SEQ ID NO: 14072 - protein, 112 aa, Zea mays subsp. mays
  peptide (1)..(112): Ceres Seq. ID no. 4614883
  misc_feature (3)..(111): Homolog of NCBI NO: 34908418 NR Description: putative AUX1-like permease [Oryza sativa
  misc_feature (4)..(111): Homolog of NCBI NO: 15240927 NR Description: LAX1 / AUX1 -like permease; protein id:
  misc_feature (4)..(111): Homolog of NCBI NO: 5881784 NR Description: putative AUX1-like permease [Arabidopsis thaliana]
  misc_feature (1)..(111): Homolog of NCBI NO: 10800920 NR Description: putative AUX1-like permease [Medicago truncatula]
  misc_feature (1)..(111): Homolog of NCBI NO: 37651177 NR Description: AUX1-like auxin influx carrier protein [Pisum
  misc_feature (1)..(111): Homolog of NCBI NO: 21586468 NR Description: auxin influx carrier protein [Medicago truncatula]
  misc_feature (8)..(111): Homolog of NCBI NO: 18404642 NR Description: expressed protein; protein id: At2g38120.1, by cDNA: 31586., supported by cDNA: gi_15450815, supported by gi_20259903 [Arabidopsis thaliana] >gi|7485590|pir||T01244
  misc_feature (1)..(111): Homolog of NCBI NO: 25956260 NR Description: AUX1-like auxin transport protein [Cucumis
  misc_feature (1)..(111): Homolog of NCBI NO: 6650716 NR Description: AUX1-like protein [Populus tremula x Populus
  misc_feature (7)..(111): Homolog of NCBI NO: 10441742 NR Description: putative AUX1-like permease [Populus tremula x
MAREQLEESIVADGNGKEEEVGVMGIGAADGADDQHGGGKLSMKSLLWHGGSVWDAWFSCASNQVAQVLLTLPYSFSQLGMLSGVLLQIFYGFLGSWTAYLISVLYVEYRSR

SEQ ID NO: 14073 - DNA, 1122 bp, Zea mays subsp. mays
  misc_feature (1)..(1122): Ceres Seq. ID no. 12781335
  misc_feature: MA Experiment ID: 108527 Result: Down-regulated in Transcription
  misc_feature: MA Experiment 108527 PARAMETER Experiment Name: Zm_5mM_NO_P Parameter: Age (day) Value: 8
  misc_feature: MA Experiment 108527 PARAMETER Experiment Name: Zm_5mM_NO_P Parameter: Organism Value: Zea mays
  misc_feature: MA Experiment 108527 PARAMETER Experiment Name: Zm_5mM_NO_P Parameter: Plant Line Value: 35A19
  misc_feature: MA Experiment 108527 PARAMETER Experiment Name: Zm_5mM_NO_P Parameter: Timepoint (hr) Value: 6
  misc_feature: MA Experiment 108527 PARAMETER Experiment Name: Zm_5mM_NO_P Parameter: Tissue Value: Aerial
  misc_feature: MA Experiment 108527 PARAMETER Experiment Name: Zm_5mM_NO_P Parameter: Treatment Value: 5mM NO vs. No Treatment
  misc_feature: MA Experiment ID: 108528 Result: Up-regulated in Transcription
  misc_feature: MA Experiment 108528 PARAMETER Experiment Name: Zm_Imbibed_Seeds_P Parameter: Age (day) Value: 5 vs. 2
  misc_feature: MA Experiment 108528 PARAMETER Experiment Name: Zm_Imbibed_Seeds_P Parameter: Organism Value: Zea mays
  misc_feature: MA Experiment 108528 PARAMETER Experiment Name: Zm_Imbibed_Seeds_P Parameter: Plant Line Value: 35A19
  misc_feature: MA Experiment 108528 PARAMETER Experiment Name: Zm_Imbibed_Seeds_P Parameter: Tissue Value: Aerial vs. Embryo
  misc_feature: MA Experiment ID: 108534 Result: Up-regulated in Transcription
  misc_feature: MA Experiment 108534 PARAMETER Experiment Name: Zm_4deg_Cold_P Parameter: Age (hr) Value: 8
  misc_feature: MA Experiment 108534 PARAMETER Experiment Name: Zm_4deg_Cold_P Parameter: Organism Value: Zea mays
  misc_feature: MA Experiment 108534 PARAMETER Experiment Name: Zm_4deg_Cold_P Parameter: Plant Line Value: 35A19
  misc_feature: MA Experiment 108534 PARAMETER Experiment Name: Zm_4deg_Cold_P Parameter: Temperature (deg C) Value: 4 vs. 22
  misc_feature: MA Experiment 108534 PARAMETER Experiment Name: Zm_4deg_Cold_P Parameter: Timepoint (hr) Value: 6
  misc_feature: MA Experiment 108534 PARAMETER Experiment Name: Zm_4deg_Cold_P Parameter: Tissue Value: Aerial
  misc_feature: MA Experiment ID: 108543 Result: Up-regulated in Transcription
  misc_feature: MA Experiment ID: 108547 Result: Up-regulated in Transcription
  misc_feature: MA Experiment 108547 PARAMETER Experiment Name: Zm_Imbibed_Seeds_P Parameter: Age (day) Value: 4 vs. 2
  misc_feature: MA Experiment 108547 PARAMETER Experiment Name: Zm_Imbibed_Seeds_P Parameter: Organism Value: Zea mays
  misc_feature: MA Experiment 108547 PARAMETER Experiment Name: Zm_Imbibed_Seeds_P Parameter: Plant Line Value: 35A19
  misc_feature: MA Experiment 108547 PARAMETER Experiment Name: Zm_Imbibed_Seeds_P Parameter: Tissue Value: Aerial vs. Embryo
  misc_feature: MA Experiment ID: 20000108 Result: Up-regulated in Transcription
  misc_feature: MA Experiment 20000108 PARAMETER Experiment Name: Zm_Root-Tips_P Parameter: Age (day) Value: 12
  misc_feature: MA Experiment 20000108 PARAMETER Experiment Name: Zm_Root-Tips_P Parameter: Organism Value: Zea mays
  misc_feature: MA Experiment 20000108 PARAMETER Experiment Name: Zm_Root-Tips_P Parameter: Tissue Value: Root tips vs. Root mid region    35
  misc_feature: MA Experiment 20000108 PARAMETER Experiment Name: Zm_Root-Tips_P Parameter: Tissue Value: Root tips vs. Root mid region   Sequence Listing-Misc Features (4)
  misc_feature: MA Experiment ID: 20000535 Result: Up-regulated in Transcription
  misc_feature: MA Experiment 20000535 PARAMETER Experiment Name: Zm_Hybrid_Seed_Dev_P Parameter: DAP Value: 30 vs. 12
  misc_feature: MA Experiment 20000535 PARAMETER Experiment Name: Zm_Hybrid_Seed_Dev_P Parameter: Organism Value: Zea mays
  misc_feature: MA Experiment 20000535 PARAMETER Experiment Name: Zm_Hybrid_Seed_Dev_P Parameter: Plant Line Value: 35A19
  misc_feature: MA Experiment 20000535 PARAMETER Experiment Name: Zm_Hybrid_Seed_Dev_P Parameter: Tissue Value: Embryo vs. Unfert Floret
attcccctctccactagctccggtccgaagagggagggaggaccggaggaggacgcccgttgccactgccgcgccgctcccgcctccctctctccatccgccgagctcgagaagccaccatgatctccgcgcgcaccgccgcagcttcccccgcttccctgtggaagcagggaggacgaagcgagggcggcggcagctgcgacggatgtcggacttacaggaacactttgcggagggccgcagcagcgaaggtgcgtgccttgccgtcgagggcggtggaggcggtcaaaatgggctccgccgcggagatggagcaggaggaggcggaggtggccgcggccgcggccggcgtcgtcgtcgaggaccactacggcgaggacagcgccaccgaggagctgcccatcctgccctgggccttctccgtcgcaagcggttacaccctcttgagggatccacatcacaacaagggtcttgctttcatggagaaggagagggatgcacaccacttgcgggggctgcttcctcctgcagttgtgcctcaagaactccaaattaagaagatcatgcacaacctgcggcagtaccaggtccctttgcagcgctatatggccatgatggaccttcaggagaggaacgagaggcttttctacaagcttttaattgataacgtggaggagctgcttcctgtggtttatacaccaactgtaggtgaggcctgccagaagtatgggtccatctttcgacaaccacagggtctgtatgtcagcttgagggacaaggggaaggtcctagaagttctaaggaactggccacataggaacatttaagttatctgtgttactgatggtgagcgaatcttgggacttggagatttgggttctcagggaatgggaattcctgtaggcaaacttgctctatacactgctcttggaggagttcgtccatcagcttgtttgcctatcacaatcgatgttggcacaaataatgagaaactgcttaatgatgagttttacattggactccggcaaaaacgtgcaactggcgaggagtatcatgagcttatggaagagttcatggctgctgttaagcaaatctacggcgagaaagtcctcattcagtttg

SEQ ID NO: 14074 - protein, 235 aa, Zea mays subsp. mays
  peptide (1)..(235): Ceres Seq. ID no. 12781336
  misc_feature (169)..(235): Pfam Name: Malic enzyme, N-terminal domain Pfam Description: Malic enzyme, N-terminal domain
  misc_feature (1)..(235): Homolog of NCBI NO: 37147841 NR Description: non-photosynthetic NADP-malic enzyme [Zea mays]
  misc_feature (104)..(235): Homolog of NCBI NO: 4096786 NR Description: NADP-malic enzyme [Zea mays]
  misc_feature (1)..(133): Homolog of NCBI NO: 4096786 NR Description: NADP-malic enzyme [Zea mays]
  misc_feature (1)..(235): Homolog of NCBI NO: 18460985 NR Description: NADP-dependent malic enzyme [Zea mays]
  misc_feature (1)..(235): Homolog of NCBI NO: 34906372 NR Description: unnamed protein product [Oryza sativa (japonica group)] >gi|9558508|dbj|BAB03427.1| unnamed protein product
  misc_feature (1)..(235): Homolog of NCBI NO: 1170871 NR Description: NADP-DEPENDENT MALIC ENZYME, CHLOROPLAST
  misc_feature (1)..(235): Homolog of NCBI NO: 30526303 NR Description: NADP-dependent malic enzyme [Sorghum bicolor]
  misc_feature (1)..(235): Homolog of NCBI NO: 126737 NR Description: NADP-DEPENDENT MALIC ENZYME, CHLOROPLAST
  misc_feature (1)..(235): Homolog of NCBI NO: 30575690 NR Description: NADP-malic enzyme [Zea mays]
  misc_feature (52)..(235): Homolog of NCBI NO: 547886 NR Description: NADP-DEPENDENT MALIC ENZYME, CHLOROPLAST
MISARTAAASPASLWKQGGRSEGGGSCDGCRTYRNTLRRAAAAKVRALPSRAVEAVKMGSAAEMEQEEAEVAAAAAGVVVEDHYGEDSATEELPILPWAFSVASGYTLLRDPHHNKGLAFMEKERDAHHLRGLLPPAVVPQELQIKKIMHNLRQYQVPLQRYMAMMDLQERNERLFYKLLIDNVEELLPVVYTPTVGEACQKYGSIFRQPQGLYVSLRDKGKVLEVLRNWPHRNI

SEQ ID NO: 14075 - protein, 184 aa, Zea mays subsp. mays
  peptide (1)..(184): Ceres Seq. ID no. 12781337
FPSPLAPVRRGREDRRRTPVATAAPLPPPSLHPPSSRSHHDLRAHRRSFPRFPVEAGRTKRGRRQLRRMSDLQEHFAEGRSSEGACLAVEGGGGGQNGLRRGDGAGGGGGGRGRGRRRRRGPLRRGQRHRGAAHPALGLLRRKRLHPLEGSTSQQGSCFHGEGEGCTPLAGAASSCSCASRTPN

SEQ ID NO: 14076 - protein, 178 aa, Zea mays subsp. mays
  peptide (1)..(178): Ceres Seq. ID no. 12781338
  misc_feature (112)..(178): Pfam Name: Malic enzyme, N-terminal domain Pfam Description: Malic enzyme, N-terminal domain
  misc_feature (1)..(178): Homolog of NCBI NO: 37147841 NR Description: non-photosynthetic NADP-malic enzyme [Zea mays]
  misc_feature (47)..(178): Homolog of NCBI NO: 4096786 NR Description: NADP-malic enzyme [Zea mays]
  misc_feature (1)..(76): Homolog of NCBI NO: 4096786 NR Description: NADP-malic enzyme [Zea mays]
  misc_feature (1)..(178): Homolog of NCBI NO: 18460985 NR Description: NADP-dependent malic enzyme [Zea mays]
  misc_feature (1)..(178): Homolog of NCBI NO: 34906372 NR Description: unnamed protein product [Oryza sativa (japonica group)] >gi|9558508|dbj|BAB03427.1| unnamed protein product
  misc_feature (1)..(178): Homolog of NCBI NO: 1170871 NR Description: NADP-DEPENDENT MALIC ENZYME, CHLOROPLAST
  misc_feature (1)..(178): Homolog of NCBI NO: 30526303 NR Description: NADP-dependent malic enzyme [Sorghum bicolor]
  misc_feature (1)..(178): Homolog of NCBI NO: 126737 NR Description: NADP-DEPENDENT MALIC ENZYME, CHLOROPLAST
  misc_feature (1)..(178): Homolog of NCBI NO: 30575690 NR Description: NADP-malic enzyme [Zea mays]
  misc_feature (1)..(178): Homolog of NCBI NO: 547886 NR Description: NADP-DEPENDENT MALIC ENZYME, CHLOROPLAST
MGSAAEMEQEEAEVAAAAAGVVVEDHYGEDSATEELPILPWAFSVASGYTLLRDPHHNKGLAFMEKERDAHHLRGLLPPAVVPQELQIKKIMHNLRQYQVPLQRYMAMMDLQERNERLFYKLLIDNVEELLPVVYTPTVGEACQKYGSIFRQPQGLYVSLRDKGKVLEVLRNWPHRNI

SEQ ID NO: 14077 - DNA, 466 bp, Zea mays subsp. mays
  misc_feature (1)..(466): Ceres Seq. ID no. 4616532
  misc_feature: MA Experiment ID: 108527 Result: Down-regulated in Transcription
  misc_feature: MA Experiment 108527 PARAMETER Experiment Name: Zm_5mM_NO_P Parameter: Age (day) Value: 8
  misc_feature: MA Experiment 108527 PARAMETER Experiment Name: Zm_5mM_NO_P Parameter: Organism Value: Zea mays
  misc_feature: MA Experiment 108527 PARAMETER Experiment Name: Zm_5mM_NO_P Parameter: Plant Line Value: 35A19
  misc_feature: MA Experiment 108527 PARAMETER Experiment Name: Zm_5mM_NO_P Parameter: Timepoint (hr) Value: 6
  misc_feature: MA Experiment 108527 PARAMETER Experiment Name: Zm_5mM_NO_P Parameter: Tissue Value: Aerial
  misc_feature: MA Experiment 108527 PARAMETER Experiment Name: Zm_5mM_NO_P Parameter: Treatment Value: 5mM NO vs. No Treatment
  misc_feature: MA Experiment ID: 108528 Result: Up-regulated in Transcription
  misc_feature: MA Experiment 108528 PARAMETER Experiment Name: Zm_Imbibed_Seeds_P Parameter: Age (day) Value: 5 vs. 2
  misc_feature: MA Experiment 108528 PARAMETER Experiment Name: Zm_Imbibed_Seeds_P Parameter: Organism Value: Zea mays
  misc_feature: MA Experiment 108528 PARAMETER Experiment Name: Zm_Imbibed_Seeds_P Parameter: Plant Line Value: 35A19
  misc_feature: MA Experiment 108528 PARAMETER Experiment Name: Zm_Imbibed_Seeds_P Parameter: Tissue Value: Aerial vs. Embryo
  misc_feature: MA Experiment ID: 108530 Result: Up-regulated in Transcription
  misc_feature: MA Experiment 108530 PARAMETER Experiment Name: Zm_Imbibed_Seeds_P Parameter: Age (day) Value: 6 vs. 2
  misc_feature: MA Experiment 108530 PARAMETER Experiment Name: Zm_Imbibed_Seeds_P Parameter: Organism Value: Zea mays
  misc_feature: MA Experiment 108530 PARAMETER Experiment Name: Zm_Imbibed_Seeds_P Parameter: Plant Line Value: 35A19
  misc_feature: MA Experiment 108530 PARAMETER Experiment Name: Zm_Imbibed_Seeds_P Parameter: Tissue Value: Aerial vs. Embryo
  misc_feature: MA Experiment ID: 108536 Result: Down-regulated in Transcription
  misc_feature: MA Experiment 108536 PARAMETER Experiment Name: Zm_Meristem_P Parameter: Age (day) Value: 8
  misc_feature: MA Experiment 108536 PARAMETER Experiment Name: Zm_Meristem_P Parameter: Organism Value: Zea mays
  misc_feature: MA Experiment 108536 PARAMETER Experiment Name: Zm_Meristem_P Parameter: Plant Line Value: 35A19
  misc_feature: MA Experiment 108536 PARAMETER Experiment Name: Zm_Meristem_P Parameter: Tissue Value: Shoot Meristem vs. Above Shoot Meristem
  misc_feature: MA Experiment ID: 108545 Result: Up-regulated in Transcription
  misc_feature: MA Experiment 108545 PARAMETER Experiment Name: Zm_Imbibed_Seeds_P Parameter: Age (day) Value: 3 vs. 2
  misc_feature: MA Experiment 108545 PARAMETER Experiment Name: Zm_Imbibed_Seeds_P Parameter: Organism Value: Zea mays
  misc_feature: MA Experiment 108545 PARAMETER Experiment Name: Zm_Imbibed_Seeds_P Parameter: Plant Line Value: 35A19
  misc_feature: MA Experiment 108545 PARAMETER Experiment Name: Zm_Imbibed_Seeds_P Parameter: Tissue Value: Aerial vs. Embryo
  misc_feature: MA Experiment ID: 108547 Result: Up-regulated in Transcription
  misc_feature: MA Experiment 108547 PARAMETER Experiment Name: Zm_Imbibed_Seeds_P Parameter: Age (day) Value: 4 vs. 2
  misc_feature: MA Experiment 108547 PARAMETER Experiment Name: Zm_Imbibed_Seeds_P Parameter: Organism Value: Zea mays
  misc_feature: MA Experiment 108547 PARAMETER Experiment Name: Zm_Imbibed_Seeds_P Parameter: Plant Line Value: 35A19
  misc_feature: MA Experiment 108547 PARAMETER Experiment Name: Zm_Imbibed_Seeds_P Parameter: Tissue Value: Aerial vs. Embryo
  misc_feature: MA Experiment ID: 108559 Result: Down-regulated in Transcription
  misc_feature: MA Experiment 108559 PARAMETER Experiment Name: Zm_5mM_NO_P Parameter: Age (day) Value: 8
  misc_feature: MA Experiment 108559 PARAMETER Experiment Name: Zm_5mM_NO_P Parameter: Organism Value: Zea mays
  misc_feature: MA Experiment 108559 PARAMETER Experiment Name: Zm_5mM_NO_P Parameter: Plant Line Value: 35A19
  misc_feature: MA Experiment 108559 PARAMETER Experiment Name: Zm_5mM_NO_P Parameter: Timepoint (hr) Value: 12
  misc_feature: MA Experiment 108559 PARAMETER Experiment Name: Zm_5mM_NO_P Parameter: Tissue Value: Aerial
  misc_feature: MA Experiment 108559 PARAMETER Experiment Name: Zm_5mM_NO_P Parameter: Treatment Value: 5mM NO vs. No Treatment
  misc_feature: MA Experiment ID: 20000477 Result: Down-regulated in Transcription
  misc_feature: MA Experiment 20000477 PARAMETER Experiment Name: Zm_5mM_SA_P Parameter: Age (day) Value: 10
  misc_feature: MA Experiment 20000477 PARAMETER Experiment Name: Zm_5mM_SA_P Parameter: Organism Value: Zea mays
  misc_feature: MA Experiment 20000477 PARAMETER Experiment Name: Zm_5mM_SA_P Parameter: Plant Line Value: 35A19
  misc_feature: MA Experiment 20000477 PARAMETER Experiment Name: Zm_5mM_SA_P Parameter: Timepoint (hr) Value: 48
  misc_feature: MA Experiment 20000477 PARAMETER Experiment Name: Zm_5mM_SA_P Parameter: Tissue Value: Aerial
  misc_feature: MA Experiment 20000477 PARAMETER Experiment Name: Zm_5mM_SA_P Parameter: Treatment Value: 5mM SA vs. No Treatment
  misc_feature: MA Experiment ID: 20000479 Result: Down-regulated in Transcription
  misc_feature: MA Experiment 20000479 PARAMETER Experiment Name: Zm_Drought_P Parameter: Age (day) Value: 10
  misc_feature: MA Experiment 20000479 PARAMETER Experiment Name: Zm_Drought_P Parameter: Organism Value: Zea mays
  misc_feature: MA Experiment 20000479 PARAMETER Experiment Name: Zm_Drought_P Parameter: Plant Line Value: 35A19
  misc_feature: MA Experiment 20000479 PARAMETER Experiment Name: Zm_Drought_P Parameter: Timepoint (hr) Value: 48
  misc_feature: MA Experiment 20000479 PARAMETER Experiment Name: Zm_Drought_P Parameter: Tissue Value: Aerial
  misc_feature: MA Experiment 20000479 PARAMETER Experiment Name: Zm_Drought_P Parameter: Treatment Value: Drought vs. No Drought
  misc_feature: MA Experiment ID: 20000480 Result: Down-regulated in Transcription
  misc_feature: MA Experiment 20000480 PARAMETER Experiment Name: Zm_Drought_P Parameter: Age (day) Value: 11
  misc_feature: MA Experiment 20000480 PARAMETER Experiment Name: Zm_Drought_P Parameter: Organism Value: Zea mays
  misc_feature: MA Experiment 20000480 PARAMETER Experiment Name: Zm_Drought_P Parameter: Plant Line Value: 35A19
  misc_feature: MA Experiment 20000480 PARAMETER Experiment Name: Zm_Drought_P Parameter: Timepoint (hr) Value: 72
  misc_feature: MA Experiment 20000480 PARAMETER Experiment Name: Zm_Drought_P Parameter: Tissue Value: Aerial
  misc_feature: MA Experiment 20000480 PARAMETER Experiment Name: Zm_Drought_P Parameter: Treatment Value: Drought vs. No Drought
  misc_feature: MA Experiment ID: 20000492 Result: Down-regulated in Transcription
  misc_feature: MA Experiment 20000492 PARAMETER Experiment Name: Zm_Hybrid_Seed_Dev_P Parameter: DAP Value: 12
  misc_feature: MA Experiment 20000492 PARAMETER Experiment Name: Zm_Hybrid_Seed_Dev_P Parameter: Organism Value: Zea mays
  misc_feature: MA Experiment 20000492 PARAMETER Experiment Name: Zm_Hybrid_Seed_Dev_P Parameter: Plant Line Value: 35A19
  misc_feature: MA Experiment 20000492 PARAMETER Experiment Name: Zm_Hybrid_Seed_Dev_P Parameter: Tissue Value: Fert Kernel vs. Unfert Floret
  misc_feature: MA Experiment ID: 20000626 Result: Down-regulated in Transcription
  misc_feature: MA Experiment 20000626 PARAMETER Experiment Name: Zm_Herbicide-Treatments_P Parameter: Timepoint (hr) Value: 12
  misc_feature: MA Experiment 20000626 PARAMETER Experiment Name: Zm_Herbicide-Treatments_P Parameter: Tissue Value: Aerial
  misc_feature: MA Experiment 20000626 PARAMETER Experiment Name: Zm_Herbicide-Treatments_P Parameter: Treatment Value: Roundup vs. No Treatment
gcacgagactgctcggccgacgaaataataaagcgcgcgcgcgcacgcggagaggctcggagagctgagtgagatggcacaaaccatggcgtccatgaccggcctctcgcagggcgttctgcccagcaggcgcgccgccaacagggccaggacggccgccgtcgtcagggcgtccgccgaggcgcaggcgggccgccgcgccgtgctcgggctggtggccactggcatcgtcggcggcgccttgtcgcaggcggtgcacgccgagaccgtcaagaccatcaagatcggagccccgccgccgccctccggtggactccccgggactctgaactctgaccaggcgagggacttcgacctccccttgaaggagcggttctacctgcagccgctgccgccggcggangcggtggcgagggtgaagacgtcggcgcaggacatcatcaacctcaagccgctcatcgacaag

SEQ ID NO: 14078 - protein, 131 aa, Zea mays subsp. mays
  peptide (1)..(131): Ceres Seq. ID no. 4616533
  misc_feature (15)..(130): Pfam Name: Oxygen evolving enhancer protein 3 (PsbQ) Pfam Description: Oxygen evolving enhancer protein 3 (PsbQ)
  misc_feature (1)..(130): Homolog of NCBI NO: 11134057 NR Description: Oxygen-evolving enhancer protein 3-1, chloroplast (OEE3) (16 kDa subunit of oxygen evolving system of photosystem
  misc_feature (1)..(130): Homolog of NCBI NO: 11134066 NR Description: Oxygen-evolving enhancer protein 3-2, chloroplast (OEE3) (16 kDa subunit of oxygen evolving system of photosystem
  misc_feature (5)..(130): Homolog of NCBI NO: 34393258 NR Description: putative Oxygen-evolving enhancer protein 3-1,
  misc_feature (1)..(130): Homolog of NCBI NO: 32400800 NR Description: oxygen-evolving complex precursor [Triticum
  misc_feature (18)..(130): Homolog of NCBI NO: 4583542 NR Description: 16 kDa polypeptide of oxygen-evolving complex
  misc_feature (18)..(130): Homolog of NCBI NO: 15233587 NR Description: oxygen-evolving complex protein 16, chloroplast (OEC16); protein id: At4g21280.1, supported by cDNA: 5691., by cDNA: gi_15215599, supported by cDNA: gi_20334895 [Arabidopsis
  misc_feature (1)..(130): Homolog of NCBI NO: 15234637 NR Description: oxygen-evolving complex protein 16, chloroplast (OEC16); protein id: At4g05180.1, supported by cDNA: 40326.,
  misc_feature (26)..(130): Homolog of NCBI NO: 31096349 NR Description: oxygen-evolving enhancer protein 3 precursor
  misc_feature (20)..(130): Homolog of NCBI NO: 11133850 NR Description: Oxygen-evolving enhancer protein 3, chloroplast (OEE3) (16 kDa subunit of oxygen evolving system of photosystem
  misc_feature (32)..(130): Homolog of NCBI NO: 131397 NR Description: Oxygen-evolving enhancer protein 3, chloroplast (OEE3) (16 kDa subunit of oxygen evolving system of photosystem
  misc_feature (110)..(110): Xaa is any aa, unknown or other
MAQTMASMTGLSQGVLPSRRAANRARTAAVVRASAEAQAGRRAVLGLVATGIVGGALSQAVHAETVKTIKIGAPPPPSGGLPGTLNSDQARDFDLPLKERFYLQPLPPAXAVARVKTSAQDIINLKPLIDK

SEQ ID NO: 14079 - protein, 127 aa, Zea mays subsp. mays
  peptide (1)..(127): Ceres Seq. ID no. 4616534
  misc_feature (11)..(126): Pfam Name: Oxygen evolving enhancer protein 3 (PsbQ) Pfam Description: Oxygen evolving enhancer protein 3 (PsbQ)
  misc_feature (1)..(126): Homolog of NCBI NO: 11134057 NR Description: Oxygen-evolving enhancer protein 3-1, chloroplast (OEE3) (16 kDa subunit of oxygen evolving system of photosystem
  misc_feature (1)..(126): Homolog of NCBI NO: 11134066 NR Description: Oxygen-evolving enhancer protein 3-2, chloroplast (OEE3) (16 kDa subunit of oxygen evolving system of photosystem
  misc_feature (1)..(126): Homolog of NCBI NO: 34393258 NR Description: putative Oxygen-evolving enhancer protein 3-1,
  misc_feature (1)..(126): Homolog of NCBI NO: 32400800 NR Description: oxygen-evolving complex precursor [Triticum
  misc_feature (14)..(126): Homolog of NCBI NO: 4583542 NR Description: 16 kDa polypeptide of oxygen-evolving complex
  misc_feature (14)..(126): Homolog of NCBI NO: 15233587 NR Description: oxygen-evolving complex protein 16, chloroplast (OEC16); protein id: At4g21280.1, supported by cDNA: 5691., by cDNA: gi_15215599, supported by cDNA: gi_20334895 [Arabidopsis
  misc_feature (1)..(126): Homolog of NCBI NO: 15234637 NR Description: oxygen-evolving complex protein 16, chloroplast (OEC16); protein id: At4g05180.1, supported by cDNA: 40326.,
  misc_feature (22)..(126): Homolog of NCBI NO: 31096349 NR Description: oxygen-evolving enhancer protein 3 precursor
  misc_feature (16)..(126): Homolog of NCBI NO: 11133850 NR Description: Oxygen-evolving enhancer protein 3, chloroplast (OEE3) (16 kDa subunit of oxygen evolving system of photosystem
  misc_feature (28)..(126): Homolog of NCBI NO: 131397 NR Description: Oxygen-evolving enhancer protein 3, chloroplast (OEE3) (16 kDa subunit of oxygen evolving system of photosystem
  misc_feature (106)..(106): Xaa is any aa, unknown or other
MASMTGLSQGVLPSRRAANRARTAAVVRASAEAQAGRRAVLGLVATGIVGGALSQAVHAETVKTIKIGAPPPPSGGLPGTLNSDQARDFDLPLKERFYLQPLPPAXAVARVKTSAQDIINLKPLIDK

SEQ ID NO: 14080 - protein, 124 aa, Zea mays subsp. mays
  peptide (1)..(124): Ceres Seq. ID no. 4616535
  misc_feature (8)..(123): Pfam Name: Oxygen evolving enhancer protein 3 (PsbQ) Pfam Description: Oxygen evolving enhancer protein 3 (PsbQ)
  misc_feature (1)..(123): Homolog of NCBI NO: 11134057 NR Description: Oxygen-evolving enhancer protein 3-1, chloroplast (OEE3) (16 kDa subunit of oxygen evolving system of photosystem
  misc_feature (1)..(123): Homolog of NCBI NO: 11134066 NR Description: Oxygen-evolving enhancer protein 3-2, chloroplast (OEE3) (16 kDa subunit of oxygen evolving system of photosystem
  misc_feature (1)..(123): Homolog of NCBI NO: 34393258 NR Description: putative Oxygen-evolving enhancer protein 3-1,
  misc_feature (1)..(123): Homolog of NCBI NO: 32400800 NR Description: oxygen-evolving complex precursor [Triticum
  misc_feature (11)..(123): Homolog of NCBI NO: 4583542 NR Description: 16 kDa polypeptide of oxygen-evolving complex
  misc_feature (11)..(123): Homolog of NCBI NO: 15233587 NR Description: oxygen-evolving complex protein 16, chloroplast (OEC16); protein id: At4g21280.1, supported by cDNA: 5691., by cDNA: gi_15215599, supported by cDNA: gi_20334895 [Arabidopsis
  misc_feature (1)..(123): Homolog of NCBI NO: 15234637 NR Description: oxygen-evolving complex protein 16, chloroplast (OEC16); protein id: At4g05180.1, supported by cDNA: 40326.,
  misc_feature (19)..(123): Homolog of NCBI NO: 31096349 NR Description: oxygen-evolving enhancer protein 3 precursor
  misc_feature (13)..(123): Homolog of NCBI NO: 11133850 NR Description: Oxygen-evolving enhancer protein 3, chloroplast (OEE3) (16 kDa subunit of oxygen evolving system of photosystem
  misc_feature (25)..(123): Homolog of NCBI NO: 131397 NR Description: Oxygen-evolving enhancer protein 3, chloroplast (OEE3) (16 kDa subunit of oxygen evolving system of photosystem
  misc_feature (103)..(103): Xaa is any aa, unknown or other
MTGLSQGVLPSRRAANRARTAAVVRASAEAQAGRRAVLGLVATGIVGGALSQAVHAETVKTIKIGAPPPPSGGLPGTLNSDQARDFDLPLKERFYLQPLPPAXAVARVKTSAQDIINLKPLIDK

SEQ ID NO: 14081 - DNA, 1391 bp, Zea mays subsp. mays; identical to SEQ ID NO: 9852
  misc_feature (1)..(1391): Ceres Seq. ID no. 13504058
  misc_feature: MA Experiment ID: 108535 Result: Up-regulated in Transcription
  misc_feature: MA Experiment 108535 PARAMETER Experiment Name: Zm_Meristem_P Parameter: Age (day) Value: 8
  misc_feature: MA Experiment 108535 PARAMETER Experiment Name: Zm_Meristem_P Parameter: Organism Value: Zea mays
  misc_feature: MA Experiment 108535 PARAMETER Experiment Name: Zm_Meristem_P Parameter: Plant Line Value: 35A19
  misc_feature: MA Experiment 108535 PARAMETER Experiment Name: Zm_Meristem_P Parameter: Tissue Value: Root Meristem vs. Above Root Meristem
  misc_feature: MA Experiment ID: 20000535 Result: Up-regulated in Transcription
  misc_feature: MA Experiment 20000535 PARAMETER Experiment Name: Zm_Hybrid_Seed_Dev_P Parameter: DAP Value: 30 vs. 12
  misc_feature: MA Experiment 20000535 PARAMETER Experiment Name: Zm_Hybrid_Seed_Dev_P Parameter: Organism Value: Zea mays
  misc_feature: MA Experiment 20000535 PARAMETER Experiment Name: Zm_Hybrid_Seed_Dev_P Parameter: Plant Line Value: 35A19
  misc_feature: MA Experiment 20000535 PARAMETER Experiment Name: Zm_Hybrid_Seed_Dev_P Parameter: Tissue Value: Embryo vs. Unfert Floret

SEQ ID NO: 14082 - protein, 284 aa, Zea mays subsp. mays; identical to SEQ ID NO: 9853
  peptide (1)..(284): Ceres Seq. ID no. 13504059
  misc_feature (140)..(193): Pfam Name: KH domain Pfam Description: KH domain
  misc_feature (140)..(193): Pfam Name: KH domain Pfam Description: KH domain
  misc_feature (1)..(284): Homolog of NCBI NO: 34909270 NR Description: P0454H12.18 [Oryza sativa (japonica
  misc_feature (3)..(284): Homolog of NCBI NO: 34900448 NR Description: contains EST C27129(C51039)~similar to
  misc_feature (1)..(283): Homolog of NCBI NO: 12322716 NR Description: unknown protein; 28504-31237 [Arabidopsis
  misc_feature (1)..(283): Homolog of NCBI NO: 30680583 NR Description: KH domain protein [Arabidopsis thaliana]
  misc_feature (1)..(283): Homolog of NCBI NO: 40645104 NR Description: hypothetical protein [Nicotiana tabacum]
  misc_feature (3)..(284): Homolog of NCBI NO: 34900448 NR Description: contains EST C27129(C51039)~similar to
  misc_feature (1)..(283): Homolog of NCBI NO: 30680583 NR Description: KH domain protein [Arabidopsis thaliana]
  misc_feature (1)..(283): Homolog of NCBI NO: 15236738 NR Description: KH domain protein [Arabidopsis thaliana]
  misc_feature (61)..(283): Homolog of NCBI NO: 34907446 NR Description: P0434C04.5 [Oryza sativa (japonica
  misc_feature (18)..(283): Homolog of NCBI NO: 22329449 NR Description: KH domain quaking protein, putative [Arabidopsis >gi|26452384|dbj|BAC43277.1| putative elongation factor
  misc_feature (18)..(283): Homolog of NCBI NO: 16930473 NR Description: At1g09660/F21M12_5 [Arabidopsis thaliana]
  misc_feature (1)..(283): Homolog of NCBI NO: 15224909 NR Description: KH domain protein [Arabidopsis thaliana]
  misc_feature (1)..(283): Homolog of NCBI NO: 40645104 NR Description: hypothetical protein [Nicotiana tabacum]
  misc_feature (1)..(283): Homolog of NCBI NO: 12322716 NR Description: unknown protein; 28504-31237 [Arabidopsis
  misc_feature (1)..(284): Homolog of NCBI NO: 34909270 NR Description: P0454H12.18 [Oryza sativa (japonica
  misc_feature (1)..(283): Homolog of NCBI NO: 15224909 NR Description: KH domain protein [Arabidopsis thaliana]
  misc_feature (18)..(283): Homolog of NCBI NO: 16930473 NR Description: At1g09660/F21M12_5 [Arabidopsis thaliana]
  misc_feature (18)..(283): Homolog of NCBI NO: 22329449 NR Description: KH domain quaking protein, putative [Arabidopsis >gi|26452384|dbj|BAC43277.1| putative elongation factor
  misc_feature (61)..(283): Homolog of NCBI NO: 34907446 NR Description: P0434C04.5 [Oryza sativa (japonica
  misc_feature (1)..(283): Homolog of NCBI NO: 15236738 NR Description: KH domain protein [Arabidopsis thaliana]

SEQ ID NO: 14083 - protein, 237 aa, Zea mays subsp. mays; identical to SEQ ID NO: 9854
  peptide (1)..(237): Ceres Seq. ID no. 13504060
  misc_feature (93)..(146): Pfam Name: KH domain Pfam Description: KH domain
  misc_feature (93)..(146): Pfam Name: KH domain Pfam Description: KH domain
  misc_feature (1)..(237): Homolog of NCBI NO: 34909270 NR Description: P0454H12.18 [Oryza sativa (japonica
  misc_feature (1)..(237): Homolog of NCBI NO: 34900448 NR Description: contains EST C27129(C51039)~similar to
  misc_feature (1)..(236): Homolog of NCBI NO: 12322716 NR Description: unknown protein; 28504-31237 [Arabidopsis
  misc_feature (1)..(236): Homolog of NCBI NO: 30680583 NR Description: KH domain protein [Arabidopsis thaliana]
  misc_feature (1)..(236): Homolog of NCBI NO: 40645104 NR Description: hypothetical protein [Nicotiana tabacum]
  misc_feature (1)..(237): Homolog of NCBI NO: 34900448 NR Description: contains EST C27129(C51039)~similar to
  misc_feature (1)..(236): Homolog of NCBI NO: 30680583 NR Description: KH domain protein [Arabidopsis thaliana]
  misc_feature (1)..(236): Homolog of NCBI NO: 15236738 NR Description: KH domain protein [Arabidopsis thaliana]
  misc_feature (14)..(236): Homolog of NCBI NO: 34907446 NR Description: P0434C04.5 [Oryza sativa (japonica
  misc_feature (1)..(236): Homolog of NCBI NO: 22329449 NR Description: KH domain quaking protein, putative [Arabidopsis >gi|26452384|dbj|BAC43277.1| putative elongation factor
  misc_feature (1)..(236): Homolog of NCBI NO: 16930473 NR Description: At1g09660/F21M12_5 [Arabidopsis thaliana]
  misc_feature (1)..(236): Homolog of NCBI NO: 15224909 NR Description: KH domain protein [Arabidopsis thaliana]
  misc_feature (1)..(236): Homolog of NCBI NO: 40645104 NR Description: hypothetical protein [Nicotiana tabacum]
  misc_feature (1)..(236): Homolog of NCBI NO: 12322716 NR Description: unknown protein; 28504-31237 [Arabidopsis
  misc_feature (1)..(237): Homolog of NCBI NO: 34909270 NR Description: P0454H12.18 [Oryza sativa (japonica
  misc_feature (1)..(236): Homolog of NCBI NO: 15224909 NR Description: KH domain protein [Arabidopsis thaliana]
  misc_feature (1)..(236): Homolog of NCBI NO: 16930473 NR Description: At1g09660/F21M12_5 [Arabidopsis thaliana]
  misc_feature (1)..(236): Homolog of NCBI NO: 22329449 NR Description: KH domain quaking protein, putative [Arabidopsis >gi|26452384|dbj|BAC43277.1| putative elongation factor
  misc_feature (14)..(236): Homolog of NCBI NO: 34907446 NR Description: P0434C04.5 [Oryza sativa (japonica
  misc_feature (1)..(236): Homolog of NCBI NO: 15236738 NR Description: KH domain protein [Arabidopsis thaliana]

SEQ ID NO: 14084 - protein, 196 aa, Zea mays subsp. mays; identical to SEQ ID NO: 9855
  peptide (1)..(196): Ceres Seq. ID no. 13504061
  misc_feature (52)..(105): Pfam Name: KH domain Pfam Description: KH domain
  misc_feature (52)..(105): Pfam Name: KH domain Pfam Description: KH domain
  misc_feature (1)..(196): Homolog of NCBI NO: 34909270 NR Description: P0454H12.18 [Oryza sativa (japonica
  misc_feature (1)..(196): Homolog of NCBI NO: 34900448 NR Description: contains EST C27129(C51039)~similar to
  misc_feature (1)..(195): Homolog of NCBI NO: 12322716 NR Description: unknown protein; 28504-31237 [Arabidopsis
  misc_feature (1)..(195): Homolog of NCBI NO: 30680583 NR Description: KH domain protein [Arabidopsis thaliana]
  misc_feature (1)..(195): Homolog of NCBI NO: 40645104 NR Description: hypothetical protein [Nicotiana tabacum]
  misc_feature (1)..(196): Homolog of NCBI NO: 34900448 NR Description: contains EST C27129(C51039)~similar to
  misc_feature (1)..(195): Homolog of NCBI NO: 30680583 NR Description: KH domain protein [Arabidopsis thaliana]
  misc_feature (1)..(195): Homolog of NCBI NO: 15236738 NR Description: KH domain protein [Arabidopsis thaliana]
  misc_feature (1)..(195): Homolog of NCBI NO: 34907446 NR Description: P0434C04.5 [Oryza sativa (japonica
  misc_feature (1)..(195): Homolog of NCBI NO: 22329449 NR Description: KH domain quaking protein, putative [Arabidopsis >gi|26452384|dbj|BAC43277.1| putative elongation factor
  misc_feature (1)..(195): Homolog of NCBI NO: 16930473 NR Description: At1g09660/F21M12_5 [Arabidopsis thaliana]
  misc_feature (1)..(195): Homolog of NCBI NO: 15224909 NR Description: KH domain protein [Arabidopsis thaliana]
  misc_feature (1)..(195): Homolog of NCBI NO: 40645104 NR Description: hypothetical protein [Nicotiana tabacum]
  misc_feature (1)..(195): Homolog of NCBI NO: 12322716 NR Description: unknown protein; 28504-31237 [Arabidopsis
  misc_feature (1)..(196): Homolog of NCBI NO: 34909270 NR Description: P0454H12.18 [Oryza sativa (japonica
  misc_feature (1)..(195): Homolog of NCBI NO: 15224909 NR Description: KH domain protein [Arabidopsis thaliana]
  misc_feature (1)..(195): Homolog of NCBI NO: 16930473 NR Description: At1g09660/F21M12_5 [Arabidopsis thaliana]
  misc_feature (1)..(195): Homolog of NCBI NO: 22329449 NR Description: KH domain quaking protein, putative [Arabidopsis >gi|26452384|dbj|BAC43277.1| putative elongation factor
  misc_feature (1)..(195): Homolog of NCBI NO: 34907446 NR Description: P0434C04.5 [Oryza sativa (japonica
  misc_feature (1)..(195): Homolog of NCBI NO: 15236738 NR Description: KH domain protein [Arabidopsis thaliana]

SEQ ID NO: 14085 - DNA, 744 bp, Zea mays subsp. mays
  misc_feature (1)..(744): Ceres Seq. ID no. 12435845
  misc_feature: MA Experiment ID: 108527 Result: Up-regulated in Transcription
  misc_feature: MA Experiment 108527 PARAMETER Experiment Name: Zm_5mM_NO_P Parameter: Age (day) Value: 8
  misc_feature: MA Experiment 108527 PARAMETER Experiment Name: Zm_5mM_NO_P Parameter: Organism Value: Zea mays
  misc_feature: MA Experiment 108527 PARAMETER Experiment Name: Zm_5mM_NO_P Parameter: Plant Line Value: 35A19
  misc_feature: MA Experiment 108527 PARAMETER Experiment Name: Zm_5mM_NO_P Parameter: Timepoint (hr) Value: 6
  misc_feature: MA Experiment 108527 PARAMETER Experiment Name: Zm_5mM_NO_P Parameter: Tissue Value: Aerial
  misc_feature: MA Experiment 108527 PARAMETER Experiment Name: Zm_5mM_NO_P Parameter: Treatment Value: 5mM NO vs. No Treatment
  misc_feature: MA Experiment ID: 108543 Result: Down-regulated in Transcription
  misc_feature: MA Experiment ID: 20000492 Result: Up-regulated in Transcription
  misc_feature: MA Experiment 20000492 PARAMETER Experiment Name: Zm_Hybrid_Seed_Dev_P Parameter: DAP Value: 12
  misc_feature: MA Experiment 20000492 PARAMETER Experiment Name: Zm_Hybrid_Seed_Dev_P Parameter: Organism Value: Zea mays
  misc_feature: MA Experiment 20000492 PARAMETER Experiment Name: Zm_Hybrid_Seed_Dev_P Parameter: Plant Line Value: 35A19
  misc_feature: MA Experiment 20000492 PARAMETER Experiment Name: Zm_Hybrid_Seed_Dev_P Parameter: Tissue Value: Fert Kernel vs. Unfert Floret
  misc_feature: MA Experiment ID: 20000535 Result: Up-regulated in Transcription
  misc_feature: MA Experiment 20000535 PARAMETER Experiment Name: Zm_Hybrid_Seed_Dev_P Parameter: DAP Value: 30 vs. 12
  misc_feature: MA Experiment 20000535 PARAMETER Experiment Name: Zm_Hybrid_Seed_Dev_P Parameter: Organism Value: Zea mays
  misc_feature: MA Experiment 20000535 PARAMETER Experiment Name: Zm_Hybrid_Seed_Dev_P Parameter: Plant Line Value: 35A19
  misc_feature: MA Experiment 20000535 PARAMETER Experiment Name: Zm_Hybrid_Seed_Dev_P Parameter: Tissue Value: Embryo vs. Unfert Floret
cataccatccctcgaccggccacctctccccaattgcatcgcatccccaggacttgcgcccggtccagagacggcgataatgggggcttctgaggtgtggtcatcggtgccggcctggctggcgatcgccgtcggcttggcggccgtggtttcctcgtcggaggctcacgtcttctacgccggtggccgcgacggctgggtccttgaccccaccgagagctacaaccattgggccgggcgcagccggttccaagtgaacgacaccatcgtgttcacgcacgaggagggcgtcgactcggtgctgctggtgacggagcaggacttcgacacgtgcaacacgcgcaacccggtccggcggctccaggccgtcggcagcagcggcagttcggagcgttcggtgttcaagctcgaccggtccggcccgttcttcttcatcagcagcgacgaggaacggtgccaaaagggccagaagctgtacgtaatcgtgatggcggttcgccggtcgacgacgccggcggcaccggcaccggcacccgacgcggcgttcccgccggcgccttcaccggtacccgattcggcgttcccgccggcgccttcaccggtgtgggcctcggcgcccgacaacgcgcacgctccaccaccgacggcgggtgcgtcacgtctggacgacggagcgatcatcggctctgtgcttggggttataggagctttggtgctctgtaccgtgtactaatcagaaatcag

SEQ ID NO: 14086 - protein, 243 aa, Zea mays subsp. mays
  peptide (1)..(243): Ceres Seq. ID no. 12435846
  misc_feature (66)..(156): Pfam Name: Plastocyanin-like domain Pfam Description: Plastocyanin-like domain
  misc_feature (30)..(218): Homolog of NCBI NO: 28396618 NR Description: phytocyanin protein, PUP2 [Arabidopsis thaliana]
  misc_feature (10)..(219): Homolog of NCBI NO: 34909494 NR Description: P0481E12.17 [Oryza sativa (japonica
  misc_feature (40)..(242): Homolog of NCBI NO: 7486634 NR Description: hypothetical protein F8B4.190 - Arabidopsis
  misc_feature (40)..(242): Homolog of NCBI NO: 30689408 NR Description: plastocyanin-like domain containing protein thaliana] >gi|27754288|gb|AAO22597.1| putative nodulin thaliana] >gi|28393899|gb|AAO42357.1| putative nodulin
  misc_feature (34)..(214): Homolog of NCBI NO: 34903678 NR Description: B1015E06.24 [Oryza sativa (japonica
  misc_feature (35)..(219): Homolog of NCBI NO: 15234164 NR Description: putative protein; protein id: At4g27520.1, by cDNA: 33380., supported by cDNA: gi_13358224 [Arabidopsis
  misc_feature (35)..(219): Homolog of NCBI NO: 21592865 NR Description: unknown [Arabidopsis thaliana]
  misc_feature (30)..(218): Homolog of NCBI NO: 15238868 NR Description: putative protein; protein id: At5g53870.1 thaliana] >gi|10177249|dbj|BAB10717.1| contains similarity to
  misc_feature (44)..(238): Homolog of NCBI NO: 7485901 NR Description: hypothetical protein F20O9.30 - Arabidopsis
  misc_feature (44)..(238): Homolog of NCBI NO: 18417181 NR Description: copper-binding protein-like; protein id:
IPSLDRPPLPNCIASPGLAPGPETAIMGASEVWSSVPAWLAIAVGLAAVVSSSEAHVFYAGGRDGWVLDPTESYNHWAGRSRFQVNDTIVFTHEEGVDSVLLVTEQDFDTCNTRNPVRRLQAVGSSGSSERSVFKLDRSGPFFFISSDEERCQKGQKLYVIVMAVRRSTTPAAPAPAPDAAFPPAPSPVPDSAFPPAPSPVWASAPDNAHAPPPTAGASRLDDGAIIGSVLGVIGALVLCTVY

SEQ ID NO: 14087 - protein, 217 aa, Zea mays subsp. mays
  peptide (1)..(217): Ceres Seq. ID no. 12435847
  misc_feature (40)..(130): Pfam Name: Plastocyanin-like domain Pfam Description: Plastocyanin-like domain
  misc_feature (1)..(193): Homolog of NCBI NO: 34909494 NR Description: P0481E12.17 [Oryza sativa (japonica
  misc_feature (14)..(216): Homolog of NCBI NO: 7486634 NR Description: hypothetical protein F8B4.190 - Arabidopsis
  misc_feature (14)..(216): Homolog of NCBI NO: 30689408 NR Description: plastocyanin-like domain containing protein thaliana] >gi|27754288|gb|AAO22597.1| putative nodulin thaliana] >gi|28393899|gb|AAO42357.1| putative nodulin
  misc_feature (8)..(188): Homolog of NCBI NO: 34903678 NR Description: B1015E06.24 [Oryza sativa (japonica
  misc_feature (9)..(193): Homolog of NCBI NO: 15234164 NR Description: putative protein; protein id: At4g27520.1, by cDNA: 33380., supported by cDNA: gi_13358224 [Arabidopsis
  misc_feature (9)..(193): Homolog of NCBI NO: 21592865 NR Description: unknown [Arabidopsis thaliana]
  misc_feature (4)..(192): Homolog of NCBI NO: 15238868 NR Description: putative protein; protein id: At5g53870.1 thaliana] >gi|10177249|dbj|BAB10717.1| contains similarity to
  misc_feature (18)..(212): Homolog of NCBI NO: 7485901 NR Description: hypothetical protein F20O9.30 - Arabidopsis
  misc_feature (18)..(212): Homolog of NCBI NO: 18417181 NR Description: copper-binding protein-like; protein id:
  misc_feature (4)..(192): Homolog of NCBI NO: 28396618 NR Description: phytocyanin protein, PUP2 [Arabidopsis thaliana]
MGASEVWSSVPAWLAIAVGLAAVVSSSEAHVFYAGGRDGWVLDPTESYNHWAGRSRFQVNDTIVFTHEEGVDSVLLVTEQDFDTCNTRNPVRRLQAVGSSGSSERSVFKLDRSGPFFFISSDEERCQKGQKLYVIVMAVRRSTTPAAPAPAPDAAFPPAPSPVPDSAFPPAPSPVWASAPDNAHAPPPTAGASRLDDGAIIGSVLGVIGALVLCTVY

SEQ ID NO: 14088 - DNA, 1515 bp, Zea mays subsp. mays; identical to SEQ ID NO: 7352
  misc_feature (1)..(1515): Ceres Seq. ID no. 13498565
  misc_feature: MA Experiment ID: 108556 Result: Down-regulated in Transcription
  misc_feature: MA Experiment 108556 PARAMETER Experiment Name: Zm_Drought_P Parameter: Age (day) Value: 9
  misc_feature: MA Experiment 108556 PARAMETER Experiment Name: Zm_Drought_P Parameter: Organism Value: Zea mays
  misc_feature: MA Experiment 108556 PARAMETER Experiment Name: Zm_Drought_P Parameter: Plant Line Value: 35A19
  misc_feature: MA Experiment 108556 PARAMETER Experiment Name: Zm_Drought_P Parameter: Timepoint (hr) Value: 24
  misc_feature: MA Experiment 108556 PARAMETER Experiment Name: Zm_Drought_P Parameter: Tissue Value: Aerial
  misc_feature: MA Experiment 108556 PARAMETER Experiment Name: Zm_Drought_P Parameter: Treatment Value: Drought vs. No Drought
  misc_feature: MA Experiment ID: 20000477 Result: Down-regulated in Transcription
  misc_feature: MA Experiment 20000477 PARAMETER Experiment Name: Zm_5mM_SA_P Parameter: Age (day) Value: 10
  misc_feature: MA Experiment 20000477 PARAMETER Experiment Name: Zm_5mM_SA_P Parameter: Organism Value: Zea mays
  misc_feature: MA Experiment 20000477 PARAMETER Experiment Name: Zm_5mM_SA_P Parameter: Plant Line Value: 35A19
  misc_feature: MA Experiment 20000477 PARAMETER Experiment Name: Zm_5mM_SA_P Parameter: Timepoint (hr) Value: 48
  misc_feature: MA Experiment 20000477 PARAMETER Experiment Name: Zm_5mM_SA_P Parameter: Tissue Value: Aerial
  misc_feature: MA Experiment 20000477 PARAMETER Experiment Name: Zm_5mM_SA_P Parameter: Treatment Value: 5mM SA vs. No Treatment
  misc_feature: MA Experiment ID: 20000478 Result: Down-regulated in Transcription
  misc_feature: MA Experiment 20000478 PARAMETER Experiment Name: Zm_5mM_SA_P Parameter: Age (day) Value: 11
  misc_feature: MA Experiment 20000478 PARAMETER Experiment Name: Zm_5mM_SA_P Parameter: Organism Value: Zea mays
  misc_feature: MA Experiment 20000478 PARAMETER Experiment Name: Zm_5mM_SA_P Parameter: Plant Line Value: 35A19
  misc_feature: MA Experiment 20000478 PARAMETER Experiment Name: Zm_5mM_SA_P Parameter: Timepoint (hr) Value: 72
  misc_feature: MA Experiment 20000478 PARAMETER Experiment Name: Zm_5mM_SA_P Parameter: Tissue Value: Aerial
  misc_feature: MA Experiment 20000478 PARAMETER Experiment Name: Zm_5mM_SA_P Parameter: Treatment Value: 5mM SA vs. No Treatment
  misc_feature: MA Experiment ID: 20000479 Result: Down-regulated in Transcription
  misc_feature: MA Experiment 20000479 PARAMETER Experiment Name: Zm_Drought_P Parameter: Age (day) Value: 10
  misc_feature: MA Experiment 20000479 PARAMETER Experiment Name: Zm_Drought_P Parameter: Organism Value: Zea mays
  misc_feature: MA Experiment 20000479 PARAMETER Experiment Name: Zm_Drought_P Parameter: Plant Line Value: 35A19
  misc_feature: MA Experiment 20000479 PARAMETER Experiment Name: Zm_Drought_P Parameter: Timepoint (hr) Value: 48
  misc_feature: MA Experiment 20000479 PARAMETER Experiment Name: Zm_Drought_P Parameter: Tissue Value: Aerial
  misc_feature: MA Experiment 20000479 PARAMETER Experiment Name: Zm_Drought_P Parameter: Treatment Value: Drought vs. No Drought

SEQ ID NO: 14089 - protein, 390 aa, Zea mays subsp. mays; identical to SEQ ID NO: 7353
  peptide (1)..(390): Ceres Seq. ID no. 13498566
  misc_feature (64)..(385): Pfam Name: Protein of unknown function, DUF642 Pfam Description: Protein of unknown function, DUF642
  misc_feature (64)..(385): Pfam Name: Protein of unknown function, DUF642 Pfam Description: Protein of unknown function, DUF642
  misc_feature (1)..(390): Homolog of NCBI NO: 30102997 NR Description: unknown protein [Oryza sativa (japonica
  misc_feature (45)..(385): Homolog of NCBI NO: 18398135 NR Description: expressed protein [Arabidopsis thaliana] unknown protein [Arabidopsis thaliana] unknown protein [Arabidopsis thaliana]
  misc_feature (64)..(385): Homolog of NCBI NO: 12321555 NR Description: unknown protein, 5' partial [Arabidopsis thaliana]
  misc_feature (42)..(385): Homolog of NCBI NO: 15227437 NR Description: expressed protein [Arabidopsis thaliana]
  misc_feature (41)..(385): Homolog of NCBI NO: 15227439 NR Description: expressed protein [Arabidopsis thaliana]
  misc_feature (45)..(385): Homolog of NCBI NO: 18398135 NR Description: expressed protein [Arabidopsis thaliana] unknown protein [Arabidopsis thaliana] unknown protein [Arabidopsis thaliana]
  misc_feature (42)..(385): Homolog of NCBI NO: 15227437 NR Description: expressed protein [Arabidopsis thaliana]
  misc_feature (49)..(389): Homolog of NCBI NO: 21537379 NR Description: unknown [Arabidopsis thaliana]
  misc_feature (49)..(389): Homolog of NCBI NO: 15239438 NR Description: expressed protein [Arabidopsis thaliana] Unknown protein [Arabidopsis thaliana]
  misc_feature (48)..(389): Homolog of NCBI NO: 23397043 NR Description: unknown protein [Arabidopsis thaliana]
  misc_feature (48)..(389): Homolog of NCBI NO: 21554402 NR Description: unknown [Arabidopsis thaliana]
  misc_feature (48)..(389): Homolog of NCBI NO: 15239049 NR Description: expressed protein [Arabidopsis thaliana]
  misc_feature (41)..(385): Homolog of NCBI NO: 15227439 NR Description: expressed protein [Arabidopsis thaliana]
  misc_feature (64)..(385): Homolog of NCBI NO: 12321555 NR Description: unknown protein, 5' partial [Arabidopsis thaliana]
  misc_feature (1)..(390): Homolog of NCBI NO: 30102997 NR Description: unknown protein [Oryza sativa (japonica
  misc_feature (48)..(389): Homolog of NCBI NO: 15239049 NR Description: expressed protein [Arabidopsis thaliana]
  misc_feature (48)..(389): Homolog of NCBI NO: 21554402 NR Description: unknown [Arabidopsis thaliana]
  misc_feature (48)..(389): Homolog of NCBI NO: 23397043 NR Description: unknown protein [Arabidopsis thaliana]
  misc_feature (49)..(389): Homolog of NCBI NO: 15239438 NR Description: expressed protein [Arabidopsis thaliana] Unknown protein [Arabidopsis thaliana]
  misc_feature (49)..(389): Homolog of NCBI NO: 21537379 NR Description: unknown [Arabidopsis thaliana]

SEQ ID NO: 14090 - protein, 384 aa, Zea mays subsp. mays; identical to SEQ ID NO: 7354
  peptide (1)..(384): Ceres Seq. ID no. 13498567
  misc_feature (58)..(379): Pfam Name: Protein of unknown function, DUF642 Pfam Description: Protein of unknown function, DUF642
  misc_feature (58)..(379): Pfam Name: Protein of unknown function, DUF642 Pfam Description: Protein of unknown function, DUF642
  misc_feature (1)..(384): Homolog of NCBI NO: 30102997 NR Description: unknown protein [Oryza sativa (japonica
  misc_feature (39)..(379): Homolog of NCBI NO: 18398135 NR Description: expressed protein [Arabidopsis thaliana] unknown protein [Arabidopsis thaliana] unknown protein [Arabidopsis thaliana]
  misc_feature (58)..(379): Homolog of NCBI NO: 12321555 NR Description: unknown protein, 5' partial [Arabidopsis thaliana]
  misc_feature (36)..(379): Homolog of NCBI NO: 15227437 NR Description: expressed protein [Arabidopsis thaliana]
  misc_feature (35)..(379): Homolog of NCBI NO: 15227439 NR Description: expressed protein [Arabidopsis thaliana]
  misc_feature (39)..(379): Homolog of NCBI NO: 18398135 NR Description: expressed protein [Arabidopsis thaliana] unknown protein [Arabidopsis thaliana] unknown protein [Arabidopsis thaliana]
  misc_feature (36)..(379): Homolog of NCBI NO: 15227437 NR Description: expressed protein [Arabidopsis thaliana]
  misc_feature (43)..(383): Homolog of NCBI NO: 21537379 NR Description: unknown [Arabidopsis thaliana]
  misc_feature (43)..(383): Homolog of NCBI NO: 15239438 NR Description: expressed protein [Arabidopsis thaliana] Unknown protein [Arabidopsis thaliana]
  misc_feature (42)..(383): Homolog of NCBI NO: 23397043 NR Description: unknown protein [Arabidopsis thaliana]
  misc_feature (42)..(383): Homolog of NCBI NO: 21554402 NR Description: unknown [Arabidopsis thaliana]
  misc_feature (42)..(383): Homolog of NCBI NO: 15239049 NR Description: expressed protein [Arabidopsis thaliana]
  misc_feature (35)..(379): Homolog of NCBI NO: 15227439 NR Description: expressed protein [Arabidopsis thaliana]
  misc_feature (58)..(379): Homolog of NCBI NO: 12321555 NR Description: unknown protein, 5' partial [Arabidopsis thaliana]
  misc_feature (1)..(384): Homolog of NCBI NO: 30102997 NR Description: unknown protein [Oryza sativa (japonica
  misc_feature (42)..(383): Homolog of NCBI NO: 15239049 NR Description: expressed protein [Arabidopsis thaliana]
  misc_feature (42)..(383): Homolog of NCBI NO: 21554402 NR Description: unknown [Arabidopsis thaliana]
  misc_feature (42)..(383): Homolog of NCBI NO: 23397043 NR Description: unknown protein [Arabidopsis thaliana]
  misc_feature (43)..(383): Homolog of NCBI NO: 15239438 NR Description: expressed protein [Arabidopsis thaliana] Unknown protein [Arabidopsis thaliana]
  misc_feature (43)..(383): Homolog of NCBI NO: 21537379 NR Description: unknown [Arabidopsis thaliana]

SEQ ID NO: 14091 - protein, 366 aa, Zea mays subsp. mays; identical to SEQ ID NO: 7355
  peptide (1)..(366): Ceres Seq. ID no. 13498568
  misc_feature (76)..(340): Homolog of NCBI NO: 23102218 NR Description: hypothetical protein [Azotobacter vinelandii]
  misc_feature (76)..(340): Homolog of NCBI NO: 23102218 NR Description: hypothetical protein [Azotobacter vinelandii]

SEQ ID NO: 14092 - DNA, 1593 bp, Zea mays subsp. mays
  misc_feature (1)..(1593): Ceres Seq. ID no. 12435837
  misc_feature: MA Experiment ID: 20000108 Result: Up-regulated in Transcription
  misc_feature: MA Experiment 20000108 PARAMETER Experiment Name: Zm_Root-Tips_P Parameter: Age (day) Value: 12
  misc_feature: MA Experiment 20000108 PARAMETER Experiment Name: Zm_Root-Tips_P Parameter: Organism Value: Zea mays
  misc_feature: MA Experiment 20000108 PARAMETER Experiment Name: Zm_Root-Tips_P Parameter: Tissue Value: Root tips vs. Root mid region    35
  misc_feature: MA Experiment 20000108 PARAMETER Experiment Name: Zm_Root-Tips_P Parameter: Tissue Value: Root tips vs. Root mid region   Sequence Listing-Misc Features (4)
atttccgtccatttcccaggttctaaccggttcctcaaaccctaaaacctccaaaccccagcaatggcggattccccttcgttccgtcgctacccgctcgcctcctccgtcgacctcgtccgctggctcccttcctcctccatctccccttccggtcgcctcctcgccgccgccgtccacgatcccacctccggctccttcgcctccagcatccgccttctccccctctccgaccctgtctcccggctcgcctccgtcccgctcccgtcccgcgccacggcactccgctgctcccatgctgcgctcgccgctgccacctcctcgggctcgctccacttcgttccctcctcattcgactcggacgccgcagtgtccgtccccggcggcgcgggcttccatgtcggtcctgtccggggcctcgactgcggcggggaggagtgggtcacagcgggagaagacggaagagtgcatgtggtcggcggtgtagctgacgggagagtggtaacgaggaggatgtgggacgggaaaggaatgtcagggtatgaagctgccagatgggcttcgccggtggagtttgccacgggtggagccggatgtggtgttcagtggtgggatcggaggaaaggggacgccatcgtggcgcagtgtaacggcatctggggccgtggcatagttactggcatggtgcattccattgacattcatccatcaagaaagcatatctgcgtggtgggaggttcatcggggaccgtatttgcctgggatctgcggcagccacaggagctgataccaatctctgttctaggtcttaatgaaacagctgagcctgtgtgtgaaagtgaggtttgggaggttcttttcgacacttacactaagtcttccgatatcatctcatctgcatctgcaagaatattgccagtgatgatgtgttcagaggatgggatccttgcagttgtcgaacaagataagagaccccttgaattgcttgctgaatcttgtgccatcaactccttcgacatagatcctcagaacccctctgtaagtccttggcttcacctggtcaaatgaacagtttttcttatttgtagataatgttactactgttatcgatttgtgcaggatgttgtttgcgcattagaatgggaatcggtcggtgtcctaactcgtggtagagatgcaatgtcagaagaatgaaaattttcatcacccagggatctcaatcagatttttttccaaggtggatgaaactgctatcagaaagaatcttctgaattctgagggcttccatattcagtcaccattctaatgcccgtgaccatgggcaacggtagaaggaataaagcgtgcatgacgaatgccttttcctgtctttgcatactaaccaacactgtcttgtaccgttggaagttttactctgttgtcatgggtagttgcagattgcagaaaccttttctgggctagcttcaagatgtgtaattgctcttggatgccaactgctgacagtttgaaggagtggtcacaaacaattcaatccttttagctgggggctgatgaactgaagctataattagtttcataatgtttgcttgtggt

SEQ ID NO: 14093 - protein, 334 aa, Zea mays subsp. mays
  peptide (1)..(334): Ceres Seq. ID no. 12435838
  misc_feature (60)..(324): Homolog of NCBI NO: 18417678 NR Description: expressed protein; protein id: At4g30840.1,
  misc_feature (60)..(324): Homolog of NCBI NO: 21554881 NR Description: unknown [Arabidopsis thaliana]
  misc_feature (60)..(222): Homolog of NCBI NO: 25372649 NR Description: hypothetical protein AT4g30840 [imported] - thaliana >gi|2980782|emb|CAA18209.1| hypothetical protein thaliana] >gi|7269985|emb|CAB79802.1| hypothetical protein
  misc_feature (224)..(326): Homolog of NCBI NO: 25372649 NR Description: hypothetical protein AT4g30840 [imported] - thaliana >gi|2980782|emb|CAA18209.1| hypothetical protein thaliana] >gi|7269985|emb|CAB79802.1| hypothetical protein
  misc_feature (106)..(266): Homolog of NCBI NO: 30851621 NR Description: 2610529I12Rik protein [Mus musculus]
MADSPSFRRYPLASSVDLVRWLPSSSISPSGRLLAAAVHDPTSGSFASSIRLLPLSDPVSRLASVPLPSRATALRCSHAALAAATSSGSLHFVPSSFDSDAAVSVPGGAGFHVGPVRGLDCGGEEWVTAGEDGRVHVVGGVADGRVVTRRMWDGKGMSGYEAARWASPVEFATGGAGCGVQWWDRRKGDAIVAQCNGIWGRGIVTGMVHSIDIHPSRKHICVVGGSSGTVFAWDLRQPQELIPISVLGLNETAEPVCESEVWEVLFDTYTKSSDIISSASARILPVMMCSEDGILAVVEQDKRPLELLAESCAINSFDIDPQNPSVSPWLHLVK

SEQ ID NO: 14094 - protein, 184 aa, Zea mays subsp. mays
  peptide (1)..(184): Ceres Seq. ID no. 12435839
  misc_feature (1)..(174): Homolog of NCBI NO: 18417678 NR Description: expressed protein; protein id: At4g30840.1,
  misc_feature (1)..(174): Homolog of NCBI NO: 21554881 NR Description: unknown [Arabidopsis thaliana]
  misc_feature (1)..(72): Homolog of NCBI NO: 25372649 NR Description: hypothetical protein AT4g30840 [imported] - thaliana >gi|2980782|emb|CAA18209.1| hypothetical protein thaliana] >gi|7269985|emb|CAB79802.1| hypothetical protein
  misc_feature (74)..(176): Homolog of NCBI NO: 25372649 NR Description: hypothetical protein AT4g30840 [imported] - thaliana >gi|2980782|emb|CAA18209.1| hypothetical protein thaliana] >gi|7269985|emb|CAB79802.1| hypothetical protein
  misc_feature (1)..(116): Homolog of NCBI NO: 30851621 NR Description: 2610529I12Rik protein [Mus musculus]
MWDGKGMSGYEAARWASPVEFATGGAGCGVQWWDRRKGDAIVAQCNGIWGRGIVTGMVHSIDIHPSRKHICVVGGSSGTVFAWDLRQPQELIPISVLGLNETAEPVCESEVWEVLFDTYTKSSDIISSASARILPVMMCSEDGILAVVEQDKRPLELLAESCAINSFDIDPQNPSVSPWLHLVK

SEQ ID NO: 14095 - protein, 178 aa, Zea mays subsp. mays
  peptide (1)..(178): Ceres Seq. ID no. 12435840
  misc_feature (1)..(168): Homolog of NCBI NO: 18417678 NR Description: expressed protein; protein id: At4g30840.1,
  misc_feature (1)..(168): Homolog of NCBI NO: 21554881 NR Description: unknown [Arabidopsis thaliana]
  misc_feature (1)..(66): Homolog of NCBI NO: 25372649 NR Description: hypothetical protein AT4g30840 [imported] - thaliana >gi|2980782|emb|CAA18209.1| hypothetical protein thaliana] >gi|7269985|emb|CAB79802.1| hypothetical protein
  misc_feature (68)..(170): Homolog of NCBI NO: 25372649 NR Description: hypothetical protein AT4g30840 [imported] - thaliana >gi|2980782|emb|CAA18209.1| hypothetical protein thaliana] >gi|7269985|emb|CAB79802.1| hypothetical protein
  misc_feature (1)..(110): Homolog of NCBI NO: 30851621 NR Description: 2610529I12Rik protein [Mus musculus]
MSGYEAARWASPVEFATGGAGCGVQWWDRRKGDAIVAQCNGIWGRGIVTGMVHSIDIHPSRKHICVVGGSSGTVFAWDLRQPQELIPISVLGLNETAEPVCESEVWEVLFDTYTKSSDIISSASARILPVMMCSEDGILAVVEQDKRPLELLAESCAINSFDIDPQNPSVSPWLHLVK

SEQ ID NO: 14096 - DNA, 1445 bp, Zea mays subsp. mays
  misc_feature (1)..(1445): Ceres Seq. ID no. 15178640
  misc_feature: MA Experiment ID: 108515 Result: Down-regulated in Transcription
  misc_feature: MA Experiment 108515 PARAMETER Experiment Name: Zm_2mM_SA_P Parameter: Age (day) Value: 8
  misc_feature: MA Experiment 108515 PARAMETER Experiment Name: Zm_2mM_SA_P Parameter: Organism Value: Zea mays
  misc_feature: MA Experiment 108515 PARAMETER Experiment Name: Zm_2mM_SA_P Parameter: Plant Line Value: 35A19
  misc_feature: MA Experiment 108515 PARAMETER Experiment Name: Zm_2mM_SA_P Parameter: Timepoint (hr) Value: 12
  misc_feature: MA Experiment 108515 PARAMETER Experiment Name: Zm_2mM_SA_P Parameter: Tissue Value: Aerial
  misc_feature: MA Experiment 108515 PARAMETER Experiment Name: Zm_2mM_SA_P Parameter: Treatment Value: 2mM SA vs. No Treatment
  misc_feature: MA Experiment ID: 108523 Result: Down-regulated in Transcription
  misc_feature: MA Experiment 108523 PARAMETER Experiment Name: Zm_42deg_Heat_P Parameter: Age (day) Value: 8
  misc_feature: MA Experiment 108523 PARAMETER Experiment Name: Zm_42deg_Heat_P Parameter: Organism Value: Zea mays
  misc_feature: MA Experiment 108523 PARAMETER Experiment Name: Zm_42deg_Heat_P Parameter: Plant Line Value: 35A19
  misc_feature: MA Experiment 108523 PARAMETER Experiment Name: Zm_42deg_Heat_P Parameter: Temperature (deg C) Value: 42 vs. 22
  misc_feature: MA Experiment 108523 PARAMETER Experiment Name: Zm_42deg_Heat_P Parameter: Timepoint (hr) Value: 6
  misc_feature: MA Experiment 108523 PARAMETER Experiment Name: Zm_42deg_Heat_P Parameter: Tissue Value: Aerial
  misc_feature: MA Experiment ID: 108528 Result: Up-regulated in Transcription
  misc_feature: MA Experiment 108528 PARAMETER Experiment Name: Zm_Imbibed_Seeds_P Parameter: Age (day) Value: 5 vs. 2
  misc_feature: MA Experiment 108528 PARAMETER Experiment Name: Zm_Imbibed_Seeds_P Parameter: Organism Value: Zea mays
  misc_feature: MA Experiment 108528 PARAMETER Experiment Name: Zm_Imbibed_Seeds_P Parameter: Plant Line Value: 35A19
  misc_feature: MA Experiment 108528 PARAMETER Experiment Name: Zm_Imbibed_Seeds_P Parameter: Tissue Value: Aerial vs. Embryo
  misc_feature: MA Experiment ID: 108530 Result: Up-regulated in Transcription
  misc_feature: MA Experiment 108530 PARAMETER Experiment Name: Zm_Imbibed_Seeds_P Parameter: Age (day) Value: 6 vs. 2
  misc_feature: MA Experiment 108530 PARAMETER Experiment Name: Zm_Imbibed_Seeds_P Parameter: Organism Value: Zea mays
  misc_feature: MA Experiment 108530 PARAMETER Experiment Name: Zm_Imbibed_Seeds_P Parameter: Plant Line Value: 35A19
  misc_feature: MA Experiment 108530 PARAMETER Experiment Name: Zm_Imbibed_Seeds_P Parameter: Tissue Value: Aerial vs. Embryo
  misc_feature: MA Experiment ID: 108534 Result: Up-regulated in Transcription
  misc_feature: MA Experiment 108534 PARAMETER Experiment Name: Zm_4deg_Cold_P Parameter: Age (hr) Value: 8
  misc_feature: MA Experiment 108534 PARAMETER Experiment Name: Zm_4deg_Cold_P Parameter: Organism Value: Zea mays
  misc_feature: MA Experiment 108534 PARAMETER Experiment Name: Zm_4deg_Cold_P Parameter: Plant Line Value: 35A19
  misc_feature: MA Experiment 108534 PARAMETER Experiment Name: Zm_4deg_Cold_P Parameter: Temperature (deg C) Value: 4 vs. 22
  misc_feature: MA Experiment 108534 PARAMETER Experiment Name: Zm_4deg_Cold_P Parameter: Timepoint (hr) Value: 6
  misc_feature: MA Experiment 108534 PARAMETER Experiment Name: Zm_4deg_Cold_P Parameter: Tissue Value: Aerial
  misc_feature: MA Experiment ID: 108535 Result: Down-regulated in Transcription
  misc_feature: MA Experiment 108535 PARAMETER Experiment Name: Zm_Meristem_P Parameter: Age (day) Value: 8
  misc_feature: MA Experiment 108535 PARAMETER Experiment Name: Zm_Meristem_P Parameter: Organism Value: Zea mays
  misc_feature: MA Experiment 108535 PARAMETER Experiment Name: Zm_Meristem_P Parameter: Plant Line Value: 35A19
  misc_feature: MA Experiment 108535 PARAMETER Experiment Name: Zm_Meristem_P Parameter: Tissue Value: Root Meristem vs. Above Root Meristem
  misc_feature: MA Experiment ID: 108543 Result: Up-regulated in Transcription
  misc_feature: MA Experiment ID: 108545 Result: Up-regulated in Transcription
  misc_feature: MA Experiment 108545 PARAMETER Experiment Name: Zm_Imbibed_Seeds_P Parameter: Age (day) Value: 3 vs. 2
  misc_feature: MA Experiment 108545 PARAMETER Experiment Name: Zm_Imbibed_Seeds_P Parameter: Organism Value: Zea mays
  misc_feature: MA Experiment 108545 PARAMETER Experiment Name: Zm_Imbibed_Seeds_P Parameter: Plant Line Value: 35A19
  misc_feature: MA Experiment 108545 PARAMETER Experiment Name: Zm_Imbibed_Seeds_P Parameter: Tissue Value: Aerial vs. Embryo
  misc_feature: MA Experiment ID: 108547 Result: Up-regulated in Transcription
  misc_feature: MA Experiment 108547 PARAMETER Experiment Name: Zm_Imbibed_Seeds_P Parameter: Age (day) Value: 4 vs. 2
  misc_feature: MA Experiment 108547 PARAMETER Experiment Name: Zm_Imbibed_Seeds_P Parameter: Organism Value: Zea mays
  misc_feature: MA Experiment 108547 PARAMETER Experiment Name: Zm_Imbibed_Seeds_P Parameter: Plant Line Value: 35A19
  misc_feature: MA Experiment 108547 PARAMETER Experiment Name: Zm_Imbibed_Seeds_P Parameter: Tissue Value: Aerial vs. Embryo
  misc_feature: MA Experiment ID: 108687 Result: Down-regulated in Transcription
  misc_feature: MA Experiment 108687 PARAMETER Experiment Name: Zm_Embryos-Flowers__P Parameter: Tissue Value: Embryo vs. Aerial+
  misc_feature: MA Experiment ID: 108689 Result: Down-regulated in Transcription
  misc_feature: MA Experiment 108689 PARAMETER Experiment Name: Zm_Drought_Roots_P Parameter: Age (day) Value: 9
  misc_feature: MA Experiment 108689 PARAMETER Experiment Name: Zm_Drought_Roots_P Parameter: Organism Value: Zea mays
  misc_feature: MA Experiment 108689 PARAMETER Experiment Name: Zm_Drought_Roots_P Parameter: Plant Line Value: 35A19
  misc_feature: MA Experiment 108689 PARAMETER Experiment Name: Zm_Drought_Roots_P Parameter: Timepoint (hr) Value: 24
  misc_feature: MA Experiment 108689 PARAMETER Experiment Name: Zm_Drought_Roots_P Parameter: Tissue Value: Roots
  misc_feature: MA Experiment 108689 PARAMETER Experiment Name: Zm_Drought_Roots_P Parameter: Treatment Value: Drought vs. No Drought
  misc_feature: MA Experiment ID: 20000535 Result: Down-regulated in Transcription
  misc_feature: MA Experiment 20000535 PARAMETER Experiment Name: Zm_Hybrid_Seed_Dev_P Parameter: DAP Value: 30 vs. 12
  misc_feature: MA Experiment 20000535 PARAMETER Experiment Name: Zm_Hybrid_Seed_Dev_P Parameter: Organism Value: Zea mays
  misc_feature: MA Experiment 20000535 PARAMETER Experiment Name: Zm_Hybrid_Seed_Dev_P Parameter: Plant Line Value: 35A19
  misc_feature: MA Experiment 20000535 PARAMETER Experiment Name: Zm_Hybrid_Seed_Dev_P Parameter: Tissue Value: Embryo vs. Unfert Floret
  misc_feature: MA Experiment ID: 20001608 Result: Down-regulated in Transcription
  misc_feature: MA Experiment 20001608 PARAMETER Experiment Name: Zm_50ppm_KNO3_L-to-H_P Parameter: Age (day) Value: 21
  misc_feature: MA Experiment 20001608 PARAMETER Experiment Name: Zm_50ppm_KNO3_L-to-H_P Parameter: Organism Value: Zea mays
  misc_feature: MA Experiment 20001608 PARAMETER Experiment Name: Zm_50ppm_KNO3_L-to-H_P Parameter: Plant Line Value: 35A19
  misc_feature: MA Experiment 20001608 PARAMETER Experiment Name: Zm_50ppm_KNO3_L-to-H_P Parameter: Timepoint (hr) Value: 48
  misc_feature: MA Experiment 20001608 PARAMETER Experiment Name: Zm_50ppm_KNO3_L-to-H_P Parameter: Tissue Value: Shoots
  misc_feature: MA Experiment 20001608 PARAMETER Experiment Name: Zm_50ppm_KNO3_L-to-H_P Parameter: Treatment Value: 50ppm KNO3 vs. 50ppm KCl
agagcagcagctaaagaagcaaagcaagtgtctgctcactcagtcctgcgcaagagctcgctctcggagaaaaaaacgcgggaggcgataatggagggaggtgccggtgcgagcgagaaagggaaggtgctggtcacgggggcgtcgggcttcgtcggctcctggctcgtcatgaagctcctccaggccggctacaccgtccgggcgaccgtgcgcgatcccgcgaacgttgggaagacgaagccattgatggaccttcccggagcaacggagcgcctgtccatatggaaagccgacctggcggaggaaggcagcttccacgacgccatcaggggctgcaccggcgtcttccacgtcgccacgcccatggacttcctgtccaaagaccctgagaatgaggtaatcaagccgacggtggaagggatgataagcatcatgcgggcatgcaaggaggccggcaccgtgcggcgcatcgtcttcacttcctccgccgggacggtcaacctggaggagcggcagaggcccgtctacgacgaggaaagctggaccgacgtcgacttctgccgtcgcgtcaagatgaccggatggatgtacttcgtgtctaaaaccctggcggagaaggcggccctggcgtacgcggcggagcacggcctggacctggtcaccatcatcccgacgctcgtggtcggcccgttcatcagcgcgtccatgccgcccagcctcatcaccgcgctggcgctcatcacggggaacgcgccccactactcgatcctcaagcaggtgcagctcatccacctcgacgacctctgcgacgccgagatcttcctcttcgagaacccggccgcggccgggcgctacgtctgctcctcgcacgacgtcaccatccacggcctcgccgccatgctcagggataggtaccccgagtacgacgtcccgcagaggttccccgggatccaggacgacctccagccggtgcgcttctcgtccaagaagctccaggacctcgggttcaccttcaggtacaagacgctggaggacatgttcgacgccgccatccggacttgccaggagaagggcctcatccccctcgccactgccgccggaggggacggctttgcctcggtgcgcgcacccggcgagacggaggcgacgattggcgcttaagcaacaatcacccggctctccccgtcgatgatgctatcagctatctatctcttcgactccgctgccaatacggaacttatttccatgttcaacgaattgttttatcccctggattacgtattgtttttatgttttatacccaaacaacgaatgtttctcagtattttactacagctagcccctatagtagagattctattatatgaataagctatctgtagaggctctggtgcaatatatatttcgagttatttggattactagcaaaaaaaaaaaaaaaa

SEQ ID NO: 14097 - protein, 387 aa, Zea mays subsp. mays
  peptide (1)..(387): Ceres Seq. ID no. 15178641
  misc_feature (43)..(337): Pfam Name: NAD dependent epimerase/dehydratase family Pfam Description: NAD dependent epimerase/dehydratase family
  misc_feature (31)..(387): Homolog of NCBI NO: 1706374 NR Description: DIHYDROFLAVONOL-4-REDUCTASE (DFR)
  misc_feature (31)..(387): Homolog of NCBI NO: 7427700 NR Description: dihydrokaempferol 4-reductase (EC 1.1.1.219) B -
  misc_feature (31)..(387): Homolog of NCBI NO: 3287294 NR Description: dihydroflavonol4-reductase [Zea mays]
  misc_feature (31)..(387): Homolog of NCBI NO: 7427698 NR Description: dihydrokaempferol 4-reductase (EC 1.1.1.219) A -
  misc_feature (26)..(369): Homolog of NCBI NO: 7427697 NR Description: dihydrokaempferol 4-reductase (EC 1.1.1.219) A -
  misc_feature (36)..(387): Homolog of NCBI NO: 7427699 NR Description: dihydrokaempferol 4-reductase (EC 1.1.1.219) B -
  misc_feature (40)..(387): Homolog of NCBI NO: 28912450 NR Description: dihydroflavonol 4-reductase [Triticum aestivum]
  misc_feature (40)..(387): Homolog of NCBI NO: 28932727 NR Description: dihydroflavonol 4-reductase [Lophopyrum ponticum
  misc_feature (40)..(387): Homolog of NCBI NO: 1706372 NR Description: DIHYDROFLAVONOL-4-REDUCTASE (DFR)
  misc_feature (40)..(387): Homolog of NCBI NO: 28883586 NR Description: dihydroflavonol 4-reductase [Lophopyrum ponticum
RAAAKEAKQVSAHSVLRKSSLSEKKTREAIMEGGAGASEKGKVLVTGASGFVGSWLVMKLLQAGYTVRATVRDPANVGKTKPLMDLPGATERLSIWKADLAEEGSFHDAIRGCTGVFHVATPMDFLSKDPENEVIKPTVEGMISIMRACKEAGTVRRIVFTSSAGTVNLEERQRPVYDEESWTDVDFCRRVKMTGWMYFVSKTLAEKAALAYAAEHGLDLVTIIPTLVVGPFISASMPPSLITALALITGNAPHYSILKQVQLIHLDDLCDAEIFLFENPAAAGRYVCSSHDVTIHGLAAMLRDRYPEYDVPQRFPGIQDDLQPVRFSSKKLQDLGFTFRYKTLEDMFDAAIRTCQEKGLIPLATAAGGDGFASVRAPGETEATIGA

SEQ ID NO: 14098 - protein, 357 aa, Zea mays subsp. mays
  peptide (1)..(357): Ceres Seq. ID no. 15178642
  misc_feature (13)..(307): Pfam Name: NAD dependent epimerase/dehydratase family Pfam Description: NAD dependent epimerase/dehydratase family
  misc_feature (1)..(357): Homolog of NCBI NO: 1706374 NR Description: DIHYDROFLAVONOL-4-REDUCTASE (DFR)
  misc_feature (1)..(357): Homolog of NCBI NO: 7427700 NR Description: dihydrokaempferol 4-reductase (EC 1.1.1.219) B -
  misc_feature (1)..(357): Homolog of NCBI NO: 3287294 NR Description: dihydroflavonol4-reductase [Zea mays]
  misc_feature (1)..(357): Homolog of NCBI NO: 7427698 NR Description: dihydrokaempferol 4-reductase (EC 1.1.1.219) A -
  misc_feature (1)..(339): Homolog of NCBI NO: 7427697 NR Description: dihydrokaempferol 4-reductase (EC 1.1.1.219) A -
  misc_feature (6)..(357): Homolog of NCBI NO: 7427699 NR Description: dihydrokaempferol 4-reductase (EC 1.1.1.219) B -
  misc_feature (10)..(357): Homolog of NCBI NO: 28912450 NR Description: dihydroflavonol 4-reductase [Triticum aestivum]
  misc_feature (10)..(357): Homolog of NCBI NO: 28932727 NR Description: dihydroflavonol 4-reductase [Lophopyrum ponticum
  misc_feature (10)..(357): Homolog of NCBI NO: 1706372 NR Description: DIHYDROFLAVONOL-4-REDUCTASE (DFR)
  misc_feature (10)..(357): Homolog of NCBI NO: 28883586 NR Description: dihydroflavonol 4-reductase [Lophopyrum ponticum
MEGGAGASEKGKVLVTGASGFVGSWLVMKLLQAGYTVRATVRDPANVGKTKPLMDLPGATERLSIWKADLAEEGSFHDAIRGCTGVFHVATPMDFLSKDPENEVIKPTVEGMISIMRACKEAGTVRRIVFTSSAGTVNLEERQRPVYDEESWTDVDFCRRVKMTGWMYFVSKTLAEKAALAYAAEHGLDLVTIIPTLVVGPFISASMPPSLITALALITGNAPHYSILKQVQLIHLDDLCDAEIFLFENPAAAGRYVCSSHDVTIHGLAAMLRDRYPEYDVPQRFPGIQDDLQPVRFSSKKLQDLGFTFRYKTLEDMFDAAIRTCQEKGLIPLATAAGGDGFASVRAPGETEATIGA

SEQ ID NO: 14099 - protein, 330 aa, Zea mays subsp. mays
  peptide (1)..(330): Ceres Seq. ID no. 15178643
  misc_feature (1)..(280): Pfam Name: NAD dependent epimerase/dehydratase family Pfam Description: NAD dependent epimerase/dehydratase family
  misc_feature (1)..(330): Homolog of NCBI NO: 1706374 NR Description: DIHYDROFLAVONOL-4-REDUCTASE (DFR)
  misc_feature (1)..(330): Homolog of NCBI NO: 7427700 NR Description: dihydrokaempferol 4-reductase (EC 1.1.1.219) B -
  misc_feature (1)..(330): Homolog of NCBI NO: 3287294 NR Description: dihydroflavonol4-reductase [Zea mays]
  misc_feature (1)..(330): Homolog of NCBI NO: 7427698 NR Description: dihydrokaempferol 4-reductase (EC 1.1.1.219) A -
  misc_feature (1)..(312): Homolog of NCBI NO: 7427697 NR Description: dihydrokaempferol 4-reductase (EC 1.1.1.219) A -
  misc_feature (1)..(330): Homolog of NCBI NO: 7427699 NR Description: dihydrokaempferol 4-reductase (EC 1.1.1.219) B -
  misc_feature (1)..(330): Homolog of NCBI NO: 28912450 NR Description: dihydroflavonol 4-reductase [Triticum aestivum]
  misc_feature (1)..(330): Homolog of NCBI NO: 28932727 NR Description: dihydroflavonol 4-reductase [Lophopyrum ponticum
  misc_feature (1)..(330): Homolog of NCBI NO: 1706372 NR Description: DIHYDROFLAVONOL-4-REDUCTASE (DFR)
  misc_feature (1)..(330): Homolog of NCBI NO: 28883586 NR Description: dihydroflavonol 4-reductase [Lophopyrum ponticum
MKLLQAGYTVRATVRDPANVGKTKPLMDLPGATERLSIWKADLAEEGSFHDAIRGCTGVFHVATPMDFLSKDPENEVIKPTVEGMISIMRACKEAGTVRRIVFTSSAGTVNLEERQRPVYDEESWTDVDFCRRVKMTGWMYFVSKTLAEKAALAYAAEHGLDLVTIIPTLVVGPFISASMPPSLITALALITGNAPHYSILKQVQLIHLDDLCDAEIFLFENPAAAGRYVCSSHDVTIHGLAAMLRDRYPEYDVPQRFPGIQDDLQPVRFSSKKLQDLGFTFRYKTLEDMFDAAIRTCQEKGLIPLATAAGGDGFASVRAPGETEATIGA

SEQ ID NO: 14100 - DNA, 1359 bp, Zea mays subsp. mays; identical to SEQ ID NO: 6407
  misc_feature (1)..(1359): Ceres Seq. ID no. 12408140
  misc_feature: MA Experiment ID: 108522 Result: Up-regulated in Transcription
  misc_feature: MA Experiment 108522 PARAMETER Experiment Name: Zm_42deg_Heat_P Parameter: Age (day) Value: 8
  misc_feature: MA Experiment 108522 PARAMETER Experiment Name: Zm_42deg_Heat_P Parameter: Organism Value: Zea mays
  misc_feature: MA Experiment 108522 PARAMETER Experiment Name: Zm_42deg_Heat_P Parameter: Plant Line Value: 35A19
  misc_feature: MA Experiment 108522 PARAMETER Experiment Name: Zm_42deg_Heat_P Parameter: Temperature (deg C) Value: 42 vs. 22
  misc_feature: MA Experiment 108522 PARAMETER Experiment Name: Zm_42deg_Heat_P Parameter: Timepoint (hr) Value: 1
  misc_feature: MA Experiment 108522 PARAMETER Experiment Name: Zm_42deg_Heat_P Parameter: Tissue Value: Aerial
  misc_feature: MA Experiment ID: 108545 Result: Up-regulated in Transcription
  misc_feature: MA Experiment 108545 PARAMETER Experiment Name: Zm_Imbibed_Seeds_P Parameter: Age (day) Value: 3 vs. 2
  misc_feature: MA Experiment 108545 PARAMETER Experiment Name: Zm_Imbibed_Seeds_P Parameter: Organism Value: Zea mays
  misc_feature: MA Experiment 108545 PARAMETER Experiment Name: Zm_Imbibed_Seeds_P Parameter: Plant Line Value: 35A19
  misc_feature: MA Experiment 108545 PARAMETER Experiment Name: Zm_Imbibed_Seeds_P Parameter: Tissue Value: Aerial vs. Embryo
  misc_feature: MA Experiment ID: 108547 Result: Up-regulated in Transcription
  misc_feature: MA Experiment 108547 PARAMETER Experiment Name: Zm_Imbibed_Seeds_P Parameter: Age (day) Value: 4 vs. 2
  misc_feature: MA Experiment 108547 PARAMETER Experiment Name: Zm_Imbibed_Seeds_P Parameter: Organism Value: Zea mays
  misc_feature: MA Experiment 108547 PARAMETER Experiment Name: Zm_Imbibed_Seeds_P Parameter: Plant Line Value: 35A19
  misc_feature: MA Experiment 108547 PARAMETER Experiment Name: Zm_Imbibed_Seeds_P Parameter: Tissue Value: Aerial vs. Embryo

SEQ ID NO: 14101 - protein, 246 aa, Zea mays subsp. mays; identical to SEQ ID NO: 6408
  peptide (1)..(246): Ceres Seq. ID no. 12408141
  misc_feature (151)..(246): Pfam Name: Chaperonin 10 Kd subunit Pfam Description: Chaperonin 10 Kd subunit
  misc_feature (151)..(246): Pfam Name: Chaperonin 10 Kd subunit Pfam Description: Chaperonin 10 Kd subunit
  misc_feature (4)..(246): Homolog of NCBI NO: 15242045 NR Description: chloroplast Cpn21 protein; protein id: supported by cDNA: gi_10179871, supported by cDNA: gi_14334611, by cDNA: gi_14587372, supported by cDNA: gi_16226814, supported
  misc_feature (1)..(246): Homolog of NCBI NO: 7331143 NR Description: chaperonin 21 precursor [Lycopersicon esculentum]
  misc_feature (4)..(246): Homolog of NCBI NO: 25453528 NR Description: chaperonin 10 [imported] - Arabidopsis thaliana
  misc_feature (2)..(246): Homolog of NCBI NO: 21780187 NR Description: cp10-like protein [Gossypium hirsutum]
  misc_feature (35)..(246): Homolog of NCBI NO: 399241 NR Description: 20 kDa chaperonin, chloroplast precursor (Protein
  misc_feature (1)..(246): Homolog of NCBI NO: 7331143 NR Description: chaperonin 21 precursor [Lycopersicon esculentum]
  misc_feature (2)..(246): Homolog of NCBI NO: 21780187 NR Description: cp10-like protein [Gossypium hirsutum]
  misc_feature (54)..(145): Homolog of NCBI NO: 23113174 NR Description: hypothetical protein [Desulfitobacterium
  misc_feature (55)..(146): Homolog of NCBI NO: 20807075 NR Description: Co-chaperonin GroES (HSP10) [Thermoanaerobacter
  misc_feature (55)..(146): Homolog of NCBI NO: 2493659 NR Description: 10 kDa chaperonin (Protein Cpn10) (groES protein)
  misc_feature (152)..(246): Homolog of NCBI NO: 3599923 NR Description: GroES/HSP10 homolog [Lawsonia intracellularis]
  misc_feature (150)..(245): Homolog of NCBI NO: 22297730 NR Description: 10kD chaperonin [Thermosynechococcus elongatus >gi|4033374|sp|O50322|CH10_SYNEL 10 kDa chaperonin (Protein (groES protein) >gi|2696700|dbj|BAA23816.1| GroES [Synechococcus
  misc_feature (35)..(246): Homolog of NCBI NO: 399241 NR Description: 20 kDa chaperonin, chloroplast precursor (Protein
  misc_feature (4)..(246): Homolog of NCBI NO: 25453528 NR Description: chaperonin 10 [imported] - Arabidopsis thaliana
  misc_feature (4)..(246): Homolog of NCBI NO: 15242045 NR Description: chloroplast Cpn21 protein; protein id: supported by cDNA: gi_10179871, supported by cDNA: gi_14334611, by cDNA: gi_14587372, supported by cDNA: gi_16226814, supported
  misc_feature (150)..(245): Homolog of NCBI NO: 22297730 NR Description: 10kD chaperonin [Thermosynechococcus elongatus >gi|4033374|sp|O50322|CH10_SYNEL 10 kDa chaperonin (Protein (groES protein) >gi|2696700|dbj|BAA23816.1| GroES [Synechococcus
  misc_feature (152)..(246): Homolog of NCBI NO: 3599923 NR Description: GroES/HSP10 homolog [Lawsonia intracellularis]
  misc_feature (55)..(146): Homolog of NCBI NO: 2493659 NR Description: 10 kDa chaperonin (Protein Cpn10) (groES protein)
  misc_feature (55)..(146): Homolog of NCBI NO: 20807075 NR Description: Co-chaperonin GroES (HSP10) [Thermoanaerobacter
  misc_feature (54)..(145): Homolog of NCBI NO: 23113174 NR Description: hypothetical protein [Desulfitobacterium

SEQ ID NO: 14102 - DNA, 1540 bp, Zea mays subsp. mays
  misc_feature (1)..(1540): Ceres Seq. ID no. 12435829
  misc_feature: MA Experiment ID: 108527 Result: Up-regulated in Transcription
  misc_feature: MA Experiment 108527 PARAMETER Experiment Name: Zm_5mM_NO_P Parameter: Age (day) Value: 8
  misc_feature: MA Experiment 108527 PARAMETER Experiment Name: Zm_5mM_NO_P Parameter: Organism Value: Zea mays
  misc_feature: MA Experiment 108527 PARAMETER Experiment Name: Zm_5mM_NO_P Parameter: Plant Line Value: 35A19
  misc_feature: MA Experiment 108527 PARAMETER Experiment Name: Zm_5mM_NO_P Parameter: Timepoint (hr) Value: 6
  misc_feature: MA Experiment 108527 PARAMETER Experiment Name: Zm_5mM_NO_P Parameter: Tissue Value: Aerial
  misc_feature: MA Experiment 108527 PARAMETER Experiment Name: Zm_5mM_NO_P Parameter: Treatment Value: 5mM NO vs. No Treatment
  misc_feature: MA Experiment ID: 108543 Result: Down-regulated in Transcription
ggggacctcttctcatcgtcatctccgccgacggaagctgcgtgcgctcgtcgtctttatgctgttccatccaggcttcagttcacaaataaccgccgcactgctggctgctgttaccagcttccttgacgatcgaccagtccaaagctttcgtcatctctttgatcccacgcggcctcacccggctccggctccggctcagcaatcaattccccatacgaattactaatctctctgatttcctttcagctcatcggcatgccgcaggcagcagcagcagcagcagcagcagccgtgcacggcaaggaccccagcaccgtccgtccggccgcgctgcccctgaagctcctccgccctctcctcctcgtggcggtgctcggcacgggcttcctcgccgccgtggccctgctcgtcggcggccccgcctactcgtccgcgctcccgcgcccgccggtcgccctgccgcccgcgccgccgtcgggcggcgggaagcagcagccgctggagcggtgggcgcgggcgccggcgtcccgcgtggcacaacatgaccgacgacgagctgctgtgggcggcgtcgtggcgccccagcgtccggcgctacccgtaccgccggacgcccaaggtggccttcatgttcctgacccgcggcccgctgccgctggcgccgctgtgggagcgcttcttcgccggcgccgggggcggggacgccggcctcttctccgtctacgtgcacgccacgccggggtaccgccccgacttcgcgccggcgtccgccttctaccgccgccaagtgcccagccaggtggccgagtggggcgagccgagcatgttcgacgcggagcggcggctgctggcgaacgcgctgctggacccgggcaacgagcgcttcgtgctgctgtccgagtcgtgcgtgccgctgtacggcttcccggcggtgtacagctacctgacgcggtcgcgggagagcttcgtgggcgcgttcgacgacccgggcccgggaggccggggccggtaccagggcgggctggccccggaggtggtccgcgagcagttccgcaagggcgcagtggttcgagctggaccgcgccctcgccgtcgacgttgtcgccgacggccgctactaccccaagttccgggagcactgccggccgccgtgctacgcggacgagcactacctgccgacggcgctctccatcctggcccccgcgcggatcgccaaccgcagcgtcacgtgggtggactggtcccgcggcggcgcgcacccggccacgttcggggaggccgacgtcggcgaggcgttcctcaggcggctcacggcgcccgggaagggccagggcaactgcacctacaacggccagccggcgcaggtgtgcttcctgttcgcaaggaagctggcgcccggcacgctgcagccgctgctcaggctcgccccgaagctgctcggatacggctgactgtcactgtcactctgactgctcacctctgaatctgaatctgaatcttctccaaagtgacacaaagacacctctgaatctgattt

SEQ ID NO: 14103 - protein, 427 aa, Zea mays subsp. mays
  peptide (1)..(427): Ceres Seq. ID no. 12435830
  misc_feature (69)..(292): Pfam Name: Protein of unknown function (DUF390) Pfam Description: Protein of unknown function (DUF390)
  misc_feature (89)..(370): Homolog of NCBI NO: 23106243 NR Description: hypothetical protein [Azotobacter vinelandii]
  misc_feature (246)..(405): Homolog of NCBI NO: 13592175 NR Description: ppg3 [Leishmania major]
  misc_feature (6)..(396): Homolog of NCBI NO: 7018571 NR Description: hypothetical protein L8325.10 [Leishmania major]
  misc_feature (266)..(403): Homolog of NCBI NO: 28574039 NR Description: Salivary gland secretion 1 CG3047-PA
  misc_feature (270)..(407): Homolog of NCBI NO: 15901602 NR Description: cell wall surface anchor family protein pneumoniae TIGR4] >gi|25389341|pir||E95206 cell wall surface
  misc_feature (270)..(407): Homolog of NCBI NO: 15901602 NR Description: cell wall surface anchor family protein pneumoniae TIGR4] >gi|25389341|pir||E95206 cell wall surface
  misc_feature (256)..(398): Homolog of NCBI NO: 13592175 NR Description: ppg3 [Leishmania major]
  misc_feature (261)..(368): Homolog of NCBI NO: 28574039 NR Description: Salivary gland secretion 1 CG3047-PA
  misc_feature (16)..(363): Homolog of NCBI NO: 27375632 NR Description: blr0521 [Bradyrhizobium japonicum]
  misc_feature (246)..(398): Homolog of NCBI NO: 13592175 NR Description: ppg3 [Leishmania major]
MPQAAAAAAAAAVHGKDPSTVRPAALPLKLLRPLLLVAVLGTGFLAAVALLVGGPAYSSALPRPPVALPPAPPSGGGKQQPLERWARAPASRVAQHDRRRAAVGGVVAPQRPALPVPPDAQGGLHVPDPRPAAAGAAVGALLRRRRGRGRRPLLRLRARHAGVPPRLRAGVRLLPPPSAQPGGRVGRAEHVRRGAAAAGERAAGPGQRALRAAVRVVRAAVRLPGGVQLPDAVAGELRGRVRRPGPGRPGPVPGRAGPGGGPRAVPQGRSGSSWTAPSPSTLSPTAATTPSSGSTAGRRATRTSTTCRRRSPSWPPRGSPTAASRGWTGPAAARTRPRSGRPTSARRSSGGSRRPGRARATAPTTASRRRCASCSQGSWRPARCSRCSGSPRSCSDTADCHCHSDCSPLNLNLNLLQSDTKTPLNLI

SEQ ID NO: 14104 - protein, 313 aa, Zea mays subsp. mays
  peptide (1)..(313): Ceres Seq. ID no. 12435831
  misc_feature (66)..(174): Pfam Name: Arabidopsis protein of unknown function, DUF266 Pfam Description: Arabidopsis protein of unknown function, DUF266
  misc_feature (1)..(174): Homolog of NCBI NO: 18402952 NR Description: expressed protein; protein id: At3g21310.1,
  misc_feature (1)..(174): Homolog of NCBI NO: 21554566 NR Description: unknown [Arabidopsis thaliana]
  misc_feature (1)..(174): Homolog of NCBI NO: 15239155 NR Description: putative protein; protein id: At5g11730.1, by cDNA: gi_20260569 [Arabidopsis thaliana]
  misc_feature (1)..(174): Homolog of NCBI NO: 15218028 NR Description: hypothetical protein; protein id: At1g51770.1
  misc_feature (1)..(174): Homolog of NCBI NO: 15239557 NR Description: putative protein; protein id: At5g25970.1 thaliana] >gi|5107829|gb|AAD40142.1|AF149413_23 contains to several Arabidopsis thaliana hypothetical proteins including
  misc_feature (1)..(174): Homolog of NCBI NO: 38344090 NR Description: OSJNBb0056F09.13 [Oryza sativa (japonica
  misc_feature (1)..(174): Homolog of NCBI NO: 9280235 NR Description: gb|AAD40142.1~gene_id:MXL8.19~strong similarity
  misc_feature (1)..(174): Homolog of NCBI NO: 15218485 NR Description: unknown protein; protein id: At1g10280.1 thaliana] >gi|4914330|gb|AAD32878.1|AC005489_16 F14N23.16
  misc_feature (1)..(174): Homolog of NCBI NO: 34895606 NR Description: OSJNBa0083M16.15 [Oryza sativa (japonica
  misc_feature (1)..(174): Homolog of NCBI NO: 34907318 NR Description: contains ESTs to Arabidopsis thaliana chromosome 1, At1g10280~unknown protein
MTDDELLWAASWRPSVRRYPYRRTPKVAFMFLTRGPLPLAPLWERFFAGAGGGDAGLFSVYVHATPGYRPDFAPASAFYRRQVPSQVAEWGEPSMFDAERRLLANALLDPGNERFVLLSESCVPLYGFPAVYSYLTRSRESFVGAFDDPGPGGRGRYQGGLAPEVVREQFRKGAVVRAGPRPRRRRCRRRPLLPQVPGALPAAVLRGRALPADGALHPGPRADRQPQRHVGGLVPRRRAPGHVRGGRRRRGVPQAAHGAREGPGQLHLQRPAGAGVLPVRKEAGARHAAAAAQARPEAARIRLTVTVTLTAHL

SEQ ID NO: 14105 - protein, 284 aa, Zea mays subsp. mays
  peptide (1)..(284): Ceres Seq. ID no. 12435832
  misc_feature (37)..(145): Pfam Name: Arabidopsis protein of unknown function, DUF266 Pfam Description: Arabidopsis protein of unknown function, DUF266
  misc_feature (1)..(145): Homolog of NCBI NO: 9280235 NR Description: gb|AAD40142.1~gene_id:MXL8.19~strong similarity
  misc_feature (1)..(145): Homolog of NCBI NO: 15218485 NR Description: unknown protein; protein id: At1g10280.1 thaliana] >gi|4914330|gb|AAD32878.1|AC005489_16 F14N23.16
  misc_feature (1)..(145): Homolog of NCBI NO: 18402952 NR Description: expressed protein; protein id: At3g21310.1,
  misc_feature (1)..(145): Homolog of NCBI NO: 15239155 NR Description: putative protein; protein id: At5g11730.1, by cDNA: gi_20260569 [Arabidopsis thaliana]
  misc_feature (1)..(145): Homolog of NCBI NO: 15239557 NR Description: putative protein; protein id: At5g25970.1 thaliana] >gi|5107829|gb|AAD40142.1|AF149413_23 contains to several Arabidopsis thaliana hypothetical proteins including
  misc_feature (1)..(145): Homolog of NCBI NO: 38344090 NR Description: OSJNBb0056F09.13 [Oryza sativa (japonica
  misc_feature (1)..(145): Homolog of NCBI NO: 15218028 NR Description: hypothetical protein; protein id: At1g51770.1
  misc_feature (1)..(145): Homolog of NCBI NO: 21554566 NR Description: unknown [Arabidopsis thaliana]
  misc_feature (1)..(145): Homolog of NCBI NO: 34895606 NR Description: OSJNBa0083M16.15 [Oryza sativa (japonica
  misc_feature (1)..(145): Homolog of NCBI NO: 34907318 NR Description: contains ESTs to Arabidopsis thaliana chromosome 1, At1g10280~unknown protein
MFLTRGPLPLAPLWERFFAGAGGGDAGLFSVYVHATPGYRPDFAPASAFYRRQVPSQVAEWGEPSMFDAERRLLANALLDPGNERFVLLSESCVPLYGFPAVYSYLTRSRESFVGAFDDPGPGGRGRYQGGLAPEVVREQFRKGAVVRAGPRPRRRRCRRRPLLPQVPGALPAAVLRGRALPADGALHPGPRADRQPQRHVGGLVPRRRAPGHVRGGRRRRGVPQAAHGAREGPGQLHLQRPAGAGVLPVRKEAGARHAAAAAQARPEAARIRLTVTVTLTAHL

SEQ ID NO: 14106 - DNA, 1002 bp, Zea mays subsp. mays
  misc_feature (1)..(1002): Ceres Seq. ID no. 12454907
  misc_feature: MA Experiment ID: 108527 Result: Down-regulated in Transcription
  misc_feature: MA Experiment 108527 PARAMETER Experiment Name: Zm_5mM_NO_P Parameter: Age (day) Value: 8
  misc_feature: MA Experiment 108527 PARAMETER Experiment Name: Zm_5mM_NO_P Parameter: Organism Value: Zea mays
  misc_feature: MA Experiment 108527 PARAMETER Experiment Name: Zm_5mM_NO_P Parameter: Plant Line Value: 35A19
  misc_feature: MA Experiment 108527 PARAMETER Experiment Name: Zm_5mM_NO_P Parameter: Timepoint (hr) Value: 6
  misc_feature: MA Experiment 108527 PARAMETER Experiment Name: Zm_5mM_NO_P Parameter: Tissue Value: Aerial
  misc_feature: MA Experiment 108527 PARAMETER Experiment Name: Zm_5mM_NO_P Parameter: Treatment Value: 5mM NO vs. No Treatment
  misc_feature: MA Experiment ID: 108535 Result: Down-regulated in Transcription
  misc_feature: MA Experiment 108535 PARAMETER Experiment Name: Zm_Meristem_P Parameter: Age (day) Value: 8
  misc_feature: MA Experiment 108535 PARAMETER Experiment Name: Zm_Meristem_P Parameter: Organism Value: Zea mays
  misc_feature: MA Experiment 108535 PARAMETER Experiment Name: Zm_Meristem_P Parameter: Plant Line Value: 35A19
  misc_feature: MA Experiment 108535 PARAMETER Experiment Name: Zm_Meristem_P Parameter: Tissue Value: Root Meristem vs. Above Root Meristem
  misc_feature: MA Experiment ID: 108556 Result: Down-regulated in Transcription
  misc_feature: MA Experiment 108556 PARAMETER Experiment Name: Zm_Drought_P Parameter: Age (day) Value: 9
  misc_feature: MA Experiment 108556 PARAMETER Experiment Name: Zm_Drought_P Parameter: Organism Value: Zea mays
  misc_feature: MA Experiment 108556 PARAMETER Experiment Name: Zm_Drought_P Parameter: Plant Line Value: 35A19
  misc_feature: MA Experiment 108556 PARAMETER Experiment Name: Zm_Drought_P Parameter: Timepoint (hr) Value: 24
  misc_feature: MA Experiment 108556 PARAMETER Experiment Name: Zm_Drought_P Parameter: Tissue Value: Aerial
  misc_feature: MA Experiment 108556 PARAMETER Experiment Name: Zm_Drought_P Parameter: Treatment Value: Drought vs. No Drought
  misc_feature: MA Experiment ID: 108559 Result: Down-regulated in Transcription
  misc_feature: MA Experiment 108559 PARAMETER Experiment Name: Zm_5mM_NO_P Parameter: Age (day) Value: 8
  misc_feature: MA Experiment 108559 PARAMETER Experiment Name: Zm_5mM_NO_P Parameter: Organism Value: Zea mays
  misc_feature: MA Experiment 108559 PARAMETER Experiment Name: Zm_5mM_NO_P Parameter: Plant Line Value: 35A19
  misc_feature: MA Experiment 108559 PARAMETER Experiment Name: Zm_5mM_NO_P Parameter: Timepoint (hr) Value: 12
  misc_feature: MA Experiment 108559 PARAMETER Experiment Name: Zm_5mM_NO_P Parameter: Tissue Value: Aerial
  misc_feature: MA Experiment 108559 PARAMETER Experiment Name: Zm_5mM_NO_P Parameter: Treatment Value: 5mM NO vs. No Treatment
  misc_feature: MA Experiment ID: 20000480 Result: Down-regulated in Transcription
  misc_feature: MA Experiment 20000480 PARAMETER Experiment Name: Zm_Drought_P Parameter: Age (day) Value: 11
  misc_feature: MA Experiment 20000480 PARAMETER Experiment Name: Zm_Drought_P Parameter: Organism Value: Zea mays
  misc_feature: MA Experiment 20000480 PARAMETER Experiment Name: Zm_Drought_P Parameter: Plant Line Value: 35A19
  misc_feature: MA Experiment 20000480 PARAMETER Experiment Name: Zm_Drought_P Parameter: Timepoint (hr) Value: 72
  misc_feature: MA Experiment 20000480 PARAMETER Experiment Name: Zm_Drought_P Parameter: Tissue Value: Aerial
  misc_feature: MA Experiment 20000480 PARAMETER Experiment Name: Zm_Drought_P Parameter: Treatment Value: Drought vs. No Drought
atccgtccgtccatccaatgcgatggtgtcgttggcgcgccggccgctctccgccgccgtacctgcgggcaacctcctcggcatccatctcttccggtgccccgacgccgttggcatcgtcgccaagctctcggaatgcatcgcctcccgcggtggcaacatccacagcgtcgacgtcttcgtccccgacgacaaacccgtcttctactcccgcagtgagtttacctacaatccaaggctctggtctcgtcatgagctccacaaggatttcctcaatctctcccgctgcttcaatgcgcaaacctccaccgtacgagttcccgatcttgaccccaaatacaacatctccatcctcgcatcaaagcaggaccactgcttgttcgatttgctctatagatggcaagaaggcaggcttccagtacacatcaattgtgtcattagcaaccatgatagaccacaagataatcatgtacggcgttttctccagaggcatggaatcccataccactacttacccaccgcacctgccaacaaaagagagaaagagatcttggaattgatccagggtacagattttgttgtgctggcaagatacatgcagatactctcagaaaacttgttaaaagcatatggtaaagacattatcaatattcatcatggccttcttccctcatttaagggagggaatccttcaagacaggccttcagtgctggggtgaagttaatcggggcaactagccatttcgttactccagaacttgatgctgggccaatcattgaacagatggttgaacgagtctctcaccgagacacgttacagagttttgttgtcaagtctgagaaccttgagaagcagtgcttagcagaggctatcaagtcatattgcgagcttcgtgtcctaccatatgaactcaggaagactgtcgtgttctgatctgagctccctttattttctgtcttattgtacttttatatggattgataaaatgaatttttttagct

SEQ ID NO: 14107 - protein, 310 aa, Zea mays subsp. mays
  peptide (1)..(310): Ceres Seq. ID no. 12454908
  misc_feature (113)..(291): Pfam Name: Formyl transferase Pfam Description: Formyl transferase
  misc_feature (27)..(310): Homolog of NCBI NO: 15236046 NR Description: phosphoribosylglycinamide formyltransferase-like
  misc_feature (16)..(310): Homolog of NCBI NO: 18422794 NR Description: Expressed protein; protein id: At5g47435.1, by cDNA: gi_16648926, supported by cDNA: gi_20148260 [Arabidopsis
  misc_feature (45)..(310): Homolog of NCBI NO: 7433570 NR Description: probable formyltransferase purU - Arabidopsis >gi|2245095|emb|CAB10517.1| formyltransferase purU homolog thaliana] >gi|7268488|emb|CAB78739.1| formyltransferase purU
  misc_feature (28)..(310): Homolog of NCBI NO: 15606867 NR Description: formyltetrahydrofolate deformylase [Aquifex
  misc_feature (33)..(310): Homolog of NCBI NO: 15599510 NR Description: formyltetrahydrofolate deformylase [Pseudomonas PA01] >gi|11348559|pir||C83105 formyltetrahydrofolate deformylase
  misc_feature (16)..(310): Homolog of NCBI NO: 21674639 NR Description: formyltetrahydrofolate deformylase [Chlorobium TLS] >gi|21647842|gb|AAM73046.1| formyltetrahydrofolate
  misc_feature (33)..(310): Homolog of NCBI NO: 27381066 NR Description: formyltetrahydrofolate deformylase japonicum] >gi|27354232|dbj|BAC51220.1| formyltetrahydrofolate
  misc_feature (33)..(310): Homolog of NCBI NO: 23105027 NR Description: hypothetical protein [Azotobacter vinelandii]
  misc_feature (15)..(310): Homolog of NCBI NO: 37523894 NR Description: formyltetrahydrofolate deformylase [Gloeobacter >gi|35214900|dbj|BAC92266.1| formyltetrahydrofolate deformylase
  misc_feature (33)..(310): Homolog of NCBI NO: 16127860 NR Description: formyltetrahydrofolate deformylase [Caulobacter
SVRPSNAMVSLARRPLSAAVPAGNLLGIHLFRCPDAVGIVAKLSECIASRGGNIHSVDVFVPDDKPVFYSRSEFTYNPRLWSRHELHKDFLNLSRCFNAQTSTVRVPDLDPKYNISILASKQDHCLFDLLYRWQEGRLPVHINCVISNHDRPQDNHVRRFLQRHGIPYHYLPTAPANKREKEILELIQGTDFVVLARYMQILSENLLKAYGKDIINIHHGLLPSFKGGNPSRQAFSAGVKLIGATSHFVTPELDAGPIIEQMVERVSHRDTLQSFVVKSENLEKQCLAEAIKSYCELRVLPYELRKTVVF

SEQ ID NO: 14108 - protein, 303 aa, Zea mays subsp. mays
  peptide (1)..(303): Ceres Seq. ID no. 12454909
  misc_feature (106)..(284): Pfam Name: Formyl transferase Pfam Description: Formyl transferase
  misc_feature (20)..(303): Homolog of NCBI NO: 15236046 NR Description: phosphoribosylglycinamide formyltransferase-like
  misc_feature (9)..(303): Homolog of NCBI NO: 18422794 NR Description: Expressed protein; protein id: At5g47435.1, by cDNA: gi_16648926, supported by cDNA: gi_20148260 [Arabidopsis
  misc_feature (38)..(303): Homolog of NCBI NO: 7433570 NR Description: probable formyltransferase purU - Arabidopsis >gi|2245095|emb|CAB10517.1| formyltransferase purU homolog thaliana] >gi|7268488|emb|CAB78739.1| formyltransferase purU
  misc_feature (21)..(303): Homolog of NCBI NO: 15606867 NR Description: formyltetrahydrofolate deformylase [Aquifex
  misc_feature (26)..(303): Homolog of NCBI NO: 15599510 NR Description: formyltetrahydrofolate deformylase [Pseudomonas PA01] >gi|11348559|pir||C83105 formyltetrahydrofolate deformylase
  misc_feature (9)..(303): Homolog of NCBI NO: 21674639 NR Description: formyltetrahydrofolate deformylase [Chlorobium TLS] >gi|21647842|gb|AAM73046.1| formyltetrahydrofolate
  misc_feature (26)..(303): Homolog of NCBI NO: 27381066 NR Description: formyltetrahydrofolate deformylase japonicum] >gi|27354232|dbj|BAC51220.1| formyltetrahydrofolate
  misc_feature (26)..(303): Homolog of NCBI NO: 23105027 NR Description: hypothetical protein [Azotobacter vinelandii]
  misc_feature (8)..(303): Homolog of NCBI NO: 37523894 NR Description: formyltetrahydrofolate deformylase [Gloeobacter >gi|35214900|dbj|BAC92266.1| formyltetrahydrofolate deformylase
  misc_feature (26)..(303): Homolog of NCBI NO: 16127860 NR Description: formyltetrahydrofolate deformylase [Caulobacter
MVSLARRPLSAAVPAGNLLGIHLFRCPDAVGIVAKLSECIASRGGNIHSVDVFVPDDKPVFYSRSEFTYNPRLWSRHELHKDFLNLSRCFNAQTSTVRVPDLDPKYNISILASKQDHCLFDLLYRWQEGRLPVHINCVISNHDRPQDNHVRRFLQRHGIPYHYLPTAPANKREKEILELIQGTDFVVLARYMQILSENLLKAYGKDIINIHHGLLPSFKGGNPSRQAFSAGVKLIGATSHFVTPELDAGPIIEQMVERVSHRDTLQSFVVKSENLEKQCLAEAIKSYCELRVLPYELRKTVVF

SEQ ID NO: 14109 - protein, 185 aa, Zea mays subsp. mays
  peptide (1)..(185): Ceres Seq. ID no. 12454910
PSVHPMRWCRWRAGRSPPPYLRATSSASISSGAPTPLASSPSSRNASPPAVATSTASTSSSPTTNPSSTPAVSLPTIQGSGLVMSSTRISSISPAASMRKPPPYEFPILTPNTTSPSSHQSRTTACSICSIDGKKAGFQYTSIVSLATMIDHKIIMYGVFSRGMESHTTTYPPHLPTKERKRSWN

SEQ ID NO: 14110 - DNA, 2394 bp, Zea mays subsp. mays
  misc_feature (1)..(2394): Ceres Seq. ID no. 12567160
  misc_feature: MA Experiment ID: 108527 Result: Down-regulated in Transcription
  misc_feature: MA Experiment 108527 PARAMETER Experiment Name: Zm_5mM_NO_P Parameter: Age (day) Value: 8
  misc_feature: MA Experiment 108527 PARAMETER Experiment Name: Zm_5mM_NO_P Parameter: Organism Value: Zea mays
  misc_feature: MA Experiment 108527 PARAMETER Experiment Name: Zm_5mM_NO_P Parameter: Plant Line Value: 35A19
  misc_feature: MA Experiment 108527 PARAMETER Experiment Name: Zm_5mM_NO_P Parameter: Timepoint (hr) Value: 6
  misc_feature: MA Experiment 108527 PARAMETER Experiment Name: Zm_5mM_NO_P Parameter: Tissue Value: Aerial
  misc_feature: MA Experiment 108527 PARAMETER Experiment Name: Zm_5mM_NO_P Parameter: Treatment Value: 5mM NO vs. No Treatment
  misc_feature: MA Experiment ID: 108529 Result: Down-regulated in Transcription
  misc_feature: MA Experiment 108529 PARAMETER Experiment Name: Zm_Imbibed_Seeds_P Parameter: Age (day) Value: 5 vs. 2
  misc_feature: MA Experiment 108529 PARAMETER Experiment Name: Zm_Imbibed_Seeds_P Parameter: Organism Value: Zea mays
  misc_feature: MA Experiment 108529 PARAMETER Experiment Name: Zm_Imbibed_Seeds_P Parameter: Plant Line Value: 35A19
  misc_feature: MA Experiment 108529 PARAMETER Experiment Name: Zm_Imbibed_Seeds_P Parameter: Tissue Value: Roots vs. Embryo
  misc_feature: MA Experiment ID: 108530 Result: Up-regulated in Transcription
  misc_feature: MA Experiment 108530 PARAMETER Experiment Name: Zm_Imbibed_Seeds_P Parameter: Age (day) Value: 6 vs. 2
  misc_feature: MA Experiment 108530 PARAMETER Experiment Name: Zm_Imbibed_Seeds_P Parameter: Organism Value: Zea mays
  misc_feature: MA Experiment 108530 PARAMETER Experiment Name: Zm_Imbibed_Seeds_P Parameter: Plant Line Value: 35A19
  misc_feature: MA Experiment 108530 PARAMETER Experiment Name: Zm_Imbibed_Seeds_P Parameter: Tissue Value: Aerial vs. Embryo
  misc_feature: MA Experiment ID: 108544 Result: Up-regulated in Transcription
  misc_feature: MA Experiment ID: 108545 Result: Up-regulated in Transcription
  misc_feature: MA Experiment 108545 PARAMETER Experiment Name: Zm_Imbibed_Seeds_P Parameter: Age (day) Value: 3 vs. 2
  misc_feature: MA Experiment 108545 PARAMETER Experiment Name: Zm_Imbibed_Seeds_P Parameter: Organism Value: Zea mays
  misc_feature: MA Experiment 108545 PARAMETER Experiment Name: Zm_Imbibed_Seeds_P Parameter: Plant Line Value: 35A19
  misc_feature: MA Experiment 108545 PARAMETER Experiment Name: Zm_Imbibed_Seeds_P Parameter: Tissue Value: Aerial vs. Embryo
  misc_feature: MA Experiment ID: 108546 Result: Down-regulated in Transcription
  misc_feature: MA Experiment 108546 PARAMETER Experiment Name: Zm_Imbibed_Seeds_P Parameter: Age (day) Value: 3 vs. 2
  misc_feature: MA Experiment 108546 PARAMETER Experiment Name: Zm_Imbibed_Seeds_P Parameter: Organism Value: Zea mays
  misc_feature: MA Experiment 108546 PARAMETER Experiment Name: Zm_Imbibed_Seeds_P Parameter: Plant Line Value: 35A19
  misc_feature: MA Experiment 108546 PARAMETER Experiment Name: Zm_Imbibed_Seeds_P Parameter: Tissue Value: Roots vs. Embryo
  misc_feature: MA Experiment ID: 108559 Result: Down-regulated in Transcription
  misc_feature: MA Experiment 108559 PARAMETER Experiment Name: Zm_5mM_NO_P Parameter: Age (day) Value: 8
  misc_feature: MA Experiment 108559 PARAMETER Experiment Name: Zm_5mM_NO_P Parameter: Organism Value: Zea mays
  misc_feature: MA Experiment 108559 PARAMETER Experiment Name: Zm_5mM_NO_P Parameter: Plant Line Value: 35A19
  misc_feature: MA Experiment 108559 PARAMETER Experiment Name: Zm_5mM_NO_P Parameter: Timepoint (hr) Value: 12
  misc_feature: MA Experiment 108559 PARAMETER Experiment Name: Zm_5mM_NO_P Parameter: Tissue Value: Aerial
  misc_feature: MA Experiment 108559 PARAMETER Experiment Name: Zm_5mM_NO_P Parameter: Treatment Value: 5mM NO vs. No Treatment
  misc_feature: MA Experiment ID: 108688 Result: Down-regulated in Transcription
  misc_feature: MA Experiment 108688 PARAMETER Experiment Name: Zm_Embryos-Flowers__P Parameter: Tissue Value: Immature Flowers vs. Aerial+
  misc_feature: MA Experiment ID: 108689 Result: Up-regulated in Transcription
  misc_feature: MA Experiment 108689 PARAMETER Experiment Name: Zm_Drought_Roots_P Parameter: Age (day) Value: 9
  misc_feature: MA Experiment 108689 PARAMETER Experiment Name: Zm_Drought_Roots_P Parameter: Organism Value: Zea mays
  misc_feature: MA Experiment 108689 PARAMETER Experiment Name: Zm_Drought_Roots_P Parameter: Plant Line Value: 35A19
  misc_feature: MA Experiment 108689 PARAMETER Experiment Name: Zm_Drought_Roots_P Parameter: Timepoint (hr) Value: 24
  misc_feature: MA Experiment 108689 PARAMETER Experiment Name: Zm_Drought_Roots_P Parameter: Tissue Value: Roots
  misc_feature: MA Experiment 108689 PARAMETER Experiment Name: Zm_Drought_Roots_P Parameter: Treatment Value: Drought vs. No Drought
  misc_feature: MA Experiment ID: 20000534 Result: Down-regulated in Transcription
  misc_feature: MA Experiment 20000534 PARAMETER Experiment Name: Zm_Hybrid_Pollen_P Parameter: Age (day) Value: 8
  misc_feature: MA Experiment 20000534 PARAMETER Experiment Name: Zm_Hybrid_Pollen_P Parameter: Organism Value: Zea mays
  misc_feature: MA Experiment 20000534 PARAMETER Experiment Name: Zm_Hybrid_Pollen_P Parameter: Plant Line Value: 35A19
  misc_feature: MA Experiment 20000534 PARAMETER Experiment Name: Zm_Hybrid_Pollen_P Parameter: Tissue Value: Pollen vs. Aerial
  misc_feature: MA Experiment ID: 20000535 Result: Up-regulated in Transcription
  misc_feature: MA Experiment 20000535 PARAMETER Experiment Name: Zm_Hybrid_Seed_Dev_P Parameter: DAP Value: 30 vs. 12
  misc_feature: MA Experiment 20000535 PARAMETER Experiment Name: Zm_Hybrid_Seed_Dev_P Parameter: Organism Value: Zea mays
  misc_feature: MA Experiment 20000535 PARAMETER Experiment Name: Zm_Hybrid_Seed_Dev_P Parameter: Plant Line Value: 35A19
  misc_feature: MA Experiment 20000535 PARAMETER Experiment Name: Zm_Hybrid_Seed_Dev_P Parameter: Tissue Value: Embryo vs. Unfert Floret
accacatcccacgccgagcgcgacgccagcagcaggctagctccgctgtccgctccgccgctcactagctagctgctggactgcgcctccctccatcgcgccggcgcgcgcgcctagctagcggagccgccttttcatggtccccgccgtggtcgggacgagatgcctcgcctcgcattcctccgccgctccctccccgcgaggcttctcgcgcgagcgtgtggtggtggtggtggagtccgggggagccctggccaggtggcgcgggacgaggaggccggaggcagcggcggaatgagcgggcggtcgtcggcgggtgggccgtccggcggggagtgctacgcgtgcacgcagcccggggtgccggcgttccactccacgacgtgcgaccaggtgcactcgccggactgggacgccgacgcggggtcctcgctcgtgccggtccaagggccaggcgcaggcggcggcggcgccgcggcancggcacgcggcgcggtggctgttggggcccgtgctggacccgcggagcaggcgcgtgcagcgctggaaccgctggatcctgctgggccgcgccgccgcgctggcggtggacccgctcttnttctacgcgctctccatcggccgcgccggccagccctgcctctacatggacgccgggctcgcctccgcggtcacggcgctgcggacctgcgccgacgtggcgcacctcgcgcacgtgctcctgcagctccgcctcgcctacgtctcccgcgagtccctcgtcgtcgggtgcggcaagctcgtgtgggacgcccgcgccgtcgccgcgcactacgcacgctccgtcaagggcctctgcttcgacctcttcgtcatcctccccatcccgcaggttatcttctggctggttataccaaagttaatcagggaggagcaggttaagcttatcatgacaatactgctgctcatgttcatagttcaatttctccccaaggtctaccatagtatacacatcatgaggaaaatgcagaagattgcgggtgggtgctggtatgttcttgcgatccagcgcatcgcttcctgcctccaggaagaatgcaagagaaacaacagttgcgatctaatatcgctagcttgttccaaggagatatgttttcaccctccgtggtcatcgaatgttaacggattcgcgtgcgatacgaacatgacctcctttagccaacaaaatgtgtctacttgcttgagtggaaaaggttccttcgcttatggaatctatttgggggctcttcctgttatatcgagcaattcgcttgctgtcaaaatactgtatcctatattttggggcctcatgacactcagtacttttggtaacgatcttgccccaacaagcaatggtattgaggtgatattcagcataatcaatgtcctcagtggccttatgctcttcacgttgctgatcggaaacatacaggtatttctgcacgcggtcctggcaaggaagcggaagatgcagctgcggttccgggnacatggaatggtggannaggcggaggcanctgccgtcccggctgaggcaaagggtgcgcaaatacnagcgcgaacgctgggccgccgtcncgggagacgaggagatggagatgatcaaggatctgcctgaagggctgagangggacatcaagcgctacctgtgccntgagctagttaagcaggttccnctgttccatggcatggacnacctgatcctggacaacatctgngaccggctgcggcctctggtgttgtccagcggggagaaggtgatccggnagggcgaccccgtgcagcgcatggtgttcatcctgcagggcaagctccggagcacgcagccgctgaccaaaggcgtggtggcgangtgcatgctgggcgcgggcagcttcctgggcgncgagctgctgtcgtggtgcctgcgccgccgccttcttggaccggctccccgcgtcgtcggccacgttcnagtgcgtggaccccgcgcaggcgttctgcctcggcgcgccggacctgcggttcatcaccgagcacttccggtacaacttcgccaacgagaagctcaagcgcacggcgcggtactactcgtccaactggcggacgtgggccgccgtcaacatccagctcgcgtggcgcaggtacagggcccggacgtcggcggacctggcggcgcaggccgcgcctccgttggtgggcgggcccgacgacggggaccggcggctcagacactacgcggccatgttcatgtcgctacggccgcatgaccacctagagtgagcaggagggaccatcctagctgtgccggccgcgtcatggtgactgtacagtgtgcactgtaatagtatattgctgccatcttttgcgtaagtgaattagtggttccgaattgtc

SEQ ID NO: 14111 - protein, 329 aa, Zea mays subsp. mays
  peptide (1)..(329): Ceres Seq. ID no. 12567161
  misc_feature (8)..(267): Pfam Name: Ion transport protein Pfam Description: Ion transport protein
  misc_feature (1)..(75): Homolog of NCBI NO: 13236666 NR Description: putative cyclic nucleotide and
  misc_feature (123)..(286): Homolog of NCBI NO: 13236666 NR Description: putative cyclic nucleotide and
  misc_feature (1)..(137): Homolog of NCBI NO: 15242291 NR Description: cyclic nucleotide-regulated ion channel (CNGC2); id: At5g15410.1, supported by cDNA: gi_3894398 [Arabidopsis
  misc_feature (123)..(286): Homolog of NCBI NO: 15242291 NR Description: cyclic nucleotide-regulated ion channel (CNGC2); id: At5g15410.1, supported by cDNA: gi_3894398 [Arabidopsis
  misc_feature (73)..(191): Homolog of NCBI NO: 13236666 NR Description: putative cyclic nucleotide and
  misc_feature (129)..(286): Homolog of NCBI NO: 30961811 NR Description: putative cyclic nucleotide and
  misc_feature (1)..(137): Homolog of NCBI NO: 15239581 NR Description: cyclic nucleotide-regulated ion channel (CNGC4); id: At5g54250.1, supported by cDNA: gi_16323173 [Arabidopsis
  misc_feature (124)..(286): Homolog of NCBI NO: 15239581 NR Description: cyclic nucleotide-regulated ion channel (CNGC4); id: At5g54250.1, supported by cDNA: gi_16323173 [Arabidopsis
  misc_feature (1)..(137): Homolog of NCBI NO: 34910098 NR Description: putative cyclic nucleotide and
  misc_feature (125)..(286): Homolog of NCBI NO: 34910098 NR Description: putative cyclic nucleotide and
  misc_feature (287)..(287): Xaa is any aa, unknown or other
  misc_feature (292)..(292): Xaa is any aa, unknown or other
  misc_feature (293)..(293): Xaa is any aa, unknown or other
  misc_feature (297)..(297): Xaa is any aa, unknown or other
  misc_feature (309)..(309): Xaa is any aa, unknown or other
  misc_feature (317)..(317): Xaa is any aa, unknown or other
MDAGLASAVTALRTCADVAHLAHVLLQLRLAYVSRESLVVGCGKLVWDARAVAAHYARSVKGLCFDLFVILPIPQVIFWLVIPKLIREEQVKLIMTILLLMFIVQFLPKVYHSIHIMRKMQKIAGGCWYVLAIQRIASCLQEECKRNNSCDLISLACSKEICFHPPWSSNVNGFACDTNMTSFSQQNVSTCLSGKGSFAYGIYLGALPVISSNSLAVKILYPIFWGLMTLSTFGNDLAPTSNGIEVIFSIINVLSGLMLFTLLIGNIQVFLHAVLARKRKMQLRFRXHGMVXXAEAXAVPAEAKGAQIXARTLGRRXGRRGDGDDQGSA

SEQ ID NO: 14112 - protein, 252 aa, Zea mays subsp. mays
  peptide (1)..(252): Ceres Seq. ID no. 12567162
  misc_feature (40)..(95): Homolog of NCBI NO: 15242291 NR Description: cyclic nucleotide-regulated ion channel (CNGC2); id: At5g15410.1, supported by cDNA: gi_3894398 [Arabidopsis
  misc_feature (1)..(109): Homolog of NCBI NO: 13236666 NR Description: putative cyclic nucleotide and
  misc_feature (107)..(107): Xaa is any aa, unknown or other
  misc_feature (147)..(147): Xaa is any aa, unknown or other
MPRLAFLRRSLPARLLARACGGGGGVRGSPGQVARDEEAGGSGGMSGRSSAGGPSGGECYACTQPGVPAFHSTTCDQVHSPDWDADAGSSLVPVQGPGAGGGGAAAXARGAVAVGARAGPAEQARAALEPLDPAGPRRRAGGGPALXLRALHRPRRPALPLHGRRARLRGHGAADLRRRGAPRARAPAAPPRLRLPRVPRRRVRQARVGRPRRRRALRTLRQGPLLRPLRHPPHPAGYLLAGYTKVNQGGAG

SEQ ID NO: 14113 - protein, 252 aa, Zea mays subsp. mays
  peptide (1)..(252): Ceres Seq. ID no. 12567163
  misc_feature (78)..(148): Pfam Name: Cyclic nucleotide-binding domain Pfam Description: Cyclic nucleotide-binding domain
  misc_feature (1)..(148): Homolog of NCBI NO: 13236666 NR Description: putative cyclic nucleotide and
  misc_feature (1)..(148): Homolog of NCBI NO: 15242291 NR Description: cyclic nucleotide-regulated ion channel (CNGC2); id: At5g15410.1, supported by cDNA: gi_3894398 [Arabidopsis
  misc_feature (1)..(148): Homolog of NCBI NO: 30961811 NR Description: putative cyclic nucleotide and
  misc_feature (1)..(148): Homolog of NCBI NO: 15239581 NR Description: cyclic nucleotide-regulated ion channel (CNGC4); id: At5g54250.1, supported by cDNA: gi_16323173 [Arabidopsis
  misc_feature (1)..(148): Homolog of NCBI NO: 34910098 NR Description: putative cyclic nucleotide and
  misc_feature (1)..(141): Homolog of NCBI NO: 30961805 NR Description: putative cyclic nucleotide and
  misc_feature (2)..(142): Homolog of NCBI NO: 15226370 NR Description: cyclic nucleotide-regulated ion channel, protein id: At2g28260.1 [Arabidopsis thaliana]
  misc_feature (2)..(139): Homolog of NCBI NO: 25412226 NR Description: hypothetical protein At2g24610 [imported] -
  misc_feature (2)..(139): Homolog of NCBI NO: 30682497 NR Description: cyclic nucleotide-regulated ion channel, putative
  misc_feature (2)..(139): Homolog of NCBI NO: 15219100 NR Description: cyclic nucleotide-regulated ion channel,
  misc_feature (5)..(5): Xaa is any aa, unknown or other
  misc_feature (9)..(9): Xaa is any aa, unknown or other
  misc_feature (22)..(22): Xaa is any aa, unknown or other
  misc_feature (30)..(30): Xaa is any aa, unknown or other
  misc_feature (47)..(47): Xaa is any aa, unknown or other
  misc_feature (55)..(55): Xaa is any aa, unknown or other
  misc_feature (62)..(62): Xaa is any aa, unknown or other
  misc_feature (69)..(69): Xaa is any aa, unknown or other
  misc_feature (76)..(76): Xaa is any aa, unknown or other
  misc_feature (93)..(93): Xaa is any aa, unknown or other
  misc_feature (121)..(121): Xaa is any aa, unknown or other
  misc_feature (132)..(132): Xaa is any aa, unknown or other
  misc_feature (155)..(155): Xaa is any aa, unknown or other
MEWWXRRRXLPSRLRQRVRKYXRERWAAVXGDEEMEMIKDLPEGLRXDIKRYLCXELVKQVXLFHGMDXLILDNIXDRLRPLVLSSGEKVIRXGDPVQRMVFILQGKLRSTQPLTKGVVAXCMLGAGSFLGXELLSWCLRRRLLGPAPRVVGHVXVRGPRAGVLPRRAGPAVHHRALPVQLRQREAQAHGAVLLVQLADVGRRQHPARVAQVQGPDVGGPGGAGRASVGGRARRRGPAAQTLRGHVHVATAA

SEQ ID NO: 14114 - DNA, 1071 bp, Zea mays subsp. mays
  misc_feature (1)..(1071): Ceres Seq. ID no. 12435826
  misc_feature: MA Experiment ID: 108527 Result: Down-regulated in Transcription
  misc_feature: MA Experiment 108527 PARAMETER Experiment Name: Zm_5mM_NO_P Parameter: Age (day) Value: 8
  misc_feature: MA Experiment 108527 PARAMETER Experiment Name: Zm_5mM_NO_P Parameter: Organism Value: Zea mays
  misc_feature: MA Experiment 108527 PARAMETER Experiment Name: Zm_5mM_NO_P Parameter: Plant Line Value: 35A19
  misc_feature: MA Experiment 108527 PARAMETER Experiment Name: Zm_5mM_NO_P Parameter: Timepoint (hr) Value: 6
  misc_feature: MA Experiment 108527 PARAMETER Experiment Name: Zm_5mM_NO_P Parameter: Tissue Value: Aerial
  misc_feature: MA Experiment 108527 PARAMETER Experiment Name: Zm_5mM_NO_P Parameter: Treatment Value: 5mM NO vs. No Treatment
  misc_feature: MA Experiment ID: 108528 Result: Up-regulated in Transcription
  misc_feature: MA Experiment 108528 PARAMETER Experiment Name: Zm_Imbibed_Seeds_P Parameter: Age (day) Value: 5 vs. 2
  misc_feature: MA Experiment 108528 PARAMETER Experiment Name: Zm_Imbibed_Seeds_P Parameter: Organism Value: Zea mays
  misc_feature: MA Experiment 108528 PARAMETER Experiment Name: Zm_Imbibed_Seeds_P Parameter: Plant Line Value: 35A19
  misc_feature: MA Experiment 108528 PARAMETER Experiment Name: Zm_Imbibed_Seeds_P Parameter: Tissue Value: Aerial vs. Embryo
  misc_feature: MA Experiment ID: 108529 Result: Down-regulated in Transcription
  misc_feature: MA Experiment 108529 PARAMETER Experiment Name: Zm_Imbibed_Seeds_P Parameter: Age (day) Value: 5 vs. 2
  misc_feature: MA Experiment 108529 PARAMETER Experiment Name: Zm_Imbibed_Seeds_P Parameter: Organism Value: Zea mays
  misc_feature: MA Experiment 108529 PARAMETER Experiment Name: Zm_Imbibed_Seeds_P Parameter: Plant Line Value: 35A19
  misc_feature: MA Experiment 108529 PARAMETER Experiment Name: Zm_Imbibed_Seeds_P Parameter: Tissue Value: Roots vs. Embryo
  misc_feature: MA Experiment ID: 108530 Result: Up-regulated in Transcription
  misc_feature: MA Experiment 108530 PARAMETER Experiment Name: Zm_Imbibed_Seeds_P Parameter: Age (day) Value: 6 vs. 2
  misc_feature: MA Experiment 108530 PARAMETER Experiment Name: Zm_Imbibed_Seeds_P Parameter: Organism Value: Zea mays
  misc_feature: MA Experiment 108530 PARAMETER Experiment Name: Zm_Imbibed_Seeds_P Parameter: Plant Line Value: 35A19
  misc_feature: MA Experiment 108530 PARAMETER Experiment Name: Zm_Imbibed_Seeds_P Parameter: Tissue Value: Aerial vs. Embryo
  misc_feature: MA Experiment ID: 108535 Result: Up-regulated in Transcription
  misc_feature: MA Experiment 108535 PARAMETER Experiment Name: Zm_Meristem_P Parameter: Age (day) Value: 8
  misc_feature: MA Experiment 108535 PARAMETER Experiment Name: Zm_Meristem_P Parameter: Organism Value: Zea mays
  misc_feature: MA Experiment 108535 PARAMETER Experiment Name: Zm_Meristem_P Parameter: Plant Line Value: 35A19
  misc_feature: MA Experiment 108535 PARAMETER Experiment Name: Zm_Meristem_P Parameter: Tissue Value: Root Meristem vs. Above Root Meristem
  misc_feature: MA Experiment ID: 108544 Result: Down-regulated in Transcription
  misc_feature: MA Experiment ID: 108545 Result: Up-regulated in Transcription
  misc_feature: MA Experiment 108545 PARAMETER Experiment Name: Zm_Imbibed_Seeds_P Parameter: Age (day) Value: 3 vs. 2
  misc_feature: MA Experiment 108545 PARAMETER Experiment Name: Zm_Imbibed_Seeds_P Parameter: Organism Value: Zea mays
  misc_feature: MA Experiment 108545 PARAMETER Experiment Name: Zm_Imbibed_Seeds_P Parameter: Plant Line Value: 35A19
  misc_feature: MA Experiment 108545 PARAMETER Experiment Name: Zm_Imbibed_Seeds_P Parameter: Tissue Value: Aerial vs. Embryo
  misc_feature: MA Experiment ID: 108546 Result: Down-regulated in Transcription
  misc_feature: MA Experiment 108546 PARAMETER Experiment Name: Zm_Imbibed_Seeds_P Parameter: Age (day) Value: 3 vs. 2
  misc_feature: MA Experiment 108546 PARAMETER Experiment Name: Zm_Imbibed_Seeds_P Parameter: Organism Value: Zea mays
  misc_feature: MA Experiment 108546 PARAMETER Experiment Name: Zm_Imbibed_Seeds_P Parameter: Plant Line Value: 35A19
  misc_feature: MA Experiment 108546 PARAMETER Experiment Name: Zm_Imbibed_Seeds_P Parameter: Tissue Value: Roots vs. Embryo
  misc_feature: MA Experiment ID: 108547 Result: Up-regulated in Transcription
  misc_feature: MA Experiment 108547 PARAMETER Experiment Name: Zm_Imbibed_Seeds_P Parameter: Age (day) Value: 4 vs. 2
  misc_feature: MA Experiment 108547 PARAMETER Experiment Name: Zm_Imbibed_Seeds_P Parameter: Organism Value: Zea mays
  misc_feature: MA Experiment 108547 PARAMETER Experiment Name: Zm_Imbibed_Seeds_P Parameter: Plant Line Value: 35A19
  misc_feature: MA Experiment 108547 PARAMETER Experiment Name: Zm_Imbibed_Seeds_P Parameter: Tissue Value: Aerial vs. Embryo
  misc_feature: MA Experiment ID: 108556 Result: Down-regulated in Transcription
  misc_feature: MA Experiment 108556 PARAMETER Experiment Name: Zm_Drought_P Parameter: Age (day) Value: 9
  misc_feature: MA Experiment 108556 PARAMETER Experiment Name: Zm_Drought_P Parameter: Organism Value: Zea mays
  misc_feature: MA Experiment 108556 PARAMETER Experiment Name: Zm_Drought_P Parameter: Plant Line Value: 35A19
  misc_feature: MA Experiment 108556 PARAMETER Experiment Name: Zm_Drought_P Parameter: Timepoint (hr) Value: 24
  misc_feature: MA Experiment 108556 PARAMETER Experiment Name: Zm_Drought_P Parameter: Tissue Value: Aerial
  misc_feature: MA Experiment 108556 PARAMETER Experiment Name: Zm_Drought_P Parameter: Treatment Value: Drought vs. No Drought
  misc_feature: MA Experiment ID: 108559 Result: Down-regulated in Transcription
  misc_feature: MA Experiment 108559 PARAMETER Experiment Name: Zm_5mM_NO_P Parameter: Age (day) Value: 8
  misc_feature: MA Experiment 108559 PARAMETER Experiment Name: Zm_5mM_NO_P Parameter: Organism Value: Zea mays
  misc_feature: MA Experiment 108559 PARAMETER Experiment Name: Zm_5mM_NO_P Parameter: Plant Line Value: 35A19
  misc_feature: MA Experiment 108559 PARAMETER Experiment Name: Zm_5mM_NO_P Parameter: Timepoint (hr) Value: 12
  misc_feature: MA Experiment 108559 PARAMETER Experiment Name: Zm_5mM_NO_P Parameter: Tissue Value: Aerial
  misc_feature: MA Experiment 108559 PARAMETER Experiment Name: Zm_5mM_NO_P Parameter: Treatment Value: 5mM NO vs. No Treatment
  misc_feature: MA Experiment ID: 108597 Result: Down-regulated in Transcription
  misc_feature: MA Experiment 108597 PARAMETER Experiment Name: Zm_100uM_ABA_P Parameter: Age (day) Value: 9
  misc_feature: MA Experiment 108597 PARAMETER Experiment Name: Zm_100uM_ABA_P Parameter: Organism Value: Zea mays
  misc_feature: MA Experiment 108597 PARAMETER Experiment Name: Zm_100uM_ABA_P Parameter: Plant Line Value: 35A19
  misc_feature: MA Experiment 108597 PARAMETER Experiment Name: Zm_100uM_ABA_P Parameter: Timepoint (hr) Value: 24
  misc_feature: MA Experiment 108597 PARAMETER Experiment Name: Zm_100uM_ABA_P Parameter: Tissue Value: Aerial
  misc_feature: MA Experiment 108597 PARAMETER Experiment Name: Zm_100uM_ABA_P Parameter: Treatment Value: 100uM ABA vs. No Treatment
  misc_feature: MA Experiment ID: 108687 Result: Down-regulated in Transcription
  misc_feature: MA Experiment 108687 PARAMETER Experiment Name: Zm_Embryos-Flowers__P Parameter: Tissue Value: Embryo vs. Aerial+
  misc_feature: MA Experiment ID: 108688 Result: Down-regulated in Transcription
  misc_feature: MA Experiment 108688 PARAMETER Experiment Name: Zm_Embryos-Flowers__P Parameter: Tissue Value: Immature Flowers vs. Aerial+
  misc_feature: MA Experiment ID: 20000480 Result: Down-regulated in Transcription
  misc_feature: MA Experiment 20000480 PARAMETER Experiment Name: Zm_Drought_P Parameter: Age (day) Value: 11
  misc_feature: MA Experiment 20000480 PARAMETER Experiment Name: Zm_Drought_P Parameter: Organism Value: Zea mays
  misc_feature: MA Experiment 20000480 PARAMETER Experiment Name: Zm_Drought_P Parameter: Plant Line Value: 35A19
  misc_feature: MA Experiment 20000480 PARAMETER Experiment Name: Zm_Drought_P Parameter: Timepoint (hr) Value: 72
  misc_feature: MA Experiment 20000480 PARAMETER Experiment Name: Zm_Drought_P Parameter: Tissue Value: Aerial
  misc_feature: MA Experiment 20000480 PARAMETER Experiment Name: Zm_Drought_P Parameter: Treatment Value: Drought vs. No Drought
  misc_feature: MA Experiment ID: 20001608 Result: Up-regulated in Transcription
  misc_feature: MA Experiment 20001608 PARAMETER Experiment Name: Zm_50ppm_KNO3_L-to-H_P Parameter: Age (day) Value: 21
  misc_feature: MA Experiment 20001608 PARAMETER Experiment Name: Zm_50ppm_KNO3_L-to-H_P Parameter: Organism Value: Zea mays
  misc_feature: MA Experiment 20001608 PARAMETER Experiment Name: Zm_50ppm_KNO3_L-to-H_P Parameter: Plant Line Value: 35A19
  misc_feature: MA Experiment 20001608 PARAMETER Experiment Name: Zm_50ppm_KNO3_L-to-H_P Parameter: Timepoint (hr) Value: 48
  misc_feature: MA Experiment 20001608 PARAMETER Experiment Name: Zm_50ppm_KNO3_L-to-H_P Parameter: Tissue Value: Shoots
  misc_feature: MA Experiment 20001608 PARAMETER Experiment Name: Zm_50ppm_KNO3_L-to-H_P Parameter: Treatment Value: 50ppm KNO3 vs. 50ppm KCl
attaacaaaacgcctcccgaagcagacagcctcactccgcgcgcccgcgcagcgaagcagggagcatggagctgaggccgccgcgcctgcgaccgtgagcacgctctgtagccagccgggtccggctgggcggccatggcagccaccgttctcttcactccggcgcagtgccaccgcgccaccgcgacgacgagcgggcgaggagccccctcgcattgcgccctggcccctgggcaccggcgcccggggcggggatcggtgagggcggtgcctcccgagcagagcagcttgcctcaggcggcggctgctgtctacgggactgctggcgacgtcaaggccgcgctgtaccgagcgctggacggcgccaacagggggatattcgggatgacgtccgccaagcgctcggagatccatggcctggtggagctgctcgagtccaggaaccccacgccggagcccaccgccaagctgcaggacaaggtggatggatgctggaaactcatctacagcacgatctccatactggggaagaagagaaccaagttagggctgcgagatttcatcagcctaggggacttcctccagataattgacgtcaaacaggaaaaggcggtgaatgtggtagagttcagcgcgagagcactgaagatactgacggggaagctcaccatcgaggcttcgtacagagttaccagccaaacaagagtggatatcaagctcgagagctcaaccatcacccctgagcagctgatgaacatatttcagaagaactacgacatgctcctggaaatattcaatccagagggctggctggagataacatatgttgatgaatctctacggattggacgagatgacaaagaaaacatattcgtgctggagagagcagacctgccagacgtccgatgacgcgcagttcatgcgcacaggcggtccgtaattttgtgacgaggagcgagtgtaacacgcagaaaacatagcctctgcaaatatataaatatggtatatccgacagctaggactcttgcatggttattggcagttcgatgcagacaatctactacttgaagt

SEQ ID NO: 14115 - protein, 257 aa, Zea mays subsp. mays
  peptide (1)..(257): Ceres Seq. ID no. 12435827
  misc_feature (66)..(189): Pfam Name: PAP_fibrillin Pfam Description: PAP_fibrillin
  misc_feature (10)..(230): Homolog of NCBI NO: 32489298 NR Description: OSJNBa0028I23.21 [Oryza sativa (japonica
  misc_feature (62)..(254): Homolog of NCBI NO: 30682868 NR Description: plastid-lipid associated protein PAP/fibrillin
  misc_feature (62)..(189): Homolog of NCBI NO: 9758960 NR Description: gene_id:MYH9.3~pir||S75332~similar to unknown
  misc_feature (65)..(250): Homolog of NCBI NO: 16329838 NR Description: fibrillin [Synechocystis sp. PCC 6803]
  misc_feature (67)..(250): Homolog of NCBI NO: 23126201 NR Description: hypothetical protein [Nostoc punctiforme]
  misc_feature (67)..(250): Homolog of NCBI NO: 22297962 NR Description: fibrillin [Thermosynechococcus elongatus BP-1]
  misc_feature (67)..(251): Homolog of NCBI NO: 5020103 NR Description: fibrillin [Nostoc sp. PCC 8009]
  misc_feature (67)..(250): Homolog of NCBI NO: 17231810 NR Description: fibrillin [Nostoc sp. PCC 7120]
  misc_feature (67)..(248): Homolog of NCBI NO: 23041005 NR Description: hypothetical protein [Trichodesmium erythraeum
  misc_feature (91)..(253): Homolog of NCBI NO: 23039408 NR Description: hypothetical protein [Trichodesmium erythraeum
MAATVLFTPAQCHRATATTSGRGAPSHCALAPGHRRPGRGSVRAVPPEQSSLPQAAAAVYGTAGDVKAALYRALDGANRGIFGMTSAKRSEIHGLVELLESRNPTPEPTAKLQDKVDGCWKLIYSTISILGKKRTKLGLRDFISLGDFLQIIDVKQEKAVNVVEFSARALKILTGKLTIEASYRVTSQTRVDIKLESSTITPEQLMNIFQKNYDMLLEIFNPEGWLEITYVDESLRIGRDDKENIFVLERADLPDVR

SEQ ID NO: 14116 - protein, 174 aa, Zea mays subsp. mays
  peptide (1)..(174): Ceres Seq. ID no. 12435828
  misc_feature (1)..(106): Pfam Name: PAP_fibrillin Pfam Description: PAP_fibrillin
  misc_feature (1)..(147): Homolog of NCBI NO: 32489298 NR Description: OSJNBa0028I23.21 [Oryza sativa (japonica
  misc_feature (1)..(171): Homolog of NCBI NO: 30682868 NR Description: plastid-lipid associated protein PAP/fibrillin
  misc_feature (1)..(106): Homolog of NCBI NO: 9758960 NR Description: gene_id:MYH9.3~pir||S75332~similar to unknown
  misc_feature (1)..(167): Homolog of NCBI NO: 16329838 NR Description: fibrillin [Synechocystis sp. PCC 6803]
  misc_feature (1)..(167): Homolog of NCBI NO: 23126201 NR Description: hypothetical protein [Nostoc punctiforme]
  misc_feature (1)..(167): Homolog of NCBI NO: 22297962 NR Description: fibrillin [Thermosynechococcus elongatus BP-1]
  misc_feature (1)..(168): Homolog of NCBI NO: 5020103 NR Description: fibrillin [Nostoc sp. PCC 8009]
  misc_feature (1)..(167): Homolog of NCBI NO: 17231810 NR Description: fibrillin [Nostoc sp. PCC 7120]
  misc_feature (1)..(165): Homolog of NCBI NO: 23041005 NR Description: hypothetical protein [Trichodesmium erythraeum
  misc_feature (8)..(170): Homolog of NCBI NO: 23039408 NR Description: hypothetical protein [Trichodesmium erythraeum
MTSAKRSEIHGLVELLESRNPTPEPTAKLQDKVDGCWKLIYSTISILGKKRTKLGLRDFISLGDFLQIIDVKQEKAVNVVEFSARALKILTGKLTIEASYRVTSQTRVDIKLESSTITPEQLMNIFQKNYDMLLEIFNPEGWLEITYVDESLRIGRDDKENIFVLERADLPDVR

SEQ ID NO: 14117 - DNA, 2450 bp, Zea mays subsp. mays
  misc_feature (1)..(2450): Ceres Seq. ID no. 12435822
  misc_feature: MA Experiment ID: 108534 Result: Up-regulated in Transcription
  misc_feature: MA Experiment 108534 PARAMETER Experiment Name: Zm_4deg_Cold_P Parameter: Age (hr) Value: 8
  misc_feature: MA Experiment 108534 PARAMETER Experiment Name: Zm_4deg_Cold_P Parameter: Organism Value: Zea mays
  misc_feature: MA Experiment 108534 PARAMETER Experiment Name: Zm_4deg_Cold_P Parameter: Plant Line Value: 35A19
  misc_feature: MA Experiment 108534 PARAMETER Experiment Name: Zm_4deg_Cold_P Parameter: Temperature (deg C) Value: 4 vs. 22
  misc_feature: MA Experiment 108534 PARAMETER Experiment Name: Zm_4deg_Cold_P Parameter: Timepoint (hr) Value: 6
  misc_feature: MA Experiment 108534 PARAMETER Experiment Name: Zm_4deg_Cold_P Parameter: Tissue Value: Aerial
  misc_feature: MA Experiment ID: 108547 Result: Up-regulated in Transcription
  misc_feature: MA Experiment 108547 PARAMETER Experiment Name: Zm_Imbibed_Seeds_P Parameter: Age (day) Value: 4 vs. 2
  misc_feature: MA Experiment 108547 PARAMETER Experiment Name: Zm_Imbibed_Seeds_P Parameter: Organism Value: Zea mays
  misc_feature: MA Experiment 108547 PARAMETER Experiment Name: Zm_Imbibed_Seeds_P Parameter: Plant Line Value: 35A19
  misc_feature: MA Experiment 108547 PARAMETER Experiment Name: Zm_Imbibed_Seeds_P Parameter: Tissue Value: Aerial vs. Embryo
  misc_feature: MA Experiment ID: 20000534 Result: Down-regulated in Transcription
  misc_feature: MA Experiment 20000534 PARAMETER Experiment Name: Zm_Hybrid_Pollen_P Parameter: Age (day) Value: 8
  misc_feature: MA Experiment 20000534 PARAMETER Experiment Name: Zm_Hybrid_Pollen_P Parameter: Organism Value: Zea mays
  misc_feature: MA Experiment 20000534 PARAMETER Experiment Name: Zm_Hybrid_Pollen_P Parameter: Plant Line Value: 35A19
  misc_feature: MA Experiment 20000534 PARAMETER Experiment Name: Zm_Hybrid_Pollen_P Parameter: Tissue Value: Pollen vs. Aerial
atcacacatccaccgccgccgccaccaccaccacccgccctatacccgtatataattactcgtacccggacgccaccgccgcctgcgccatgggcgactcctcggtggccggcgcgctcgtgccgtccgtgcccaagccggagcccgcgccgtccggtgacacctccgcggcggccgcggcgactacagcggcgctggcgatgccggaggaggcgggtatgcgcgcggcgtcggcgtcgcctcaggggcctgcggaggagggggagggccccgccgatagggaccttctctgcccgatctgcatggccgtcatcaaggacgccttcctcaccgcatgcggccacagcttctgctacatgtgcatcgtcacgcatctcagcaacaagagcgactgcccctgctgcggccactaccttaccaaggcccagctctaccccaactttctccttgacaaggttctgaagaaaatatcagcccaacaaatagcaaaaacagcatcgccaatcgatcaatttcgatgtgcattgcaacagggaaatgaaatgggggttaaagagttggatagccttatgactttgattgctgagaagaagcggcaaatggaacaacaagaatcagagacaaatatgcaaatattgctagtcttcttacactgccttagaaagcaaaagctagaagagttgaatgagattcaaactgatctacaatacatcaaagaggatataagttctgtggagagacatagggcagaattatatcgcacaaaagaaaggtactccatgaagctgcgcatgcttttagatgagcctactgcacaaaaaatgtggccctcttctatagacaaagctagctgtcgctttcttcccaactctcggacaccacttagtggatcatgtccaggaactttacagaataagaagcttgatttgaaagctcaagtaagccatcaaggatttcaaaggagagatgctctaacttcttctgatcctcctaactcccctatacaatcgggtaatgttattgctaggaagaggcgagttcaagcacagttcaatgagcttcaagaatactacctgcaaagacgtcgtactggagcacaggcacgcagacaggaagaaagagatatagttgcaatgaatagagaaggctatcatgcaggtcttcaggatttccagtctgtgctaacaacgttcactcgatacagtcgtctacgtgtcattgcggaactaagacatggagacttgtttcactctgccaatattgtatccagtattgaatttgatcgtgatgatgaactatttgctaccgctggagtctcgaaacgtattaaagtcttcgaattttccactgttgttaatgaaccatcagatgtgcattgcccagttgttgaaatggctaccagatctaaacttagctgcctaagctggaacaagtactcaaaaaatattattgcaagcagtgactatgagggtatagtaactgtgtgggatgttcagacccgtcagagtgtgatggaatatgaagagcatgagaagagagcatggagtgttgatttttctcgcacagactcttcaatgctagtatctgggagtgatgattgcaaggtgaaagtgtggtgcacaaatcaagaagcaagtgtgatcaatattgatatgaaagcaaatatttgctcggttaaatataatcctggatcaagcttctacgttgcagtcggatctgctgatcaccatattcattactttgatttacgtaatccaagttcgcctgtccatattttcggggggcacaagaaagcagtatcgtatgtgaaattcttatctaacaatgagcttgcgtctgcgtcaacagatagcacattacgcttatgggatgtcaaggataactgcccggtacggacattcagagggcacaaaaatgaaaagaactttgttggcttgtctgtgaacaatgaatatattgcttgtggaagtgagacaaatgaggtttttgtttatcacaaggctatctcgaaaccggcagcaagccatagatttgtatcttctgacccggatgatgccgatgatgatcctggttcttatttcattagtgctgtctgctggaagagtgatagccctacgatgttgactgctaacagtcaggggaccataaaagttcttgtacttgctccttgatgtcatggagggcgttcaagaggttcacagtactgtccagttgtttcctttcgtgtcattatattcccccaaaattgggaacgggggcataattgatctccggttagggaatgaagttttgcagatggtcagctgacgtagggttttgaggtatcagaatgtgcatagtcatgtttatgttgtataggtgtaattgtgtaaagcagccaagttattggttacaagtgtaacacgagaaatacacattaatataaaaaaaacctccagctcgtttgtgct

SEQ ID NO: 14118 - protein, 722 aa, Zea mays subsp. mays
  peptide (1)..(722): Ceres Seq. ID no. 12435823
  misc_feature (97)..(134): Pfam Name: Zinc finger, C3HC4 type (RING finger) Pfam Description: Zinc finger, C3HC4 type (RING finger)
  misc_feature (204)..(722): Homolog of NCBI NO: 13925701 NR Description: COP1 [Oryza sativa subsp. indica]
  misc_feature (47)..(721): Homolog of NCBI NO: 4090943 NR Description: COP1 homolog [Lycopersicon esculentum]
  misc_feature (82)..(721): Homolog of NCBI NO: 15225760 NR Description: COP1 regulatory protein; protein id: At2g32950.1 thaliana] >gi|20141387|sp|P43254|COP1_ARATH COP1 regulatory (Constitutive photomorphogenesis protein 1)
  misc_feature (82)..(721): Homolog of NCBI NO: 402685 NR Description: regulatory protein
  misc_feature (52)..(721): Homolog of NCBI NO: 11127996 NR Description: COP1 [Ipomoea nil]
  misc_feature (92)..(721): Homolog of NCBI NO: 3121867 NR Description: COP1 regulatory protein (Constitutive
  misc_feature (92)..(721): Homolog of NCBI NO: 7688063 NR Description: constitutively photomorphogenic 1 protein [Pisum
  misc_feature (85)..(721): Homolog of NCBI NO: 15029364 NR Description: photoregulatory zinc-finger protein COP1 [Rosa
  misc_feature (326)..(720): Homolog of NCBI NO: 21359963 NR Description: constitutive photomorphogenic protein [Homo >gi|21105537|gb|AAM34692.1|AF508940_1 constitutive protein [Homo sapiens] >gi|28394261|tpg|DAA01050.1| TPA: RING
  misc_feature (27)..(245): Homolog of NCBI NO: 21359963 NR Description: constitutive photomorphogenic protein [Homo >gi|21105537|gb|AAM34692.1|AF508940_1 constitutive protein [Homo sapiens] >gi|28394261|tpg|DAA01050.1| TPA: RING
HTSTAAATTTTRPIPVYNYSYPDATAACAMGDSSVAGALVPSVPKPEPAPSGDTSAAAAATTAALAMPEEAGMRAASASPQGPAEEGEGPADRDLLCPICMAVIKDAFLTACGHSFCYMCIVTHLSNKSDCPCCGHYLTKAQLYPNFLLDKVLKKISAQQIAKTASPIDQFRCALQQGNEMGVKELDSLMTLIAEKKRQMEQQESETNMQILLVFLHCLRKQKLEELNEIQTDLQYIKEDISSVERHRAELYRTKERYSMKLRMLLDEPTAQKMWPSSIDKASCRFLPNSRTPLSGSCPGTLQNKKLDLKAQVSHQGFQRRDALTSSDPPNSPIQSGNVIARKRRVQAQFNELQEYYLQRRRTGAQARRQEERDIVAMNREGYHAGLQDFQSVLTTFTRYSRLRVIAELRHGDLFHSANIVSSIEFDRDDELFATAGVSKRIKVFEFSTVVNEPSDVHCPVVEMATRSKLSCLSWNKYSKNIIASSDYEGIVTVWDVQTRQSVMEYEEHEKRAWSVDFSRTDSSMLVSGSDDCKVKVWCTNQEASVINIDMKANICSVKYNPGSSFYVAVGSADHHIHYFDLRNPSSPVHIFGGHKKAVSYVKFLSNNELASASTDSTLRLWDVKDNCPVRTFRGHKNEKNFVGLSVNNEYIACGSETNEVFVYHKAISKPAASHRFVSSDPDDADDDPGSYFISAVCWKSDSPTMLTANSQGTIKVLVLAP

SEQ ID NO: 14119 - protein, 693 aa, Zea mays subsp. mays
  peptide (1)..(693): Ceres Seq. ID no. 12435824
  misc_feature (68)..(105): Pfam Name: Zinc finger, C3HC4 type (RING finger) Pfam Description: Zinc finger, C3HC4 type (RING finger)
  misc_feature (175)..(693): Homolog of NCBI NO: 13925701 NR Description: COP1 [Oryza sativa subsp. indica]
  misc_feature (18)..(692): Homolog of NCBI NO: 4090943 NR Description: COP1 homolog [Lycopersicon esculentum]
  misc_feature (53)..(692): Homolog of NCBI NO: 15225760 NR Description: COP1 regulatory protein; protein id: At2g32950.1 thaliana] >gi|20141387|sp|P43254|COP1_ARATH COP1 regulatory (Constitutive photomorphogenesis protein 1)
  misc_feature (53)..(692): Homolog of NCBI NO: 402685 NR Description: regulatory protein
  misc_feature (23)..(692): Homolog of NCBI NO: 11127996 NR Description: COP1 [Ipomoea nil]
  misc_feature (63)..(692): Homolog of NCBI NO: 3121867 NR Description: COP1 regulatory protein (Constitutive
  misc_feature (63)..(692): Homolog of NCBI NO: 7688063 NR Description: constitutively photomorphogenic 1 protein [Pisum
  misc_feature (56)..(692): Homolog of NCBI NO: 15029364 NR Description: photoregulatory zinc-finger protein COP1 [Rosa
  misc_feature (297)..(691): Homolog of NCBI NO: 21359963 NR Description: constitutive photomorphogenic protein [Homo >gi|21105537|gb|AAM34692.1|AF508940_1 constitutive protein [Homo sapiens] >gi|28394261|tpg|DAA01050.1| TPA: RING
  misc_feature (1)..(216): Homolog of NCBI NO: 21359963 NR Description: constitutive photomorphogenic protein [Homo >gi|21105537|gb|AAM34692.1|AF508940_1 constitutive protein [Homo sapiens] >gi|28394261|tpg|DAA01050.1| TPA: RING
MGDSSVAGALVPSVPKPEPAPSGDTSAAAAATTAALAMPEEAGMRAASASPQGPAEEGEGPADRDLLCPICMAVIKDAFLTACGHSFCYMCIVTHLSNKSDCPCCGHYLTKAQLYPNFLLDKVLKKISAQQIAKTASPIDQFRCALQQGNEMGVKELDSLMTLIAEKKRQMEQQESETNMQILLVFLHCLRKQKLEELNEIQTDLQYIKEDISSVERHRAELYRTKERYSMKLRMLLDEPTAQKMWPSSIDKASCRFLPNSRTPLSGSCPGTLQNKKLDLKAQVSHQGFQRRDALTSSDPPNSPIQSGNVIARKRRVQAQFNELQEYYLQRRRTGAQARRQEERDIVAMNREGYHAGLQDFQSVLTTFTRYSRLRVIAELRHGDLFHSANIVSSIEFDRDDELFATAGVSKRIKVFEFSTVVNEPSDVHCPVVEMATRSKLSCLSWNKYSKNIIASSDYEGIVTVWDVQTRQSVMEYEEHEKRAWSVDFSRTDSSMLVSGSDDCKVKVWCTNQEASVINIDMKANICSVKYNPGSSFYVAVGSADHHIHYFDLRNPSSPVHIFGGHKKAVSYVKFLSNNELASASTDSTLRLWDVKDNCPVRTFRGHKNEKNFVGLSVNNEYIACGSETNEVFVYHKAISKPAASHRFVSSDPDDADDDPGSYFISAVCWKSDSPTMLTANSQGTIKVLVLAP

SEQ ID NO: 14120 - protein, 656 aa, Zea mays subsp. mays
  peptide (1)..(656): Ceres Seq. ID no. 12435825
  misc_feature (31)..(68): Pfam Name: Zinc finger, C3HC4 type (RING finger) Pfam Description: Zinc finger, C3HC4 type (RING finger)
  misc_feature (138)..(656): Homolog of NCBI NO: 13925701 NR Description: COP1 [Oryza sativa subsp. indica]
  misc_feature (1)..(655): Homolog of NCBI NO: 4090943 NR Description: COP1 homolog [Lycopersicon esculentum]
  misc_feature (16)..(655): Homolog of NCBI NO: 15225760 NR Description: COP1 regulatory protein; protein id: At2g32950.1 thaliana] >gi|20141387|sp|P43254|COP1_ARATH COP1 regulatory (Constitutive photomorphogenesis protein 1)
  misc_feature (16)..(655): Homolog of NCBI NO: 402685 NR Description: regulatory protein
  misc_feature (1)..(655): Homolog of NCBI NO: 11127996 NR Description: COP1 [Ipomoea nil]
  misc_feature (26)..(655): Homolog of NCBI NO: 3121867 NR Description: COP1 regulatory protein (Constitutive
  misc_feature (26)..(655): Homolog of NCBI NO: 7688063 NR Description: constitutively photomorphogenic 1 protein [Pisum
  misc_feature (19)..(655): Homolog of NCBI NO: 15029364 NR Description: photoregulatory zinc-finger protein COP1 [Rosa
  misc_feature (260)..(654): Homolog of NCBI NO: 21359963 NR Description: constitutive photomorphogenic protein [Homo >gi|21105537|gb|AAM34692.1|AF508940_1 constitutive protein [Homo sapiens] >gi|28394261|tpg|DAA01050.1| TPA: RING
  misc_feature (1)..(179): Homolog of NCBI NO: 21359963 NR Description: constitutive photomorphogenic protein [Homo >gi|21105537|gb|AAM34692.1|AF508940_1 constitutive protein [Homo sapiens] >gi|28394261|tpg|DAA01050.1| TPA: RING
MPEEAGMRAASASPQGPAEEGEGPADRDLLCPICMAVIKDAFLTACGHSFCYMCIVTHLSNKSDCPCCGHYLTKAQLYPNFLLDKVLKKISAQQIAKTASPIDQFRCALQQGNEMGVKELDSLMTLIAEKKRQMEQQESETNMQILLVFLHCLRKQKLEELNEIQTDLQYIKEDISSVERHRAELYRTKERYSMKLRMLLDEPTAQKMWPSSIDKASCRFLPNSRTPLSGSCPGTLQNKKLDLKAQVSHQGFQRRDALTSSDPPNSPIQSGNVIARKRRVQAQFNELQEYYLQRRRTGAQARRQEERDIVAMNREGYHAGLQDFQSVLTTFTRYSRLRVIAELRHGDLFHSANIVSSIEFDRDDELFATAGVSKRIKVFEFSTVVNEPSDVHCPVVEMATRSKLSCLSWNKYSKNIIASSDYEGIVTVWDVQTRQSVMEYEEHEKRAWSVDFSRTDSSMLVSGSDDCKVKVWCTNQEASVINIDMKANICSVKYNPGSSFYVAVGSADHHIHYFDLRNPSSPVHIFGGHKKAVSYVKFLSNNELASASTDSTLRLWDVKDNCPVRTFRGHKNEKNFVGLSVNNEYIACGSETNEVFVYHKAISKPAASHRFVSSDPDDADDDPGSYFISAVCWKSDSPTMLTANSQGTIKVLVLAP

SEQ ID NO: 14121 - DNA, 396 bp, Zea mays subsp. mays
  misc_feature (1)..(396): Ceres Seq. ID no. 3010931
  misc_feature: MA Experiment ID: 108597 Result: Up-regulated in Transcription
  misc_feature: MA Experiment 108597 PARAMETER Experiment Name: Zm_100uM_ABA_P Parameter: Age (day) Value: 9
  misc_feature: MA Experiment 108597 PARAMETER Experiment Name: Zm_100uM_ABA_P Parameter: Organism Value: Zea mays
  misc_feature: MA Experiment 108597 PARAMETER Experiment Name: Zm_100uM_ABA_P Parameter: Plant Line Value: 35A19
  misc_feature: MA Experiment 108597 PARAMETER Experiment Name: Zm_100uM_ABA_P Parameter: Timepoint (hr) Value: 24
  misc_feature: MA Experiment 108597 PARAMETER Experiment Name: Zm_100uM_ABA_P Parameter: Tissue Value: Aerial
  misc_feature: MA Experiment 108597 PARAMETER Experiment Name: Zm_100uM_ABA_P Parameter: Treatment Value: 100uM ABA vs. No Treatment
  misc_feature: MA Experiment ID: 20000487 Result: Up-regulated in Transcription
  misc_feature: MA Experiment 20000487 PARAMETER Experiment Name: Zm_50mM_NH4NO3_L_to_H_P Parameter: Organism Value: Zea mays
  misc_feature: MA Experiment 20000487 PARAMETER Experiment Name: Zm_50mM_NH4NO3_L_to_H_P Parameter: Timepoint (hr) Value: 4
  misc_feature: MA Experiment 20000487 PARAMETER Experiment Name: Zm_50mM_NH4NO3_L_to_H_P Parameter: Tissue Value: Leaves
  misc_feature: MA Experiment 20000487 PARAMETER Experiment Name: Zm_50mM_NH4NO3_L_to_H_P Parameter: Treatment Value: 50mM NH4NO3 vs. 100mM Mannitol
  misc_feature: Pfam Name: DUF803 Pfam Description: Protein of unknown function (DUF803)
caactttcagtcaagttttgttcaacaagggtctgattgagacttccatgaaactgatcgatttgtcgttgctgtcatgtatgtgaacttatggtttagaagcagctaagtttccaacatgttacatggtagggaatgtatttgctaacactatttgctagcactacaagttccgtatgccctatgtgatagatggaaagattgaatgaagggctgtcattatttgatgcaatactgattgttccaatgtttcaaattgtttggaccttcttctctatttgtacaggatttgtttactttcaagaatatcaagtaagttcttgtttattataatcggataatgaagtkaawcatgcatttcctaantataaactgatgaatctgtttttctgctgt

SEQ ID NO: 14122 - protein, 46 aa, Zea mays subsp. mays
  peptide (1)..(46): Ceres Seq. ID no. 3010932
  misc_feature: Pfam Name: DUF803 Pfam Description: Protein of unknown function (DUF803)
  misc_feature (1)..(45): Homolog of NCBI NO: 15231596 NR Description: unknown protein; protein id: At3g26670.1, by cDNA: gi_20260459 [Arabidopsis thaliana]
MERLNEGLSLFDAILIVPMFQIVWTFFSICTGFVYFQEYQVSSCLL

SEQ ID NO: 14123 - DNA, 1105 bp, Zea mays subsp. mays
  misc_feature (1)..(1105): Ceres Seq. ID no. 14305301
  misc_feature: MA Experiment ID: 108527 Result: Down-regulated in Transcription
  misc_feature: MA Experiment 108527 PARAMETER Experiment Name: Zm_5mM_NO_P Parameter: Age (day) Value: 8
  misc_feature: MA Experiment 108527 PARAMETER Experiment Name: Zm_5mM_NO_P Parameter: Organism Value: Zea mays
  misc_feature: MA Experiment 108527 PARAMETER Experiment Name: Zm_5mM_NO_P Parameter: Plant Line Value: 35A19
  misc_feature: MA Experiment 108527 PARAMETER Experiment Name: Zm_5mM_NO_P Parameter: Timepoint (hr) Value: 6
  misc_feature: MA Experiment 108527 PARAMETER Experiment Name: Zm_5mM_NO_P Parameter: Tissue Value: Aerial
  misc_feature: MA Experiment 108527 PARAMETER Experiment Name: Zm_5mM_NO_P Parameter: Treatment Value: 5mM NO vs. No Treatment
acaagctcgcttttttaaaatctgtccctgcaattctctcctctgttcccactcattaagataccaccgcctcccgccgcccgccgcccgccgccgacgagcaccgcagcctgacacagagccgcgggcgagccatcgcgtgcggcctcgcccgggatggcgaccatggagagcctgatcgggctggtgaaccggatccagcgcgcgtgcaccgtcctcggcgaccacggcggcggcggcggtgagggctccctctgggaggcgctcccctccgtcgctgtcgttggcgggcagagttccgggaagtcgtcggtgcttgagagcatagtagggagggacttcctgccccgtggatctggtatcgtcacgaggcggcctttagtgctgcagctccacaagacagatggtgggcacgagtatgctgagtttctccacgccccgcggaagcggttcaccgactttgctgctgtgaggaaagagattgctgatgaaacagaccgcattactgggaaaactaaagctatttcaaatgttcccatccatttgagtatatattcgccacatgttgttaacttgacacttattgatcttcctggactgacaaaggtcgctgtagaggggcaagcagaatctattgttcaagatattgaaaacatggttcgatcttatgttgacaagccaaattgcatcatcttggctatctccccagctaaccaagatatagcaacgtcagatgctatcaagcttgccagggatgtcgatccttcaggtgacaggacatttggagtcttaacaaagcttgatttgatggacaagggtaccaatgccgttgatgtacttgaagggagacaatatcgcttacaacacccctgggttggaattgttaatcgctcacaagctgatatcaacaagaatgttgatatgctttcagcaagacgcaaagaaaaagagtactttgagagtagtcctgaatatggtcacttggcacataaaatgggtgcagagtatcttgccaagcttctgtcacagcatttagaggctgtgatcagggccaaaattccaagtattatagccttgattaacaaaacaattgatgaaatagaag

SEQ ID NO: 14124 - protein, 316 aa, Zea mays subsp. mays
  peptide (1)..(316): Ceres Seq. ID no. 14305302
  misc_feature (6)..(223): Pfam Name: Dynamin family Pfam Description: Dynamin family
  misc_feature (1)..(315): Homolog of NCBI NO: 18071348 NR Description: putative GTP-binding protein [Oryza sativa
  misc_feature (1)..(315): Homolog of NCBI NO: 37536976 NR Description: putative phragmoplastin [Oryza sativa (japonica group)] >gi|18854996|gb|AAL79688.1| putative phragmoplastin sativa] >gi|31433579|gb|AAP55077.1| putative phragmoplastin
  misc_feature (1)..(315): Homolog of NCBI NO: 15223914 NR Description: dynamin -related [Arabidopsis thaliana]
  misc_feature (1)..(315): Homolog of NCBI NO: 21537304 NR Description: dynamin, putative [Arabidopsis thaliana]
  misc_feature (1)..(315): Homolog of NCBI NO: 6651403 NR Description: dynamin-like protein 5 [Arabidopsis thaliana]
  misc_feature (1)..(315): Homolog of NCBI NO: 18411520 NR Description: dynamin-related protein 4 (ADL4) [Arabidopsis
  misc_feature (4)..(315): Homolog of NCBI NO: 11357275 NR Description: dynamin-like protein 4 (ADL4) - Arabidopsis
  misc_feature (4)..(315): Homolog of NCBI NO: 19569772 NR Description: dynamin-like protein C [Arabidopsis thaliana]
  misc_feature (1)..(315): Homolog of NCBI NO: 6651401 NR Description: dynamin-like protein 4 [Arabidopsis thaliana]
  misc_feature (138)..(315): Homolog of NCBI NO: 8778229 NR Description: F10B6.23 [Arabidopsis thaliana]
MATMESLIGLVNRIQRACTVLGDHGGGGGEGSLWEALPSVAVVGGQSSGKSSVLESIVGRDFLPRGSGIVTRRPLVLQLHKTDGGHEYAEFLHAPRKRFTDFAAVRKEIADETDRITGKTKAISNVPIHLSIYSPHVVNLTLIDLPGLTKVAVEGQAESIVQDIENMVRSYVDKPNCIILAISPANQDIATSDAIKLARDVDPSGDRTFGVLTKLDLMDKGTNAVDVLEGRQYRLQHPWVGIVNRSQADINKNVDMLSARRKEKEYFESSPEYGHLAHKMGAEYLAKLLSQHLEAVIRAKIPSIIALINKTIDEIE

SEQ ID NO: 14125 - protein, 313 aa, Zea mays subsp. mays
  peptide (1)..(313): Ceres Seq. ID no. 14305303
  misc_feature (3)..(220): Pfam Name: Dynamin family Pfam Description: Dynamin family
  misc_feature (1)..(312): Homolog of NCBI NO: 37536976 NR Description: putative phragmoplastin [Oryza sativa (japonica group)] >gi|18854996|gb|AAL79688.1| putative phragmoplastin sativa] >gi|31433579|gb|AAP55077.1| putative phragmoplastin
  misc_feature (1)..(312): Homolog of NCBI NO: 15223914 NR Description: dynamin -related [Arabidopsis thaliana]
  misc_feature (1)..(312): Homolog of NCBI NO: 21537304 NR Description: dynamin, putative [Arabidopsis thaliana]
  misc_feature (1)..(312): Homolog of NCBI NO: 6651403 NR Description: dynamin-like protein 5 [Arabidopsis thaliana]
  misc_feature (1)..(312): Homolog of NCBI NO: 18411520 NR Description: dynamin-related protein 4 (ADL4) [Arabidopsis
  misc_feature (1)..(312): Homolog of NCBI NO: 18071348 NR Description: putative GTP-binding protein [Oryza sativa
  misc_feature (1)..(312): Homolog of NCBI NO: 11357275 NR Description: dynamin-like protein 4 (ADL4) - Arabidopsis
  misc_feature (1)..(312): Homolog of NCBI NO: 19569772 NR Description: dynamin-like protein C [Arabidopsis thaliana]
  misc_feature (1)..(312): Homolog of NCBI NO: 6651401 NR Description: dynamin-like protein 4 [Arabidopsis thaliana]
  misc_feature (135)..(312): Homolog of NCBI NO: 8778229 NR Description: F10B6.23 [Arabidopsis thaliana]
MESLIGLVNRIQRACTVLGDHGGGGGEGSLWEALPSVAVVGGQSSGKSSVLESIVGRDFLPRGSGIVTRRPLVLQLHKTDGGHEYAEFLHAPRKRFTDFAAVRKEIADETDRITGKTKAISNVPIHLSIYSPHVVNLTLIDLPGLTKVAVEGQAESIVQDIENMVRSYVDKPNCIILAISPANQDIATSDAIKLARDVDPSGDRTFGVLTKLDLMDKGTNAVDVLEGRQYRLQHPWVGIVNRSQADINKNVDMLSARRKEKEYFESSPEYGHLAHKMGAEYLAKLLSQHLEAVIRAKIPSIIALINKTIDEIE

SEQ ID NO: 14126 - DNA, 486 bp, Zea mays subsp. mays
  misc_feature (1)..(486): Ceres Seq. ID no. 3011241
  misc_feature: MA Experiment ID: 108597 Result: Up-regulated in Transcription
  misc_feature: MA Experiment 108597 PARAMETER Experiment Name: Zm_100uM_ABA_P Parameter: Age (day) Value: 9
  misc_feature: MA Experiment 108597 PARAMETER Experiment Name: Zm_100uM_ABA_P Parameter: Organism Value: Zea mays
  misc_feature: MA Experiment 108597 PARAMETER Experiment Name: Zm_100uM_ABA_P Parameter: Plant Line Value: 35A19
  misc_feature: MA Experiment 108597 PARAMETER Experiment Name: Zm_100uM_ABA_P Parameter: Timepoint (hr) Value: 24
  misc_feature: MA Experiment 108597 PARAMETER Experiment Name: Zm_100uM_ABA_P Parameter: Tissue Value: Aerial
  misc_feature: MA Experiment 108597 PARAMETER Experiment Name: Zm_100uM_ABA_P Parameter: Treatment Value: 100uM ABA vs. No Treatment
cccaactcgaacctcagtcaggcagcgtgaggagggagagttcaaggaccgaggcggcgtcgggcgagatgaagcttaacgtcaagaccctcaagggcaccaacttcgagatcgaggcgagccccgatgcgtcggttgctgacgtgaagaggatcattgagaccactcagggtcagagtacctaccgggcggaccagcaaatgcttatataccaagggaaaattctcaaggatgagaccactttggaaagcaacggagttgctgagaacagcttccttgttataatgttgtccaaggctaaggcatcgtcgagtggagcttctaccactactgctgcaaaagctcctgcaactctggcccaacctgctgccccggtgccccctgctgcatcagttgcaagaacaccaacacaggctcctgttgccacagctgaaanctgatgatgctgatgtgtacagtcaggcagcttcaaaccttgtatctggc

SEQ ID NO: 14127 - protein, 145 aa, Zea mays subsp. mays
  peptide (1)..(145): Ceres Seq. ID no. 3011242
  misc_feature (23)..(100): Pfam Name: Ubiquitin family Pfam Description: Ubiquitin family
  misc_feature (23)..(139): Homolog of NCBI NO: 7446459 NR Description: RAD23 protein, isoform I - carrot
  misc_feature (23)..(142): Homolog of NCBI NO: 7446462 NR Description: RAD23 protein homolog - rice
  misc_feature (23)..(141): Homolog of NCBI NO: 5640111 NR Description: RAD23 protein [Lycopersicon esculentum]
  misc_feature (23)..(143): Homolog of NCBI NO: 38175472 NR Description: putative osRAD23 [Oryza sativa (japonica
  misc_feature (23)..(139): Homolog of NCBI NO: 15232924 NR Description: putative RAD23; protein id: At3g02540.1, by cDNA: gi_14517453 [Arabidopsis thaliana] putative RAD23 [Arabidopsis thaliana] >gi|14517454|gb|AAK62617.1|
  misc_feature (23)..(143): Homolog of NCBI NO: 14335004 NR Description: unknown protein [Arabidopsis thaliana]
  misc_feature (23)..(143): Homolog of NCBI NO: 15240922 NR Description: DNA repair protein RAD23 homolog; protein id: supported by cDNA: 36697., supported by cDNA: gi_14335003, by cDNA: gi_16648837, supported by cDNA: gi_19548080 [Arabidopsis
  misc_feature (23)..(143): Homolog of NCBI NO: 30409730 NR Description: RAD23-like protein [Arabidopsis thaliana]
  misc_feature (23)..(132): Homolog of NCBI NO: 7446460 NR Description: RAD23 protein, isoform II - carrot
  misc_feature (23)..(136): Homolog of NCBI NO: 25518044 NR Description: T24D18.27 protein - Arabidopsis thaliana Contains similarity to gb|Y12014 RAD23 protein isoform II from carota and is a member of the Ubiquitin PF|00240 family
  misc_feature (145)..(145): Xaa is any aa, unknown or other
QLEPQSGSVRRESSRTEAASGEMKLNVKTLKGTNFEIEASPDASVADVKRIIETTQGQSTYRADQQMLIYQGKILKDETTLESNGVAENSFLVIMLSKAKASSSGASTTTAAKAPATLAQPAAPVPPAASVARTPTQAPVATAEX

SEQ ID NO: 14128 - protein, 123 aa, Zea mays subsp. mays
  peptide (1)..(123): Ceres Seq. ID no. 3011243
  misc_feature (1)..(78): Pfam Name: Ubiquitin family Pfam Description: Ubiquitin family
  misc_feature (1)..(117): Homolog of NCBI NO: 7446459 NR Description: RAD23 protein, isoform I - carrot
  misc_feature (1)..(120): Homolog of NCBI NO: 7446462 NR Description: RAD23 protein homolog - rice
  misc_feature (1)..(119): Homolog of NCBI NO: 5640111 NR Description: RAD23 protein [Lycopersicon esculentum]
  misc_feature (1)..(121): Homolog of NCBI NO: 38175472 NR Description: putative osRAD23 [Oryza sativa (japonica
  misc_feature (1)..(117): Homolog of NCBI NO: 15232924 NR Description: putative RAD23; protein id: At3g02540.1, by cDNA: gi_14517453 [Arabidopsis thaliana] putative RAD23 [Arabidopsis thaliana] >gi|14517454|gb|AAK62617.1|
  misc_feature (1)..(121): Homolog of NCBI NO: 14335004 NR Description: unknown protein [Arabidopsis thaliana]
  misc_feature (1)..(121): Homolog of NCBI NO: 15240922 NR Description: DNA repair protein RAD23 homolog; protein id: supported by cDNA: 36697., supported by cDNA: gi_14335003, by cDNA: gi_16648837, supported by cDNA: gi_19548080 [Arabidopsis
  misc_feature (1)..(121): Homolog of NCBI NO: 30409730 NR Description: RAD23-like protein [Arabidopsis thaliana]
  misc_feature (1)..(110): Homolog of NCBI NO: 7446460 NR Description: RAD23 protein, isoform II - carrot
  misc_feature (1)..(114): Homolog of NCBI NO: 25518044 NR Description: T24D18.27 protein - Arabidopsis thaliana Contains similarity to gb|Y12014 RAD23 protein isoform II from carota and is a member of the Ubiquitin PF|00240 family
  misc_feature (123)..(123): Xaa is any aa, unknown or other
MKLNVKTLKGTNFEIEASPDASVADVKRIIETTQGQSTYRADQQMLIYQGKILKDETTLESNGVAENSFLVIMLSKAKASSSGASTTTAAKAPATLAQPAAPVPPAASVARTPTQAPVATAEX

SEQ ID NO: 14129 - protein, 79 aa, Zea mays subsp. mays
  peptide (1)..(79): Ceres Seq. ID no. 3011244
  misc_feature (1)..(73): Homolog of NCBI NO: 7446459 NR Description: RAD23 protein, isoform I - carrot
  misc_feature (1)..(76): Homolog of NCBI NO: 7446462 NR Description: RAD23 protein homolog - rice
  misc_feature (1)..(75): Homolog of NCBI NO: 5640111 NR Description: RAD23 protein [Lycopersicon esculentum]
  misc_feature (1)..(77): Homolog of NCBI NO: 38175472 NR Description: putative osRAD23 [Oryza sativa (japonica
  misc_feature (1)..(73): Homolog of NCBI NO: 15232924 NR Description: putative RAD23; protein id: At3g02540.1, by cDNA: gi_14517453 [Arabidopsis thaliana] putative RAD23 [Arabidopsis thaliana] >gi|14517454|gb|AAK62617.1|
  misc_feature (1)..(77): Homolog of NCBI NO: 14335004 NR Description: unknown protein [Arabidopsis thaliana]
  misc_feature (1)..(77): Homolog of NCBI NO: 15240922 NR Description: DNA repair protein RAD23 homolog; protein id: supported by cDNA: 36697., supported by cDNA: gi_14335003, by cDNA: gi_16648837, supported by cDNA: gi_19548080 [Arabidopsis
  misc_feature (1)..(77): Homolog of NCBI NO: 30409730 NR Description: RAD23-like protein [Arabidopsis thaliana]
  misc_feature (1)..(66): Homolog of NCBI NO: 7446460 NR Description: RAD23 protein, isoform II - carrot
  misc_feature (1)..(70): Homolog of NCBI NO: 25518044 NR Description: T24D18.27 protein - Arabidopsis thaliana Contains similarity to gb|Y12014 RAD23 protein isoform II from carota and is a member of the Ubiquitin PF|00240 family
  misc_feature (79)..(79): Xaa is any aa, unknown or other
MLIYQGKILKDETTLESNGVAENSFLVIMLSKAKASSSGASTTTAAKAPATLAQPAAPVPPAASVARTPTQAPVATAEX

SEQ ID NO: 14130 - DNA, 1913 bp, Zea mays subsp. mays
  misc_feature (1)..(1913): Ceres Seq. ID no. 12425465
  misc_feature: MA Experiment ID: 108534 Result: Up-regulated in Transcription
  misc_feature: MA Experiment 108534 PARAMETER Experiment Name: Zm_4deg_Cold_P Parameter: Age (hr) Value: 8
  misc_feature: MA Experiment 108534 PARAMETER Experiment Name: Zm_4deg_Cold_P Parameter: Organism Value: Zea mays
  misc_feature: MA Experiment 108534 PARAMETER Experiment Name: Zm_4deg_Cold_P Parameter: Plant Line Value: 35A19
  misc_feature: MA Experiment 108534 PARAMETER Experiment Name: Zm_4deg_Cold_P Parameter: Temperature (deg C) Value: 4 vs. 22
  misc_feature: MA Experiment 108534 PARAMETER Experiment Name: Zm_4deg_Cold_P Parameter: Timepoint (hr) Value: 6
  misc_feature: MA Experiment 108534 PARAMETER Experiment Name: Zm_4deg_Cold_P Parameter: Tissue Value: Aerial
  misc_feature: MA Experiment ID: 20000626 Result: Down-regulated in Transcription
  misc_feature: MA Experiment 20000626 PARAMETER Experiment Name: Zm_Herbicide-Treatments_P Parameter: Timepoint (hr) Value: 12
  misc_feature: MA Experiment 20000626 PARAMETER Experiment Name: Zm_Herbicide-Treatments_P Parameter: Tissue Value: Aerial
  misc_feature: MA Experiment 20000626 PARAMETER Experiment Name: Zm_Herbicide-Treatments_P Parameter: Treatment Value: Roundup vs. No Treatment
aacacaagcatgcaagtccatcagcttctcggcttatggtgccagaccgacgtgcctagtagcgtactatcttagcttcaagagaccgaccaggcaagatccattgatcgatggagctgcttcctctgctcacgtggctcctccttgcgcacgccctggcctgcctggcctggacggccgccgcgcggcgccggcagtctcggtgctacctcctggactacgtctgccacaagcccagcgacgaccgcaagctgtccacggagacggccggcaacgtgatccagcgcaacgcgcggctggggctcaccgactaccgcttcctcctccgcgtcatcgtccgctccggcatcggcgaggagacctacgccccgcgcaacatcctggagggccgcgaggactcgcccaccctggaggacgcggtggacgagatggacgccttcttcgacgaggccatcgccgagctcttcgcccggaccggcctcgcgccccgcgacgtggacgtgctcgtcttcaacgtctccatgctctccccggcgccgtcgctgtcgtccaggatcgtgcgccgctacggcctgcgcgaggacgtggcggcgtacaacctcacgggcatggggtgcagcgcgggcctgatcgcgctggacctggcccggaacgcgctccggacgcgtccccgggcgctggcgctggtggtgtcgtccgagtccatcgcgcccaactggtactccggcaccgacaagactatgatgctggccaactgcctgttccgcagcggcggctccgcggtgctggtgaccaacgacccggcgcggcgcgggcaggccaagatggagctcagctgcctggtgcgcgccaacatcggcgccagcgacgacgcgcacgcgtgcgcgctgcagcgcgaggacggcgagggccgcgtcgggatcagcctgagcaaggcgctccccaaggccgccgtgcgcgccttcgccgtcaacctgcgccgcctcgcgccgcgcgtgctccccgtgggcgagctcgcgcggttcgccgcgcgtctcctcgcccggaggctcttcacgacgtccccgcacctgcgtcagcagcacctatcgggcggcaagcagaagggcgacgcggcggcggccccaaagatcaacttcaaggccggggtggaccacttctgcctccaccccggcggcacggccgtcatcgaggcggtgaagaagagcctggacctggaggacgaggacgtggagccggcgcggatgacgctgcaccggtgggggaacacgtcggcgagcagcctgtggtacgtgctgtcttacatggaggccaaagggcggctcaaggtcggggacagggtgctcatggtcacgttcgggtcggggttcaagtgcaacagctgcgtgtgggaggtgaccggcgacatggccgacaagggggcgtgggccgactgcatcgacgcctacccgccggagaagctcgccaacccgtacttggacaagttcggttggatcaacgatgtcgacggcgataccctgatgctctaacggtacggtatacgatcgaggaccgctctccaccggcggaaatgacgacaacggcggaagcagtaaaaagcaggctagctgttgttcagaacgacaggccggtgatgctagcttgcagcctgcgtaggtgtatttatgcccttggttttactgggcctgtcgttctgaacaatatagccctatttatttaccacccaattatatatgtgtagccgatgcagcagtagcacaatatattcttcttcttcttctgaattgttttctatagcaaaaggaaaaaacatatatagcttttttagaacagaagatcgatcggatctccatgtatacagaaacgattgcaagaacaaacaatataatatcaagtgtacttttacccgcctg

SEQ ID NO: 14131 - protein, 579 aa, Zea mays subsp. mays
  peptide (1)..(579): Ceres Seq. ID no. 12425466
  misc_feature (72)..(494): Pfam Name: High molecular weight glutenin subunit Pfam Description: High molecular weight glutenin subunit
  misc_feature (94)..(509): Homolog of NCBI NO: 29247944 NR Description: GLP_26_54603_52153 [Giardia lamblia ATCC 50803]
  misc_feature (17)..(500): Homolog of NCBI NO: 79833 NR Description: hypothetical 119.5K protein (uvrA region) -
TQACKSISFSAYGARPTCLVAYYLSFKRPTRQDPLIDGAASSAHVAPPCARPGLPGLDGRRAAPAVSVLPPGLRLPQAQRRPQAVHGDGRQRDPAQRAAGAHRLPLPPPRHRPLRHRRGDLRPAQHPGGPRGLAHPGGRGGRDGRLLRRGHRRALRPDRPRAPRRGRARLQRLHALPGAVAVVQDRAPLRPARGRGGVQPHGHGVQRGPDRAGPGPERAPDASPGAGAGGVVRVHRAQLVLRHRQDYDAGQLPVPQRRLRGAGDQRPGAARAGQDGAQLPGARQHRRQRRRARVRAAARGRRGPRRDQPEQGAPQGRRARLRRQPAPPRAARAPRGRARAVRRASPRPEALHDVPAPASAAPIGRQAEGRRGGGPKDQLQGRGGPLLPPPRRHGRHRGGEEEPGPGGRGRGAGADDAAPVGEHVGEQPVVRAVLHGGQRAAQGRGQGAHGHVRVGVQVQQLRVGGDRRHGRQGGVGRLHRRLPAGEARQPVLGQVRLDQRCRRRYPDALTVRYTIEDRSPPAEMTTTAEAVKSRLAVVQNDRPVMLACSLRRCIYALGFTGPVVLNNIALFIYHPIIYV

SEQ ID NO: 14132 - protein, 472 aa, Zea mays subsp. mays
  peptide (1)..(472): Ceres Seq. ID no. 12425467
  misc_feature (288)..(429): Pfam Name: Chalcone and stilbene synthases, C-terminal domain Pfam Description: Chalcone and stilbene synthases, C-terminal
  misc_feature (1)..(472): Homolog of NCBI NO: 40882703 NR Description: putative fatty acid elongase [Oryza sativa
  misc_feature (1)..(468): Homolog of NCBI NO: 40882682 NR Description: putative fatty acid elongase [Oryza sativa
  misc_feature (1)..(465): Homolog of NCBI NO: 37535300 NR Description: putative fatty acid elongase 3-ketoacyl-CoA
  misc_feature (1)..(469): Homolog of NCBI NO: 15226916 NR Description: putative fatty acid elongase; protein id: supported by cDNA: 115769., supported by cDNA: gi_15810262, by cDNA: gi_20259582 [Arabidopsis thaliana]
  misc_feature (1)..(469): Homolog of NCBI NO: 21536949 NR Description: putative fatty acid elongase [Arabidopsis
  misc_feature (1)..(472): Homolog of NCBI NO: 15222994 NR Description: fatty acid elongase 3-ketoacyl-CoA synthase, protein id: At1g07720.1, supported by cDNA: gi_16226846, by cDNA: gi_17065247 [Arabidopsis thaliana]
  misc_feature (1)..(464): Homolog of NCBI NO: 15238194 NR Description: fatty acid elongase - like protein; protein id:
  misc_feature (13)..(315): Homolog of NCBI NO: 4091810 NR Description: fatty acid elongase 3-ketoacyl-CoA synthase 1
  misc_feature (13)..(315): Homolog of NCBI NO: 22329274 NR Description: fatty acid elongase 3-ketoacyl-CoA synthase 1; id: At1g01120.1, supported by cDNA: gi_18377663, supported by
  misc_feature (342)..(447): Homolog of NCBI NO: 4091810 NR Description: fatty acid elongase 3-ketoacyl-CoA synthase 1
MELLPLLTWLLLAHALACLAWTAAARRRQSRCYLLDYVCHKPSDDRKLSTETAGNVIQRNARLGLTDYRFLLRVIVRSGIGEETYAPRNILEGREDSPTLEDAVDEMDAFFDEAIAELFARTGLAPRDVDVLVFNVSMLSPAPSLSSRIVRRYGLREDVAAYNLTGMGCSAGLIALDLARNALRTRPRALALVVSSESIAPNWYSGTDKTMMLANCLFRSGGSAVLVTNDPARRGQAKMELSCLVRANIGASDDAHACALQREDGEGRVGISLSKALPKAAVRAFAVNLRRLAPRVLPVGELARFAARLLARRLFTTSPHLRQQHLSGGKQKGDAAAAPKINFKAGVDHFCLHPGGTAVIEAVKKSLDLEDEDVEPARMTLHRWGNTSASSLWYVLSYMEAKGRLKVGDRVLMVTFGSGFKCNSCVWEVTGDMADKGAWADCIDAYPPEKLANPYLDKFGWINDVDGDTLML

SEQ ID NO: 14133 - protein, 366 aa, Zea mays subsp. mays
  peptide (1)..(366): Ceres Seq. ID no. 12425468
  misc_feature (182)..(323): Pfam Name: Chalcone and stilbene synthases, C-terminal domain Pfam Description: Chalcone and stilbene synthases, C-terminal
  misc_feature (1)..(366): Homolog of NCBI NO: 40882703 NR Description: putative fatty acid elongase [Oryza sativa
  misc_feature (1)..(362): Homolog of NCBI NO: 40882682 NR Description: putative fatty acid elongase [Oryza sativa
  misc_feature (1)..(359): Homolog of NCBI NO: 37535300 NR Description: putative fatty acid elongase 3-ketoacyl-CoA
  misc_feature (1)..(363): Homolog of NCBI NO: 15226916 NR Description: putative fatty acid elongase; protein id: supported by cDNA: 115769., supported by cDNA: gi_15810262, by cDNA: gi_20259582 [Arabidopsis thaliana]
  misc_feature (1)..(363): Homolog of NCBI NO: 21536949 NR Description: putative fatty acid elongase [Arabidopsis
  misc_feature (1)..(366): Homolog of NCBI NO: 15222994 NR Description: fatty acid elongase 3-ketoacyl-CoA synthase, protein id: At1g07720.1, supported by cDNA: gi_16226846, by cDNA: gi_17065247 [Arabidopsis thaliana]
  misc_feature (1)..(358): Homolog of NCBI NO: 15238194 NR Description: fatty acid elongase - like protein; protein id:
  misc_feature (1)..(209): Homolog of NCBI NO: 4091810 NR Description: fatty acid elongase 3-ketoacyl-CoA synthase 1
  misc_feature (1)..(209): Homolog of NCBI NO: 22329274 NR Description: fatty acid elongase 3-ketoacyl-CoA synthase 1; id: At1g01120.1, supported by cDNA: gi_18377663, supported by
  misc_feature (236)..(341): Homolog of NCBI NO: 4091810 NR Description: fatty acid elongase 3-ketoacyl-CoA synthase 1
MDAFFDEAIAELFARTGLAPRDVDVLVFNVSMLSPAPSLSSRIVRRYGLREDVAAYNLTGMGCSAGLIALDLARNALRTRPRALALVVSSESIAPNWYSGTDKTMMLANCLFRSGGSAVLVTNDPARRGQAKMELSCLVRANIGASDDAHACALQREDGEGRVGISLSKALPKAAVRAFAVNLRRLAPRVLPVGELARFAARLLARRLFTTSPHLRQQHLSGGKQKGDAAAAPKINFKAGVDHFCLHPGGTAVIEAVKKSLDLEDEDVEPARMTLHRWGNTSASSLWYVLSYMEAKGRLKVGDRVLMVTFGSGFKCNSCVWEVTGDMADKGAWADCIDAYPPEKLANPYLDKFGWINDVDGDTLML

SEQ ID NO: 14134 - DNA, 1485 bp, Zea mays subsp. mays
  misc_feature (1)..(1485): Ceres Seq. ID no. 12450637
  misc_feature: MA Experiment ID: 108523 Result: Down-regulated in Transcription
  misc_feature: MA Experiment 108523 PARAMETER Experiment Name: Zm_42deg_Heat_P Parameter: Age (day) Value: 8
  misc_feature: MA Experiment 108523 PARAMETER Experiment Name: Zm_42deg_Heat_P Parameter: Organism Value: Zea mays
  misc_feature: MA Experiment 108523 PARAMETER Experiment Name: Zm_42deg_Heat_P Parameter: Plant Line Value: 35A19
  misc_feature: MA Experiment 108523 PARAMETER Experiment Name: Zm_42deg_Heat_P Parameter: Temperature (deg C) Value: 42 vs. 22
  misc_feature: MA Experiment 108523 PARAMETER Experiment Name: Zm_42deg_Heat_P Parameter: Timepoint (hr) Value: 6
  misc_feature: MA Experiment 108523 PARAMETER Experiment Name: Zm_42deg_Heat_P Parameter: Tissue Value: Aerial
  misc_feature: MA Experiment ID: 108527 Result: Down-regulated in Transcription
  misc_feature: MA Experiment 108527 PARAMETER Experiment Name: Zm_5mM_NO_P Parameter: Age (day) Value: 8
  misc_feature: MA Experiment 108527 PARAMETER Experiment Name: Zm_5mM_NO_P Parameter: Organism Value: Zea mays
  misc_feature: MA Experiment 108527 PARAMETER Experiment Name: Zm_5mM_NO_P Parameter: Plant Line Value: 35A19
  misc_feature: MA Experiment 108527 PARAMETER Experiment Name: Zm_5mM_NO_P Parameter: Timepoint (hr) Value: 6
  misc_feature: MA Experiment 108527 PARAMETER Experiment Name: Zm_5mM_NO_P Parameter: Tissue Value: Aerial
  misc_feature: MA Experiment 108527 PARAMETER Experiment Name: Zm_5mM_NO_P Parameter: Treatment Value: 5mM NO vs. No Treatment
  misc_feature: MA Experiment ID: 108528 Result: Up-regulated in Transcription
  misc_feature: MA Experiment 108528 PARAMETER Experiment Name: Zm_Imbibed_Seeds_P Parameter: Age (day) Value: 5 vs. 2
  misc_feature: MA Experiment 108528 PARAMETER Experiment Name: Zm_Imbibed_Seeds_P Parameter: Organism Value: Zea mays
  misc_feature: MA Experiment 108528 PARAMETER Experiment Name: Zm_Imbibed_Seeds_P Parameter: Plant Line Value: 35A19
  misc_feature: MA Experiment 108528 PARAMETER Experiment Name: Zm_Imbibed_Seeds_P Parameter: Tissue Value: Aerial vs. Embryo
  misc_feature: MA Experiment ID: 108530 Result: Up-regulated in Transcription
  misc_feature: MA Experiment 108530 PARAMETER Experiment Name: Zm_Imbibed_Seeds_P Parameter: Age (day) Value: 6 vs. 2
  misc_feature: MA Experiment 108530 PARAMETER Experiment Name: Zm_Imbibed_Seeds_P Parameter: Organism Value: Zea mays
  misc_feature: MA Experiment 108530 PARAMETER Experiment Name: Zm_Imbibed_Seeds_P Parameter: Plant Line Value: 35A19
  misc_feature: MA Experiment 108530 PARAMETER Experiment Name: Zm_Imbibed_Seeds_P Parameter: Tissue Value: Aerial vs. Embryo
  misc_feature: MA Experiment ID: 108543 Result: Up-regulated in Transcription
  misc_feature: MA Experiment ID: 108545 Result: Up-regulated in Transcription
  misc_feature: MA Experiment 108545 PARAMETER Experiment Name: Zm_Imbibed_Seeds_P Parameter: Age (day) Value: 3 vs. 2
  misc_feature: MA Experiment 108545 PARAMETER Experiment Name: Zm_Imbibed_Seeds_P Parameter: Organism Value: Zea mays
  misc_feature: MA Experiment 108545 PARAMETER Experiment Name: Zm_Imbibed_Seeds_P Parameter: Plant Line Value: 35A19
  misc_feature: MA Experiment 108545 PARAMETER Experiment Name: Zm_Imbibed_Seeds_P Parameter: Tissue Value: Aerial vs. Embryo
  misc_feature: MA Experiment ID: 108546 Result: Down-regulated in Transcription
  misc_feature: MA Experiment 108546 PARAMETER Experiment Name: Zm_Imbibed_Seeds_P Parameter: Age (day) Value: 3 vs. 2
  misc_feature: MA Experiment 108546 PARAMETER Experiment Name: Zm_Imbibed_Seeds_P Parameter: Organism Value: Zea mays
  misc_feature: MA Experiment 108546 PARAMETER Experiment Name: Zm_Imbibed_Seeds_P Parameter: Plant Line Value: 35A19
  misc_feature: MA Experiment 108546 PARAMETER Experiment Name: Zm_Imbibed_Seeds_P Parameter: Tissue Value: Roots vs. Embryo
  misc_feature: MA Experiment ID: 108547 Result: Up-regulated in Transcription
  misc_feature: MA Experiment 108547 PARAMETER Experiment Name: Zm_Imbibed_Seeds_P Parameter: Age (day) Value: 4 vs. 2
  misc_feature: MA Experiment 108547 PARAMETER Experiment Name: Zm_Imbibed_Seeds_P Parameter: Organism Value: Zea mays
  misc_feature: MA Experiment 108547 PARAMETER Experiment Name: Zm_Imbibed_Seeds_P Parameter: Plant Line Value: 35A19
  misc_feature: MA Experiment 108547 PARAMETER Experiment Name: Zm_Imbibed_Seeds_P Parameter: Tissue Value: Aerial vs. Embryo
  misc_feature: MA Experiment ID: 108559 Result: Down-regulated in Transcription
  misc_feature: MA Experiment 108559 PARAMETER Experiment Name: Zm_5mM_NO_P Parameter: Age (day) Value: 8
  misc_feature: MA Experiment 108559 PARAMETER Experiment Name: Zm_5mM_NO_P Parameter: Organism Value: Zea mays
  misc_feature: MA Experiment 108559 PARAMETER Experiment Name: Zm_5mM_NO_P Parameter: Plant Line Value: 35A19
  misc_feature: MA Experiment 108559 PARAMETER Experiment Name: Zm_5mM_NO_P Parameter: Timepoint (hr) Value: 12
  misc_feature: MA Experiment 108559 PARAMETER Experiment Name: Zm_5mM_NO_P Parameter: Tissue Value: Aerial
  misc_feature: MA Experiment 108559 PARAMETER Experiment Name: Zm_5mM_NO_P Parameter: Treatment Value: 5mM NO vs. No Treatment
  misc_feature: MA Experiment ID: 108688 Result: Down-regulated in Transcription
  misc_feature: MA Experiment 108688 PARAMETER Experiment Name: Zm_Embryos-Flowers__P Parameter: Tissue Value: Immature Flowers vs. Aerial+
  misc_feature: MA Experiment ID: 20000535 Result: Up-regulated in Transcription
  misc_feature: MA Experiment 20000535 PARAMETER Experiment Name: Zm_Hybrid_Seed_Dev_P Parameter: DAP Value: 30 vs. 12
  misc_feature: MA Experiment 20000535 PARAMETER Experiment Name: Zm_Hybrid_Seed_Dev_P Parameter: Organism Value: Zea mays
  misc_feature: MA Experiment 20000535 PARAMETER Experiment Name: Zm_Hybrid_Seed_Dev_P Parameter: Plant Line Value: 35A19
  misc_feature: MA Experiment 20000535 PARAMETER Experiment Name: Zm_Hybrid_Seed_Dev_P Parameter: Tissue Value: Embryo vs. Unfert Floret
aatcctaatcccctccgcctcatccccttcaaccccacgtctctctcgccgaaggctccggcctcgtcgggatccggtgctggattgacgcaatggcgccgctccacgccgcgctgccgccgccctcctccgccgccgctcaccaccacgcggcagccccgcctgtcttcctcgcccgctcgccgtaccacccccgcagggcggcggcctcctgcccgctcgccgtcgctgccgctccctcgtcgagaaaagcgttcttgtcgtgcccgctgctgggccactggaccacggccgcgccgccgcgcgccatcccctcctcgtcgtcgtcgtcgaccccggcgctcatcgcgtccgtgcaggacctgtatgacttcatctgctgcggcccgctggtggacaggatcggctacaccagtgagaagatcaccgagtccatcgaccgctggcttctcgccggggctagggtggcgcgcctcttccgcctcaacgagctccagctgtcggacgccgagaaggcccggatataccacttctacatccccgtcttcctctggtgcgaggacgaggtcatggtgcacagagccaggtacaacgacggcgatgacatcccgccattggtgatcggggtcagcgctccccaaggaagtgggaagacgactcttgtgttcgcacttgattatctttttcgggttgctggtaggaattctgccacattgtctatagacgacttctatctgacagcaaaagaacagaatgaattgagggacagaaatcctgcaaatgctcttttagagttccgcgggaatgctggaagccacgatctccaactctcagtggaaacactcgagtcactgatcaagctaacgaaggaaggtatgaagatgaaggttccacggtatgacaagtctgcgtttgggggaaggggtgaccgggctgatccttctgtatggccagaggttgaagggcccttagaggttgttctgttcgaaggatggatgcttggatttaaacctcttccaaatgaagttgtgaaagaagtggatccacagctggaggtggttaacaagaaccttgaagcatactctgatgcttgggacaggttcatccagtcatggattgttattaaaataagagaacccggtagcgtttaccagtggagactgcaggcagaggtcgctatgagagcagatggaaagcctggaatgtctgatgaggaggttatggattttgtatcacgctacctaccggcataccatgcatatctgccaacactgtacaaagaggggccgaatggttcgaatccagatcatctgctggtcatcgacatagacgaaaataggaaccctatctgtggtggatcatgggacatctcatgtttgtgaaactacttttatgatgggccgtcaaacaccactggcctcttgttgccctacactctggtagtgtaaatctgtgaattccatgtaaatatgaatttcgcttcct

SEQ ID NO: 14135 - protein, 429 aa, Zea mays subsp. mays
  peptide (1)..(429): Ceres Seq. ID no. 12450638
  misc_feature (176)..(408): Pfam Name: Phosphoribulokinase / Uridine kinase family Pfam Description: Phosphoribulokinase / Uridine kinase family
  misc_feature (1)..(295): Homolog of NCBI NO: 34911206 NR Description: P0019E03.19 [Oryza sativa (japonica
  misc_feature (319)..(421): Homolog of NCBI NO: 34911206 NR Description: P0019E03.19 [Oryza sativa (japonica
  misc_feature (85)..(419): Homolog of NCBI NO: 30699506 NR Description: auxin-regulated protein [Arabidopsis thaliana] unknown protein [Arabidopsis thaliana]
  misc_feature (85)..(419): Homolog of NCBI NO: 16226442 NR Description: At1g80380/F5I6_13 [Arabidopsis thaliana]
  misc_feature (203)..(419): Homolog of NCBI NO: 25406658 NR Description: unknown protein F5I6.13 [imported] - Arabidopsis
  misc_feature (85)..(210): Homolog of NCBI NO: 25406658 NR Description: unknown protein F5I6.13 [imported] - Arabidopsis
  misc_feature (266)..(419): Homolog of NCBI NO: 18412831 NR Description: auxin-regulated protein; protein id: At1g80380.1,
  misc_feature (85)..(173): Homolog of NCBI NO: 18412831 NR Description: auxin-regulated protein; protein id: At1g80380.1,
  misc_feature (266)..(419): Homolog of NCBI NO: 21537005 NR Description: unknown [Arabidopsis thaliana]
  misc_feature (85)..(173): Homolog of NCBI NO: 21537005 NR Description: unknown [Arabidopsis thaliana]
MAPLHAALPPPSSAAAHHHAAAPPVFLARSPYHPRRAAASCPLAVAAAPSSRKAFLSCPLLGHWTTAAPPRAIPSSSSSSTPALIASVQDLYDFICCGPLVDRIGYTSEKITESIDRWLLAGARVARLFRLNELQLSDAEKARIYHFYIPVFLWCEDEVMVHRARYNDGDDIPPLVIGVSAPQGSGKTTLVFALDYLFRVAGRNSATLSIDDFYLTAKEQNELRDRNPANALLEFRGNAGSHDLQLSVETLESLIKLTKEGMKMKVPRYDKSAFGGRGDRADPSVWPEVEGPLEVVLFEGWMLGFKPLPNEVVKEVDPQLEVVNKNLEAYSDAWDRFIQSWIVIKIREPGSVYQWRLQAEVAMRADGKPGMSDEEVMDFVSRYLPAYHAYLPTLYKEGPNGSNPDHLLVIDIDENRNPICGGSWDISCL

SEQ ID NO: 14136 - protein, 270 aa, Zea mays subsp. mays
  peptide (1)..(270): Ceres Seq. ID no. 12450639
  misc_feature (17)..(249): Pfam Name: Phosphoribulokinase / Uridine kinase family Pfam Description: Phosphoribulokinase / Uridine kinase family
  misc_feature (1)..(136): Homolog of NCBI NO: 34911206 NR Description: P0019E03.19 [Oryza sativa (japonica
  misc_feature (160)..(262): Homolog of NCBI NO: 34911206 NR Description: P0019E03.19 [Oryza sativa (japonica
  misc_feature (1)..(260): Homolog of NCBI NO: 30699506 NR Description: auxin-regulated protein [Arabidopsis thaliana] unknown protein [Arabidopsis thaliana]
  misc_feature (1)..(260): Homolog of NCBI NO: 16226442 NR Description: At1g80380/F5I6_13 [Arabidopsis thaliana]
  misc_feature (44)..(260): Homolog of NCBI NO: 25406658 NR Description: unknown protein F5I6.13 [imported] - Arabidopsis
  misc_feature (1)..(51): Homolog of NCBI NO: 25406658 NR Description: unknown protein F5I6.13 [imported] - Arabidopsis
  misc_feature (107)..(260): Homolog of NCBI NO: 18412831 NR Description: auxin-regulated protein; protein id: At1g80380.1,
  misc_feature (1)..(14): Homolog of NCBI NO: 18412831 NR Description: auxin-regulated protein; protein id: At1g80380.1,
  misc_feature (107)..(260): Homolog of NCBI NO: 21537005 NR Description: unknown [Arabidopsis thaliana]
  misc_feature (1)..(14): Homolog of NCBI NO: 21537005 NR Description: unknown [Arabidopsis thaliana]
MVHRARYNDGDDIPPLVIGVSAPQGSGKTTLVFALDYLFRVAGRNSATLSIDDFYLTAKEQNELRDRNPANALLEFRGNAGSHDLQLSVETLESLIKLTKEGMKMKVPRYDKSAFGGRGDRADPSVWPEVEGPLEVVLFEGWMLGFKPLPNEVVKEVDPQLEVVNKNLEAYSDAWDRFIQSWIVIKIREPGSVYQWRLQAEVAMRADGKPGMSDEEVMDFVSRYLPAYHAYLPTLYKEGPNGSNPDHLLVIDIDENRNPICGGSWDISCL

SEQ ID NO: 14137 - DNA, 1117 bp, Zea mays subsp. mays
  misc_feature (1)..(1117): Ceres Seq. ID no. 12436168
  misc_feature: MA Experiment ID: 108536 Result: Up-regulated in Transcription
  misc_feature: MA Experiment 108536 PARAMETER Experiment Name: Zm_Meristem_P Parameter: Age (day) Value: 8
  misc_feature: MA Experiment 108536 PARAMETER Experiment Name: Zm_Meristem_P Parameter: Organism Value: Zea mays
  misc_feature: MA Experiment 108536 PARAMETER Experiment Name: Zm_Meristem_P Parameter: Plant Line Value: 35A19
  misc_feature: MA Experiment 108536 PARAMETER Experiment Name: Zm_Meristem_P Parameter: Tissue Value: Shoot Meristem vs. Above Shoot Meristem
  misc_feature: MA Experiment ID: 108687 Result: Down-regulated in Transcription
  misc_feature: MA Experiment 108687 PARAMETER Experiment Name: Zm_Embryos-Flowers__P Parameter: Tissue Value: Embryo vs. Aerial+
  misc_feature: MA Experiment ID: 20000477 Result: Down-regulated in Transcription
  misc_feature: MA Experiment 20000477 PARAMETER Experiment Name: Zm_5mM_SA_P Parameter: Age (day) Value: 10
  misc_feature: MA Experiment 20000477 PARAMETER Experiment Name: Zm_5mM_SA_P Parameter: Organism Value: Zea mays
  misc_feature: MA Experiment 20000477 PARAMETER Experiment Name: Zm_5mM_SA_P Parameter: Plant Line Value: 35A19
  misc_feature: MA Experiment 20000477 PARAMETER Experiment Name: Zm_5mM_SA_P Parameter: Timepoint (hr) Value: 48
  misc_feature: MA Experiment 20000477 PARAMETER Experiment Name: Zm_5mM_SA_P Parameter: Tissue Value: Aerial
  misc_feature: MA Experiment 20000477 PARAMETER Experiment Name: Zm_5mM_SA_P Parameter: Treatment Value: 5mM SA vs. No Treatment
gcatttgatttctttgcaggtgcagccgtgcaggtgaggtgatcgcgcgtggatgggagttcagacaatgtcgtcccactcccacggcgacgacggccgccgcggcctcccgcggcagggctcggtctacggcctcacgctgaccgaggtggagacgcagctgggcgagccgctgcggaccatgaacctggacgacctcctgcgcaccgttctcccggcctccgccgccgccgccgccgcaggcccgcccccgcccccggccccggcggccaagaagacggtggacgaggtgtggcgcgacatccagagcgccggcggcggcggcggcggccgtcagccctccatgggcgagatgacgctggaggacttcctctcccgcgccggcgtcgccgtcgatgccgccccgcattggatgcaccagtacccgcagcagcagcagcagtacgcgctgccgcggcccctgccgcttcccggcccggctctggacgccgcgtaccacggcgaccggcccggtgttttcctctcgcactcgcaggtggccgggcggaagcgcgccgccacggcggccgtggccggggacggcgtcgtggagaggacggtggagcggcggcagaagcgcatgatcaagaaccgcgagtccgcggcgaggtcccgggccaggaagcaggcgtacaccaacgagctggagaacaaggtggcccggctggaggaggagaacaagcgtctcattgagctcaaggtgctgaaaccactggagccactggagccgccaccggcggagcagaacaagaagcagccgccgccgcaaccgaagaggaagcagccgcagccaccgccaccgccgccgccgccgattcagcagctgccgccgaagcaccgccacgacctccggcgaacgaattccgccactttctgatgacgagggcacgggggggggggggggctctctgcctctctctagggcgtctacggggggtactgtactgtactgtactgtacttgggatgctttgagatgtgaatgaacaaaaccctgctctgcttgcagagactctggtggtctgtggatgggtgcgtgcgtgccgccgttgcagtgaaagctagcagtgttgatgtgc

SEQ ID NO: 14138 - protein, 287 aa, Zea mays subsp. mays
  peptide (1)..(287): Ceres Seq. ID no. 12436169
  misc_feature (6)..(287): Homolog of NCBI NO: 33146493 NR Description: putative bZIP protein DPBF3 [Oryza sativa
  misc_feature (122)..(225): Homolog of NCBI NO: 34909206 NR Description: putative promoter-binding factor-like protein
  misc_feature (69)..(117): Homolog of NCBI NO: 34909206 NR Description: putative promoter-binding factor-like protein
  misc_feature (15)..(64): Homolog of NCBI NO: 34909206 NR Description: putative promoter-binding factor-like protein
  misc_feature (17)..(241): Homolog of NCBI NO: 18405590 NR Description: bZIP family transcription factor; protein id: supported by cDNA: 114632., supported by cDNA: gi_13346156 thaliana] >gi|13346157|gb|AAK19602.1|AF334209_1 bZIP putative
  misc_feature (17)..(241): Homolog of NCBI NO: 26451276 NR Description: putative bZIP transcription factor AtbZIP12 /
  misc_feature (38)..(241): Homolog of NCBI NO: 21694632 NR Description: basic leucine zipper transcription factor
  misc_feature (44)..(241): Homolog of NCBI NO: 7487620 NR Description: probable bZIP transcription factor [imported] -
  misc_feature (120)..(241): Homolog of NCBI NO: 13346155 NR Description: bZIP protein DPBF3 [Arabidopsis thaliana]
  misc_feature (120)..(241): Homolog of NCBI NO: 15230146 NR Description: ABA-responsive element binding protein 3; protein At3g56850.1, supported by cDNA: gi_13346154, supported by cDNA: supported by cDNA: gi_20148682, supported by cDNA: gi_9967420
MGVQTMSSHSHGDDGRRGLPRQGSVYGLTLTEVETQLGEPLRTMNLDDLLRTVLPASAAAAAAGPPPPPAPAAKKTVDEVWRDIQSAGGGGGGRQPSMGEMTLEDFLSRAGVAVDAAPHWMHQYPQQQQQYALPRPLPLPGPALDAAYHGDRPGVFLSHSQVAGRKRAATAAVAGDGVVERTVERRQKRMIKNRESAARSRARKQAYTNELENKVARLEEENKRLIELKVLKPLEPLEPPPAEQNKKQPPPQPKRKQPQPPPPPPPPIQQLPPKHRHDLRRTNSATF

SEQ ID NO: 14139 - protein, 282 aa, Zea mays subsp. mays
  peptide (1)..(282): Ceres Seq. ID no. 12436170
  misc_feature (1)..(282): Homolog of NCBI NO: 33146493 NR Description: putative bZIP protein DPBF3 [Oryza sativa
  misc_feature (117)..(220): Homolog of NCBI NO: 34909206 NR Description: putative promoter-binding factor-like protein
  misc_feature (64)..(112): Homolog of NCBI NO: 34909206 NR Description: putative promoter-binding factor-like protein
  misc_feature (10)..(59): Homolog of NCBI NO: 34909206 NR Description: putative promoter-binding factor-like protein
  misc_feature (12)..(236): Homolog of NCBI NO: 18405590 NR Description: bZIP family transcription factor; protein id: supported by cDNA: 114632., supported by cDNA: gi_13346156 thaliana] >gi|13346157|gb|AAK19602.1|AF334209_1 bZIP putative
  misc_feature (12)..(236): Homolog of NCBI NO: 26451276 NR Description: putative bZIP transcription factor AtbZIP12 /
  misc_feature (33)..(236): Homolog of NCBI NO: 21694632 NR Description: basic leucine zipper transcription factor
  misc_feature (39)..(236): Homolog of NCBI NO: 7487620 NR Description: probable bZIP transcription factor [imported] -
  misc_feature (115)..(236): Homolog of NCBI NO: 13346155 NR Description: bZIP protein DPBF3 [Arabidopsis thaliana]
  misc_feature (115)..(236): Homolog of NCBI NO: 15230146 NR Description: ABA-responsive element binding protein 3; protein At3g56850.1, supported by cDNA: gi_13346154, supported by cDNA: supported by cDNA: gi_20148682, supported by cDNA: gi_9967420
MSSHSHGDDGRRGLPRQGSVYGLTLTEVETQLGEPLRTMNLDDLLRTVLPASAAAAAAGPPPPPAPAAKKTVDEVWRDIQSAGGGGGGRQPSMGEMTLEDFLSRAGVAVDAAPHWMHQYPQQQQQYALPRPLPLPGPALDAAYHGDRPGVFLSHSQVAGRKRAATAAVAGDGVVERTVERRQKRMIKNRESAARSRARKQAYTNELENKVARLEEENKRLIELKVLKPLEPLEPPPAEQNKKQPPPQPKRKQPQPPPPPPPPIQQLPPKHRHDLRRTNSATF

SEQ ID NO: 14140 - protein, 244 aa, Zea mays subsp. mays
  peptide (1)..(244): Ceres Seq. ID no. 12436171
  misc_feature (1)..(198): Homolog of NCBI NO: 18405590 NR Description: bZIP family transcription factor; protein id: supported by cDNA: 114632., supported by cDNA: gi_13346156 thaliana] >gi|13346157|gb|AAK19602.1|AF334209_1 bZIP putative
  misc_feature (1)..(198): Homolog of NCBI NO: 26451276 NR Description: putative bZIP transcription factor AtbZIP12 /
  misc_feature (1)..(198): Homolog of NCBI NO: 21694632 NR Description: basic leucine zipper transcription factor
  misc_feature (1)..(198): Homolog of NCBI NO: 7487620 NR Description: probable bZIP transcription factor [imported] -
  misc_feature (77)..(198): Homolog of NCBI NO: 13346155 NR Description: bZIP protein DPBF3 [Arabidopsis thaliana]
  misc_feature (77)..(198): Homolog of NCBI NO: 15230146 NR Description: ABA-responsive element binding protein 3; protein At3g56850.1, supported by cDNA: gi_13346154, supported by cDNA: supported by cDNA: gi_20148682, supported by cDNA: gi_9967420
  misc_feature (1)..(244): Homolog of NCBI NO: 33146493 NR Description: putative bZIP protein DPBF3 [Oryza sativa
  misc_feature (79)..(182): Homolog of NCBI NO: 34909206 NR Description: putative promoter-binding factor-like protein
  misc_feature (26)..(74): Homolog of NCBI NO: 34909206 NR Description: putative promoter-binding factor-like protein
  misc_feature (1)..(21): Homolog of NCBI NO: 34909206 NR Description: putative promoter-binding factor-like protein
MNLDDLLRTVLPASAAAAAAGPPPPPAPAAKKTVDEVWRDIQSAGGGGGGRQPSMGEMTLEDFLSRAGVAVDAAPHWMHQYPQQQQQYALPRPLPLPGPALDAAYHGDRPGVFLSHSQVAGRKRAATAAVAGDGVVERTVERRQKRMIKNRESAARSRARKQAYTNELENKVARLEEENKRLIELKVLKPLEPLEPPPAEQNKKQPPPQPKRKQPQPPPPPPPPIQQLPPKHRHDLRRTNSATF

SEQ ID NO: 14141 - DNA, 795 bp, Zea mays subsp. mays
  misc_feature (1)..(795): Ceres Seq. ID no. 12419382
  misc_feature: MA Experiment ID: 108522 Result: Down-regulated in Transcription
  misc_feature: MA Experiment 108522 PARAMETER Experiment Name: Zm_42deg_Heat_P Parameter: Age (day) Value: 8
  misc_feature: MA Experiment 108522 PARAMETER Experiment Name: Zm_42deg_Heat_P Parameter: Organism Value: Zea mays
  misc_feature: MA Experiment 108522 PARAMETER Experiment Name: Zm_42deg_Heat_P Parameter: Plant Line Value: 35A19
  misc_feature: MA Experiment 108522 PARAMETER Experiment Name: Zm_42deg_Heat_P Parameter: Temperature (deg C) Value: 42 vs. 22
  misc_feature: MA Experiment 108522 PARAMETER Experiment Name: Zm_42deg_Heat_P Parameter: Timepoint (hr) Value: 1
  misc_feature: MA Experiment 108522 PARAMETER Experiment Name: Zm_42deg_Heat_P Parameter: Tissue Value: Aerial
agaaggaagatgcatggcagatctatgcggcgcactacattgtgatctgatgatgcagttcaaaaaaccaaaaagtaaatgcaatgcagctgcagctacaaggaatcgtcatctttgtgagagccttgcagacagttgctttcctattaatcaaggtcttgctgccagccgtcttcatgaatttttcttgcgccagttttgtgatgctcacacttgcagtaagggaacaaaacctttccccaaaggtggcaggaaacaaacaaacaggttatacctcgctctctccattttgacgctgatacttttgccgctgttctatctaattgtgttcctgcaccagagggaaatgaggaaaggtacccaagatctaaaacggttttcgaaaattgggcagaagaaaaagccatcctagtgtccaacagtcacaacgttctcgagcccatggagccaaggatgagctggataaggaacgtggtatgcagtgtgaaatgtttttatgggcagggaagaaatttccctcatttccaggacgggaacaatgtccgcaggtcgaggaatgctggcttcgaccttttcttttctttttctttcttttttgtttcgacatgtagatgcaaacttcgagaggcaagcatgtgtggtctttgtgagattacggcgatatgaagtcctattgataatttaaggatttttgggaggcctcaggcttaaaaaccaatgtcagtaaatgtagtatgactcctatccaatgtaatgatcaatgtgttggtgaggcacaatctttattcccttgct

SEQ ID NO: 14142 - protein, 136 aa, Zea mays subsp. mays
  peptide (1)..(136): Ceres Seq. ID no. 12419383
  misc_feature (3)..(136): Homolog of NCBI NO: 18424689 NR Description: expressed protein; protein id: At5g63280.1, by cDNA: 114951., supported by cDNA: gi_17381005 [Arabidopsis >gi|17381006|gb|AAL36315.1| unknown protein [Arabidopsis
  misc_feature (2)..(135): Homolog of NCBI NO: 15237477 NR Description: zinc finger - like protein; protein id: [Arabidopsis thaliana] >gi|9758099|dbj|BAB08543.1|
  misc_feature (2)..(135): Homolog of NCBI NO: 26452757 NR Description: putative zinc finger protein [Arabidopsis
  misc_feature (3)..(136): Homolog of NCBI NO: 10177309 NR Description: gene_id:MDC12.25~unknown protein [Arabidopsis
EGRCMADLCGALHCDLMMQFKKPKSKCNAAAATRNRHLCESLADSCFPINQGLAASRLHEFFLRQFCDAHTCSKGTKPFPKGGRKQTNRLYLALSILTLILLPLFYLIVFLHQREMRKGTQDLKRFSKIGQKKKPS

SEQ ID NO: 14143 - protein, 132 aa, Zea mays subsp. mays
  peptide (1)..(132): Ceres Seq. ID no. 12419384
  misc_feature (1)..(132): Homolog of NCBI NO: 18424689 NR Description: expressed protein; protein id: At5g63280.1, by cDNA: 114951., supported by cDNA: gi_17381005 [Arabidopsis >gi|17381006|gb|AAL36315.1| unknown protein [Arabidopsis
  misc_feature (1)..(131): Homolog of NCBI NO: 15237477 NR Description: zinc finger - like protein; protein id: [Arabidopsis thaliana] >gi|9758099|dbj|BAB08543.1|
  misc_feature (1)..(131): Homolog of NCBI NO: 26452757 NR Description: putative zinc finger protein [Arabidopsis
  misc_feature (1)..(132): Homolog of NCBI NO: 10177309 NR Description: gene_id:MDC12.25~unknown protein [Arabidopsis
MADLCGALHCDLMMQFKKPKSKCNAAAATRNRHLCESLADSCFPINQGLAASRLHEFFLRQFCDAHTCSKGTKPFPKGGRKQTNRLYLALSILTLILLPLFYLIVFLHQREMRKGTQDLKRFSKIGQKKKPS

SEQ ID NO: 14144 - protein, 120 aa, Zea mays subsp. mays
  peptide (1)..(120): Ceres Seq. ID no. 12419385
  misc_feature (1)..(120): Homolog of NCBI NO: 18424689 NR Description: expressed protein; protein id: At5g63280.1, by cDNA: 114951., supported by cDNA: gi_17381005 [Arabidopsis >gi|17381006|gb|AAL36315.1| unknown protein [Arabidopsis
  misc_feature (1)..(119): Homolog of NCBI NO: 15237477 NR Description: zinc finger - like protein; protein id: [Arabidopsis thaliana] >gi|9758099|dbj|BAB08543.1|
  misc_feature (1)..(119): Homolog of NCBI NO: 26452757 NR Description: putative zinc finger protein [Arabidopsis
  misc_feature (1)..(120): Homolog of NCBI NO: 10177309 NR Description: gene_id:MDC12.25~unknown protein [Arabidopsis
MMQFKKPKSKCNAAAATRNRHLCESLADSCFPINQGLAASRLHEFFLRQFCDAHTCSKGTKPFPKGGRKQTNRLYLALSILTLILLPLFYLIVFLHQREMRKGTQDLKRFSKIGQKKKPS

SEQ ID NO: 14145 - DNA, 1616 bp, Zea mays subsp. mays
  misc_feature (1)..(1616): Ceres Seq. ID no. 12436397
  misc_feature: MA Experiment ID: 108528 Result: Down-regulated in Transcription
  misc_feature: MA Experiment 108528 PARAMETER Experiment Name: Zm_Imbibed_Seeds_P Parameter: Age (day) Value: 5 vs. 2
  misc_feature: MA Experiment 108528 PARAMETER Experiment Name: Zm_Imbibed_Seeds_P Parameter: Organism Value: Zea mays
  misc_feature: MA Experiment 108528 PARAMETER Experiment Name: Zm_Imbibed_Seeds_P Parameter: Plant Line Value: 35A19
  misc_feature: MA Experiment 108528 PARAMETER Experiment Name: Zm_Imbibed_Seeds_P Parameter: Tissue Value: Aerial vs. Embryo
  misc_feature: MA Experiment ID: 108529 Result: Up-regulated in Transcription
  misc_feature: MA Experiment 108529 PARAMETER Experiment Name: Zm_Imbibed_Seeds_P Parameter: Age (day) Value: 5 vs. 2
  misc_feature: MA Experiment 108529 PARAMETER Experiment Name: Zm_Imbibed_Seeds_P Parameter: Organism Value: Zea mays
  misc_feature: MA Experiment 108529 PARAMETER Experiment Name: Zm_Imbibed_Seeds_P Parameter: Plant Line Value: 35A19
  misc_feature: MA Experiment 108529 PARAMETER Experiment Name: Zm_Imbibed_Seeds_P Parameter: Tissue Value: Roots vs. Embryo
  misc_feature: MA Experiment ID: 108530 Result: Down-regulated in Transcription
  misc_feature: MA Experiment 108530 PARAMETER Experiment Name: Zm_Imbibed_Seeds_P Parameter: Age (day) Value: 6 vs. 2
  misc_feature: MA Experiment 108530 PARAMETER Experiment Name: Zm_Imbibed_Seeds_P Parameter: Organism Value: Zea mays
  misc_feature: MA Experiment 108530 PARAMETER Experiment Name: Zm_Imbibed_Seeds_P Parameter: Plant Line Value: 35A19
  misc_feature: MA Experiment 108530 PARAMETER Experiment Name: Zm_Imbibed_Seeds_P Parameter: Tissue Value: Aerial vs. Embryo
  misc_feature: MA Experiment ID: 108535 Result: Down-regulated in Transcription
  misc_feature: MA Experiment 108535 PARAMETER Experiment Name: Zm_Meristem_P Parameter: Age (day) Value: 8
  misc_feature: MA Experiment 108535 PARAMETER Experiment Name: Zm_Meristem_P Parameter: Organism Value: Zea mays
  misc_feature: MA Experiment 108535 PARAMETER Experiment Name: Zm_Meristem_P Parameter: Plant Line Value: 35A19
  misc_feature: MA Experiment 108535 PARAMETER Experiment Name: Zm_Meristem_P Parameter: Tissue Value: Root Meristem vs. Above Root Meristem
  misc_feature: MA Experiment ID: 108543 Result: Up-regulated in Transcription
  misc_feature: MA Experiment ID: 108545 Result: Down-regulated in Transcription
  misc_feature: MA Experiment 108545 PARAMETER Experiment Name: Zm_Imbibed_Seeds_P Parameter: Age (day) Value: 3 vs. 2
  misc_feature: MA Experiment 108545 PARAMETER Experiment Name: Zm_Imbibed_Seeds_P Parameter: Organism Value: Zea mays
  misc_feature: MA Experiment 108545 PARAMETER Experiment Name: Zm_Imbibed_Seeds_P Parameter: Plant Line Value: 35A19
  misc_feature: MA Experiment 108545 PARAMETER Experiment Name: Zm_Imbibed_Seeds_P Parameter: Tissue Value: Aerial vs. Embryo
  misc_feature: MA Experiment ID: 108546 Result: Up-regulated in Transcription
  misc_feature: MA Experiment 108546 PARAMETER Experiment Name: Zm_Imbibed_Seeds_P Parameter: Age (day) Value: 3 vs. 2
  misc_feature: MA Experiment 108546 PARAMETER Experiment Name: Zm_Imbibed_Seeds_P Parameter: Organism Value: Zea mays
  misc_feature: MA Experiment 108546 PARAMETER Experiment Name: Zm_Imbibed_Seeds_P Parameter: Plant Line Value: 35A19
  misc_feature: MA Experiment 108546 PARAMETER Experiment Name: Zm_Imbibed_Seeds_P Parameter: Tissue Value: Roots vs. Embryo
  misc_feature: MA Experiment ID: 108547 Result: Down-regulated in Transcription
  misc_feature: MA Experiment 108547 PARAMETER Experiment Name: Zm_Imbibed_Seeds_P Parameter: Age (day) Value: 4 vs. 2
  misc_feature: MA Experiment 108547 PARAMETER Experiment Name: Zm_Imbibed_Seeds_P Parameter: Organism Value: Zea mays
  misc_feature: MA Experiment 108547 PARAMETER Experiment Name: Zm_Imbibed_Seeds_P Parameter: Plant Line Value: 35A19
  misc_feature: MA Experiment 108547 PARAMETER Experiment Name: Zm_Imbibed_Seeds_P Parameter: Tissue Value: Aerial vs. Embryo
accaacacaacaacatctcctccattctcctagctccagcaacaaacaggacacaacaccttctcctcctcattcttctaccatagctagctagctagcttcacatcagcagctacatactcaccgatagatacagacctcagagcatcacactacagagtacagacctagctcagagcacacatccagccatggggctcctccctaccgaccgcatggatagcctcttctccccgcgctgcgtgtgggtgaccgggcccatcatcgtgggcgcggggccgtcggggctagccgtggcggcgtgcctgcgggagcagggcgtgccgttcgtcgtcctggagcgcgccgactgtatcgcctcgctgtggcaacggcgcacgtacaaccgcctcaagctgcacctacccaagcagttctgccagctcccgcgcatgccgttcccggaagactacccggagtacccgacccgccgccagttcgtcgactacctcgagcgctacgccgccgagttcgagatcaagccggagttcggcaccaccgtgctgtcggcgcgctacgacgagacgtcgggcctctggcgcgtcgtcaccaacggcggagccggcggcgacatggagtacatcgggcgctggctcgtggtcgccacgggcgagaacgcggaggccgtggtgcccgacatcccgggcctcgccggcttcgacggcgaggtgacccacgtgagcgagtacaagtccggcgaggcctacgccggcaagcgcgtgctggtggtcggctgcggcaactccgggatggaggtgtcgctggacctggccgagcacggcgcgcgcccggccatggtggtgcgcgacgccgtccacgtcctcccgcgcgaggtgctgggcacgtccaccttcgggctcgccgtgctgctcatgcgctggctcccgctctggctcgtcgactggctcatggtgctcctcggcgtggctcgtcctcggcaacctcgccaggctcggcctccgccgccccgccgccggcccgctccagctcaaggagacgcacggccgcacaccagtcctcgactacggcgcgctcgcgcgcatccgcgccggcgacatcaccgtcgtccctgcggtgacacggttcgccggcaagggcggacaggttgaggtcgccgacggccgcacgctcggcttcgacgccgtcatcctcgccaccggatatcgcagcaacgtgccgcagtggctccagggcaacgatttcttcaacaaggacggataccccaagacggcgttcccgcacgggtggaagggcgagagtgggctgtacgccgtggggttcacccggcgcggcctctccggcgcctccgccgacgccgtgcgcatcgccacggacctcgggaacgtctggagggaggagaccaagcccaccaagagggccggcgcctgccacaggcgctgcatctcggtcgtcttctaatccgatcggccacacctgggagcatgcatgacgatgattgaagctaacttttctgaagcgcagaanaaaaaaaaaaaaaaaaaaaaaaaaaaaaaaaaaaaaaaaaaaaaaaaaaaaaaangaaaaaaaaaaaaaaaaantttcgttcccgtcaacct

SEQ ID NO: 14146 - protein, 318 aa, Zea mays subsp. mays
  peptide (1)..(318): Ceres Seq. ID no. 12436398
  misc_feature (22)..(250): Pfam Name: Pyridine nucleotide-disulphide oxidoreductase Pfam Description: Pyridine nucleotide-disulphide oxidoreductase
  misc_feature (1)..(256): Homolog of NCBI NO: 38346518 NR Description: OSJNBa0027H09.13 [Oryza sativa (japonica
  misc_feature (10)..(256): Homolog of NCBI NO: 15219671 NR Description: putative dimethylaniline monooxygenase; protein At1g04180.1 [Arabidopsis thaliana] >gi|7485875|pir||T00955
  misc_feature (10)..(256): Homolog of NCBI NO: 15240026 NR Description: dimethylaniline monooxygenase-like; protein id: [Arabidopsis thaliana] >gi|8953750|dbj|BAA98069.1|
  misc_feature (7)..(256): Homolog of NCBI NO: 15235409 NR Description: putative protein; protein id: At4g28720.1
  misc_feature (16)..(256): Homolog of NCBI NO: 33147034 NR Description: putative dimethylaniline monooxygenase [Oryza
  misc_feature (12)..(256): Homolog of NCBI NO: 15219767 NR Description: putative dimethylaniline monooxygenase; protein At1g04610.1 [Arabidopsis thaliana] >gi|25406796|pir||G86178
  misc_feature (10)..(256): Homolog of NCBI NO: 15225816 NR Description: putative flavin-containing monooxygenase; protein
  misc_feature (2)..(262): Homolog of NCBI NO: 22327064 NR Description: putative protein; protein id: At5g25620.1, by cDNA: gi_17528989, supported by cDNA: gi_21280978 [Arabidopsis >gi|17528990|gb|AAL38705.1| unknown protein [Arabidopsis
  misc_feature (15)..(256): Homolog of NCBI NO: 15239020 NR Description: putative protein; protein id: At5g11320.1 thaliana] >gi|8953394|emb|CAB96667.1| putative protein
  misc_feature (18)..(256): Homolog of NCBI NO: 15010541 NR Description: flavin monoxygenase-like protein floozy [Petunia
MGLLPTDRMDSLFSPRCVWVTGPIIVGAGPSGLAVAACLREQGVPFVVLERADCIASLWQRRTYNRLKLHLPKQFCQLPRMPFPEDYPEYPTRRQFVDYLERYAAEFEIKPEFGTTVLSARYDETSGLWRVVTNGGAGGDMEYIGRWLVVATGENAEAVVPDIPGLAGFDGEVTHVSEYKSGEAYAGKRVLVVGCGNSGMEVSLDLAEHGARPAMVVRDAVHVLPREVLGTSTFGLAVLLMRWLPLWLVDWLMVLLGVARPRQPRQARPPPPRRRPAPAQGDARPHTSPRLRRARAHPRRRHHRRPCGDTVRRQGRTG

SEQ ID NO: 14147 - protein, 310 aa, Zea mays subsp. mays
  peptide (1)..(310): Ceres Seq. ID no. 12436399
  misc_feature (14)..(242): Pfam Name: Pyridine nucleotide-disulphide oxidoreductase Pfam Description: Pyridine nucleotide-disulphide oxidoreductase
  misc_feature (1)..(248): Homolog of NCBI NO: 38346518 NR Description: OSJNBa0027H09.13 [Oryza sativa (japonica
  misc_feature (2)..(248): Homolog of NCBI NO: 15219671 NR Description: putative dimethylaniline monooxygenase; protein At1g04180.1 [Arabidopsis thaliana] >gi|7485875|pir||T00955
  misc_feature (2)..(248): Homolog of NCBI NO: 15240026 NR Description: dimethylaniline monooxygenase-like; protein id: [Arabidopsis thaliana] >gi|8953750|dbj|BAA98069.1|
  misc_feature (1)..(248): Homolog of NCBI NO: 15235409 NR Description: putative protein; protein id: At4g28720.1
  misc_feature (8)..(248): Homolog of NCBI NO: 33147034 NR Description: putative dimethylaniline monooxygenase [Oryza
  misc_feature (4)..(248): Homolog of NCBI NO: 15219767 NR Description: putative dimethylaniline monooxygenase; protein At1g04610.1 [Arabidopsis thaliana] >gi|25406796|pir||G86178
  misc_feature (2)..(248): Homolog of NCBI NO: 15225816 NR Description: putative flavin-containing monooxygenase; protein
  misc_feature (1)..(254): Homolog of NCBI NO: 22327064 NR Description: putative protein; protein id: At5g25620.1, by cDNA: gi_17528989, supported by cDNA: gi_21280978 [Arabidopsis >gi|17528990|gb|AAL38705.1| unknown protein [Arabidopsis
  misc_feature (7)..(248): Homolog of NCBI NO: 15239020 NR Description: putative protein; protein id: At5g11320.1 thaliana] >gi|8953394|emb|CAB96667.1| putative protein
  misc_feature (10)..(248): Homolog of NCBI NO: 15010541 NR Description: flavin monoxygenase-like protein floozy [Petunia
MDSLFSPRCVWVTGPIIVGAGPSGLAVAACLREQGVPFVVLERADCIASLWQRRTYNRLKLHLPKQFCQLPRMPFPEDYPEYPTRRQFVDYLERYAAEFEIKPEFGTTVLSARYDETSGLWRVVTNGGAGGDMEYIGRWLVVATGENAEAVVPDIPGLAGFDGEVTHVSEYKSGEAYAGKRVLVVGCGNSGMEVSLDLAEHGARPAMVVRDAVHVLPREVLGTSTFGLAVLLMRWLPLWLVDWLMVLLGVARPRQPRQARPPPPRRRPAPAQGDARPHTSPRLRRARAHPRRRHHRRPCGDTVRRQGRTG

SEQ ID NO: 14148 - protein, 238 aa, Zea mays subsp. mays
  peptide (1)..(238): Ceres Seq. ID no. 12436400
  misc_feature (1)..(170): Pfam Name: Pyridine nucleotide-disulphide oxidoreductase Pfam Description: Pyridine nucleotide-disulphide oxidoreductase
  misc_feature (1)..(176): Homolog of NCBI NO: 38346518 NR Description: OSJNBa0027H09.13 [Oryza sativa (japonica
  misc_feature (1)..(176): Homolog of NCBI NO: 15219671 NR Description: putative dimethylaniline monooxygenase; protein At1g04180.1 [Arabidopsis thaliana] >gi|7485875|pir||T00955
  misc_feature (1)..(176): Homolog of NCBI NO: 15240026 NR Description: dimethylaniline monooxygenase-like; protein id: [Arabidopsis thaliana] >gi|8953750|dbj|BAA98069.1|
  misc_feature (1)..(176): Homolog of NCBI NO: 15235409 NR Description: putative protein; protein id: At4g28720.1
  misc_feature (1)..(176): Homolog of NCBI NO: 33147034 NR Description: putative dimethylaniline monooxygenase [Oryza
  misc_feature (1)..(176): Homolog of NCBI NO: 15219767 NR Description: putative dimethylaniline monooxygenase; protein At1g04610.1 [Arabidopsis thaliana] >gi|25406796|pir||G86178
  misc_feature (1)..(176): Homolog of NCBI NO: 15225816 NR Description: putative flavin-containing monooxygenase; protein
  misc_feature (1)..(182): Homolog of NCBI NO: 22327064 NR Description: putative protein; protein id: At5g25620.1, by cDNA: gi_17528989, supported by cDNA: gi_21280978 [Arabidopsis >gi|17528990|gb|AAL38705.1| unknown protein [Arabidopsis
  misc_feature (1)..(176): Homolog of NCBI NO: 15239020 NR Description: putative protein; protein id: At5g11320.1 thaliana] >gi|8953394|emb|CAB96667.1| putative protein
  misc_feature (1)..(176): Homolog of NCBI NO: 15010541 NR Description: flavin monoxygenase-like protein floozy [Petunia
MPFPEDYPEYPTRRQFVDYLERYAAEFEIKPEFGTTVLSARYDETSGLWRVVTNGGAGGDMEYIGRWLVVATGENAEAVVPDIPGLAGFDGEVTHVSEYKSGEAYAGKRVLVVGCGNSGMEVSLDLAEHGARPAMVVRDAVHVLPREVLGTSTFGLAVLLMRWLPLWLVDWLMVLLGVARPRQPRQARPPPPRRRPAPAQGDARPHTSPRLRRARAHPRRRHHRRPCGDTVRRQGRTG

SEQ ID NO: 14149 - DNA, 1925 bp, Zea mays subsp. mays
  misc_feature (1)..(1925): Ceres Seq. ID no. 12425449
  misc_feature: MA Experiment ID: 108523 Result: Up-regulated in Transcription
  misc_feature: MA Experiment 108523 PARAMETER Experiment Name: Zm_42deg_Heat_P Parameter: Age (day) Value: 8
  misc_feature: MA Experiment 108523 PARAMETER Experiment Name: Zm_42deg_Heat_P Parameter: Organism Value: Zea mays
  misc_feature: MA Experiment 108523 PARAMETER Experiment Name: Zm_42deg_Heat_P Parameter: Plant Line Value: 35A19
  misc_feature: MA Experiment 108523 PARAMETER Experiment Name: Zm_42deg_Heat_P Parameter: Temperature (deg C) Value: 42 vs. 22
  misc_feature: MA Experiment 108523 PARAMETER Experiment Name: Zm_42deg_Heat_P Parameter: Timepoint (hr) Value: 6
  misc_feature: MA Experiment 108523 PARAMETER Experiment Name: Zm_42deg_Heat_P Parameter: Tissue Value: Aerial
  misc_feature: MA Experiment ID: 108556 Result: Up-regulated in Transcription
  misc_feature: MA Experiment 108556 PARAMETER Experiment Name: Zm_Drought_P Parameter: Age (day) Value: 9
  misc_feature: MA Experiment 108556 PARAMETER Experiment Name: Zm_Drought_P Parameter: Organism Value: Zea mays
  misc_feature: MA Experiment 108556 PARAMETER Experiment Name: Zm_Drought_P Parameter: Plant Line Value: 35A19
  misc_feature: MA Experiment 108556 PARAMETER Experiment Name: Zm_Drought_P Parameter: Timepoint (hr) Value: 24
  misc_feature: MA Experiment 108556 PARAMETER Experiment Name: Zm_Drought_P Parameter: Tissue Value: Aerial
  misc_feature: MA Experiment 108556 PARAMETER Experiment Name: Zm_Drought_P Parameter: Treatment Value: Drought vs. No Drought
  misc_feature: MA Experiment ID: 20000626 Result: Down-regulated in Transcription
  misc_feature: MA Experiment 20000626 PARAMETER Experiment Name: Zm_Herbicide-Treatments_P Parameter: Timepoint (hr) Value: 12
  misc_feature: MA Experiment 20000626 PARAMETER Experiment Name: Zm_Herbicide-Treatments_P Parameter: Tissue Value: Aerial
  misc_feature: MA Experiment 20000626 PARAMETER Experiment Name: Zm_Herbicide-Treatments_P Parameter: Treatment Value: Roundup vs. No Treatment
  misc_feature: MA Experiment ID: 20000629 Result: Down-regulated in Transcription
  misc_feature: MA Experiment 20000629 PARAMETER Experiment Name: Zm_Herbicide-Treatments_P Parameter: Timepoint (hr) Value: 12
  misc_feature: MA Experiment 20000629 PARAMETER Experiment Name: Zm_Herbicide-Treatments_P Parameter: Tissue Value: Aerial
  misc_feature: MA Experiment 20000629 PARAMETER Experiment Name: Zm_Herbicide-Treatments_P Parameter: Treatment Value: Trimec vs. No Treatment
gtgtttccagccttccaggcgcctctgctgcctgcgcctgcgcgcgtcgtgaaggcgtgaacggcagctcggctcggcgcaggccccccgcccgcgccggcatcgcgtcgcggccgccgcgcgagccccatgctgcgttgctgccgcacgacacgtcacttcggctgcggcgtggttgtgtggactcctctcgctcctggccctcgccggcgctgcgtcggctgcggatggggcggagggtgagtgggagccgctgatacggatgccgacggcgaaggggagtgacgctgcttctgctccggctgctgaggatgatgaagtggggacgaggtgggccgtgctcgtcgccggatccttcggttatgggaactaccggcaccaggccgatgtgtgccatgcgtaccagatactgcagaagggaggagtgaagaaggagaacattgtggtgttcatgtatgatgatattgcccacaacattctgaaccctaggcctggagttatcattaaccatcctaaaggagcaaatgtttatgatggtgttccaaaggattacacaggtgatcaggtcactactgaaaacttctttgctgtcctcttgggcaatagaagtgctaccactggagggagtaagaaggtgatagacagcaaacctaatgaccacatcttcatctattactcagatcatgggggtcctggagttcttggtatgccgaacctgccatatctgtatgctggtgacttcatcaaggtcttgaaaaagaagcatgcttccaatagctactcaaaaatggttatatatgttgaagcatgtgaaagtggcagtatctttgaggggttaatgcctgaagatctaaatatttatgtcacaacagcctcaaatccagttgaaaatagttggggaacttactgccctgggatggaaccatcaccccctcctgagtacattacctgtttaggtgatttgtacagtgtttcttggatggaagacagtgaaacccacaatctaaagaaggaaaccatcaaggatcagtatgaagtggtgaaaacaagaacctcaaactcaaataagtacaaagagggttctcatgttatggagtatggtgataagaccttcaaggatgagaagctttccttttatcaaggttttgatcctgctaatgccaacattgcaaacatgctgctttggccaggcccaaagggtgcagtcaatcaaagagatgctgatcttctcttcatgtggaagaggtacgagcagttaaatggggggaccgaagagaagctgagggctctcatagagattaaagaaactgttcagcacaggaagcatcttgacagcagtatcgatttcgttgggaggctcgtcttcggatttgagaaagggccttcgatgcttgaggctgttagaacctctggtcaaccattagtcgatgactgggactgtttgaagaggatggtgcggattttcgagtcccagtgtggttcacttactcagtacggcatgaagtacatgagagcgtttgcaaacatctgcaacagtggtatatctgagatgaaaatgagggagtcgagcatcagcgcttgcagcagctacaactcggcgaggtggagcccgatggctcggggacacagtgcttgatggtaaagatcaaatagcaaagccccccgaggtctgctgccccatgtccctgtgagcgagctcgtatcatctggggactgtggacccatcgacggttgtacatatcatgcacttgtgctcgtgcctatgtaaagtagtaataccaactcaactctgatcttcatccaagtaccgaaatgattaaaagatcagatgtgaatgctgttgcgatgggtgatcgcaagtaggccataatcagtggaccgaaaatgatgacccaaatcaaggtagtgctcctctgatcgatagc

SEQ ID NO: 14150 - protein, 457 aa, Zea mays subsp. mays
  peptide (1)..(457): Ceres Seq. ID no. 12425450
  misc_feature (1)..(338): Pfam Name: Peptidase C13 family Pfam Description: Peptidase C13 family
  misc_feature (1)..(457): Homolog of NCBI NO: 30465961 NR Description: vacuolar processing enzyme [Oryza sativa
  misc_feature (1)..(457): Homolog of NCBI NO: 26006020 NR Description: asparaginyl endopeptidase REP-2 [Oryza sativa
  misc_feature (5)..(457): Homolog of NCBI NO: 17864752 NR Description: C13 cysteine proteinase precursor [Oryza sativa
  misc_feature (1)..(457): Homolog of NCBI NO: 9622221 NR Description: asparaginyl endopeptidase [Sesamum indicum]
  misc_feature (1)..(457): Homolog of NCBI NO: 2414681 NR Description: cysteine proteinase precursor [Vicia narbonensis]
  misc_feature (1)..(457): Homolog of NCBI NO: 1351409 NR Description: Vacuolar processing enzyme precursor (VPE)
MPTAKGSDAASAPAAEDDEVGTRWAVLVAGSFGYGNYRHQADVCHAYQILQKGGVKKENIVVFMYDDIAHNILNPRPGVIINHPKGANVYDGVPKDYTGDQVTTENFFAVLLGNRSATTGGSKKVIDSKPNDHIFIYYSDHGGPGVLGMPNLPYLYAGDFIKVLKKKHASNSYSKMVIYVEACESGSIFEGLMPEDLNIYVTTASNPVENSWGTYCPGMEPSPPPEYITCLGDLYSVSWMEDSETHNLKKETIKDQYEVVKTRTSNSNKYKEGSHVMEYGDKTFKDEKLSFYQGFDPANANIANMLLWPGPKGAVNQRDADLLFMWKRYEQLNGGTEEKLRALIEIKETVQHRKHLDSSIDFVGRLVFGFEKGPSMLEAVRTSGQPLVDDWDCLKRMVRIFESQCGSLTQYGMKYMRAFANICNSGISEMKMRESSISACSSYNSARWSPMARGHSA

SEQ ID NO: 14151 - protein, 394 aa, Zea mays subsp. mays
  peptide (1)..(394): Ceres Seq. ID no. 12425451
  misc_feature (1)..(275): Pfam Name: Peptidase C13 family Pfam Description: Peptidase C13 family
  misc_feature (1)..(394): Homolog of NCBI NO: 30465961 NR Description: vacuolar processing enzyme [Oryza sativa
  misc_feature (1)..(394): Homolog of NCBI NO: 26006020 NR Description: asparaginyl endopeptidase REP-2 [Oryza sativa
  misc_feature (1)..(394): Homolog of NCBI NO: 17864752 NR Description: C13 cysteine proteinase precursor [Oryza sativa
  misc_feature (1)..(394): Homolog of NCBI NO: 9622221 NR Description: asparaginyl endopeptidase [Sesamum indicum]
  misc_feature (1)..(394): Homolog of NCBI NO: 2414681 NR Description: cysteine proteinase precursor [Vicia narbonensis]
  misc_feature (1)..(394): Homolog of NCBI NO: 1351409 NR Description: Vacuolar processing enzyme precursor (VPE)
MYDDIAHNILNPRPGVIINHPKGANVYDGVPKDYTGDQVTTENFFAVLLGNRSATTGGSKKVIDSKPNDHIFIYYSDHGGPGVLGMPNLPYLYAGDFIKVLKKKHASNSYSKMVIYVEACESGSIFEGLMPEDLNIYVTTASNPVENSWGTYCPGMEPSPPPEYITCLGDLYSVSWMEDSETHNLKKETIKDQYEVVKTRTSNSNKYKEGSHVMEYGDKTFKDEKLSFYQGFDPANANIANMLLWPGPKGAVNQRDADLLFMWKRYEQLNGGTEEKLRALIEIKETVQHRKHLDSSIDFVGRLVFGFEKGPSMLEAVRTSGQPLVDDWDCLKRMVRIFESQCGSLTQYGMKYMRAFANICNSGISEMKMRESSISACSSYNSARWSPMARGHSA

SEQ ID NO: 14152 - protein, 309 aa, Zea mays subsp. mays
  peptide (1)..(309): Ceres Seq. ID no. 12425452
  misc_feature (1)..(190): Pfam Name: Peptidase C13 family Pfam Description: Peptidase C13 family
  misc_feature (1)..(309): Homolog of NCBI NO: 30465961 NR Description: vacuolar processing enzyme [Oryza sativa
  misc_feature (1)..(309): Homolog of NCBI NO: 26006020 NR Description: asparaginyl endopeptidase REP-2 [Oryza sativa
  misc_feature (1)..(309): Homolog of NCBI NO: 17864752 NR Description: C13 cysteine proteinase precursor [Oryza sativa
  misc_feature (1)..(309): Homolog of NCBI NO: 9622221 NR Description: asparaginyl endopeptidase [Sesamum indicum]
  misc_feature (1)..(309): Homolog of NCBI NO: 2414681 NR Description: cysteine proteinase precursor [Vicia narbonensis]
  misc_feature (1)..(309): Homolog of NCBI NO: 1351409 NR Description: Vacuolar processing enzyme precursor (VPE)
MPNLPYLYAGDFIKVLKKKHASNSYSKMVIYVEACESGSIFEGLMPEDLNIYVTTASNPVENSWGTYCPGMEPSPPPEYITCLGDLYSVSWMEDSETHNLKKETIKDQYEVVKTRTSNSNKYKEGSHVMEYGDKTFKDEKLSFYQGFDPANANIANMLLWPGPKGAVNQRDADLLFMWKRYEQLNGGTEEKLRALIEIKETVQHRKHLDSSIDFVGRLVFGFEKGPSMLEAVRTSGQPLVDDWDCLKRMVRIFESQCGSLTQYGMKYMRAFANICNSGISEMKMRESSISACSSYNSARWSPMARGHSA

SEQ ID NO: 14153 - DNA, 1261 bp, Zea mays subsp. mays
  misc_feature (1)..(1261): Ceres Seq. ID no. 12450620
  misc_feature: MA Experiment ID: 108527 Result: Down-regulated in Transcription
  misc_feature: MA Experiment 108527 PARAMETER Experiment Name: Zm_5mM_NO_P Parameter: Age (day) Value: 8
  misc_feature: MA Experiment 108527 PARAMETER Experiment Name: Zm_5mM_NO_P Parameter: Organism Value: Zea mays
  misc_feature: MA Experiment 108527 PARAMETER Experiment Name: Zm_5mM_NO_P Parameter: Plant Line Value: 35A19
  misc_feature: MA Experiment 108527 PARAMETER Experiment Name: Zm_5mM_NO_P Parameter: Timepoint (hr) Value: 6
  misc_feature: MA Experiment 108527 PARAMETER Experiment Name: Zm_5mM_NO_P Parameter: Tissue Value: Aerial
  misc_feature: MA Experiment 108527 PARAMETER Experiment Name: Zm_5mM_NO_P Parameter: Treatment Value: 5mM NO vs. No Treatment
  misc_feature: MA Experiment ID: 108528 Result: Up-regulated in Transcription
  misc_feature: MA Experiment 108528 PARAMETER Experiment Name: Zm_Imbibed_Seeds_P Parameter: Age (day) Value: 5 vs. 2
  misc_feature: MA Experiment 108528 PARAMETER Experiment Name: Zm_Imbibed_Seeds_P Parameter: Organism Value: Zea mays
  misc_feature: MA Experiment 108528 PARAMETER Experiment Name: Zm_Imbibed_Seeds_P Parameter: Plant Line Value: 35A19
  misc_feature: MA Experiment 108528 PARAMETER Experiment Name: Zm_Imbibed_Seeds_P Parameter: Tissue Value: Aerial vs. Embryo
  misc_feature: MA Experiment ID: 108529 Result: Down-regulated in Transcription
  misc_feature: MA Experiment 108529 PARAMETER Experiment Name: Zm_Imbibed_Seeds_P Parameter: Age (day) Value: 5 vs. 2
  misc_feature: MA Experiment 108529 PARAMETER Experiment Name: Zm_Imbibed_Seeds_P Parameter: Organism Value: Zea mays
  misc_feature: MA Experiment 108529 PARAMETER Experiment Name: Zm_Imbibed_Seeds_P Parameter: Plant Line Value: 35A19
  misc_feature: MA Experiment 108529 PARAMETER Experiment Name: Zm_Imbibed_Seeds_P Parameter: Tissue Value: Roots vs. Embryo
  misc_feature: MA Experiment ID: 108530 Result: Up-regulated in Transcription
  misc_feature: MA Experiment 108530 PARAMETER Experiment Name: Zm_Imbibed_Seeds_P Parameter: Age (day) Value: 6 vs. 2
  misc_feature: MA Experiment 108530 PARAMETER Experiment Name: Zm_Imbibed_Seeds_P Parameter: Organism Value: Zea mays
  misc_feature: MA Experiment 108530 PARAMETER Experiment Name: Zm_Imbibed_Seeds_P Parameter: Plant Line Value: 35A19
  misc_feature: MA Experiment 108530 PARAMETER Experiment Name: Zm_Imbibed_Seeds_P Parameter: Tissue Value: Aerial vs. Embryo
  misc_feature: MA Experiment ID: 108543 Result: Up-regulated in Transcription
  misc_feature: MA Experiment ID: 108547 Result: Up-regulated in Transcription
  misc_feature: MA Experiment 108547 PARAMETER Experiment Name: Zm_Imbibed_Seeds_P Parameter: Age (day) Value: 4 vs. 2
  misc_feature: MA Experiment 108547 PARAMETER Experiment Name: Zm_Imbibed_Seeds_P Parameter: Organism Value: Zea mays
  misc_feature: MA Experiment 108547 PARAMETER Experiment Name: Zm_Imbibed_Seeds_P Parameter: Plant Line Value: 35A19
  misc_feature: MA Experiment 108547 PARAMETER Experiment Name: Zm_Imbibed_Seeds_P Parameter: Tissue Value: Aerial vs. Embryo
  misc_feature: MA Experiment ID: 108556 Result: Down-regulated in Transcription
  misc_feature: MA Experiment 108556 PARAMETER Experiment Name: Zm_Drought_P Parameter: Age (day) Value: 9
  misc_feature: MA Experiment 108556 PARAMETER Experiment Name: Zm_Drought_P Parameter: Organism Value: Zea mays
  misc_feature: MA Experiment 108556 PARAMETER Experiment Name: Zm_Drought_P Parameter: Plant Line Value: 35A19
  misc_feature: MA Experiment 108556 PARAMETER Experiment Name: Zm_Drought_P Parameter: Timepoint (hr) Value: 24
  misc_feature: MA Experiment 108556 PARAMETER Experiment Name: Zm_Drought_P Parameter: Tissue Value: Aerial
  misc_feature: MA Experiment 108556 PARAMETER Experiment Name: Zm_Drought_P Parameter: Treatment Value: Drought vs. No Drought
  misc_feature: MA Experiment ID: 108597 Result: Down-regulated in Transcription
  misc_feature: MA Experiment 108597 PARAMETER Experiment Name: Zm_100uM_ABA_P Parameter: Age (day) Value: 9
  misc_feature: MA Experiment 108597 PARAMETER Experiment Name: Zm_100uM_ABA_P Parameter: Organism Value: Zea mays
  misc_feature: MA Experiment 108597 PARAMETER Experiment Name: Zm_100uM_ABA_P Parameter: Plant Line Value: 35A19
  misc_feature: MA Experiment 108597 PARAMETER Experiment Name: Zm_100uM_ABA_P Parameter: Timepoint (hr) Value: 24
  misc_feature: MA Experiment 108597 PARAMETER Experiment Name: Zm_100uM_ABA_P Parameter: Tissue Value: Aerial
  misc_feature: MA Experiment 108597 PARAMETER Experiment Name: Zm_100uM_ABA_P Parameter: Treatment Value: 100uM ABA vs. No Treatment
  misc_feature: MA Experiment ID: 20000478 Result: Down-regulated in Transcription
  misc_feature: MA Experiment 20000478 PARAMETER Experiment Name: Zm_5mM_SA_P Parameter: Age (day) Value: 11
  misc_feature: MA Experiment 20000478 PARAMETER Experiment Name: Zm_5mM_SA_P Parameter: Organism Value: Zea mays
  misc_feature: MA Experiment 20000478 PARAMETER Experiment Name: Zm_5mM_SA_P Parameter: Plant Line Value: 35A19
  misc_feature: MA Experiment 20000478 PARAMETER Experiment Name: Zm_5mM_SA_P Parameter: Timepoint (hr) Value: 72
  misc_feature: MA Experiment 20000478 PARAMETER Experiment Name: Zm_5mM_SA_P Parameter: Tissue Value: Aerial
  misc_feature: MA Experiment 20000478 PARAMETER Experiment Name: Zm_5mM_SA_P Parameter: Treatment Value: 5mM SA vs. No Treatment
  misc_feature: MA Experiment ID: 20000479 Result: Down-regulated in Transcription
  misc_feature: MA Experiment 20000479 PARAMETER Experiment Name: Zm_Drought_P Parameter: Age (day) Value: 10
  misc_feature: MA Experiment 20000479 PARAMETER Experiment Name: Zm_Drought_P Parameter: Organism Value: Zea mays
  misc_feature: MA Experiment 20000479 PARAMETER Experiment Name: Zm_Drought_P Parameter: Plant Line Value: 35A19
  misc_feature: MA Experiment 20000479 PARAMETER Experiment Name: Zm_Drought_P Parameter: Timepoint (hr) Value: 48
  misc_feature: MA Experiment 20000479 PARAMETER Experiment Name: Zm_Drought_P Parameter: Tissue Value: Aerial
  misc_feature: MA Experiment 20000479 PARAMETER Experiment Name: Zm_Drought_P Parameter: Treatment Value: Drought vs. No Drought
  misc_feature: MA Experiment ID: 20000480 Result: Down-regulated in Transcription
  misc_feature: MA Experiment 20000480 PARAMETER Experiment Name: Zm_Drought_P Parameter: Age (day) Value: 11
  misc_feature: MA Experiment 20000480 PARAMETER Experiment Name: Zm_Drought_P Parameter: Organism Value: Zea mays
  misc_feature: MA Experiment 20000480 PARAMETER Experiment Name: Zm_Drought_P Parameter: Plant Line Value: 35A19
  misc_feature: MA Experiment 20000480 PARAMETER Experiment Name: Zm_Drought_P Parameter: Timepoint (hr) Value: 72
  misc_feature: MA Experiment 20000480 PARAMETER Experiment Name: Zm_Drought_P Parameter: Tissue Value: Aerial
  misc_feature: MA Experiment 20000480 PARAMETER Experiment Name: Zm_Drought_P Parameter: Treatment Value: Drought vs. No Drought
  misc_feature: MA Experiment ID: 20000488 Result: Up-regulated in Transcription
  misc_feature: MA Experiment 20000488 PARAMETER Experiment Name: Zm_50mM_NH4NO3_L_to_H_P Parameter: Organism Value: Zea mays
  misc_feature: MA Experiment 20000488 PARAMETER Experiment Name: Zm_50mM_NH4NO3_L_to_H_P Parameter: Timepoint (hr) Value: 8
  misc_feature: MA Experiment 20000488 PARAMETER Experiment Name: Zm_50mM_NH4NO3_L_to_H_P Parameter: Tissue Value: Leaves
  misc_feature: MA Experiment 20000488 PARAMETER Experiment Name: Zm_50mM_NH4NO3_L_to_H_P Parameter: Treatment Value: 50mM NH4NO3 vs. 100mM Mannitol
  misc_feature: MA Experiment ID: 20000626 Result: Down-regulated in Transcription
  misc_feature: MA Experiment 20000626 PARAMETER Experiment Name: Zm_Herbicide-Treatments_P Parameter: Timepoint (hr) Value: 12
  misc_feature: MA Experiment 20000626 PARAMETER Experiment Name: Zm_Herbicide-Treatments_P Parameter: Tissue Value: Aerial
  misc_feature: MA Experiment 20000626 PARAMETER Experiment Name: Zm_Herbicide-Treatments_P Parameter: Treatment Value: Roundup vs. No Treatment
  misc_feature: MA Experiment ID: 20000630 Result: Down-regulated in Transcription
  misc_feature: MA Experiment 20000630 PARAMETER Experiment Name: Zm_Herbicide-Treatments_P Parameter: Timepoint (hr) Value: 4
  misc_feature: MA Experiment 20000630 PARAMETER Experiment Name: Zm_Herbicide-Treatments_P Parameter: Tissue Value: Aerial
  misc_feature: MA Experiment 20000630 PARAMETER Experiment Name: Zm_Herbicide-Treatments_P Parameter: Treatment Value: Roundup vs. No Treatment
  misc_feature: MA Experiment ID: 20001608 Result: Up-regulated in Transcription
  misc_feature: MA Experiment 20001608 PARAMETER Experiment Name: Zm_50ppm_KNO3_L-to-H_P Parameter: Age (day) Value: 21
  misc_feature: MA Experiment 20001608 PARAMETER Experiment Name: Zm_50ppm_KNO3_L-to-H_P Parameter: Organism Value: Zea mays
  misc_feature: MA Experiment 20001608 PARAMETER Experiment Name: Zm_50ppm_KNO3_L-to-H_P Parameter: Plant Line Value: 35A19
  misc_feature: MA Experiment 20001608 PARAMETER Experiment Name: Zm_50ppm_KNO3_L-to-H_P Parameter: Timepoint (hr) Value: 48
  misc_feature: MA Experiment 20001608 PARAMETER Experiment Name: Zm_50ppm_KNO3_L-to-H_P Parameter: Tissue Value: Shoots
  misc_feature: MA Experiment 20001608 PARAMETER Experiment Name: Zm_50ppm_KNO3_L-to-H_P Parameter: Treatment Value: 50ppm KNO3 vs. 50ppm KCl
agttcattcccatttcccaacccaaaccagcggctggcacggacgccggcgagccgcgcggcccggaggaccactgcctcctgcatatagccggcttccgcggccatgtcatccgtacacttctttcctgcctcctcccagaccccggtccccgcctgccttctcaaaacctctccaaagtcacccctcccgtgcccccgcacccttgccaccaccgctctccagagtgttggcggcaattgcaatgcgtggcaccgcccgcacctacggctgcagcggagggtccgcacccctgcagcaccgtccgacgcgccgcctgtgggccccgatggcgggagcgggggcggcggcgcggggggagggagtggaggggaggatgaggaggaggagggggagaagaagaagggactgttgcccgagtggatgaacttgacaacagaggacgccaagacggtgctggccgcggtagctatctcgctcgctttccgaaccttcgtcgccgagccgcgcttcatcccctcgctctccatgttccccaccttcgacgtcggtgaccgcatcgtcgccgagaaggttacttactactttaggaagccatgtgttaatgatataataattttcaaaagccctccagtgctgcaggaggttgggtatactgataatgatgttttcattaaaagagtagttgccagggagggagatgttgttgaggttcatgaaggaaaactcgttgtgaatgcaagtaccagaaaactctgtttttgtgatgggagataaccgaaacaacagctacgattcacatgtgtggggccctcttccagcaaaaaacatattggggagatcaatttttcggtattggcctcctggtcgaatagggggtactaccaagggttgcttcagccctgaattaagccctggagcaaagccagaatcacttactgatgtcaaatcgacaaagtaggagattgagaagttagttttggtggtgcctgatgtgcaggggaagcttcggttattcttcgtggtagaatgtcacagaggaatcctgtgttgtgtggcaggtagttctattagaacccagagagaggaagacaatttgattctcattgagtcattgattggattggccaaaaggcacagaaaccattttgtctcagggtttcttgtccttttgccttgctgtatacgtacgtattagggaaacttgataccatgatggctgacctagttaagctgcaaaaaagtatggttccactgttgc

SEQ ID NO: 14154 - protein, 223 aa, Zea mays subsp. mays
  peptide (1)..(223): Ceres Seq. ID no. 12450621
  misc_feature (110)..(215): Pfam Name: Signal peptidase I Pfam Description: Signal peptidase I
  misc_feature (67)..(215): Homolog of NCBI NO: 9294054 NR Description: contains similarity to signal peptidase (leader
  misc_feature (67)..(215): Homolog of NCBI NO: 30687572 NR Description: chloroplast thylakoidal processing peptidase
  misc_feature (67)..(215): Homolog of NCBI NO: 25082936 NR Description: chloroplast thylakoidal processing peptidase,
  misc_feature (101)..(211): Homolog of NCBI NO: 15222236 NR Description: chloroplast thylakoidal processing peptidase, protein id: At1g06870.1, supported by cDNA: 15392. [Arabidopsis
  misc_feature (70)..(211): Homolog of NCBI NO: 25408074 NR Description: probable signal peptidase I [imported] - thaliana >gi|1946373|gb|AAB63091.1| putative signal peptidase I
  misc_feature (70)..(211): Homolog of NCBI NO: 30684587 NR Description: signal peptidase I -related [Arabidopsis >gi|2769566|emb|CAA71502.1| chloroplast thylakoidal processing [Arabidopsis thaliana] >gi|22135950|gb|AAM91557.1| putative
  misc_feature (101)..(211): Homolog of NCBI NO: 21553622 NR Description: chloroplast thylakoidal processing peptidase,
  misc_feature (104)..(211): Homolog of NCBI NO: 23042815 NR Description: hypothetical protein [Trichodesmium erythraeum
  misc_feature (94)..(211): Homolog of NCBI NO: 17230467 NR Description: signal peptidase I [Nostoc sp. PCC 7120]
  misc_feature (91)..(211): Homolog of NCBI NO: 23125131 NR Description: hypothetical protein [Nostoc punctiforme]
MSSVHFFPASSQTPVPACLLKTSPKSPLPCPRTLATTALQSVGGNCNAWHRPHLRLQRRVRTPAAPSDAPPVGPDGGSGGGGAGGGSGGEDEEEEGEKKKGLLPEWMNLTTEDAKTVLAAVAISLAFRTFVAEPRFIPSLSMFPTFDVGDRIVAEKVTYYFRKPCVNDIIIFKSPPVLQEVGYTDNDVFIKRVVAREGDVVEVHEGKLVVNASTRKLCFCDGR

SEQ ID NO: 14155 - protein, 141 aa, Zea mays subsp. mays
  peptide (1)..(141): Ceres Seq. ID no. 12450622
VHSHFPTQTSGWHGRRRAARPGGPLPPAYSRLPRPCHPYTSFLPPPRPRSPPAFSKPLQSHPSRAPAPLPPPLSRVLAAIAMRGTARTYGCSGGSAPLQHRPTRRLWAPMAGAGAAARGEGVEGRMRRRRGRRRRDCCPSG

SEQ ID NO: 14156 - protein, 125 aa, Zea mays subsp. mays
  peptide (1)..(125): Ceres Seq. ID no. 12450623
FIPISQPKPAAGTDAGEPRGPEDHCLLHIAGFRGHVIRTLLSCLLPDPGPRLPSQNLSKVTPPVPPHPCHHRSPECWRQLQCVAPPAPTAAAEGPHPCSTVRRAACGPRWRERGRRRGGREWRGG

SEQ ID NO: 14157 - DNA, 2550 bp, Zea mays subsp. mays
  misc_feature (1)..(2550): Ceres Seq. ID no. 13599007
  misc_feature: MA Experiment ID: 108527 Result: Up-regulated in Transcription
  misc_feature: MA Experiment 108527 PARAMETER Experiment Name: Zm_5mM_NO_P Parameter: Age (day) Value: 8
  misc_feature: MA Experiment 108527 PARAMETER Experiment Name: Zm_5mM_NO_P Parameter: Organism Value: Zea mays
  misc_feature: MA Experiment 108527 PARAMETER Experiment Name: Zm_5mM_NO_P Parameter: Plant Line Value: 35A19
  misc_feature: MA Experiment 108527 PARAMETER Experiment Name: Zm_5mM_NO_P Parameter: Timepoint (hr) Value: 6
  misc_feature: MA Experiment 108527 PARAMETER Experiment Name: Zm_5mM_NO_P Parameter: Tissue Value: Aerial
  misc_feature: MA Experiment 108527 PARAMETER Experiment Name: Zm_5mM_NO_P Parameter: Treatment Value: 5mM NO vs. No Treatment
  misc_feature: MA Experiment ID: 108543 Result: Down-regulated in Transcription
  misc_feature: MA Experiment ID: 108559 Result: Up-regulated in Transcription
  misc_feature: MA Experiment 108559 PARAMETER Experiment Name: Zm_5mM_NO_P Parameter: Age (day) Value: 8
  misc_feature: MA Experiment 108559 PARAMETER Experiment Name: Zm_5mM_NO_P Parameter: Organism Value: Zea mays
  misc_feature: MA Experiment 108559 PARAMETER Experiment Name: Zm_5mM_NO_P Parameter: Plant Line Value: 35A19
  misc_feature: MA Experiment 108559 PARAMETER Experiment Name: Zm_5mM_NO_P Parameter: Timepoint (hr) Value: 12
  misc_feature: MA Experiment 108559 PARAMETER Experiment Name: Zm_5mM_NO_P Parameter: Tissue Value: Aerial
  misc_feature: MA Experiment 108559 PARAMETER Experiment Name: Zm_5mM_NO_P Parameter: Treatment Value: 5mM NO vs. No Treatment
agaacatcctaatcgaaaaaccgcacacggctccgctgcttcgcgactcctctccggctctccgcacaggactccaaccgcctcgccgttgcatcgccgcgggcgtcaacctaggctgctgccggtaccggtgcgtccccagccatggctcggccgccgcaggaggcgatcgacaccttcgtcagcatcaccggcgccgacgaggtcaccgcagtccgcgtgctcgaggaacatggtcatgatctaaatgaagctgtgaatgcttattttaatgaaggagataggaccaccaccagaatcaatcagaatcctgtgcctgccactgccagttatgatgacatgatggagctggatgaaccacttgatcccatgttcaacagacctttgttccctagaactttgggcaacccttttgcccttttggatccaggttttgctgacataactgctggtgatatatttggacgtggaccccgagttacacaacctagggacgtgaggcagatacctattgaagttaaggacagcaatactcaaacaggcagttctggtcagggtcccattattgaggatgttactggacgtgaatcttttatggtccagaggtccatgggaccgttatagttgaygaagatgatgaagacttgccattaacactatctgctcaggatcctaagatcccaagcagtgctttgcacccaaaccatttcatgcctagtgcgcctccagtggttgatgttagtgaccataacaatgatatagaagaggagatgattaaggcagcaattgaagcttcaaaaagggaagctgacgggatgaaaaatgttctaagtagtggtcaatctgaaaacatgtcacgtggcagaggtgatcatgagcttgctcgggcggtttctttgtccttggaggtagccttttaacttctaagatgtagctatgtatttttgttcatatacctatacctgcaatgtgttttttatgtggctatcagacagcagagcgagagagagctctgcgccaagagggaatgtatgtagcagatcactctcctgacttatctgataaagaaggcggtcaaggaggaagtgggataagcgaaaggtgaagtcacatttccaaatgggtagaacagtggtagtgtgtggattattacttatttataatcaattaatggctcaatttctgttcccctatcatttgtttttttgtatggtttcatttgcatggaagccatgcatcgtgtgggatatgatattgtttccctgtttgtgtgggtcacttctcatgcaatgttttagcgagcttttcctaacctttgtaagtataatctgtgtctaattggaatatacttggtagcagctgattcctcatacatgtccattcttattgtaggcgaggactaactacaggagaagtgggaacttctgagcaaacagtagatgaagagaacttccaagaggacaatgaagatggtgaagaacaacctttagttaggactcgttctaggcgacttcgaggcagaactattgagccagcagaaactgttcaaagggctgacagcccgccctcaagtccccaacctcatgttcaaattggtcatcagcgtaatgtggggtttccttcagtagagtggggtggtatttcttctgaagagcgtgatgaagctcttatgcttgaggctgcaatgtttggtgggattcctgaaggagcaccatatccattttccttcccagcccatggcaggtcgactcactatcccctagtagcacgtcctccatcaccatcattaacggcacagcggttgttaagggagcagcaggatgatgagtatcttgctgctctccaagctgatcgagaaaaagagttgaaggctgtgcaggaggctgaacttcgcagggtagaggaagctgcagcaagagaggctgctcttgaacgtcaaaagaaagaagaggaggagaagctaaagaaacaacgtgaggaagaggagttggaatccaagcttgcagccaaacaagcatcactacctaaggagccactacaaaatgacgagggggctgtcacagtggtagtccgcatgcctgatggtagtcgtcgaggacggcgctttctcaaatctgacaggcttcagtatctttttgatttcatagacatcagccggactttcaaaccaggaacttatagactggcgaggtcttatcccaggcgtgccttcactgaattggagagccagatgtcactgagcgatctcggtctcactagcaagcaggaagctctgttcctagaaaaactgtctgcgtagagtacaaggttctggagttatggtcgagtagtatatgcacttataaaatcggtcatttagatcgtgcctggcgtgtgttcatgaaaatactgcagcggttgaatgattactgatctctagagatcccgtcgccatcttctgtgctctgaaacggaggtgtttcgatctgactgtgcagatgggcagttctacattcagatttcagaacaactgtagctcttgcggttttaagacttgagtatggtttactc

SEQ ID NO: 14158 - protein, 209 aa, Zea mays subsp. mays
  peptide (1)..(209): Ceres Seq. ID no. 15222489
  misc_feature (125)..(205): Pfam Name: UBX domain Pfam Description: UBX domain
  misc_feature (1)..(205): Homolog of NCBI NO: 18416058 NR Description: expressed protein [Arabidopsis thaliana] unknown protein [Arabidopsis thaliana]
  misc_feature (1)..(205): Homolog of NCBI NO: 7487672 NR Description: hypothetical protein T5C23.170 - Arabidopsis >gi|4539465|emb|CAB39945.1| putative protein [Arabidopsis >gi|7267874|emb|CAB78217.1| putative protein [Arabidopsis
  misc_feature (1)..(205): Homolog of NCBI NO: 7486575 NR Description: hypothetical protein F7H19.230 - Arabidopsis >gi|3292830|emb|CAA19820.1| putative protein [Arabidopsis >gi|7269151|emb|CAB79259.1| putative protein [Arabidopsis
  misc_feature (1)..(205): Homolog of NCBI NO: 18413644 NR Description: expressed protein [Arabidopsis thaliana] Unknown protein [Arabidopsis thaliana]
  misc_feature (1)..(105): Homolog of NCBI NO: 13160609 NR Description: Ara4-interacting protein [Arabidopsis thaliana]
  misc_feature (79)..(207): Homolog of NCBI NO: 30678726 NR Description: expressed protein [Arabidopsis thaliana]
  misc_feature (101)..(156): Homolog of NCBI NO: 4325337 NR Description: F15P23.3 gene product [Arabidopsis thaliana]
  misc_feature (1)..(65): Homolog of NCBI NO: 30678726 NR Description: expressed protein [Arabidopsis thaliana]
  misc_feature (46)..(205): Homolog of NCBI NO: 7486906 NR Description: hypothetical protein T12H20.9 - Arabidopsis >gi|3600032|gb|AAC35520.1| contains similarity to tropomyosin
  misc_feature (46)..(205): Homolog of NCBI NO: 15236931 NR Description: expressed protein [Arabidopsis thaliana]
MLEAAMFGGIPEGAPYPFSFPAHGRSTHYPLVARPPSPSLTAQRLLREQQDDEYLAALQADREKELKAVQEAELRRVEEAAAREAALERQKKEEEEKLKKQREEEELESKLAAKQASLPKEPLQNDEGAVTVVVRMPDGSRRGRRFLKSDRLQYLFDFIDISRTFKPGTYRLARSYPRRAFTELESQMSLSDLGLTSKQEALFLEKLSA

SEQ ID NO: 14159 - protein, 204 aa, Zea mays subsp. mays
  peptide (1)..(204): Ceres Seq. ID no. 15222490
  misc_feature (120)..(200): Pfam Name: UBX domain Pfam Description: UBX domain
  misc_feature (1)..(200): Homolog of NCBI NO: 18416058 NR Description: expressed protein [Arabidopsis thaliana] unknown protein [Arabidopsis thaliana]
  misc_feature (1)..(200): Homolog of NCBI NO: 7487672 NR Description: hypothetical protein T5C23.170 - Arabidopsis >gi|4539465|emb|CAB39945.1| putative protein [Arabidopsis >gi|7267874|emb|CAB78217.1| putative protein [Arabidopsis
  misc_feature (1)..(200): Homolog of NCBI NO: 7486575 NR Description: hypothetical protein F7H19.230 - Arabidopsis >gi|3292830|emb|CAA19820.1| putative protein [Arabidopsis >gi|7269151|emb|CAB79259.1| putative protein [Arabidopsis
  misc_feature (1)..(200): Homolog of NCBI NO: 18413644 NR Description: expressed protein [Arabidopsis thaliana] Unknown protein [Arabidopsis thaliana]
  misc_feature (1)..(100): Homolog of NCBI NO: 13160609 NR Description: Ara4-interacting protein [Arabidopsis thaliana]
  misc_feature (74)..(202): Homolog of NCBI NO: 30678726 NR Description: expressed protein [Arabidopsis thaliana]
  misc_feature (96)..(151): Homolog of NCBI NO: 4325337 NR Description: F15P23.3 gene product [Arabidopsis thaliana]
  misc_feature (1)..(60): Homolog of NCBI NO: 30678726 NR Description: expressed protein [Arabidopsis thaliana]
  misc_feature (41)..(200): Homolog of NCBI NO: 7486906 NR Description: hypothetical protein T12H20.9 - Arabidopsis >gi|3600032|gb|AAC35520.1| contains similarity to tropomyosin
  misc_feature (41)..(200): Homolog of NCBI NO: 15236931 NR Description: expressed protein [Arabidopsis thaliana]
MFGGIPEGAPYPFSFPAHGRSTHYPLVARPPSPSLTAQRLLREQQDDEYLAALQADREKELKAVQEAELRRVEEAAAREAALERQKKEEEEKLKKQREEEELESKLAAKQASLPKEPLQNDEGAVTVVVRMPDGSRRGRRFLKSDRLQYLFDFIDISRTFKPGTYRLARSYPRRAFTELESQMSLSDLGLTSKQEALFLEKLSA

SEQ ID NO: 14160 - protein, 159 aa, Zea mays subsp. mays
  peptide (1)..(159): Ceres Seq. ID no. 15222491
  misc_feature (1)..(145): Homolog of NCBI NO: 18416058 NR Description: expressed protein [Arabidopsis thaliana] unknown protein [Arabidopsis thaliana]
  misc_feature (64)..(159): Homolog of NCBI NO: 7487672 NR Description: hypothetical protein T5C23.170 - Arabidopsis >gi|4539465|emb|CAB39945.1| putative protein [Arabidopsis >gi|7267874|emb|CAB78217.1| putative protein [Arabidopsis
  misc_feature (1)..(145): Homolog of NCBI NO: 7486575 NR Description: hypothetical protein F7H19.230 - Arabidopsis >gi|3292830|emb|CAA19820.1| putative protein [Arabidopsis >gi|7269151|emb|CAB79259.1| putative protein [Arabidopsis
  misc_feature (1)..(159): Homolog of NCBI NO: 13160609 NR Description: Ara4-interacting protein [Arabidopsis thaliana]
  misc_feature (1)..(48): Homolog of NCBI NO: 30678726 NR Description: expressed protein [Arabidopsis thaliana]
  misc_feature (1)..(48): Homolog of NCBI NO: 4325337 NR Description: F15P23.3 gene product [Arabidopsis thaliana]
MARPPQEAIDTFVSITGADEVTAVRVLEEHGHDLNEAVNAYFNEGDRTTTRINQNPVPATASYDDMMELDEPLDPMFNRPLFPRTLGNPFALLDPGFADITAGDIFGRGPRVTQPRDVRQIPIEVKDSNTQTGSSGQGPIIEDVTGRESFMVQRSMGPL

SEQ ID NO: 14161 - DNA, 2347 bp, Zea mays subsp. mays
  misc_feature (1)..(2347): Ceres Seq. ID no. 12450495
  misc_feature: MA Experiment ID: 108530 Result: Up-regulated in Transcription
  misc_feature: MA Experiment 108530 PARAMETER Experiment Name: Zm_Imbibed_Seeds_P Parameter: Age (day) Value: 6 vs. 2
  misc_feature: MA Experiment 108530 PARAMETER Experiment Name: Zm_Imbibed_Seeds_P Parameter: Organism Value: Zea mays
  misc_feature: MA Experiment 108530 PARAMETER Experiment Name: Zm_Imbibed_Seeds_P Parameter: Plant Line Value: 35A19
  misc_feature: MA Experiment 108530 PARAMETER Experiment Name: Zm_Imbibed_Seeds_P Parameter: Tissue Value: Aerial vs. Embryo
  misc_feature: MA Experiment ID: 108535 Result: Down-regulated in Transcription
  misc_feature: MA Experiment 108535 PARAMETER Experiment Name: Zm_Meristem_P Parameter: Age (day) Value: 8
  misc_feature: MA Experiment 108535 PARAMETER Experiment Name: Zm_Meristem_P Parameter: Organism Value: Zea mays
  misc_feature: MA Experiment 108535 PARAMETER Experiment Name: Zm_Meristem_P Parameter: Plant Line Value: 35A19
  misc_feature: MA Experiment 108535 PARAMETER Experiment Name: Zm_Meristem_P Parameter: Tissue Value: Root Meristem vs. Above Root Meristem
  misc_feature: MA Experiment ID: 108543 Result: Up-regulated in Transcription
  misc_feature: MA Experiment ID: 108544 Result: Up-regulated in Transcription
  misc_feature: MA Experiment ID: 108687 Result: Down-regulated in Transcription
  misc_feature: MA Experiment 108687 PARAMETER Experiment Name: Zm_Embryos-Flowers__P Parameter: Tissue Value: Embryo vs. Aerial+
  misc_feature: MA Experiment ID: 20000535 Result: Down-regulated in Transcription
  misc_feature: MA Experiment 20000535 PARAMETER Experiment Name: Zm_Hybrid_Seed_Dev_P Parameter: DAP Value: 30 vs. 12
  misc_feature: MA Experiment 20000535 PARAMETER Experiment Name: Zm_Hybrid_Seed_Dev_P Parameter: Organism Value: Zea mays
  misc_feature: MA Experiment 20000535 PARAMETER Experiment Name: Zm_Hybrid_Seed_Dev_P Parameter: Plant Line Value: 35A19
  misc_feature: MA Experiment 20000535 PARAMETER Experiment Name: Zm_Hybrid_Seed_Dev_P Parameter: Tissue Value: Embryo vs. Unfert Floret
ataattggtgcctttcttgataagttgatatacaaccgtggatccttggaacttcgatttagttagtgactccgtaggtatcagataaccaaaaaaagaggaatcacgtgaactaccggttatatttcccctggatttcgacaaagctttttaggaaatttcgtactttttttcatggagaaatttcgaagacaccaatgaagttctcgcataaaataataaaaaaaccctaagcatgctcgattttcatttttttttttgccatgaacaactgctagtcaagcacaaaacaaggatttcctaattctccacactcgacaaccattattttcacagcttcaagaactctcaacttcccctcaccccaacccaaaagaagtgaatacaaccataaccttcacagcttcaagaacttttcaacttcaaggaaatttctaaacagtaattcttttttaagctggtgaggtgtcccggccctcctgtttcctgaaaaaaaagcacgactgaactagatgttattaggtccgcacatgaattgcatacgaaatgttttcctgactggggctaaattgctagtttagccatggggcagacgcatcttttgttgctcgcttgtttctgggtcctgtcaacatgctccttgctacttgatgcttcctccgatggactgttaagaatcaacctgaacaagaagagactggacaaggaagctttgactgctgcgaaattggcgaagaaggagagcaaccttcgaaggtctgtgggtgctgaccagtatctcagtgcctcaactgatgacatagtccctttggacaactacctggacacccagtactttggacagatcagcatcggcacgccaccacagaacttcacagtgatattcgacactggaagctccaacttgtgggttccctcatccaagtgctacttttcgatagcatgctacttacaccacagatacaagtcaaccaagtcgaagacttacacaaagaatggagaatcttgtacgataacatatggttctgggcaaatcgctggcttcttcagtgaggacaatgtgttggttggcaaccttgttgtgcaaaatcagaaatttattgagacaactcgagaaaccagccctactttcatcattgggaagtttgatggaattcttggtctcggatttcctgaaatttctgtaggaggagcccctccaatttggcagagcatgaaacagcagaaactggtcgcaaaggatgtcttctctttctggcttaatcgtgaccctgatgcatcttctggaggaggcgagcttgtctttggtggtgttgacccaaaacactacaaaggggaccatacatatgttcccgttacacgcaaaggctactggcagtttgacatgggagatcttattattggtggccactcaactggtttctgtgctggtggctgtgctgctattgtggactcagggacttcattgcttgctggtccaactaccatagtggctcaagtcaatcatgcaattggggctgagggaatcatcagtacagaatgcaaagaagtggtgagcgagtatggagagatgatccttgagttgctcatatcgcagacaagcccacagaaagtgtgcactcagattggtctctgtgtatttgatggtgcccattctgtcagcaatccaattgaatctgttgttgagaaacagaagcgtggttctgatcttttctgtactgcttgtgagatggctgttgtctggatacagaatcagctccgtgaaaacaagacaaaagaactcattttgaattatgctaatcagctctgtgagcgtctccctagccccaatggcgagtcaactgttgattgccatcagatctcaaagatgccaaatcttgcattcaccatagcaaacaagactttcaccttaacaccagagcagtacatagtgaagctggagcaagcaggacaaactatctgcatcagtgggtttatggcatttgacgtaccgcctcctcgtggtcctctctggatacttggtgatgtttttatgggtgcctaccacactgtttttgacttcggtgagaacaggattgggtttgccaaatctgcatgaggactggagttctgcgctttagtagcatgtccagtttgttatccgggtattgtacatatatatgttgccaactggtgtaatccgcagtgtttaatagtatatattcatgcagaaatctagaagattgtggcatgatatgtgtttgcaaatggagctatgctatgtatggagctccaggacctagagttttatgtaaagggagacgatgaggattagggcttttaacctattctcatcacgttattgtcc

SEQ ID NO: 14162 - protein, 504 aa, Zea mays subsp. mays
  peptide (1)..(504): Ceres Seq. ID no. 12450496
  misc_feature (29)..(359): Pfam Name: Eukaryotic aspartyl protease Pfam Description: Eukaryotic aspartyl protease
  misc_feature (1)..(504): Homolog of NCBI NO: 1168537 NR Description: Aspartic proteinase precursor
  misc_feature (1)..(504): Homolog of NCBI NO: 7435839 NR Description: aspartic proteinase precursor, wound-induced - >gi|951449|gb|AAB18280.1| aspartic protease precursor
MGQTHLLLLACFWVLSTCSLLLDASSDGLLRINLNKKRLDKEALTAAKLAKKESNLRRSVGADQYLSASTDDIVPLDNYLDTQYFGQISIGTPPQNFTVIFDTGSSNLWVPSSKCYFSIACYLHHRYKSTKSKTYTKNGESCTITYGSGQIAGFFSEDNVLVGNLVVQNQKFIETTRETSPTFIIGKFDGILGLGFPEISVGGAPPIWQSMKQQKLVAKDVFSFWLNRDPDASSGGGELVFGGVDPKHYKGDHTYVPVTRKGYWQFDMGDLIIGGHSTGFCAGGCAAIVDSGTSLLAGPTTIVAQVNHAIGAEGIISTECKEVVSEYGEMILELLISQTSPQKVCTQIGLCVFDGAHSVSNPIESVVEKQKRGSDLFCTACEMAVVWIQNQLRENKTKELILNYANQLCERLPSPNGESTVDCHQISKMPNLAFTIANKTFTLTPEQYIVKLEQAGQTICISGFMAFDVPPPRGPLWILGDVFMGAYHTVFDFGENRIGFAKSA

SEQ ID NO: 14163 - protein, 294 aa, Zea mays subsp. mays; identical to SEQ ID NO: 13178
  peptide (1)..(294): Ceres Seq. ID no. 12450497
  misc_feature (1)..(149): Pfam Name: Eukaryotic aspartyl protease Pfam Description: Eukaryotic aspartyl protease
  misc_feature (1)..(294): Homolog of NCBI NO: 1168537 NR Description: Aspartic proteinase precursor
  misc_feature (1)..(294): Homolog of NCBI NO: 7435839 NR Description: aspartic proteinase precursor, wound-induced - >gi|951449|gb|AAB18280.1| aspartic protease precursor

SEQ ID NO: 14164 - DNA, 2285 bp, Zea mays subsp. mays
  misc_feature (1)..(2285): Ceres Seq. ID no. 13622799
  misc_feature: MA Experiment ID: 108504 Result: Down-regulated in Transcription
  misc_feature: MA Experiment 108504 PARAMETER Experiment Name: Zm_Drought_P Parameter: Age (day) Value: 8
  misc_feature: MA Experiment 108504 PARAMETER Experiment Name: Zm_Drought_P Parameter: Organism Value: Zea mays
  misc_feature: MA Experiment 108504 PARAMETER Experiment Name: Zm_Drought_P Parameter: Plant Line Value: 35A19
  misc_feature: MA Experiment 108504 PARAMETER Experiment Name: Zm_Drought_P Parameter: Timepoint (hr) Value: 12
  misc_feature: MA Experiment 108504 PARAMETER Experiment Name: Zm_Drought_P Parameter: Tissue Value: Aerial
  misc_feature: MA Experiment 108504 PARAMETER Experiment Name: Zm_Drought_P Parameter: Treatment Value: Drought vs. No Drought
  misc_feature: MA Experiment ID: 108523 Result: Down-regulated in Transcription
  misc_feature: MA Experiment 108523 PARAMETER Experiment Name: Zm_42deg_Heat_P Parameter: Age (day) Value: 8
  misc_feature: MA Experiment 108523 PARAMETER Experiment Name: Zm_42deg_Heat_P Parameter: Organism Value: Zea mays
  misc_feature: MA Experiment 108523 PARAMETER Experiment Name: Zm_42deg_Heat_P Parameter: Plant Line Value: 35A19
  misc_feature: MA Experiment 108523 PARAMETER Experiment Name: Zm_42deg_Heat_P Parameter: Temperature (deg C) Value: 42 vs. 22
  misc_feature: MA Experiment 108523 PARAMETER Experiment Name: Zm_42deg_Heat_P Parameter: Timepoint (hr) Value: 6
  misc_feature: MA Experiment 108523 PARAMETER Experiment Name: Zm_42deg_Heat_P Parameter: Tissue Value: Aerial
  misc_feature: MA Experiment ID: 108527 Result: Down-regulated in Transcription
  misc_feature: MA Experiment 108527 PARAMETER Experiment Name: Zm_5mM_NO_P Parameter: Age (day) Value: 8
  misc_feature: MA Experiment 108527 PARAMETER Experiment Name: Zm_5mM_NO_P Parameter: Organism Value: Zea mays
  misc_feature: MA Experiment 108527 PARAMETER Experiment Name: Zm_5mM_NO_P Parameter: Plant Line Value: 35A19
  misc_feature: MA Experiment 108527 PARAMETER Experiment Name: Zm_5mM_NO_P Parameter: Timepoint (hr) Value: 6
  misc_feature: MA Experiment 108527 PARAMETER Experiment Name: Zm_5mM_NO_P Parameter: Tissue Value: Aerial
  misc_feature: MA Experiment 108527 PARAMETER Experiment Name: Zm_5mM_NO_P Parameter: Treatment Value: 5mM NO vs. No Treatment
  misc_feature: MA Experiment ID: 108528 Result: Up-regulated in Transcription
  misc_feature: MA Experiment 108528 PARAMETER Experiment Name: Zm_Imbibed_Seeds_P Parameter: Age (day) Value: 5 vs. 2
  misc_feature: MA Experiment 108528 PARAMETER Experiment Name: Zm_Imbibed_Seeds_P Parameter: Organism Value: Zea mays
  misc_feature: MA Experiment 108528 PARAMETER Experiment Name: Zm_Imbibed_Seeds_P Parameter: Plant Line Value: 35A19
  misc_feature: MA Experiment 108528 PARAMETER Experiment Name: Zm_Imbibed_Seeds_P Parameter: Tissue Value: Aerial vs. Embryo
  misc_feature: MA Experiment ID: 108529 Result: Down-regulated in Transcription
  misc_feature: MA Experiment 108529 PARAMETER Experiment Name: Zm_Imbibed_Seeds_P Parameter: Age (day) Value: 5 vs. 2
  misc_feature: MA Experiment 108529 PARAMETER Experiment Name: Zm_Imbibed_Seeds_P Parameter: Organism Value: Zea mays
  misc_feature: MA Experiment 108529 PARAMETER Experiment Name: Zm_Imbibed_Seeds_P Parameter: Plant Line Value: 35A19
  misc_feature: MA Experiment 108529 PARAMETER Experiment Name: Zm_Imbibed_Seeds_P Parameter: Tissue Value: Roots vs. Embryo
  misc_feature: MA Experiment ID: 108530 Result: Up-regulated in Transcription
  misc_feature: MA Experiment 108530 PARAMETER Experiment Name: Zm_Imbibed_Seeds_P Parameter: Age (day) Value: 6 vs. 2
  misc_feature: MA Experiment 108530 PARAMETER Experiment Name: Zm_Imbibed_Seeds_P Parameter: Organism Value: Zea mays
  misc_feature: MA Experiment 108530 PARAMETER Experiment Name: Zm_Imbibed_Seeds_P Parameter: Plant Line Value: 35A19
  misc_feature: MA Experiment 108530 PARAMETER Experiment Name: Zm_Imbibed_Seeds_P Parameter: Tissue Value: Aerial vs. Embryo
  misc_feature: MA Experiment ID: 108536 Result: Down-regulated in Transcription
  misc_feature: MA Experiment 108536 PARAMETER Experiment Name: Zm_Meristem_P Parameter: Age (day) Value: 8
  misc_feature: MA Experiment 108536 PARAMETER Experiment Name: Zm_Meristem_P Parameter: Organism Value: Zea mays
  misc_feature: MA Experiment 108536 PARAMETER Experiment Name: Zm_Meristem_P Parameter: Plant Line Value: 35A19
  misc_feature: MA Experiment 108536 PARAMETER Experiment Name: Zm_Meristem_P Parameter: Tissue Value: Shoot Meristem vs. Above Shoot Meristem
  misc_feature: MA Experiment ID: 108545 Result: Up-regulated in Transcription
  misc_feature: MA Experiment 108545 PARAMETER Experiment Name: Zm_Imbibed_Seeds_P Parameter: Age (day) Value: 3 vs. 2
  misc_feature: MA Experiment 108545 PARAMETER Experiment Name: Zm_Imbibed_Seeds_P Parameter: Organism Value: Zea mays
  misc_feature: MA Experiment 108545 PARAMETER Experiment Name: Zm_Imbibed_Seeds_P Parameter: Plant Line Value: 35A19
  misc_feature: MA Experiment 108545 PARAMETER Experiment Name: Zm_Imbibed_Seeds_P Parameter: Tissue Value: Aerial vs. Embryo
  misc_feature: MA Experiment ID: 108556 Result: Down-regulated in Transcription
  misc_feature: MA Experiment 108556 PARAMETER Experiment Name: Zm_Drought_P Parameter: Age (day) Value: 9
  misc_feature: MA Experiment 108556 PARAMETER Experiment Name: Zm_Drought_P Parameter: Organism Value: Zea mays
  misc_feature: MA Experiment 108556 PARAMETER Experiment Name: Zm_Drought_P Parameter: Plant Line Value: 35A19
  misc_feature: MA Experiment 108556 PARAMETER Experiment Name: Zm_Drought_P Parameter: Timepoint (hr) Value: 24
  misc_feature: MA Experiment 108556 PARAMETER Experiment Name: Zm_Drought_P Parameter: Tissue Value: Aerial
  misc_feature: MA Experiment 108556 PARAMETER Experiment Name: Zm_Drought_P Parameter: Treatment Value: Drought vs. No Drought
  misc_feature: MA Experiment ID: 108597 Result: Down-regulated in Transcription
  misc_feature: MA Experiment 108597 PARAMETER Experiment Name: Zm_100uM_ABA_P Parameter: Age (day) Value: 9
  misc_feature: MA Experiment 108597 PARAMETER Experiment Name: Zm_100uM_ABA_P Parameter: Organism Value: Zea mays
  misc_feature: MA Experiment 108597 PARAMETER Experiment Name: Zm_100uM_ABA_P Parameter: Plant Line Value: 35A19
  misc_feature: MA Experiment 108597 PARAMETER Experiment Name: Zm_100uM_ABA_P Parameter: Timepoint (hr) Value: 24
  misc_feature: MA Experiment 108597 PARAMETER Experiment Name: Zm_100uM_ABA_P Parameter: Tissue Value: Aerial
  misc_feature: MA Experiment 108597 PARAMETER Experiment Name: Zm_100uM_ABA_P Parameter: Treatment Value: 100uM ABA vs. No Treatment
  misc_feature: MA Experiment ID: 20000478 Result: Down-regulated in Transcription
  misc_feature: MA Experiment 20000478 PARAMETER Experiment Name: Zm_5mM_SA_P Parameter: Age (day) Value: 11
  misc_feature: MA Experiment 20000478 PARAMETER Experiment Name: Zm_5mM_SA_P Parameter: Organism Value: Zea mays
  misc_feature: MA Experiment 20000478 PARAMETER Experiment Name: Zm_5mM_SA_P Parameter: Plant Line Value: 35A19
  misc_feature: MA Experiment 20000478 PARAMETER Experiment Name: Zm_5mM_SA_P Parameter: Timepoint (hr) Value: 72
  misc_feature: MA Experiment 20000478 PARAMETER Experiment Name: Zm_5mM_SA_P Parameter: Tissue Value: Aerial
  misc_feature: MA Experiment 20000478 PARAMETER Experiment Name: Zm_5mM_SA_P Parameter: Treatment Value: 5mM SA vs. No Treatment
ggatctttcgctttccttaccccgttagcgttcctgcttgatacactacgactgcagattctttggcagaccgctaccaagtgcaagtgtgcaacgcacacacatcactcacagtctcacggtgtctctgtgcgcgcgcgtgggacacaggagggagagagacacagagaagggggcgggacgatcagctctagctcagctggtatcgtctaaactgcataaaaggggagggaaaaaaagttgcaatgatgcatcccggcgcatagatagagagagagagagaagagagagccccgactcgagagccaagaacgccgtgtgttgtgtttgtgtgcatctatctccgtacacgcacgctcgtacgcaccagctagcacgaccgccatggccgccaccaggagagccttcttccacagcgccgtcgacggcattgcgcgcgccgggccgggggaggccgagcggctgccggcgccgccgcaggtcgggcgaccggtggaaggcgccagcagcatggtcttgggcttccccgtgccgcggcccacgatgccggaccgccggccggccgccgtcacccagcagttctttccgcccactactacggccgcgcagcaggcgacgatggaggagcaatgccacgtgcccgccggtagcgcggcggagcagtgggtccggtcgtcggcgtccaggaagagccggcgcggcccgcggtcacggagctcgcagtaccgcggcgtcaccttctaccgccgcaccggccgctgggagtcccacatctgggactgtgggaaacaggtgtacttgggtggattcgacacggcgcaggccgctgcgagggcctacgaccaagccgcgatcaagttccgcggcctgaacgcggacatcaacttcaccctggacgactacaaggacgagatgaagaagatgaaggacttgagcaaggaggagttcgtgttggtgctccggcggcagggcgccggcttcgtcaggggcagctccaggttccggggagtcacccagcacaagtgcggcaagtgggaggccaggatcggccagctcatgggcaagaagtatgtgtacctgggcctgtatgacacagagacggaggctgcccaggcatatgacaaggctgccatcaagtgctacggcaaggaggcggtgaccaacttcgatgcccagagctacgacaaggagctccagtcgcagccctgggacggcgagctggatctcgagctcagtctgggctgcgccagcagcgatccgtccacggtcgccgtcgaggcgttcagccccgcgacgagcagcagtagccgcaagcagaggacgatgacgctgacgctcggtctgccggaggaggaggagacgggcgccggctaccctcaccctgctgccggcatgttcgggcgcccggctgatggccacgtccacgtagcaccgccgccacaccggcaatggcagcagcagcagcagggacagcacgcagctccagatgcggcgcctgagcgacgagcggcagagccagcagatcggcagcggtggggccggggcgcgcgctggcccatcgccagcgccagcggcattaactgggcctgggcgccgccgtacgccaccgcccgcgccggcaccgacgacgacgacgccagcagcgccgccgctgcagcatcatcaggattcccactgtggcagctgggtgcggcgtcgtccaggtccagctggcccagctgctgagcctttcctgtcgtcccgcgccaccaacagtgacgctgctgggccacgtactgacggcgactggtgacctgctggaaccgccgccggcctgtttcccttttctaggtaaaagcagtggcagaggggcgagctagcgacagcgtgcctcgtcatccatcgtccctgcgccgtggctggcggggtgggaaaaagtctgagcagttttgagcgtccggaggagctcgagatttcctccctcgaatagtcacttggggtggccactagttattatttctttccttccccctcgttgattctgctacccattatagcctctgtatctagctacatgcatgatgctgctctagcgctgttggacgttgatggcacggtgtacggatatgggacagggttcgtgtgaccccatgtccactgctaggcctgtttccaaatggagtatttctgcagtaccatggcttatagaaatgccgagtattttaaaccattaggtgcttggttactttcccaaaaactaggttttcaaagctatggtataatgaataccacggtatatatttttc

SEQ ID NO: 14165 - protein, 446 aa, Zea mays subsp. mays
  peptide (1)..(446): Ceres Seq. ID no. 13622800
  misc_feature (111)..(174): Pfam Name: AP2 domain Pfam Description: AP2 domain
  misc_feature (1)..(446): Homolog of NCBI NO: 7489716 NR Description: APETALA2-like protein Glossy15 - maize
  misc_feature (24)..(289): Homolog of NCBI NO: 38345500 NR Description: OSJNBa0010D21.13 [Oryza sativa (japonica
  misc_feature (41)..(294): Homolog of NCBI NO: 28894445 NR Description: LIPLESS2 [Antirrhinum majus]
  misc_feature (86)..(293): Homolog of NCBI NO: 28894443 NR Description: LIPLESS1 [Antirrhinum majus]
  misc_feature (88)..(290): Homolog of NCBI NO: 13173164 NR Description: APETAL2-like protein [Pisum sativum]
  misc_feature (86)..(318): Homolog of NCBI NO: 21717332 NR Description: transcription factor AHAP2 [Malus x domestica]
  misc_feature (92)..(290): Homolog of NCBI NO: 5081555 NR Description: PHAP2A protein [Petunia x hybrida]
  misc_feature (101)..(293): Homolog of NCBI NO: 15234566 NR Description: floral homeotic protein APETALA2 [Arabidopsis
  misc_feature (59)..(308): Homolog of NCBI NO: 28876023 NR Description: putative transcription factor AP2 family protein,
  misc_feature (59)..(308): Homolog of NCBI NO: 29124121 NR Description: APETALA2-like protein [Oryza sativa (japonica
MAATRRAFFHSAVDGIARAGPGEAERLPAPPQVGRPVEGASSMVLGFPVPRPTMPDRRPAAVTQQFFPPTTTAAQQATMEEQCHVPAGSAAEQWVRSSASRKSRRGPRSRSSQYRGVTFYRRTGRWESHIWDCGKQVYLGGFDTAQAAARAYDQAAIKFRGLNADINFTLDDYKDEMKKMKDLSKEEFVLVLRRQGAGFVRGSSRFRGVTQHKCGKWEARIGQLMGKKYVYLGLYDTETEAAQAYDKAAIKCYGKEAVTNFDAQSYDKELQSQPWDGELDLELSLGCASSDPSTVAVEAFSPATSSSSRKQRTMTLTLGLPEEEETGAGYPHPAAGMFGRPADGHVHVAPPPHRQWQQQQQGQHAAPDAAPERRAAEPADRQRWGRGARWPIASASGINWAWAPPYATARAGTDDDDASSAAAAASSGFPLWQLGAASSRSSWPSC

SEQ ID NO: 14166 - protein, 404 aa, Zea mays subsp. mays
  peptide (1)..(404): Ceres Seq. ID no. 13622801
  misc_feature (69)..(132): Pfam Name: AP2 domain Pfam Description: AP2 domain
  misc_feature (1)..(404): Homolog of NCBI NO: 7489716 NR Description: APETALA2-like protein Glossy15 - maize
  misc_feature (1)..(247): Homolog of NCBI NO: 38345500 NR Description: OSJNBa0010D21.13 [Oryza sativa (japonica
  misc_feature (1)..(252): Homolog of NCBI NO: 28894445 NR Description: LIPLESS2 [Antirrhinum majus]
  misc_feature (44)..(251): Homolog of NCBI NO: 28894443 NR Description: LIPLESS1 [Antirrhinum majus]
  misc_feature (46)..(248): Homolog of NCBI NO: 13173164 NR Description: APETAL2-like protein [Pisum sativum]
  misc_feature (44)..(276): Homolog of NCBI NO: 21717332 NR Description: transcription factor AHAP2 [Malus x domestica]
  misc_feature (50)..(248): Homolog of NCBI NO: 5081555 NR Description: PHAP2A protein [Petunia x hybrida]
  misc_feature (59)..(251): Homolog of NCBI NO: 15234566 NR Description: floral homeotic protein APETALA2 [Arabidopsis
  misc_feature (17)..(266): Homolog of NCBI NO: 28876023 NR Description: putative transcription factor AP2 family protein,
  misc_feature (17)..(266): Homolog of NCBI NO: 29124121 NR Description: APETALA2-like protein [Oryza sativa (japonica
MVLGFPVPRPTMPDRRPAAVTQQFFPPTTTAAQQATMEEQCHVPAGSAAEQWVRSSASRKSRRGPRSRSSQYRGVTFYRRTGRWESHIWDCGKQVYLGGFDTAQAAARAYDQAAIKFRGLNADINFTLDDYKDEMKKMKDLSKEEFVLVLRRQGAGFVRGSSRFRGVTQHKCGKWEARIGQLMGKKYVYLGLYDTETEAAQAYDKAAIKCYGKEAVTNFDAQSYDKELQSQPWDGELDLELSLGCASSDPSTVAVEAFSPATSSSSRKQRTMTLTLGLPEEEETGAGYPHPAAGMFGRPADGHVHVAPPPHRQWQQQQQGQHAAPDAAPERRAAEPADRQRWGRGARWPIASASGINWAWAPPYATARAGTDDDDASSAAAAASSGFPLWQLGAASSRSSWPSC

SEQ ID NO: 14167 - protein, 393 aa, Zea mays subsp. mays
  peptide (1)..(393): Ceres Seq. ID no. 13622802
  misc_feature (58)..(121): Pfam Name: AP2 domain Pfam Description: AP2 domain
  misc_feature (1)..(393): Homolog of NCBI NO: 7489716 NR Description: APETALA2-like protein Glossy15 - maize
  misc_feature (1)..(236): Homolog of NCBI NO: 38345500 NR Description: OSJNBa0010D21.13 [Oryza sativa (japonica
  misc_feature (1)..(241): Homolog of NCBI NO: 28894445 NR Description: LIPLESS2 [Antirrhinum majus]
  misc_feature (33)..(240): Homolog of NCBI NO: 28894443 NR Description: LIPLESS1 [Antirrhinum majus]
  misc_feature (35)..(237): Homolog of NCBI NO: 13173164 NR Description: APETAL2-like protein [Pisum sativum]
  misc_feature (33)..(265): Homolog of NCBI NO: 21717332 NR Description: transcription factor AHAP2 [Malus x domestica]
  misc_feature (39)..(237): Homolog of NCBI NO: 5081555 NR Description: PHAP2A protein [Petunia x hybrida]
  misc_feature (48)..(240): Homolog of NCBI NO: 15234566 NR Description: floral homeotic protein APETALA2 [Arabidopsis
  misc_feature (6)..(255): Homolog of NCBI NO: 28876023 NR Description: putative transcription factor AP2 family protein,
  misc_feature (6)..(255): Homolog of NCBI NO: 29124121 NR Description: APETALA2-like protein [Oryza sativa (japonica
MPDRRPAAVTQQFFPPTTTAAQQATMEEQCHVPAGSAAEQWVRSSASRKSRRGPRSRSSQYRGVTFYRRTGRWESHIWDCGKQVYLGGFDTAQAAARAYDQAAIKFRGLNADINFTLDDYKDEMKKMKDLSKEEFVLVLRRQGAGFVRGSSRFRGVTQHKCGKWEARIGQLMGKKYVYLGLYDTETEAAQAYDKAAIKCYGKEAVTNFDAQSYDKELQSQPWDGELDLELSLGCASSDPSTVAVEAFSPATSSSSRKQRTMTLTLGLPEEEETGAGYPHPAAGMFGRPADGHVHVAPPPHRQWQQQQQGQHAAPDAAPERRAAEPADRQRWGRGARWPIASASGINWAWAPPYATARAGTDDDDASSAAAAASSGFPLWQLGAASSRSSWPSC

SEQ ID NO: 14168 - DNA, 1888 bp, Zea mays subsp. mays
  misc_feature (1)..(1888): Ceres Seq. ID no. 12454903
  misc_feature: MA Experiment ID: 108522 Result: Up-regulated in Transcription
  misc_feature: MA Experiment 108522 PARAMETER Experiment Name: Zm_42deg_Heat_P Parameter: Age (day) Value: 8
  misc_feature: MA Experiment 108522 PARAMETER Experiment Name: Zm_42deg_Heat_P Parameter: Organism Value: Zea mays
  misc_feature: MA Experiment 108522 PARAMETER Experiment Name: Zm_42deg_Heat_P Parameter: Plant Line Value: 35A19
  misc_feature: MA Experiment 108522 PARAMETER Experiment Name: Zm_42deg_Heat_P Parameter: Temperature (deg C) Value: 42 vs. 22
  misc_feature: MA Experiment 108522 PARAMETER Experiment Name: Zm_42deg_Heat_P Parameter: Timepoint (hr) Value: 1
  misc_feature: MA Experiment 108522 PARAMETER Experiment Name: Zm_42deg_Heat_P Parameter: Tissue Value: Aerial
  misc_feature: MA Experiment ID: 108523 Result: Up-regulated in Transcription
  misc_feature: MA Experiment 108523 PARAMETER Experiment Name: Zm_42deg_Heat_P Parameter: Age (day) Value: 8
  misc_feature: MA Experiment 108523 PARAMETER Experiment Name: Zm_42deg_Heat_P Parameter: Organism Value: Zea mays
  misc_feature: MA Experiment 108523 PARAMETER Experiment Name: Zm_42deg_Heat_P Parameter: Plant Line Value: 35A19
  misc_feature: MA Experiment 108523 PARAMETER Experiment Name: Zm_42deg_Heat_P Parameter: Temperature (deg C) Value: 42 vs. 22
  misc_feature: MA Experiment 108523 PARAMETER Experiment Name: Zm_42deg_Heat_P Parameter: Timepoint (hr) Value: 6
  misc_feature: MA Experiment 108523 PARAMETER Experiment Name: Zm_42deg_Heat_P Parameter: Tissue Value: Aerial
  misc_feature: MA Experiment ID: 108527 Result: Up-regulated in Transcription
  misc_feature: MA Experiment 108527 PARAMETER Experiment Name: Zm_5mM_NO_P Parameter: Age (day) Value: 8
  misc_feature: MA Experiment 108527 PARAMETER Experiment Name: Zm_5mM_NO_P Parameter: Organism Value: Zea mays
  misc_feature: MA Experiment 108527 PARAMETER Experiment Name: Zm_5mM_NO_P Parameter: Plant Line Value: 35A19
  misc_feature: MA Experiment 108527 PARAMETER Experiment Name: Zm_5mM_NO_P Parameter: Timepoint (hr) Value: 6
  misc_feature: MA Experiment 108527 PARAMETER Experiment Name: Zm_5mM_NO_P Parameter: Tissue Value: Aerial
  misc_feature: MA Experiment 108527 PARAMETER Experiment Name: Zm_5mM_NO_P Parameter: Treatment Value: 5mM NO vs. No Treatment
  misc_feature: MA Experiment ID: 108528 Result: Up-regulated in Transcription
  misc_feature: MA Experiment 108528 PARAMETER Experiment Name: Zm_Imbibed_Seeds_P Parameter: Age (day) Value: 5 vs. 2
  misc_feature: MA Experiment 108528 PARAMETER Experiment Name: Zm_Imbibed_Seeds_P Parameter: Organism Value: Zea mays
  misc_feature: MA Experiment 108528 PARAMETER Experiment Name: Zm_Imbibed_Seeds_P Parameter: Plant Line Value: 35A19
  misc_feature: MA Experiment 108528 PARAMETER Experiment Name: Zm_Imbibed_Seeds_P Parameter: Tissue Value: Aerial vs. Embryo
  misc_feature: MA Experiment ID: 108530 Result: Up-regulated in Transcription
  misc_feature: MA Experiment 108530 PARAMETER Experiment Name: Zm_Imbibed_Seeds_P Parameter: Age (day) Value: 6 vs. 2
  misc_feature: MA Experiment 108530 PARAMETER Experiment Name: Zm_Imbibed_Seeds_P Parameter: Organism Value: Zea mays
  misc_feature: MA Experiment 108530 PARAMETER Experiment Name: Zm_Imbibed_Seeds_P Parameter: Plant Line Value: 35A19
  misc_feature: MA Experiment 108530 PARAMETER Experiment Name: Zm_Imbibed_Seeds_P Parameter: Tissue Value: Aerial vs. Embryo
  misc_feature: MA Experiment ID: 108534 Result: Down-regulated in Transcription
  misc_feature: MA Experiment 108534 PARAMETER Experiment Name: Zm_4deg_Cold_P Parameter: Age (hr) Value: 8
  misc_feature: MA Experiment 108534 PARAMETER Experiment Name: Zm_4deg_Cold_P Parameter: Organism Value: Zea mays
  misc_feature: MA Experiment 108534 PARAMETER Experiment Name: Zm_4deg_Cold_P Parameter: Plant Line Value: 35A19
  misc_feature: MA Experiment 108534 PARAMETER Experiment Name: Zm_4deg_Cold_P Parameter: Temperature (deg C) Value: 4 vs. 22
  misc_feature: MA Experiment 108534 PARAMETER Experiment Name: Zm_4deg_Cold_P Parameter: Timepoint (hr) Value: 6
  misc_feature: MA Experiment 108534 PARAMETER Experiment Name: Zm_4deg_Cold_P Parameter: Tissue Value: Aerial
  misc_feature: MA Experiment ID: 108535 Result: Down-regulated in Transcription
  misc_feature: MA Experiment 108535 PARAMETER Experiment Name: Zm_Meristem_P Parameter: Age (day) Value: 8
  misc_feature: MA Experiment 108535 PARAMETER Experiment Name: Zm_Meristem_P Parameter: Organism Value: Zea mays
  misc_feature: MA Experiment 108535 PARAMETER Experiment Name: Zm_Meristem_P Parameter: Plant Line Value: 35A19
  misc_feature: MA Experiment 108535 PARAMETER Experiment Name: Zm_Meristem_P Parameter: Tissue Value: Root Meristem vs. Above Root Meristem
  misc_feature: MA Experiment ID: 108556 Result: Up-regulated in Transcription
  misc_feature: MA Experiment 108556 PARAMETER Experiment Name: Zm_Drought_P Parameter: Age (day) Value: 9
  misc_feature: MA Experiment 108556 PARAMETER Experiment Name: Zm_Drought_P Parameter: Organism Value: Zea mays
  misc_feature: MA Experiment 108556 PARAMETER Experiment Name: Zm_Drought_P Parameter: Plant Line Value: 35A19
  misc_feature: MA Experiment 108556 PARAMETER Experiment Name: Zm_Drought_P Parameter: Timepoint (hr) Value: 24
  misc_feature: MA Experiment 108556 PARAMETER Experiment Name: Zm_Drought_P Parameter: Tissue Value: Aerial
  misc_feature: MA Experiment 108556 PARAMETER Experiment Name: Zm_Drought_P Parameter: Treatment Value: Drought vs. No Drought
  misc_feature: MA Experiment ID: 108597 Result: Up-regulated in Transcription
  misc_feature: MA Experiment 108597 PARAMETER Experiment Name: Zm_100uM_ABA_P Parameter: Age (day) Value: 9
  misc_feature: MA Experiment 108597 PARAMETER Experiment Name: Zm_100uM_ABA_P Parameter: Organism Value: Zea mays
  misc_feature: MA Experiment 108597 PARAMETER Experiment Name: Zm_100uM_ABA_P Parameter: Plant Line Value: 35A19
  misc_feature: MA Experiment 108597 PARAMETER Experiment Name: Zm_100uM_ABA_P Parameter: Timepoint (hr) Value: 24
  misc_feature: MA Experiment 108597 PARAMETER Experiment Name: Zm_100uM_ABA_P Parameter: Tissue Value: Aerial
  misc_feature: MA Experiment 108597 PARAMETER Experiment Name: Zm_100uM_ABA_P Parameter: Treatment Value: 100uM ABA vs. No Treatment
  misc_feature: MA Experiment ID: 108687 Result: Down-regulated in Transcription
  misc_feature: MA Experiment 108687 PARAMETER Experiment Name: Zm_Embryos-Flowers__P Parameter: Tissue Value: Embryo vs. Aerial+
  misc_feature: MA Experiment ID: 20000108 Result: Down-regulated in Transcription
  misc_feature: MA Experiment 20000108 PARAMETER Experiment Name: Zm_Root-Tips_P Parameter: Age (day) Value: 12
  misc_feature: MA Experiment 20000108 PARAMETER Experiment Name: Zm_Root-Tips_P Parameter: Organism Value: Zea mays
  misc_feature: MA Experiment 20000108 PARAMETER Experiment Name: Zm_Root-Tips_P Parameter: Tissue Value: Root tips vs. Root mid region    35
  misc_feature: MA Experiment 20000108 PARAMETER Experiment Name: Zm_Root-Tips_P Parameter: Tissue Value: Root tips vs. Root mid region   Sequence Listing-Misc Features (4)
  misc_feature: MA Experiment ID: 20000477 Result: Up-regulated in Transcription
  misc_feature: MA Experiment 20000477 PARAMETER Experiment Name: Zm_5mM_SA_P Parameter: Age (day) Value: 10
  misc_feature: MA Experiment 20000477 PARAMETER Experiment Name: Zm_5mM_SA_P Parameter: Organism Value: Zea mays
  misc_feature: MA Experiment 20000477 PARAMETER Experiment Name: Zm_5mM_SA_P Parameter: Plant Line Value: 35A19
  misc_feature: MA Experiment 20000477 PARAMETER Experiment Name: Zm_5mM_SA_P Parameter: Timepoint (hr) Value: 48
  misc_feature: MA Experiment 20000477 PARAMETER Experiment Name: Zm_5mM_SA_P Parameter: Tissue Value: Aerial
  misc_feature: MA Experiment 20000477 PARAMETER Experiment Name: Zm_5mM_SA_P Parameter: Treatment Value: 5mM SA vs. No Treatment
  misc_feature: MA Experiment ID: 20000478 Result: Up-regulated in Transcription
  misc_feature: MA Experiment 20000478 PARAMETER Experiment Name: Zm_5mM_SA_P Parameter: Age (day) Value: 11
  misc_feature: MA Experiment 20000478 PARAMETER Experiment Name: Zm_5mM_SA_P Parameter: Organism Value: Zea mays
  misc_feature: MA Experiment 20000478 PARAMETER Experiment Name: Zm_5mM_SA_P Parameter: Plant Line Value: 35A19
  misc_feature: MA Experiment 20000478 PARAMETER Experiment Name: Zm_5mM_SA_P Parameter: Timepoint (hr) Value: 72
  misc_feature: MA Experiment 20000478 PARAMETER Experiment Name: Zm_5mM_SA_P Parameter: Tissue Value: Aerial
  misc_feature: MA Experiment 20000478 PARAMETER Experiment Name: Zm_5mM_SA_P Parameter: Treatment Value: 5mM SA vs. No Treatment
  misc_feature: MA Experiment ID: 20000480 Result: Up-regulated in Transcription
  misc_feature: MA Experiment 20000480 PARAMETER Experiment Name: Zm_Drought_P Parameter: Age (day) Value: 11
  misc_feature: MA Experiment 20000480 PARAMETER Experiment Name: Zm_Drought_P Parameter: Organism Value: Zea mays
  misc_feature: MA Experiment 20000480 PARAMETER Experiment Name: Zm_Drought_P Parameter: Plant Line Value: 35A19
  misc_feature: MA Experiment 20000480 PARAMETER Experiment Name: Zm_Drought_P Parameter: Timepoint (hr) Value: 72
  misc_feature: MA Experiment 20000480 PARAMETER Experiment Name: Zm_Drought_P Parameter: Tissue Value: Aerial
  misc_feature: MA Experiment 20000480 PARAMETER Experiment Name: Zm_Drought_P Parameter: Treatment Value: Drought vs. No Drought
  misc_feature: MA Experiment ID: 20000492 Result: Down-regulated in Transcription
  misc_feature: MA Experiment 20000492 PARAMETER Experiment Name: Zm_Hybrid_Seed_Dev_P Parameter: DAP Value: 12
  misc_feature: MA Experiment 20000492 PARAMETER Experiment Name: Zm_Hybrid_Seed_Dev_P Parameter: Organism Value: Zea mays
  misc_feature: MA Experiment 20000492 PARAMETER Experiment Name: Zm_Hybrid_Seed_Dev_P Parameter: Plant Line Value: 35A19
  misc_feature: MA Experiment 20000492 PARAMETER Experiment Name: Zm_Hybrid_Seed_Dev_P Parameter: Tissue Value: Fert Kernel vs. Unfert Floret
  misc_feature: MA Experiment ID: 20000532 Result: Up-regulated in Transcription
  misc_feature: MA Experiment 20000532 PARAMETER Experiment Name: Zm_0.001percent_MeJA_P Parameter: Age (day) Value: 10
  misc_feature: MA Experiment 20000532 PARAMETER Experiment Name: Zm_0.001percent_MeJA_P Parameter: Organism Value: Zea mays
  misc_feature: MA Experiment 20000532 PARAMETER Experiment Name: Zm_0.001percent_MeJA_P Parameter: Plant Line Value: 35A19
  misc_feature: MA Experiment 20000532 PARAMETER Experiment Name: Zm_0.001percent_MeJA_P Parameter: Timepoint (hr) Value: 48
  misc_feature: MA Experiment 20000532 PARAMETER Experiment Name: Zm_0.001percent_MeJA_P Parameter: Tissue Value: Aerial
  misc_feature: MA Experiment 20000532 PARAMETER Experiment Name: Zm_0.001percent_MeJA_P Parameter: Treatment Value: 0.001percent MeJA vs. No Treatment
  misc_feature: MA Experiment ID: 20000533 Result: Up-regulated in Transcription
  misc_feature: MA Experiment 20000533 PARAMETER Experiment Name: Zm_0.001percent_MeJA_P Parameter: Age (day) Value: 11
  misc_feature: MA Experiment 20000533 PARAMETER Experiment Name: Zm_0.001percent_MeJA_P Parameter: Organism Value: Zea mays
  misc_feature: MA Experiment 20000533 PARAMETER Experiment Name: Zm_0.001percent_MeJA_P Parameter: Plant Line Value: 35A19
  misc_feature: MA Experiment 20000533 PARAMETER Experiment Name: Zm_0.001percent_MeJA_P Parameter: Timepoint (hr) Value: 72
  misc_feature: MA Experiment 20000533 PARAMETER Experiment Name: Zm_0.001percent_MeJA_P Parameter: Tissue Value: Aerial
  misc_feature: MA Experiment 20000533 PARAMETER Experiment Name: Zm_0.001percent_MeJA_P Parameter: Treatment Value: 0.001percent MeJA vs. No Treatment
  misc_feature: MA Experiment ID: 20000535 Result: Down-regulated in Transcription
  misc_feature: MA Experiment 20000535 PARAMETER Experiment Name: Zm_Hybrid_Seed_Dev_P Parameter: DAP Value: 30 vs. 12
  misc_feature: MA Experiment 20000535 PARAMETER Experiment Name: Zm_Hybrid_Seed_Dev_P Parameter: Organism Value: Zea mays
  misc_feature: MA Experiment 20000535 PARAMETER Experiment Name: Zm_Hybrid_Seed_Dev_P Parameter: Plant Line Value: 35A19
  misc_feature: MA Experiment 20000535 PARAMETER Experiment Name: Zm_Hybrid_Seed_Dev_P Parameter: Tissue Value: Embryo vs. Unfert Floret
  misc_feature: MA Experiment ID: 20000626 Result: Up-regulated in Transcription
  misc_feature: MA Experiment 20000626 PARAMETER Experiment Name: Zm_Herbicide-Treatments_P Parameter: Timepoint (hr) Value: 12
  misc_feature: MA Experiment 20000626 PARAMETER Experiment Name: Zm_Herbicide-Treatments_P Parameter: Tissue Value: Aerial
  misc_feature: MA Experiment 20000626 PARAMETER Experiment Name: Zm_Herbicide-Treatments_P Parameter: Treatment Value: Roundup vs. No Treatment
acactggcacgtactccagagacgagcgcgcgcgcgcggagcaggccgggtccataaattatgagctcgccctttggaaccgagaggcgtttcctacccaccttaccttatcattattagctccaagcaagtcgcacacgacacagacacacacacatcatcatcatcaacaacctgacatggccggcgacggggcggacgccgcgcacggcgcgtcggcgcggctggagggcgtgctgacggatgcgtcgaccccgtgggcgcggcgcgcgtggggcgcggccgccatcgagctgccgctgctgacgcggctggcggcgccggcggttgtgatgtacatgatcaactacctcatgtccatgtcgacgcagatcttctcgggccacctcggcaacctggagctcgccgccgcctcgctcggcaacaccggcgtgcagatgttcgcctacggactcatgctgggcatgggcagcgcggtggagacgctgtgcgggcaggcgtacggcgcccacaagtacgagatgctgggcatctacctgcagcggtcggccgtgctgctgtgcgcgacgggcgtgccgctggccgtgatctacggcttctcggagccgatcctggtgttcctggggcagtcgccggagatcgcccgcgcggcggccatcttcgtgtacggcctgatcccgcagatcttcgcgtacgccatcaacttcccgatccagaagttcatgcaggcagcagagcatcgtgctcccgagcgcgtacatctccaccgcgtcgctggcgctgcacctgctgctgagctgggtggtggtctacaaggtggggctgggcctgctgggggcctccctggtgctgagcctcagctggtggctcctcgtcgcggcgcagttcgcgtacatcgtgatgagccccaggtgccgccacacctggaccggcttcacctggcaggccttctcgggcctctgggacttcctcaagctctccgccgcgtccgccgtcatgctctgcctcgagacctggtactatcaggtcctggtgctcatcgccggcttgctccccaaccctgaacttgcattggacgcgctgtctgtatgcatgactgttaatgggtgggtgttcatgatcgcagtagggttcaacgccgctgccagcgtgagagtgagcaatgagctcggcgccggccaccccaagtccgcgtatttctcggtgtgggtagtgaccgcgctgtcgacgctcatatctatcatgctcggcgttctggtcctctgcctgcgcaactacatcagctacttgttcacggagggcgaggtggtgtccaacgcggtggccgatctctgcccgctgcttgccgtcacgctcgttctcaacggcatccagcctgtgctgtcaggtgtcgccgttgggtgcgggtggcagcagttcgtggcctacgtgaacattggctgctactacatagtcggcgtccccctcggcgccgtgctcgggttcgtcttcaagctcggtgtgaagggcatttgggctgggatgatcggagggacttgcatgcagacggctattctagtgtgggtcaccttgagaactgactggaacaaggaggtagaggaagcacatgaatangttgcacaagtgggaggctaacaagacgacggagccccttcttgcgggggtcagcaatgacaaataaataacgtaactgcgcgcggatgatcgatcgatccacaatatcaatcaatctccggccttcaccagtactagttcccttcatgcataatgttgggaactggcgtctttagattttctgtgcagtaaattaaatgaaccacggtaacgtcaatgtaaacgaatcacgcatgtttggtttgcttatttcttccgttttaatgcttaacgt

SEQ ID NO: 14169 - protein, 353 aa, Zea mays subsp. mays
  peptide (1)..(353): Ceres Seq. ID no. 12454904
  misc_feature (72)..(274): Homolog of NCBI NO: 15233127 NR Description: integral membrane protein, putative; protein id: supported by cDNA: gi_20466555 [Arabidopsis thaliana] gb|AAC28507.1~gene_id:MIL23.25~strong similarity to unknown
  misc_feature (72)..(274): Homolog of NCBI NO: 20466556 NR Description: integral membrane protein, putative [Arabidopsis
  misc_feature (74)..(243): Homolog of NCBI NO: 18407368 NR Description: expressed protein; protein id: At1g61890.1, by cDNA: gi_13272458, supported by cDNA: gi_15028186, supported cDNA: gi_15081772, supported by cDNA: gi_16209723 [Arabidopsis
  misc_feature (74)..(243): Homolog of NCBI NO: 15081773 NR Description: At1g61890/F8K4_9 [Arabidopsis thaliana]
  misc_feature (71)..(243): Homolog of NCBI NO: 15221073 NR Description: unknown protein; protein id: At1g11670.1
  misc_feature (71)..(243): Homolog of NCBI NO: 22655139 NR Description: unknown protein [Arabidopsis thaliana]
  misc_feature (75)..(249): Homolog of NCBI NO: 18415793 NR Description: putative protein; protein id: At4g21910.1 thaliana] >gi|15809935|gb|AAL06895.1| AT4g21910/T8O5_120 thaliana] >gi|22137012|gb|AAM91351.1| At4g21910/T8O5_120
  misc_feature (75)..(249): Homolog of NCBI NO: 21553843 NR Description: unknown [Arabidopsis thaliana]
  misc_feature (93)..(274): Homolog of NCBI NO: 34901880 NR Description: putative Multidrug resistance protein norM
  misc_feature (75)..(249): Homolog of NCBI NO: 7487826 NR Description: hypothetical protein T8O5.120 - Arabidopsis >gi|2894569|emb|CAA17158.1| putative protein [Arabidopsis >gi|7269036|emb|CAB79146.1| putative protein [Arabidopsis
TGTYSRDERARAEQAGSINYELALWNREAFPTHLTLSLLAPSKSHTTQTHTHHHHQQPDMAGDGADAAHGASARLEGVLTDASTPWARRAWGAAAIELPLLTRLAAPAVVMYMINYLMSMSTQIFSGHLGNLELAAASLGNTGVQMFAYGLMLGMGSAVETLCGQAYGAHKYEMLGIYLQRSAVLLCATGVPLAVIYGFSEPILVFLGQSPEIARAAAIFVYGLIPQIFAYAINFPIQKFMQAAEHRAPERVHLHRVAGAAPAAELGGGLQGGAGPAGGLPGAEPQLVAPRRGAVRVHRDEPQVPPHLDRLHLAGLLGPLGLPQALRRVRRHALPRDLVLSGPGAHRRLAPQP

SEQ ID NO: 14170 - protein, 294 aa, Zea mays subsp. mays
  peptide (1)..(294): Ceres Seq. ID no. 12454905
  misc_feature (13)..(215): Homolog of NCBI NO: 15233127 NR Description: integral membrane protein, putative; protein id: supported by cDNA: gi_20466555 [Arabidopsis thaliana] gb|AAC28507.1~gene_id:MIL23.25~strong similarity to unknown
  misc_feature (13)..(215): Homolog of NCBI NO: 20466556 NR Description: integral membrane protein, putative [Arabidopsis
  misc_feature (15)..(184): Homolog of NCBI NO: 18407368 NR Description: expressed protein; protein id: At1g61890.1, by cDNA: gi_13272458, supported by cDNA: gi_15028186, supported cDNA: gi_15081772, supported by cDNA: gi_16209723 [Arabidopsis
  misc_feature (15)..(184): Homolog of NCBI NO: 15081773 NR Description: At1g61890/F8K4_9 [Arabidopsis thaliana]
  misc_feature (12)..(184): Homolog of NCBI NO: 15221073 NR Description: unknown protein; protein id: At1g11670.1
  misc_feature (12)..(184): Homolog of NCBI NO: 22655139 NR Description: unknown protein [Arabidopsis thaliana]
  misc_feature (16)..(190): Homolog of NCBI NO: 18415793 NR Description: putative protein; protein id: At4g21910.1 thaliana] >gi|15809935|gb|AAL06895.1| AT4g21910/T8O5_120 thaliana] >gi|22137012|gb|AAM91351.1| At4g21910/T8O5_120
  misc_feature (16)..(190): Homolog of NCBI NO: 21553843 NR Description: unknown [Arabidopsis thaliana]
  misc_feature (34)..(215): Homolog of NCBI NO: 34901880 NR Description: putative Multidrug resistance protein norM
  misc_feature (16)..(190): Homolog of NCBI NO: 7487826 NR Description: hypothetical protein T8O5.120 - Arabidopsis >gi|2894569|emb|CAA17158.1| putative protein [Arabidopsis >gi|7269036|emb|CAB79146.1| putative protein [Arabidopsis
MAGDGADAAHGASARLEGVLTDASTPWARRAWGAAAIELPLLTRLAAPAVVMYMINYLMSMSTQIFSGHLGNLELAAASLGNTGVQMFAYGLMLGMGSAVETLCGQAYGAHKYEMLGIYLQRSAVLLCATGVPLAVIYGFSEPILVFLGQSPEIARAAAIFVYGLIPQIFAYAINFPIQKFMQAAEHRAPERVHLHRVAGAAPAAELGGGLQGGAGPAGGLPGAEPQLVAPRRGAVRVHRDEPQVPPHLDRLHLAGLLGPLGLPQALRRVRRHALPRDLVLSGPGAHRRLAPQP

SEQ ID NO: 14171 - protein, 244 aa, Zea mays subsp. mays
  peptide (1)..(244): Ceres Seq. ID no. 12454906
  misc_feature (1)..(235): Homolog of NCBI NO: 15233127 NR Description: integral membrane protein, putative; protein id: supported by cDNA: gi_20466555 [Arabidopsis thaliana] gb|AAC28507.1~gene_id:MIL23.25~strong similarity to unknown
  misc_feature (1)..(235): Homolog of NCBI NO: 20466556 NR Description: integral membrane protein, putative [Arabidopsis
  misc_feature (1)..(241): Homolog of NCBI NO: 18407368 NR Description: expressed protein; protein id: At1g61890.1, by cDNA: gi_13272458, supported by cDNA: gi_15028186, supported cDNA: gi_15081772, supported by cDNA: gi_16209723 [Arabidopsis
  misc_feature (1)..(241): Homolog of NCBI NO: 15081773 NR Description: At1g61890/F8K4_9 [Arabidopsis thaliana]
  misc_feature (1)..(241): Homolog of NCBI NO: 15221073 NR Description: unknown protein; protein id: At1g11670.1
  misc_feature (1)..(241): Homolog of NCBI NO: 22655139 NR Description: unknown protein [Arabidopsis thaliana]
  misc_feature (1)..(237): Homolog of NCBI NO: 18415793 NR Description: putative protein; protein id: At4g21910.1 thaliana] >gi|15809935|gb|AAL06895.1| AT4g21910/T8O5_120 thaliana] >gi|22137012|gb|AAM91351.1| At4g21910/T8O5_120
  misc_feature (1)..(237): Homolog of NCBI NO: 21553843 NR Description: unknown [Arabidopsis thaliana]
  misc_feature (1)..(202): Homolog of NCBI NO: 34901880 NR Description: putative Multidrug resistance protein norM
  misc_feature (1)..(211): Homolog of NCBI NO: 7487826 NR Description: hypothetical protein T8O5.120 - Arabidopsis >gi|2894569|emb|CAA17158.1| putative protein [Arabidopsis >gi|7269036|emb|CAB79146.1| putative protein [Arabidopsis
  misc_feature (238)..(238): Xaa is any aa, unknown or other
MSPRCRHTWTGFTWQAFSGLWDFLKLSAASAVMLCLETWYYQVLVLIAGLLPNPELALDALSVCMTVNGWVFMIAVGFNAAASVRVSNELGAGHPKSAYFSVWVVTALSTLISIMLGVLVLCLRNYISYLFTEGEVVSNAVADLCPLLAVTLVLNGIQPVLSGVAVGCGWQQFVAYVNIGCYYIVGVPLGAVLGFVFKLGVKGIWAGMIGGTCMQTAILVWVTLRTDWNKEVEEAHEXVAQVGG

SEQ ID NO: 14172 - DNA, 1417 bp, Zea mays subsp. mays
  misc_feature (1)..(1417): Ceres Seq. ID no. 12436145
  misc_feature: MA Experiment ID: 108544 Result: Down-regulated in Transcription
  misc_feature: MA Experiment ID: 20000478 Result: Down-regulated in Transcription
  misc_feature: MA Experiment 20000478 PARAMETER Experiment Name: Zm_5mM_SA_P Parameter: Age (day) Value: 11
  misc_feature: MA Experiment 20000478 PARAMETER Experiment Name: Zm_5mM_SA_P Parameter: Organism Value: Zea mays
  misc_feature: MA Experiment 20000478 PARAMETER Experiment Name: Zm_5mM_SA_P Parameter: Plant Line Value: 35A19
  misc_feature: MA Experiment 20000478 PARAMETER Experiment Name: Zm_5mM_SA_P Parameter: Timepoint (hr) Value: 72
  misc_feature: MA Experiment 20000478 PARAMETER Experiment Name: Zm_5mM_SA_P Parameter: Tissue Value: Aerial
  misc_feature: MA Experiment 20000478 PARAMETER Experiment Name: Zm_5mM_SA_P Parameter: Treatment Value: 5mM SA vs. No Treatment
aaacggaggctggactggattcttgaagaggcttccattccatgggggtaaagcgatcccatttccactcctgcctgttgtctgcctccaaggcaacagttttttagtttgcttgcgctctcctgccttcggttcaccgcctctccatgaatgcaagcaagccgccttttaaatacgaggctctcgcttgttactgaagctgcgcggcgtcttgtgcctcggaacctgccaactgccattggaagtgtttctctacagtctacaaatacgtcgcgcgccatggacggcgactcgaagaagctgagggtgtggttttctggagtaggaaagggaggtggaggtggacgccagtcttcagcggcaccaccgcaagaaagcgcgcctattggaagagcggaaatgaacagcagcggggaatttgatgctgcattcgcagccacaattgcagcagcagcatttgcaattgctgcccgtgaagagaagcttgcagctcagaagaagtctgtccccatcgaggaggtgccacgagccctgtcgctagtcaagagagctggaagcaccaaaaaacctgcgggaggcaacaaaatctcaagatggtttagcggcaaggagcctctagaacacgacgacgacggtccagtgagcaggccactgaaaccagcacctggaaagcccgagggtatgcctgcagatcacaaggtggcacccaagattcttgagacttctctgagtgtgaggaagggttcagggtcctccggcaagacaacagacaggaaagggagcaagaagtttgagcaagaacatgttcagaaagcgccatcgatcatcaggccatctacatcataccattctagacggaatggagaagacgcagcaggagtagctgctattggcggcacgagatctaaggctgatgagtgggagaaggcaaagcttgcaaaagttagagaggagtacgaaaagatgatggagaccatagctgaatgggaaactgagaagaaggtgaaggcgagacgccataaagaacagagagagactgtgctggacagaaagagagcaaaagcactagaagaatacaaccaggagatgacaaggatcagcaagattgctggaggagcaaggtcgatggcagaggaacgaaaatacaacgacgagaataagatcaaagagaaggcgcacaagatacgatccacaagaaagcctccccgcacatgtgcttgcttttgagaatagttctatacactgaaatttggaaccgtatgaaagaagtgtgatttgaagtcactattgtaaaagtcacacaatagtgacgtactgtattgtaatatgtatttggctttgacaagatattagtgtagagttgtatcccccttcaaaaagagagttgtatccaacacgcaacatattgacgctttcc

SEQ ID NO: 14173 - protein, 358 aa, Zea mays subsp. mays
  peptide (1)..(358): Ceres Seq. ID no. 12436146
  misc_feature (254)..(355): Pfam Name: Remorin, C-terminal region Pfam Description: Remorin, C-terminal region
  misc_feature (254)..(358): Homolog of NCBI NO: 37532756 NR Description: hypothetical protein [Oryza sativa (japonica group)] >gi|20042984|gb|AAM08792.1| Hypothetical protein [Oryza >gi|31431145|gb|AAP52967.1| hypothetical protein [Oryza sativa
  misc_feature (88)..(358): Homolog of NCBI NO: 15222980 NR Description: hypothetical protein; protein id: At1g13920.1
  misc_feature (205)..(358): Homolog of NCBI NO: 15240195 NR Description: putative protein; protein id: At5g61280.1 thaliana] >gi|9757849|dbj|BAB08483.1|
  misc_feature (252)..(358): Homolog of NCBI NO: 8778390 NR Description: F16A14.13 [Arabidopsis thaliana]
  misc_feature (255)..(355): Homolog of NCBI NO: 12597780 NR Description: hypothetical protein [Arabidopsis thaliana]
  misc_feature (255)..(355): Homolog of NCBI NO: 30697834 NR Description: predicted protein [Arabidopsis thaliana]
  misc_feature (264)..(355): Homolog of NCBI NO: 12325086 NR Description: hypothetical protein; 34983-33172 [Arabidopsis
  misc_feature (257)..(352): Homolog of NCBI NO: 15229057 NR Description: remorin -like protein; protein id: At3g48940.1
  misc_feature (161)..(358): Homolog of NCBI NO: 15233068 NR Description: putative DNA-binding protein; protein id: supported by cDNA: 40796., supported by cDNA: gi_17104524
  misc_feature (257)..(358): Homolog of NCBI NO: 15225899 NR Description: remorin; protein id: At2g45820.1, supported by gi_15028386, supported by cDNA: gi_19310658 [Arabidopsis
MQASRLLNTRLSLVTEAARRLVPRNLPTAIGSVSLQSTNTSRAMDGDSKKLRVWFSGVGKGGGGGRQSSAAPPQESAPIGRAEMNSSGEFDAAFAATIAAAAFAIAAREEKLAAQKKSVPIEEVPRALSLVKRAGSTKKPAGGNKISRWFSGKEPLEHDDDGPVSRPLKPAPGKPEGMPADHKVAPKILETSLSVRKGSGSSGKTTDRKGSKKFEQEHVQKAPSIIRPSTSYHSRRNGEDAAGVAAIGGTRSKADEWEKAKLAKVREEYEKMMETIAEWETEKKVKARRHKEQRETVLDRKRAKALEEYNQEMTRISKIAGGARSMAEERKYNDENKIKEKAHKIRSTRKPPRTCACF

SEQ ID NO: 14174 - protein, 315 aa, Zea mays subsp. mays
  peptide (1)..(315): Ceres Seq. ID no. 12436147
  misc_feature (211)..(312): Pfam Name: Remorin, C-terminal region Pfam Description: Remorin, C-terminal region
  misc_feature (211)..(315): Homolog of NCBI NO: 37532756 NR Description: hypothetical protein [Oryza sativa (japonica group)] >gi|20042984|gb|AAM08792.1| Hypothetical protein [Oryza >gi|31431145|gb|AAP52967.1| hypothetical protein [Oryza sativa
  misc_feature (45)..(315): Homolog of NCBI NO: 15222980 NR Description: hypothetical protein; protein id: At1g13920.1
  misc_feature (162)..(315): Homolog of NCBI NO: 15240195 NR Description: putative protein; protein id: At5g61280.1 thaliana] >gi|9757849|dbj|BAB08483.1|
  misc_feature (209)..(315): Homolog of NCBI NO: 8778390 NR Description: F16A14.13 [Arabidopsis thaliana]
  misc_feature (212)..(312): Homolog of NCBI NO: 12597780 NR Description: hypothetical protein [Arabidopsis thaliana]
  misc_feature (212)..(312): Homolog of NCBI NO: 30697834 NR Description: predicted protein [Arabidopsis thaliana]
  misc_feature (221)..(312): Homolog of NCBI NO: 12325086 NR Description: hypothetical protein; 34983-33172 [Arabidopsis
  misc_feature (214)..(309): Homolog of NCBI NO: 15229057 NR Description: remorin -like protein; protein id: At3g48940.1
  misc_feature (118)..(315): Homolog of NCBI NO: 15233068 NR Description: putative DNA-binding protein; protein id: supported by cDNA: 40796., supported by cDNA: gi_17104524
  misc_feature (214)..(315): Homolog of NCBI NO: 15225899 NR Description: remorin; protein id: At2g45820.1, supported by gi_15028386, supported by cDNA: gi_19310658 [Arabidopsis
MDGDSKKLRVWFSGVGKGGGGGRQSSAAPPQESAPIGRAEMNSSGEFDAAFAATIAAAAFAIAAREEKLAAQKKSVPIEEVPRALSLVKRAGSTKKPAGGNKISRWFSGKEPLEHDDDGPVSRPLKPAPGKPEGMPADHKVAPKILETSLSVRKGSGSSGKTTDRKGSKKFEQEHVQKAPSIIRPSTSYHSRRNGEDAAGVAAIGGTRSKADEWEKAKLAKVREEYEKMMETIAEWETEKKVKARRHKEQRETVLDRKRAKALEEYNQEMTRISKIAGGARSMAEERKYNDENKIKEKAHKIRSTRKPPRTCACF

SEQ ID NO: 14175 - protein, 275 aa, Zea mays subsp. mays
  peptide (1)..(275): Ceres Seq. ID no. 12436148
  misc_feature (171)..(272): Pfam Name: Remorin, C-terminal region Pfam Description: Remorin, C-terminal region
  misc_feature (171)..(275): Homolog of NCBI NO: 37532756 NR Description: hypothetical protein [Oryza sativa (japonica group)] >gi|20042984|gb|AAM08792.1| Hypothetical protein [Oryza >gi|31431145|gb|AAP52967.1| hypothetical protein [Oryza sativa
  misc_feature (5)..(275): Homolog of NCBI NO: 15222980 NR Description: hypothetical protein; protein id: At1g13920.1
  misc_feature (122)..(275): Homolog of NCBI NO: 15240195 NR Description: putative protein; protein id: At5g61280.1 thaliana] >gi|9757849|dbj|BAB08483.1|
  misc_feature (169)..(275): Homolog of NCBI NO: 8778390 NR Description: F16A14.13 [Arabidopsis thaliana]
  misc_feature (172)..(272): Homolog of NCBI NO: 12597780 NR Description: hypothetical protein [Arabidopsis thaliana]
  misc_feature (172)..(272): Homolog of NCBI NO: 30697834 NR Description: predicted protein [Arabidopsis thaliana]
  misc_feature (181)..(272): Homolog of NCBI NO: 12325086 NR Description: hypothetical protein; 34983-33172 [Arabidopsis
  misc_feature (174)..(269): Homolog of NCBI NO: 15229057 NR Description: remorin -like protein; protein id: At3g48940.1
  misc_feature (78)..(275): Homolog of NCBI NO: 15233068 NR Description: putative DNA-binding protein; protein id: supported by cDNA: 40796., supported by cDNA: gi_17104524
  misc_feature (174)..(275): Homolog of NCBI NO: 15225899 NR Description: remorin; protein id: At2g45820.1, supported by gi_15028386, supported by cDNA: gi_19310658 [Arabidopsis
MNSSGEFDAAFAATIAAAAFAIAAREEKLAAQKKSVPIEEVPRALSLVKRAGSTKKPAGGNKISRWFSGKEPLEHDDDGPVSRPLKPAPGKPEGMPADHKVAPKILETSLSVRKGSGSSGKTTDRKGSKKFEQEHVQKAPSIIRPSTSYHSRRNGEDAAGVAAIGGTRSKADEWEKAKLAKVREEYEKMMETIAEWETEKKVKARRHKEQRETVLDRKRAKALEEYNQEMTRISKIAGGARSMAEERKYNDENKIKEKAHKIRSTRKPPRTCACF

SEQ ID NO: 14176 - DNA, 457 bp, Zea mays subsp. mays
  misc_feature (1)..(457): Ceres Seq. ID no. 3011619
  misc_feature: MA Experiment ID: 108529 Result: Up-regulated in Transcription
  misc_feature: MA Experiment 108529 PARAMETER Experiment Name: Zm_Imbibed_Seeds_P Parameter: Age (day) Value: 5 vs. 2
  misc_feature: MA Experiment 108529 PARAMETER Experiment Name: Zm_Imbibed_Seeds_P Parameter: Organism Value: Zea mays
  misc_feature: MA Experiment 108529 PARAMETER Experiment Name: Zm_Imbibed_Seeds_P Parameter: Plant Line Value: 35A19
  misc_feature: MA Experiment 108529 PARAMETER Experiment Name: Zm_Imbibed_Seeds_P Parameter: Tissue Value: Roots vs. Embryo
  misc_feature: MA Experiment ID: 20000632 Result: Up-regulated in Transcription
  misc_feature: MA Experiment 20000632 PARAMETER Experiment Name: Zm_Herbicide-Treatments_P Parameter: Timepoint (hr) Value: 4
  misc_feature: MA Experiment 20000632 PARAMETER Experiment Name: Zm_Herbicide-Treatments_P Parameter: Tissue Value: Aerial
  misc_feature: MA Experiment 20000632 PARAMETER Experiment Name: Zm_Herbicide-Treatments_P Parameter: Treatment Value: Glean vs. No Treatment
cacacctcctcaaccgccgcctccaagaccctagtaccgaaccccaacctcgtcccgctccggctcgtccgccacttcccggccatggccgccaccgccgcagacgagttcgtgaagggccgcgtcttccccaacggcgtcgccgtcatcacgctcgaccgacccaaggccctcaacgccatgaacctcgaaatggatgttagatacaaggcacttcttgatgaatgggaaacaaatccaagtgtcaagtgtattcttgtggaaagcagctcttctcgtgccttctcagcaggtattcacagtagagtactctttaatttgtaagatacatgagtatgcaaaaccttatatatgcttgatggatggagtgacaatgggatttggaattgggctatcagggcatggccgctaccgcattattacagagagaacactcctagccatgcctgaaaatggt

SEQ ID NO: 14177 - protein, 107 aa, Zea mays subsp. mays
  peptide (1)..(107): Ceres Seq. ID no. 3011620
  misc_feature (48)..(99): Pfam Name: Enoyl-CoA hydratase/isomerase family Pfam Description: Enoyl-CoA hydratase/isomerase family
  misc_feature (29)..(99): Homolog of NCBI NO: 15235689 NR Description: 3-hydroxyisobutyryl-coenzyme A hydrolase - like protein id: At4g13360.1, supported by cDNA: 101316., supported by gi_14190484, supported by cDNA: gi_16323265 [Arabidopsis
  misc_feature (22)..(98): Homolog of NCBI NO: 22977745 NR Description: hypothetical protein [Ralstonia metallidurans]
  misc_feature (24)..(99): Homolog of NCBI NO: 11994698 NR Description: 3-hydroxyisobutyryl-coenzyme A hydrolase-like
  misc_feature (31)..(99): Homolog of NCBI NO: 15230101 NR Description: 3-hydroxyisobutyryl-coenzyme A hydrolase,
  misc_feature (50)..(106): Homolog of NCBI NO: 23013936 NR Description: hypothetical protein [Magnetospirillum
  misc_feature (50)..(98): Homolog of NCBI NO: 23016278 NR Description: hypothetical protein [Magnetospirillum
  misc_feature (49)..(98): Homolog of NCBI NO: 31208011 NR Description: ENSANGP00000024573 [Anopheles gambiae]
  misc_feature (22)..(98): Homolog of NCBI NO: 22122625 NR Description: RIKEN cDNA 2610509I15 [Mus musculus]
  misc_feature (46)..(98): Homolog of NCBI NO: 22965338 NR Description: hypothetical protein [Rhodopseudomonas palustris]
  misc_feature (47)..(104): Homolog of NCBI NO: 22968519 NR Description: hypothetical protein [Rhodospirillum rubrum]
HTSSTAASKTLVPNPNLVPLRLVRHFPAMAATAADEFVKGRVFPNGVAVITLDRPKALNAMNLEMDVRYKALLDEWETNPSVKCILVESSSSRAFSAGIHSRVLFNL

SEQ ID NO: 14178 - protein, 87 aa, Zea mays subsp. mays
  peptide (1)..(87): Ceres Seq. ID no. 3011621
  misc_feature (31)..(86): Pfam Name: Enoyl-CoA hydratase/isomerase family Pfam Description: Enoyl-CoA hydratase/isomerase family
  misc_feature (34)..(86): Homolog of NCBI NO: 22968519 NR Description: hypothetical protein [Rhodospirillum rubrum]
  misc_feature (31)..(86): Homolog of NCBI NO: 15235689 NR Description: 3-hydroxyisobutyryl-coenzyme A hydrolase - like protein id: At4g13360.1, supported by cDNA: 101316., supported by gi_14190484, supported by cDNA: gi_16323265 [Arabidopsis
  misc_feature (32)..(85): Homolog of NCBI NO: 22977745 NR Description: hypothetical protein [Ralstonia metallidurans]
  misc_feature (16)..(86): Homolog of NCBI NO: 15230101 NR Description: 3-hydroxyisobutyryl-coenzyme A hydrolase,
  misc_feature (16)..(86): Homolog of NCBI NO: 11994698 NR Description: 3-hydroxyisobutyryl-coenzyme A hydrolase-like
  misc_feature (33)..(86): Homolog of NCBI NO: 23013936 NR Description: hypothetical protein [Magnetospirillum
  misc_feature (37)..(86): Homolog of NCBI NO: 23016278 NR Description: hypothetical protein [Magnetospirillum
  misc_feature (30)..(85): Homolog of NCBI NO: 31208011 NR Description: ENSANGP00000024573 [Anopheles gambiae]
  misc_feature (30)..(86): Homolog of NCBI NO: 22122625 NR Description: RIKEN cDNA 2610509I15 [Mus musculus]
  misc_feature (37)..(86): Homolog of NCBI NO: 22965338 NR Description: hypothetical protein [Rhodopseudomonas palustris]
MLDTRHFLMNGKQIQVSSVFLWKAALLVPSQQVFTVEYSLICKIHEYAKPYICLMDGVTMGFGIGLSGHGRYRIITERTLLAMPENG

SEQ ID NO: 14179 - protein, 79 aa, Zea mays subsp. mays
  peptide (1)..(79): Ceres Seq. ID no. 3011622
  misc_feature (20)..(71): Pfam Name: Enoyl-CoA hydratase/isomerase family Pfam Description: Enoyl-CoA hydratase/isomerase family
  misc_feature (1)..(71): Homolog of NCBI NO: 15235689 NR Description: 3-hydroxyisobutyryl-coenzyme A hydrolase - like protein id: At4g13360.1, supported by cDNA: 101316., supported by gi_14190484, supported by cDNA: gi_16323265 [Arabidopsis
  misc_feature (1)..(70): Homolog of NCBI NO: 22977745 NR Description: hypothetical protein [Ralstonia metallidurans]
  misc_feature (1)..(71): Homolog of NCBI NO: 11994698 NR Description: 3-hydroxyisobutyryl-coenzyme A hydrolase-like
  misc_feature (3)..(71): Homolog of NCBI NO: 15230101 NR Description: 3-hydroxyisobutyryl-coenzyme A hydrolase,
  misc_feature (22)..(78): Homolog of NCBI NO: 23013936 NR Description: hypothetical protein [Magnetospirillum
  misc_feature (22)..(70): Homolog of NCBI NO: 23016278 NR Description: hypothetical protein [Magnetospirillum
  misc_feature (21)..(70): Homolog of NCBI NO: 31208011 NR Description: ENSANGP00000024573 [Anopheles gambiae]
  misc_feature (1)..(70): Homolog of NCBI NO: 22122625 NR Description: RIKEN cDNA 2610509I15 [Mus musculus]
  misc_feature (18)..(70): Homolog of NCBI NO: 22965338 NR Description: hypothetical protein [Rhodopseudomonas palustris]
  misc_feature (19)..(76): Homolog of NCBI NO: 22968519 NR Description: hypothetical protein [Rhodospirillum rubrum]
MAATAADEFVKGRVFPNGVAVITLDRPKALNAMNLEMDVRYKALLDEWETNPSVKCILVESSSSRAFSAGIHSRVLFNL

SEQ ID NO: 14180 - DNA, 2187 bp, Zea mays subsp. mays
  misc_feature (1)..(2187): Ceres Seq. ID no. 13666028
  misc_feature: MA Experiment ID: 108527 Result: Up-regulated in Transcription
  misc_feature: MA Experiment 108527 PARAMETER Experiment Name: Zm_5mM_NO_P Parameter: Age (day) Value: 8
  misc_feature: MA Experiment 108527 PARAMETER Experiment Name: Zm_5mM_NO_P Parameter: Organism Value: Zea mays
  misc_feature: MA Experiment 108527 PARAMETER Experiment Name: Zm_5mM_NO_P Parameter: Plant Line Value: 35A19
  misc_feature: MA Experiment 108527 PARAMETER Experiment Name: Zm_5mM_NO_P Parameter: Timepoint (hr) Value: 6
  misc_feature: MA Experiment 108527 PARAMETER Experiment Name: Zm_5mM_NO_P Parameter: Tissue Value: Aerial
  misc_feature: MA Experiment 108527 PARAMETER Experiment Name: Zm_5mM_NO_P Parameter: Treatment Value: 5mM NO vs. No Treatment
  misc_feature: MA Experiment ID: 108528 Result: Down-regulated in Transcription
  misc_feature: MA Experiment 108528 PARAMETER Experiment Name: Zm_Imbibed_Seeds_P Parameter: Age (day) Value: 5 vs. 2
  misc_feature: MA Experiment 108528 PARAMETER Experiment Name: Zm_Imbibed_Seeds_P Parameter: Organism Value: Zea mays
  misc_feature: MA Experiment 108528 PARAMETER Experiment Name: Zm_Imbibed_Seeds_P Parameter: Plant Line Value: 35A19
  misc_feature: MA Experiment 108528 PARAMETER Experiment Name: Zm_Imbibed_Seeds_P Parameter: Tissue Value: Aerial vs. Embryo
  misc_feature: MA Experiment ID: 108530 Result: Down-regulated in Transcription
  misc_feature: MA Experiment 108530 PARAMETER Experiment Name: Zm_Imbibed_Seeds_P Parameter: Age (day) Value: 6 vs. 2
  misc_feature: MA Experiment 108530 PARAMETER Experiment Name: Zm_Imbibed_Seeds_P Parameter: Organism Value: Zea mays
  misc_feature: MA Experiment 108530 PARAMETER Experiment Name: Zm_Imbibed_Seeds_P Parameter: Plant Line Value: 35A19
  misc_feature: MA Experiment 108530 PARAMETER Experiment Name: Zm_Imbibed_Seeds_P Parameter: Tissue Value: Aerial vs. Embryo
  misc_feature: MA Experiment ID: 108536 Result: Up-regulated in Transcription
  misc_feature: MA Experiment 108536 PARAMETER Experiment Name: Zm_Meristem_P Parameter: Age (day) Value: 8
  misc_feature: MA Experiment 108536 PARAMETER Experiment Name: Zm_Meristem_P Parameter: Organism Value: Zea mays
  misc_feature: MA Experiment 108536 PARAMETER Experiment Name: Zm_Meristem_P Parameter: Plant Line Value: 35A19
  misc_feature: MA Experiment 108536 PARAMETER Experiment Name: Zm_Meristem_P Parameter: Tissue Value: Shoot Meristem vs. Above Shoot Meristem
  misc_feature: MA Experiment ID: 108545 Result: Down-regulated in Transcription
  misc_feature: MA Experiment 108545 PARAMETER Experiment Name: Zm_Imbibed_Seeds_P Parameter: Age (day) Value: 3 vs. 2
  misc_feature: MA Experiment 108545 PARAMETER Experiment Name: Zm_Imbibed_Seeds_P Parameter: Organism Value: Zea mays
  misc_feature: MA Experiment 108545 PARAMETER Experiment Name: Zm_Imbibed_Seeds_P Parameter: Plant Line Value: 35A19
  misc_feature: MA Experiment 108545 PARAMETER Experiment Name: Zm_Imbibed_Seeds_P Parameter: Tissue Value: Aerial vs. Embryo
  misc_feature: MA Experiment ID: 108547 Result: Down-regulated in Transcription
  misc_feature: MA Experiment 108547 PARAMETER Experiment Name: Zm_Imbibed_Seeds_P Parameter: Age (day) Value: 4 vs. 2
  misc_feature: MA Experiment 108547 PARAMETER Experiment Name: Zm_Imbibed_Seeds_P Parameter: Organism Value: Zea mays
  misc_feature: MA Experiment 108547 PARAMETER Experiment Name: Zm_Imbibed_Seeds_P Parameter: Plant Line Value: 35A19
  misc_feature: MA Experiment 108547 PARAMETER Experiment Name: Zm_Imbibed_Seeds_P Parameter: Tissue Value: Aerial vs. Embryo
  misc_feature: MA Experiment ID: 108559 Result: Up-regulated in Transcription
  misc_feature: MA Experiment 108559 PARAMETER Experiment Name: Zm_5mM_NO_P Parameter: Age (day) Value: 8
  misc_feature: MA Experiment 108559 PARAMETER Experiment Name: Zm_5mM_NO_P Parameter: Organism Value: Zea mays
  misc_feature: MA Experiment 108559 PARAMETER Experiment Name: Zm_5mM_NO_P Parameter: Plant Line Value: 35A19
  misc_feature: MA Experiment 108559 PARAMETER Experiment Name: Zm_5mM_NO_P Parameter: Timepoint (hr) Value: 12
  misc_feature: MA Experiment 108559 PARAMETER Experiment Name: Zm_5mM_NO_P Parameter: Tissue Value: Aerial
  misc_feature: MA Experiment 108559 PARAMETER Experiment Name: Zm_5mM_NO_P Parameter: Treatment Value: 5mM NO vs. No Treatment
  misc_feature: MA Experiment ID: 20000478 Result: Down-regulated in Transcription
  misc_feature: MA Experiment 20000478 PARAMETER Experiment Name: Zm_5mM_SA_P Parameter: Age (day) Value: 11
  misc_feature: MA Experiment 20000478 PARAMETER Experiment Name: Zm_5mM_SA_P Parameter: Organism Value: Zea mays
  misc_feature: MA Experiment 20000478 PARAMETER Experiment Name: Zm_5mM_SA_P Parameter: Plant Line Value: 35A19
  misc_feature: MA Experiment 20000478 PARAMETER Experiment Name: Zm_5mM_SA_P Parameter: Timepoint (hr) Value: 72
  misc_feature: MA Experiment 20000478 PARAMETER Experiment Name: Zm_5mM_SA_P Parameter: Tissue Value: Aerial
  misc_feature: MA Experiment 20000478 PARAMETER Experiment Name: Zm_5mM_SA_P Parameter: Treatment Value: 5mM SA vs. No Treatment
  misc_feature: MA Experiment ID: 20000533 Result: Up-regulated in Transcription
  misc_feature: MA Experiment 20000533 PARAMETER Experiment Name: Zm_0.001percent_MeJA_P Parameter: Age (day) Value: 11
  misc_feature: MA Experiment 20000533 PARAMETER Experiment Name: Zm_0.001percent_MeJA_P Parameter: Organism Value: Zea mays
  misc_feature: MA Experiment 20000533 PARAMETER Experiment Name: Zm_0.001percent_MeJA_P Parameter: Plant Line Value: 35A19
  misc_feature: MA Experiment 20000533 PARAMETER Experiment Name: Zm_0.001percent_MeJA_P Parameter: Timepoint (hr) Value: 72
  misc_feature: MA Experiment 20000533 PARAMETER Experiment Name: Zm_0.001percent_MeJA_P Parameter: Tissue Value: Aerial
  misc_feature: MA Experiment 20000533 PARAMETER Experiment Name: Zm_0.001percent_MeJA_P Parameter: Treatment Value: 0.001percent MeJA vs. No Treatment
  misc_feature: MA Experiment ID: 20000626 Result: Up-regulated in Transcription
  misc_feature: MA Experiment 20000626 PARAMETER Experiment Name: Zm_Herbicide-Treatments_P Parameter: Timepoint (hr) Value: 12
  misc_feature: MA Experiment 20000626 PARAMETER Experiment Name: Zm_Herbicide-Treatments_P Parameter: Tissue Value: Aerial
  misc_feature: MA Experiment 20000626 PARAMETER Experiment Name: Zm_Herbicide-Treatments_P Parameter: Treatment Value: Roundup vs. No Treatment
  misc_feature: MA Experiment ID: 20000627 Result: Up-regulated in Transcription
  misc_feature: MA Experiment 20000627 PARAMETER Experiment Name: Zm_Herbicide-Treatments_P Parameter: Timepoint (hr) Value: 12
  misc_feature: MA Experiment 20000627 PARAMETER Experiment Name: Zm_Herbicide-Treatments_P Parameter: Tissue Value: Aerial
  misc_feature: MA Experiment 20000627 PARAMETER Experiment Name: Zm_Herbicide-Treatments_P Parameter: Treatment Value: Finale vs. No Treatment
  misc_feature: MA Experiment ID: 20000629 Result: Up-regulated in Transcription
  misc_feature: MA Experiment 20000629 PARAMETER Experiment Name: Zm_Herbicide-Treatments_P Parameter: Timepoint (hr) Value: 12
  misc_feature: MA Experiment 20000629 PARAMETER Experiment Name: Zm_Herbicide-Treatments_P Parameter: Tissue Value: Aerial
  misc_feature: MA Experiment 20000629 PARAMETER Experiment Name: Zm_Herbicide-Treatments_P Parameter: Treatment Value: Trimec vs. No Treatment
accgaaccaaacaacacacgtcaaagcggaaaacctcagaaaaccacaataaatcatcctcgtccaccactgcccccgctctgctgcaactccactcggcccggccgctctttccacccaccttgatcctctgatccgttggtgcttgaccgatccatggacacccacatcggatccgtgaacggggcggcgtcgaaccagacggttggctgcccggcgtcggcgccggggtgcccgatggcgtccacgccggcgcagcccgcggcgaccctgtcggcgggggaggcgtcgctggggcgccacctcgcgcgtcgcctcgtgcaggtcggcgtcaacgatgtattcgcggttccgggggacttcaacctcacgctgctcgaccacctgatcgccgagcccggcctgcgcctcgtcggctgctgcaacgagctcaacgccgggtacgccgccgacgggtacgcgcgcgcgcgcggcgtcggggcctgcgccgtcacgttcacagtcggggggctcagcgtgctcaacgccatcgcgggcgcctacagcgagaacctgcccgtcatctgcatcgccggcgggcccaactccaacgactacgggaccaaccgcatcctccaccacaccatcggcctccccgacttctcgcaggagctccgctgcttccagaccgtcacctgccatcaggcggtggtgaacaatctggatgacgcgcacgagcagatcgacacggccattgccacggcactgagggagagcaagcccgtgtacctcagcatcagctgcaacctccctgggctgcctcatcctaccttcagccgcgacccagtgcccttcttcctcacccccaggacgagcaacaagatggggctagaggctgcagtggaggcaactgtcgaattcctgaacaaggcggtgaagccagtccttgtcgccggccccaaactgcgtgtggcaaaggcaggaaaggcatttgtcgatatggtagatgccagtggctatgcctatgccgtgatgccatcggccaagggtcttgtgccagagactcacccccacttcatcggcacctactggggcgccgtcagcaccgccttctgtgcggagattgttgagtccgcagatgcctacctctttgcaggccccattttcaatgactacagctctgttggctactcattcctcctcaagaaggaaaaggccatcatcgtccagcctgagcgtgtgatagtggggaatgggccggcattcggatgtgtgatgatgaaagagttcttgtctgaattggctaagagggttaataagaacaccactgcctatgagaattacaagaggatctttgtacctgagggccagccgctggaaagcgagccaaatgagccactgcgagtgaatgtgctcttcaagcacgtccagaagatgttgactggtgatagtgcggtgattgctgagactggtgactcctggttcaactgccagaagcttaagctgccagaaggctgtgggtatgaattccaaatgcagtatggttcgattggatggtcagtgggtgcattgctcggatatgctcagggtgcgaaccacaagcgtgtgattgccttcattggtgatgggagcttccaggttacagcacaggatgtgtcaactatgctgcgatgtgagcagaacagcataatcttcctgatcaacaacggtgggtacacgattgaggtggaaatccatgacgggccatacaacgtcatcaagaactggaactacactggctttgtggacgccatccacaatggcttgggcaagtgctggacctccaaggtgaagagcgaggaggacctgacggctgccattgagacagcgctaggggagaagaaggactgcctgtgcttcatcgaggtgatcgcgcacaaggacgacaccagcaaagagctgctggaatggggctctagggtttctgccgccaactcccgaccaccaaatcctcagtagaagtccgcaggctccaagcctcggagtgtcattagtgatagtaagctgtagcacggtgggggctcaaccgaataacctgaacgcattgccctttctgttacgtgttttattttattgtgtttctgtggtcgtatatctgttttgtgacgtgttccctgcttctcccatgtgaattccagaagaactatgagaaaattcaggttggttgtc

SEQ ID NO: 14181 - protein, 606 aa, Zea mays subsp. mays
  peptide (1)..(606): Ceres Seq. ID no. 13666029
  misc_feature (1)..(606): Homolog of NCBI NO: 1706328 NR Description: Pyruvate decarboxylase isozyme 2 (PDC)
  misc_feature (1)..(606): Homolog of NCBI NO: 29373077 NR Description: pyruvate decarboxylase 1 [Lotus corniculatus]
  misc_feature (33)..(606): Homolog of NCBI NO: 10732644 NR Description: pyruvate decarboxylase 1 [Vitis vinifera]
  misc_feature (20)..(606): Homolog of NCBI NO: 24745919 NR Description: pyruvate decarboxylase [Solanum tuberosum]
  misc_feature (1)..(606): Homolog of NCBI NO: 10121330 NR Description: pyruvate decarboxylase [Fragaria x ananassa]
  misc_feature (1)..(606): Homolog of NCBI NO: 17225598 NR Description: pyruvate decarboxylase [Fragaria x ananassa]
  misc_feature (9)..(606): Homolog of NCBI NO: 3970823 NR Description: pyruvate decarboxylase [Zea mays]
  misc_feature (9)..(606): Homolog of NCBI NO: 118390 NR Description: Pyruvate decarboxylase isozyme 1 (PDC)
  misc_feature (45)..(569): Homolog of NCBI NO: 11268382 NR Description: probable pyruvate decarboxylase (EC 4.1.1.1) - yeast (Schizosaccharomyces pombe) >gi|1749736|dbj|BAA13925.1|
  misc_feature (43)..(532): Homolog of NCBI NO: 2501327 NR Description: Pyruvate decarboxylase >gi|2131152|pir||S70684
MDTHIGSVNGAASNQTVGCPASAPGCPMASTPAQPAATLSAGEASLGRHLARRLVQVGVNDVFAVPGDFNLTLLDHLIAEPGLRLVGCCNELNAGYAADGYARARGVGACAVTFTVGGLSVLNAIAGAYSENLPVICIAGGPNSNDYGTNRILHHTIGLPDFSQELRCFQTVTCHQAVVNNLDDAHEQIDTAIATALRESKPVYLSISCNLPGLPHPTFSRDPVPFFLTPRTSNKMGLEAAVEATVEFLNKAVKPVLVAGPKLRVAKAGKAFVDMVDASGYAYAVMPSAKGLVPETHPHFIGTYWGAVSTAFCAEIVESADAYLFAGPIFNDYSSVGYSFLLKKEKAIIVQPERVIVGNGPAFGCVMMKEFLSELAKRVNKNTTAYENYKRIFVPEGQPLESEPNEPLRVNVLFKHVQKMLTGDSAVIAETGDSWFNCQKLKLPEGCGYEFQMQYGSIGWSVGALLGYAQGANHKRVIAFIGDGSFQVTAQDVSTMLRCEQNSIIFLINNGGYTIEVEIHDGPYNVIKNWNYTGFVDAIHNGLGKCWTSKVKSEEDLTAAIETALGEKKDCLCFIEVIAHKDDTSKELLEWGSRVSAANSRPPNPQ

SEQ ID NO: 14182 - protein, 579 aa, Zea mays subsp. mays
  peptide (1)..(579): Ceres Seq. ID no. 13666030
  misc_feature (1)..(579): Homolog of NCBI NO: 1706328 NR Description: Pyruvate decarboxylase isozyme 2 (PDC)
  misc_feature (1)..(579): Homolog of NCBI NO: 29373077 NR Description: pyruvate decarboxylase 1 [Lotus corniculatus]
  misc_feature (6)..(579): Homolog of NCBI NO: 10732644 NR Description: pyruvate decarboxylase 1 [Vitis vinifera]
  misc_feature (1)..(579): Homolog of NCBI NO: 24745919 NR Description: pyruvate decarboxylase [Solanum tuberosum]
  misc_feature (1)..(579): Homolog of NCBI NO: 10121330 NR Description: pyruvate decarboxylase [Fragaria x ananassa]
  misc_feature (1)..(579): Homolog of NCBI NO: 17225598 NR Description: pyruvate decarboxylase [Fragaria x ananassa]
  misc_feature (1)..(579): Homolog of NCBI NO: 3970823 NR Description: pyruvate decarboxylase [Zea mays]
  misc_feature (1)..(579): Homolog of NCBI NO: 118390 NR Description: Pyruvate decarboxylase isozyme 1 (PDC)
  misc_feature (18)..(542): Homolog of NCBI NO: 11268382 NR Description: probable pyruvate decarboxylase (EC 4.1.1.1) - yeast (Schizosaccharomyces pombe) >gi|1749736|dbj|BAA13925.1|
  misc_feature (16)..(505): Homolog of NCBI NO: 2501327 NR Description: Pyruvate decarboxylase >gi|2131152|pir||S70684
MASTPAQPAATLSAGEASLGRHLARRLVQVGVNDVFAVPGDFNLTLLDHLIAEPGLRLVGCCNELNAGYAADGYARARGVGACAVTFTVGGLSVLNAIAGAYSENLPVICIAGGPNSNDYGTNRILHHTIGLPDFSQELRCFQTVTCHQAVVNNLDDAHEQIDTAIATALRESKPVYLSISCNLPGLPHPTFSRDPVPFFLTPRTSNKMGLEAAVEATVEFLNKAVKPVLVAGPKLRVAKAGKAFVDMVDASGYAYAVMPSAKGLVPETHPHFIGTYWGAVSTAFCAEIVESADAYLFAGPIFNDYSSVGYSFLLKKEKAIIVQPERVIVGNGPAFGCVMMKEFLSELAKRVNKNTTAYENYKRIFVPEGQPLESEPNEPLRVNVLFKHVQKMLTGDSAVIAETGDSWFNCQKLKLPEGCGYEFQMQYGSIGWSVGALLGYAQGANHKRVIAFIGDGSFQVTAQDVSTMLRCEQNSIIFLINNGGYTIEVEIHDGPYNVIKNWNYTGFVDAIHNGLGKCWTSKVKSEEDLTAAIETALGEKKDCLCFIEVIAHKDDTSKELLEWGSRVSAANSRPPNPQ

SEQ ID NO: 14183 - protein, 371 aa, Zea mays subsp. mays
  peptide (1)..(371): Ceres Seq. ID no. 13666031
  misc_feature (1)..(371): Homolog of NCBI NO: 1706328 NR Description: Pyruvate decarboxylase isozyme 2 (PDC)
  misc_feature (1)..(371): Homolog of NCBI NO: 29373077 NR Description: pyruvate decarboxylase 1 [Lotus corniculatus]
  misc_feature (1)..(371): Homolog of NCBI NO: 10732644 NR Description: pyruvate decarboxylase 1 [Vitis vinifera]
  misc_feature (1)..(371): Homolog of NCBI NO: 24745919 NR Description: pyruvate decarboxylase [Solanum tuberosum]
  misc_feature (1)..(371): Homolog of NCBI NO: 10121330 NR Description: pyruvate decarboxylase [Fragaria x ananassa]
  misc_feature (1)..(371): Homolog of NCBI NO: 17225598 NR Description: pyruvate decarboxylase [Fragaria x ananassa]
  misc_feature (1)..(371): Homolog of NCBI NO: 3970823 NR Description: pyruvate decarboxylase [Zea mays]
  misc_feature (1)..(371): Homolog of NCBI NO: 118390 NR Description: Pyruvate decarboxylase isozyme 1 (PDC)
  misc_feature (1)..(334): Homolog of NCBI NO: 11268382 NR Description: probable pyruvate decarboxylase (EC 4.1.1.1) - yeast (Schizosaccharomyces pombe) >gi|1749736|dbj|BAA13925.1|
  misc_feature (1)..(297): Homolog of NCBI NO: 2501327 NR Description: Pyruvate decarboxylase >gi|2131152|pir||S70684
MGLEAAVEATVEFLNKAVKPVLVAGPKLRVAKAGKAFVDMVDASGYAYAVMPSAKGLVPETHPHFIGTYWGAVSTAFCAEIVESADAYLFAGPIFNDYSSVGYSFLLKKEKAIIVQPERVIVGNGPAFGCVMMKEFLSELAKRVNKNTTAYENYKRIFVPEGQPLESEPNEPLRVNVLFKHVQKMLTGDSAVIAETGDSWFNCQKLKLPEGCGYEFQMQYGSIGWSVGALLGYAQGANHKRVIAFIGDGSFQVTAQDVSTMLRCEQNSIIFLINNGGYTIEVEIHDGPYNVIKNWNYTGFVDAIHNGLGKCWTSKVKSEEDLTAAIETALGEKKDCLCFIEVIAHKDDTSKELLEWGSRVSAANSRPPNPQ

SEQ ID NO: 14184 - DNA, 2591 bp, Zea mays subsp. mays
  misc_feature (1)..(2591): Ceres Seq. ID no. 12435670
  misc_feature: MA Experiment ID: 108556 Result: Down-regulated in Transcription
  misc_feature: MA Experiment 108556 PARAMETER Experiment Name: Zm_Drought_P Parameter: Age (day) Value: 9
  misc_feature: MA Experiment 108556 PARAMETER Experiment Name: Zm_Drought_P Parameter: Organism Value: Zea mays
  misc_feature: MA Experiment 108556 PARAMETER Experiment Name: Zm_Drought_P Parameter: Plant Line Value: 35A19
  misc_feature: MA Experiment 108556 PARAMETER Experiment Name: Zm_Drought_P Parameter: Timepoint (hr) Value: 24
  misc_feature: MA Experiment 108556 PARAMETER Experiment Name: Zm_Drought_P Parameter: Tissue Value: Aerial
  misc_feature: MA Experiment 108556 PARAMETER Experiment Name: Zm_Drought_P Parameter: Treatment Value: Drought vs. No Drought
  misc_feature: MA Experiment ID: 20000477 Result: Down-regulated in Transcription
  misc_feature: MA Experiment 20000477 PARAMETER Experiment Name: Zm_5mM_SA_P Parameter: Age (day) Value: 10
  misc_feature: MA Experiment 20000477 PARAMETER Experiment Name: Zm_5mM_SA_P Parameter: Organism Value: Zea mays
  misc_feature: MA Experiment 20000477 PARAMETER Experiment Name: Zm_5mM_SA_P Parameter: Plant Line Value: 35A19
  misc_feature: MA Experiment 20000477 PARAMETER Experiment Name: Zm_5mM_SA_P Parameter: Timepoint (hr) Value: 48
  misc_feature: MA Experiment 20000477 PARAMETER Experiment Name: Zm_5mM_SA_P Parameter: Tissue Value: Aerial
  misc_feature: MA Experiment 20000477 PARAMETER Experiment Name: Zm_5mM_SA_P Parameter: Treatment Value: 5mM SA vs. No Treatment
  misc_feature: MA Experiment ID: 20000478 Result: Down-regulated in Transcription
  misc_feature: MA Experiment 20000478 PARAMETER Experiment Name: Zm_5mM_SA_P Parameter: Age (day) Value: 11
  misc_feature: MA Experiment 20000478 PARAMETER Experiment Name: Zm_5mM_SA_P Parameter: Organism Value: Zea mays
  misc_feature: MA Experiment 20000478 PARAMETER Experiment Name: Zm_5mM_SA_P Parameter: Plant Line Value: 35A19
  misc_feature: MA Experiment 20000478 PARAMETER Experiment Name: Zm_5mM_SA_P Parameter: Timepoint (hr) Value: 72
  misc_feature: MA Experiment 20000478 PARAMETER Experiment Name: Zm_5mM_SA_P Parameter: Tissue Value: Aerial
  misc_feature: MA Experiment 20000478 PARAMETER Experiment Name: Zm_5mM_SA_P Parameter: Treatment Value: 5mM SA vs. No Treatment
  misc_feature: MA Experiment ID: 20000479 Result: Down-regulated in Transcription
  misc_feature: MA Experiment 20000479 PARAMETER Experiment Name: Zm_Drought_P Parameter: Age (day) Value: 10
  misc_feature: MA Experiment 20000479 PARAMETER Experiment Name: Zm_Drought_P Parameter: Organism Value: Zea mays
  misc_feature: MA Experiment 20000479 PARAMETER Experiment Name: Zm_Drought_P Parameter: Plant Line Value: 35A19
  misc_feature: MA Experiment 20000479 PARAMETER Experiment Name: Zm_Drought_P Parameter: Timepoint (hr) Value: 48
  misc_feature: MA Experiment 20000479 PARAMETER Experiment Name: Zm_Drought_P Parameter: Tissue Value: Aerial
  misc_feature: MA Experiment 20000479 PARAMETER Experiment Name: Zm_Drought_P Parameter: Treatment Value: Drought vs. No Drought
  misc_feature: MA Experiment ID: 20000480 Result: Down-regulated in Transcription
  misc_feature: MA Experiment 20000480 PARAMETER Experiment Name: Zm_Drought_P Parameter: Age (day) Value: 11
  misc_feature: MA Experiment 20000480 PARAMETER Experiment Name: Zm_Drought_P Parameter: Organism Value: Zea mays
  misc_feature: MA Experiment 20000480 PARAMETER Experiment Name: Zm_Drought_P Parameter: Plant Line Value: 35A19
  misc_feature: MA Experiment 20000480 PARAMETER Experiment Name: Zm_Drought_P Parameter: Timepoint (hr) Value: 72
  misc_feature: MA Experiment 20000480 PARAMETER Experiment Name: Zm_Drought_P Parameter: Tissue Value: Aerial
  misc_feature: MA Experiment 20000480 PARAMETER Experiment Name: Zm_Drought_P Parameter: Treatment Value: Drought vs. No Drought
atcacaacaaaaggcgcaagcaccgcacggagagcaagcaagaaagcatccactgcactgccactacctaacaatggcccgcgcctacgtgtttctcgtcgtgctcctcctggccgctgtcatcgtggcaccgttcgcgggagcgacgcgtgtcgacgtcgttgagggcaggtccatggcgtccgccgacgcgccggaggccgccgcaccatcacccgggcctgactctgcctcgtcaccggactcctcgtcggaagcgccctccagcagcagctcctcggactagatagctctagccgcaggtcaggcatatatcaactgggcagcaaagatggcagtgggactggacactggtgtgccgtgggtgatgtgcaaggaggaggatgcacctgatccagtgatcaatgcgtgtaatggtttctactgtgatgcattttctcctaacaaaccttacaagcccacaatgtggactgaagcttggagtggctggttcacagaatttggtgggaccatccgccaacgaccggttgaagatctcgcatttgctgttgctcgatttgtacaaaagggtggctcttttatcaattactacatgtatcatggaggaacaaattttggacgcactgctgggggtcccttcatcacaacaagctatgattatgatgctccaattgatgaatatggacttattagagaaccaaagcacagtcatcttaaagaactccacagagctgttaagttatgtgaacaggctttggtttctgttgaccccacaattactacccttggaactatgcaagaggcccatgtcttccgatctccatctggttgtgcagctttccttgcaaactacaattctaactcccatgcaaaagttgtgttcaacaatgagcaatacagcctcccaccttggtcaattagcatccttcctgattgcaagaatgtagtttttaacagtgccacagttggtgttcagacatctcagatgcaaatgtggggagatggtgccacatcgatgatgtgggagaggtacgatgaggaggttgattctctggcagctgctccattgctcaccacaactggtttgcttgagcagcttaacgtcaccagagacagcagtgattatctgtggtacattaccagtgttgacataagcccatctgaaaactttctacaaggtggtggcaagcctccgtctctgagtgttcagtctgctggtcacgccttgcatgtctttgtcaacggacaacttcaaggttcttcgtatggtaccagggaggatcgaagaattaaatataatggcaatgttaaccttcgagctggtactaacaaaatcgcactactgagtgttgcttgcggattgccgaatgttggagtgcattatgagacgtggaacaccggcgtcggtggtcctgtcgtgcttcatggattgaatgaaggttcgcgagaccttacttggcagacctggtcctatcaggttggcctgaaaggcgagcagatgaatctgaactccgtagaaggctcaggctcagttgaatggatgcaagggtcactgatagctcagaagcaacagccgttggcctggtaaggcttacttcgagactcccagcggggacgagccattggctttggatatgggcagcatgggcaagggacaggtctggataaacggacaaagcattggacgctactggacagcgtatgcagacggggactgcaaagggtgcagctacaccgggaccttccgggcacccaagtgccaagcaggctgcggccagcccacccagcgttggtaccatgtgccaaggtcctggctgcagcccagcagaaacctactggtagtcttggaggaactgggtggtggggactcgtcgaagatcgccctagccaagaggtcggtctcgagcgtctgtgccgacgtgtccgaggaccatccgaacatcaagaagtggcagatcgagagctacggcgagcgcgagcaccgcagggccaaggtgcacctgaggtgcgcgcacgggcagtccatctccgcgatcagattcgcgagcttcgggacgcctgtgggcacctgcggcaacttccagcagggaggctgccactcggctagctctcacgctgtgctagagaagagatgcattgggctctagagatgcgtcgtcgccatctcccccgacaacttcggaggagacccctgcccgagcgtgacgaagagggtggcggtcgaggcggtgtgctctcccgccgcttaggcttagcctgcccgcccgcccctacttctccgactcaccgagcaacggatttgaaggccgaaaccgatgtgtgtggagagtggaactgtaagtatcgacttgcattggtcggagggaggtttagcattcgtccgtctgattccggtttaggattggtgctctgctacgtctccatgaactgttcaaagcggccagctgggtccagggatggagctgtagagagagtaggagtagaagactgatcatgcgttcttttgctgttgtgtgttagtagtagctgtgtacctacccgtgacacatctcgtttttcttgaaacggaggaagacgcaggtgaagcgtgc

SEQ ID NO: 14185 - protein, 418 aa, Zea mays subsp. mays
  peptide (1)..(418): Ceres Seq. ID no. 12435671
  misc_feature (1)..(418): Pfam Name: Glycosyl hydrolases family 35 Pfam Description: Glycosyl hydrolases family 35
  misc_feature (1)..(418): Homolog of NCBI NO: 15081596 NR Description: putative beta-galactosidase BG1 [Vitis vinifera]
  misc_feature (1)..(418): Homolog of NCBI NO: 18419821 NR Description: glycosyl hydrolase family 35 protein id: At4g36360.1, supported by cDNA: gi_15810492,
  misc_feature (1)..(418): Homolog of NCBI NO: 25326166 NR Description: beta-galactosidase like protein [imported] -
  misc_feature (1)..(418): Homolog of NCBI NO: 7939625 NR Description: putative beta-galactosidase [Lycopersicon
  misc_feature (1)..(418): Homolog of NCBI NO: 30690633 NR Description: glycosyl hydrolase family 35 (beta-galactosidase)
  misc_feature (1)..(418): Homolog of NCBI NO: 7488063 NR Description: probable beta-galactosidase (EC 3.2.1.23)
  misc_feature (1)..(418): Homolog of NCBI NO: 14970839 NR Description: beta-galactosidase [Fragaria x ananassa]
  misc_feature (1)..(418): Homolog of NCBI NO: 3204134 NR Description: beta-galactosidase [Cicer arietinum]
  misc_feature (1)..(418): Homolog of NCBI NO: 4138137 NR Description: ss-galactosidase [Lycopersicon esculentum]
  misc_feature (1)..(418): Homolog of NCBI NO: 15231354 NR Description: glycosyl hydrolase family 35 protein id: At3g13750.1, supported by cDNA: gi_20260595
MAVGLDTGVPWVMCKEEDAPDPVINACNGFYCDAFSPNKPYKPTMWTEAWSGWFTEFGGTIRQRPVEDLAFAVARFVQKGGSFINYYMYHGGTNFGRTAGGPFITTSYDYDAPIDEYGLIREPKHSHLKELHRAVKLCEQALVSVDPTITTLGTMQEAHVFRSPSGCAAFLANYNSNSHAKVVFNNEQYSLPPWSISILPDCKNVVFNSATVGVQTSQMQMWGDGATSMMWERYDEEVDSLAAAPLLTTTGLLEQLNVTRDSSDYLWYITSVDISPSENFLQGGGKPPSLSVQSAGHALHVFVNGQLQGSSYGTREDRRIKYNGNVNLRAGTNKIALLSVACGLPNVGVHYETWNTGVGGPVVLHGLNEGSRDLTWQTWSYQVGLKGEQMNLNSVEGSGSVEWMQGSLIAQKQQPLAW

SEQ ID NO: 14186 - protein, 406 aa, Zea mays subsp. mays
  peptide (1)..(406): Ceres Seq. ID no. 12435672
  misc_feature (1)..(406): Pfam Name: Glycosyl hydrolases family 35 Pfam Description: Glycosyl hydrolases family 35
  misc_feature (1)..(406): Homolog of NCBI NO: 15081596 NR Description: putative beta-galactosidase BG1 [Vitis vinifera]
  misc_feature (1)..(406): Homolog of NCBI NO: 18419821 NR Description: glycosyl hydrolase family 35 protein id: At4g36360.1, supported by cDNA: gi_15810492,
  misc_feature (1)..(406): Homolog of NCBI NO: 25326166 NR Description: beta-galactosidase like protein [imported] -
  misc_feature (1)..(406): Homolog of NCBI NO: 7939625 NR Description: putative beta-galactosidase [Lycopersicon
  misc_feature (1)..(406): Homolog of NCBI NO: 30690633 NR Description: glycosyl hydrolase family 35 (beta-galactosidase)
  misc_feature (1)..(406): Homolog of NCBI NO: 7488063 NR Description: probable beta-galactosidase (EC 3.2.1.23)
  misc_feature (1)..(406): Homolog of NCBI NO: 14970839 NR Description: beta-galactosidase [Fragaria x ananassa]
  misc_feature (1)..(406): Homolog of NCBI NO: 3204134 NR Description: beta-galactosidase [Cicer arietinum]
  misc_feature (1)..(406): Homolog of NCBI NO: 4138137 NR Description: ss-galactosidase [Lycopersicon esculentum]
  misc_feature (1)..(406): Homolog of NCBI NO: 15231354 NR Description: glycosyl hydrolase family 35 protein id: At3g13750.1, supported by cDNA: gi_20260595
MCKEEDAPDPVINACNGFYCDAFSPNKPYKPTMWTEAWSGWFTEFGGTIRQRPVEDLAFAVARFVQKGGSFINYYMYHGGTNFGRTAGGPFITTSYDYDAPIDEYGLIREPKHSHLKELHRAVKLCEQALVSVDPTITTLGTMQEAHVFRSPSGCAAFLANYNSNSHAKVVFNNEQYSLPPWSISILPDCKNVVFNSATVGVQTSQMQMWGDGATSMMWERYDEEVDSLAAAPLLTTTGLLEQLNVTRDSSDYLWYITSVDISPSENFLQGGGKPPSLSVQSAGHALHVFVNGQLQGSSYGTREDRRIKYNGNVNLRAGTNKIALLSVACGLPNVGVHYETWNTGVGGPVVLHGLNEGSRDLTWQTWSYQVGLKGEQMNLNSVEGSGSVEWMQGSLIAQKQQPLAW

SEQ ID NO: 14187 - protein, 374 aa, Zea mays subsp. mays
  peptide (1)..(374): Ceres Seq. ID no. 12435673
  misc_feature (1)..(374): Pfam Name: Glycosyl hydrolases family 35 Pfam Description: Glycosyl hydrolases family 35
  misc_feature (1)..(374): Homolog of NCBI NO: 15081596 NR Description: putative beta-galactosidase BG1 [Vitis vinifera]
  misc_feature (1)..(374): Homolog of NCBI NO: 18419821 NR Description: glycosyl hydrolase family 35 protein id: At4g36360.1, supported by cDNA: gi_15810492,
  misc_feature (1)..(374): Homolog of NCBI NO: 25326166 NR Description: beta-galactosidase like protein [imported] -
  misc_feature (1)..(374): Homolog of NCBI NO: 7939625 NR Description: putative beta-galactosidase [Lycopersicon
  misc_feature (1)..(374): Homolog of NCBI NO: 30690633 NR Description: glycosyl hydrolase family 35 (beta-galactosidase)
  misc_feature (1)..(374): Homolog of NCBI NO: 7488063 NR Description: probable beta-galactosidase (EC 3.2.1.23)
  misc_feature (1)..(374): Homolog of NCBI NO: 14970839 NR Description: beta-galactosidase [Fragaria x ananassa]
  misc_feature (1)..(374): Homolog of NCBI NO: 3204134 NR Description: beta-galactosidase [Cicer arietinum]
  misc_feature (1)..(374): Homolog of NCBI NO: 4138137 NR Description: ss-galactosidase [Lycopersicon esculentum]
  misc_feature (1)..(374): Homolog of NCBI NO: 15231354 NR Description: glycosyl hydrolase family 35 protein id: At3g13750.1, supported by cDNA: gi_20260595
MWTEAWSGWFTEFGGTIRQRPVEDLAFAVARFVQKGGSFINYYMYHGGTNFGRTAGGPFITTSYDYDAPIDEYGLIREPKHSHLKELHRAVKLCEQALVSVDPTITTLGTMQEAHVFRSPSGCAAFLANYNSNSHAKVVFNNEQYSLPPWSISILPDCKNVVFNSATVGVQTSQMQMWGDGATSMMWERYDEEVDSLAAAPLLTTTGLLEQLNVTRDSSDYLWYITSVDISPSENFLQGGGKPPSLSVQSAGHALHVFVNGQLQGSSYGTREDRRIKYNGNVNLRAGTNKIALLSVACGLPNVGVHYETWNTGVGGPVVLHGLNEGSRDLTWQTWSYQVGLKGEQMNLNSVEGSGSVEWMQGSLIAQKQQPLAW

SEQ ID NO: 14188 - DNA, 1980 bp, Zea mays subsp. mays; identical to SEQ ID NO: 12689
  misc_feature (1)..(1980): Ceres Seq. ID no. 12450491
  misc_feature: MA Experiment ID: 108535 Result: Up-regulated in Transcription
  misc_feature: MA Experiment 108535 PARAMETER Experiment Name: Zm_Meristem_P Parameter: Age (day) Value: 8
  misc_feature: MA Experiment 108535 PARAMETER Experiment Name: Zm_Meristem_P Parameter: Organism Value: Zea mays
  misc_feature: MA Experiment 108535 PARAMETER Experiment Name: Zm_Meristem_P Parameter: Plant Line Value: 35A19
  misc_feature: MA Experiment 108535 PARAMETER Experiment Name: Zm_Meristem_P Parameter: Tissue Value: Root Meristem vs. Above Root Meristem
  misc_feature: MA Experiment ID: 108544 Result: Down-regulated in Transcription
  misc_feature: MA Experiment ID: 108689 Result: Down-regulated in Transcription
  misc_feature: MA Experiment 108689 PARAMETER Experiment Name: Zm_Drought_Roots_P Parameter: Age (day) Value: 9
  misc_feature: MA Experiment 108689 PARAMETER Experiment Name: Zm_Drought_Roots_P Parameter: Organism Value: Zea mays
  misc_feature: MA Experiment 108689 PARAMETER Experiment Name: Zm_Drought_Roots_P Parameter: Plant Line Value: 35A19
  misc_feature: MA Experiment 108689 PARAMETER Experiment Name: Zm_Drought_Roots_P Parameter: Timepoint (hr) Value: 24
  misc_feature: MA Experiment 108689 PARAMETER Experiment Name: Zm_Drought_Roots_P Parameter: Tissue Value: Roots
  misc_feature: MA Experiment 108689 PARAMETER Experiment Name: Zm_Drought_Roots_P Parameter: Treatment Value: Drought vs. No Drought
  misc_feature: MA Experiment ID: 20000534 Result: Down-regulated in Transcription
  misc_feature: MA Experiment 20000534 PARAMETER Experiment Name: Zm_Hybrid_Pollen_P Parameter: Age (day) Value: 8
  misc_feature: MA Experiment 20000534 PARAMETER Experiment Name: Zm_Hybrid_Pollen_P Parameter: Organism Value: Zea mays
  misc_feature: MA Experiment 20000534 PARAMETER Experiment Name: Zm_Hybrid_Pollen_P Parameter: Plant Line Value: 35A19
  misc_feature: MA Experiment 20000534 PARAMETER Experiment Name: Zm_Hybrid_Pollen_P Parameter: Tissue Value: Pollen vs. Aerial

SEQ ID NO: 14189 - protein, 546 aa, Zea mays subsp. mays; identical to SEQ ID NO: 12690
  peptide (1)..(546): Ceres Seq. ID no. 12450492
  misc_feature (94)..(352): Pfam Name: Protein kinase domain Pfam Description: Protein kinase domain
  misc_feature (94)..(352): Pfam Name: Protein kinase domain Pfam Description: Protein kinase domain
  misc_feature (80)..(545): Homolog of NCBI NO: 15236560 NR Description: calcium-dependent protein kinase (CDPK6); protein At4g23650.1, supported by cDNA: 37278., supported by cDNA: supported by cDNA: gi_15450436, supported by cDNA: gi_17386099,
  misc_feature (80)..(545): Homolog of NCBI NO: 15450437 NR Description: AT4g23650/F9D16_120 [Arabidopsis thaliana]
  misc_feature (25)..(544): Homolog of NCBI NO: 14970920 NR Description: calcium dependent calmodulin independent protein
  misc_feature (17)..(544): Homolog of NCBI NO: 18175903 NR Description: putative calcium-dependent protein kinase
  misc_feature (17)..(544): Homolog of NCBI NO: 15239888 NR Description: calcium-dependent protein kinase; protein id:
  misc_feature (80)..(545): Homolog of NCBI NO: 15450437 NR Description: AT4g23650/F9D16_120 [Arabidopsis thaliana]
  misc_feature (17)..(544): Homolog of NCBI NO: 18175903 NR Description: putative calcium-dependent protein kinase
  misc_feature (12)..(532): Homolog of NCBI NO: 23616997 NR Description: CDP2_ORYSA Calcium-dependent protein kinase
  misc_feature (21)..(535): Homolog of NCBI NO: 7428009 NR Description: calcium-dependent protein kinase (EC 2.7.1.-) 1 -
  misc_feature (80)..(544): Homolog of NCBI NO: 5162877 NR Description: calcium-dependent protein kinase [Marchantia
  misc_feature (80)..(544): Homolog of NCBI NO: 5162878 NR Description: calcium-dependent protein kinase [Marchantia
  misc_feature (63)..(544): Homolog of NCBI NO: 15239716 NR Description: calcium-dependent protein kinase - like; protein
  misc_feature (17)..(544): Homolog of NCBI NO: 15239888 NR Description: calcium-dependent protein kinase; protein id:
  misc_feature (25)..(544): Homolog of NCBI NO: 14970920 NR Description: calcium dependent calmodulin independent protein
  misc_feature (80)..(545): Homolog of NCBI NO: 15236560 NR Description: calcium-dependent protein kinase (CDPK6); protein At4g23650.1, supported by cDNA: 37278., supported by cDNA: supported by cDNA: gi_15450436, supported by cDNA: gi_17386099,
  misc_feature (63)..(544): Homolog of NCBI NO: 15239716 NR Description: calcium-dependent protein kinase - like; protein
  misc_feature (80)..(544): Homolog of NCBI NO: 5162878 NR Description: calcium-dependent protein kinase [Marchantia
  misc_feature (80)..(544): Homolog of NCBI NO: 5162877 NR Description: calcium-dependent protein kinase [Marchantia
  misc_feature (21)..(535): Homolog of NCBI NO: 7428009 NR Description: calcium-dependent protein kinase (EC 2.7.1.-) 1 -
  misc_feature (12)..(532): Homolog of NCBI NO: 23616997 NR Description: CDP2_ORYSA Calcium-dependent protein kinase

SEQ ID NO: 14190 - protein, 530 aa, Zea mays subsp. mays; identical to SEQ ID NO: 12691
  peptide (1)..(530): Ceres Seq. ID no. 12450493
  misc_feature (78)..(336): Pfam Name: Protein kinase domain Pfam Description: Protein kinase domain
  misc_feature (78)..(336): Pfam Name: Protein kinase domain Pfam Description: Protein kinase domain
  misc_feature (64)..(529): Homolog of NCBI NO: 15236560 NR Description: calcium-dependent protein kinase (CDPK6); protein At4g23650.1, supported by cDNA: 37278., supported by cDNA: supported by cDNA: gi_15450436, supported by cDNA: gi_17386099,
  misc_feature (64)..(529): Homolog of NCBI NO: 15450437 NR Description: AT4g23650/F9D16_120 [Arabidopsis thaliana]
  misc_feature (9)..(528): Homolog of NCBI NO: 14970920 NR Description: calcium dependent calmodulin independent protein
  misc_feature (1)..(528): Homolog of NCBI NO: 18175903 NR Description: putative calcium-dependent protein kinase
  misc_feature (1)..(528): Homolog of NCBI NO: 15239888 NR Description: calcium-dependent protein kinase; protein id:
  misc_feature (64)..(529): Homolog of NCBI NO: 15450437 NR Description: AT4g23650/F9D16_120 [Arabidopsis thaliana]
  misc_feature (1)..(528): Homolog of NCBI NO: 18175903 NR Description: putative calcium-dependent protein kinase
  misc_feature (1)..(516): Homolog of NCBI NO: 23616997 NR Description: CDP2_ORYSA Calcium-dependent protein kinase
  misc_feature (5)..(519): Homolog of NCBI NO: 7428009 NR Description: calcium-dependent protein kinase (EC 2.7.1.-) 1 -
  misc_feature (64)..(528): Homolog of NCBI NO: 5162877 NR Description: calcium-dependent protein kinase [Marchantia
  misc_feature (64)..(528): Homolog of NCBI NO: 5162878 NR Description: calcium-dependent protein kinase [Marchantia
  misc_feature (47)..(528): Homolog of NCBI NO: 15239716 NR Description: calcium-dependent protein kinase - like; protein
  misc_feature (1)..(528): Homolog of NCBI NO: 15239888 NR Description: calcium-dependent protein kinase; protein id:
  misc_feature (9)..(528): Homolog of NCBI NO: 14970920 NR Description: calcium dependent calmodulin independent protein
  misc_feature (64)..(529): Homolog of NCBI NO: 15236560 NR Description: calcium-dependent protein kinase (CDPK6); protein At4g23650.1, supported by cDNA: 37278., supported by cDNA: supported by cDNA: gi_15450436, supported by cDNA: gi_17386099,
  misc_feature (47)..(528): Homolog of NCBI NO: 15239716 NR Description: calcium-dependent protein kinase - like; protein
  misc_feature (64)..(528): Homolog of NCBI NO: 5162878 NR Description: calcium-dependent protein kinase [Marchantia
  misc_feature (64)..(528): Homolog of NCBI NO: 5162877 NR Description: calcium-dependent protein kinase [Marchantia
  misc_feature (5)..(519): Homolog of NCBI NO: 7428009 NR Description: calcium-dependent protein kinase (EC 2.7.1.-) 1 -
  misc_feature (1)..(516): Homolog of NCBI NO: 23616997 NR Description: CDP2_ORYSA Calcium-dependent protein kinase

SEQ ID NO: 14191 - protein, 460 aa, Zea mays subsp. mays; identical to SEQ ID NO: 12692
  peptide (1)..(460): Ceres Seq. ID no. 12450494
  misc_feature (8)..(266): Pfam Name: Protein kinase domain Pfam Description: Protein kinase domain
  misc_feature (8)..(266): Pfam Name: Protein kinase domain Pfam Description: Protein kinase domain
  misc_feature (1)..(459): Homolog of NCBI NO: 15236560 NR Description: calcium-dependent protein kinase (CDPK6); protein At4g23650.1, supported by cDNA: 37278., supported by cDNA: supported by cDNA: gi_15450436, supported by cDNA: gi_17386099,
  misc_feature (1)..(459): Homolog of NCBI NO: 15450437 NR Description: AT4g23650/F9D16_120 [Arabidopsis thaliana]
  misc_feature (1)..(458): Homolog of NCBI NO: 14970920 NR Description: calcium dependent calmodulin independent protein
  misc_feature (1)..(458): Homolog of NCBI NO: 18175903 NR Description: putative calcium-dependent protein kinase
  misc_feature (1)..(458): Homolog of NCBI NO: 15239888 NR Description: calcium-dependent protein kinase; protein id:
  misc_feature (1)..(459): Homolog of NCBI NO: 15450437 NR Description: AT4g23650/F9D16_120 [Arabidopsis thaliana]
  misc_feature (1)..(458): Homolog of NCBI NO: 18175903 NR Description: putative calcium-dependent protein kinase
  misc_feature (1)..(446): Homolog of NCBI NO: 23616997 NR Description: CDP2_ORYSA Calcium-dependent protein kinase
  misc_feature (1)..(449): Homolog of NCBI NO: 7428009 NR Description: calcium-dependent protein kinase (EC 2.7.1.-) 1 -
  misc_feature (1)..(458): Homolog of NCBI NO: 5162877 NR Description: calcium-dependent protein kinase [Marchantia
  misc_feature (1)..(458): Homolog of NCBI NO: 5162878 NR Description: calcium-dependent protein kinase [Marchantia
  misc_feature (1)..(458): Homolog of NCBI NO: 15239716 NR Description: calcium-dependent protein kinase - like; protein
  misc_feature (1)..(458): Homolog of NCBI NO: 15239888 NR Description: calcium-dependent protein kinase; protein id:
  misc_feature (1)..(458): Homolog of NCBI NO: 14970920 NR Description: calcium dependent calmodulin independent protein
  misc_feature (1)..(459): Homolog of NCBI NO: 15236560 NR Description: calcium-dependent protein kinase (CDPK6); protein At4g23650.1, supported by cDNA: 37278., supported by cDNA: supported by cDNA: gi_15450436, supported by cDNA: gi_17386099,
  misc_feature (1)..(458): Homolog of NCBI NO: 15239716 NR Description: calcium-dependent protein kinase - like; protein
  misc_feature (1)..(458): Homolog of NCBI NO: 5162878 NR Description: calcium-dependent protein kinase [Marchantia
  misc_feature (1)..(458): Homolog of NCBI NO: 5162877 NR Description: calcium-dependent protein kinase [Marchantia
  misc_feature (1)..(449): Homolog of NCBI NO: 7428009 NR Description: calcium-dependent protein kinase (EC 2.7.1.-) 1 -
  misc_feature (1)..(446): Homolog of NCBI NO: 23616997 NR Description: CDP2_ORYSA Calcium-dependent protein kinase

SEQ ID NO: 14192 - DNA, 1738 bp, Zea mays subsp. mays
  misc_feature (1)..(1738): Ceres Seq. ID no. 12454899
  misc_feature: MA Experiment ID: 108528 Result: Up-regulated in Transcription
  misc_feature: MA Experiment 108528 PARAMETER Experiment Name: Zm_Imbibed_Seeds_P Parameter: Age (day) Value: 5 vs. 2
  misc_feature: MA Experiment 108528 PARAMETER Experiment Name: Zm_Imbibed_Seeds_P Parameter: Organism Value: Zea mays
  misc_feature: MA Experiment 108528 PARAMETER Experiment Name: Zm_Imbibed_Seeds_P Parameter: Plant Line Value: 35A19
  misc_feature: MA Experiment 108528 PARAMETER Experiment Name: Zm_Imbibed_Seeds_P Parameter: Tissue Value: Aerial vs. Embryo
  misc_feature: MA Experiment ID: 108530 Result: Up-regulated in Transcription
  misc_feature: MA Experiment 108530 PARAMETER Experiment Name: Zm_Imbibed_Seeds_P Parameter: Age (day) Value: 6 vs. 2
  misc_feature: MA Experiment 108530 PARAMETER Experiment Name: Zm_Imbibed_Seeds_P Parameter: Organism Value: Zea mays
  misc_feature: MA Experiment 108530 PARAMETER Experiment Name: Zm_Imbibed_Seeds_P Parameter: Plant Line Value: 35A19
  misc_feature: MA Experiment 108530 PARAMETER Experiment Name: Zm_Imbibed_Seeds_P Parameter: Tissue Value: Aerial vs. Embryo
  misc_feature: MA Experiment ID: 108533 Result: Down-regulated in Transcription
  misc_feature: MA Experiment 108533 PARAMETER Experiment Name: Zm_4deg_Cold_P Parameter: Age (hr) Value: 8
  misc_feature: MA Experiment 108533 PARAMETER Experiment Name: Zm_4deg_Cold_P Parameter: Organism Value: Zea mays
  misc_feature: MA Experiment 108533 PARAMETER Experiment Name: Zm_4deg_Cold_P Parameter: Plant Line Value: 35A19
  misc_feature: MA Experiment 108533 PARAMETER Experiment Name: Zm_4deg_Cold_P Parameter: Temperature (deg C) Value: 4 vs. 22
  misc_feature: MA Experiment 108533 PARAMETER Experiment Name: Zm_4deg_Cold_P Parameter: Timepoint (hr) Value: 1
  misc_feature: MA Experiment 108533 PARAMETER Experiment Name: Zm_4deg_Cold_P Parameter: Tissue Value: Aerial
  misc_feature: MA Experiment ID: 108534 Result: Down-regulated in Transcription
  misc_feature: MA Experiment 108534 PARAMETER Experiment Name: Zm_4deg_Cold_P Parameter: Age (hr) Value: 8
  misc_feature: MA Experiment 108534 PARAMETER Experiment Name: Zm_4deg_Cold_P Parameter: Organism Value: Zea mays
  misc_feature: MA Experiment 108534 PARAMETER Experiment Name: Zm_4deg_Cold_P Parameter: Plant Line Value: 35A19
  misc_feature: MA Experiment 108534 PARAMETER Experiment Name: Zm_4deg_Cold_P Parameter: Temperature (deg C) Value: 4 vs. 22
  misc_feature: MA Experiment 108534 PARAMETER Experiment Name: Zm_4deg_Cold_P Parameter: Timepoint (hr) Value: 6
  misc_feature: MA Experiment 108534 PARAMETER Experiment Name: Zm_4deg_Cold_P Parameter: Tissue Value: Aerial
  misc_feature: MA Experiment ID: 108543 Result: Down-regulated in Transcription
  misc_feature: MA Experiment ID: 108556 Result: Up-regulated in Transcription
  misc_feature: MA Experiment 108556 PARAMETER Experiment Name: Zm_Drought_P Parameter: Age (day) Value: 9
  misc_feature: MA Experiment 108556 PARAMETER Experiment Name: Zm_Drought_P Parameter: Organism Value: Zea mays
  misc_feature: MA Experiment 108556 PARAMETER Experiment Name: Zm_Drought_P Parameter: Plant Line Value: 35A19
  misc_feature: MA Experiment 108556 PARAMETER Experiment Name: Zm_Drought_P Parameter: Timepoint (hr) Value: 24
  misc_feature: MA Experiment 108556 PARAMETER Experiment Name: Zm_Drought_P Parameter: Tissue Value: Aerial
  misc_feature: MA Experiment 108556 PARAMETER Experiment Name: Zm_Drought_P Parameter: Treatment Value: Drought vs. No Drought
atggactctcctctaatggagcccctactagtgcccaacaaccacagtcccggtccggttgtcgccgccacgccgggagaacacggcggtgctgcggtcgacgagagcagcaccctcgtggatgctgccagtggcacggatgagagccacagggcactcgccgacgccgacgtgaagatgaacgacgatggcgacgtacaaggggacgagctgtccgcgtccgtgcagcgccggctggacgagagcagcgccgtggagggggaggatgaagaggaggagattggtgacgacgcggaggccgacgacatggcggcgcgcatgggacggcgcctggcggcgctgcccgggaatgcgcatgagagcgagccgttcaccatcttccgcgtggcggggcccatgcgcgaccgcaaccggcacctctacgagccgcagatgatctccatcgggcccttccaccgtggcgccggccggcacctcgccgccatggaggagcacaagtggcggtacctccgcgacattctggcccgccccggcggcgcgacgctggcctcgtacgcccgcgccgcgcgctcgatggaggcctccgcgcgccgccggtacgcggagcccgtgctgctgcccgcggccgagttcgccgagatgctcctcctggacggctgcttcctggtggagttcttcctcaaggggcaggagagcgcggaggacgcgctcatcgacgcctcgtgggcgatgcagaacgtgtacaacgacatgctgctgctcgagaaccagctccccttcttcgtgctcgagcgcttctacgacctggccacgggcgggctcggccgggactacttcgtcaccaacgtcctcgtcaactacctcaccgtggacatgtgcgtcggcccgcgggaccccgagagcacgcggccccccgacggtgagatccaccacctgctgcacctctactactactggttcctgccaccggaggaccgggacgggagcggcacgggcagcaaggacaaggaagacggcgaggcgctcgaggaactgatgtccacgtctgcggatgagcgcatgccgtggcagctgccgccggcgtcggagctgaaggactccggggtgacgttccgcgccaagaagtcgccgcggagcatggtggacgtgaccttcgaccgccgcagcggcgcgctgtagatcccggccgtggagagctacacgaaccacgccatcttcgcgaacctgctggcgtacgagcagagccggggccggtgggagctgcagcgcctggtgagctacgtgctgctgatggcgtccgtggtggacgcgcggcgcgacgtggaggtcctgcagcgggccggcgtgttcgtgcgcggggacgaggagacggcggcgttctacgcgcacctgggcgagctgtgcccgccgcccgagttcgtcaacaactgctacgccgacctgttccgcgacgtcctggagtactgtgggcgcagctggaacaggcaccgcgccgtgctggtgcacgactacttcagcaacccgtggaccagcatgtccgccgccgccgccgtcttcctgcttgtcctcaccgtcgtgcagacggtctacaccgtgctgccatactacagccagaattaaccgggcaaaaaacaaaaaaggcgttttgccgccgtcacacagaccgggtgtcgccctctgttttttctttttttttgcctgcaactacaagaaaccctatgatttttncttggctcct

SEQ ID NO: 14193 - protein, 392 aa, Zea mays subsp. mays
  peptide (1)..(392): Ceres Seq. ID no. 12454900
  misc_feature (121)..(326): Pfam Name: Plant protein of unknown function Pfam Description: Plant protein of unknown function
  misc_feature (41)..(322): Homolog of NCBI NO: 38175550 NR Description: unknown protein [Oryza sativa (japonica
  misc_feature (98)..(326): Homolog of NCBI NO: 34914152 NR Description: P0496H05.27 [Oryza sativa (japonica
  misc_feature (303)..(392): Homolog of NCBI NO: 34914152 NR Description: P0496H05.27 [Oryza sativa (japonica
  misc_feature (103)..(326): Homolog of NCBI NO: 34914138 NR Description: P0496H05.18 [Oryza sativa (japonica
  misc_feature (361)..(392): Homolog of NCBI NO: 34914138 NR Description: P0496H05.18 [Oryza sativa (japonica
  misc_feature (125)..(392): Homolog of NCBI NO: 34894670 NR Description: B1153F04.26 [Oryza sativa (japonica
  misc_feature (106)..(392): Homolog of NCBI NO: 15227658 NR Description: hypothetical protein; protein id: At2g36430.1, by cDNA: gi_18377794, supported by cDNA: gi_21280850 [Arabidopsis >gi|25366666|pir||F84780 hypothetical protein At2g36430
  misc_feature (73)..(392): Homolog of NCBI NO: 34894658 NR Description: B1153F04.19 [Oryza sativa (japonica
  misc_feature (68)..(392): Homolog of NCBI NO: 15229684 NR Description: putative protein; protein id: At3g50150.1
  misc_feature (118)..(392): Homolog of NCBI NO: 34894664 NR Description: B1153F04.22 [Oryza sativa (japonica
MDSPLMEPLLVPNNHSPGPVVAATPGEHGGAAVDESSTLVDAASGTDESHRALADADVKMNDDGDVQGDELSASVQRRLDESSAVEGEDEEEEIGDDAEADDMAARMGRRLAALPGNAHESEPFTIFRVAGPMRDRNRHLYEPQMISIGPFHRGAGRHLAAMEEHKWRYLRDILARPGGATLASYARAARSMEASARRRYAEPVLLPAAEFAEMLLLDGCFLVEFFLKGQESAEDALIDASWAMQNVYNDMLLLENQLPFFVLERFYDLATGGLGRDYFVTNVLVNYLTVDMCVGPRDPESTRPPDGEIHHLLHLYYYWFLPPEDRDGSGTGSKDKEDGEALEELMSTSADERMPWQLPPASELKDSGVTFRAKKSPRSMVDVTFDRRSGAL

SEQ ID NO: 14194 - protein, 387 aa, Zea mays subsp. mays
  peptide (1)..(387): Ceres Seq. ID no. 12454901
  misc_feature (116)..(321): Pfam Name: Plant protein of unknown function Pfam Description: Plant protein of unknown function
  misc_feature (36)..(317): Homolog of NCBI NO: 38175550 NR Description: unknown protein [Oryza sativa (japonica
  misc_feature (93)..(321): Homolog of NCBI NO: 34914152 NR Description: P0496H05.27 [Oryza sativa (japonica
  misc_feature (298)..(387): Homolog of NCBI NO: 34914152 NR Description: P0496H05.27 [Oryza sativa (japonica
  misc_feature (98)..(321): Homolog of NCBI NO: 34914138 NR Description: P0496H05.18 [Oryza sativa (japonica
  misc_feature (356)..(387): Homolog of NCBI NO: 34914138 NR Description: P0496H05.18 [Oryza sativa (japonica
  misc_feature (120)..(387): Homolog of NCBI NO: 34894670 NR Description: B1153F04.26 [Oryza sativa (japonica
  misc_feature (101)..(387): Homolog of NCBI NO: 15227658 NR Description: hypothetical protein; protein id: At2g36430.1, by cDNA: gi_18377794, supported by cDNA: gi_21280850 [Arabidopsis >gi|25366666|pir||F84780 hypothetical protein At2g36430
  misc_feature (68)..(387): Homolog of NCBI NO: 34894658 NR Description: B1153F04.19 [Oryza sativa (japonica
  misc_feature (63)..(387): Homolog of NCBI NO: 15229684 NR Description: putative protein; protein id: At3g50150.1
  misc_feature (113)..(387): Homolog of NCBI NO: 34894664 NR Description: B1153F04.22 [Oryza sativa (japonica
MEPLLVPNNHSPGPVVAATPGEHGGAAVDESSTLVDAASGTDESHRALADADVKMNDDGDVQGDELSASVQRRLDESSAVEGEDEEEEIGDDAEADDMAARMGRRLAALPGNAHESEPFTIFRVAGPMRDRNRHLYEPQMISIGPFHRGAGRHLAAMEEHKWRYLRDILARPGGATLASYARAARSMEASARRRYAEPVLLPAAEFAEMLLLDGCFLVEFFLKGQESAEDALIDASWAMQNVYNDMLLLENQLPFFVLERFYDLATGGLGRDYFVTNVLVNYLTVDMCVGPRDPESTRPPDGEIHHLLHLYYYWFLPPEDRDGSGTGSKDKEDGEALEELMSTSADERMPWQLPPASELKDSGVTFRAKKSPRSMVDVTFDRRSGAL

SEQ ID NO: 14195 - protein, 333 aa, Zea mays subsp. mays
  peptide (1)..(333): Ceres Seq. ID no. 12454902
  misc_feature (62)..(267): Pfam Name: Plant protein of unknown function Pfam Description: Plant protein of unknown function
  misc_feature (47)..(333): Homolog of NCBI NO: 15227658 NR Description: hypothetical protein; protein id: At2g36430.1, by cDNA: gi_18377794, supported by cDNA: gi_21280850 [Arabidopsis >gi|25366666|pir||F84780 hypothetical protein At2g36430
  misc_feature (14)..(333): Homolog of NCBI NO: 34894658 NR Description: B1153F04.19 [Oryza sativa (japonica
  misc_feature (1)..(263): Homolog of NCBI NO: 38175550 NR Description: unknown protein [Oryza sativa (japonica
  misc_feature (244)..(333): Homolog of NCBI NO: 34914152 NR Description: P0496H05.27 [Oryza sativa (japonica
  misc_feature (302)..(333): Homolog of NCBI NO: 34914138 NR Description: P0496H05.18 [Oryza sativa (japonica
  misc_feature (66)..(333): Homolog of NCBI NO: 34894670 NR Description: B1153F04.26 [Oryza sativa (japonica
  misc_feature (44)..(267): Homolog of NCBI NO: 34914138 NR Description: P0496H05.18 [Oryza sativa (japonica
  misc_feature (39)..(267): Homolog of NCBI NO: 34914152 NR Description: P0496H05.27 [Oryza sativa (japonica
  misc_feature (9)..(333): Homolog of NCBI NO: 15229684 NR Description: putative protein; protein id: At3g50150.1
  misc_feature (59)..(333): Homolog of NCBI NO: 34894664 NR Description: B1153F04.22 [Oryza sativa (japonica
MNDDGDVQGDELSASVQRRLDESSAVEGEDEEEEIGDDAEADDMAARMGRRLAALPGNAHESEPFTIFRVAGPMRDRNRHLYEPQMISIGPFHRGAGRHLAAMEEHKWRYLRDILARPGGATLASYARAARSMEASARRRYAEPVLLPAAEFAEMLLLDGCFLVEFFLKGQESAEDALIDASWAMQNVYNDMLLLENQLPFFVLERFYDLATGGLGRDYFVTNVLVNYLTVDMCVGPRDPESTRPPDGEIHHLLHLYYYWFLPPEDRDGSGTGSKDKEDGEALEELMSTSADERMPWQLPPASELKDSGVTFRAKKSPRSMVDVTFDRRSGAL

SEQ ID NO: 14196 - DNA, 1761 bp, Zea mays subsp. mays
  misc_feature (1)..(1761): Ceres Seq. ID no. 12450583
  misc_feature: MA Experiment ID: 108522 Result: Down-regulated in Transcription
  misc_feature: MA Experiment 108522 PARAMETER Experiment Name: Zm_42deg_Heat_P Parameter: Age (day) Value: 8
  misc_feature: MA Experiment 108522 PARAMETER Experiment Name: Zm_42deg_Heat_P Parameter: Organism Value: Zea mays
  misc_feature: MA Experiment 108522 PARAMETER Experiment Name: Zm_42deg_Heat_P Parameter: Plant Line Value: 35A19
  misc_feature: MA Experiment 108522 PARAMETER Experiment Name: Zm_42deg_Heat_P Parameter: Temperature (deg C) Value: 42 vs. 22
  misc_feature: MA Experiment 108522 PARAMETER Experiment Name: Zm_42deg_Heat_P Parameter: Timepoint (hr) Value: 1
  misc_feature: MA Experiment 108522 PARAMETER Experiment Name: Zm_42deg_Heat_P Parameter: Tissue Value: Aerial
  misc_feature: MA Experiment ID: 108527 Result: Up-regulated in Transcription
  misc_feature: MA Experiment 108527 PARAMETER Experiment Name: Zm_5mM_NO_P Parameter: Age (day) Value: 8
  misc_feature: MA Experiment 108527 PARAMETER Experiment Name: Zm_5mM_NO_P Parameter: Organism Value: Zea mays
  misc_feature: MA Experiment 108527 PARAMETER Experiment Name: Zm_5mM_NO_P Parameter: Plant Line Value: 35A19
  misc_feature: MA Experiment 108527 PARAMETER Experiment Name: Zm_5mM_NO_P Parameter: Timepoint (hr) Value: 6
  misc_feature: MA Experiment 108527 PARAMETER Experiment Name: Zm_5mM_NO_P Parameter: Tissue Value: Aerial
  misc_feature: MA Experiment 108527 PARAMETER Experiment Name: Zm_5mM_NO_P Parameter: Treatment Value: 5mM NO vs. No Treatment
  misc_feature: MA Experiment ID: 108529 Result: Up-regulated in Transcription
  misc_feature: MA Experiment 108529 PARAMETER Experiment Name: Zm_Imbibed_Seeds_P Parameter: Age (day) Value: 5 vs. 2
  misc_feature: MA Experiment 108529 PARAMETER Experiment Name: Zm_Imbibed_Seeds_P Parameter: Organism Value: Zea mays
  misc_feature: MA Experiment 108529 PARAMETER Experiment Name: Zm_Imbibed_Seeds_P Parameter: Plant Line Value: 35A19
  misc_feature: MA Experiment 108529 PARAMETER Experiment Name: Zm_Imbibed_Seeds_P Parameter: Tissue Value: Roots vs. Embryo
  misc_feature: MA Experiment ID: 108535 Result: Down-regulated in Transcription
  misc_feature: MA Experiment 108535 PARAMETER Experiment Name: Zm_Meristem_P Parameter: Age (day) Value: 8
  misc_feature: MA Experiment 108535 PARAMETER Experiment Name: Zm_Meristem_P Parameter: Organism Value: Zea mays
  misc_feature: MA Experiment 108535 PARAMETER Experiment Name: Zm_Meristem_P Parameter: Plant Line Value: 35A19
  misc_feature: MA Experiment 108535 PARAMETER Experiment Name: Zm_Meristem_P Parameter: Tissue Value: Root Meristem vs. Above Root Meristem
  misc_feature: MA Experiment ID: 108556 Result: Up-regulated in Transcription
  misc_feature: MA Experiment 108556 PARAMETER Experiment Name: Zm_Drought_P Parameter: Age (day) Value: 9
  misc_feature: MA Experiment 108556 PARAMETER Experiment Name: Zm_Drought_P Parameter: Organism Value: Zea mays
  misc_feature: MA Experiment 108556 PARAMETER Experiment Name: Zm_Drought_P Parameter: Plant Line Value: 35A19
  misc_feature: MA Experiment 108556 PARAMETER Experiment Name: Zm_Drought_P Parameter: Timepoint (hr) Value: 24
  misc_feature: MA Experiment 108556 PARAMETER Experiment Name: Zm_Drought_P Parameter: Tissue Value: Aerial
  misc_feature: MA Experiment 108556 PARAMETER Experiment Name: Zm_Drought_P Parameter: Treatment Value: Drought vs. No Drought
  misc_feature: MA Experiment ID: 108689 Result: Up-regulated in Transcription
  misc_feature: MA Experiment 108689 PARAMETER Experiment Name: Zm_Drought_Roots_P Parameter: Age (day) Value: 9
  misc_feature: MA Experiment 108689 PARAMETER Experiment Name: Zm_Drought_Roots_P Parameter: Organism Value: Zea mays
  misc_feature: MA Experiment 108689 PARAMETER Experiment Name: Zm_Drought_Roots_P Parameter: Plant Line Value: 35A19
  misc_feature: MA Experiment 108689 PARAMETER Experiment Name: Zm_Drought_Roots_P Parameter: Timepoint (hr) Value: 24
  misc_feature: MA Experiment 108689 PARAMETER Experiment Name: Zm_Drought_Roots_P Parameter: Tissue Value: Roots
  misc_feature: MA Experiment 108689 PARAMETER Experiment Name: Zm_Drought_Roots_P Parameter: Treatment Value: Drought vs. No Drought
  misc_feature: MA Experiment ID: 20000478 Result: Up-regulated in Transcription
  misc_feature: MA Experiment 20000478 PARAMETER Experiment Name: Zm_5mM_SA_P Parameter: Age (day) Value: 11
  misc_feature: MA Experiment 20000478 PARAMETER Experiment Name: Zm_5mM_SA_P Parameter: Organism Value: Zea mays
  misc_feature: MA Experiment 20000478 PARAMETER Experiment Name: Zm_5mM_SA_P Parameter: Plant Line Value: 35A19
  misc_feature: MA Experiment 20000478 PARAMETER Experiment Name: Zm_5mM_SA_P Parameter: Timepoint (hr) Value: 72
  misc_feature: MA Experiment 20000478 PARAMETER Experiment Name: Zm_5mM_SA_P Parameter: Tissue Value: Aerial
  misc_feature: MA Experiment 20000478 PARAMETER Experiment Name: Zm_5mM_SA_P Parameter: Treatment Value: 5mM SA vs. No Treatment
  misc_feature: MA Experiment ID: 20000480 Result: Up-regulated in Transcription
  misc_feature: MA Experiment 20000480 PARAMETER Experiment Name: Zm_Drought_P Parameter: Age (day) Value: 11
  misc_feature: MA Experiment 20000480 PARAMETER Experiment Name: Zm_Drought_P Parameter: Organism Value: Zea mays
  misc_feature: MA Experiment 20000480 PARAMETER Experiment Name: Zm_Drought_P Parameter: Plant Line Value: 35A19
  misc_feature: MA Experiment 20000480 PARAMETER Experiment Name: Zm_Drought_P Parameter: Timepoint (hr) Value: 72
  misc_feature: MA Experiment 20000480 PARAMETER Experiment Name: Zm_Drought_P Parameter: Tissue Value: Aerial
  misc_feature: MA Experiment 20000480 PARAMETER Experiment Name: Zm_Drought_P Parameter: Treatment Value: Drought vs. No Drought
aaccagcacaacgaagtcccgcgcacgcaaagaagtcacgtccaaactgaaggtgacaacatggagtccgcgccgtcaacggcggcggtcatggagcgcgagcgcctcacggccgagctggccttcgcggaggccgacgcagagcctagcagcttcgtcgtcaagatccggtgtcggctgccggacttcgcgcgcagcgtcaacctcaagtacgtccgcctcggcctgcgctctggcgccatccctgcgccctcctcatgggtcccgctcgcgctcgcgccgtcgctcctcgtcgcggcggcatactcgctcgttggcgcggacaagttctactcactcgacctgctcacctgcatcgcgtggctcgccgcggcggtgctgctgctcaccgtgtatttcctcatgcgcccaaggccggtgtacctcgtggacttcgcgtgctacaggccgggcaacgagcacgccatctccaaggngggcttcctggacatgacagancagcacgggctgcttcaacgcggaggcactcgagttccagaccaagatcaccaagcgctccggactcggcgatcggacgtacctcccgccgggcatccaggcacggccgccgcggctgtctatggaggaggcgcgcgcggaggccgaggccgtcatgttcggctgcctcgactcgctattctcggccacgggcatcgacccacgccgcgatgtgcgcgtgctcatcgtcaactgcagcctcttcaacccgacgccgtcgctggcgtccatggtagtgcaccgctacaagatgcgggaggacgtcaagtcgttcaaccttggaggcatggggtgcagcgcagggctcatcgccgtggacctcgccagggacatgctgcaggcgaaccccgggtgctacgccgtcntggtgagcaccgagaacatcacgctgaactggtacttcggcaacgaccgctccatgctgctgtccaactgcatcttccgcatgggcggcgctgccgcgctgctgtccaaccgccgcgccgacgccgggcgcgccaagtacaggctgctacacacggtacgcacccacaagggcgccgcggacgagtgctacggctgcgtgtaccagcgcgaggacggcaccggccgcgtcggcgtgtcgctggcgcgcgagctcatggccgtcgccggggacgcgctcaagacgaacatcaccaccctgggcccgctggtgctcccgatatcggagcagctcaagttcctcaagtccctcgtgctccgccgcgccctccgctcccgcggtgtccgtccgtacatcccggacttccggcgcgcgtttgaacacttctgcgtgcacgccggcgggcgcgccgtgctggaggaggtgcagcgcagcctggggctcagggacgcggacatggagcccagcaggtgcaccctgcaccgcttnggcaacaccagcagcagctcgctctggtacgagctcgcctacgccgaggccaanggccgcgtccgccgcggccnccgcgtgtggcagatcggattcggatccggattcaagtgcaacagtgctgtctggcgcgcgctccgcgacgtgccgcccgtgcacgccgacggcgccggcggtggcagcaactgcaacccgtgggtggacagcattcagagctacccgccaaaagagtacatctgatcgccatcttctttgtggtgaattaatcacgtcctgttggatcanttgtactanccgcgacgcagtagtgcacganaactgtatgtatggtg

SEQ ID NO: 14197 - protein, 439 aa, Zea mays subsp. mays
  peptide (1)..(439): Ceres Seq. ID no. 12450584
  misc_feature (41)..(191): Homolog of NCBI NO: 37531254 NR Description: putative senescence-associated protein 15 [Oryza
  misc_feature (31)..(165): Homolog of NCBI NO: 3551960 NR Description: senescence-associated protein 15 [Hemerocallis
  misc_feature (31)..(169): Homolog of NCBI NO: 4091810 NR Description: fatty acid elongase 3-ketoacyl-CoA synthase 1
  misc_feature (31)..(169): Homolog of NCBI NO: 22329274 NR Description: fatty acid elongase 3-ketoacyl-CoA synthase 1; id: At1g01120.1, supported by cDNA: gi_18377663, supported by
  misc_feature (20)..(163): Homolog of NCBI NO: 29417540 NR Description: beta-ketoacyl-CoA-synthase [Marchantia polymorpha]
  misc_feature (58)..(162): Homolog of NCBI NO: 9714501 NR Description: putative fatty acid elongase [Zea mays]
  misc_feature (60)..(170): Homolog of NCBI NO: 15239981 NR Description: beta-ketoacyl-CoA synthase; protein id: supported by cDNA: gi_14334713, supported by cDNA: gi_15983490
  misc_feature (60)..(170): Homolog of NCBI NO: 14334714 NR Description: putative beta-ketoacyl-CoA synthase [Arabidopsis
  misc_feature (59)..(170): Homolog of NCBI NO: 15219676 NR Description: putative beta-ketoacyl-CoA synthase; protein id:
  misc_feature (46)..(169): Homolog of NCBI NO: 15225767 NR Description: putative beta-ketoacyl-CoA synthase; protein id:
  misc_feature (159)..(159): Xaa is any aa, unknown or other
  misc_feature (166)..(166): Xaa is any aa, unknown or other
  misc_feature (301)..(301): Xaa is any aa, unknown or other
NQHNEVPRTQRSHVQTEGDNMESAPSTAAVMERERLTAELAFAEADAEPSSFVVKIRCRLPDFARSVNLKYVRLGLRSGAIPAPSSWVPLALAPSLLVAAAYSLVGADKFYSLDLLTCIAWLAAAVLLLTVYFLMRPRPVYLVDFACYRPGNEHAISKXGFLDMTXQHGLLQRGGTRVPDQDHQALRTRRSDVPPAGHPGTAAAAVYGGGARGGRGRHVRLPRLAILGHGHRPTPRCARAHRQLQPLQPDAVAGVHGSAPLQDAGGRQVVQPWRHGVQRRAHRRGPRQGHAAGEPRVLRRXGEHREHHAELVLRQRPLHAAVQLHLPHGRRCRAAVQPPRRRRARQVQAATHGTHPQGRRGRVLRLRVPARGRHRPRRRVAGARAHGRRRGRAQDEHHHPGPAGAPDIGAAQVPQVPRAPPRPPLPRCPSVHPGLPARV

SEQ ID NO: 14198 - protein, 419 aa, Zea mays subsp. mays
  peptide (1)..(419): Ceres Seq. ID no. 12450585
  misc_feature (21)..(171): Homolog of NCBI NO: 37531254 NR Description: putative senescence-associated protein 15 [Oryza
  misc_feature (11)..(145): Homolog of NCBI NO: 3551960 NR Description: senescence-associated protein 15 [Hemerocallis
  misc_feature (11)..(149): Homolog of NCBI NO: 4091810 NR Description: fatty acid elongase 3-ketoacyl-CoA synthase 1
  misc_feature (11)..(149): Homolog of NCBI NO: 22329274 NR Description: fatty acid elongase 3-ketoacyl-CoA synthase 1; id: At1g01120.1, supported by cDNA: gi_18377663, supported by
  misc_feature (1)..(143): Homolog of NCBI NO: 29417540 NR Description: beta-ketoacyl-CoA-synthase [Marchantia polymorpha]
  misc_feature (38)..(142): Homolog of NCBI NO: 9714501 NR Description: putative fatty acid elongase [Zea mays]
  misc_feature (40)..(150): Homolog of NCBI NO: 15239981 NR Description: beta-ketoacyl-CoA synthase; protein id: supported by cDNA: gi_14334713, supported by cDNA: gi_15983490
  misc_feature (40)..(150): Homolog of NCBI NO: 14334714 NR Description: putative beta-ketoacyl-CoA synthase [Arabidopsis
  misc_feature (39)..(150): Homolog of NCBI NO: 15219676 NR Description: putative beta-ketoacyl-CoA synthase; protein id:
  misc_feature (26)..(149): Homolog of NCBI NO: 15225767 NR Description: putative beta-ketoacyl-CoA synthase; protein id:
  misc_feature (139)..(139): Xaa is any aa, unknown or other
  misc_feature (146)..(146): Xaa is any aa, unknown or other
  misc_feature (281)..(281): Xaa is any aa, unknown or other
MESAPSTAAVMERERLTAELAFAEADAEPSSFVVKIRCRLPDFARSVNLKYVRLGLRSGAIPAPSSWVPLALAPSLLVAAAYSLVGADKFYSLDLLTCIAWLAAAVLLLTVYFLMRPRPVYLVDFACYRPGNEHAISKXGFLDMTXQHGLLQRGGTRVPDQDHQALRTRRSDVPPAGHPGTAAAAVYGGGARGGRGRHVRLPRLAILGHGHRPTPRCARAHRQLQPLQPDAVAGVHGSAPLQDAGGRQVVQPWRHGVQRRAHRRGPRQGHAAGEPRVLRRXGEHREHHAELVLRQRPLHAAVQLHLPHGRRCRAAVQPPRRRRARQVQAATHGTHPQGRRGRVLRLRVPARGRHRPRRRVAGARAHGRRRGRAQDEHHHPGPAGAPDIGAAQVPQVPRAPPRPPLPRCPSVHPGLPARV

SEQ ID NO: 14199 - protein, 409 aa, Zea mays subsp. mays
  peptide (1)..(409): Ceres Seq. ID no. 12450586
  misc_feature (11)..(161): Homolog of NCBI NO: 37531254 NR Description: putative senescence-associated protein 15 [Oryza
  misc_feature (1)..(135): Homolog of NCBI NO: 3551960 NR Description: senescence-associated protein 15 [Hemerocallis
  misc_feature (1)..(139): Homolog of NCBI NO: 4091810 NR Description: fatty acid elongase 3-ketoacyl-CoA synthase 1
  misc_feature (1)..(139): Homolog of NCBI NO: 22329274 NR Description: fatty acid elongase 3-ketoacyl-CoA synthase 1; id: At1g01120.1, supported by cDNA: gi_18377663, supported by
  misc_feature (1)..(133): Homolog of NCBI NO: 29417540 NR Description: beta-ketoacyl-CoA-synthase [Marchantia polymorpha]
  misc_feature (28)..(132): Homolog of NCBI NO: 9714501 NR Description: putative fatty acid elongase [Zea mays]
  misc_feature (30)..(140): Homolog of NCBI NO: 15239981 NR Description: beta-ketoacyl-CoA synthase; protein id: supported by cDNA: gi_14334713, supported by cDNA: gi_15983490
  misc_feature (30)..(140): Homolog of NCBI NO: 14334714 NR Description: putative beta-ketoacyl-CoA synthase [Arabidopsis
  misc_feature (29)..(140): Homolog of NCBI NO: 15219676 NR Description: putative beta-ketoacyl-CoA synthase; protein id:
  misc_feature (16)..(139): Homolog of NCBI NO: 15225767 NR Description: putative beta-ketoacyl-CoA synthase; protein id:
  misc_feature (129)..(129): Xaa is any aa, unknown or other
  misc_feature (136)..(136): Xaa is any aa, unknown or other
  misc_feature (271)..(271): Xaa is any aa, unknown or other
MERERLTAELAFAEADAEPSSFVVKIRCRLPDFARSVNLKYVRLGLRSGAIPAPSSWVPLALAPSLLVAAAYSLVGADKFYSLDLLTCIAWLAAAVLLLTVYFLMRPRPVYLVDFACYRPGNEHAISKXGFLDMTXQHGLLQRGGTRVPDQDHQALRTRRSDVPPAGHPGTAAAAVYGGGARGGRGRHVRLPRLAILGHGHRPTPRCARAHRQLQPLQPDAVAGVHGSAPLQDAGGRQVVQPWRHGVQRRAHRRGPRQGHAAGEPRVLRRXGEHREHHAELVLRQRPLHAAVQLHLPHGRRCRAAVQPPRRRRARQVQAATHGTHPQGRRGRVLRLRVPARGRHRPRRRVAGARAHGRRRGRAQDEHHHPGPAGAPDIGAAQVPQVPRAPPRPPLPRCPSVHPGLPARV

SEQ ID NO: 14200 - protein, 349 aa, Zea mays subsp. mays
  peptide (1)..(349): Ceres Seq. ID no. 12450587
  misc_feature (171)..(317): Pfam Name: Chalcone and stilbene synthases, C-terminal domain Pfam Description: Chalcone and stilbene synthases, C-terminal
  misc_feature (1)..(330): Homolog of NCBI NO: 37531254 NR Description: putative senescence-associated protein 15 [Oryza
  misc_feature (1)..(346): Homolog of NCBI NO: 3551960 NR Description: senescence-associated protein 15 [Hemerocallis
  misc_feature (1)..(346): Homolog of NCBI NO: 4091810 NR Description: fatty acid elongase 3-ketoacyl-CoA synthase 1
  misc_feature (1)..(346): Homolog of NCBI NO: 22329274 NR Description: fatty acid elongase 3-ketoacyl-CoA synthase 1; id: At1g01120.1, supported by cDNA: gi_18377663, supported by
  misc_feature (1)..(344): Homolog of NCBI NO: 29417540 NR Description: beta-ketoacyl-CoA-synthase [Marchantia polymorpha]
  misc_feature (1)..(344): Homolog of NCBI NO: 9714501 NR Description: putative fatty acid elongase [Zea mays]
  misc_feature (1)..(344): Homolog of NCBI NO: 15239981 NR Description: beta-ketoacyl-CoA synthase; protein id: supported by cDNA: gi_14334713, supported by cDNA: gi_15983490
  misc_feature (1)..(344): Homolog of NCBI NO: 14334714 NR Description: putative beta-ketoacyl-CoA synthase [Arabidopsis
  misc_feature (1)..(344): Homolog of NCBI NO: 15219676 NR Description: putative beta-ketoacyl-CoA synthase; protein id:
  misc_feature (1)..(344): Homolog of NCBI NO: 15225767 NR Description: putative beta-ketoacyl-CoA synthase; protein id:
  misc_feature (95)..(95): Xaa is any aa, unknown or other
  misc_feature (270)..(270): Xaa is any aa, unknown or other
  misc_feature (288)..(288): Xaa is any aa, unknown or other
  misc_feature (295)..(295): Xaa is any aa, unknown or other
MEEARAEAEAVMFGCLDSLFSATGIDPRRDVRVLIVNCSLFNPTPSLASMVVHRYKMREDVKSFNLGGMGCSAGLIAVDLARDMLQANPGCYAVXVSTENITLNWYFGNDRSMLLSNCIFRMGGAAALLSNRRADAGRAKYRLLHTVRTHKGAADECYGCVYQREDGTGRVGVSLARELMAVAGDALKTNITTLGPLVLPISEQLKFLKSLVLRRALRSRGVRPYIPDFRRAFEHFCVHAGGRAVLEEVQRSLGLRDADMEPSRCTLHRXGNTSSSSLWYELAYAEAXGRVRRGXRVWQIGFGSGFKCNSAVWRALRDVPPVHADGAGGGSNCNPWVDSIQSYPPKEYI

SEQ ID NO: 14201 - DNA, 1477 bp, Zea mays subsp. mays; identical to SEQ ID NO: 2026
  misc_feature (1)..(1477): Ceres Seq. ID no. 12405682
  misc_feature: MA Experiment ID: 108522 Result: Down-regulated in Transcription
  misc_feature: MA Experiment 108522 PARAMETER Experiment Name: Zm_42deg_Heat_P Parameter: Age (day) Value: 8
  misc_feature: MA Experiment 108522 PARAMETER Experiment Name: Zm_42deg_Heat_P Parameter: Organism Value: Zea mays
  misc_feature: MA Experiment 108522 PARAMETER Experiment Name: Zm_42deg_Heat_P Parameter: Plant Line Value: 35A19
  misc_feature: MA Experiment 108522 PARAMETER Experiment Name: Zm_42deg_Heat_P Parameter: Temperature (deg C) Value: 42 vs. 22
  misc_feature: MA Experiment 108522 PARAMETER Experiment Name: Zm_42deg_Heat_P Parameter: Timepoint (hr) Value: 1
  misc_feature: MA Experiment 108522 PARAMETER Experiment Name: Zm_42deg_Heat_P Parameter: Tissue Value: Aerial

SEQ ID NO: 14202 - protein, 304 aa, Zea mays subsp. mays; identical to SEQ ID NO: 2027
  peptide (1)..(304): Ceres Seq. ID no. 12405683
  misc_feature (72)..(292): Homolog of NCBI NO: 15229211 NR Description: unknown protein; protein id: At3g04020.1 thaliana] >gi|6223647|gb|AAF05861.1|AC011698_12 unknown protein

SEQ ID NO: 14203 - protein, 254 aa, Zea mays subsp. mays; identical to SEQ ID NO: 2028
  peptide (1)..(254): Ceres Seq. ID no. 12405684
  misc_feature (22)..(242): Homolog of NCBI NO: 15229211 NR Description: unknown protein; protein id: At3g04020.1 thaliana] >gi|6223647|gb|AAF05861.1|AC011698_12 unknown protein

SEQ ID NO: 14204 - protein, 239 aa, Zea mays subsp. mays; identical to SEQ ID NO: 2029
  peptide (1)..(239): Ceres Seq. ID no. 12405685
  misc_feature (7)..(227): Homolog of NCBI NO: 15229211 NR Description: unknown protein; protein id: At3g04020.1 thaliana] >gi|6223647|gb|AAF05861.1|AC011698_12 unknown protein

SEQ ID NO: 14205 - DNA, 1711 bp, Zea mays subsp. mays; identical to SEQ ID NO: 6526
  misc_feature (1)..(1711): Ceres Seq. ID no. 12566006
  misc_feature: MA Experiment ID: 108527 Result: Down-regulated in Transcription
  misc_feature: MA Experiment 108527 PARAMETER Experiment Name: Zm_5mM_NO_P Parameter: Age (day) Value: 8
  misc_feature: MA Experiment 108527 PARAMETER Experiment Name: Zm_5mM_NO_P Parameter: Organism Value: Zea mays
  misc_feature: MA Experiment 108527 PARAMETER Experiment Name: Zm_5mM_NO_P Parameter: Plant Line Value: 35A19
  misc_feature: MA Experiment 108527 PARAMETER Experiment Name: Zm_5mM_NO_P Parameter: Timepoint (hr) Value: 6
  misc_feature: MA Experiment 108527 PARAMETER Experiment Name: Zm_5mM_NO_P Parameter: Tissue Value: Aerial
  misc_feature: MA Experiment 108527 PARAMETER Experiment Name: Zm_5mM_NO_P Parameter: Treatment Value: 5mM NO vs. No Treatment
  misc_feature: MA Experiment ID: 108529 Result: Down-regulated in Transcription
  misc_feature: MA Experiment 108529 PARAMETER Experiment Name: Zm_Imbibed_Seeds_P Parameter: Age (day) Value: 5 vs. 2
  misc_feature: MA Experiment 108529 PARAMETER Experiment Name: Zm_Imbibed_Seeds_P Parameter: Organism Value: Zea mays
  misc_feature: MA Experiment 108529 PARAMETER Experiment Name: Zm_Imbibed_Seeds_P Parameter: Plant Line Value: 35A19
  misc_feature: MA Experiment 108529 PARAMETER Experiment Name: Zm_Imbibed_Seeds_P Parameter: Tissue Value: Roots vs. Embryo
  misc_feature: MA Experiment ID: 108536 Result: Down-regulated in Transcription
  misc_feature: MA Experiment 108536 PARAMETER Experiment Name: Zm_Meristem_P Parameter: Age (day) Value: 8
  misc_feature: MA Experiment 108536 PARAMETER Experiment Name: Zm_Meristem_P Parameter: Organism Value: Zea mays
  misc_feature: MA Experiment 108536 PARAMETER Experiment Name: Zm_Meristem_P Parameter: Plant Line Value: 35A19
  misc_feature: MA Experiment 108536 PARAMETER Experiment Name: Zm_Meristem_P Parameter: Tissue Value: Shoot Meristem vs. Above Shoot Meristem
  misc_feature: MA Experiment ID: 108546 Result: Down-regulated in Transcription
  misc_feature: MA Experiment 108546 PARAMETER Experiment Name: Zm_Imbibed_Seeds_P Parameter: Age (day) Value: 3 vs. 2
  misc_feature: MA Experiment 108546 PARAMETER Experiment Name: Zm_Imbibed_Seeds_P Parameter: Organism Value: Zea mays
  misc_feature: MA Experiment 108546 PARAMETER Experiment Name: Zm_Imbibed_Seeds_P Parameter: Plant Line Value: 35A19
  misc_feature: MA Experiment 108546 PARAMETER Experiment Name: Zm_Imbibed_Seeds_P Parameter: Tissue Value: Roots vs. Embryo
  misc_feature: MA Experiment ID: 108556 Result: Down-regulated in Transcription
  misc_feature: MA Experiment 108556 PARAMETER Experiment Name: Zm_Drought_P Parameter: Age (day) Value: 9
  misc_feature: MA Experiment 108556 PARAMETER Experiment Name: Zm_Drought_P Parameter: Organism Value: Zea mays
  misc_feature: MA Experiment 108556 PARAMETER Experiment Name: Zm_Drought_P Parameter: Plant Line Value: 35A19
  misc_feature: MA Experiment 108556 PARAMETER Experiment Name: Zm_Drought_P Parameter: Timepoint (hr) Value: 24
  misc_feature: MA Experiment 108556 PARAMETER Experiment Name: Zm_Drought_P Parameter: Tissue Value: Aerial
  misc_feature: MA Experiment 108556 PARAMETER Experiment Name: Zm_Drought_P Parameter: Treatment Value: Drought vs. No Drought
  misc_feature: MA Experiment ID: 108597 Result: Down-regulated in Transcription
  misc_feature: MA Experiment 108597 PARAMETER Experiment Name: Zm_100uM_ABA_P Parameter: Age (day) Value: 9
  misc_feature: MA Experiment 108597 PARAMETER Experiment Name: Zm_100uM_ABA_P Parameter: Organism Value: Zea mays
  misc_feature: MA Experiment 108597 PARAMETER Experiment Name: Zm_100uM_ABA_P Parameter: Plant Line Value: 35A19
  misc_feature: MA Experiment 108597 PARAMETER Experiment Name: Zm_100uM_ABA_P Parameter: Timepoint (hr) Value: 24
  misc_feature: MA Experiment 108597 PARAMETER Experiment Name: Zm_100uM_ABA_P Parameter: Tissue Value: Aerial
  misc_feature: MA Experiment 108597 PARAMETER Experiment Name: Zm_100uM_ABA_P Parameter: Treatment Value: 100uM ABA vs. No Treatment
  misc_feature: MA Experiment ID: 20000478 Result: Down-regulated in Transcription
  misc_feature: MA Experiment 20000478 PARAMETER Experiment Name: Zm_5mM_SA_P Parameter: Age (day) Value: 11
  misc_feature: MA Experiment 20000478 PARAMETER Experiment Name: Zm_5mM_SA_P Parameter: Organism Value: Zea mays
  misc_feature: MA Experiment 20000478 PARAMETER Experiment Name: Zm_5mM_SA_P Parameter: Plant Line Value: 35A19
  misc_feature: MA Experiment 20000478 PARAMETER Experiment Name: Zm_5mM_SA_P Parameter: Timepoint (hr) Value: 72
  misc_feature: MA Experiment 20000478 PARAMETER Experiment Name: Zm_5mM_SA_P Parameter: Tissue Value: Aerial
  misc_feature: MA Experiment 20000478 PARAMETER Experiment Name: Zm_5mM_SA_P Parameter: Treatment Value: 5mM SA vs. No Treatment
  misc_feature: MA Experiment ID: 20000480 Result: Down-regulated in Transcription
  misc_feature: MA Experiment 20000480 PARAMETER Experiment Name: Zm_Drought_P Parameter: Age (day) Value: 11
  misc_feature: MA Experiment 20000480 PARAMETER Experiment Name: Zm_Drought_P Parameter: Organism Value: Zea mays
  misc_feature: MA Experiment 20000480 PARAMETER Experiment Name: Zm_Drought_P Parameter: Plant Line Value: 35A19
  misc_feature: MA Experiment 20000480 PARAMETER Experiment Name: Zm_Drought_P Parameter: Timepoint (hr) Value: 72
  misc_feature: MA Experiment 20000480 PARAMETER Experiment Name: Zm_Drought_P Parameter: Tissue Value: Aerial
  misc_feature: MA Experiment 20000480 PARAMETER Experiment Name: Zm_Drought_P Parameter: Treatment Value: Drought vs. No Drought
  misc_feature: MA Experiment ID: 20000488 Result: Down-regulated in Transcription
  misc_feature: MA Experiment 20000488 PARAMETER Experiment Name: Zm_50mM_NH4NO3_L_to_H_P Parameter: Organism Value: Zea mays
  misc_feature: MA Experiment 20000488 PARAMETER Experiment Name: Zm_50mM_NH4NO3_L_to_H_P Parameter: Timepoint (hr) Value: 8
  misc_feature: MA Experiment 20000488 PARAMETER Experiment Name: Zm_50mM_NH4NO3_L_to_H_P Parameter: Tissue Value: Leaves
  misc_feature: MA Experiment 20000488 PARAMETER Experiment Name: Zm_50mM_NH4NO3_L_to_H_P Parameter: Treatment Value: 50mM NH4NO3 vs. 100mM Mannitol

SEQ ID NO: 14206 - protein, 441 aa, Zea mays subsp. mays; identical to SEQ ID NO: 6527
  peptide (1)..(441): Ceres Seq. ID no. 12566007
  misc_feature (243)..(405): Pfam Name: MatE Pfam Description: MatE
  misc_feature (243)..(405): Pfam Name: MatE Pfam Description: MatE
  misc_feature (4)..(405): Homolog of NCBI NO: 37532026 NR Description: putative membrane protein [Oryza sativa (japonica group)] >gi|22748423|gb|AAN05388.1| putative membrane protein
  misc_feature (1)..(405): Homolog of NCBI NO: 16924114 NR Description: putative multidrug efflux protein [Oryza sativa]
  misc_feature (10)..(406): Homolog of NCBI NO: 15220246 NR Description: unknown protein; protein id: At1g47530.1, by cDNA: gi_16604504 [Arabidopsis thaliana]
  misc_feature (10)..(406): Homolog of NCBI NO: 16604505 NR Description: At1g47530/F16N3_20 [Arabidopsis thaliana]
  misc_feature (1)..(406): Homolog of NCBI NO: 15220701 NR Description: conserved hypothetical protein; protein id:
  misc_feature (1)..(405): Homolog of NCBI NO: 16924114 NR Description: putative multidrug efflux protein [Oryza sativa]
  misc_feature (10)..(406): Homolog of NCBI NO: 16604505 NR Description: At1g47530/F16N3_20 [Arabidopsis thaliana]
  misc_feature (11)..(406): Homolog of NCBI NO: 30686958 NR Description: MATE efflux protein family [Arabidopsis thaliana]
  misc_feature (7)..(337): Homolog of NCBI NO: 34909838 NR Description: P0403C05.27 [Oryza sativa (japonica
  misc_feature (11)..(406): Homolog of NCBI NO: 15240824 NR Description: putative transmembrane protein; protein id: supported by cDNA: gi_13937233 [Arabidopsis thaliana] emb|CAA66809.1~gene_id:F16F17.3~strong similarity to unknown
  misc_feature (11)..(406): Homolog of NCBI NO: 15231577 NR Description: integral membrane protein, putative; protein id: supported by cDNA: gi_16323120 [Arabidopsis thaliana] unknown [Arabidopsis thaliana] >gi|9293938|dbj|BAB01841.1|
  misc_feature (11)..(406): Homolog of NCBI NO: 15222119 NR Description: unknown protein; protein id: At1g12950.1
  misc_feature (1)..(406): Homolog of NCBI NO: 15220701 NR Description: conserved hypothetical protein; protein id:
  misc_feature (10)..(406): Homolog of NCBI NO: 15220246 NR Description: unknown protein; protein id: At1g47530.1, by cDNA: gi_16604504 [Arabidopsis thaliana]
  misc_feature (4)..(405): Homolog of NCBI NO: 37532026 NR Description: putative membrane protein [Oryza sativa (japonica group)] >gi|22748423|gb|AAN05388.1| putative membrane protein
  misc_feature (11)..(406): Homolog of NCBI NO: 15222119 NR Description: unknown protein; protein id: At1g12950.1
  misc_feature (11)..(406): Homolog of NCBI NO: 15231577 NR Description: integral membrane protein, putative; protein id: supported by cDNA: gi_16323120 [Arabidopsis thaliana] unknown [Arabidopsis thaliana] >gi|9293938|dbj|BAB01841.1|
  misc_feature (11)..(406): Homolog of NCBI NO: 15240824 NR Description: putative transmembrane protein; protein id: supported by cDNA: gi_13937233 [Arabidopsis thaliana] emb|CAA66809.1~gene_id:F16F17.3~strong similarity to unknown
  misc_feature (7)..(337): Homolog of NCBI NO: 34909838 NR Description: P0403C05.27 [Oryza sativa (japonica
  misc_feature (11)..(406): Homolog of NCBI NO: 30686958 NR Description: MATE efflux protein family [Arabidopsis thaliana]

SEQ ID NO: 14207 - protein, 373 aa, Zea mays subsp. mays; identical to SEQ ID NO: 6528
  peptide (1)..(373): Ceres Seq. ID no. 12566008
  misc_feature (175)..(337): Pfam Name: MatE Pfam Description: MatE
  misc_feature (175)..(337): Pfam Name: MatE Pfam Description: MatE
  misc_feature (1)..(337): Homolog of NCBI NO: 37532026 NR Description: putative membrane protein [Oryza sativa (japonica group)] >gi|22748423|gb|AAN05388.1| putative membrane protein
  misc_feature (1)..(337): Homolog of NCBI NO: 16924114 NR Description: putative multidrug efflux protein [Oryza sativa]
  misc_feature (1)..(338): Homolog of NCBI NO: 15220246 NR Description: unknown protein; protein id: At1g47530.1, by cDNA: gi_16604504 [Arabidopsis thaliana]
  misc_feature (1)..(338): Homolog of NCBI NO: 16604505 NR Description: At1g47530/F16N3_20 [Arabidopsis thaliana]
  misc_feature (1)..(338): Homolog of NCBI NO: 15220701 NR Description: conserved hypothetical protein; protein id:
  misc_feature (1)..(337): Homolog of NCBI NO: 16924114 NR Description: putative multidrug efflux protein [Oryza sativa]
  misc_feature (1)..(338): Homolog of NCBI NO: 16604505 NR Description: At1g47530/F16N3_20 [Arabidopsis thaliana]
  misc_feature (1)..(338): Homolog of NCBI NO: 30686958 NR Description: MATE efflux protein family [Arabidopsis thaliana]
  misc_feature (1)..(269): Homolog of NCBI NO: 34909838 NR Description: P0403C05.27 [Oryza sativa (japonica
  misc_feature (1)..(338): Homolog of NCBI NO: 15240824 NR Description: putative transmembrane protein; protein id: supported by cDNA: gi_13937233 [Arabidopsis thaliana] emb|CAA66809.1~gene_id:F16F17.3~strong similarity to unknown
  misc_feature (1)..(338): Homolog of NCBI NO: 15231577 NR Description: integral membrane protein, putative; protein id: supported by cDNA: gi_16323120 [Arabidopsis thaliana] unknown [Arabidopsis thaliana] >gi|9293938|dbj|BAB01841.1|
  misc_feature (1)..(338): Homolog of NCBI NO: 15222119 NR Description: unknown protein; protein id: At1g12950.1
  misc_feature (1)..(338): Homolog of NCBI NO: 15220701 NR Description: conserved hypothetical protein; protein id:
  misc_feature (1)..(338): Homolog of NCBI NO: 15220246 NR Description: unknown protein; protein id: At1g47530.1, by cDNA: gi_16604504 [Arabidopsis thaliana]
  misc_feature (1)..(337): Homolog of NCBI NO: 37532026 NR Description: putative membrane protein [Oryza sativa (japonica group)] >gi|22748423|gb|AAN05388.1| putative membrane protein
  misc_feature (1)..(338): Homolog of NCBI NO: 15222119 NR Description: unknown protein; protein id: At1g12950.1
  misc_feature (1)..(338): Homolog of NCBI NO: 15231577 NR Description: integral membrane protein, putative; protein id: supported by cDNA: gi_16323120 [Arabidopsis thaliana] unknown [Arabidopsis thaliana] >gi|9293938|dbj|BAB01841.1|
  misc_feature (1)..(338): Homolog of NCBI NO: 15240824 NR Description: putative transmembrane protein; protein id: supported by cDNA: gi_13937233 [Arabidopsis thaliana] emb|CAA66809.1~gene_id:F16F17.3~strong similarity to unknown
  misc_feature (1)..(269): Homolog of NCBI NO: 34909838 NR Description: P0403C05.27 [Oryza sativa (japonica
  misc_feature (1)..(338): Homolog of NCBI NO: 30686958 NR Description: MATE efflux protein family [Arabidopsis thaliana]

SEQ ID NO: 14208 - protein, 288 aa, Zea mays subsp. mays; identical to SEQ ID NO: 6529
  peptide (1)..(288): Ceres Seq. ID no. 12566009
  misc_feature (90)..(252): Pfam Name: MatE Pfam Description: MatE
  misc_feature (90)..(252): Pfam Name: MatE Pfam Description: MatE
  misc_feature (1)..(252): Homolog of NCBI NO: 37532026 NR Description: putative membrane protein [Oryza sativa (japonica group)] >gi|22748423|gb|AAN05388.1| putative membrane protein
  misc_feature (1)..(252): Homolog of NCBI NO: 16924114 NR Description: putative multidrug efflux protein [Oryza sativa]
  misc_feature (1)..(253): Homolog of NCBI NO: 15220246 NR Description: unknown protein; protein id: At1g47530.1, by cDNA: gi_16604504 [Arabidopsis thaliana]
  misc_feature (1)..(253): Homolog of NCBI NO: 16604505 NR Description: At1g47530/F16N3_20 [Arabidopsis thaliana]
  misc_feature (1)..(253): Homolog of NCBI NO: 15220701 NR Description: conserved hypothetical protein; protein id:
  misc_feature (1)..(252): Homolog of NCBI NO: 16924114 NR Description: putative multidrug efflux protein [Oryza sativa]
  misc_feature (1)..(253): Homolog of NCBI NO: 16604505 NR Description: At1g47530/F16N3_20 [Arabidopsis thaliana]
  misc_feature (1)..(253): Homolog of NCBI NO: 30686958 NR Description: MATE efflux protein family [Arabidopsis thaliana]
  misc_feature (1)..(184): Homolog of NCBI NO: 34909838 NR Description: P0403C05.27 [Oryza sativa (japonica
  misc_feature (1)..(253): Homolog of NCBI NO: 15240824 NR Description: putative transmembrane protein; protein id: supported by cDNA: gi_13937233 [Arabidopsis thaliana] emb|CAA66809.1~gene_id:F16F17.3~strong similarity to unknown
  misc_feature (1)..(253): Homolog of NCBI NO: 15231577 NR Description: integral membrane protein, putative; protein id: supported by cDNA: gi_16323120 [Arabidopsis thaliana] unknown [Arabidopsis thaliana] >gi|9293938|dbj|BAB01841.1|
  misc_feature (1)..(253): Homolog of NCBI NO: 15222119 NR Description: unknown protein; protein id: At1g12950.1
  misc_feature (1)..(253): Homolog of NCBI NO: 15220701 NR Description: conserved hypothetical protein; protein id:
  misc_feature (1)..(253): Homolog of NCBI NO: 15220246 NR Description: unknown protein; protein id: At1g47530.1, by cDNA: gi_16604504 [Arabidopsis thaliana]
  misc_feature (1)..(252): Homolog of NCBI NO: 37532026 NR Description: putative membrane protein [Oryza sativa (japonica group)] >gi|22748423|gb|AAN05388.1| putative membrane protein
  misc_feature (1)..(253): Homolog of NCBI NO: 15222119 NR Description: unknown protein; protein id: At1g12950.1
  misc_feature (1)..(253): Homolog of NCBI NO: 15231577 NR Description: integral membrane protein, putative; protein id: supported by cDNA: gi_16323120 [Arabidopsis thaliana] unknown [Arabidopsis thaliana] >gi|9293938|dbj|BAB01841.1|
  misc_feature (1)..(253): Homolog of NCBI NO: 15240824 NR Description: putative transmembrane protein; protein id: supported by cDNA: gi_13937233 [Arabidopsis thaliana] emb|CAA66809.1~gene_id:F16F17.3~strong similarity to unknown
  misc_feature (1)..(184): Homolog of NCBI NO: 34909838 NR Description: P0403C05.27 [Oryza sativa (japonica
  misc_feature (1)..(253): Homolog of NCBI NO: 30686958 NR Description: MATE efflux protein family [Arabidopsis thaliana]

SEQ ID NO: 14209 - DNA, 1010 bp, Zea mays subsp. mays
  misc_feature (1)..(1010): Ceres Seq. ID no. 12450604
  misc_feature: MA Experiment ID: 108522 Result: Up-regulated in Transcription
  misc_feature: MA Experiment 108522 PARAMETER Experiment Name: Zm_42deg_Heat_P Parameter: Age (day) Value: 8
  misc_feature: MA Experiment 108522 PARAMETER Experiment Name: Zm_42deg_Heat_P Parameter: Organism Value: Zea mays
  misc_feature: MA Experiment 108522 PARAMETER Experiment Name: Zm_42deg_Heat_P Parameter: Plant Line Value: 35A19
  misc_feature: MA Experiment 108522 PARAMETER Experiment Name: Zm_42deg_Heat_P Parameter: Temperature (deg C) Value: 42 vs. 22
  misc_feature: MA Experiment 108522 PARAMETER Experiment Name: Zm_42deg_Heat_P Parameter: Timepoint (hr) Value: 1
  misc_feature: MA Experiment 108522 PARAMETER Experiment Name: Zm_42deg_Heat_P Parameter: Tissue Value: Aerial
  misc_feature: MA Experiment ID: 108523 Result: Up-regulated in Transcription
  misc_feature: MA Experiment 108523 PARAMETER Experiment Name: Zm_42deg_Heat_P Parameter: Age (day) Value: 8
  misc_feature: MA Experiment 108523 PARAMETER Experiment Name: Zm_42deg_Heat_P Parameter: Organism Value: Zea mays
  misc_feature: MA Experiment 108523 PARAMETER Experiment Name: Zm_42deg_Heat_P Parameter: Plant Line Value: 35A19
  misc_feature: MA Experiment 108523 PARAMETER Experiment Name: Zm_42deg_Heat_P Parameter: Temperature (deg C) Value: 42 vs. 22
  misc_feature: MA Experiment 108523 PARAMETER Experiment Name: Zm_42deg_Heat_P Parameter: Timepoint (hr) Value: 6
  misc_feature: MA Experiment 108523 PARAMETER Experiment Name: Zm_42deg_Heat_P Parameter: Tissue Value: Aerial
  misc_feature: MA Experiment ID: 108543 Result: Up-regulated in Transcription
  misc_feature: MA Experiment ID: 108556 Result: Up-regulated in Transcription
  misc_feature: MA Experiment 108556 PARAMETER Experiment Name: Zm_Drought_P Parameter: Age (day) Value: 9
  misc_feature: MA Experiment 108556 PARAMETER Experiment Name: Zm_Drought_P Parameter: Organism Value: Zea mays
  misc_feature: MA Experiment 108556 PARAMETER Experiment Name: Zm_Drought_P Parameter: Plant Line Value: 35A19
  misc_feature: MA Experiment 108556 PARAMETER Experiment Name: Zm_Drought_P Parameter: Timepoint (hr) Value: 24
  misc_feature: MA Experiment 108556 PARAMETER Experiment Name: Zm_Drought_P Parameter: Tissue Value: Aerial
  misc_feature: MA Experiment 108556 PARAMETER Experiment Name: Zm_Drought_P Parameter: Treatment Value: Drought vs. No Drought
  misc_feature: MA Experiment ID: 108597 Result: Up-regulated in Transcription
  misc_feature: MA Experiment 108597 PARAMETER Experiment Name: Zm_100uM_ABA_P Parameter: Age (day) Value: 9
  misc_feature: MA Experiment 108597 PARAMETER Experiment Name: Zm_100uM_ABA_P Parameter: Organism Value: Zea mays
  misc_feature: MA Experiment 108597 PARAMETER Experiment Name: Zm_100uM_ABA_P Parameter: Plant Line Value: 35A19
  misc_feature: MA Experiment 108597 PARAMETER Experiment Name: Zm_100uM_ABA_P Parameter: Timepoint (hr) Value: 24
  misc_feature: MA Experiment 108597 PARAMETER Experiment Name: Zm_100uM_ABA_P Parameter: Tissue Value: Aerial
  misc_feature: MA Experiment 108597 PARAMETER Experiment Name: Zm_100uM_ABA_P Parameter: Treatment Value: 100uM ABA vs. No Treatment
acgagtgcactgcgcacaacgctgtgcgtgtgcggtgtgcgctcgacgattccagacattgcccacgggccacggccgccaaacacagctgccggaactgcacgccctcctcgctccactgatccaaagctgcgcctgcgctcgctccaaggtacccatgggatcccaccaccactacacctccgcctcgcaattcgtcttcgccgccgtcgattccaaccccaaccccaggcccagctacagccacaagcccaagaccaccgtgcaaatccccatcacgtctctaccagaacgggctcgggcgggaccgcccgacgcggcggccgccgccaagatccaggcggccttgcggggctacctggtcatgcggcacgccgcggccgtgcgcggggccgacgccgaggcgacgcggctcgagcggctgctccggcggcaggagaccgtggacgccgtccgcggcgacgagcgcgagcgggcccggttctccgaggcgctcatggccgtgctgctccgcctggacgccgtgccgggacgctacccggccgtgcgggacgcgcggcgcgccgtgagccgccgcgtcgtcggcctgcaggaagtgttcgacgctgttgtcncggcncctgcagngcagacttgcggggttccggctagcctggagcaggtcctngaagggatntggggcatcgganaggcgcctgttccggtgccgccggcgcaggcgatggccgcggtggaggaggaagtnaggaggggcggatcatactgggcaaggttttttggtggagtgggctggccgtgactgtgactctgtgagtgtgtagcgaggagggtacctgggtactagaatggctatagnctactgctgtgccgtactcggctgcacatgtattttgagatgtgtcgtattgtataccaaagtgccatgttgctgttaatgacgtgagagaaaaactgtaagtcaccatttggatcctttatttcagggctcgtttgtcggcaatgttttaccg

SEQ ID NO: 14210 - protein, 265 aa, Zea mays subsp. mays
  peptide (1)..(265): Ceres Seq. ID no. 12450605
  misc_feature (128)..(203): Pfam Name: BAG domain Pfam Description: BAG domain
  misc_feature (84)..(258): Homolog of NCBI NO: 25402702 NR Description: protein F12F1.7 [imported] - Arabidopsis thaliana
  misc_feature (84)..(203): Homolog of NCBI NO: 15221182 NR Description: hypothetical protein; protein id: At1g12060.1
  misc_feature (205)..(205): Xaa is any aa, unknown or other
  misc_feature (206)..(206): Xaa is any aa, unknown or other
  misc_feature (209)..(209): Xaa is any aa, unknown or other
  misc_feature (222)..(222): Xaa is any aa, unknown or other
  misc_feature (225)..(225): Xaa is any aa, unknown or other
  misc_feature (230)..(230): Xaa is any aa, unknown or other
  misc_feature (248)..(248): Xaa is any aa, unknown or other
RVHCAQRCACAVCARRFQTLPTGHGRQTQLPELHALLAPLIQSCACARSKVPMGSHHHYTSASQFVFAAVDSNPNPRPSYSHKPKTTVQIPITSLPERARAGPPDAAAAAKIQAALRGYLVMRHAAAVRGADAEATRLERLLRRQETVDAVRGDERERARFSEALMAVLLRLDAVPGRYPAVRDARRAVSRRVVGLQEVFDAVVXXPAXQTCGVPASLEQVXEGXWGIGXAPVPVPPAQAMAAVEEEXRRGGSYWARFFGGVGWP

SEQ ID NO: 14211 - protein, 216 aa, Zea mays subsp. mays
  peptide (1)..(216): Ceres Seq. ID no. 12450606
  misc_feature (24)..(216): Homolog of NCBI NO: 29247944 NR Description: GLP_26_54603_52153 [Giardia lamblia ATCC 50803]
  misc_feature (14)..(216): Homolog of NCBI NO: 22960369 NR Description: hypothetical protein [Rhodobacter sphaeroides]
  misc_feature (50)..(216): Homolog of NCBI NO: 29830954 NR Description: putative GntR-family transcriptional regulator
  misc_feature (18)..(216): Homolog of NCBI NO: 23104258 NR Description: hypothetical protein [Azotobacter vinelandii]
  misc_feature (205)..(205): Xaa is any aa, unknown or other
  misc_feature (207)..(207): Xaa is any aa, unknown or other
  misc_feature (209)..(209): Xaa is any aa, unknown or other
TSALRTTLCVCGVRSTIPDIAHGPRPPNTAAGTARPPRSTDPKLRLRSLQGTHGIPPPLHLRLAIRLRRRRFQPQPQAQLQPQAQDHRANPHHVSTRTGSGGTARRGGRRQDPGGLAGLPGHAARRGRARGRRRGDAARAAAPAAGDRGRRPRRRARAGPVLRGAHGRAAPPGRRAGTLPGRAGRAARREPPRRRPAGSVRRCCXGXCXADLRGSG

SEQ ID NO: 14212 - protein, 213 aa, Zea mays subsp. mays
  peptide (1)..(213): Ceres Seq. ID no. 12450607
  misc_feature (76)..(151): Pfam Name: BAG domain Pfam Description: BAG domain
  misc_feature (32)..(206): Homolog of NCBI NO: 25402702 NR Description: protein F12F1.7 [imported] - Arabidopsis thaliana
  misc_feature (32)..(151): Homolog of NCBI NO: 15221182 NR Description: hypothetical protein; protein id: At1g12060.1
  misc_feature (153)..(153): Xaa is any aa, unknown or other
  misc_feature (154)..(154): Xaa is any aa, unknown or other
  misc_feature (157)..(157): Xaa is any aa, unknown or other
  misc_feature (170)..(170): Xaa is any aa, unknown or other
  misc_feature (173)..(173): Xaa is any aa, unknown or other
  misc_feature (178)..(178): Xaa is any aa, unknown or other
  misc_feature (196)..(196): Xaa is any aa, unknown or other
MGSHHHYTSASQFVFAAVDSNPNPRPSYSHKPKTTVQIPITSLPERARAGPPDAAAAAKIQAALRGYLVMRHAAAVRGADAEATRLERLLRRQETVDAVRGDERERARFSEALMAVLLRLDAVPGRYPAVRDARRAVSRRVVGLQEVFDAVVXXPAXQTCGVPASLEQVXEGXWGIGXAPVPVPPAQAMAAVEEEXRRGGSYWARFFGGVGWP

SEQ ID NO: 14213 - DNA, 1884 bp, Zea mays subsp. mays
  misc_feature (1)..(1884): Ceres Seq. ID no. 12425457
  misc_feature: MA Experiment ID: 108522 Result: Down-regulated in Transcription
  misc_feature: MA Experiment 108522 PARAMETER Experiment Name: Zm_42deg_Heat_P Parameter: Age (day) Value: 8
  misc_feature: MA Experiment 108522 PARAMETER Experiment Name: Zm_42deg_Heat_P Parameter: Organism Value: Zea mays
  misc_feature: MA Experiment 108522 PARAMETER Experiment Name: Zm_42deg_Heat_P Parameter: Plant Line Value: 35A19
  misc_feature: MA Experiment 108522 PARAMETER Experiment Name: Zm_42deg_Heat_P Parameter: Temperature (deg C) Value: 42 vs. 22
  misc_feature: MA Experiment 108522 PARAMETER Experiment Name: Zm_42deg_Heat_P Parameter: Timepoint (hr) Value: 1
  misc_feature: MA Experiment 108522 PARAMETER Experiment Name: Zm_42deg_Heat_P Parameter: Tissue Value: Aerial
  misc_feature: MA Experiment ID: 108535 Result: Up-regulated in Transcription
  misc_feature: MA Experiment 108535 PARAMETER Experiment Name: Zm_Meristem_P Parameter: Age (day) Value: 8
  misc_feature: MA Experiment 108535 PARAMETER Experiment Name: Zm_Meristem_P Parameter: Organism Value: Zea mays
  misc_feature: MA Experiment 108535 PARAMETER Experiment Name: Zm_Meristem_P Parameter: Plant Line Value: 35A19
  misc_feature: MA Experiment 108535 PARAMETER Experiment Name: Zm_Meristem_P Parameter: Tissue Value: Root Meristem vs. Above Root Meristem
  misc_feature: MA Experiment ID: 108543 Result: Up-regulated in Transcription
  misc_feature: MA Experiment ID: 108544 Result: Down-regulated in Transcription
  misc_feature: MA Experiment ID: 108556 Result: Down-regulated in Transcription
  misc_feature: MA Experiment 108556 PARAMETER Experiment Name: Zm_Drought_P Parameter: Age (day) Value: 9
  misc_feature: MA Experiment 108556 PARAMETER Experiment Name: Zm_Drought_P Parameter: Organism Value: Zea mays
  misc_feature: MA Experiment 108556 PARAMETER Experiment Name: Zm_Drought_P Parameter: Plant Line Value: 35A19
  misc_feature: MA Experiment 108556 PARAMETER Experiment Name: Zm_Drought_P Parameter: Timepoint (hr) Value: 24
  misc_feature: MA Experiment 108556 PARAMETER Experiment Name: Zm_Drought_P Parameter: Tissue Value: Aerial
  misc_feature: MA Experiment 108556 PARAMETER Experiment Name: Zm_Drought_P Parameter: Treatment Value: Drought vs. No Drought
  misc_feature: MA Experiment ID: 108689 Result: Down-regulated in Transcription
  misc_feature: MA Experiment 108689 PARAMETER Experiment Name: Zm_Drought_Roots_P Parameter: Age (day) Value: 9
  misc_feature: MA Experiment 108689 PARAMETER Experiment Name: Zm_Drought_Roots_P Parameter: Organism Value: Zea mays
  misc_feature: MA Experiment 108689 PARAMETER Experiment Name: Zm_Drought_Roots_P Parameter: Plant Line Value: 35A19
  misc_feature: MA Experiment 108689 PARAMETER Experiment Name: Zm_Drought_Roots_P Parameter: Timepoint (hr) Value: 24
  misc_feature: MA Experiment 108689 PARAMETER Experiment Name: Zm_Drought_Roots_P Parameter: Tissue Value: Roots
  misc_feature: MA Experiment 108689 PARAMETER Experiment Name: Zm_Drought_Roots_P Parameter: Treatment Value: Drought vs. No Drought
  misc_feature: MA Experiment ID: 20000626 Result: Down-regulated in Transcription
  misc_feature: MA Experiment 20000626 PARAMETER Experiment Name: Zm_Herbicide-Treatments_P Parameter: Timepoint (hr) Value: 12
  misc_feature: MA Experiment 20000626 PARAMETER Experiment Name: Zm_Herbicide-Treatments_P Parameter: Tissue Value: Aerial
  misc_feature: MA Experiment 20000626 PARAMETER Experiment Name: Zm_Herbicide-Treatments_P Parameter: Treatment Value: Roundup vs. No Treatment
aaaaaaacccaaaaaaacaattggcagcgcaaccgcccacagctcgtgacgaggcgacccaacccccccgtagcggcggcggcggcggcgagcaatcctccggtccggccggcggaaacactagcggcgggaggcagagcgtccaatggcggaggacgggggcaaggccgcggcggcgactgcggcggaggcgggaggcggaggagccaaggagggcggcgaggagaggaccgtcaagctcttcgtgggccaggtgcccaagcacatggccgaggccgacctgctcgccttgttccgcgaggtagccgccgtcgacgaggtcaccgtcatcaaggacaaggccaccaaggtctcccgagggtgctgcttcgtcatatgcccctcaagggaggaagctgacaaggcggtgaatgcctaccacaacaagcaaaccctctctggggtatgcgagcatactactaaccttgttctggcatcaagtcctttgcaagtaaaatatgctgatggagagttggagaggcttgaacataagcttttcattggaatgcttccgaaaaatgttacggacactgagttgactgatttgttttccaaatatgggaatgtcacggatttgcaaattttgagaggttcacaacaaacaaacaaagctggctgtgccttcattaaatatcaaacaaaagatcaagcattggcagctattgaagctctaaacgggaaacacaaaatagagggttctagcgtgccgttggttgtcaaatgggctgatacagaaaaggaaaggcaggctcggaaagcacaaaaagctcagtcacagctatctcatatacccaatgcaagtccaatgcagcagcactcttcagtatttggtgctttacagatgggatatatgcctcaatacaatggatttggttatcagccaacagggacatacggacttatgcagtaccctctatctcctatgcaaaatcaaggccccttccagaatatggtccaacctcttaatcaagggaactcgataagaggagtcaatcctgaagtgtctcccagttcagttcaaaggtcatttaatgcaatgcagctaggcagcccttatcctgctatgcctggtatgcagtatcctggatcatatcccggtggtcccatgggcaaccgtcatttgggaaattctcacaatccgattaaagttccaaattcgaatgccaattccactgtttcttctagtcccagcagcaatgctggtgggcaggttgaaggtcctcctggagccaacctatttatttatcatatcccacaagaatacggtgaccaggagctttccagcgccttccagagtttcggaagagtagtaagcgctaaggtgttcgtggacaaagcaacgggcgtgagcaaatgcttcggtttcgtgagctacgactctcctgcctccgcgcaggcagccatcaacaggatgaacggctaccagttaggcggtaaaaaactcaaggtacaactgaagagagaaaacaacaccaagcacagtagtaaaccgttttgacagacaaggcagcagccgtccggtacccggtacatattaattgaccatcaacacattgcagcagcagccttcagggcctggggagggaagagacccgtgtaccccctctttgttcaccttcacattcttggagattcgtcagtcagctcagctcgtgtaattcattgcagcagacataggccgtagcagcagtttgtaccatgatcagatcacttgtacacatgattcattcaattgttactgacagccggctttcatcctagaataattcgctgtgacaaccttatcatttgctgacgaatgaagtcaggtagacttgttcatctatggaatgatggcaactttcg

SEQ ID NO: 14214 - protein, 463 aa, Zea mays subsp. mays
  peptide (1)..(463): Ceres Seq. ID no. 12425458
  misc_feature (130)..(202): Pfam Name: RNA recognition motif. (a.k.a. RRM, RBD, or RNP domain) Pfam Description: RNA recognition motif. (a.k.a. RRM, RBD, or RNP
  misc_feature (2)..(463): Homolog of NCBI NO: 34907248 NR Description: putative ribonucleoprotein [Oryza sativa cultivar- group)] >gi|20160777|dbj|BAB89718.1| putative
  misc_feature (14)..(462): Homolog of NCBI NO: 18412143 NR Description: RNA-binding CELF protein, putative; protein id: supported by cDNA: 114653. [Arabidopsis thaliana]
  misc_feature (14)..(461): Homolog of NCBI NO: 7488303 NR Description: ribonucleoprotein homolog T4I9.1 - Arabidopsis >gi|3924594|gb|AAC79095.1| putative ribonucleoprotein thaliana] >gi|4262139|gb|AAD14439.1| putative ribonucleoprotein
  misc_feature (14)..(424): Homolog of NCBI NO: 30679366 NR Description: RNA-binding protein, putative [Arabidopsis >gi|17529054|gb|AAL38737.1| putative ribonucleoprotein
  misc_feature (26)..(461): Homolog of NCBI NO: 25386552 NR Description: protein F21B7.8 [imported] - Arabidopsis thaliana
  misc_feature (26)..(319): Homolog of NCBI NO: 7488302 NR Description: ribonucleoprotein homolog F21B7.26 - Arabidopsis
  misc_feature (371)..(461): Homolog of NCBI NO: 7488302 NR Description: ribonucleoprotein homolog F21B7.26 - Arabidopsis
  misc_feature (19)..(453): Homolog of NCBI NO: 33354192 NR Description: putative CUG triplet repeat RNA-binding protein 1
  misc_feature (26)..(351): Homolog of NCBI NO: 22329313 NR Description: RNA-binding CELF protein, putative; protein id: [Arabidopsis thaliana] >gi|26449591|dbj|BAC41921.1| putative [Arabidopsis thaliana] >gi|28950997|gb|AAO63422.1| At1g03457
  misc_feature (26)..(321): Homolog of NCBI NO: 28422663 NR Description: Similar to RIKEN cDNA 4930415M08 gene [Xenopus
MAEDGGKAAAATAAEAGGGGAKEGGEERTVKLFVGQVPKHMAEADLLALFREVAAVDEVTVIKDKATKVSRGCCFVICPSREEADKAVNAYHNKQTLSGVCEHTTNLVLASSPLQVKYADGELERLEHKLFIGMLPKNVTDTELTDLFSKYGNVTDLQILRGSQQTNKAGCAFIKYQTKDQALAAIEALNGKHKIEGSSVPLVVKWADTEKERQARKAQKAQSQLSHIPNASPMQQHSSVFGALQMGYMPQYNGFGYQPTGTYGLMQYPLSPMQNQGPFQNMVQPLNQGNSIRGVNPEVSPSSVQRSFNAMQLGSPYPAMPGMQYPGSYPGGPMGNRHLGNSHNPIKVPNSNANSTVSSSPSSNAGGQVEGPPGANLFIYHIPQEYGDQELSSAFQSFGRVVSAKVFVDKATGVSKCFGFVSYDSPASAQAAINRMNGYQLGGKKLKVQLKRENNTKHSSKPF

SEQ ID NO: 14215 - protein, 423 aa, Zea mays subsp. mays
  peptide (1)..(423): Ceres Seq. ID no. 12425459
  misc_feature (90)..(162): Pfam Name: RNA recognition motif. (a.k.a. RRM, RBD, or RNP domain) Pfam Description: RNA recognition motif. (a.k.a. RRM, RBD, or RNP
  misc_feature (1)..(311): Homolog of NCBI NO: 22329313 NR Description: RNA-binding CELF protein, putative; protein id: [Arabidopsis thaliana] >gi|26449591|dbj|BAC41921.1| putative [Arabidopsis thaliana] >gi|28950997|gb|AAO63422.1| At1g03457
  misc_feature (1)..(423): Homolog of NCBI NO: 34907248 NR Description: putative ribonucleoprotein [Oryza sativa cultivar- group)] >gi|20160777|dbj|BAB89718.1| putative
  misc_feature (1)..(421): Homolog of NCBI NO: 7488303 NR Description: ribonucleoprotein homolog T4I9.1 - Arabidopsis >gi|3924594|gb|AAC79095.1| putative ribonucleoprotein thaliana] >gi|4262139|gb|AAD14439.1| putative ribonucleoprotein
  misc_feature (1)..(421): Homolog of NCBI NO: 25386552 NR Description: protein F21B7.8 [imported] - Arabidopsis thaliana
  misc_feature (331)..(421): Homolog of NCBI NO: 7488302 NR Description: ribonucleoprotein homolog F21B7.26 - Arabidopsis
  misc_feature (1)..(413): Homolog of NCBI NO: 33354192 NR Description: putative CUG triplet repeat RNA-binding protein 1
  misc_feature (1)..(279): Homolog of NCBI NO: 7488302 NR Description: ribonucleoprotein homolog F21B7.26 - Arabidopsis
  misc_feature (1)..(384): Homolog of NCBI NO: 30679366 NR Description: RNA-binding protein, putative [Arabidopsis >gi|17529054|gb|AAL38737.1| putative ribonucleoprotein
  misc_feature (1)..(422): Homolog of NCBI NO: 18412143 NR Description: RNA-binding CELF protein, putative; protein id: supported by cDNA: 114653. [Arabidopsis thaliana]
  misc_feature (1)..(281): Homolog of NCBI NO: 28422663 NR Description: Similar to RIKEN cDNA 4930415M08 gene [Xenopus
MAEADLLALFREVAAVDEVTVIKDKATKVSRGCCFVICPSREEADKAVNAYHNKQTLSGVCEHTTNLVLASSPLQVKYADGELERLEHKLFIGMLPKNVTDTELTDLFSKYGNVTDLQILRGSQQTNKAGCAFIKYQTKDQALAAIEALNGKHKIEGSSVPLVVKWADTEKERQARKAQKAQSQLSHIPNASPMQQHSSVFGALQMGYMPQYNGFGYQPTGTYGLMQYPLSPMQNQGPFQNMVQPLNQGNSIRGVNPEVSPSSVQRSFNAMQLGSPYPAMPGMQYPGSYPGGPMGNRHLGNSHNPIKVPNSNANSTVSSSPSSNAGGQVEGPPGANLFIYHIPQEYGDQELSSAFQSFGRVVSAKVFVDKATGVSKCFGFVSYDSPASAQAAINRMNGYQLGGKKLKVQLKRENNTKHSSKPF

SEQ ID NO: 14216 - protein, 330 aa, Zea mays subsp. mays
  peptide (1)..(330): Ceres Seq. ID no. 12425460
  misc_feature (1)..(69): Pfam Name: RNA recognition motif. (a.k.a. RRM, RBD, or RNP domain) Pfam Description: RNA recognition motif. (a.k.a. RRM, RBD, or RNP
  misc_feature (1)..(330): Homolog of NCBI NO: 34907248 NR Description: putative ribonucleoprotein [Oryza sativa cultivar- group)] >gi|20160777|dbj|BAB89718.1| putative
  misc_feature (1)..(329): Homolog of NCBI NO: 18412143 NR Description: RNA-binding CELF protein, putative; protein id: supported by cDNA: 114653. [Arabidopsis thaliana]
  misc_feature (1)..(328): Homolog of NCBI NO: 7488303 NR Description: ribonucleoprotein homolog T4I9.1 - Arabidopsis >gi|3924594|gb|AAC79095.1| putative ribonucleoprotein thaliana] >gi|4262139|gb|AAD14439.1| putative ribonucleoprotein
  misc_feature (1)..(291): Homolog of NCBI NO: 30679366 NR Description: RNA-binding protein, putative [Arabidopsis >gi|17529054|gb|AAL38737.1| putative ribonucleoprotein
  misc_feature (1)..(328): Homolog of NCBI NO: 25386552 NR Description: protein F21B7.8 [imported] - Arabidopsis thaliana
  misc_feature (1)..(186): Homolog of NCBI NO: 7488302 NR Description: ribonucleoprotein homolog F21B7.26 - Arabidopsis
  misc_feature (238)..(328): Homolog of NCBI NO: 7488302 NR Description: ribonucleoprotein homolog F21B7.26 - Arabidopsis
  misc_feature (1)..(320): Homolog of NCBI NO: 33354192 NR Description: putative CUG triplet repeat RNA-binding protein 1
  misc_feature (1)..(218): Homolog of NCBI NO: 22329313 NR Description: RNA-binding CELF protein, putative; protein id: [Arabidopsis thaliana] >gi|26449591|dbj|BAC41921.1| putative [Arabidopsis thaliana] >gi|28950997|gb|AAO63422.1| At1g03457
  misc_feature (1)..(188): Homolog of NCBI NO: 28422663 NR Description: Similar to RIKEN cDNA 4930415M08 gene [Xenopus
MLPKNVTDTELTDLFSKYGNVTDLQILRGSQQTNKAGCAFIKYQTKDQALAAIEALNGKHKIEGSSVPLVVKWADTEKERQARKAQKAQSQLSHIPNASPMQQHSSVFGALQMGYMPQYNGFGYQPTGTYGLMQYPLSPMQNQGPFQNMVQPLNQGNSIRGVNPEVSPSSVQRSFNAMQLGSPYPAMPGMQYPGSYPGGPMGNRHLGNSHNPIKVPNSNANSTVSSSPSSNAGGQVEGPPGANLFIYHIPQEYGDQELSSAFQSFGRVVSAKVFVDKATGVSKCFGFVSYDSPASAQAAINRMNGYQLGGKKLKVQLKRENNTKHSSKPF

SEQ ID NO: 14217 - DNA, 1063 bp, Zea mays subsp. mays
  misc_feature (1)..(1063): Ceres Seq. ID no. 13586635
  misc_feature: MA Experiment ID: 108527 Result: Up-regulated in Transcription
  misc_feature: MA Experiment 108527 PARAMETER Experiment Name: Zm_5mM_NO_P Parameter: Age (day) Value: 8
  misc_feature: MA Experiment 108527 PARAMETER Experiment Name: Zm_5mM_NO_P Parameter: Organism Value: Zea mays
  misc_feature: MA Experiment 108527 PARAMETER Experiment Name: Zm_5mM_NO_P Parameter: Plant Line Value: 35A19
  misc_feature: MA Experiment 108527 PARAMETER Experiment Name: Zm_5mM_NO_P Parameter: Timepoint (hr) Value: 6
  misc_feature: MA Experiment 108527 PARAMETER Experiment Name: Zm_5mM_NO_P Parameter: Tissue Value: Aerial
  misc_feature: MA Experiment 108527 PARAMETER Experiment Name: Zm_5mM_NO_P Parameter: Treatment Value: 5mM NO vs. No Treatment
  misc_feature: MA Experiment ID: 108536 Result: Up-regulated in Transcription
  misc_feature: MA Experiment 108536 PARAMETER Experiment Name: Zm_Meristem_P Parameter: Age (day) Value: 8
  misc_feature: MA Experiment 108536 PARAMETER Experiment Name: Zm_Meristem_P Parameter: Organism Value: Zea mays
  misc_feature: MA Experiment 108536 PARAMETER Experiment Name: Zm_Meristem_P Parameter: Plant Line Value: 35A19
  misc_feature: MA Experiment 108536 PARAMETER Experiment Name: Zm_Meristem_P Parameter: Tissue Value: Shoot Meristem vs. Above Shoot Meristem
  misc_feature: MA Experiment ID: 108542 Result: Up-regulated in Transcription
  misc_feature: MA Experiment 108542 PARAMETER Experiment Name: Zm_150mM_NaCl_P Parameter: Age (day) Value: 8
  misc_feature: MA Experiment 108542 PARAMETER Experiment Name: Zm_150mM_NaCl_P Parameter: Organism Value: Zea mays
  misc_feature: MA Experiment 108542 PARAMETER Experiment Name: Zm_150mM_NaCl_P Parameter: Plant Line Value: 35A19
  misc_feature: MA Experiment 108542 PARAMETER Experiment Name: Zm_150mM_NaCl_P Parameter: Timepoint (hr) Value: 6
  misc_feature: MA Experiment 108542 PARAMETER Experiment Name: Zm_150mM_NaCl_P Parameter: Tissue Value: Aerial
  misc_feature: MA Experiment 108542 PARAMETER Experiment Name: Zm_150mM_NaCl_P Parameter: Treatment Value: 150mM NaCl vs. No Treatment
  misc_feature: MA Experiment ID: 108544 Result: Down-regulated in Transcription
  misc_feature: MA Experiment ID: 108559 Result: Up-regulated in Transcription
  misc_feature: MA Experiment 108559 PARAMETER Experiment Name: Zm_5mM_NO_P Parameter: Age (day) Value: 8
  misc_feature: MA Experiment 108559 PARAMETER Experiment Name: Zm_5mM_NO_P Parameter: Organism Value: Zea mays
  misc_feature: MA Experiment 108559 PARAMETER Experiment Name: Zm_5mM_NO_P Parameter: Plant Line Value: 35A19
  misc_feature: MA Experiment 108559 PARAMETER Experiment Name: Zm_5mM_NO_P Parameter: Timepoint (hr) Value: 12
  misc_feature: MA Experiment 108559 PARAMETER Experiment Name: Zm_5mM_NO_P Parameter: Tissue Value: Aerial
  misc_feature: MA Experiment 108559 PARAMETER Experiment Name: Zm_5mM_NO_P Parameter: Treatment Value: 5mM NO vs. No Treatment
  misc_feature: MA Experiment ID: 20000535 Result: Up-regulated in Transcription
  misc_feature: MA Experiment 20000535 PARAMETER Experiment Name: Zm_Hybrid_Seed_Dev_P Parameter: DAP Value: 30 vs. 12
  misc_feature: MA Experiment 20000535 PARAMETER Experiment Name: Zm_Hybrid_Seed_Dev_P Parameter: Organism Value: Zea mays
  misc_feature: MA Experiment 20000535 PARAMETER Experiment Name: Zm_Hybrid_Seed_Dev_P Parameter: Plant Line Value: 35A19
  misc_feature: MA Experiment 20000535 PARAMETER Experiment Name: Zm_Hybrid_Seed_Dev_P Parameter: Tissue Value: Embryo vs. Unfert Floret
cacgcgattctcgactcccctccacccatacgtaacacgttctcctcccacgcccccactaaaacagatgccttcgcccttcgtgcgccacaacggaaaacccaccactcgcgagcaagtgcaggcaccgttgcccatccatcgttcatgatcccagcctgcctccgcggcctctgcacctgcttcgacgtggacgacgacaaggctaacaaccacgagcaagagccgacgatggccgccgccgccgccgctacaggcagcgccgacgacgaccagacggcaagcaccatcacccaccgcaccgtggagctgagcaccggcgtgcgcctgcacgtggcggaggccggcggcgcggcggcaacagcagcaggaggcgcgcccgcggtgctgctgctgcacggcttcccggagctgtggtacacctggcgccaccagatgcgggcgctggccgcggccgggtaccgcgccgtggcgccggacctgcgcgggtacggcggctccgacgcgccggcggtgggcggcggcgacgacgacgacgacccggccgcgcagtacaccgcgctgcacgtggtgggggacctggtggcgctcctcgacgcgctcggcgagagccaggtgttcgtggcggcgcacgactggggcgcgctcgtggcctggagcctctgcctgttccggcccgaccgggtgcgcgcgctcgtcgcgctcagcgtcgcctacacgccccgcagcgccgcgcggaagccagtcgacggcctccgggcgctcttcggcgacgactactacatctgccggatccaggagcccggggaaatagaagcagaatttgctgcagagtggtgtcttcgcccaaggatgggaagagcggggagaagacgatgaccatcgatgtaggcgtatgcagggaaggcgagttcagccaagtagcaggagcatgagcttttattagagatagatgaagataggaagatttcaaattcttttcttcttcctttttcttgtacgagtccgttcctcggagagtatgaacttgtctcgtttcaaatcccaccttttttgtttaaac

SEQ ID NO: 14218 - protein, 292 aa, Zea mays subsp. mays
  peptide (1)..(292): Ceres Seq. ID no. 13586636
  misc_feature (154)..(276): Pfam Name: alpha/beta hydrolase fold Pfam Description: alpha/beta hydrolase fold
  misc_feature (94)..(275): Homolog of NCBI NO: 34902880 NR Description: unnamed protein product [Oryza sativa (japonica group)] >gi|5922625|dbj|BAA84626.1| unnamed protein product
  misc_feature (94)..(277): Homolog of NCBI NO: 34897302 NR Description: putative hydrolase [Oryza sativa (japonica
  misc_feature (97)..(276): Homolog of NCBI NO: 25044843 NR Description: epoxide hydrolase [Ananas comosus]
  misc_feature (124)..(276): Homolog of NCBI NO: 18411917 NR Description: epoxide hydrolase, putative [Arabidopsis thaliana]
  misc_feature (97)..(276): Homolog of NCBI NO: 7489256 NR Description: probable epoxide hydrolase (EC 3.3.2.3) (clone
  misc_feature (97)..(277): Homolog of NCBI NO: 15230018 NR Description: epoxide hydrolase, putative [Arabidopsis >gi|6714450|gb|AAF26137.1|AC011620_13 putative epoxide hydrolase thaliana] >gi|17979165|gb|AAL49778.1| putative epoxide putative
  misc_feature (94)..(267): Homolog of NCBI NO: 34902882 NR Description: unnamed protein product [Oryza sativa (japonica group)] >gi|5922626|dbj|BAA84627.1| unnamed protein product
  misc_feature (94)..(276): Homolog of NCBI NO: 34897298 NR Description: putative hydrolase [Oryza sativa (japonica
  misc_feature (99)..(276): Homolog of NCBI NO: 15225781 NR Description: epoxide hydrolase (ATsEH) [Arabidopsis thaliana]
  misc_feature (99)..(276): Homolog of NCBI NO: 16226396 NR Description: At2g26740/F18A8.11 [Arabidopsis thaliana]
HAILDSPPPIRNTFSSHAPTKTDAFALRAPQRKTHHSRASAGTVAHPSFMIPACLRGLCTCFDVDDDKANNHEQEPTMAAAAAATGSADDDQTASTITHRTVELSTGVRLHVAEAGGAAATAAGGAPAVLLLHGFPELWYTWRHQMRALAAAGYRAVAPDLRGYGGSDAPAVGGGDDDDDPAAQYTALHVVGDLVALLDALGESQVFVAAHDWGALVAWSLCLFRPDRVRALVALSVAYTPRSAARKPVDGLRALFGDDYYICRIQEPGEIEAEFAAEWCLRPRMGRAGRRR

SEQ ID NO: 14219 - protein, 243 aa, Zea mays subsp. mays
  peptide (1)..(243): Ceres Seq. ID no. 13586637
  misc_feature (105)..(227): Pfam Name: alpha/beta hydrolase fold Pfam Description: alpha/beta hydrolase fold
  misc_feature (45)..(226): Homolog of NCBI NO: 34902880 NR Description: unnamed protein product [Oryza sativa (japonica group)] >gi|5922625|dbj|BAA84626.1| unnamed protein product
  misc_feature (45)..(228): Homolog of NCBI NO: 34897302 NR Description: putative hydrolase [Oryza sativa (japonica
  misc_feature (48)..(227): Homolog of NCBI NO: 25044843 NR Description: epoxide hydrolase [Ananas comosus]
  misc_feature (75)..(227): Homolog of NCBI NO: 18411917 NR Description: epoxide hydrolase, putative [Arabidopsis thaliana]
  misc_feature (48)..(227): Homolog of NCBI NO: 7489256 NR Description: probable epoxide hydrolase (EC 3.3.2.3) (clone
  misc_feature (48)..(228): Homolog of NCBI NO: 15230018 NR Description: epoxide hydrolase, putative [Arabidopsis >gi|6714450|gb|AAF26137.1|AC011620_13 putative epoxide hydrolase thaliana] >gi|17979165|gb|AAL49778.1| putative epoxide putative
  misc_feature (45)..(218): Homolog of NCBI NO: 34902882 NR Description: unnamed protein product [Oryza sativa (japonica group)] >gi|5922626|dbj|BAA84627.1| unnamed protein product
  misc_feature (45)..(227): Homolog of NCBI NO: 34897298 NR Description: putative hydrolase [Oryza sativa (japonica
  misc_feature (50)..(227): Homolog of NCBI NO: 15225781 NR Description: epoxide hydrolase (ATsEH) [Arabidopsis thaliana]
  misc_feature (50)..(227): Homolog of NCBI NO: 16226396 NR Description: At2g26740/F18A8.11 [Arabidopsis thaliana]
MIPACLRGLCTCFDVDDDKANNHEQEPTMAAAAAATGSADDDQTASTITHRTVELSTGVRLHVAEAGGAAATAAGGAPAVLLLHGFPELWYTWRHQMRALAAAGYRAVAPDLRGYGGSDAPAVGGGDDDDDPAAQYTALHVVGDLVALLDALGESQVFVAAHDWGALVAWSLCLFRPDRVRALVALSVAYTPRSAARKPVDGLRALFGDDYYICRIQEPGEIEAEFAAEWCLRPRMGRAGRRR

SEQ ID NO: 14220 - protein, 215 aa, Zea mays subsp. mays
  peptide (1)..(215): Ceres Seq. ID no. 13586638
  misc_feature (77)..(199): Pfam Name: alpha/beta hydrolase fold Pfam Description: alpha/beta hydrolase fold
  misc_feature (17)..(198): Homolog of NCBI NO: 34902880 NR Description: unnamed protein product [Oryza sativa (japonica group)] >gi|5922625|dbj|BAA84626.1| unnamed protein product
  misc_feature (17)..(200): Homolog of NCBI NO: 34897302 NR Description: putative hydrolase [Oryza sativa (japonica
  misc_feature (20)..(199): Homolog of NCBI NO: 25044843 NR Description: epoxide hydrolase [Ananas comosus]
  misc_feature (47)..(199): Homolog of NCBI NO: 18411917 NR Description: epoxide hydrolase, putative [Arabidopsis thaliana]
  misc_feature (20)..(199): Homolog of NCBI NO: 7489256 NR Description: probable epoxide hydrolase (EC 3.3.2.3) (clone
  misc_feature (20)..(200): Homolog of NCBI NO: 15230018 NR Description: epoxide hydrolase, putative [Arabidopsis >gi|6714450|gb|AAF26137.1|AC011620_13 putative epoxide hydrolase thaliana] >gi|17979165|gb|AAL49778.1| putative epoxide putative
  misc_feature (17)..(190): Homolog of NCBI NO: 34902882 NR Description: unnamed protein product [Oryza sativa (japonica group)] >gi|5922626|dbj|BAA84627.1| unnamed protein product
  misc_feature (17)..(199): Homolog of NCBI NO: 34897298 NR Description: putative hydrolase [Oryza sativa (japonica
  misc_feature (22)..(199): Homolog of NCBI NO: 15225781 NR Description: epoxide hydrolase (ATsEH) [Arabidopsis thaliana]
  misc_feature (22)..(199): Homolog of NCBI NO: 16226396 NR Description: At2g26740/F18A8.11 [Arabidopsis thaliana]
MAAAAAATGSADDDQTASTITHRTVELSTGVRLHVAEAGGAAATAAGGAPAVLLLHGFPELWYTWRHQMRALAAAGYRAVAPDLRGYGGSDAPAVGGGDDDDDPAAQYTALHVVGDLVALLDALGESQVFVAAHDWGALVAWSLCLFRPDRVRALVALSVAYTPRSAARKPVDGLRALFGDDYYICRIQEPGEIEAEFAAEWCLRPRMGRAGRRR

SEQ ID NO: 14221 - DNA, 2385 bp, Zea mays subsp. mays
  misc_feature (1)..(2385): Ceres Seq. ID no. 12436349
  misc_feature: MA Experiment ID: 108523 Result: Down-regulated in Transcription
  misc_feature: MA Experiment 108523 PARAMETER Experiment Name: Zm_42deg_Heat_P Parameter: Age (day) Value: 8
  misc_feature: MA Experiment 108523 PARAMETER Experiment Name: Zm_42deg_Heat_P Parameter: Organism Value: Zea mays
  misc_feature: MA Experiment 108523 PARAMETER Experiment Name: Zm_42deg_Heat_P Parameter: Plant Line Value: 35A19
  misc_feature: MA Experiment 108523 PARAMETER Experiment Name: Zm_42deg_Heat_P Parameter: Temperature (deg C) Value: 42 vs. 22
  misc_feature: MA Experiment 108523 PARAMETER Experiment Name: Zm_42deg_Heat_P Parameter: Timepoint (hr) Value: 6
  misc_feature: MA Experiment 108523 PARAMETER Experiment Name: Zm_42deg_Heat_P Parameter: Tissue Value: Aerial
  misc_feature: MA Experiment ID: 108527 Result: Up-regulated in Transcription
  misc_feature: MA Experiment 108527 PARAMETER Experiment Name: Zm_5mM_NO_P Parameter: Age (day) Value: 8
  misc_feature: MA Experiment 108527 PARAMETER Experiment Name: Zm_5mM_NO_P Parameter: Organism Value: Zea mays
  misc_feature: MA Experiment 108527 PARAMETER Experiment Name: Zm_5mM_NO_P Parameter: Plant Line Value: 35A19
  misc_feature: MA Experiment 108527 PARAMETER Experiment Name: Zm_5mM_NO_P Parameter: Timepoint (hr) Value: 6
  misc_feature: MA Experiment 108527 PARAMETER Experiment Name: Zm_5mM_NO_P Parameter: Tissue Value: Aerial
  misc_feature: MA Experiment 108527 PARAMETER Experiment Name: Zm_5mM_NO_P Parameter: Treatment Value: 5mM NO vs. No Treatment
  misc_feature: MA Experiment ID: 108529 Result: Up-regulated in Transcription
  misc_feature: MA Experiment 108529 PARAMETER Experiment Name: Zm_Imbibed_Seeds_P Parameter: Age (day) Value: 5 vs. 2
  misc_feature: MA Experiment 108529 PARAMETER Experiment Name: Zm_Imbibed_Seeds_P Parameter: Organism Value: Zea mays
  misc_feature: MA Experiment 108529 PARAMETER Experiment Name: Zm_Imbibed_Seeds_P Parameter: Plant Line Value: 35A19
  misc_feature: MA Experiment 108529 PARAMETER Experiment Name: Zm_Imbibed_Seeds_P Parameter: Tissue Value: Roots vs. Embryo
  misc_feature: MA Experiment ID: 108535 Result: Down-regulated in Transcription
  misc_feature: MA Experiment 108535 PARAMETER Experiment Name: Zm_Meristem_P Parameter: Age (day) Value: 8
  misc_feature: MA Experiment 108535 PARAMETER Experiment Name: Zm_Meristem_P Parameter: Organism Value: Zea mays
  misc_feature: MA Experiment 108535 PARAMETER Experiment Name: Zm_Meristem_P Parameter: Plant Line Value: 35A19
  misc_feature: MA Experiment 108535 PARAMETER Experiment Name: Zm_Meristem_P Parameter: Tissue Value: Root Meristem vs. Above Root Meristem
  misc_feature: MA Experiment ID: 108545 Result: Down-regulated in Transcription
  misc_feature: MA Experiment 108545 PARAMETER Experiment Name: Zm_Imbibed_Seeds_P Parameter: Age (day) Value: 3 vs. 2
  misc_feature: MA Experiment 108545 PARAMETER Experiment Name: Zm_Imbibed_Seeds_P Parameter: Organism Value: Zea mays
  misc_feature: MA Experiment 108545 PARAMETER Experiment Name: Zm_Imbibed_Seeds_P Parameter: Plant Line Value: 35A19
  misc_feature: MA Experiment 108545 PARAMETER Experiment Name: Zm_Imbibed_Seeds_P Parameter: Tissue Value: Aerial vs. Embryo
  misc_feature: MA Experiment ID: 108546 Result: Up-regulated in Transcription
  misc_feature: MA Experiment 108546 PARAMETER Experiment Name: Zm_Imbibed_Seeds_P Parameter: Age (day) Value: 3 vs. 2
  misc_feature: MA Experiment 108546 PARAMETER Experiment Name: Zm_Imbibed_Seeds_P Parameter: Organism Value: Zea mays
  misc_feature: MA Experiment 108546 PARAMETER Experiment Name: Zm_Imbibed_Seeds_P Parameter: Plant Line Value: 35A19
  misc_feature: MA Experiment 108546 PARAMETER Experiment Name: Zm_Imbibed_Seeds_P Parameter: Tissue Value: Roots vs. Embryo
  misc_feature: MA Experiment ID: 108559 Result: Up-regulated in Transcription
  misc_feature: MA Experiment 108559 PARAMETER Experiment Name: Zm_5mM_NO_P Parameter: Age (day) Value: 8
  misc_feature: MA Experiment 108559 PARAMETER Experiment Name: Zm_5mM_NO_P Parameter: Organism Value: Zea mays
  misc_feature: MA Experiment 108559 PARAMETER Experiment Name: Zm_5mM_NO_P Parameter: Plant Line Value: 35A19
  misc_feature: MA Experiment 108559 PARAMETER Experiment Name: Zm_5mM_NO_P Parameter: Timepoint (hr) Value: 12
  misc_feature: MA Experiment 108559 PARAMETER Experiment Name: Zm_5mM_NO_P Parameter: Tissue Value: Aerial
  misc_feature: MA Experiment 108559 PARAMETER Experiment Name: Zm_5mM_NO_P Parameter: Treatment Value: 5mM NO vs. No Treatment
  misc_feature: MA Experiment ID: 20000108 Result: Down-regulated in Transcription
  misc_feature: MA Experiment 20000108 PARAMETER Experiment Name: Zm_Root-Tips_P Parameter: Age (day) Value: 12
  misc_feature: MA Experiment 20000108 PARAMETER Experiment Name: Zm_Root-Tips_P Parameter: Organism Value: Zea mays
  misc_feature: MA Experiment 20000108 PARAMETER Experiment Name: Zm_Root-Tips_P Parameter: Tissue Value: Root tips vs. Root mid region    35
  misc_feature: MA Experiment 20000108 PARAMETER Experiment Name: Zm_Root-Tips_P Parameter: Tissue Value: Root tips vs. Root mid region   Sequence Listing-Misc Features (4)
  misc_feature: MA Experiment ID: 20000478 Result: Up-regulated in Transcription
  misc_feature: MA Experiment 20000478 PARAMETER Experiment Name: Zm_5mM_SA_P Parameter: Age (day) Value: 11
  misc_feature: MA Experiment 20000478 PARAMETER Experiment Name: Zm_5mM_SA_P Parameter: Organism Value: Zea mays
  misc_feature: MA Experiment 20000478 PARAMETER Experiment Name: Zm_5mM_SA_P Parameter: Plant Line Value: 35A19
  misc_feature: MA Experiment 20000478 PARAMETER Experiment Name: Zm_5mM_SA_P Parameter: Timepoint (hr) Value: 72
  misc_feature: MA Experiment 20000478 PARAMETER Experiment Name: Zm_5mM_SA_P Parameter: Tissue Value: Aerial
  misc_feature: MA Experiment 20000478 PARAMETER Experiment Name: Zm_5mM_SA_P Parameter: Treatment Value: 5mM SA vs. No Treatment
  misc_feature: MA Experiment ID: 20000480 Result: Up-regulated in Transcription
  misc_feature: MA Experiment 20000480 PARAMETER Experiment Name: Zm_Drought_P Parameter: Age (day) Value: 11
  misc_feature: MA Experiment 20000480 PARAMETER Experiment Name: Zm_Drought_P Parameter: Organism Value: Zea mays
  misc_feature: MA Experiment 20000480 PARAMETER Experiment Name: Zm_Drought_P Parameter: Plant Line Value: 35A19
  misc_feature: MA Experiment 20000480 PARAMETER Experiment Name: Zm_Drought_P Parameter: Timepoint (hr) Value: 72
  misc_feature: MA Experiment 20000480 PARAMETER Experiment Name: Zm_Drought_P Parameter: Tissue Value: Aerial
  misc_feature: MA Experiment 20000480 PARAMETER Experiment Name: Zm_Drought_P Parameter: Treatment Value: Drought vs. No Drought
  misc_feature: MA Experiment ID: 20000492 Result: Down-regulated in Transcription
  misc_feature: MA Experiment 20000492 PARAMETER Experiment Name: Zm_Hybrid_Seed_Dev_P Parameter: DAP Value: 12
  misc_feature: MA Experiment 20000492 PARAMETER Experiment Name: Zm_Hybrid_Seed_Dev_P Parameter: Organism Value: Zea mays
  misc_feature: MA Experiment 20000492 PARAMETER Experiment Name: Zm_Hybrid_Seed_Dev_P Parameter: Plant Line Value: 35A19
  misc_feature: MA Experiment 20000492 PARAMETER Experiment Name: Zm_Hybrid_Seed_Dev_P Parameter: Tissue Value: Fert Kernel vs. Unfert Floret
  misc_feature: MA Experiment ID: 20000535 Result: Down-regulated in Transcription
  misc_feature: MA Experiment 20000535 PARAMETER Experiment Name: Zm_Hybrid_Seed_Dev_P Parameter: DAP Value: 30 vs. 12
  misc_feature: MA Experiment 20000535 PARAMETER Experiment Name: Zm_Hybrid_Seed_Dev_P Parameter: Organism Value: Zea mays
  misc_feature: MA Experiment 20000535 PARAMETER Experiment Name: Zm_Hybrid_Seed_Dev_P Parameter: Plant Line Value: 35A19
  misc_feature: MA Experiment 20000535 PARAMETER Experiment Name: Zm_Hybrid_Seed_Dev_P Parameter: Tissue Value: Embryo vs. Unfert Floret
  misc_feature: MA Experiment ID: 20001608 Result: Down-regulated in Transcription
  misc_feature: MA Experiment 20001608 PARAMETER Experiment Name: Zm_50ppm_KNO3_L-to-H_P Parameter: Age (day) Value: 21
  misc_feature: MA Experiment 20001608 PARAMETER Experiment Name: Zm_50ppm_KNO3_L-to-H_P Parameter: Organism Value: Zea mays
  misc_feature: MA Experiment 20001608 PARAMETER Experiment Name: Zm_50ppm_KNO3_L-to-H_P Parameter: Plant Line Value: 35A19
  misc_feature: MA Experiment 20001608 PARAMETER Experiment Name: Zm_50ppm_KNO3_L-to-H_P Parameter: Timepoint (hr) Value: 48
  misc_feature: MA Experiment 20001608 PARAMETER Experiment Name: Zm_50ppm_KNO3_L-to-H_P Parameter: Tissue Value: Shoots
  misc_feature: MA Experiment 20001608 PARAMETER Experiment Name: Zm_50ppm_KNO3_L-to-H_P Parameter: Treatment Value: 50ppm KNO3 vs. 50ppm KCl
aaaacattgcctccaaaaaaaatataaaaaaaacggagccagcccaaaccgcgcgccagaaatccccgagagctgaacagagctcagagctgccatgcgttccccgagccaccacgaccgagacctcctcctcctcctcctcgtactcgcggcggccgtcggttcccgcagcgacgatacgcacgcgtgccggtcgcggccgtacctctgcggcggcgtgaacatcagctacccgttccacctcgccagcgacgccacggcggtcccgggccacgatggcgagtcctactgcggctacccgggcctcgccgtcagctgcgacggcggcaacaaggccgtcctgaacctcggcgaccacgactacacagtctcgcgcatagactacgccaaccagaccgtctcgctcgccgacgcgggggccagcagcggatgccccgtcgtggaccacaacgtgacgatcccgcaggacgtccggctgtccctcctccacagcatcgactacctcctcttcttcgccggctgctccttcggcccgggcgccggccccgaccccaggccgccgaagccgccgtccatcgagcccgtcacctgcggcgagtctggcgacctgggcaagccggccgccgccatgacgttcgtgctcccgcgcgccgaggtgcctccgggcgactgggcgagcgcgtgccggaaggtcttccaggtgccggtgctcaagggctccgtcccgcccgacgcccagcacgacccgctgtggacgagcggcggcgggtacggcgaggcgctccgcgcggggttccagctcggctgggaccgcggctctggcccgtgcgcccgatgcgagcagtccggcggcaagtgcgggtacggccgcgccggcgagttcctgggatgcctctgcgccggcagccgcgtggacggcggcggcgactgcagtaagatgtcagccggctcctccgatctgccttggttcgggccaaaaagtaaaacagcagttattgccggtgtcgcggctggcgctggtgttgcaatacttgctgctgccatttttttgttcgtgaggcgcaagagaaagcagaagagagtggtcaactcgtcttcgaagctcctcaagtacagcggctctggcgggaccccgcgttcacgggtcggtgacatggagtccggcagcatcgaggacccgcctacgcatctcttcacctacgaggagcttgaggaggcgaccagttgcttcgacgaaaacagagagctcggtgacggtggcttcggcaccgtctacaaagggtacctcaaggacgggcgcgtggtggcggtgaaacggctgtacaacaacagctaccggcgcgtggagcagttccagaacgaggcggccatcctgtcggggctacgccaccccaacctcgtcatgttctacggctgcacgtccagccagagccgcgagctgctgctggtgtacgagttcgtggccaacggcacggtcgccgaccacctgcacgggcagcgggccgccgagcgcgccctcccgtggccgctccgcctcggcgtcgccgtggagtccgccgcggcgctcacctacctgcacgccatcgagccgcccgtggtgcaccgcgacgtcaagaccaccaacatcctcctggacgccgactaccacgtcaaggtcgccgacttcggcctctcccgcctcttccccctcgacgtcacgcacgtctccaccgctccccagggcacgccagggtatgtagatccagagtaccaccagtgctaccagctgacggacaagagcgacgtgtacagtttcggagtggtcctggtggagctcatctcgtccaagcccgccgtcgacgtcacccggcaccgcaacgagatcaacctggccggcatggccatcagcaagatccagaagtgccagctggaggagctcgtcgacatcgacctgggctacgagtccgacccggccaccaagaaggcgatgacggcggtcgccgagctggccttccgttgcctgcagcagaacggcgagatgcgcccgccgatcaaggaggtgctcgaggtgctcaggagcattcagggcgaataccagacggggaaggacggagacaaaaacaagggacggacccctctctcccaccacggttcatgctccgtgggagagcagggccacgacgcccaacaccagcagggactagaccagtcggtcagtgtcaaggactggagaccggagaagttgctgctgctgtgtgactgtgaggcatgccagattgcctgtcatttgttttcaggcttcgcggtccggttcctgctgatgtatatatttgttttgttgggtctgtcagagctgagggaatgtacatatatgtgaaagagtggtgaatgatatatataatacac

SEQ ID NO: 14222 - protein, 753 aa, Zea mays subsp. mays
  peptide (1)..(753): Ceres Seq. ID no. 12436350
  misc_feature (6)..(674): Homolog of NCBI NO: 34911340 NR Description: P0034C09.1 [Oryza sativa (japonica
  misc_feature (230)..(659): Homolog of NCBI NO: 24417464 NR Description: unknown [Arabidopsis thaliana]
  misc_feature (28)..(126): Homolog of NCBI NO: 24417464 NR Description: unknown [Arabidopsis thaliana]
  misc_feature (310)..(657): Homolog of NCBI NO: 25402857 NR Description: protein F15H18.11 [imported] - Arabidopsis >gi|6714300|gb|AAF25996.1|AC013354_15 F15H18.11 [Arabidopsis
  misc_feature (192)..(269): Homolog of NCBI NO: 25402857 NR Description: protein F15H18.11 [imported] - Arabidopsis >gi|6714300|gb|AAF25996.1|AC013354_15 F15H18.11 [Arabidopsis
  misc_feature (209)..(680): Homolog of NCBI NO: 15408730 NR Description: P0443D08.12 [Oryza sativa (japonica
  misc_feature (305)..(674): Homolog of NCBI NO: 15408726 NR Description: P0443D08.8 [Oryza sativa (japonica
  misc_feature (66)..(657): Homolog of NCBI NO: 10177797 NR Description: contains similarity to protein
  misc_feature (62)..(659): Homolog of NCBI NO: 30697422 NR Description: serine/threonine protein kinase family
  misc_feature (62)..(659): Homolog of NCBI NO: 12597754 NR Description: protein kinase, putative [Arabidopsis thaliana]
MRSPSHHDRDLLLLLLVLAAAVGSRSDDTHACRSRPYLCGGVNISYPFHLASDATAVPGHDGESYCGYPGLAVSCDGGNKAVLNLGDHDYTVSRIDYANQTVSLADAGASSGCPVVDHNVTIPQDVRLSLLHSIDYLLFFAGCSFGPGAGPDPRPPKPPSIEPVTCGESGDLGKPAAAMTFVLPRAEVPPGDWASACRKVFQVPVLKGSVPPDAQHDPLWTSGGGYGEALRAGFQLGWDRGSGPCARCEQSGGKCGYGRAGEFLGCLCAGSRVDGGGDCSKMSAGSSDLPWFGPKSKTAVIAGVAAGAGVAILAAAIFLFVRRKRKQKRVVNSSSKLLKYSGSGGTPRSRVGDMESGSIEDPPTHLFTYEELEEATSCFDENRELGDGGFGTVYKGYLKDGRVVAVKRLYNNSYRRVEQFQNEAAILSGLRHPNLVMFYGCTSSQSRELLLVYEFVANGTVADHLHGQRAAERALPWPLRLGVAVESAAALTYLHAIEPPVVHRDVKTTNILLDADYHVKVADFGLSRLFPLDVTHVSTAPQGTPGYVDPEYHQCYQLTDKSDVYSFGVVLVELISSKPAVDVTRHRNEINLAGMAISKIQKCQLEELVDIDLGYESDPATKKAMTAVAELAFRCLQQNGEMRPPIKEVLEVLRSIQGEYQTGKDGDKNKGRTPLSHHGSCSVGEQGHDAQHQQGLDQSVSVKDWRPEKLLLLCDCEACQIACHLFSGFAVRFLLMYIFVLLGLSELRECTYM

SEQ ID NO: 14223 - protein, 575 aa, Zea mays subsp. mays
  peptide (1)..(575): Ceres Seq. ID no. 12436351
  misc_feature (1)..(496): Homolog of NCBI NO: 34911340 NR Description: P0034C09.1 [Oryza sativa (japonica
  misc_feature (52)..(481): Homolog of NCBI NO: 24417464 NR Description: unknown [Arabidopsis thaliana]
  misc_feature (132)..(479): Homolog of NCBI NO: 25402857 NR Description: protein F15H18.11 [imported] - Arabidopsis >gi|6714300|gb|AAF25996.1|AC013354_15 F15H18.11 [Arabidopsis
  misc_feature (14)..(91): Homolog of NCBI NO: 25402857 NR Description: protein F15H18.11 [imported] - Arabidopsis >gi|6714300|gb|AAF25996.1|AC013354_15 F15H18.11 [Arabidopsis
  misc_feature (31)..(502): Homolog of NCBI NO: 15408730 NR Description: P0443D08.12 [Oryza sativa (japonica
  misc_feature (127)..(496): Homolog of NCBI NO: 15408726 NR Description: P0443D08.8 [Oryza sativa (japonica
  misc_feature (1)..(479): Homolog of NCBI NO: 10177797 NR Description: contains similarity to protein
  misc_feature (1)..(481): Homolog of NCBI NO: 30697422 NR Description: serine/threonine protein kinase family
  misc_feature (1)..(481): Homolog of NCBI NO: 12597754 NR Description: protein kinase, putative [Arabidopsis thaliana]
  misc_feature (1)..(481): Homolog of NCBI NO: 25404646 NR Description: probable wall-associated kinase T4O24.5
MTFVLPRAEVPPGDWASACRKVFQVPVLKGSVPPDAQHDPLWTSGGGYGEALRAGFQLGWDRGSGPCARCEQSGGKCGYGRAGEFLGCLCAGSRVDGGGDCSKMSAGSSDLPWFGPKSKTAVIAGVAAGAGVAILAAAIFLFVRRKRKQKRVVNSSSKLLKYSGSGGTPRSRVGDMESGSIEDPPTHLFTYEELEEATSCFDENRELGDGGFGTVYKGYLKDGRVVAVKRLYNNSYRRVEQFQNEAAILSGLRHPNLVMFYGCTSSQSRELLLVYEFVANGTVADHLHGQRAAERALPWPLRLGVAVESAAALTYLHAIEPPVVHRDVKTTNILLDADYHVKVADFGLSRLFPLDVTHVSTAPQGTPGYVDPEYHQCYQLTDKSDVYSFGVVLVELISSKPAVDVTRHRNEINLAGMAISKIQKCQLEELVDIDLGYESDPATKKAMTAVAELAFRCLQQNGEMRPPIKEVLEVLRSIQGEYQTGKDGDKNKGRTPLSHHGSCSVGEQGHDAQHQQGLDQSVSVKDWRPEKLLLLCDCEACQIACHLFSGFAVRFLLMYIFVLLGLSELRECTYM

SEQ ID NO: 14224 - protein, 472 aa, Zea mays subsp. mays
  peptide (1)..(472): Ceres Seq. ID no. 12436352
  misc_feature (1)..(393): Homolog of NCBI NO: 34911340 NR Description: P0034C09.1 [Oryza sativa (japonica
  misc_feature (1)..(378): Homolog of NCBI NO: 24417464 NR Description: unknown [Arabidopsis thaliana]
  misc_feature (29)..(376): Homolog of NCBI NO: 25402857 NR Description: protein F15H18.11 [imported] - Arabidopsis >gi|6714300|gb|AAF25996.1|AC013354_15 F15H18.11 [Arabidopsis
  misc_feature (1)..(399): Homolog of NCBI NO: 15408730 NR Description: P0443D08.12 [Oryza sativa (japonica
  misc_feature (24)..(393): Homolog of NCBI NO: 15408726 NR Description: P0443D08.8 [Oryza sativa (japonica
  misc_feature (1)..(376): Homolog of NCBI NO: 10177797 NR Description: contains similarity to protein
  misc_feature (1)..(378): Homolog of NCBI NO: 30697422 NR Description: serine/threonine protein kinase family
  misc_feature (1)..(378): Homolog of NCBI NO: 12597754 NR Description: protein kinase, putative [Arabidopsis thaliana]
  misc_feature (1)..(378): Homolog of NCBI NO: 25404646 NR Description: probable wall-associated kinase T4O24.5
  misc_feature (1)..(376): Homolog of NCBI NO: 22327431 NR Description: protein kinase - like protein; protein id: supported by cDNA: gi_18175790 [Arabidopsis thaliana] putative protein kinase [Arabidopsis thaliana]
MSAGSSDLPWFGPKSKTAVIAGVAAGAGVAILAAAIFLFVRRKRKQKRVVNSSSKLLKYSGSGGTPRSRVGDMESGSIEDPPTHLFTYEELEEATSCFDENRELGDGGFGTVYKGYLKDGRVVAVKRLYNNSYRRVEQFQNEAAILSGLRHPNLVMFYGCTSSQSRELLLVYEFVANGTVADHLHGQRAAERALPWPLRLGVAVESAAALTYLHAIEPPVVHRDVKTTNILLDADYHVKVADFGLSRLFPLDVTHVSTAPQGTPGYVDPEYHQCYQLTDKSDVYSFGVVLVELISSKPAVDVTRHRNEINLAGMAISKIQKCQLEELVDIDLGYESDPATKKAMTAVAELAFRCLQQNGEMRPPIKEVLEVLRSIQGEYQTGKDGDKNKGRTPLSHHGSCSVGEQGHDAQHQQGLDQSVSVKDWRPEKLLLLCDCEACQIACHLFSGFAVRFLLMYIFVLLGLSELRECTYM

SEQ ID NO: 14225 - DNA, 925 bp, Zea mays subsp. mays
  misc_feature (1)..(925): Ceres Seq. ID no. 12436172
  misc_feature: MA Experiment ID: 108522 Result: Down-regulated in Transcription
  misc_feature: MA Experiment 108522 PARAMETER Experiment Name: Zm_42deg_Heat_P Parameter: Age (day) Value: 8
  misc_feature: MA Experiment 108522 PARAMETER Experiment Name: Zm_42deg_Heat_P Parameter: Organism Value: Zea mays
  misc_feature: MA Experiment 108522 PARAMETER Experiment Name: Zm_42deg_Heat_P Parameter: Plant Line Value: 35A19
  misc_feature: MA Experiment 108522 PARAMETER Experiment Name: Zm_42deg_Heat_P Parameter: Temperature (deg C) Value: 42 vs. 22
  misc_feature: MA Experiment 108522 PARAMETER Experiment Name: Zm_42deg_Heat_P Parameter: Timepoint (hr) Value: 1
  misc_feature: MA Experiment 108522 PARAMETER Experiment Name: Zm_42deg_Heat_P Parameter: Tissue Value: Aerial
  misc_feature: MA Experiment ID: 108687 Result: Down-regulated in Transcription
  misc_feature: MA Experiment 108687 PARAMETER Experiment Name: Zm_Embryos-Flowers__P Parameter: Tissue Value: Embryo vs. Aerial+
tattagctataattgatgtttagtacatatagtataaaaggcaaggtttttgttacaaagaaaatattctctgtttgtgtgtgtgtttgcttaagtgttatggattattcattttttgtaaatttagtgatacttttatttgacctgctgcacacctagctaatagttcatttctctgttggcatagcaagaagtggtacacaggttcatttggacaaggaaactcttattatgcaagaaattttcccatgcccaaaaaggattcttcagcaggtggagcttcgaagttaccaaaagaatatgcagaaccatgggactatagccatgattatcctgttactctcccactaaggaagccctactctggaaatcctgaaattctggatgaggaagaatttggagaatcttctgccagcaggacccaagatgatgaattatctgcagcagagcagcttggattaatggatatgtcgtcggaatcacagttcctcttcttccagttgccatcctntcttcctttaccgaggcagccacaatcagttgctgaccctaacgaagtccgcgatgagaaacgtgagggcatgaggccatcatcgcacaatggctcgaaactcaaagaggttcctgaaggctatatggggaaaatgctcgtatataagagtggtaaagtgaagatgaagataggagacactctctttgatgtttcatttggctcgaattgcatgttttcccaggaggttgcagcaatcaacatcagagaaaaacattgctgtacggtgggagagatcagcaagcgtgcaatcatcaccccagatattaactacatgttgggttctgttgacaagatggaagaatagtccattggtttctttcgcgcaaaccatatagaccatattatgccattacaagatagttttgctttctt

SEQ ID NO: 14226 - protein, 202 aa, Zea mays subsp. mays
  peptide (1)..(202): Ceres Seq. ID no. 12436173
  misc_feature (85)..(190): Pfam Name: RNA polymerase III RPC4 Pfam Description: RNA polymerase III RPC4
  misc_feature (1)..(201): Homolog of NCBI NO: 21740741 NR Description: OSJNBa0072K14.6 [Oryza sativa (japonica
  misc_feature (1)..(200): Homolog of NCBI NO: 15242400 NR Description: putative protein; protein id: At5g09380.1 thaliana] >gi|9955525|emb|CAC05464.1| putative protein
  misc_feature (17)..(153): Homolog of NCBI NO: 7486060 NR Description: hypothetical protein F24A6.20 - Arabidopsis >gi|4454006|emb|CAA23059.1| hypothetical protein [Arabidopsis >gi|7269368|emb|CAB79427.1| hypothetical protein [Arabidopsis
  misc_feature (17)..(153): Homolog of NCBI NO: 15234965 NR Description: hypothetical protein; protein id: At4g25180.1
  misc_feature (152)..(201): Homolog of NCBI NO: 7486060 NR Description: hypothetical protein F24A6.20 - Arabidopsis >gi|4454006|emb|CAA23059.1| hypothetical protein [Arabidopsis >gi|7269368|emb|CAB79427.1| hypothetical protein [Arabidopsis
  misc_feature (152)..(201): Homolog of NCBI NO: 15234965 NR Description: hypothetical protein; protein id: At4g25180.1
  misc_feature (46)..(194): Homolog of NCBI NO: 34907504 NR Description: B1099D03.22 [Oryza sativa (japonica
  misc_feature (62)..(194): Homolog of NCBI NO: 34874432 NR Description: similar to DNA-directed RNA polymerase III 47 kDa (RNA polymerase C subunit 4) (RPC4) (RPC53) (BN51 protein)
  misc_feature (62)..(194): Homolog of NCBI NO: 4502437 NR Description: RNA polymerase III 53 kDa subunit RPC4; sensitive complementation, cell cycle specific, tsBN51; BN51
  misc_feature (62)..(194): Homolog of NCBI NO: 29429159 NR Description: DNA-directed RNA polymerase III 47 kDa (RNA polymerase C subunit 4) (RPC4) (RPC53) (BN51 protein) Similar to BN51 (BHK21) temperature sensitivity complementing
  misc_feature (88)..(88): Xaa is any aa, unknown or other
MPKKDSSAGGASKLPKEYAEPWDYSHDYPVTLPLRKPYSGNPEILDEEEFGESSASRTQDDELSAAEQLGLMDMSSESQFLFFQLPSXLPLPRQPQSVADPNEVRDEKREGMRPSSHNGSKLKEVPEGYMGKMLVYKSGKVKMKIGDTLFDVSFGSNCMFSQEVAAINIREKHCCTVGEISKRAIITPDINYMLGSVDKMEE

SEQ ID NO: 14227 - protein, 131 aa, Zea mays subsp. mays
  peptide (1)..(131): Ceres Seq. ID no. 12436174
  misc_feature (14)..(119): Pfam Name: RNA polymerase III RPC4 Pfam Description: RNA polymerase III RPC4
  misc_feature (1)..(130): Homolog of NCBI NO: 21740741 NR Description: OSJNBa0072K14.6 [Oryza sativa (japonica
  misc_feature (1)..(129): Homolog of NCBI NO: 15242400 NR Description: putative protein; protein id: At5g09380.1 thaliana] >gi|9955525|emb|CAC05464.1| putative protein
  misc_feature (1)..(82): Homolog of NCBI NO: 7486060 NR Description: hypothetical protein F24A6.20 - Arabidopsis >gi|4454006|emb|CAA23059.1| hypothetical protein [Arabidopsis >gi|7269368|emb|CAB79427.1| hypothetical protein [Arabidopsis
  misc_feature (1)..(82): Homolog of NCBI NO: 15234965 NR Description: hypothetical protein; protein id: At4g25180.1
  misc_feature (81)..(130): Homolog of NCBI NO: 7486060 NR Description: hypothetical protein F24A6.20 - Arabidopsis >gi|4454006|emb|CAA23059.1| hypothetical protein [Arabidopsis >gi|7269368|emb|CAB79427.1| hypothetical protein [Arabidopsis
  misc_feature (81)..(130): Homolog of NCBI NO: 15234965 NR Description: hypothetical protein; protein id: At4g25180.1
  misc_feature (1)..(123): Homolog of NCBI NO: 34907504 NR Description: B1099D03.22 [Oryza sativa (japonica
  misc_feature (1)..(123): Homolog of NCBI NO: 34874432 NR Description: similar to DNA-directed RNA polymerase III 47 kDa (RNA polymerase C subunit 4) (RPC4) (RPC53) (BN51 protein)
  misc_feature (1)..(123): Homolog of NCBI NO: 4502437 NR Description: RNA polymerase III 53 kDa subunit RPC4; sensitive complementation, cell cycle specific, tsBN51; BN51
  misc_feature (1)..(123): Homolog of NCBI NO: 29429159 NR Description: DNA-directed RNA polymerase III 47 kDa (RNA polymerase C subunit 4) (RPC4) (RPC53) (BN51 protein) Similar to BN51 (BHK21) temperature sensitivity complementing
  misc_feature (17)..(17): Xaa is any aa, unknown or other
MDMSSESQFLFFQLPSXLPLPRQPQSVADPNEVRDEKREGMRPSSHNGSKLKEVPEGYMGKMLVYKSGKVKMKIGDTLFDVSFGSNCMFSQEVAAINIREKHCCTVGEISKRAIITPDINYMLGSVDKMEE

SEQ ID NO: 14228 - protein, 129 aa, Zea mays subsp. mays
  peptide (1)..(129): Ceres Seq. ID no. 12436175
  misc_feature (12)..(117): Pfam Name: RNA polymerase III RPC4 Pfam Description: RNA polymerase III RPC4
  misc_feature (1)..(121): Homolog of NCBI NO: 4502437 NR Description: RNA polymerase III 53 kDa subunit RPC4; sensitive complementation, cell cycle specific, tsBN51; BN51
  misc_feature (1)..(128): Homolog of NCBI NO: 21740741 NR Description: OSJNBa0072K14.6 [Oryza sativa (japonica
  misc_feature (1)..(80): Homolog of NCBI NO: 7486060 NR Description: hypothetical protein F24A6.20 - Arabidopsis >gi|4454006|emb|CAA23059.1| hypothetical protein [Arabidopsis >gi|7269368|emb|CAB79427.1| hypothetical protein [Arabidopsis
  misc_feature (79)..(128): Homolog of NCBI NO: 7486060 NR Description: hypothetical protein F24A6.20 - Arabidopsis >gi|4454006|emb|CAA23059.1| hypothetical protein [Arabidopsis >gi|7269368|emb|CAB79427.1| hypothetical protein [Arabidopsis
  misc_feature (1)..(121): Homolog of NCBI NO: 34907504 NR Description: B1099D03.22 [Oryza sativa (japonica
  misc_feature (1)..(121): Homolog of NCBI NO: 34874432 NR Description: similar to DNA-directed RNA polymerase III 47 kDa (RNA polymerase C subunit 4) (RPC4) (RPC53) (BN51 protein)
  misc_feature (79)..(128): Homolog of NCBI NO: 15234965 NR Description: hypothetical protein; protein id: At4g25180.1
  misc_feature (1)..(80): Homolog of NCBI NO: 15234965 NR Description: hypothetical protein; protein id: At4g25180.1
  misc_feature (1)..(127): Homolog of NCBI NO: 15242400 NR Description: putative protein; protein id: At5g09380.1 thaliana] >gi|9955525|emb|CAC05464.1| putative protein
  misc_feature (1)..(121): Homolog of NCBI NO: 29429159 NR Description: DNA-directed RNA polymerase III 47 kDa (RNA polymerase C subunit 4) (RPC4) (RPC53) (BN51 protein) Similar to BN51 (BHK21) temperature sensitivity complementing
  misc_feature (15)..(15): Xaa is any aa, unknown or other
MSSESQFLFFQLPSXLPLPRQPQSVADPNEVRDEKREGMRPSSHNGSKLKEVPEGYMGKMLVYKSGKVKMKIGDTLFDVSFGSNCMFSQEVAAINIREKHCCTVGEISKRAIITPDINYMLGSVDKMEE

SEQ ID NO: 14229 - DNA, 423 bp, Zea mays subsp. mays
  misc_feature (1)..(423): Ceres Seq. ID no. 3114586
  misc_feature: MA Experiment ID: 108689 Result: Down-regulated in Transcription
  misc_feature: MA Experiment 108689 PARAMETER Experiment Name: Zm_Drought_Roots_P Parameter: Age (day) Value: 9
  misc_feature: MA Experiment 108689 PARAMETER Experiment Name: Zm_Drought_Roots_P Parameter: Organism Value: Zea mays
  misc_feature: MA Experiment 108689 PARAMETER Experiment Name: Zm_Drought_Roots_P Parameter: Plant Line Value: 35A19
  misc_feature: MA Experiment 108689 PARAMETER Experiment Name: Zm_Drought_Roots_P Parameter: Timepoint (hr) Value: 24
  misc_feature: MA Experiment 108689 PARAMETER Experiment Name: Zm_Drought_Roots_P Parameter: Tissue Value: Roots
  misc_feature: MA Experiment 108689 PARAMETER Experiment Name: Zm_Drought_Roots_P Parameter: Treatment Value: Drought vs. No Drought
aaaatatatatatcctcgctttccttcccgtcgccgcctgaaaccgctgcgctctcggcttggatagcaagggtctcagtctctcagagggagcaagaagaggatctgagggtgagatggcgatcgaccacgagtccccgttcaaggagctccgcctcaagaaccgaaggatcatgggcggcggcggccctgaccctgagccggaggaggaggaggaggagggcgtcacggcggcgtacgcggagcggtggccgcggtggctgcagccgctgctgtccgcgcgcttcttcgcgcagtgcaggacgcacagcgactccaaccgcagcggcgaatgcaacatgttctgcctggactgctcggccgccgggggcacgggcacgggcgcgggcgcgctctgctcgctgtgcctggcgcagcacgggc

SEQ ID NO: 14230 - protein, 141 aa, Zea mays subsp. mays
  peptide (1)..(141): Ceres Seq. ID no. 3114587
KIYISSLSFPSPPETAALSAWIARVSVSQREQEEDLRVRWRSTTSPRSRSSASRTEGSWAAAALTLSRRRRRRRASRRRTRSGGRGGCSRCCPRASSRSAGRTATPTAAANATCSAWTARPPGARARARARSARCAWRSTG

SEQ ID NO: 14231 - protein, 102 aa, Zea mays subsp. mays
  peptide (1)..(102): Ceres Seq. ID no. 3114588
  misc_feature (43)..(101): Pfam Name: Protein of unknown function, DUF597 Pfam Description: Protein of unknown function, DUF597
  misc_feature (1)..(101): Homolog of NCBI NO: 37537092 NR Description: unknown protein [Oryza sativa (japonica
  misc_feature (1)..(101): Homolog of NCBI NO: 15236696 NR Description: putative protein; protein id: At4g17900.1
  misc_feature (43)..(101): Homolog of NCBI NO: 38346725 NR Description: OSJNBa0086O06.23 [Oryza sativa (japonica
  misc_feature (45)..(101): Homolog of NCBI NO: 18398555 NR Description: expressed protein; protein id: At1g32700.1,
  misc_feature (45)..(101): Homolog of NCBI NO: 6714272 NR Description: F6N18.8 [Arabidopsis thaliana]
  misc_feature (34)..(101): Homolog of NCBI NO: 5441885 NR Description: Similar to Arabidopsis thaliana BAC genomic
  misc_feature (45)..(101): Homolog of NCBI NO: 21554139 NR Description: unknown [Arabidopsis thaliana]
  misc_feature (44)..(101): Homolog of NCBI NO: 15237491 NR Description: putative protein; protein id: At5g46710.1, by cDNA: 42747. [Arabidopsis thaliana] gene_id:MZA15.12~pir||T05076~similar to unknown protein
  misc_feature (27)..(101): Homolog of NCBI NO: 18394936 NR Description: expressed protein; protein id: At1g21000.1, by cDNA: 119384., supported by cDNA: gi_14030626, supported by gi_16226406 [Arabidopsis thaliana]
  misc_feature (27)..(101): Homolog of NCBI NO: 21537073 NR Description: unknown [Arabidopsis thaliana]
MAIDHESPFKELRLKNRRIMGGGGPDPEPEEEEEEGVTAAYAERWPRWLQPLLSARFFAQCRTHSDSNRSGECNMFCLDCSAAGGTGTGAGALCSLCLAQHG

SEQ ID NO: 14232 - protein, 83 aa, Zea mays subsp. mays
  peptide (1)..(83): Ceres Seq. ID no. 3114589
  misc_feature (24)..(82): Pfam Name: Protein of unknown function, DUF597 Pfam Description: Protein of unknown function, DUF597
  misc_feature (1)..(82): Homolog of NCBI NO: 37537092 NR Description: unknown protein [Oryza sativa (japonica
  misc_feature (1)..(82): Homolog of NCBI NO: 15236696 NR Description: putative protein; protein id: At4g17900.1
  misc_feature (24)..(82): Homolog of NCBI NO: 38346725 NR Description: OSJNBa0086O06.23 [Oryza sativa (japonica
  misc_feature (26)..(82): Homolog of NCBI NO: 18398555 NR Description: expressed protein; protein id: At1g32700.1,
  misc_feature (26)..(82): Homolog of NCBI NO: 6714272 NR Description: F6N18.8 [Arabidopsis thaliana]
  misc_feature (15)..(82): Homolog of NCBI NO: 5441885 NR Description: Similar to Arabidopsis thaliana BAC genomic
  misc_feature (26)..(82): Homolog of NCBI NO: 21554139 NR Description: unknown [Arabidopsis thaliana]
  misc_feature (25)..(82): Homolog of NCBI NO: 15237491 NR Description: putative protein; protein id: At5g46710.1, by cDNA: 42747. [Arabidopsis thaliana] gene_id:MZA15.12~pir||T05076~similar to unknown protein
  misc_feature (8)..(82): Homolog of NCBI NO: 18394936 NR Description: expressed protein; protein id: At1g21000.1, by cDNA: 119384., supported by cDNA: gi_14030626, supported by gi_16226406 [Arabidopsis thaliana]
  misc_feature (8)..(82): Homolog of NCBI NO: 21537073 NR Description: unknown [Arabidopsis thaliana]
MGGGGPDPEPEEEEEEGVTAAYAERWPRWLQPLLSARFFAQCRTHSDSNRSGECNMFCLDCSAAGGTGTGAGALCSLCLAQHG

SEQ ID NO: 14233 - DNA, 1315 bp, Zea mays subsp. mays
  misc_feature (1)..(1315): Ceres Seq. ID no. 13635214
  misc_feature: MA Experiment ID: 108530 Result: Down-regulated in Transcription
  misc_feature: MA Experiment 108530 PARAMETER Experiment Name: Zm_Imbibed_Seeds_P Parameter: Age (day) Value: 6 vs. 2
  misc_feature: MA Experiment 108530 PARAMETER Experiment Name: Zm_Imbibed_Seeds_P Parameter: Organism Value: Zea mays
  misc_feature: MA Experiment 108530 PARAMETER Experiment Name: Zm_Imbibed_Seeds_P Parameter: Plant Line Value: 35A19
  misc_feature: MA Experiment 108530 PARAMETER Experiment Name: Zm_Imbibed_Seeds_P Parameter: Tissue Value: Aerial vs. Embryo
  misc_feature: MA Experiment ID: 108544 Result: Up-regulated in Transcription
gcatcccatctgctatcccttggttgccgcwkcctccaaagccactcccaaacccccgcttccagaaccttctcgaarctcyccgcckcytcctcyactmgcwccgatggcgaaggaaccratgcgcgtgctcgtcactggmgccgcaggrcaaattggatatgcyctkgttcccatgattgctaggggwgttatgcttggtgcagaccagcctgttattctgcacatgcttgayattccgccagcagctgaagcccttawtggtgttaagatggagtyggttgatgctgcrtttcctcttctgaagggagtygttgckacaactgatgttgtggaagcgctgcactggsgtsaatgtggccgtcatgswtggtggattccccaggaaggagggaannnaaaggaaaagatgttatgtckaaaaaatgtttcaatctacaaawcccaagcatctgctccttgaagcccatgcrgcycccaactgcaaggttctggtggttgccaacccagcraacaccaatgctcttatcttgaaagaatttgctccatcwattccwgakargaacgttacttgcctgacccgkctggaccacaacagggctcttggccagatttctgagagacttartgtccaagtyagtgatgtgaagaatgttatcatctggggtaaccactcgtccwctcagtaccctgatgttaaccatgccacagtgaagacttccactggggagaagcctgttcgtgagcttgtctgctgatgaygagtggctyaatggygaattcatcacaactgtccaacagcgtggtgctgcaatcatyaaagcgagaaagttctccagygctctctcrgctgctagctctgcttgtgaccayattcgtgattgggttcttggaacmcctgagggkacatttgtttccatgggtgtgtaytcygatggttcatayggtgttccttcyggactyatttaytcattcccagtaacatgcagtgggtgggtgaatggaaaatcgttcaaggcctcccgatygaygagytctcaaggaagaagawgggatgccactgcccaagagctgmcggargagaagacgcttgcttactcatgcctcgagtaaattctaccacayccagagagcaattgccaccccaatgttttgaataaaaaaagaaactccaactcsattcatagattctcwctcagaactgctgcacgtcgcagtgcaggcgtgttgctggcttcgcccacgcttctttttttgcctgtgatttgcgacgacatttatatttattgaaatcttgcagaatcgcttgacgatg

SEQ ID NO: 14234 - protein, 153 aa, Zea mays subsp. mays
  peptide (1)..(153): Ceres Seq. ID no. 15220341
  misc_feature (38)..(152): Pfam Name: lactate/malate dehydrogenase, NAD binding domain Pfam Description: lactate/malate dehydrogenase, NAD binding domain
  misc_feature (38)..(152): Pfam Name: lactate/malate dehydrogenase, NAD binding domain Pfam Description: lactate/malate dehydrogenase, NAD binding domain
  misc_feature (36)..(152): Homolog of NCBI NO: 15219721 NR Description: malate dehydrogenase, cytosolic, putative thaliana] >gi|11133509|sp|P93819|MDHC_ARATH Malate dehydrogenase,
  misc_feature (36)..(152): Homolog of NCBI NO: 15239843 NR Description: malate dehydrogenase, cytosolic, putative thaliana] >gi|11133446|sp|P57106|MDHD_ARATH Malate dehydrogenase,
  misc_feature (36)..(152): Homolog of NCBI NO: 37535388 NR Description: cytoplasmic malate dehydrogenase [Oryza sativa
  misc_feature (36)..(152): Homolog of NCBI NO: 15982948 NR Description: NAD-dependent malate dehydrogenase [Prunus
  misc_feature (36)..(152): Homolog of NCBI NO: 11133373 NR Description: Malate dehydrogenase, cytoplasmic
  misc_feature (36)..(152): Homolog of NCBI NO: 37535388 NR Description: cytoplasmic malate dehydrogenase [Oryza sativa
  misc_feature (36)..(152): Homolog of NCBI NO: 15982948 NR Description: NAD-dependent malate dehydrogenase [Prunus
  misc_feature (36)..(152): Homolog of NCBI NO: 21593565 NR Description: cytosolic malate dehydrogenase [Arabidopsis
  misc_feature (36)..(152): Homolog of NCBI NO: 15239843 NR Description: malate dehydrogenase, cytosolic, putative thaliana] >gi|11133446|sp|P57106|MDHD_ARATH Malate dehydrogenase,
  misc_feature (36)..(152): Homolog of NCBI NO: 15219721 NR Description: malate dehydrogenase, cytosolic, putative thaliana] >gi|11133509|sp|P93819|MDHC_ARATH Malate dehydrogenase,
  misc_feature (36)..(152): Homolog of NCBI NO: 12229778 NR Description: Malate dehydrogenase, cytoplasmic
  misc_feature (36)..(152): Homolog of NCBI NO: 11133373 NR Description: Malate dehydrogenase, cytoplasmic
  misc_feature (36)..(152): Homolog of NCBI NO: 10798652 NR Description: malate dehydrogenase [Nicotiana tabacum]
  misc_feature (36)..(152): Homolog of NCBI NO: 10334493 NR Description: cytosolic malate dehydrogenase [Cicer arietinum]
  misc_feature (36)..(152): Homolog of NCBI NO: 18202485 NR Description: Malate dehydrogenase, cytoplasmic
  misc_feature (36)..(152): Homolog of NCBI NO: 12229778 NR Description: Malate dehydrogenase, cytoplasmic
  misc_feature (36)..(152): Homolog of NCBI NO: 10798652 NR Description: malate dehydrogenase [Nicotiana tabacum]
  misc_feature (36)..(152): Homolog of NCBI NO: 10334493 NR Description: cytosolic malate dehydrogenase [Cicer arietinum]
  misc_feature (36)..(152): Homolog of NCBI NO: 18202485 NR Description: Malate dehydrogenase, cytoplasmic
  misc_feature (36)..(152): Homolog of NCBI NO: 21593565 NR Description: cytosolic malate dehydrogenase [Arabidopsis
  misc_feature (10)..(10): Xaa is any aa, unknown or other
  misc_feature (11)..(11): Xaa is any aa, unknown or other
  misc_feature (26)..(26): Xaa is any aa, unknown or other
  misc_feature (27)..(27): Xaa is any aa, unknown or other
  misc_feature (29)..(29): Xaa is any aa, unknown or other
  misc_feature (30)..(30): Xaa is any aa, unknown or other
  misc_feature (32)..(32): Xaa is any aa, unknown or other
  misc_feature (33)..(33): Xaa is any aa, unknown or other
  misc_feature (34)..(34): Xaa is any aa, unknown or other
  misc_feature (40)..(40): Xaa is any aa, unknown or other
  misc_feature (47)..(47): Xaa is any aa, unknown or other
  misc_feature (50)..(50): Xaa is any aa, unknown or other
  misc_feature (55)..(55): Xaa is any aa, unknown or other
  misc_feature (56)..(56): Xaa is any aa, unknown or other
  misc_feature (63)..(63): Xaa is any aa, unknown or other
  misc_feature (78)..(78): Xaa is any aa, unknown or other
  misc_feature (87)..(87): Xaa is any aa, unknown or other
  misc_feature (93)..(93): Xaa is any aa, unknown or other
  misc_feature (97)..(97): Xaa is any aa, unknown or other
  misc_feature (104)..(104): Xaa is any aa, unknown or other
  misc_feature (106)..(106): Xaa is any aa, unknown or other
  misc_feature (117)..(117): Xaa is any aa, unknown or other
  misc_feature (118)..(118): Xaa is any aa, unknown or other
  misc_feature (123)..(123): Xaa is any aa, unknown or other
  misc_feature (132)..(132): Xaa is any aa, unknown or other
  misc_feature (133)..(133): Xaa is any aa, unknown or other
  misc_feature (140)..(140): Xaa is any aa, unknown or other
  misc_feature (148)..(148): Xaa is any aa, unknown or other
HPICYPLVAXXSKATPKPPLPEPSRXXPXXPXXXPMAKEXMRVLVTXAAXQIGYXXVPMIARXVMLGADQPVILHMLXIPPAAEALXGVKMEXVDAXFPLLKGXVXTTDVVEALHWXXCGRHXWWIPQEGGXXKEKMLCXKNVSIYKXQASAP

SEQ ID NO: 14235 - protein, 143 aa, Zea mays subsp. mays
  peptide (1)..(143): Ceres Seq. ID no. 15220342
  misc_feature (85)..(142): Pfam Name: lactate/malate dehydrogenase, alpha/beta Pfam Description: lactate/malate dehydrogenase, alpha/beta
  misc_feature (85)..(142): Pfam Name: lactate/malate dehydrogenase, alpha/beta Pfam Description: lactate/malate dehydrogenase, alpha/beta
  misc_feature (6)..(142): Homolog of NCBI NO: 18202485 NR Description: Malate dehydrogenase, cytoplasmic
  misc_feature (6)..(142): Homolog of NCBI NO: 37535388 NR Description: cytoplasmic malate dehydrogenase [Oryza sativa
  misc_feature (6)..(142): Homolog of NCBI NO: 21593565 NR Description: cytosolic malate dehydrogenase [Arabidopsis
  misc_feature (6)..(142): Homolog of NCBI NO: 15239843 NR Description: malate dehydrogenase, cytosolic, putative thaliana] >gi|11133446|sp|P57106|MDHD_ARATH Malate dehydrogenase,
  misc_feature (6)..(142): Homolog of NCBI NO: 15982948 NR Description: NAD-dependent malate dehydrogenase [Prunus
  misc_feature (6)..(142): Homolog of NCBI NO: 37535388 NR Description: cytoplasmic malate dehydrogenase [Oryza sativa
  misc_feature (6)..(142): Homolog of NCBI NO: 15239843 NR Description: malate dehydrogenase, cytosolic, putative thaliana] >gi|11133446|sp|P57106|MDHD_ARATH Malate dehydrogenase,
  misc_feature (6)..(142): Homolog of NCBI NO: 12229778 NR Description: Malate dehydrogenase, cytoplasmic
  misc_feature (6)..(142): Homolog of NCBI NO: 11133373 NR Description: Malate dehydrogenase, cytoplasmic
  misc_feature (6)..(142): Homolog of NCBI NO: 15219721 NR Description: malate dehydrogenase, cytosolic, putative thaliana] >gi|11133509|sp|P93819|MDHC_ARATH Malate dehydrogenase,
  misc_feature (6)..(142): Homolog of NCBI NO: 10334493 NR Description: cytosolic malate dehydrogenase [Cicer arietinum]
  misc_feature (6)..(142): Homolog of NCBI NO: 10798652 NR Description: malate dehydrogenase [Nicotiana tabacum]
  misc_feature (6)..(142): Homolog of NCBI NO: 15982948 NR Description: NAD-dependent malate dehydrogenase [Prunus
  misc_feature (6)..(142): Homolog of NCBI NO: 21593565 NR Description: cytosolic malate dehydrogenase [Arabidopsis
  misc_feature (6)..(142): Homolog of NCBI NO: 18202485 NR Description: Malate dehydrogenase, cytoplasmic
  misc_feature (6)..(142): Homolog of NCBI NO: 10798652 NR Description: malate dehydrogenase [Nicotiana tabacum]
  misc_feature (6)..(142): Homolog of NCBI NO: 10334493 NR Description: cytosolic malate dehydrogenase [Cicer arietinum]
  misc_feature (6)..(142): Homolog of NCBI NO: 15219721 NR Description: malate dehydrogenase, cytosolic, putative thaliana] >gi|11133509|sp|P93819|MDHC_ARATH Malate dehydrogenase,
  misc_feature (6)..(142): Homolog of NCBI NO: 11133373 NR Description: Malate dehydrogenase, cytoplasmic
  misc_feature (6)..(142): Homolog of NCBI NO: 12229778 NR Description: Malate dehydrogenase, cytoplasmic
  misc_feature (8)..(8): Xaa is any aa, unknown or other
  misc_feature (9)..(9): Xaa is any aa, unknown or other
  misc_feature (15)..(15): Xaa is any aa, unknown or other
  misc_feature (24)..(24): Xaa is any aa, unknown or other
  misc_feature (25)..(25): Xaa is any aa, unknown or other
  misc_feature (32)..(32): Xaa is any aa, unknown or other
  misc_feature (39)..(39): Xaa is any aa, unknown or other
  misc_feature (49)..(49): Xaa is any aa, unknown or other
  misc_feature (50)..(50): Xaa is any aa, unknown or other
  misc_feature (62)..(62): Xaa is any aa, unknown or other
  misc_feature (75)..(75): Xaa is any aa, unknown or other
  misc_feature (77)..(77): Xaa is any aa, unknown or other
  misc_feature (78)..(78): Xaa is any aa, unknown or other
  misc_feature (79)..(79): Xaa is any aa, unknown or other
  misc_feature (86)..(86): Xaa is any aa, unknown or other
  misc_feature (101)..(101): Xaa is any aa, unknown or other
  misc_feature (104)..(104): Xaa is any aa, unknown or other
  misc_feature (119)..(119): Xaa is any aa, unknown or other
MLWKRCTXXNVAVMXGGFPRKEGXXRKRCYVXKMFQSTXPKHLLLEAHXXPNCKVLVVANPXNTNALILKEFAPXIXXXNVTCLTXLDHNRALGQISERLXVQXSDVKNVIIWGNHSSXQYPDVNHATVKTSTGEKPVRELVC

SEQ ID NO: 14236 - protein, 130 aa, Zea mays subsp. mays
  peptide (1)..(130): Ceres Seq. ID no. 15220343
  misc_feature (72)..(129): Pfam Name: lactate/malate dehydrogenase, alpha/beta Pfam Description: lactate/malate dehydrogenase, alpha/beta
  misc_feature (72)..(129): Pfam Name: lactate/malate dehydrogenase, alpha/beta Pfam Description: lactate/malate dehydrogenase, alpha/beta
  misc_feature (1)..(129): Homolog of NCBI NO: 18202485 NR Description: Malate dehydrogenase, cytoplasmic
  misc_feature (1)..(129): Homolog of NCBI NO: 37535388 NR Description: cytoplasmic malate dehydrogenase [Oryza sativa
  misc_feature (1)..(129): Homolog of NCBI NO: 21593565 NR Description: cytosolic malate dehydrogenase [Arabidopsis
  misc_feature (1)..(129): Homolog of NCBI NO: 15239843 NR Description: malate dehydrogenase, cytosolic, putative thaliana] >gi|11133446|sp|P57106|MDHD_ARATH Malate dehydrogenase,
  misc_feature (1)..(129): Homolog of NCBI NO: 15982948 NR Description: NAD-dependent malate dehydrogenase [Prunus
  misc_feature (1)..(129): Homolog of NCBI NO: 37535388 NR Description: cytoplasmic malate dehydrogenase [Oryza sativa
  misc_feature (1)..(129): Homolog of NCBI NO: 15239843 NR Description: malate dehydrogenase, cytosolic, putative thaliana] >gi|11133446|sp|P57106|MDHD_ARATH Malate dehydrogenase,
  misc_feature (1)..(129): Homolog of NCBI NO: 12229778 NR Description: Malate dehydrogenase, cytoplasmic
  misc_feature (1)..(129): Homolog of NCBI NO: 11133373 NR Description: Malate dehydrogenase, cytoplasmic
  misc_feature (1)..(129): Homolog of NCBI NO: 15219721 NR Description: malate dehydrogenase, cytosolic, putative thaliana] >gi|11133509|sp|P93819|MDHC_ARATH Malate dehydrogenase,
  misc_feature (1)..(129): Homolog of NCBI NO: 10334493 NR Description: cytosolic malate dehydrogenase [Cicer arietinum]
  misc_feature (1)..(129): Homolog of NCBI NO: 10798652 NR Description: malate dehydrogenase [Nicotiana tabacum]
  misc_feature (1)..(129): Homolog of NCBI NO: 15982948 NR Description: NAD-dependent malate dehydrogenase [Prunus
  misc_feature (1)..(129): Homolog of NCBI NO: 21593565 NR Description: cytosolic malate dehydrogenase [Arabidopsis
  misc_feature (1)..(129): Homolog of NCBI NO: 18202485 NR Description: Malate dehydrogenase, cytoplasmic
  misc_feature (1)..(129): Homolog of NCBI NO: 10798652 NR Description: malate dehydrogenase [Nicotiana tabacum]
  misc_feature (1)..(129): Homolog of NCBI NO: 10334493 NR Description: cytosolic malate dehydrogenase [Cicer arietinum]
  misc_feature (1)..(129): Homolog of NCBI NO: 15219721 NR Description: malate dehydrogenase, cytosolic, putative thaliana] >gi|11133509|sp|P93819|MDHC_ARATH Malate dehydrogenase,
  misc_feature (1)..(129): Homolog of NCBI NO: 11133373 NR Description: Malate dehydrogenase, cytoplasmic
  misc_feature (1)..(129): Homolog of NCBI NO: 12229778 NR Description: Malate dehydrogenase, cytoplasmic
  misc_feature (2)..(2): Xaa is any aa, unknown or other
  misc_feature (11)..(11): Xaa is any aa, unknown or other
  misc_feature (12)..(12): Xaa is any aa, unknown or other
  misc_feature (19)..(19): Xaa is any aa, unknown or other
  misc_feature (26)..(26): Xaa is any aa, unknown or other
  misc_feature (36)..(36): Xaa is any aa, unknown or other
  misc_feature (37)..(37): Xaa is any aa, unknown or other
  misc_feature (49)..(49): Xaa is any aa, unknown or other
  misc_feature (62)..(62): Xaa is any aa, unknown or other
  misc_feature (64)..(64): Xaa is any aa, unknown or other
  misc_feature (65)..(65): Xaa is any aa, unknown or other
  misc_feature (66)..(66): Xaa is any aa, unknown or other
  misc_feature (73)..(73): Xaa is any aa, unknown or other
  misc_feature (88)..(88): Xaa is any aa, unknown or other
  misc_feature (91)..(91): Xaa is any aa, unknown or other
  misc_feature (106)..(106): Xaa is any aa, unknown or other
MXGGFPRKEGXXRKRCYVXKMFQSTXPKHLLLEAHXXPNCKVLVVANPXNTNALILKEFAPXIXXXNVTCLTXLDHNRALGQISERLXVQXSDVKNVIIWGNHSSXQYPDVNHATVKTSTGEKPVRELVC

SEQ ID NO: 14237 - DNA, 2372 bp, Zea mays subsp. mays
  misc_feature (1)..(2372): Ceres Seq. ID no. 12450487
  misc_feature: MA Experiment ID: 108543 Result: Down-regulated in Transcription
  misc_feature: MA Experiment ID: 20000534 Result: Down-regulated in Transcription
  misc_feature: MA Experiment 20000534 PARAMETER Experiment Name: Zm_Hybrid_Pollen_P Parameter: Age (day) Value: 8
  misc_feature: MA Experiment 20000534 PARAMETER Experiment Name: Zm_Hybrid_Pollen_P Parameter: Organism Value: Zea mays
  misc_feature: MA Experiment 20000534 PARAMETER Experiment Name: Zm_Hybrid_Pollen_P Parameter: Plant Line Value: 35A19
  misc_feature: MA Experiment 20000534 PARAMETER Experiment Name: Zm_Hybrid_Pollen_P Parameter: Tissue Value: Pollen vs. Aerial
aacgaattcctcctcgggctcccacctaatcgtgttcgccgcctgcctctcccaaaccctagcaacccacgatcgaacccaaatccgctcctcccacccgaggggattatgcgaaattccccgagattctagcccagcactagcagatcgatccatcgcttgcccacctgccggccaccaacccttgtagtctcagtcaatctgtagattgagactacgatgagcctgtcaccgctcgactcctcctccccgccggccgcggctgcggctgctgctacggaggtgcccctcgccccgggcttccgcttccaccccaccgacgaggagctcgtctcctactacctccgccgccgcgtcctcggccgccgcctccgcgtcgacgccatcgccgagatcgacctctaccgcctcgagccctgggacctcccctccctctcccgcatccgcagccgcgacgcccagtggtacttcttcgcccgtctcgaccgcaaggtcgccggcgctggcgccgggggccggggcggtcccggcaacaggaccaaccgcgctacgccgagggggtactggaagaccacgggcaaggaccgcgaggtgcaccaccgcggcaagcccgtcgggatgaagaagacgctcgtcttccacgccgggagggcgcctaagggcgagaggaccaactgggtcatgcacgagtaccgcctcctcgatgcagacggacctcaggatctgcatgtggtttgtagaatcttccagaagcatgggtctggaccacagaacggtgcgcagtatggtgcaccatacatggaagaggaatgggaagaggatgatgatgctattgagaatggttctacccacgatgcatctggtcaaattgctgcaaccacctgtgctgtagatgaggagtcaaatgaggacgatgagaatgcatattgtgaaacaaacagacctgctcgagtagaaccatctcatctgccttcggttcatgaaatgctcaatccaccagagatggctcctctccaaggtcaatattctaaagagacaagcgatggaagttgttctgatgttgctatttctctggaagagattttgcaggaacctttgtcaaatattagtgtggagaatatgcatagacttgaagggcagaatgccactgatgataacatcagtgttgataacttgttatcagcatatcccacgaaagataatggctacgtaggccagtataacactatgaatgggagtgctccagcagatgaagctcacgcacgctggcctttgagaacatatagtaatcagaattatgtcaatggccctcttgctgatgagttctttgacacagggaatgataccaatggggttgcatattccaggcagcagcaagctgatggctttccagcacctcgccaagttgatgaaagtatggtattttatgatgccccatctgattacaacttggtggatggaaaagatgacttcgtatatctgaacgacattctgaatgagccacttggaaatgaatcgctctttgatggagatgatatgatggcttactttgatgccacagagaatgatttcaagtatgacattttgggctctggtcagggtttggattatccacttgcagacatgccgttgaactttgcccaaaagagtgacaaggaagacaagtttacattcgaagggatctctgaggttccggaagcaaatcctcagtacggtgcatcctcatctggttcacatgaagatctgtatactgatactgaatttctaggtgtgccaacagatgacactgctgataaaacttacggaaatcgcctggccagcatgttaggctctatcccagctccacctgcaatggcctcagaattcccgccgtcaacagggaaatctgctgggatgctttcggctgtcagctcgagctcaattcgttttactgctggtatcatccaacttgatggcctcactttcagcagcggctccggtcagtggcccttgcagaagaatggagacttgagtttgcttgtctcttttgctgtggagggcgacgtggcatccaagctccctgttggtcttgggcgtgctactcggattagcaccgttcccatggtgctgcgcagtggtttttaccttttctttatgtcggccatgattctcttgtttagctacaaagtagggtcgtgtatctacagcaggtaagttgaagttgatggcgcctcttgtccggccagacctgtgggctgtttattttagttcaacacgtggatcattccctcagtgatgggggtatagcagtcgttcgacaccttttttacacatttaccattttgacctgtcaaaacatacagcaataaactttcgaactggtggtggtgatc

SEQ ID NO: 14238 - protein, 657 aa, Zea mays subsp. mays
  peptide (1)..(657): Ceres Seq. ID no. 12450488
  misc_feature (24)..(161): Pfam Name: No apical meristem (NAM) protein Pfam Description: No apical meristem (NAM) protein
  misc_feature (134)..(612): Homolog of NCBI NO: 29367359 NR Description: NAC-like protein [Oryza sativa (japonica
  misc_feature (185)..(657): Homolog of NCBI NO: 29367359 NR Description: NAC-like protein [Oryza sativa (japonica
  misc_feature (24)..(202): Homolog of NCBI NO: 21105746 NR Description: nam-like protein 9 [Petunia x hybrida]
  misc_feature (408)..(569): Homolog of NCBI NO: 21105746 NR Description: nam-like protein 9 [Petunia x hybrida]
  misc_feature (24)..(427): Homolog of NCBI NO: 15237699 NR Description: putative protein; protein id: At5g04410.1, by cDNA: gi_20466285, supported by cDNA: gi_6456750 [Arabidopsis
  misc_feature (24)..(203): Homolog of NCBI NO: 8567779 NR Description: NAC, putative [Arabidopsis thaliana]
  misc_feature (24)..(203): Homolog of NCBI NO: 18398895 NR Description: expressed protein; protein id: At3g10500.1 thaliana] >gi|15293139|gb|AAK93680.1| unknown protein thaliana] >gi|19310691|gb|AAL85076.1| unknown protein
  misc_feature (24)..(203): Homolog of NCBI NO: 21593389 NR Description: NAC, putative [Arabidopsis thaliana]
  misc_feature (24)..(419): Homolog of NCBI NO: 6456751 NR Description: NAC2 [Arabidopsis thaliana]
  misc_feature (13)..(287): Homolog of NCBI NO: 21105744 NR Description: nam-like protein 8 [Petunia x hybrida]
MSLSPLDSSSPPAAAAAAATEVPLAPGFRFHPTDEELVSYYLRRRVLGRRLRVDAIAEIDLYRLEPWDLPSLSRIRSRDAQWYFFARLDRKVAGAGAGGRGGPGNRTNRATPRGYWKTTGKDREVHHRGKPVGMKKTLVFHAGRAPKGERTNWVMHEYRLLDADGPQDLHVVCRIFQKHGSGPQNGAQYGAPYMEEEWEEDDDAIENGSTHDASGQIAATTCAVDEESNEDDENAYCETNRPARVEPSHLPSVHEMLNPPEMAPLQGQYSKETSDGSCSDVAISLEEILQEPLSNISVENMHRLEGQNATDDNISVDNLLSAYPTKDNGYVGQYNTMNGSAPADEAHARWPLRTYSNQNYVNGPLADEFFDTGNDTNGVAYSRQQQADGFPAPRQVDESMVFYDAPSDYNLVDGKDDFVYLNDILNEPLGNESLFDGDDMMAYFDATENDFKYDILGSGQGLDYPLADMPLNFAQKSDKEDKFTFEGISEVPEANPQYGASSSGSHEDLYTDTEFLGVPTDDTADKTYGNRLASMLGSIPAPPAMASEFPPSTGKSAGMLSAVSSSSIRFTAGIIQLDGLTFSSGSGQWPLQKNGDLSLLVSFAVEGDVASKLPVGLGRATRISTVPMVLRSGFYLFFMSAMILLFSYKVGSCIYSR

SEQ ID NO: 14239 - protein, 524 aa, Zea mays subsp. mays
  peptide (1)..(524): Ceres Seq. ID no. 12450489
  misc_feature (1)..(479): Homolog of NCBI NO: 29367359 NR Description: NAC-like protein [Oryza sativa (japonica
  misc_feature (52)..(524): Homolog of NCBI NO: 29367359 NR Description: NAC-like protein [Oryza sativa (japonica
  misc_feature (1)..(69): Homolog of NCBI NO: 21105746 NR Description: nam-like protein 9 [Petunia x hybrida]
  misc_feature (275)..(436): Homolog of NCBI NO: 21105746 NR Description: nam-like protein 9 [Petunia x hybrida]
  misc_feature (1)..(294): Homolog of NCBI NO: 15237699 NR Description: putative protein; protein id: At5g04410.1, by cDNA: gi_20466285, supported by cDNA: gi_6456750 [Arabidopsis
  misc_feature (1)..(70): Homolog of NCBI NO: 8567779 NR Description: NAC, putative [Arabidopsis thaliana]
  misc_feature (1)..(70): Homolog of NCBI NO: 18398895 NR Description: expressed protein; protein id: At3g10500.1 thaliana] >gi|15293139|gb|AAK93680.1| unknown protein thaliana] >gi|19310691|gb|AAL85076.1| unknown protein
  misc_feature (1)..(70): Homolog of NCBI NO: 21593389 NR Description: NAC, putative [Arabidopsis thaliana]
  misc_feature (1)..(286): Homolog of NCBI NO: 6456751 NR Description: NAC2 [Arabidopsis thaliana]
  misc_feature (1)..(154): Homolog of NCBI NO: 21105744 NR Description: nam-like protein 8 [Petunia x hybrida]
MKKTLVFHAGRAPKGERTNWVMHEYRLLDADGPQDLHVVCRIFQKHGSGPQNGAQYGAPYMEEEWEEDDDAIENGSTHDASGQIAATTCAVDEESNEDDENAYCETNRPARVEPSHLPSVHEMLNPPEMAPLQGQYSKETSDGSCSDVAISLEEILQEPLSNISVENMHRLEGQNATDDNISVDNLLSAYPTKDNGYVGQYNTMNGSAPADEAHARWPLRTYSNQNYVNGPLADEFFDTGNDTNGVAYSRQQQADGFPAPRQVDESMVFYDAPSDYNLVDGKDDFVYLNDILNEPLGNESLFDGDDMMAYFDATENDFKYDILGSGQGLDYPLADMPLNFAQKSDKEDKFTFEGISEVPEANPQYGASSSGSHEDLYTDTEFLGVPTDDTADKTYGNRLASMLGSIPAPPAMASEFPPSTGKSAGMLSAVSSSSIRFTAGIIQLDGLTFSSGSGQWPLQKNGDLSLLVSFAVEGDVASKLPVGLGRATRISTVPMVLRSGFYLFFMSAMILLFSYKVGSCIYSR

SEQ ID NO: 14240 - protein, 503 aa, Zea mays subsp. mays
  peptide (1)..(503): Ceres Seq. ID no. 12450490
  misc_feature (1)..(458): Homolog of NCBI NO: 29367359 NR Description: NAC-like protein [Oryza sativa (japonica
  misc_feature (31)..(503): Homolog of NCBI NO: 29367359 NR Description: NAC-like protein [Oryza sativa (japonica
  misc_feature (1)..(48): Homolog of NCBI NO: 21105746 NR Description: nam-like protein 9 [Petunia x hybrida]
  misc_feature (254)..(415): Homolog of NCBI NO: 21105746 NR Description: nam-like protein 9 [Petunia x hybrida]
  misc_feature (1)..(273): Homolog of NCBI NO: 15237699 NR Description: putative protein; protein id: At5g04410.1, by cDNA: gi_20466285, supported by cDNA: gi_6456750 [Arabidopsis
  misc_feature (1)..(49): Homolog of NCBI NO: 8567779 NR Description: NAC, putative [Arabidopsis thaliana]
  misc_feature (1)..(49): Homolog of NCBI NO: 18398895 NR Description: expressed protein; protein id: At3g10500.1 thaliana] >gi|15293139|gb|AAK93680.1| unknown protein thaliana] >gi|19310691|gb|AAL85076.1| unknown protein
  misc_feature (1)..(49): Homolog of NCBI NO: 21593389 NR Description: NAC, putative [Arabidopsis thaliana]
  misc_feature (1)..(265): Homolog of NCBI NO: 6456751 NR Description: NAC2 [Arabidopsis thaliana]
  misc_feature (1)..(133): Homolog of NCBI NO: 21105744 NR Description: nam-like protein 8 [Petunia x hybrida]
MHEYRLLDADGPQDLHVVCRIFQKHGSGPQNGAQYGAPYMEEEWEEDDDAIENGSTHDASGQIAATTCAVDEESNEDDENAYCETNRPARVEPSHLPSVHEMLNPPEMAPLQGQYSKETSDGSCSDVAISLEEILQEPLSNISVENMHRLEGQNATDDNISVDNLLSAYPTKDNGYVGQYNTMNGSAPADEAHARWPLRTYSNQNYVNGPLADEFFDTGNDTNGVAYSRQQQADGFPAPRQVDESMVFYDAPSDYNLVDGKDDFVYLNDILNEPLGNESLFDGDDMMAYFDATENDFKYDILGSGQGLDYPLADMPLNFAQKSDKEDKFTFEGISEVPEANPQYGASSSGSHEDLYTDTEFLGVPTDDTADKTYGNRLASMLGSIPAPPAMASEFPPSTGKSAGMLSAVSSSSIRFTAGIIQLDGLTFSSGSGQWPLQKNGDLSLLVSFAVEGDVASKLPVGLGRATRISTVPMVLRSGFYLFFMSAMILLFSYKVGSCIYSR

SEQ ID NO: 14241 - DNA, 2703 bp, Zea mays subsp. mays
  misc_feature (1)..(2703): Ceres Seq. ID no. 15180196
  misc_feature: MA Experiment ID: 108528 Result: Up-regulated in Transcription
  misc_feature: MA Experiment 108528 PARAMETER Experiment Name: Zm_Imbibed_Seeds_P Parameter: Age (day) Value: 5 vs. 2
  misc_feature: MA Experiment 108528 PARAMETER Experiment Name: Zm_Imbibed_Seeds_P Parameter: Organism Value: Zea mays
  misc_feature: MA Experiment 108528 PARAMETER Experiment Name: Zm_Imbibed_Seeds_P Parameter: Plant Line Value: 35A19
  misc_feature: MA Experiment 108528 PARAMETER Experiment Name: Zm_Imbibed_Seeds_P Parameter: Tissue Value: Aerial vs. Embryo
tcccccgatgctgtttgaattcctgcgacactgttaccgagaacatcctaatcaaaagtgttgtctagcactctagctgcttctctcggttctcgcgactcccaaacggcaaaacgccaaaaccctagccgcggccattccggaattggccatggaggcgagggcgtcgccgcgtccgtcggtctccatcggtggcggcggcggcttcggagctgggcggggtgacggcagcgccttctcgtttctctcaaaggggtggcgcgaggtgcgggattccgccaccgccgacctgcgcctcatgcgcgcgagggctgattccctccgcacgctcgcggaccgcgagctcgagcacctcctcgcgtccgcctccactgcgctgacctccgcgccgccgccgccgctcgccgcgggggcgcccatagccgagttcgagttcgtgcgcacacggatccagcccaagatctccgaactgcggcgcccggtacgtgtcacaggagcgggagctcggccgcagggtgctcgaggggtgggcgccgcgcggggcggggaaacccgcgcgcgcacgtgtcgacctctctgggatcaccgccatccgcaacgccatcgtctctgaagtggatggcggggagcgctggaggcgcgtggtgtggaacggggaggcggaagaggggaaagaatgggaggtgctcaggatcatacgggacggcatcaaagagttcgagcgccggagccagaccaaggagatttttgagggattgcgcagtaccggcgagctcgtcgagaaattcaagtccagcctgaaatcattcaacatggagtctcaaggatccaaggaaatccaaccactggatctacctgaaatactggcaaatcttgtaaggcagtctgaaccatttttggatcaacttggtgtacggagagatcagtgtgacaaactagtggaggcattgtgtaggaaacaaaatcattccctttcagaaaacacatccttgcctgtaaatgataagtcatcagatgaacttgacttgagaatcgcaagcgtgcttcaaagttctggttatcatgctgatgatggtttctggagtgaacctacaaagtctgaggtctcagacgataaaagacatgtggctatagtcaccacagcaagtttaccatggatgacaggaacagcagttaatccattgttccgtgcagcatatctcgcaaaaggtactagacaagatgtgacactggtagtgccttggctttgcaaatcagaccaagaactggtatacccaaatagcatgacgttcagttcaccagaagagcaggaaacttatataaggagctggctggaggaaagactaggatttgaatcaaacttcaagatatccttttatcctggcaagttctcaaaagagcggcgtagcatcattccagctggtgatacgtctcagttcataccgtcaagagaagctgatatagcaatattggaagaaccagaacatctcaattggtatcatcatgggaaacgctggactgacaagttcaaccatgttgttggtgtagttcatacaaactacctggaatatatcaagagagagaagaatggagctcttcaggcctttctagttaaacacatcaacaattgggtgaccagagcatactgcgacaaggtcttacgtctttctgcagcaactcaagatttaccaaagtctattgtttgcaatgttcatggtgttaacccaaagttcctgaagattggagaagaaataactgccaatagggggagttgggagcctccattttccaagggagcatattttcttgggaagatggtttgggccaaaggttatagggaactcatagatttgatggctaaacataaaagcgatttagaaggattcaagttagatgtatacggaagtggtgaggactcgcaagaagttcaatccactgccaggaggttagatttgagtctcaattttttcaagggaagggatcatgctgataattcactccatgggtacaaggttttcataaatccgagcattagtgatgtcctgtgcacagcaacggcagaggctcttgcaatggggaaattcgtgatctgcgcagaacatccatcaaatgagtttttcatgtcatttccgaactgtttgacatacaagacttcagaggagtttgttgcgagagtgaaagaggcaatggatagagaaccccaaccgctaacccctgagcaaagatacaacctttcgtgggaggcagcgactgagagattcatggagtactcagaccttgacaaggttctgaacaatgaggctgctcagcctggacaaggtaggaaaagaaagaataaaagaacctcacagcctaatttgtccgacataatggatggcggtctagcgttggcccatcgatgcttaactggcaatgaggttctcaggctggcaaccggagccattcctggtacccgggactacgataagcagcactgtgtggatatgggtctcttgcctcctcaagtacagcaccctgtatatggctggtgatgactgatgagcacccaaagctaatcgtaggtatatatgtacataatacaccatgtcgctcttatgtcgactaatgtttggagtattgtaattgtagcatgcatgacgacctttgcccattgttttgtactctgtaataaggttctttctccttaaattggagttttatcgc

SEQ ID NO: 14242 - protein, 572 aa, Zea mays subsp. mays
  peptide (1)..(572): Ceres Seq. ID no. 15180197
  misc_feature (318)..(478): Pfam Name: Glycosyl transferases group 1 Pfam Description: Glycosyl transferases group 1
  misc_feature (1)..(572): Homolog of NCBI NO: 38344037 NR Description: OJ991214_12.18 [Oryza sativa (japonica
  misc_feature (1)..(572): Homolog of NCBI NO: 15229824 NR Description: digalactosyldiacylglycerol synthase 1 (MGDG:MGDG (galactolipid galactosyltransferase) (DGD1) [Arabidopsis >gi|5354158|gb|AAD42378.1|AF149841_1 digalactosyldiacylglycerol
  misc_feature (109)..(572): Homolog of NCBI NO: 27542603 NR Description: digalactosyldiacylglycerol synthase [Xerophyta
  misc_feature (1)..(397): Homolog of NCBI NO: 30681840 NR Description: digalactosyldiacylglycerol synthase 1 (MGDG:MGDG (galactolipid galactosyltransferase) (DGD1) [Arabidopsis
  misc_feature (102)..(559): Homolog of NCBI NO: 34902044 NR Description: name [Oryza sativa (japonica cultivar-group)]
  misc_feature (99)..(560): Homolog of NCBI NO: 22328179 NR Description: UDP-galactose:MGDG galactosyltransferase synthase 2) (DGD2) [Arabidopsis thaliana]
  misc_feature (175)..(368): Homolog of NCBI NO: 7486557 NR Description: hypothetical protein F6N23.24 - Arabidopsis >gi|3047114|gb|AAC13625.1| F6N23.24 gene product [Arabidopsis >gi|7267394|emb|CAB80864.1| predicted protein of unknown function
  misc_feature (396)..(560): Homolog of NCBI NO: 7486557 NR Description: hypothetical protein F6N23.24 - Arabidopsis >gi|3047114|gb|AAC13625.1| F6N23.24 gene product [Arabidopsis >gi|7267394|emb|CAB80864.1| predicted protein of unknown function
  misc_feature (99)..(137): Homolog of NCBI NO: 7486557 NR Description: hypothetical protein F6N23.24 - Arabidopsis >gi|3047114|gb|AAC13625.1| F6N23.24 gene product [Arabidopsis >gi|7267394|emb|CAB80864.1| predicted protein of unknown function
  misc_feature (335)..(560): Homolog of NCBI NO: 18141114 NR Description: digalactosyldiacylglycerol synthase [Arabidopsis
MESQGSKEIQPLDLPEILANLVRQSEPFLDQLGVRRDQCDKLVEALCRKQNHSLSENTSLPVNDKSSDELDLRIASVLQSSGYHADDGFWSEPTKSEVSDDKRHVAIVTTASLPWMTGTAVNPLFRAAYLAKGTRQDVTLVVPWLCKSDQELVYPNSMTFSSPEEQETYIRSWLEERLGFESNFKISFYPGKFSKERRSIIPAGDTSQFIPSREADIAILEEPEHLNWYHHGKRWTDKFNHVVGVVHTNYLEYIKREKNGALQAFLVKHINNWVTRAYCDKVLRLSAATQDLPKSIVCNVHGVNPKFLKIGEEITANRGSWEPPFSKGAYFLGKMVWAKGYRELIDLMAKHKSDLEGFKLDVYGSGEDSQEVQSTARRLDLSLNFFKGRDHADNSLHGYKVFINPSISDVLCTATAEALAMGKFVICAEHPSNEFFMSFPNCLTYKTSEEFVARVKEAMDREPQPLTPEQRYNLSWEAATERFMEYSDLDKVLNNEAAQPGQGRKRKNKRTSQPNLSDIMDGGLALAHRCLTGNEVLRLATGAIPGTRDYDKQHCVDMGLLPPQVQHPVYGW

SEQ ID NO: 14243 - protein, 457 aa, Zea mays subsp. mays
  peptide (1)..(457): Ceres Seq. ID no. 15180198
  misc_feature (203)..(363): Pfam Name: Glycosyl transferases group 1 Pfam Description: Glycosyl transferases group 1
  misc_feature (1)..(457): Homolog of NCBI NO: 38344037 NR Description: OJ991214_12.18 [Oryza sativa (japonica
  misc_feature (1)..(457): Homolog of NCBI NO: 15229824 NR Description: digalactosyldiacylglycerol synthase 1 (MGDG:MGDG (galactolipid galactosyltransferase) (DGD1) [Arabidopsis >gi|5354158|gb|AAD42378.1|AF149841_1 digalactosyldiacylglycerol
  misc_feature (1)..(457): Homolog of NCBI NO: 27542603 NR Description: digalactosyldiacylglycerol synthase [Xerophyta
  misc_feature (1)..(282): Homolog of NCBI NO: 30681840 NR Description: digalactosyldiacylglycerol synthase 1 (MGDG:MGDG (galactolipid galactosyltransferase) (DGD1) [Arabidopsis
  misc_feature (1)..(444): Homolog of NCBI NO: 34902044 NR Description: name [Oryza sativa (japonica cultivar-group)]
  misc_feature (1)..(445): Homolog of NCBI NO: 22328179 NR Description: UDP-galactose:MGDG galactosyltransferase synthase 2) (DGD2) [Arabidopsis thaliana]
  misc_feature (60)..(253): Homolog of NCBI NO: 7486557 NR Description: hypothetical protein F6N23.24 - Arabidopsis >gi|3047114|gb|AAC13625.1| F6N23.24 gene product [Arabidopsis >gi|7267394|emb|CAB80864.1| predicted protein of unknown function
  misc_feature (281)..(445): Homolog of NCBI NO: 7486557 NR Description: hypothetical protein F6N23.24 - Arabidopsis >gi|3047114|gb|AAC13625.1| F6N23.24 gene product [Arabidopsis >gi|7267394|emb|CAB80864.1| predicted protein of unknown function
  misc_feature (1)..(22): Homolog of NCBI NO: 7486557 NR Description: hypothetical protein F6N23.24 - Arabidopsis >gi|3047114|gb|AAC13625.1| F6N23.24 gene product [Arabidopsis >gi|7267394|emb|CAB80864.1| predicted protein of unknown function
  misc_feature (220)..(445): Homolog of NCBI NO: 18141114 NR Description: digalactosyldiacylglycerol synthase [Arabidopsis
MTGTAVNPLFRAAYLAKGTRQDVTLVVPWLCKSDQELVYPNSMTFSSPEEQETYIRSWLEERLGFESNFKISFYPGKFSKERRSIIPAGDTSQFIPSREADIAILEEPEHLNWYHHGKRWTDKFNHVVGVVHTNYLEYIKREKNGALQAFLVKHINNWVTRAYCDKVLRLSAATQDLPKSIVCNVHGVNPKFLKIGEEITANRGSWEPPFSKGAYFLGKMVWAKGYRELIDLMAKHKSDLEGFKLDVYGSGEDSQEVQSTARRLDLSLNFFKGRDHADNSLHGYKVFINPSISDVLCTATAEALAMGKFVICAEHPSNEFFMSFPNCLTYKTSEEFVARVKEAMDREPQPLTPEQRYNLSWEAATERFMEYSDLDKVLNNEAAQPGQGRKRKNKRTSQPNLSDIMDGGLALAHRCLTGNEVLRLATGAIPGTRDYDKQHCVDMGLLPPQVQHPVYGW

SEQ ID NO: 14244 - protein, 415 aa, Zea mays subsp. mays
  peptide (1)..(415): Ceres Seq. ID no. 15180199
  misc_feature (161)..(321): Pfam Name: Glycosyl transferases group 1 Pfam Description: Glycosyl transferases group 1
  misc_feature (1)..(415): Homolog of NCBI NO: 38344037 NR Description: OJ991214_12.18 [Oryza sativa (japonica
  misc_feature (1)..(415): Homolog of NCBI NO: 15229824 NR Description: digalactosyldiacylglycerol synthase 1 (MGDG:MGDG (galactolipid galactosyltransferase) (DGD1) [Arabidopsis >gi|5354158|gb|AAD42378.1|AF149841_1 digalactosyldiacylglycerol
  misc_feature (1)..(415): Homolog of NCBI NO: 27542603 NR Description: digalactosyldiacylglycerol synthase [Xerophyta
  misc_feature (1)..(240): Homolog of NCBI NO: 30681840 NR Description: digalactosyldiacylglycerol synthase 1 (MGDG:MGDG (galactolipid galactosyltransferase) (DGD1) [Arabidopsis
  misc_feature (1)..(402): Homolog of NCBI NO: 34902044 NR Description: name [Oryza sativa (japonica cultivar-group)]
  misc_feature (1)..(403): Homolog of NCBI NO: 22328179 NR Description: UDP-galactose:MGDG galactosyltransferase synthase 2) (DGD2) [Arabidopsis thaliana]
  misc_feature (18)..(211): Homolog of NCBI NO: 7486557 NR Description: hypothetical protein F6N23.24 - Arabidopsis >gi|3047114|gb|AAC13625.1| F6N23.24 gene product [Arabidopsis >gi|7267394|emb|CAB80864.1| predicted protein of unknown function
  misc_feature (239)..(403): Homolog of NCBI NO: 7486557 NR Description: hypothetical protein F6N23.24 - Arabidopsis >gi|3047114|gb|AAC13625.1| F6N23.24 gene product [Arabidopsis >gi|7267394|emb|CAB80864.1| predicted protein of unknown function
  misc_feature (178)..(403): Homolog of NCBI NO: 18141114 NR Description: digalactosyldiacylglycerol synthase [Arabidopsis
MTFSSPEEQETYIRSWLEERLGFESNFKISFYPGKFSKERRSIIPAGDTSQFIPSREADIAILEEPEHLNWYHHGKRWTDKFNHVVGVVHTNYLEYIKREKNGALQAFLVKHINNWVTRAYCDKVLRLSAATQDLPKSIVCNVHGVNPKFLKIGEEITANRGSWEPPFSKGAYFLGKMVWAKGYRELIDLMAKHKSDLEGFKLDVYGSGEDSQEVQSTARRLDLSLNFFKGRDHADNSLHGYKVFINPSISDVLCTATAEALAMGKFVICAEHPSNEFFMSFPNCLTYKTSEEFVARVKEAMDREPQPLTPEQRYNLSWEAATERFMEYSDLDKVLNNEAAQPGQGRKRKNKRTSQPNLSDIMDGGLALAHRCLTGNEVLRLATGAIPGTRDYDKQHCVDMGLLPPQVQHPVYGW

SEQ ID NO: 14245 - DNA, 1676 bp, Zea mays subsp. mays
  misc_feature (1)..(1676): Ceres Seq. ID no. 12450484
  misc_feature: MA Experiment ID: 108689 Result: Up-regulated in Transcription
  misc_feature: MA Experiment 108689 PARAMETER Experiment Name: Zm_Drought_Roots_P Parameter: Age (day) Value: 9
  misc_feature: MA Experiment 108689 PARAMETER Experiment Name: Zm_Drought_Roots_P Parameter: Organism Value: Zea mays
  misc_feature: MA Experiment 108689 PARAMETER Experiment Name: Zm_Drought_Roots_P Parameter: Plant Line Value: 35A19
  misc_feature: MA Experiment 108689 PARAMETER Experiment Name: Zm_Drought_Roots_P Parameter: Timepoint (hr) Value: 24
  misc_feature: MA Experiment 108689 PARAMETER Experiment Name: Zm_Drought_Roots_P Parameter: Tissue Value: Roots
  misc_feature: MA Experiment 108689 PARAMETER Experiment Name: Zm_Drought_Roots_P Parameter: Treatment Value: Drought vs. No Drought
atctccatgagttgagcagcctgagcagatgaggtgaagtgagttggctgccagcgcgtgctgtatcttgtatggctgtactgtatcccccctcctctcgctaaccctttgtctccttcccccacaaaaccacctccgccccctcctcccaccagtacctgtgagttgtgagctccttgctgcggctgcttgctcccctcatctctagcctgtacactggttggagtggttgccagtgttctccccacctgctcctctcgatccactccatcccctttggccatgggtgtgcaagcatacatctacggtaattgcatgcttctcctgccttgaagcggaagccttagccttagcctgccgcctgggggaaaccttctgtttcgccgctgccgctgctgtggtataaaggtggaaggctgatccgtcgacggacggagtcccggcggagggaagattgctccgtcgccgcggtttcgcggccaagaaggtggcctacgcggtggaaaggggcggggcggggccgtgaaggaatcttgctccgacgccaatccctcctctgcccctcgattttcgggcggttgtcggtgctgcctttcgcagtaagaggtgggatctcgcgtccggcggcggcggcggcggcgttgctggatcgagcaacctccggcggtggcctgcgtacctgcgtggccgatctgtgcgtggctgttcatctcttcgccggcattgcgaggcgggctcgccgggcggtgtggattgcttgcggtgaggagtgcggaggagaggtgctgatccaagcggcgggcgggcgggcggctgcacgccaggtgttcgacgaaggaccccgaccgggccagccagccatgagggacttcccttcctgcttcggcgagagcggcgtccagatcgcggacgcgtcgtcgtcgtcgtccagcgccggcaagggcgcggcgcagaacctggtgacctgcctctaccagacgcagttctcgggccggccctgcgtgatctcgctcacgtggagcaggagcctcatggggcagggcctcagcgtcggcgtcgacgacctgtccggccactgcctctgcaaggcggacatcaagccgtggctcttctccaagaagaaggggtccaagagcctcgacgtcgaggacggcaagatcgacatcttctgggacctgtcgggcgccaagttcggcgctgggccagagccggtggaggggttctatgtcgcagtggtgttcgaccttgagctcgtgctcttgctcggcgacatgaagaaggatgcctacaggaagactggagccaaccggtcgatgctgaacgccgcgtttgtggcgaggagggagcacatatacggcaagaagacctactccgccaaggcgcagttctgcgacaatggccagttccatgacattgtcatagactgcgacaccgtcgacctgaaggatccgtgtcttgaaataagagttgacaagaagcccgtgatgctttaaagacccaccggcactggcagtgagtgttgctgcttgtgtaggctttggtacgtatgggctttatttgcttctggatgttgtgtactacttgggtttgttgaattattatgagcagttgcgtattgtaattcagctgggctacctggacattgttatgtattaataaatgctttgctttcttct

SEQ ID NO: 14246 - protein, 210 aa, Zea mays subsp. mays
  peptide (1)..(210): Ceres Seq. ID no. 12450485
  misc_feature (26)..(209): Pfam Name: Plant protein of unknown function (DUF868) Pfam Description: Plant protein of unknown function (DUF868)
  misc_feature (1)..(209): Homolog of NCBI NO: 30102999 NR Description: hypothetical protein [Oryza sativa (japonica
  misc_feature (1)..(209): Homolog of NCBI NO: 15241702 NR Description: putative protein; protein id: At5g28150.1, by cDNA: gi_19699076 [Arabidopsis thaliana] AT5g28150/T24G3_80 [Arabidopsis thaliana]
  misc_feature (1)..(209): Homolog of NCBI NO: 18397034 NR Description: expressed protein; protein id: At3g04860.1, by cDNA: 5170., supported by cDNA: gi_16612260 [Arabidopsis
  misc_feature (1)..(209): Homolog of NCBI NO: 21593854 NR Description: unknown [Arabidopsis thaliana]
  misc_feature (1)..(209): Homolog of NCBI NO: 34394221 NR Description: unknown protein [Oryza sativa (japonica
  misc_feature (75)..(210): Homolog of NCBI NO: 20804936 NR Description: P0456E05.14 [Oryza sativa (japonica
  misc_feature (5)..(72): Homolog of NCBI NO: 20804936 NR Description: P0456E05.14 [Oryza sativa (japonica
  misc_feature (30)..(204): Homolog of NCBI NO: 15235452 NR Description: putative protein; protein id: At4g12690.1, by cDNA: 12923. [Arabidopsis thaliana] >gi|7459232|pir||T06627
  misc_feature (30)..(204): Homolog of NCBI NO: 15228105 NR Description: hypothetical protein; protein id: At2g04220.1 thaliana] >gi|20198211|gb|AAD27916.2| hypothetical protein thaliana] >gi|20198251|gb|AAM15482.1| hypothetical protein
  misc_feature (1)..(204): Homolog of NCBI NO: 15238927 NR Description: putative protein; protein id: At5g48270.1 thaliana] >gi|8777417|dbj|BAA97007.1|
MRDFPSCFGESGVQIADASSSSSSAGKGAAQNLVTCLYQTQFSGRPCVISLTWSRSLMGQGLSVGVDDLSGHCLCKADIKPWLFSKKKGSKSLDVEDGKIDIFWDLSGAKFGAGPEPVEGFYVAVVFDLELVLLLGDMKKDAYRKTGANRSMLNAAFVARREHIYGKKTYSAKAQFCDNGQFHDIVIDCDTVDLKDPCLEIRVDKKPVML

SEQ ID NO: 14247 - protein, 153 aa, Zea mays subsp. mays
  peptide (1)..(153): Ceres Seq. ID no. 12450486
  misc_feature (1)..(152): Pfam Name: Plant protein of unknown function (DUF868) Pfam Description: Plant protein of unknown function (DUF868)
  misc_feature (1)..(152): Homolog of NCBI NO: 30102999 NR Description: hypothetical protein [Oryza sativa (japonica
  misc_feature (1)..(152): Homolog of NCBI NO: 15241702 NR Description: putative protein; protein id: At5g28150.1, by cDNA: gi_19699076 [Arabidopsis thaliana] AT5g28150/T24G3_80 [Arabidopsis thaliana]
  misc_feature (1)..(152): Homolog of NCBI NO: 18397034 NR Description: expressed protein; protein id: At3g04860.1, by cDNA: 5170., supported by cDNA: gi_16612260 [Arabidopsis
  misc_feature (1)..(152): Homolog of NCBI NO: 21593854 NR Description: unknown [Arabidopsis thaliana]
  misc_feature (1)..(152): Homolog of NCBI NO: 34394221 NR Description: unknown protein [Oryza sativa (japonica
  misc_feature (18)..(153): Homolog of NCBI NO: 20804936 NR Description: P0456E05.14 [Oryza sativa (japonica
  misc_feature (1)..(15): Homolog of NCBI NO: 20804936 NR Description: P0456E05.14 [Oryza sativa (japonica
  misc_feature (1)..(147): Homolog of NCBI NO: 15235452 NR Description: putative protein; protein id: At4g12690.1, by cDNA: 12923. [Arabidopsis thaliana] >gi|7459232|pir||T06627
  misc_feature (1)..(147): Homolog of NCBI NO: 15228105 NR Description: hypothetical protein; protein id: At2g04220.1 thaliana] >gi|20198211|gb|AAD27916.2| hypothetical protein thaliana] >gi|20198251|gb|AAM15482.1| hypothetical protein
  misc_feature (1)..(147): Homolog of NCBI NO: 15238927 NR Description: putative protein; protein id: At5g48270.1 thaliana] >gi|8777417|dbj|BAA97007.1|
MGQGLSVGVDDLSGHCLCKADIKPWLFSKKKGSKSLDVEDGKIDIFWDLSGAKFGAGPEPVEGFYVAVVFDLELVLLLGDMKKDAYRKTGANRSMLNAAFVARREHIYGKKTYSAKAQFCDNGQFHDIVIDCDTVDLKDPCLEIRVDKKPVML

SEQ ID NO: 14248 - DNA, 441 bp, Zea mays subsp. mays
  misc_feature (1)..(441): Ceres Seq. ID no. 4614339
  misc_feature: MA Experiment ID: 108523 Result: Up-regulated in Transcription
  misc_feature: MA Experiment 108523 PARAMETER Experiment Name: Zm_42deg_Heat_P Parameter: Age (day) Value: 8
  misc_feature: MA Experiment 108523 PARAMETER Experiment Name: Zm_42deg_Heat_P Parameter: Organism Value: Zea mays
  misc_feature: MA Experiment 108523 PARAMETER Experiment Name: Zm_42deg_Heat_P Parameter: Plant Line Value: 35A19
  misc_feature: MA Experiment 108523 PARAMETER Experiment Name: Zm_42deg_Heat_P Parameter: Temperature (deg C) Value: 42 vs. 22
  misc_feature: MA Experiment 108523 PARAMETER Experiment Name: Zm_42deg_Heat_P Parameter: Timepoint (hr) Value: 6
  misc_feature: MA Experiment 108523 PARAMETER Experiment Name: Zm_42deg_Heat_P Parameter: Tissue Value: Aerial
  misc_feature: MA Experiment ID: 108527 Result: Up-regulated in Transcription
  misc_feature: MA Experiment 108527 PARAMETER Experiment Name: Zm_5mM_NO_P Parameter: Age (day) Value: 8
  misc_feature: MA Experiment 108527 PARAMETER Experiment Name: Zm_5mM_NO_P Parameter: Organism Value: Zea mays
  misc_feature: MA Experiment 108527 PARAMETER Experiment Name: Zm_5mM_NO_P Parameter: Plant Line Value: 35A19
  misc_feature: MA Experiment 108527 PARAMETER Experiment Name: Zm_5mM_NO_P Parameter: Timepoint (hr) Value: 6
  misc_feature: MA Experiment 108527 PARAMETER Experiment Name: Zm_5mM_NO_P Parameter: Tissue Value: Aerial
  misc_feature: MA Experiment 108527 PARAMETER Experiment Name: Zm_5mM_NO_P Parameter: Treatment Value: 5mM NO vs. No Treatment
agaacgccccagccttccacctcgaactccgcggcgcccagcgccctcggtaaccgccccccgccccgccacagagacaggtcgacgagacagacaaaggccggccgccatgggagaggacaagaaggcgggcaacaaggacgccgccggcggcgacaagaagaaggacgccggcgccggggccgcgccgcagcccatcgtgctgaaggtcgacttgcactgcgccggctgcgccaacaaggtccgcaaggccatcaagcacgccccaggtgtggagtcggtgacgccggacatggcggcgggtaaggtggtcgtgaccggtctggcggacgcggtggagctcaaggagcgcatcgaggccagggcgaagaagcccgtgcagatcgtctccgccggcgccggcccacccaagaaggagaaggacaaggagaaggawgaagg

SEQ ID NO: 14249 - protein, 146 aa, Zea mays subsp. mays
  peptide (1)..(146): Ceres Seq. ID no. 4614340
  misc_feature (37)..(144): Homolog of NCBI NO: 37534752 NR Description: putative metal-binding protein [Oryza sativa
  misc_feature (37)..(143): Homolog of NCBI NO: 22327990 NR Description: expressed protein; protein id: At5g60800.1 thaliana] >gi|10176908|dbj|BAB10101.1| to unknown protein [Arabidopsis thaliana]
  misc_feature (25)..(145): Homolog of NCBI NO: 38344582 NR Description: OSJNBa0053B21.14 [Oryza sativa (japonica
  misc_feature (39)..(145): Homolog of NCBI NO: 15241256 NR Description: copper chaperone (CCH)-related; protein id: [Arabidopsis thaliana] >gi|8777397|dbj|BAA96987.1| contains
  misc_feature (90)..(144): Homolog of NCBI NO: 29367499 NR Description: unknown [Oryza sativa (japonica cultivar-group)]
  misc_feature (37)..(139): Homolog of NCBI NO: 15242741 NR Description: expressed protein; protein id: At5g03380.1, by cDNA: gi_16604512 [Arabidopsis thaliana]
  misc_feature (23)..(144): Homolog of NCBI NO: 24417342 NR Description: unknown [Arabidopsis thaliana]
  misc_feature (23)..(144): Homolog of NCBI NO: 9758294 NR Description: contains similarity to ATFP3~gene_id:MLE2.16
  misc_feature (23)..(144): Homolog of NCBI NO: 18424719 NR Description: copper chaperone (CCH)-related; protein id: supported by cDNA: gi_13430829, supported by cDNA: gi_15810596 thaliana] >gi|13430830|gb|AAK26037.1|AF360327_1 unknown protein
  misc_feature (32)..(139): Homolog of NCBI NO: 18404283 NR Description: expressed protein; protein id: At2g36950.1, by cDNA: 19570. [Arabidopsis thaliana]
  misc_feature (145)..(145): Xaa is any aa, unknown or other
ERPSLPPRTPRRPAPSVTAPRPATETGRRDRQRPAAMGEDKKAGNKDAAGGDKKKDAGAGAAPQPIVLKVDLHCAGCANKVRKAIKHAPGVESVTPDMAAGKVVVTGLADAVELKERIEARAKKPVQIVSAGAGPPKKEKDKEKXE

SEQ ID NO: 14250 - protein, 110 aa, Zea mays subsp. mays
  peptide (1)..(110): Ceres Seq. ID no. 4614341
  misc_feature (1)..(108): Homolog of NCBI NO: 37534752 NR Description: putative metal-binding protein [Oryza sativa
  misc_feature (1)..(107): Homolog of NCBI NO: 22327990 NR Description: expressed protein; protein id: At5g60800.1 thaliana] >gi|10176908|dbj|BAB10101.1| to unknown protein [Arabidopsis thaliana]
  misc_feature (1)..(109): Homolog of NCBI NO: 38344582 NR Description: OSJNBa0053B21.14 [Oryza sativa (japonica
  misc_feature (3)..(109): Homolog of NCBI NO: 15241256 NR Description: copper chaperone (CCH)-related; protein id: [Arabidopsis thaliana] >gi|8777397|dbj|BAA96987.1| contains
  misc_feature (54)..(108): Homolog of NCBI NO: 29367499 NR Description: unknown [Oryza sativa (japonica cultivar-group)]
  misc_feature (1)..(103): Homolog of NCBI NO: 15242741 NR Description: expressed protein; protein id: At5g03380.1, by cDNA: gi_16604512 [Arabidopsis thaliana]
  misc_feature (1)..(108): Homolog of NCBI NO: 24417342 NR Description: unknown [Arabidopsis thaliana]
  misc_feature (1)..(108): Homolog of NCBI NO: 9758294 NR Description: contains similarity to ATFP3~gene_id:MLE2.16
  misc_feature (1)..(108): Homolog of NCBI NO: 18424719 NR Description: copper chaperone (CCH)-related; protein id: supported by cDNA: gi_13430829, supported by cDNA: gi_15810596 thaliana] >gi|13430830|gb|AAK26037.1|AF360327_1 unknown protein
  misc_feature (1)..(103): Homolog of NCBI NO: 18404283 NR Description: expressed protein; protein id: At2g36950.1, by cDNA: 19570. [Arabidopsis thaliana]
  misc_feature (109)..(109): Xaa is any aa, unknown or other
MGEDKKAGNKDAAGGDKKKDAGAGAAPQPIVLKVDLHCAGCANKVRKAIKHAPGVESVTPDMAAGKVVVTGLADAVELKERIEARAKKPVQIVSAGAGPPKKEKDKEKXE

SEQ ID NO: 14251 - protein, 101 aa, Zea mays subsp. mays
  peptide (1)..(101): Ceres Seq. ID no. 4614342
  misc_feature (25)..(101): Homolog of NCBI NO: 9845301 NR Description: pr1 [Rat cytomegalovirus]
  misc_feature (4)..(101): Homolog of NCBI NO: 30354095 NR Description: Similar to serine/arginine repetitive matrix 2
  misc_feature (4)..(101): Homolog of NCBI NO: 23011993 NR Description: hypothetical protein [Magnetospirillum
RTPQPSTSNSAAPSALGNRPPPRHRDRSTRQTKAGRHGRGQEGGQQGRRRRRQEEGRRRRGRAAAHRAEGRLALRRLRQQGPQGHQARPRCGVGDAGHGGG

SEQ ID NO: 14252 - DNA, 1845 bp, Zea mays subsp. mays
  misc_feature (1)..(1845): Ceres Seq. ID no. 12454887
  misc_feature: MA Experiment ID: 108535 Result: Up-regulated in Transcription
  misc_feature: MA Experiment 108535 PARAMETER Experiment Name: Zm_Meristem_P Parameter: Age (day) Value: 8
  misc_feature: MA Experiment 108535 PARAMETER Experiment Name: Zm_Meristem_P Parameter: Organism Value: Zea mays
  misc_feature: MA Experiment 108535 PARAMETER Experiment Name: Zm_Meristem_P Parameter: Plant Line Value: 35A19
  misc_feature: MA Experiment 108535 PARAMETER Experiment Name: Zm_Meristem_P Parameter: Tissue Value: Root Meristem vs. Above Root Meristem
  misc_feature: MA Experiment ID: 108544 Result: Down-regulated in Transcription
  misc_feature: MA Experiment ID: 20000478 Result: Down-regulated in Transcription
  misc_feature: MA Experiment 20000478 PARAMETER Experiment Name: Zm_5mM_SA_P Parameter: Age (day) Value: 11
  misc_feature: MA Experiment 20000478 PARAMETER Experiment Name: Zm_5mM_SA_P Parameter: Organism Value: Zea mays
  misc_feature: MA Experiment 20000478 PARAMETER Experiment Name: Zm_5mM_SA_P Parameter: Plant Line Value: 35A19
  misc_feature: MA Experiment 20000478 PARAMETER Experiment Name: Zm_5mM_SA_P Parameter: Timepoint (hr) Value: 72
  misc_feature: MA Experiment 20000478 PARAMETER Experiment Name: Zm_5mM_SA_P Parameter: Tissue Value: Aerial
  misc_feature: MA Experiment 20000478 PARAMETER Experiment Name: Zm_5mM_SA_P Parameter: Treatment Value: 5mM SA vs. No Treatment
  misc_feature: MA Experiment ID: 20000626 Result: Down-regulated in Transcription
  misc_feature: MA Experiment 20000626 PARAMETER Experiment Name: Zm_Herbicide-Treatments_P Parameter: Timepoint (hr) Value: 12
  misc_feature: MA Experiment 20000626 PARAMETER Experiment Name: Zm_Herbicide-Treatments_P Parameter: Tissue Value: Aerial
  misc_feature: MA Experiment 20000626 PARAMETER Experiment Name: Zm_Herbicide-Treatments_P Parameter: Treatment Value: Roundup vs. No Treatment
agtcctgggccgctgctgccgcgcactgcctgcttcggccgagacgagccccccggcccccgtttcgctcccatctcgcgacactctgcccacagctcactcgcctccgtctctccccgtcaaaaaagccacccccgtcccccgcgccgcgccacccgcctttggcctctggctggcaccctttcccccgcctagaaacccgagctctccctctagccttctgccgcacacttccgagttccttccgccacaacatccacacgcaaacctcgcgatggccgcgtcggaatccgtgccgttctgcgtcaaagggggcggcggcggcgcgcccaggccgcacggccacctggtgctcccggcggggcgggtccgcgaggggcttgcgttcgcggcgggcgccgtggtggccgctctcgtgctcctctcctcggcctccgtcctcacgccgccgcccgtgcccaacatcgtctccctccccctgtcgtcgtcgcccgccaacgccaacgccgccatctcttcctcccctgccgtggccgtcggcgagggcccgcgcacgttctacgacgaccgggagctgtcgtacgccgtcggggggcagcgcgtcacgggctgggacgcgaagcgcgcggcgtggctgcggacccggggcctggacggcgcggcggtcgcggggcgggtggtgatggtgaccgggtcgcanccggagccatgcaaggggccggggggcgaccacgcgctgctgcggttcctcaagaataagctggactactgccgcctccacgggatcgagctcctgtacaacaccgcgctgctggagccgtccatggtggcgtactgggccaagatccccagcgtgcgcgccgcgatgctggcgcacccggacgccgagtgggtgtggtgggtggacgccgacgccgtgttcacggacatggacttctccctcccgctggagcggtaccgcgagagcagcctggtggtgtacgggtgggagcgggaggtgtacgaggagcggtcgtgggtggggctcaacgccggcgtcttcctcatccgtaactgccagtggtcgctggacctcatggacgcgtgggcgcgcatgggcccggcctcgccggagtacgcgcggtgggggaagacgctgcgcgaggagctggaggggaaacccaacgacgagtcggacgaccagtcggcgctcgtgtacctcctgtccaggcacctggagcgggagcggtgggcgaacgccacgttcctcgagtccgggtactacttccaggggtactgggcggagatcgtggacaggctcgacggcgtggccacgcgctacgaggccgtggagcgcggccgcgcagggggccgggccgggctccgccgccgccacgcggagcgggagcacctcctgtacgcggcggcgcgacgtgagncggtgcggcagcagcgagggaccggcggaggcgtgcccgggccggacggcggcggccagaaggggtggcgccgccccttcgtcacgcacttcacggggtgccagccctgcggcggcgcgcccaaccggatgtacacgcggaggcggtgcgccgaggggatccgccgcgccctggcgttcgcggacgaccaggtgctccgctcctacggcttccgacacgccgcgccgctcagcgacagcgtcacgccgctgccgttcgactaccccgccgcacactgatgggcggtcgcgttggtgggcggtgggttcggcaactggctatggctattggctaggttaattaaatgagacaaaaccatgaatgcgatgcaatgtgtcaagtcacagtgtgtgtactatacatttttgatttgggtgtcatccatatt

SEQ ID NO: 14253 - protein, 564 aa, Zea mays subsp. mays
  peptide (1)..(564): Ceres Seq. ID no. 12454888
  misc_feature (225)..(516): Pfam Name: galactosyl transferase GMA12/MNN10 family Pfam Description: galactosyl transferase GMA12/MNN10 family
  misc_feature (126)..(475): Homolog of NCBI NO: 25486551 NR Description: alpha galactosyltransferase (EC 2.4.1.-)
  misc_feature (453)..(563): Homolog of NCBI NO: 25486551 NR Description: alpha galactosyltransferase (EC 2.4.1.-)
  misc_feature (119)..(561): Homolog of NCBI NO: 18400116 NR Description: Expressed protein; protein id: At2g22900.1, by cDNA: gi_14334701, supported by cDNA: gi_16323413 [Arabidopsis >gi|25349319|pir||C84618 hypothetical protein At2g22900
  misc_feature (111)..(561): Homolog of NCBI NO: 22329223 NR Description: similar to alpha galactosyltransferase protein; id: At4g37690.1 [Arabidopsis thaliana] >gi|7485771|pir||T04726
  misc_feature (93)..(440): Homolog of NCBI NO: 15240848 NR Description: alpha galactosyltransferase protein; protein id: [Arabidopsis thaliana] >gi|9716848|emb|CAC01676.1| putative golgi [Arabidopsis thaliana] >gi|9759594|dbj|BAB11451.1| alpha
  misc_feature (489)..(553): Homolog of NCBI NO: 15240848 NR Description: alpha galactosyltransferase protein; protein id: [Arabidopsis thaliana] >gi|9716848|emb|CAC01676.1| putative golgi [Arabidopsis thaliana] >gi|9759594|dbj|BAB11451.1| alpha
  misc_feature (179)..(434): Homolog of NCBI NO: 15228843 NR Description: alpha galactosyltransferase-like protein; protein At3g62720.1, supported by cDNA: gi_15983425 [Arabidopsis
  misc_feature (198)..(440): Homolog of NCBI NO: 15221224 NR Description: putative alpha galactosyltransferase; protein id:
  misc_feature (489)..(555): Homolog of NCBI NO: 15228843 NR Description: alpha galactosyltransferase-like protein; protein At3g62720.1, supported by cDNA: gi_15983425 [Arabidopsis
  misc_feature (489)..(553): Homolog of NCBI NO: 15221224 NR Description: putative alpha galactosyltransferase; protein id:
  misc_feature (233)..(233): Xaa is any aa, unknown or other
  misc_feature (473)..(473): Xaa is any aa, unknown or other
VLGRCCRALPASAETSPPAPVSLPSRDTLPTAHSPPSLPVKKATPVPRAAPPAFGLWLAPFPPPRNPSSPSSLLPHTSEFLPPQHPHANLAMAASESVPFCVKGGGGGAPRPHGHLVLPAGRVREGLAFAAGAVVAALVLLSSASVLTPPPVPNIVSLPLSSSPANANAAISSSPAVAVGEGPRTFYDDRELSYAVGGQRVTGWDAKRAAWLRTRGLDGAAVAGRVVMVTGSXPEPCKGPGGDHALLRFLKNKLDYCRLHGIELLYNTALLEPSMVAYWAKIPSVRAAMLAHPDAEWVWWVDADAVFTDMDFSLPLERYRESSLVVYGWEREVYEERSWVGLNAGVFLIRNCQWSLDLMDAWARMGPASPEYARWGKTLREELEGKPNDESDDQSALVYLLSRHLERERWANATFLESGYYFQGYWAEIVDRLDGVATRYEAVERGRAGGRAGLRRRHAEREHLLYAAARREXVRQQRGTGGGVPGPDGGGQKGWRRPFVTHFTGCQPCGGAPNRMYTRRRCAEGIRRALAFADDQVLRSYGFRHAAPLSDSVTPLPFDYPAAH

SEQ ID NO: 14254 - protein, 473 aa, Zea mays subsp. mays
  peptide (1)..(473): Ceres Seq. ID no. 12454889
  misc_feature (134)..(425): Pfam Name: galactosyl transferase GMA12/MNN10 family Pfam Description: galactosyl transferase GMA12/MNN10 family
  misc_feature (35)..(384): Homolog of NCBI NO: 25486551 NR Description: alpha galactosyltransferase (EC 2.4.1.-)
  misc_feature (362)..(472): Homolog of NCBI NO: 25486551 NR Description: alpha galactosyltransferase (EC 2.4.1.-)
  misc_feature (28)..(470): Homolog of NCBI NO: 18400116 NR Description: Expressed protein; protein id: At2g22900.1, by cDNA: gi_14334701, supported by cDNA: gi_16323413 [Arabidopsis >gi|25349319|pir||C84618 hypothetical protein At2g22900
  misc_feature (20)..(470): Homolog of NCBI NO: 22329223 NR Description: similar to alpha galactosyltransferase protein; id: At4g37690.1 [Arabidopsis thaliana] >gi|7485771|pir||T04726
  misc_feature (2)..(349): Homolog of NCBI NO: 15240848 NR Description: alpha galactosyltransferase protein; protein id: [Arabidopsis thaliana] >gi|9716848|emb|CAC01676.1| putative golgi [Arabidopsis thaliana] >gi|9759594|dbj|BAB11451.1| alpha
  misc_feature (398)..(462): Homolog of NCBI NO: 15240848 NR Description: alpha galactosyltransferase protein; protein id: [Arabidopsis thaliana] >gi|9716848|emb|CAC01676.1| putative golgi [Arabidopsis thaliana] >gi|9759594|dbj|BAB11451.1| alpha
  misc_feature (88)..(343): Homolog of NCBI NO: 15228843 NR Description: alpha galactosyltransferase-like protein; protein At3g62720.1, supported by cDNA: gi_15983425 [Arabidopsis
  misc_feature (107)..(349): Homolog of NCBI NO: 15221224 NR Description: putative alpha galactosyltransferase; protein id:
  misc_feature (398)..(464): Homolog of NCBI NO: 15228843 NR Description: alpha galactosyltransferase-like protein; protein At3g62720.1, supported by cDNA: gi_15983425 [Arabidopsis
  misc_feature (398)..(462): Homolog of NCBI NO: 15221224 NR Description: putative alpha galactosyltransferase; protein id:
  misc_feature (142)..(142): Xaa is any aa, unknown or other
  misc_feature (382)..(382): Xaa is any aa, unknown or other
MAASESVPFCVKGGGGGAPRPHGHLVLPAGRVREGLAFAAGAVVAALVLLSSASVLTPPPVPNIVSLPLSSSPANANAAISSSPAVAVGEGPRTFYDDRELSYAVGGQRVTGWDAKRAAWLRTRGLDGAAVAGRVVMVTGSXPEPCKGPGGDHALLRFLKNKLDYCRLHGIELLYNTALLEPSMVAYWAKIPSVRAAMLAHPDAEWVWWVDADAVFTDMDFSLPLERYRESSLVVYGWEREVYEERSWVGLNAGVFLIRNCQWSLDLMDAWARMGPASPEYARWGKTLREELEGKPNDESDDQSALVYLLSRHLERERWANATFLESGYYFQGYWAEIVDRLDGVATRYEAVERGRAGGRAGLRRRHAEREHLLYAAARREXVRQQRGTGGGVPGPDGGGQKGWRRPFVTHFTGCQPCGGAPNRMYTRRRCAEGIRRALAFADDQVLRSYGFRHAAPLSDSVTPLPFDYPAAH

SEQ ID NO: 14255 - protein, 337 aa, Zea mays subsp. mays
  peptide (1)..(337): Ceres Seq. ID no. 12454890
  misc_feature (1)..(289): Pfam Name: galactosyl transferase GMA12/MNN10 family Pfam Description: galactosyl transferase GMA12/MNN10 family
  misc_feature (1)..(248): Homolog of NCBI NO: 25486551 NR Description: alpha galactosyltransferase (EC 2.4.1.-)
  misc_feature (226)..(336): Homolog of NCBI NO: 25486551 NR Description: alpha galactosyltransferase (EC 2.4.1.-)
  misc_feature (1)..(334): Homolog of NCBI NO: 18400116 NR Description: Expressed protein; protein id: At2g22900.1, by cDNA: gi_14334701, supported by cDNA: gi_16323413 [Arabidopsis >gi|25349319|pir||C84618 hypothetical protein At2g22900
  misc_feature (1)..(334): Homolog of NCBI NO: 22329223 NR Description: similar to alpha galactosyltransferase protein; id: At4g37690.1 [Arabidopsis thaliana] >gi|7485771|pir||T04726
  misc_feature (1)..(213): Homolog of NCBI NO: 15240848 NR Description: alpha galactosyltransferase protein; protein id: [Arabidopsis thaliana] >gi|9716848|emb|CAC01676.1| putative golgi [Arabidopsis thaliana] >gi|9759594|dbj|BAB11451.1| alpha
  misc_feature (262)..(326): Homolog of NCBI NO: 15240848 NR Description: alpha galactosyltransferase protein; protein id: [Arabidopsis thaliana] >gi|9716848|emb|CAC01676.1| putative golgi [Arabidopsis thaliana] >gi|9759594|dbj|BAB11451.1| alpha
  misc_feature (1)..(207): Homolog of NCBI NO: 15228843 NR Description: alpha galactosyltransferase-like protein; protein At3g62720.1, supported by cDNA: gi_15983425 [Arabidopsis
  misc_feature (1)..(213): Homolog of NCBI NO: 15221224 NR Description: putative alpha galactosyltransferase; protein id:
  misc_feature (262)..(328): Homolog of NCBI NO: 15228843 NR Description: alpha galactosyltransferase-like protein; protein At3g62720.1, supported by cDNA: gi_15983425 [Arabidopsis
  misc_feature (262)..(326): Homolog of NCBI NO: 15221224 NR Description: putative alpha galactosyltransferase; protein id:
  misc_feature (6)..(6): Xaa is any aa, unknown or other
  misc_feature (246)..(246): Xaa is any aa, unknown or other
MVTGSXPEPCKGPGGDHALLRFLKNKLDYCRLHGIELLYNTALLEPSMVAYWAKIPSVRAAMLAHPDAEWVWWVDADAVFTDMDFSLPLERYRESSLVVYGWEREVYEERSWVGLNAGVFLIRNCQWSLDLMDAWARMGPASPEYARWGKTLREELEGKPNDESDDQSALVYLLSRHLERERWANATFLESGYYFQGYWAEIVDRLDGVATRYEAVERGRAGGRAGLRRRHAEREHLLYAAARREXVRQQRGTGGGVPGPDGGGQKGWRRPFVTHFTGCQPCGGAPNRMYTRRRCAEGIRRALAFADDQVLRSYGFRHAAPLSDSVTPLPFDYPAAH

SEQ ID NO: 14256 - DNA, 1144 bp, Zea mays subsp. mays
  misc_feature (1)..(1144): Ceres Seq. ID no. 12436331
  misc_feature: MA Experiment ID: 108504 Result: Down-regulated in Transcription
  misc_feature: MA Experiment 108504 PARAMETER Experiment Name: Zm_Drought_P Parameter: Age (day) Value: 8
  misc_feature: MA Experiment 108504 PARAMETER Experiment Name: Zm_Drought_P Parameter: Organism Value: Zea mays
  misc_feature: MA Experiment 108504 PARAMETER Experiment Name: Zm_Drought_P Parameter: Plant Line Value: 35A19
  misc_feature: MA Experiment 108504 PARAMETER Experiment Name: Zm_Drought_P Parameter: Timepoint (hr) Value: 12
  misc_feature: MA Experiment 108504 PARAMETER Experiment Name: Zm_Drought_P Parameter: Tissue Value: Aerial
  misc_feature: MA Experiment 108504 PARAMETER Experiment Name: Zm_Drought_P Parameter: Treatment Value: Drought vs. No Drought
  misc_feature: MA Experiment ID: 108527 Result: Down-regulated in Transcription
  misc_feature: MA Experiment 108527 PARAMETER Experiment Name: Zm_5mM_NO_P Parameter: Age (day) Value: 8
  misc_feature: MA Experiment 108527 PARAMETER Experiment Name: Zm_5mM_NO_P Parameter: Organism Value: Zea mays
  misc_feature: MA Experiment 108527 PARAMETER Experiment Name: Zm_5mM_NO_P Parameter: Plant Line Value: 35A19
  misc_feature: MA Experiment 108527 PARAMETER Experiment Name: Zm_5mM_NO_P Parameter: Timepoint (hr) Value: 6
  misc_feature: MA Experiment 108527 PARAMETER Experiment Name: Zm_5mM_NO_P Parameter: Tissue Value: Aerial
  misc_feature: MA Experiment 108527 PARAMETER Experiment Name: Zm_5mM_NO_P Parameter: Treatment Value: 5mM NO vs. No Treatment
  misc_feature: MA Experiment ID: 108530 Result: Up-regulated in Transcription
  misc_feature: MA Experiment 108530 PARAMETER Experiment Name: Zm_Imbibed_Seeds_P Parameter: Age (day) Value: 6 vs. 2
  misc_feature: MA Experiment 108530 PARAMETER Experiment Name: Zm_Imbibed_Seeds_P Parameter: Organism Value: Zea mays
  misc_feature: MA Experiment 108530 PARAMETER Experiment Name: Zm_Imbibed_Seeds_P Parameter: Plant Line Value: 35A19
  misc_feature: MA Experiment 108530 PARAMETER Experiment Name: Zm_Imbibed_Seeds_P Parameter: Tissue Value: Aerial vs. Embryo
  misc_feature: MA Experiment ID: 108534 Result: Up-regulated in Transcription
  misc_feature: MA Experiment 108534 PARAMETER Experiment Name: Zm_4deg_Cold_P Parameter: Age (hr) Value: 8
  misc_feature: MA Experiment 108534 PARAMETER Experiment Name: Zm_4deg_Cold_P Parameter: Organism Value: Zea mays
  misc_feature: MA Experiment 108534 PARAMETER Experiment Name: Zm_4deg_Cold_P Parameter: Plant Line Value: 35A19
  misc_feature: MA Experiment 108534 PARAMETER Experiment Name: Zm_4deg_Cold_P Parameter: Temperature (deg C) Value: 4 vs. 22
  misc_feature: MA Experiment 108534 PARAMETER Experiment Name: Zm_4deg_Cold_P Parameter: Timepoint (hr) Value: 6
  misc_feature: MA Experiment 108534 PARAMETER Experiment Name: Zm_4deg_Cold_P Parameter: Tissue Value: Aerial
  misc_feature: MA Experiment ID: 108545 Result: Up-regulated in Transcription
  misc_feature: MA Experiment 108545 PARAMETER Experiment Name: Zm_Imbibed_Seeds_P Parameter: Age (day) Value: 3 vs. 2
  misc_feature: MA Experiment 108545 PARAMETER Experiment Name: Zm_Imbibed_Seeds_P Parameter: Organism Value: Zea mays
  misc_feature: MA Experiment 108545 PARAMETER Experiment Name: Zm_Imbibed_Seeds_P Parameter: Plant Line Value: 35A19
  misc_feature: MA Experiment 108545 PARAMETER Experiment Name: Zm_Imbibed_Seeds_P Parameter: Tissue Value: Aerial vs. Embryo
  misc_feature: MA Experiment ID: 108556 Result: Down-regulated in Transcription
  misc_feature: MA Experiment 108556 PARAMETER Experiment Name: Zm_Drought_P Parameter: Age (day) Value: 9
  misc_feature: MA Experiment 108556 PARAMETER Experiment Name: Zm_Drought_P Parameter: Organism Value: Zea mays
  misc_feature: MA Experiment 108556 PARAMETER Experiment Name: Zm_Drought_P Parameter: Plant Line Value: 35A19
  misc_feature: MA Experiment 108556 PARAMETER Experiment Name: Zm_Drought_P Parameter: Timepoint (hr) Value: 24
  misc_feature: MA Experiment 108556 PARAMETER Experiment Name: Zm_Drought_P Parameter: Tissue Value: Aerial
  misc_feature: MA Experiment 108556 PARAMETER Experiment Name: Zm_Drought_P Parameter: Treatment Value: Drought vs. No Drought
  misc_feature: MA Experiment ID: 108559 Result: Down-regulated in Transcription
  misc_feature: MA Experiment 108559 PARAMETER Experiment Name: Zm_5mM_NO_P Parameter: Age (day) Value: 8
  misc_feature: MA Experiment 108559 PARAMETER Experiment Name: Zm_5mM_NO_P Parameter: Organism Value: Zea mays
  misc_feature: MA Experiment 108559 PARAMETER Experiment Name: Zm_5mM_NO_P Parameter: Plant Line Value: 35A19
  misc_feature: MA Experiment 108559 PARAMETER Experiment Name: Zm_5mM_NO_P Parameter: Timepoint (hr) Value: 12
  misc_feature: MA Experiment 108559 PARAMETER Experiment Name: Zm_5mM_NO_P Parameter: Tissue Value: Aerial
  misc_feature: MA Experiment 108559 PARAMETER Experiment Name: Zm_5mM_NO_P Parameter: Treatment Value: 5mM NO vs. No Treatment
  misc_feature: MA Experiment ID: 108597 Result: Down-regulated in Transcription
  misc_feature: MA Experiment 108597 PARAMETER Experiment Name: Zm_100uM_ABA_P Parameter: Age (day) Value: 9
  misc_feature: MA Experiment 108597 PARAMETER Experiment Name: Zm_100uM_ABA_P Parameter: Organism Value: Zea mays
  misc_feature: MA Experiment 108597 PARAMETER Experiment Name: Zm_100uM_ABA_P Parameter: Plant Line Value: 35A19
  misc_feature: MA Experiment 108597 PARAMETER Experiment Name: Zm_100uM_ABA_P Parameter: Timepoint (hr) Value: 24
  misc_feature: MA Experiment 108597 PARAMETER Experiment Name: Zm_100uM_ABA_P Parameter: Tissue Value: Aerial
  misc_feature: MA Experiment 108597 PARAMETER Experiment Name: Zm_100uM_ABA_P Parameter: Treatment Value: 100uM ABA vs. No Treatment
  misc_feature: MA Experiment ID: 20000479 Result: Down-regulated in Transcription
  misc_feature: MA Experiment 20000479 PARAMETER Experiment Name: Zm_Drought_P Parameter: Age (day) Value: 10
  misc_feature: MA Experiment 20000479 PARAMETER Experiment Name: Zm_Drought_P Parameter: Organism Value: Zea mays
  misc_feature: MA Experiment 20000479 PARAMETER Experiment Name: Zm_Drought_P Parameter: Plant Line Value: 35A19
  misc_feature: MA Experiment 20000479 PARAMETER Experiment Name: Zm_Drought_P Parameter: Timepoint (hr) Value: 48
  misc_feature: MA Experiment 20000479 PARAMETER Experiment Name: Zm_Drought_P Parameter: Tissue Value: Aerial
  misc_feature: MA Experiment 20000479 PARAMETER Experiment Name: Zm_Drought_P Parameter: Treatment Value: Drought vs. No Drought
  misc_feature: MA Experiment ID: 20000480 Result: Down-regulated in Transcription
  misc_feature: MA Experiment 20000480 PARAMETER Experiment Name: Zm_Drought_P Parameter: Age (day) Value: 11
  misc_feature: MA Experiment 20000480 PARAMETER Experiment Name: Zm_Drought_P Parameter: Organism Value: Zea mays
  misc_feature: MA Experiment 20000480 PARAMETER Experiment Name: Zm_Drought_P Parameter: Plant Line Value: 35A19
  misc_feature: MA Experiment 20000480 PARAMETER Experiment Name: Zm_Drought_P Parameter: Timepoint (hr) Value: 72
  misc_feature: MA Experiment 20000480 PARAMETER Experiment Name: Zm_Drought_P Parameter: Tissue Value: Aerial
  misc_feature: MA Experiment 20000480 PARAMETER Experiment Name: Zm_Drought_P Parameter: Treatment Value: Drought vs. No Drought
  misc_feature: MA Experiment ID: 20000535 Result: Down-regulated in Transcription
  misc_feature: MA Experiment 20000535 PARAMETER Experiment Name: Zm_Hybrid_Seed_Dev_P Parameter: DAP Value: 30 vs. 12
  misc_feature: MA Experiment 20000535 PARAMETER Experiment Name: Zm_Hybrid_Seed_Dev_P Parameter: Organism Value: Zea mays
  misc_feature: MA Experiment 20000535 PARAMETER Experiment Name: Zm_Hybrid_Seed_Dev_P Parameter: Plant Line Value: 35A19
  misc_feature: MA Experiment 20000535 PARAMETER Experiment Name: Zm_Hybrid_Seed_Dev_P Parameter: Tissue Value: Embryo vs. Unfert Floret
aaaaactttgctagctagctagctgaaaggctccggccgggcctggctggtacacacgcccagatccttgttgtgcacgtacgttccaaacttgctcatactactcagagcgcggcgacatgttcggctttctgaaacaacggaggcagaccccgtcagggttctcgtcgtcgtcagccgccgaggaggtcaccgccggcatcgatggctccggcctcgtcgcgatcgtcacgggcgcgtctagtgggatcggtgccgagacctgccgagttctggcgctgcggggcgttcgcgttgtgatgggcgtgaggacaccgtctgccggtgagcgcgtcaaggaagagatcgtgaagaacgtccccgctgccggaatcgcattttctcctttcaccctttcggatgatggaattgagttacaatttgcaacaaattaccttggccattttctactcactaatcttttacttgaaaagatgaaaatcacggccatggagagtggaatagaaggtagggttgtgattgttgcttctgacagctacaagcacacgtatcgagagggaattcgttttgataaactcaatgatgcatcaggctataaaggcatcctggcttatggccaatcgaagctggccaatatattgcgttccaatgaactttcttgccgcttgaaggaagaagatgcaaaagtagtagtcaactcactgcatccgggagttgttgccaccaacatcacgcgccatctgggtatcataaaagatattctttctccaattgctaaacttgtactaaggggtgttgaacaaggtgcagccaccgtttgttatctggcattgcatcctcaggttgctggagtcaccggcaaatactttgtggatttcaatgctgttgaactaaaaccgcctgcaactgacaagtagttgtccaaaaagctctgggattttagtgtcagcctactccagtgatataactgccgattagttctcctacgccagctggtaaataaaggtcgatctgaatgagagatcatgtttcagtaatagaacaaggtgatccagcagtgtaatatctactactacttattgtttgactagatatggatgccatatgtttgtaatttgaataaattgattggatacatttctgc

SEQ ID NO: 14257 - protein, 265 aa, Zea mays subsp. mays
  peptide (1)..(265): Ceres Seq. ID no. 12436332
  misc_feature (83)..(265): Homolog of NCBI NO: 21554820 NR Description: putativepod-specific dehydrogenase SAC25
  misc_feature (83)..(265): Homolog of NCBI NO: 20260302 NR Description: putative protein [Arabidopsis thaliana]
  misc_feature (83)..(265): Homolog of NCBI NO: 629592 NR Description: hypothetical protein - rape
  misc_feature (83)..(265): Homolog of NCBI NO: 15224306 NR Description: putative oxidoreductase; protein id: At2g37540.1, by cDNA: gi_20466184 [Arabidopsis thaliana]
  misc_feature (83)..(265): Homolog of NCBI NO: 15233359 NR Description: putative protein; protein id: At4g11410.1
  misc_feature (83)..(265): Homolog of NCBI NO: 34895876 NR Description: P0009G03.18 [Oryza sativa (japonica
  misc_feature (83)..(265): Homolog of NCBI NO: 30686197 NR Description: short-chain dehydrogenase/reductase family
  misc_feature (83)..(265): Homolog of NCBI NO: 39546214 NR Description: OSJNBa0029L02.3 [Oryza sativa (japonica
  misc_feature (83)..(265): Homolog of NCBI NO: 11250521 NR Description: hypothetical protein T22P11.130 - Arabidopsis >gi|7413643|emb|CAB85991.1| putative protein [Arabidopsis
  misc_feature (83)..(265): Homolog of NCBI NO: 18413950 NR Description: putative protein; protein id: At5g02540.1, by cDNA: 26538., supported by cDNA: gi_20260301 [Arabidopsis
MFGFLKQRRQTPSGFSSSSAAEEVTAGIDGSGLVAIVTGASSGIGAETCRVLALRGVRVVMGVRTPSAGERVKEEIVKNVPAAGIAFSPFTLSDDGIELQFATNYLGHFLLTNLLLEKMKITAMESGIEGRVVIVASDSYKHTYREGIRFDKLNDASGYKGILAYGQSKLANILRSNELSCRLKEEDAKVVVNSLHPGVVATNITRHLGIIKDILSPIAKLVLRGVEQGAATVCYLALHPQVAGVTGKYFVDFNAVELKPPATDK

SEQ ID NO: 14258 - protein, 205 aa, Zea mays subsp. mays
  peptide (1)..(205): Ceres Seq. ID no. 12436333
  misc_feature (23)..(205): Homolog of NCBI NO: 39546214 NR Description: OSJNBa0029L02.3 [Oryza sativa (japonica
  misc_feature (23)..(205): Homolog of NCBI NO: 11250521 NR Description: hypothetical protein T22P11.130 - Arabidopsis >gi|7413643|emb|CAB85991.1| putative protein [Arabidopsis
  misc_feature (23)..(205): Homolog of NCBI NO: 20260302 NR Description: putative protein [Arabidopsis thaliana]
  misc_feature (23)..(205): Homolog of NCBI NO: 18413950 NR Description: putative protein; protein id: At5g02540.1, by cDNA: 26538., supported by cDNA: gi_20260301 [Arabidopsis
  misc_feature (23)..(205): Homolog of NCBI NO: 21554820 NR Description: putativepod-specific dehydrogenase SAC25
  misc_feature (23)..(205): Homolog of NCBI NO: 629592 NR Description: hypothetical protein - rape
  misc_feature (23)..(205): Homolog of NCBI NO: 15224306 NR Description: putative oxidoreductase; protein id: At2g37540.1, by cDNA: gi_20466184 [Arabidopsis thaliana]
  misc_feature (23)..(205): Homolog of NCBI NO: 15233359 NR Description: putative protein; protein id: At4g11410.1
  misc_feature (23)..(205): Homolog of NCBI NO: 34895876 NR Description: P0009G03.18 [Oryza sativa (japonica
  misc_feature (23)..(205): Homolog of NCBI NO: 30686197 NR Description: short-chain dehydrogenase/reductase family
MGVRTPSAGERVKEEIVKNVPAAGIAFSPFTLSDDGIELQFATNYLGHFLLTNLLLEKMKITAMESGIEGRVVIVASDSYKHTYREGIRFDKLNDASGYKGILAYGQSKLANILRSNELSCRLKEEDAKVVVNSLHPGVVATNITRHLGIIKDILSPIAKLVLRGVEQGAATVCYLALHPQVAGVTGKYFVDFNAVELKPPATDK

SEQ ID NO: 14259 - protein, 147 aa, Zea mays subsp. mays
  peptide (1)..(147): Ceres Seq. ID no. 12436334
  misc_feature (1)..(147): Homolog of NCBI NO: 39546214 NR Description: OSJNBa0029L02.3 [Oryza sativa (japonica
  misc_feature (1)..(147): Homolog of NCBI NO: 11250521 NR Description: hypothetical protein T22P11.130 - Arabidopsis >gi|7413643|emb|CAB85991.1| putative protein [Arabidopsis
  misc_feature (1)..(147): Homolog of NCBI NO: 21554820 NR Description: putativepod-specific dehydrogenase SAC25
  misc_feature (1)..(147): Homolog of NCBI NO: 20260302 NR Description: putative protein [Arabidopsis thaliana]
  misc_feature (1)..(147): Homolog of NCBI NO: 18413950 NR Description: putative protein; protein id: At5g02540.1, by cDNA: 26538., supported by cDNA: gi_20260301 [Arabidopsis
  misc_feature (1)..(147): Homolog of NCBI NO: 629592 NR Description: hypothetical protein - rape
  misc_feature (1)..(147): Homolog of NCBI NO: 15224306 NR Description: putative oxidoreductase; protein id: At2g37540.1, by cDNA: gi_20466184 [Arabidopsis thaliana]
  misc_feature (1)..(147): Homolog of NCBI NO: 15233359 NR Description: putative protein; protein id: At4g11410.1
  misc_feature (1)..(147): Homolog of NCBI NO: 34895876 NR Description: P0009G03.18 [Oryza sativa (japonica
  misc_feature (1)..(147): Homolog of NCBI NO: 30686197 NR Description: short-chain dehydrogenase/reductase family
MKITAMESGIEGRVVIVASDSYKHTYREGIRFDKLNDASGYKGILAYGQSKLANILRSNELSCRLKEEDAKVVVNSLHPGVVATNITRHLGIIKDILSPIAKLVLRGVEQGAATVCYLALHPQVAGVTGKYFVDFNAVELKPPATDK

SEQ ID NO: 14260 - DNA, 1564 bp, Zea mays subsp. mays
  misc_feature (1)..(1564): Ceres Seq. ID no. 12443313
  misc_feature: MA Experiment ID: 108504 Result: Down-regulated in Transcription
  misc_feature: MA Experiment 108504 PARAMETER Experiment Name: Zm_Drought_P Parameter: Age (day) Value: 8
  misc_feature: MA Experiment 108504 PARAMETER Experiment Name: Zm_Drought_P Parameter: Organism Value: Zea mays
  misc_feature: MA Experiment 108504 PARAMETER Experiment Name: Zm_Drought_P Parameter: Plant Line Value: 35A19
  misc_feature: MA Experiment 108504 PARAMETER Experiment Name: Zm_Drought_P Parameter: Timepoint (hr) Value: 12
  misc_feature: MA Experiment 108504 PARAMETER Experiment Name: Zm_Drought_P Parameter: Tissue Value: Aerial
  misc_feature: MA Experiment 108504 PARAMETER Experiment Name: Zm_Drought_P Parameter: Treatment Value: Drought vs. No Drought
  misc_feature: MA Experiment ID: 108528 Result: Up-regulated in Transcription
  misc_feature: MA Experiment 108528 PARAMETER Experiment Name: Zm_Imbibed_Seeds_P Parameter: Age (day) Value: 5 vs. 2
  misc_feature: MA Experiment 108528 PARAMETER Experiment Name: Zm_Imbibed_Seeds_P Parameter: Organism Value: Zea mays
  misc_feature: MA Experiment 108528 PARAMETER Experiment Name: Zm_Imbibed_Seeds_P Parameter: Plant Line Value: 35A19
  misc_feature: MA Experiment 108528 PARAMETER Experiment Name: Zm_Imbibed_Seeds_P Parameter: Tissue Value: Aerial vs. Embryo
  misc_feature: MA Experiment ID: 108529 Result: Up-regulated in Transcription
  misc_feature: MA Experiment 108529 PARAMETER Experiment Name: Zm_Imbibed_Seeds_P Parameter: Age (day) Value: 5 vs. 2
  misc_feature: MA Experiment 108529 PARAMETER Experiment Name: Zm_Imbibed_Seeds_P Parameter: Organism Value: Zea mays
  misc_feature: MA Experiment 108529 PARAMETER Experiment Name: Zm_Imbibed_Seeds_P Parameter: Plant Line Value: 35A19
  misc_feature: MA Experiment 108529 PARAMETER Experiment Name: Zm_Imbibed_Seeds_P Parameter: Tissue Value: Roots vs. Embryo
  misc_feature: MA Experiment ID: 108530 Result: Up-regulated in Transcription
  misc_feature: MA Experiment 108530 PARAMETER Experiment Name: Zm_Imbibed_Seeds_P Parameter: Age (day) Value: 6 vs. 2
  misc_feature: MA Experiment 108530 PARAMETER Experiment Name: Zm_Imbibed_Seeds_P Parameter: Organism Value: Zea mays
  misc_feature: MA Experiment 108530 PARAMETER Experiment Name: Zm_Imbibed_Seeds_P Parameter: Plant Line Value: 35A19
  misc_feature: MA Experiment 108530 PARAMETER Experiment Name: Zm_Imbibed_Seeds_P Parameter: Tissue Value: Aerial vs. Embryo
  misc_feature: MA Experiment ID: 108535 Result: Down-regulated in Transcription
  misc_feature: MA Experiment 108535 PARAMETER Experiment Name: Zm_Meristem_P Parameter: Age (day) Value: 8
  misc_feature: MA Experiment 108535 PARAMETER Experiment Name: Zm_Meristem_P Parameter: Organism Value: Zea mays
  misc_feature: MA Experiment 108535 PARAMETER Experiment Name: Zm_Meristem_P Parameter: Plant Line Value: 35A19
  misc_feature: MA Experiment 108535 PARAMETER Experiment Name: Zm_Meristem_P Parameter: Tissue Value: Root Meristem vs. Above Root Meristem
  misc_feature: MA Experiment ID: 108546 Result: Up-regulated in Transcription
  misc_feature: MA Experiment 108546 PARAMETER Experiment Name: Zm_Imbibed_Seeds_P Parameter: Age (day) Value: 3 vs. 2
  misc_feature: MA Experiment 108546 PARAMETER Experiment Name: Zm_Imbibed_Seeds_P Parameter: Organism Value: Zea mays
  misc_feature: MA Experiment 108546 PARAMETER Experiment Name: Zm_Imbibed_Seeds_P Parameter: Plant Line Value: 35A19
  misc_feature: MA Experiment 108546 PARAMETER Experiment Name: Zm_Imbibed_Seeds_P Parameter: Tissue Value: Roots vs. Embryo
  misc_feature: MA Experiment ID: 108547 Result: Up-regulated in Transcription
  misc_feature: MA Experiment 108547 PARAMETER Experiment Name: Zm_Imbibed_Seeds_P Parameter: Age (day) Value: 4 vs. 2
  misc_feature: MA Experiment 108547 PARAMETER Experiment Name: Zm_Imbibed_Seeds_P Parameter: Organism Value: Zea mays
  misc_feature: MA Experiment 108547 PARAMETER Experiment Name: Zm_Imbibed_Seeds_P Parameter: Plant Line Value: 35A19
  misc_feature: MA Experiment 108547 PARAMETER Experiment Name: Zm_Imbibed_Seeds_P Parameter: Tissue Value: Aerial vs. Embryo
  misc_feature: MA Experiment ID: 108556 Result: Down-regulated in Transcription
  misc_feature: MA Experiment 108556 PARAMETER Experiment Name: Zm_Drought_P Parameter: Age (day) Value: 9
  misc_feature: MA Experiment 108556 PARAMETER Experiment Name: Zm_Drought_P Parameter: Organism Value: Zea mays
  misc_feature: MA Experiment 108556 PARAMETER Experiment Name: Zm_Drought_P Parameter: Plant Line Value: 35A19
  misc_feature: MA Experiment 108556 PARAMETER Experiment Name: Zm_Drought_P Parameter: Timepoint (hr) Value: 24
  misc_feature: MA Experiment 108556 PARAMETER Experiment Name: Zm_Drought_P Parameter: Tissue Value: Aerial
  misc_feature: MA Experiment 108556 PARAMETER Experiment Name: Zm_Drought_P Parameter: Treatment Value: Drought vs. No Drought
  misc_feature: MA Experiment ID: 20000535 Result: Down-regulated in Transcription
  misc_feature: MA Experiment 20000535 PARAMETER Experiment Name: Zm_Hybrid_Seed_Dev_P Parameter: DAP Value: 30 vs. 12
  misc_feature: MA Experiment 20000535 PARAMETER Experiment Name: Zm_Hybrid_Seed_Dev_P Parameter: Organism Value: Zea mays
  misc_feature: MA Experiment 20000535 PARAMETER Experiment Name: Zm_Hybrid_Seed_Dev_P Parameter: Plant Line Value: 35A19
  misc_feature: MA Experiment 20000535 PARAMETER Experiment Name: Zm_Hybrid_Seed_Dev_P Parameter: Tissue Value: Embryo vs. Unfert Floret
  misc_feature: MA Experiment ID: 20000626 Result: Up-regulated in Transcription
  misc_feature: MA Experiment 20000626 PARAMETER Experiment Name: Zm_Herbicide-Treatments_P Parameter: Timepoint (hr) Value: 12
  misc_feature: MA Experiment 20000626 PARAMETER Experiment Name: Zm_Herbicide-Treatments_P Parameter: Tissue Value: Aerial
  misc_feature: MA Experiment 20000626 PARAMETER Experiment Name: Zm_Herbicide-Treatments_P Parameter: Treatment Value: Roundup vs. No Treatment
ataaatgcacccccacttgtcccttttccctcctcctccagctcctctctgggctgtggtggctgtggctcccaagcacacggcccgcacgagcagttggaacagattcctcgaccgcgtcgccccggaacccagttcttggcatccggtgcctagcttcgtcgcccctccggcaaagaccacctccagccctccacctcccgcggtagcgcttgctgctagtgagctagtatatttctgaaaccggaaacccgcgacacgggaccgagttcttgggagcggattcggctcgctgcaggctgaggctaccggcgcgctcttctccacggcggcggagagccagccagtagttgcgaccggaggcgggcatgggcgcgggcgtgtcgggcctgccgggcgcggagcccggcggcaaggtggcgcgcggcgccgggctgggcgacctcccggagctgtgcaccgcggaggtgctgctccgcctcggcgcgccggacatatgccggctcgcgcggctcaacctagcgttccgcggcgccgcgggcgcggacttcgtgtgggaggccaagctgccggggaactacgcccggctcctgcgcttcgtggacgaggccgaggaggagggagggagtgggcgggattggagcgcggtggggaggaaagacgtctttgcgaggctcgccagacctgtgccgttcgacggtggcaaaagggaattctggctggagaagaacgaaggtgggatctgcatggccttgtcgtcgaaagcgctggtcattactgggattgacgatagaagatactggattaacatgccaacatctgaatctaggttccactccactgcatacctgcagcaaatctggtggttcgaggtggtgggagaggtggacttctgcttcccggctgggacggcctacagcctctacttcaggctccacctcggcaagtcctccacgcgcttcggccgccgggtctgcagctcggagcaggtccacggctgggacaagaagcccgtgcggttccagctctccacgtcggacggccagcacgccgtgtcccagtgctacctggacgagcctggacgctggatcctgtaccacgtcggcgatttcgacgcgccgccgagctctggtcagccgaccaggctcaagttttcgttagcgcagatcgactgcacccacacgaaaggtggcctctgtgtcgattcggtgctcgtgtatcccaaggggtttcagccggaacgggtggtcagggctcggaaatgaccgtgtgtcggcatttggtagctatagaggcactgcgcattagagcgagctgtcgagagatatgagtagcctgccatttttttttagcttgggctaattgtattctgaaagcgtttatacatagcatagtagcacactggacttttttttttgtttgatagcattagtgtgtgcgcgttactttgccatttctcatgaaggccatggcaaataaggaacctttgtacgtgtacctagctccggtacatcgcgtttgcatcggcacacaatgaagccaggaaggtctcctgttttatttc

SEQ ID NO: 14261 - protein, 298 aa, Zea mays subsp. mays
  peptide (1)..(298): Ceres Seq. ID no. 12443314
  misc_feature (23)..(68): Pfam Name: F-box domain Pfam Description: F-box domain
  misc_feature (1)..(298): Homolog of NCBI NO: 37536186 NR Description: unknown protein [Oryza sativa (japonica
  misc_feature (26)..(291): Homolog of NCBI NO: 38567911 NR Description: OSJNBa0088I22.7 [Oryza sativa (japonica
  misc_feature (1)..(286): Homolog of NCBI NO: 30695337 NR Description: F-box protein (lectin-related) [Arabidopsis
  misc_feature (23)..(286): Homolog of NCBI NO: 23397334 NR Description: unknown protein [Arabidopsis thaliana]
  misc_feature (22)..(285): Homolog of NCBI NO: 15221677 NR Description: unknown protein; protein id: At1g63090.1
  misc_feature (22)..(285): Homolog of NCBI NO: 15222051 NR Description: hypothetical protein; protein id: At1g12710.1 thaliana] >gi|9502385|gb|AAF88092.1|AC025417_20 T12C24.23 thaliana] >gi|26450401|dbj|BAC42315.1| unknown protein
  misc_feature (1)..(287): Homolog of NCBI NO: 15231726 NR Description: putative protein; protein id: At3g53000.1
  misc_feature (1)..(285): Homolog of NCBI NO: 15242282 NR Description: putative protein; protein id: At5g52120.1, by cDNA: gi_18175687, supported by cDNA: gi_20465820 [Arabidopsis >gi|18175688|gb|AAL59911.1| unknown protein [Arabidopsis
  misc_feature (109)..(285): Homolog of NCBI NO: 27754673 NR Description: unknown protein [Arabidopsis thaliana]
  misc_feature (17)..(230): Homolog of NCBI NO: 15226908 NR Description: putative phloem-specific lectin; protein id:
MGAGVSGLPGAEPGGKVARGAGLGDLPELCTAEVLLRLGAPDICRLARLNLAFRGAAGADFVWEAKLPGNYARLLRFVDEAEEEGGSGRDWSAVGRKDVFARLARPVPFDGGKREFWLEKNEGGICMALSSKALVITGIDDRRYWINMPTSESRFHSTAYLQQIWWFEVVGEVDFCFPAGTAYSLYFRLHLGKSSTRFGRRVCSSEQVHGWDKKPVRFQLSTSDGQHAVSQCYLDEPGRWILYHVGDFDAPPSSGQPTRLKFSLAQIDCTHTKGGLCVDSVLVYPKGFQPERVVRARK

SEQ ID NO: 14262 - protein, 172 aa, Zea mays subsp. mays
  peptide (1)..(172): Ceres Seq. ID no. 12443315
  misc_feature (1)..(172): Homolog of NCBI NO: 37536186 NR Description: unknown protein [Oryza sativa (japonica
  misc_feature (1)..(165): Homolog of NCBI NO: 38567911 NR Description: OSJNBa0088I22.7 [Oryza sativa (japonica
  misc_feature (1)..(160): Homolog of NCBI NO: 30695337 NR Description: F-box protein (lectin-related) [Arabidopsis
  misc_feature (1)..(160): Homolog of NCBI NO: 23397334 NR Description: unknown protein [Arabidopsis thaliana]
  misc_feature (1)..(159): Homolog of NCBI NO: 15221677 NR Description: unknown protein; protein id: At1g63090.1
  misc_feature (1)..(159): Homolog of NCBI NO: 15222051 NR Description: hypothetical protein; protein id: At1g12710.1 thaliana] >gi|9502385|gb|AAF88092.1|AC025417_20 T12C24.23 thaliana] >gi|26450401|dbj|BAC42315.1| unknown protein
  misc_feature (1)..(161): Homolog of NCBI NO: 15231726 NR Description: putative protein; protein id: At3g53000.1
  misc_feature (1)..(159): Homolog of NCBI NO: 15242282 NR Description: putative protein; protein id: At5g52120.1, by cDNA: gi_18175687, supported by cDNA: gi_20465820 [Arabidopsis >gi|18175688|gb|AAL59911.1| unknown protein [Arabidopsis
  misc_feature (1)..(159): Homolog of NCBI NO: 27754673 NR Description: unknown protein [Arabidopsis thaliana]
  misc_feature (1)..(104): Homolog of NCBI NO: 15226908 NR Description: putative phloem-specific lectin; protein id:
MALSSKALVITGIDDRRYWINMPTSESRFHSTAYLQQIWWFEVVGEVDFCFPAGTAYSLYFRLHLGKSSTRFGRRVCSSEQVHGWDKKPVRFQLSTSDGQHAVSQCYLDEPGRWILYHVGDFDAPPSSGQPTRLKFSLAQIDCTHTKGGLCVDSVLVYPKGFQPERVVRARK

SEQ ID NO: 14263 - protein, 151 aa, Zea mays subsp. mays
  peptide (1)..(151): Ceres Seq. ID no. 12443316
  misc_feature (1)..(151): Homolog of NCBI NO: 37536186 NR Description: unknown protein [Oryza sativa (japonica
  misc_feature (1)..(144): Homolog of NCBI NO: 38567911 NR Description: OSJNBa0088I22.7 [Oryza sativa (japonica
  misc_feature (1)..(139): Homolog of NCBI NO: 30695337 NR Description: F-box protein (lectin-related) [Arabidopsis
  misc_feature (1)..(139): Homolog of NCBI NO: 23397334 NR Description: unknown protein [Arabidopsis thaliana]
  misc_feature (1)..(138): Homolog of NCBI NO: 15221677 NR Description: unknown protein; protein id: At1g63090.1
  misc_feature (1)..(138): Homolog of NCBI NO: 15222051 NR Description: hypothetical protein; protein id: At1g12710.1 thaliana] >gi|9502385|gb|AAF88092.1|AC025417_20 T12C24.23 thaliana] >gi|26450401|dbj|BAC42315.1| unknown protein
  misc_feature (1)..(140): Homolog of NCBI NO: 15231726 NR Description: putative protein; protein id: At3g53000.1
  misc_feature (1)..(138): Homolog of NCBI NO: 15242282 NR Description: putative protein; protein id: At5g52120.1, by cDNA: gi_18175687, supported by cDNA: gi_20465820 [Arabidopsis >gi|18175688|gb|AAL59911.1| unknown protein [Arabidopsis
  misc_feature (1)..(138): Homolog of NCBI NO: 27754673 NR Description: unknown protein [Arabidopsis thaliana]
  misc_feature (1)..(83): Homolog of NCBI NO: 15226908 NR Description: putative phloem-specific lectin; protein id:
MPTSESRFHSTAYLQQIWWFEVVGEVDFCFPAGTAYSLYFRLHLGKSSTRFGRRVCSSEQVHGWDKKPVRFQLSTSDGQHAVSQCYLDEPGRWILYHVGDFDAPPSSGQPTRLKFSLAQIDCTHTKGGLCVDSVLVYPKGFQPERVVRARK

SEQ ID NO: 14264 - DNA, 2189 bp, Zea mays subsp. mays
  misc_feature (1)..(2189): Ceres Seq. ID no. 12454883
  misc_feature: MA Experiment ID: 108528 Result: Up-regulated in Transcription
  misc_feature: MA Experiment 108528 PARAMETER Experiment Name: Zm_Imbibed_Seeds_P Parameter: Age (day) Value: 5 vs. 2
  misc_feature: MA Experiment 108528 PARAMETER Experiment Name: Zm_Imbibed_Seeds_P Parameter: Organism Value: Zea mays
  misc_feature: MA Experiment 108528 PARAMETER Experiment Name: Zm_Imbibed_Seeds_P Parameter: Plant Line Value: 35A19
  misc_feature: MA Experiment 108528 PARAMETER Experiment Name: Zm_Imbibed_Seeds_P Parameter: Tissue Value: Aerial vs. Embryo
  misc_feature: MA Experiment ID: 108535 Result: Down-regulated in Transcription
  misc_feature: MA Experiment 108535 PARAMETER Experiment Name: Zm_Meristem_P Parameter: Age (day) Value: 8
  misc_feature: MA Experiment 108535 PARAMETER Experiment Name: Zm_Meristem_P Parameter: Organism Value: Zea mays
  misc_feature: MA Experiment 108535 PARAMETER Experiment Name: Zm_Meristem_P Parameter: Plant Line Value: 35A19
  misc_feature: MA Experiment 108535 PARAMETER Experiment Name: Zm_Meristem_P Parameter: Tissue Value: Root Meristem vs. Above Root Meristem
ggtggcttctcattcattgttgattgattgatcctccccgcctcactcctttgtctcctcgcctcgtgctcgctcgctcccctcgccctggcgaggagggcagcagaaaccctagcggctcaggccgggcgggggttagatgctccaaggttcgagagggaagggtaggttagtggtgcgccatcgactatgggctgcgtcttcggccgggcggctgcgtcgtcctctgcagcgccgaagaagaagtggggcaaggggaggtcgtccccgcagcccgaagcggggtcgccctccgcagtcgccgccaccgacggggacgggaggccgcggcggcggctcgggggccgcagggcgtcgggacccaggcagggttgcgtccccgcggctgccgcggcggagcagctcgccgccggttggccaccgtggctcgttgcagtcgctggggaggccctccgcggctgggcgccgcgccgcgccgacacgttcgagaagcttaataagataggatcgggcacgtacagcaacgtgtaccgggcgagggacaccgtctctggccggatcgtcgctcttaaaaaggtccgcttcgataacctcgagccagaaagcgtcaagtttatggcccgggaaatactgatcctaaggagactcgaccaccccaacatcatcaaattagagggcttggtcacctccaggatgtcatgcagcctttaccttgtcttcgagtacatggagcatgatcttgctggtcttgcggcaagttgtgatgtcaagttcacgttgcctcagataaaatgttacatacagcagctgttgtcagggcttgagcattgtcatgacaataatgtattgcaccgggatatcaaggggtcaaacttgttgttggataataatgggattcttaagattgcggattttgggctggcaacattctttgatccacgacataaacgaccaatgacgagccgagtggtcacgctatggtaccgtccaccagaattgttacttggtgccactgagtatagtgtaggtgttgatttgtggagtgctggatgcattcttgcagagctcctgtatggaaagcccataatgcctgggcgcactgaggtggaacagttgcacaagattttcaagctatgtggttccccttctgaggagtactggaagaagtctaaattgccacacgcaacaatattcaaacctcaacaaccctataaacgttgcatcagggagacatttaaagattttcctacatcggctctgccattggttgaaactctgcttgcaattgatccagctgagcgacaaactgcctcagctgcattacacagtgattttttttcaaccgagccttatgcttgtaacccttcaagtctgccaacatatccaccaagcaaggagatggatgccaagttaagagacgaggaggctagaagactacgagcggctgcaaaggccaagggagaacagaaaaggactcgaccacgtgatcgatctcggagggctggaccagcaccagaagctaatgcagagattcaagcaaacttagaccagaggcgacgaatgataactcatgcaaatgcaaagagtaaaagtgagaagtttcctcctccgcatcaggatggaggtacgggtaatccgcttggatcctatcatcatatggagcctatgttcgagcaccaggatgcttccttcagtacagtagtccccatagagaaggggacctcacaaacatggtccgggccgttgtttgatccagcagctctcgggcagtcgaggcggaagaagcaaactaccctagatgctaaggctgctgcttactcaaagcagctccaaaaggaaaagggagggatacgagcccgataacaaaatgtcgttttcatggcctacagatgaattttcttgttttgttcctctggtggttggaaacaggcaacaatgcgctgctgtagggtgaagtctcccggattgtgtacatgtcatgtggtagcgtttccaagtactgtttagatgcttctgaacaagctgccgtcacccggacgggactttaggggtttgagactcgtatttgtgctctttatggcaattcagttgcccatgtgtatatatggagcaattctttcttgtgtatgtaaagagacggcggtagctttgatttcttaataatgaatcaagtgtgatggcgaccttcc

SEQ ID NO: 14265 - protein, 557 aa, Zea mays subsp. mays
  peptide (1)..(557): Ceres Seq. ID no. 12454884
  misc_feature (99)..(383): Pfam Name: Protein kinase domain Pfam Description: Protein kinase domain
  misc_feature (1)..(557): Homolog of NCBI NO: 34914694 NR Description: putative CRK1 protein [Oryza sativa (japonica group)] >gi|15528648|dbj|BAB64715.1| putative CRK1 protein [Oryza
  misc_feature (1)..(537): Homolog of NCBI NO: 7671528 NR Description: CRK1 protein [Beta vulgaris]
  misc_feature (41)..(539): Homolog of NCBI NO: 15221868 NR Description: CRK1 protein, putative; protein id: At1g54610.1, by cDNA: gi_13877618 [Arabidopsis thaliana]
  misc_feature (43)..(545): Homolog of NCBI NO: 15229881 NR Description: putative cyclin-dependent protein kinase; protein At3g05050.1, supported by cDNA: gi_14532507 [Arabidopsis
  misc_feature (75)..(531): Homolog of NCBI NO: 15241289 NR Description: cyclin-dependent protein kinase-like; protein id:
  misc_feature (75)..(531): Homolog of NCBI NO: 26449319 NR Description: putative cyclin-dependent protein kinase thaliana] >gi|29028978|gb|AAO64868.1| At5g50860 [Arabidopsis
  misc_feature (45)..(544): Homolog of NCBI NO: 15219169 NR Description: cell division-related protein, putative; protein At1g53050.1 [Arabidopsis thaliana] >gi|25405618|pir||A96571
  misc_feature (45)..(544): Homolog of NCBI NO: 28393523 NR Description: putative cell division-related protein
  misc_feature (1)..(556): Homolog of NCBI NO: 33146814 NR Description: putative cyclin-dependent kinase CDC2C [Oryza
  misc_feature (71)..(473): Homolog of NCBI NO: 15217565 NR Description: putative protein kinase; protein id: At1g09600.1
MGCVFGRAAASSSAAPKKKWGKGRSSPQPEAGSPSAVAATDGDGRPRRRLGGRRASGPRQGCVPAAAAAEQLAAGWPPWLVAVAGEALRGWAPRRADTFEKLNKIGSGTYSNVYRARDTVSGRIVALKKVRFDNLEPESVKFMAREILILRRLDHPNIIKLEGLVTSRMSCSLYLVFEYMEHDLAGLAASCDVKFTLPQIKCYIQQLLSGLEHCHDNNVLHRDIKGSNLLLDNNGILKIADFGLATFFDPRHKRPMTSRVVTLWYRPPELLLGATEYSVGVDLWSAGCILAELLYGKPIMPGRTEVEQLHKIFKLCGSPSEEYWKKSKLPHATIFKPQQPYKRCIRETFKDFPTSALPLVETLLAIDPAERQTASAALHSDFFSTEPYACNPSSLPTYPPSKEMDAKLRDEEARRLRAAAKAKGEQKRTRPRDRSRRAGPAPEANAEIQANLDQRRRMITHANAKSKSEKFPPPHQDGGTGNPLGSYHHMEPMFEHQDASFSTVVPIEKGTSQTWSGPLFDPAALGQSRRKKQTTLDAKAAAYSKQLQKEKGGIRAR

SEQ ID NO: 14266 - protein, 415 aa, Zea mays subsp. mays
  peptide (1)..(415): Ceres Seq. ID no. 12454885
  misc_feature (1)..(241): Pfam Name: Protein kinase domain Pfam Description: Protein kinase domain
  misc_feature (1)..(415): Homolog of NCBI NO: 34914694 NR Description: putative CRK1 protein [Oryza sativa (japonica group)] >gi|15528648|dbj|BAB64715.1| putative CRK1 protein [Oryza
  misc_feature (1)..(395): Homolog of NCBI NO: 7671528 NR Description: CRK1 protein [Beta vulgaris]
  misc_feature (1)..(397): Homolog of NCBI NO: 15221868 NR Description: CRK1 protein, putative; protein id: At1g54610.1, by cDNA: gi_13877618 [Arabidopsis thaliana]
  misc_feature (1)..(403): Homolog of NCBI NO: 15229881 NR Description: putative cyclin-dependent protein kinase; protein At3g05050.1, supported by cDNA: gi_14532507 [Arabidopsis
  misc_feature (1)..(389): Homolog of NCBI NO: 15241289 NR Description: cyclin-dependent protein kinase-like; protein id:
  misc_feature (1)..(389): Homolog of NCBI NO: 26449319 NR Description: putative cyclin-dependent protein kinase thaliana] >gi|29028978|gb|AAO64868.1| At5g50860 [Arabidopsis
  misc_feature (1)..(402): Homolog of NCBI NO: 15219169 NR Description: cell division-related protein, putative; protein At1g53050.1 [Arabidopsis thaliana] >gi|25405618|pir||A96571
  misc_feature (1)..(402): Homolog of NCBI NO: 28393523 NR Description: putative cell division-related protein
  misc_feature (1)..(414): Homolog of NCBI NO: 33146814 NR Description: putative cyclin-dependent kinase CDC2C [Oryza
  misc_feature (1)..(331): Homolog of NCBI NO: 15217565 NR Description: putative protein kinase; protein id: At1g09600.1
MAREILILRRLDHPNIIKLEGLVTSRMSCSLYLVFEYMEHDLAGLAASCDVKFTLPQIKCYIQQLLSGLEHCHDNNVLHRDIKGSNLLLDNNGILKIADFGLATFFDPRHKRPMTSRVVTLWYRPPELLLGATEYSVGVDLWSAGCILAELLYGKPIMPGRTEVEQLHKIFKLCGSPSEEYWKKSKLPHATIFKPQQPYKRCIRETFKDFPTSALPLVETLLAIDPAERQTASAALHSDFFSTEPYACNPSSLPTYPPSKEMDAKLRDEEARRLRAAAKAKGEQKRTRPRDRSRRAGPAPEANAEIQANLDQRRRMITHANAKSKSEKFPPPHQDGGTGNPLGSYHHMEPMFEHQDASFSTVVPIEKGTSQTWSGPLFDPAALGQSRRKKQTTLDAKAAAYSKQLQKEKGGIRAR

SEQ ID NO: 14267 - protein, 389 aa, Zea mays subsp. mays
  peptide (1)..(389): Ceres Seq. ID no. 12454886
  misc_feature (1)..(215): Pfam Name: Protein kinase domain Pfam Description: Protein kinase domain
  misc_feature (1)..(389): Homolog of NCBI NO: 34914694 NR Description: putative CRK1 protein [Oryza sativa (japonica group)] >gi|15528648|dbj|BAB64715.1| putative CRK1 protein [Oryza
  misc_feature (1)..(369): Homolog of NCBI NO: 7671528 NR Description: CRK1 protein [Beta vulgaris]
  misc_feature (1)..(371): Homolog of NCBI NO: 15221868 NR Description: CRK1 protein, putative; protein id: At1g54610.1, by cDNA: gi_13877618 [Arabidopsis thaliana]
  misc_feature (1)..(377): Homolog of NCBI NO: 15229881 NR Description: putative cyclin-dependent protein kinase; protein At3g05050.1, supported by cDNA: gi_14532507 [Arabidopsis
  misc_feature (1)..(363): Homolog of NCBI NO: 15241289 NR Description: cyclin-dependent protein kinase-like; protein id:
  misc_feature (1)..(363): Homolog of NCBI NO: 26449319 NR Description: putative cyclin-dependent protein kinase thaliana] >gi|29028978|gb|AAO64868.1| At5g50860 [Arabidopsis
  misc_feature (1)..(376): Homolog of NCBI NO: 15219169 NR Description: cell division-related protein, putative; protein At1g53050.1 [Arabidopsis thaliana] >gi|25405618|pir||A96571
  misc_feature (1)..(376): Homolog of NCBI NO: 28393523 NR Description: putative cell division-related protein
  misc_feature (1)..(388): Homolog of NCBI NO: 33146814 NR Description: putative cyclin-dependent kinase CDC2C [Oryza
  misc_feature (1)..(305): Homolog of NCBI NO: 15217565 NR Description: putative protein kinase; protein id: At1g09600.1
MSCSLYLVFEYMEHDLAGLAASCDVKFTLPQIKCYIQQLLSGLEHCHDNNVLHRDIKGSNLLLDNNGILKIADFGLATFFDPRHKRPMTSRVVTLWYRPPELLLGATEYSVGVDLWSAGCILAELLYGKPIMPGRTEVEQLHKIFKLCGSPSEEYWKKSKLPHATIFKPQQPYKRCIRETFKDFPTSALPLVETLLAIDPAERQTASAALHSDFFSTEPYACNPSSLPTYPPSKEMDAKLRDEEARRLRAAAKAKGEQKRTRPRDRSRRAGPAPEANAEIQANLDQRRRMITHANAKSKSEKFPPPHQDGGTGNPLGSYHHMEPMFEHQDASFSTVVPIEKGTSQTWSGPLFDPAALGQSRRKKQTTLDAKAAAYSKQLQKEKGGIRAR

SEQ ID NO: 14268 - DNA, 447 bp, Zea mays subsp. mays
  misc_feature (1)..(447): Ceres Seq. ID no. 3104735
  misc_feature: MA Experiment ID: 108533 Result: Down-regulated in Transcription
  misc_feature: MA Experiment 108533 PARAMETER Experiment Name: Zm_4deg_Cold_P Parameter: Age (hr) Value: 8
  misc_feature: MA Experiment 108533 PARAMETER Experiment Name: Zm_4deg_Cold_P Parameter: Organism Value: Zea mays
  misc_feature: MA Experiment 108533 PARAMETER Experiment Name: Zm_4deg_Cold_P Parameter: Plant Line Value: 35A19
  misc_feature: MA Experiment 108533 PARAMETER Experiment Name: Zm_4deg_Cold_P Parameter: Temperature (deg C) Value: 4 vs. 22
  misc_feature: MA Experiment 108533 PARAMETER Experiment Name: Zm_4deg_Cold_P Parameter: Timepoint (hr) Value: 1
  misc_feature: MA Experiment 108533 PARAMETER Experiment Name: Zm_4deg_Cold_P Parameter: Tissue Value: Aerial
gtctttcacgcttgaccagccctgctctgctcattgctggaggcaaaggaaggtttgcgctggaggggttcgtcagagatggacttcttcagtgaatacggcgatgcgaacagatacaaaatccaagaggtcattggcaaaggaagttatggcgttgtttgctcagctgttgaccaacataccagtgacaaggtggcaatcaagaaaatacacaatatctttgagcacttatctgatgctgcccggatcctacgtgagatcaaactgcttcggctattacgccatcctgatatagttgagatcaagcatataatgctgcctccatcaaggagggacttcaaagatatctatgttgtatttgagctgatggatacagacctccaccaagtcatcaaggcaaatgatgatttaacccgagagcatcatcagttctttctctatcagatg

SEQ ID NO: 14269 - protein, 123 aa, Zea mays subsp. mays
  peptide (1)..(123): Ceres Seq. ID no. 3104736
  misc_feature (13)..(122): Pfam Name: Protein kinase domain Pfam Description: Protein kinase domain
  misc_feature (1)..(122): Homolog of NCBI NO: 24412850 NR Description: putative mitogen-activated protein kinase wjumk1
  misc_feature (1)..(122): Homolog of NCBI NO: 34910892 NR Description: putative mitogen-activated protein kinase [Oryza
  misc_feature (1)..(122): Homolog of NCBI NO: 34912932 NR Description: MAP kinase-like protein [Oryza sativa (japonica
  misc_feature (1)..(122): Homolog of NCBI NO: 18406088 NR Description: putative MAP kinase; protein id: At2g42880.1, by cDNA: gi_15724283 [Arabidopsis thaliana] At2g42880/F7D19.12 [Arabidopsis thaliana]
  misc_feature (1)..(122): Homolog of NCBI NO: 25408817 NR Description: probable MAP kinase [imported] - Arabidopsis
  misc_feature (1)..(122): Homolog of NCBI NO: 37594657 NR Description: mitogen activated protein kinase 6 [Zea mays]
  misc_feature (1)..(122): Homolog of NCBI NO: 15220806 NR Description: MAP kinase ATMPK9, putative; protein id: [Arabidopsis thaliana] >gi|25405642|pir||C96575 probable MAP
  misc_feature (1)..(122): Homolog of NCBI NO: 2104949 NR Description: MAP kinase-like protein [Selaginella lepidophylla]
  misc_feature (1)..(122): Homolog of NCBI NO: 9294393 NR Description: mitogen-activated protein kinase [Arabidopsis
  misc_feature (1)..(122): Homolog of NCBI NO: 4732123 NR Description: mitogen-activated protein kinase homologue
MDFFSEYGDANRYKIQEVIGKGSYGVVCSAVDQHTSDKVAIKKIHNIFEHLSDAARILREIKLLRLLRHPDIVEIKHIMLPPSRRDFKDIYVVFELMDTDLHQVIKANDDLTREHHQFFLYQM

SEQ ID NO: 14270 - protein, 97 aa, Zea mays subsp. mays
  peptide (1)..(97): Ceres Seq. ID no. 3104737
SFTLDQPCSAHCWRQRKVCAGGVRQRWTSSVNTAMRTDTKSKRSLAKEVMALFAQLLTNIPVTRWQSRKYTISLSTYLMLPGSYVRSNCFGYYAILI

SEQ ID NO: 14271 - protein, 63 aa, Zea mays subsp. mays
  peptide (1)..(63): Ceres Seq. ID no. 3104738
MRTDTKSKRSLAKEVMALFAQLLTNIPVTRWQSRKYTISLSTYLMLPGSYVRSNCFGYYAILI

SEQ ID NO: 14272 - DNA, 1679 bp, Zea mays subsp. mays
  misc_feature (1)..(1679): Ceres Seq. ID no. 12462479
  misc_feature: MA Experiment ID: 108523 Result: Down-regulated in Transcription
  misc_feature: MA Experiment 108523 PARAMETER Experiment Name: Zm_42deg_Heat_P Parameter: Age (day) Value: 8
  misc_feature: MA Experiment 108523 PARAMETER Experiment Name: Zm_42deg_Heat_P Parameter: Organism Value: Zea mays
  misc_feature: MA Experiment 108523 PARAMETER Experiment Name: Zm_42deg_Heat_P Parameter: Plant Line Value: 35A19
  misc_feature: MA Experiment 108523 PARAMETER Experiment Name: Zm_42deg_Heat_P Parameter: Temperature (deg C) Value: 42 vs. 22
  misc_feature: MA Experiment 108523 PARAMETER Experiment Name: Zm_42deg_Heat_P Parameter: Timepoint (hr) Value: 6
  misc_feature: MA Experiment 108523 PARAMETER Experiment Name: Zm_42deg_Heat_P Parameter: Tissue Value: Aerial
  misc_feature: MA Experiment ID: 108528 Result: Up-regulated in Transcription
  misc_feature: MA Experiment 108528 PARAMETER Experiment Name: Zm_Imbibed_Seeds_P Parameter: Age (day) Value: 5 vs. 2
  misc_feature: MA Experiment 108528 PARAMETER Experiment Name: Zm_Imbibed_Seeds_P Parameter: Organism Value: Zea mays
  misc_feature: MA Experiment 108528 PARAMETER Experiment Name: Zm_Imbibed_Seeds_P Parameter: Plant Line Value: 35A19
  misc_feature: MA Experiment 108528 PARAMETER Experiment Name: Zm_Imbibed_Seeds_P Parameter: Tissue Value: Aerial vs. Embryo
  misc_feature: MA Experiment ID: 108530 Result: Up-regulated in Transcription
  misc_feature: MA Experiment 108530 PARAMETER Experiment Name: Zm_Imbibed_Seeds_P Parameter: Age (day) Value: 6 vs. 2
  misc_feature: MA Experiment 108530 PARAMETER Experiment Name: Zm_Imbibed_Seeds_P Parameter: Organism Value: Zea mays
  misc_feature: MA Experiment 108530 PARAMETER Experiment Name: Zm_Imbibed_Seeds_P Parameter: Plant Line Value: 35A19
  misc_feature: MA Experiment 108530 PARAMETER Experiment Name: Zm_Imbibed_Seeds_P Parameter: Tissue Value: Aerial vs. Embryo
  misc_feature: MA Experiment ID: 108534 Result: Up-regulated in Transcription
  misc_feature: MA Experiment 108534 PARAMETER Experiment Name: Zm_4deg_Cold_P Parameter: Age (hr) Value: 8
  misc_feature: MA Experiment 108534 PARAMETER Experiment Name: Zm_4deg_Cold_P Parameter: Organism Value: Zea mays
  misc_feature: MA Experiment 108534 PARAMETER Experiment Name: Zm_4deg_Cold_P Parameter: Plant Line Value: 35A19
  misc_feature: MA Experiment 108534 PARAMETER Experiment Name: Zm_4deg_Cold_P Parameter: Temperature (deg C) Value: 4 vs. 22
  misc_feature: MA Experiment 108534 PARAMETER Experiment Name: Zm_4deg_Cold_P Parameter: Timepoint (hr) Value: 6
  misc_feature: MA Experiment 108534 PARAMETER Experiment Name: Zm_4deg_Cold_P Parameter: Tissue Value: Aerial
  misc_feature: MA Experiment ID: 108540 Result: Down-regulated in Transcription
  misc_feature: MA Experiment 108540 PARAMETER Experiment Name: Zm_20percent_PEG_P Parameter: Age (day) Value: 8
  misc_feature: MA Experiment 108540 PARAMETER Experiment Name: Zm_20percent_PEG_P Parameter: Organism Value: Zea mays
  misc_feature: MA Experiment 108540 PARAMETER Experiment Name: Zm_20percent_PEG_P Parameter: Plant Line Value: 35A19
  misc_feature: MA Experiment 108540 PARAMETER Experiment Name: Zm_20percent_PEG_P Parameter: Timepoint (hr) Value: 6
  misc_feature: MA Experiment 108540 PARAMETER Experiment Name: Zm_20percent_PEG_P Parameter: Tissue Value: Aerial
  misc_feature: MA Experiment 108540 PARAMETER Experiment Name: Zm_20percent_PEG_P Parameter: Treatment Value: 20percent PEG vs. No Treatment
  misc_feature: MA Experiment ID: 108544 Result: Up-regulated in Transcription
  misc_feature: MA Experiment ID: 108559 Result: Down-regulated in Transcription
  misc_feature: MA Experiment 108559 PARAMETER Experiment Name: Zm_5mM_NO_P Parameter: Age (day) Value: 8
  misc_feature: MA Experiment 108559 PARAMETER Experiment Name: Zm_5mM_NO_P Parameter: Organism Value: Zea mays
  misc_feature: MA Experiment 108559 PARAMETER Experiment Name: Zm_5mM_NO_P Parameter: Plant Line Value: 35A19
  misc_feature: MA Experiment 108559 PARAMETER Experiment Name: Zm_5mM_NO_P Parameter: Timepoint (hr) Value: 12
  misc_feature: MA Experiment 108559 PARAMETER Experiment Name: Zm_5mM_NO_P Parameter: Tissue Value: Aerial
  misc_feature: MA Experiment 108559 PARAMETER Experiment Name: Zm_5mM_NO_P Parameter: Treatment Value: 5mM NO vs. No Treatment
  misc_feature: MA Experiment ID: 20000477 Result: Up-regulated in Transcription
  misc_feature: MA Experiment 20000477 PARAMETER Experiment Name: Zm_5mM_SA_P Parameter: Age (day) Value: 10
  misc_feature: MA Experiment 20000477 PARAMETER Experiment Name: Zm_5mM_SA_P Parameter: Organism Value: Zea mays
  misc_feature: MA Experiment 20000477 PARAMETER Experiment Name: Zm_5mM_SA_P Parameter: Plant Line Value: 35A19
  misc_feature: MA Experiment 20000477 PARAMETER Experiment Name: Zm_5mM_SA_P Parameter: Timepoint (hr) Value: 48
  misc_feature: MA Experiment 20000477 PARAMETER Experiment Name: Zm_5mM_SA_P Parameter: Tissue Value: Aerial
  misc_feature: MA Experiment 20000477 PARAMETER Experiment Name: Zm_5mM_SA_P Parameter: Treatment Value: 5mM SA vs. No Treatment
  misc_feature: MA Experiment ID: 20000492 Result: Up-regulated in Transcription
  misc_feature: MA Experiment 20000492 PARAMETER Experiment Name: Zm_Hybrid_Seed_Dev_P Parameter: DAP Value: 12
  misc_feature: MA Experiment 20000492 PARAMETER Experiment Name: Zm_Hybrid_Seed_Dev_P Parameter: Organism Value: Zea mays
  misc_feature: MA Experiment 20000492 PARAMETER Experiment Name: Zm_Hybrid_Seed_Dev_P Parameter: Plant Line Value: 35A19
  misc_feature: MA Experiment 20000492 PARAMETER Experiment Name: Zm_Hybrid_Seed_Dev_P Parameter: Tissue Value: Fert Kernel vs. Unfert Floret
  misc_feature: MA Experiment ID: 20001608 Result: Down-regulated in Transcription
  misc_feature: MA Experiment 20001608 PARAMETER Experiment Name: Zm_50ppm_KNO3_L-to-H_P Parameter: Age (day) Value: 21
  misc_feature: MA Experiment 20001608 PARAMETER Experiment Name: Zm_50ppm_KNO3_L-to-H_P Parameter: Organism Value: Zea mays
  misc_feature: MA Experiment 20001608 PARAMETER Experiment Name: Zm_50ppm_KNO3_L-to-H_P Parameter: Plant Line Value: 35A19
  misc_feature: MA Experiment 20001608 PARAMETER Experiment Name: Zm_50ppm_KNO3_L-to-H_P Parameter: Timepoint (hr) Value: 48
  misc_feature: MA Experiment 20001608 PARAMETER Experiment Name: Zm_50ppm_KNO3_L-to-H_P Parameter: Tissue Value: Shoots
  misc_feature: MA Experiment 20001608 PARAMETER Experiment Name: Zm_50ppm_KNO3_L-to-H_P Parameter: Treatment Value: 50ppm KNO3 vs. 50ppm KCl
actagcaaacattaataacgcaagcggcactgttgtcagtgtcagtgcacagtagatatactgctagctagcttacctggcagccagtgcaactgcactgcacgtctccaatgcgctgctattataacgacgcgaacgccgcgcaggccttccgtggtatacagcagcagaagcagcatcacgatcccggcccggcggcccgtacgtcgacgaggaggaggaggacgtacgtacgcagagcagctgctggcaccatggctcccgtgagcatcagcgctgttccgttcctcccgacggcggcggagggggagacgaacgtgcgcgcgtcgttcgtgcgcgaggaggacgagcgccccaaggtgccgcacgaccgcttcagcgacgaggtgccggtggtgtcgctcgagggcatcgacgggccgcgcaggcgggccgagatccgcggccgcgtggccgcggcctgcgaggactggggcatcttccaggtggtggaccacggcgtggacgccgcgctcgtggccgacatggcgcgcctcgcccgagacttcttcgcgctcccgcccgaggacaagctccgcttcgacatgtccggcgggaagaagggcggcttcatcgtctccagccacctccagggggaggcggtgcaggactggcgtgagatcgtgacctacttctcgtacccggtgaaggcccgcgactactcccggtggccggacaagccggcggcgtggcgggcggtggtggagcggtacagcgagcagctgatggcgctggcgtgcaggctcctgggcgtgctctccgaggccatgggcctggacacggaggcgctggccagggcctgcgtggacatggaccagaaggtggtggtcaacttctacccgaggtgcccgcagccggacctcacgctggggctcaagcgccacaccgaccccggcaccatcacgctgctgctgcaggacctggtcggcggcctccaggccacgcgcgacggcggccggacctggatcaccgtgcagcccgtggagggcgccttcgtcgtcaacctcggcgaccacggccacctcctgagcaacggcaggttcaagaacgcggaccaccaggcggtggtgaactcggagtgcagccgcctgtccatcgccacgttccagaacccggcgcccgacgcgacggtgtacccgctggccgtgcgcgacggggaggcgcccatactggaccatcccatcaccttcgccgagatgtaccgccgcaagatggcccgcgacatcgagctcgccaggctcaagaagcaggccaaggccgacaagaagcagcagcagcagagtgccaacaaggagttcgccgactccaagcctctcgacgccatttttgcctgatatggtagagggcgcgcgactaccgatccgttgttattgctgcgtgtgattaattttcatctataagaacatagctacgtgcgaccgcgcgtgtggtgattaattaaggtctgaataaaataatggctgcacaaaactaggaagcgatcgatcacccagataaatgtatgtgcgttcccttttcttctttcaagatgtgtaattttcaacgtgcggttccagatgcatggactggactggaccggagtgcattgtaattcttttgtttccccctgttgaatatgcgagaggtgtgcatgtctttgt

SEQ ID NO: 14273 - protein, 420 aa, Zea mays subsp. mays
  peptide (1)..(420): Ceres Seq. ID no. 12462480
  misc_feature (247)..(348): Pfam Name: 2OG-Fe(II) oxygenase superfamily Pfam Description: 2OG-Fe(II) oxygenase superfamily
  misc_feature (49)..(420): Homolog of NCBI NO: 7433183 NR Description: naringenin 3-dioxygenase (EC 1.14.11.9) - maize
  misc_feature (49)..(403): Homolog of NCBI NO: 120229 NR Description: Naringenin,2-oxoglutarate 3-dioxygenase
  misc_feature (55)..(420): Homolog of NCBI NO: 30230339 NR Description: putative flavonoid 3-hydroxylase [Anthurium
  misc_feature (62)..(420): Homolog of NCBI NO: 4512593 NR Description: flavanone 3-hydroxyrase [Ipomoea batatas]
  misc_feature (62)..(420): Homolog of NCBI NO: 4512591 NR Description: flavanone 3-hydroxyrase [Ipomoea batatas]
  misc_feature (62)..(420): Homolog of NCBI NO: 4512589 NR Description: fravanone 3-hydroxyrase [Ipomoea batatas]
  misc_feature (62)..(420): Homolog of NCBI NO: 2344781 NR Description: 2-oxogulutarate 3-dioxygenase; flavanone
  misc_feature (54)..(401): Homolog of NCBI NO: 1364117 NR Description: naringenin 3-dioxygenase (EC 1.14.11.9) -
  misc_feature (62)..(420): Homolog of NCBI NO: 1786049 NR Description: flavanone 3-hydroxylase [Ipomoea purpurea]
  misc_feature (62)..(420): Homolog of NCBI NO: 729505 NR Description: Naringenin,2-oxoglutarate 3-dioxygenase
MRCYYNDANAAQAFRGIQQQKQHHDPGPAARTSTRRRRTYVRRAAAGTMAPVSISAVPFLPTAAEGETNVRASFVREEDERPKVPHDRFSDEVPVVSLEGIDGPRRRAEIRGRVAAACEDWGIFQVVDHGVDAALVADMARLARDFFALPPEDKLRFDMSGGKKGGFIVSSHLQGEAVQDWREIVTYFSYPVKARDYSRWPDKPAAWRAVVERYSEQLMALACRLLGVLSEAMGLDTEALARACVDMDQKVVVNFYPRCPQPDLTLGLKRHTDPGTITLLLQDLVGGLQATRDGGRTWITVQPVEGAFVVNLGDHGHLLSNGRFKNADHQAVVNSECSRLSIATFQNPAPDATVYPLAVRDGEAPILDHPITFAEMYRRKMARDIELARLKKQAKADKKQQQQSANKEFADSKPLDAIFA

SEQ ID NO: 14274 - protein, 372 aa, Zea mays subsp. mays
  peptide (1)..(372): Ceres Seq. ID no. 12462481
  misc_feature (199)..(300): Pfam Name: 2OG-Fe(II) oxygenase superfamily Pfam Description: 2OG-Fe(II) oxygenase superfamily
  misc_feature (1)..(372): Homolog of NCBI NO: 7433183 NR Description: naringenin 3-dioxygenase (EC 1.14.11.9) - maize
  misc_feature (1)..(355): Homolog of NCBI NO: 120229 NR Description: Naringenin,2-oxoglutarate 3-dioxygenase
  misc_feature (7)..(372): Homolog of NCBI NO: 30230339 NR Description: putative flavonoid 3-hydroxylase [Anthurium
  misc_feature (14)..(372): Homolog of NCBI NO: 4512593 NR Description: flavanone 3-hydroxyrase [Ipomoea batatas]
  misc_feature (14)..(372): Homolog of NCBI NO: 4512591 NR Description: flavanone 3-hydroxyrase [Ipomoea batatas]
  misc_feature (14)..(372): Homolog of NCBI NO: 4512589 NR Description: fravanone 3-hydroxyrase [Ipomoea batatas]
  misc_feature (14)..(372): Homolog of NCBI NO: 2344781 NR Description: 2-oxogulutarate 3-dioxygenase; flavanone
  misc_feature (6)..(353): Homolog of NCBI NO: 1364117 NR Description: naringenin 3-dioxygenase (EC 1.14.11.9) -
  misc_feature (14)..(372): Homolog of NCBI NO: 1786049 NR Description: flavanone 3-hydroxylase [Ipomoea purpurea]
  misc_feature (14)..(372): Homolog of NCBI NO: 729505 NR Description: Naringenin,2-oxoglutarate 3-dioxygenase
MAPVSISAVPFLPTAAEGETNVRASFVREEDERPKVPHDRFSDEVPVVSLEGIDGPRRRAEIRGRVAAACEDWGIFQVVDHGVDAALVADMARLARDFFALPPEDKLRFDMSGGKKGGFIVSSHLQGEAVQDWREIVTYFSYPVKARDYSRWPDKPAAWRAVVERYSEQLMALACRLLGVLSEAMGLDTEALARACVDMDQKVVVNFYPRCPQPDLTLGLKRHTDPGTITLLLQDLVGGLQATRDGGRTWITVQPVEGAFVVNLGDHGHLLSNGRFKNADHQAVVNSECSRLSIATFQNPAPDATVYPLAVRDGEAPILDHPITFAEMYRRKMARDIELARLKKQAKADKKQQQQSANKEFADSKPLDAIFA

SEQ ID NO: 14275 - protein, 282 aa, Zea mays subsp. mays
  peptide (1)..(282): Ceres Seq. ID no. 12462482
  misc_feature (109)..(210): Pfam Name: 2OG-Fe(II) oxygenase superfamily Pfam Description: 2OG-Fe(II) oxygenase superfamily
  misc_feature (1)..(282): Homolog of NCBI NO: 4512593 NR Description: flavanone 3-hydroxyrase [Ipomoea batatas]
  misc_feature (1)..(282): Homolog of NCBI NO: 4512591 NR Description: flavanone 3-hydroxyrase [Ipomoea batatas]
  misc_feature (1)..(282): Homolog of NCBI NO: 4512589 NR Description: fravanone 3-hydroxyrase [Ipomoea batatas]
  misc_feature (1)..(282): Homolog of NCBI NO: 2344781 NR Description: 2-oxogulutarate 3-dioxygenase; flavanone
  misc_feature (1)..(265): Homolog of NCBI NO: 120229 NR Description: Naringenin,2-oxoglutarate 3-dioxygenase
  misc_feature (1)..(282): Homolog of NCBI NO: 30230339 NR Description: putative flavonoid 3-hydroxylase [Anthurium
  misc_feature (1)..(282): Homolog of NCBI NO: 7433183 NR Description: naringenin 3-dioxygenase (EC 1.14.11.9) - maize
  misc_feature (1)..(263): Homolog of NCBI NO: 1364117 NR Description: naringenin 3-dioxygenase (EC 1.14.11.9) -
  misc_feature (1)..(282): Homolog of NCBI NO: 1786049 NR Description: flavanone 3-hydroxylase [Ipomoea purpurea]
  misc_feature (1)..(282): Homolog of NCBI NO: 729505 NR Description: Naringenin,2-oxoglutarate 3-dioxygenase
MARLARDFFALPPEDKLRFDMSGGKKGGFIVSSHLQGEAVQDWREIVTYFSYPVKARDYSRWPDKPAAWRAVVERYSEQLMALACRLLGVLSEAMGLDTEALARACVDMDQKVVVNFYPRCPQPDLTLGLKRHTDPGTITLLLQDLVGGLQATRDGGRTWITVQPVEGAFVVNLGDHGHLLSNGRFKNADHQAVVNSECSRLSIATFQNPAPDATVYPLAVRDGEAPILDHPITFAEMYRRKMARDIELARLKKQAKADKKQQQQSANKEFADSKPLDAIFA

SEQ ID NO: 14276 - DNA, 1514 bp, Zea mays subsp. mays
  misc_feature (1)..(1514): Ceres Seq. ID no. 12590448
  misc_feature: MA Experiment ID: 20000535 Result: Up-regulated in Transcription
  misc_feature: MA Experiment 20000535 PARAMETER Experiment Name: Zm_Hybrid_Seed_Dev_P Parameter: DAP Value: 30 vs. 12
  misc_feature: MA Experiment 20000535 PARAMETER Experiment Name: Zm_Hybrid_Seed_Dev_P Parameter: Organism Value: Zea mays
  misc_feature: MA Experiment 20000535 PARAMETER Experiment Name: Zm_Hybrid_Seed_Dev_P Parameter: Plant Line Value: 35A19
  misc_feature: MA Experiment 20000535 PARAMETER Experiment Name: Zm_Hybrid_Seed_Dev_P Parameter: Tissue Value: Embryo vs. Unfert Floret
ccaccacaaccaccaaccaacgggcgtgcccaccacgcggcgccgttggggttggcgggcgccatgggggcgccgagcagccgcgcgctggcgctgggcgcggccttcctgctgctcctcgtcgcgctgccctccgccttcctctacctcacctcctccgcggccacccgcgccaccctcctcgacctcaagcccttctccgccaggtgcgcgcccgcagtcgcgccgctccgcgtcttcatgtacgacctgcctgcgcgcttccacgtcgccatgatgggggccgccgccggcgcggggttccccgcgtggccgccgtccgcgggcgggatcaggcgccagcacagcgtggagtactggatgatggcgtcgctccaggatgggggcgcgggaccggagcggggaagggaggccgtcagggtgcgggatcctgacgccgccgacgccttcttcgtgcccttcttctcctcgctcagcttcaacgtgcacggtcgcaacatgaccgaccctgacaccgaggccgaccgcctcctgcaggttgaacttgtggatattctctggaagtctaaatattggcaacgttctgcgggccgtgaccatgtcattcctatgcatcaccctaatgctttcagattcctgcgagcaatggtgaatgcatctattcttatagtttcagactttgggagatacacaaaggaactggcttccctgaggaaagatgttgtggcaccatatgtgcatgttgtgggttccttccttgatgacgatccacctgatccatttgaggctcgccatacactgcttttctttcgaggccgtactgtcaggaaagatgaagggaaaatccggtcaaaacttgagaagatattaaaaggcaaggaaggggtgcgctttgaggatagcattgccacgggcgacggcattaacatatctacagaaggtatgcggtcatcaaagttttgtctccaccctgctggggacactccttcctcatgccgcctgtttgatgccatagtcagtcattgtgttcctgtgatagtcagcagtcgaatcgagctcccttttgaagatgagattgattacagtgagttctcccttttcttctccgttgaagaggctctaagacctgattacttgctgaacgagctcagacaggtccccaaaaggaagtgggttgatatgtggttgaagcttaagaatgtctcccatcattatgaattccagtatccccccaggaagggcgacgcggtgaacatgatatggaggcaggtgaggcacaagatccccgcagttaaccttgctattcacaggaacagaagactgaaaattccagactggtggggataatgattggtggtgaatcgtgtacatattaccatatccactgttagtcctggttattttcggtgcgttatgatggaaacattgctcaccgtcctttgtgaaccaaagtgttcatcttaagatccaaggaccgagtccacaactatttgctgacaggaactgagattatc

SEQ ID NO: 14277 - protein, 448 aa, Zea mays subsp. mays
  peptide (1)..(448): Ceres Seq. ID no. 12590449
  misc_feature (79)..(398): Pfam Name: Exostosin family Pfam Description: Exostosin family
  misc_feature (22)..(448): Homolog of NCBI NO: 19386797 NR Description: OJ1485_B09.5 [Oryza sativa (japonica
  misc_feature (36)..(447): Homolog of NCBI NO: 22330483 NR Description: Exostosin family; protein id: At1g67410.1
  misc_feature (36)..(335): Homolog of NCBI NO: 7487224 NR Description: hypothetical protein T1F15.13 - Arabidopsis
  misc_feature (311)..(428): Homolog of NCBI NO: 7487224 NR Description: hypothetical protein T1F15.13 - Arabidopsis
  misc_feature (77)..(442): Homolog of NCBI NO: 18410670 NR Description: Exostosin family; protein id: At1g74680.1, by cDNA: gi_16209708 [Arabidopsis thaliana] At1g74680/F1M20_36 [Arabidopsis thaliana]
  misc_feature (77)..(442): Homolog of NCBI NO: 25406363 NR Description: F25A4.34 [imported] - Arabidopsis thaliana
  misc_feature (31)..(440): Homolog of NCBI NO: 15230692 NR Description: Exostosin family; protein id: At3g45400.1
  misc_feature (69)..(444): Homolog of NCBI NO: 15228598 NR Description: Exostosin family; protein id: At3g03650.1 thaliana] >gi|6091757|gb|AAF03467.1|AC009327_6 hypothetical
  misc_feature (29)..(441): Homolog of NCBI NO: 34899802 NR Description: OJ1092_A07.9 [Oryza sativa (japonica
  misc_feature (29)..(441): Homolog of NCBI NO: 30686300 NR Description: Exostosin family [Arabidopsis thaliana]
PPQPPTNGRAHHAAPLGLAGAMGAPSSRALALGAAFLLLLVALPSAFLYLTSSAATRATLLDLKPFSARCAPAVAPLRVFMYDLPARFHVAMMGAAAGAGFPAWPPSAGGIRRQHSVEYWMMASLQDGGAGPERGREAVRVRDPDAADAFFVPFFSSLSFNVHGRNMTDPDTEADRLLQVELVDILWKSKYWQRSAGRDHVIPMHHPNAFRFLRAMVNASILIVSDFGRYTKELASLRKDVVAPYVHVVGSFLDDDPPDPFEARHTLLFFRGRTVRKDEGKIRSKLEKILKGKEGVRFEDSIATGDGINISTEGMRSSKFCLHPAGDTPSSCRLFDAIVSHCVPVIVSSRIELPFEDEIDYSEFSLFFSVEEALRPDYLLNELRQVPKRKWVDMWLKLKNVSHHYEFQYPPRKGDAVNMIWRQVRHKIPAVNLAIHRNRRLKIPDWWG

SEQ ID NO: 14278 - protein, 427 aa, Zea mays subsp. mays
  peptide (1)..(427): Ceres Seq. ID no. 12590450
  misc_feature (58)..(377): Pfam Name: Exostosin family Pfam Description: Exostosin family
  misc_feature (1)..(427): Homolog of NCBI NO: 19386797 NR Description: OJ1485_B09.5 [Oryza sativa (japonica
  misc_feature (15)..(426): Homolog of NCBI NO: 22330483 NR Description: Exostosin family; protein id: At1g67410.1
  misc_feature (15)..(314): Homolog of NCBI NO: 7487224 NR Description: hypothetical protein T1F15.13 - Arabidopsis
  misc_feature (290)..(407): Homolog of NCBI NO: 7487224 NR Description: hypothetical protein T1F15.13 - Arabidopsis
  misc_feature (56)..(421): Homolog of NCBI NO: 18410670 NR Description: Exostosin family; protein id: At1g74680.1, by cDNA: gi_16209708 [Arabidopsis thaliana] At1g74680/F1M20_36 [Arabidopsis thaliana]
  misc_feature (56)..(421): Homolog of NCBI NO: 25406363 NR Description: F25A4.34 [imported] - Arabidopsis thaliana
  misc_feature (10)..(419): Homolog of NCBI NO: 15230692 NR Description: Exostosin family; protein id: At3g45400.1
  misc_feature (48)..(423): Homolog of NCBI NO: 15228598 NR Description: Exostosin family; protein id: At3g03650.1 thaliana] >gi|6091757|gb|AAF03467.1|AC009327_6 hypothetical
  misc_feature (8)..(420): Homolog of NCBI NO: 34899802 NR Description: OJ1092_A07.9 [Oryza sativa (japonica
  misc_feature (8)..(420): Homolog of NCBI NO: 30686300 NR Description: Exostosin family [Arabidopsis thaliana]
MGAPSSRALALGAAFLLLLVALPSAFLYLTSSAATRATLLDLKPFSARCAPAVAPLRVFMYDLPARFHVAMMGAAAGAGFPAWPPSAGGIRRQHSVEYWMMASLQDGGAGPERGREAVRVRDPDAADAFFVPFFSSLSFNVHGRNMTDPDTEADRLLQVELVDILWKSKYWQRSAGRDHVIPMHHPNAFRFLRAMVNASILIVSDFGRYTKELASLRKDVVAPYVHVVGSFLDDDPPDPFEARHTLLFFRGRTVRKDEGKIRSKLEKILKGKEGVRFEDSIATGDGINISTEGMRSSKFCLHPAGDTPSSCRLFDAIVSHCVPVIVSSRIELPFEDEIDYSEFSLFFSVEEALRPDYLLNELRQVPKRKWVDMWLKLKNVSHHYEFQYPPRKGDAVNMIWRQVRHKIPAVNLAIHRNRRLKIPDWWG

SEQ ID NO: 14279 - protein, 368 aa, Zea mays subsp. mays
  peptide (1)..(368): Ceres Seq. ID no. 12590451
  misc_feature (1)..(318): Pfam Name: Exostosin family Pfam Description: Exostosin family
  misc_feature (1)..(368): Homolog of NCBI NO: 19386797 NR Description: OJ1485_B09.5 [Oryza sativa (japonica
  misc_feature (1)..(367): Homolog of NCBI NO: 22330483 NR Description: Exostosin family; protein id: At1g67410.1
  misc_feature (1)..(255): Homolog of NCBI NO: 7487224 NR Description: hypothetical protein T1F15.13 - Arabidopsis
  misc_feature (231)..(348): Homolog of NCBI NO: 7487224 NR Description: hypothetical protein T1F15.13 - Arabidopsis
  misc_feature (1)..(362): Homolog of NCBI NO: 18410670 NR Description: Exostosin family; protein id: At1g74680.1, by cDNA: gi_16209708 [Arabidopsis thaliana] At1g74680/F1M20_36 [Arabidopsis thaliana]
  misc_feature (1)..(362): Homolog of NCBI NO: 25406363 NR Description: F25A4.34 [imported] - Arabidopsis thaliana
  misc_feature (1)..(360): Homolog of NCBI NO: 15230692 NR Description: Exostosin family; protein id: At3g45400.1
  misc_feature (1)..(364): Homolog of NCBI NO: 15228598 NR Description: Exostosin family; protein id: At3g03650.1 thaliana] >gi|6091757|gb|AAF03467.1|AC009327_6 hypothetical
  misc_feature (1)..(361): Homolog of NCBI NO: 34899802 NR Description: OJ1092_A07.9 [Oryza sativa (japonica
  misc_feature (1)..(361): Homolog of NCBI NO: 30686300 NR Description: Exostosin family [Arabidopsis thaliana]
MYDLPARFHVAMMGAAAGAGFPAWPPSAGGIRRQHSVEYWMMASLQDGGAGPERGREAVRVRDPDAADAFFVPFFSSLSFNVHGRNMTDPDTEADRLLQVELVDILWKSKYWQRSAGRDHVIPMHHPNAFRFLRAMVNASILIVSDFGRYTKELASLRKDVVAPYVHVVGSFLDDDPPDPFEARHTLLFFRGRTVRKDEGKIRSKLEKILKGKEGVRFEDSIATGDGINISTEGMRSSKFCLHPAGDTPSSCRLFDAIVSHCVPVIVSSRIELPFEDEIDYSEFSLFFSVEEALRPDYLLNELRQVPKRKWVDMWLKLKNVSHHYEFQYPPRKGDAVNMIWRQVRHKIPAVNLAIHRNRRLKIPDWWG

SEQ ID NO: 14280 - DNA, 422 bp, Zea mays subsp. mays
  misc_feature (1)..(422): Ceres Seq. ID no. 5761283
  misc_feature: MA Experiment ID: 108527 Result: Down-regulated in Transcription
  misc_feature: MA Experiment 108527 PARAMETER Experiment Name: Zm_5mM_NO_P Parameter: Age (day) Value: 8
  misc_feature: MA Experiment 108527 PARAMETER Experiment Name: Zm_5mM_NO_P Parameter: Organism Value: Zea mays
  misc_feature: MA Experiment 108527 PARAMETER Experiment Name: Zm_5mM_NO_P Parameter: Plant Line Value: 35A19
  misc_feature: MA Experiment 108527 PARAMETER Experiment Name: Zm_5mM_NO_P Parameter: Timepoint (hr) Value: 6
  misc_feature: MA Experiment 108527 PARAMETER Experiment Name: Zm_5mM_NO_P Parameter: Tissue Value: Aerial
  misc_feature: MA Experiment 108527 PARAMETER Experiment Name: Zm_5mM_NO_P Parameter: Treatment Value: 5mM NO vs. No Treatment
cgaaaaatctaccgtgcggagggggaagagggagaggccaggagaggaaagcctgcagccaccatgcattccgacctctggatctcgcgtctcacggccgccaagcggcagtttgcgctgcagcgcgcgcagcgccagcacgccgccccggcatcccatcacgatcggatttgggtatgatgatatcgaacctgaggatgatttgcactcagacttcccatgcccttactgttatgaagatcatgatgttgcttctctctgcgcccatttggaggacgagcaccctttcgagtctaaaattgtgtcttgcccagtttgctcagctaggatttcgaaggacttggtggatcatataacccttcagcatggctacctatttaaaatatccttcttagatgattatatctttttagacatgtttt

SEQ ID NO: 14281 - protein, 140 aa, Zea mays subsp. mays
  peptide (1)..(140): Ceres Seq. ID no. 5761284
  misc_feature (31)..(128): Pfam Name: Drought induced 19 protein (Di19) Pfam Description: Drought induced 19 protein (Di19)
  misc_feature (31)..(128): Homolog of NCBI NO: 18377875 NR Description: AT3g06760/F3E22_10 [Arabidopsis thaliana]
  misc_feature (58)..(128): Homolog of NCBI NO: 25992529 NR Description: fiber protein Fb2 [Gossypium barbadense]
  misc_feature (58)..(131): Homolog of NCBI NO: 7485240 NR Description: hypothetical protein A_IG002P16.10 - Arabidopsis >gi|2191171|gb|AAB61057.1| similar to A. thaliana DI19 mRNA
  misc_feature (58)..(128): Homolog of NCBI NO: 1076316 NR Description: drought-induced protein Di19 - Arabidopsis
  misc_feature (58)..(128): Homolog of NCBI NO: 15028023 NR Description: unknown protein [Arabidopsis thaliana]
  misc_feature (58)..(129): Homolog of NCBI NO: 15240426 NR Description: drought-induced protein - like; protein id:
  misc_feature (26)..(128): Homolog of NCBI NO: 13937216 NR Description: AT5g49230/K21P3_11 [Arabidopsis thaliana]
  misc_feature (58)..(128): Homolog of NCBI NO: 28393233 NR Description: unknown protein [Arabidopsis thaliana]
  misc_feature (26)..(128): Homolog of NCBI NO: 15239827 NR Description: drought-induced protein Di19-like protein; id: At5g49230.1, supported by cDNA: gi_13937215 [Arabidopsis
  misc_feature (61)..(133): Homolog of NCBI NO: 3377806 NR Description: contains similarity to Arabidopsis thaliana
EKSTVRRGKRERPGEESLQPPCIPTSGSRVSRPPSGSLRCSARSASTPPRHPITIGFGYDDIEPEDDLHSDFPCPYCYEDHDVASLCAHLEDEHPFESKIVSCPVCSARISKDLVDHITLQHGYLFKISFLDDYIFLDMF

SEQ ID NO: 14282 - protein, 117 aa, Zea mays subsp. mays
  peptide (1)..(117): Ceres Seq. ID no. 5761285
KNLPCGGGRGRGQERKACSHHAFRPLDLASHGRQAAVCAAARAAPARRPGIPSRSDLGMMISNLRMICTQTSHALTVMKIMMLLLSAPIWRTSTLSSLKLCLAQFAQLGFRRTWWII

SEQ ID NO: 14283 - DNA, 2939 bp, Zea mays subsp. mays
  misc_feature (1)..(2939): Ceres Seq. ID no. 12435700
  misc_feature: MA Experiment ID: 108527 Result: Up-regulated in Transcription
  misc_feature: MA Experiment 108527 PARAMETER Experiment Name: Zm_5mM_NO_P Parameter: Age (day) Value: 8
  misc_feature: MA Experiment 108527 PARAMETER Experiment Name: Zm_5mM_NO_P Parameter: Organism Value: Zea mays
  misc_feature: MA Experiment 108527 PARAMETER Experiment Name: Zm_5mM_NO_P Parameter: Plant Line Value: 35A19
  misc_feature: MA Experiment 108527 PARAMETER Experiment Name: Zm_5mM_NO_P Parameter: Timepoint (hr) Value: 6
  misc_feature: MA Experiment 108527 PARAMETER Experiment Name: Zm_5mM_NO_P Parameter: Tissue Value: Aerial
  misc_feature: MA Experiment 108527 PARAMETER Experiment Name: Zm_5mM_NO_P Parameter: Treatment Value: 5mM NO vs. No Treatment
  misc_feature: MA Experiment ID: 108544 Result: Up-regulated in Transcription
ccaggacgacaactcccaggtcccgactcccccaaatttcccccttcccttccgcctcgcctccagccaccgcgtccgcctcgcctccagccaccgcgtccgcctccgatggcgtcggcggcggggtcctcgaacgtgatgctcgcgatcaacgagaagaaaacgatcaccactgacctctaccgcccgctgcgcctctacatcgcctccacctactcggaacgcgaggccgctgcggccgacgacgaccttagcgtggtgtgcgacctccgcgctgctgtcgagaagccctccctcccggatccgtcctccctcgagcagcgccgcgacgcgctcctcgcctacgcgcgggctctggcactcgtggagccccgcttccccatctcccccgatcgcgcccacgtccactccctcaccttcacctggcacgacgcattcaaggggaacaagaagtgcgccctcgcctccatccacctcgagaaggcatccgtgctctttaacctcggcgccgtctactcccagatcgcgctcgccgcggaccgctcgactgacgtcgggatcaggatcgcgtgcggcgccttccagagtgcggcgggggcgttcgcgtggctcagggagagcggggccgcggcgaaggctgtcgctgcggggaccaccaccgtggacatcacgcccgagtgcgccggcatgctggagaaactcatgctcgcgcaggcgcaagaatgcttcttcgagaaggtcataggtggagggaagccacccgcgctgtgctccaaggtggcgcggcaggttggcatactctatgaagaagcatacacagctctcagtgcatctcctctaagtcagcactttgataagacatgggtgtcccatgtccagcttaaagctgctcaattctacgccgatgcttgctacaggtattcactggatcttcatgagaaagaagaaattgctgaggaaattgcacgtttaaagattggtatgagtgccttggcagatgctaagaagactacgaagggagttgctgcccaacttctggattccgtcaacaagctggaaagtaacatgaaaaccaacttggaaagggctatgaaggagaatgatcgtgtttacttgatgcgggttccagctgctggttccttgggtgccctccctgcagcgtcccttgtaaaacctacctctttggctgaagttttagatgccagcaaggaaaggcttttttcatcacttgtgcctgatggcagcatgaaagcactttctaagtacacagagatggtagataatagtatccggacccaggctgagaaattgcagcaagctagtgagatcactagagtcaggctgaaggaaatggacttaccagattctattctttcattggaaggaaatataaccttgcccatggatctgaaggaagacgtagaggctgtgcagataagcggtggccctgctggcttagaatctgagttgcagcaacttagggatttgagcagggtcaatcaggaactacttgtccagactgaagagcttctacagaaggaggcgaatgaagacgctcaatttcgtacacaatttgggagtcgttggactagacctcaatcaagcaccctaacaaagaatattcaggatagattgaatctgtttgcttctaatttgaagagagctgctgatagtgattctctgattgaacgaggcgtgaaggagaactattcattgatgtctatccttgacaaaagaccgatagagtcttcacttccaagtatttccaggcctatcatgtccttggatggaaatgaagatgccattgttggagccctgaaacaaagcttgagacaactggagtctcttggcgcacaaagggcaggtcttgaagacatgctcaaagaaatgaaaagaaaggatgatatattgcctaagttgatggttggcgtgggatcacatgatgatcttttcaagaaggagattgctaagtatgatcctatatgtgctgatattgctgataacattgtggcacaggaacaattgttgctacaaatacaggcacaaaacgagcaatttgctgctgtattcaacctagaggattacaaagctgcccgtgagagatgttacaagcaaatcgctgctgctgttgtgaaataccaggagtttaaaaagaacatcaacgagggcctaaacttttatgtgactttacaggaagcaattggcaaaataaaacagcagtgcagcgacttcataatgacccgaaacattcagtgccgtgaaatgatggaagatgtgcagaggaagctacccggcttcagattctcgtcgtccagccgctcctctatgcagaggaatgctgcttctgtgccacctgacgagagcagcccatcaccgccaccgccgcatgcccaggctccctatgcctctccaccaggggtagactcgaggcatggatattctcaaccggaggcaagacctgcatactcgcagccataccccccatcctatggcgcgacaccgcaacagccgacgtatggtgcacaacaccccgggcagtaccagccgcctcctggccatgactgcggtcagccggcatatcctggatggcgcgggccatacccatactacaatgccccccagccgcagcaatctgtgccatgtccacaggcgccgtacaatgccactggggcttaccctccgcaccagagcaactattaccgacctcaataagtgctgcaactatttcttattattttgcttcttttttttccattgggtcttaccattctggtgtactactactgcatacgagagagttcgggtagtgtaatagcaggtatagctttgtatgatttagtggcggacccagaaagacccggaccgaagcgaccataaactataatatagtagcatataaaaaattgtacggttaaacaatgttgtcatagatgttaaag

SEQ ID NO: 14284 - protein, 903 aa, Zea mays subsp. mays
  peptide (1)..(903): Ceres Seq. ID no. 12435701
  misc_feature (46)..(208): Pfam Name: BRO1-like domain Pfam Description: BRO1-like domain
  misc_feature (37)..(901): Homolog of NCBI NO: 15218061 NR Description: unknown protein; protein id: At1g15130.1
  misc_feature (37)..(901): Homolog of NCBI NO: 23297205 NR Description: At1g15130/F9L1_7 [Arabidopsis thaliana]
  misc_feature (293)..(901): Homolog of NCBI NO: 25518358 NR Description: hypothetical protein F9L1.7 [imported] -
  misc_feature (37)..(271): Homolog of NCBI NO: 25518358 NR Description: hypothetical protein F9L1.7 [imported] -
  misc_feature (47)..(860): Homolog of NCBI NO: 19880054 NR Description: ALG-2 interacting protein X [Dictyostelium >gi|28829646|gb|AAO52162.1| similar to Dictyostelium discoideum
  misc_feature (48)..(903): Homolog of NCBI NO: 6424942 NR Description: ALG-2 interacting protein 1 [Homo sapiens]
  misc_feature (48)..(903): Homolog of NCBI NO: 13375569 NR Description: HP95 [Homo sapiens]
  misc_feature (48)..(903): Homolog of NCBI NO: 22027538 NR Description: programmed cell death 6 interacting protein; interacting protein 1 [Homo sapiens]
  misc_feature (53)..(903): Homolog of NCBI NO: 26327159 NR Description: unnamed protein product [Mus musculus]
  misc_feature (53)..(903): Homolog of NCBI NO: 6755002 NR Description: programmed cell death 6 interacting protein [Mus
PGRQLPGPDSPKFPPSLPPRLQPPRPPRLQPPRPPPMASAAGSSNVMLAINEKKTITTDLYRPLRLYIASTYSEREAAAADDDLSVVCDLRAAVEKPSLPDPSSLEQRRDALLAYARALALVEPRFPISPDRAHVHSLTFTWHDAFKGNKKCALASIHLEKASVLFNLGAVYSQIALAADRSTDVGIRIACGAFQSAAGAFAWLRESGAAAKAVAAGTTTVDITPECAGMLEKLMLAQAQECFFEKVIGGGKPPALCSKVARQVGILYEEAYTALSASPLSQHFDKTWVSHVQLKAAQFYADACYRYSLDLHEKEEIAEEIARLKIGMSALADAKKTTKGVAAQLLDSVNKLESNMKTNLERAMKENDRVYLMRVPAAGSLGALPAASLVKPTSLAEVLDASKERLFSSLVPDGSMKALSKYTEMVDNSIRTQAEKLQQASEITRVRLKEMDLPDSILSLEGNITLPMDLKEDVEAVQISGGPAGLESELQQLRDLSRVNQELLVQTEELLQKEANEDAQFRTQFGSRWTRPQSSTLTKNIQDRLNLFASNLKRAADSDSLIERGVKENYSLMSILDKRPIESSLPSISRPIMSLDGNEDAIVGALKQSLRQLESLGAQRAGLEDMLKEMKRKDDILPKLMVGVGSHDDLFKKEIAKYDPICADIADNIVAQEQLLLQIQAQNEQFAAVFNLEDYKAARERCYKQIAAAVVKYQEFKKNINEGLNFYVTLQEAIGKIKQQCSDFIMTRNIQCREMMEDVQRKLPGFRFSSSSRSSMQRNAASVPPDESSPSPPPPHAQAPYASPPGVDSRHGYSQPEARPAYSQPYPPSYGATPQQPTYGAQHPGQYQPPPGHDCGQPAYPGWRGPYPYYNAPQPQQSVPCPQAPYNATGAYPPHQSNYYRPQ

SEQ ID NO: 14285 - protein, 867 aa, Zea mays subsp. mays
  peptide (1)..(867): Ceres Seq. ID no. 12435702
  misc_feature (10)..(172): Pfam Name: BRO1-like domain Pfam Description: BRO1-like domain
  misc_feature (1)..(865): Homolog of NCBI NO: 15218061 NR Description: unknown protein; protein id: At1g15130.1
  misc_feature (1)..(865): Homolog of NCBI NO: 23297205 NR Description: At1g15130/F9L1_7 [Arabidopsis thaliana]
  misc_feature (257)..(865): Homolog of NCBI NO: 25518358 NR Description: hypothetical protein F9L1.7 [imported] -
  misc_feature (1)..(235): Homolog of NCBI NO: 25518358 NR Description: hypothetical protein F9L1.7 [imported] -
  misc_feature (11)..(824): Homolog of NCBI NO: 19880054 NR Description: ALG-2 interacting protein X [Dictyostelium >gi|28829646|gb|AAO52162.1| similar to Dictyostelium discoideum
  misc_feature (12)..(867): Homolog of NCBI NO: 6424942 NR Description: ALG-2 interacting protein 1 [Homo sapiens]
  misc_feature (12)..(867): Homolog of NCBI NO: 13375569 NR Description: HP95 [Homo sapiens]
  misc_feature (12)..(867): Homolog of NCBI NO: 22027538 NR Description: programmed cell death 6 interacting protein; interacting protein 1 [Homo sapiens]
  misc_feature (17)..(867): Homolog of NCBI NO: 26327159 NR Description: unnamed protein product [Mus musculus]
  misc_feature (17)..(867): Homolog of NCBI NO: 6755002 NR Description: programmed cell death 6 interacting protein [Mus
MASAAGSSNVMLAINEKKTITTDLYRPLRLYIASTYSEREAAAADDDLSVVCDLRAAVEKPSLPDPSSLEQRRDALLAYARALALVEPRFPISPDRAHVHSLTFTWHDAFKGNKKCALASIHLEKASVLFNLGAVYSQIALAADRSTDVGIRIACGAFQSAAGAFAWLRESGAAAKAVAAGTTTVDITPECAGMLEKLMLAQAQECFFEKVIGGGKPPALCSKVARQVGILYEEAYTALSASPLSQHFDKTWVSHVQLKAAQFYADACYRYSLDLHEKEEIAEEIARLKIGMSALADAKKTTKGVAAQLLDSVNKLESNMKTNLERAMKENDRVYLMRVPAAGSLGALPAASLVKPTSLAEVLDASKERLFSSLVPDGSMKALSKYTEMVDNSIRTQAEKLQQASEITRVRLKEMDLPDSILSLEGNITLPMDLKEDVEAVQISGGPAGLESELQQLRDLSRVNQELLVQTEELLQKEANEDAQFRTQFGSRWTRPQSSTLTKNIQDRLNLFASNLKRAADSDSLIERGVKENYSLMSILDKRPIESSLPSISRPIMSLDGNEDAIVGALKQSLRQLESLGAQRAGLEDMLKEMKRKDDILPKLMVGVGSHDDLFKKEIAKYDPICADIADNIVAQEQLLLQIQAQNEQFAAVFNLEDYKAARERCYKQIAAAVVKYQEFKKNINEGLNFYVTLQEAIGKIKQQCSDFIMTRNIQCREMMEDVQRKLPGFRFSSSSRSSMQRNAASVPPDESSPSPPPPHAQAPYASPPGVDSRHGYSQPEARPAYSQPYPPSYGATPQQPTYGAQHPGQYQPPPGHDCGQPAYPGWRGPYPYYNAPQPQQSVPCPQAPYNATGAYPPHQSNYYRPQ

SEQ ID NO: 14286 - protein, 857 aa, Zea mays subsp. mays
  peptide (1)..(857): Ceres Seq. ID no. 12435703
  misc_feature (1)..(162): Pfam Name: BRO1-like domain Pfam Description: BRO1-like domain
  misc_feature (1)..(855): Homolog of NCBI NO: 15218061 NR Description: unknown protein; protein id: At1g15130.1
  misc_feature (1)..(855): Homolog of NCBI NO: 23297205 NR Description: At1g15130/F9L1_7 [Arabidopsis thaliana]
  misc_feature (247)..(855): Homolog of NCBI NO: 25518358 NR Description: hypothetical protein F9L1.7 [imported] -
  misc_feature (1)..(225): Homolog of NCBI NO: 25518358 NR Description: hypothetical protein F9L1.7 [imported] -
  misc_feature (1)..(814): Homolog of NCBI NO: 19880054 NR Description: ALG-2 interacting protein X [Dictyostelium >gi|28829646|gb|AAO52162.1| similar to Dictyostelium discoideum
  misc_feature (2)..(857): Homolog of NCBI NO: 6424942 NR Description: ALG-2 interacting protein 1 [Homo sapiens]
  misc_feature (2)..(857): Homolog of NCBI NO: 13375569 NR Description: HP95 [Homo sapiens]
  misc_feature (2)..(857): Homolog of NCBI NO: 22027538 NR Description: programmed cell death 6 interacting protein; interacting protein 1 [Homo sapiens]
  misc_feature (7)..(857): Homolog of NCBI NO: 26327159 NR Description: unnamed protein product [Mus musculus]
  misc_feature (7)..(857): Homolog of NCBI NO: 6755002 NR Description: programmed cell death 6 interacting protein [Mus
MLAINEKKTITTDLYRPLRLYIASTYSEREAAAADDDLSVVCDLRAAVEKPSLPDPSSLEQRRDALLAYARALALVEPRFPISPDRAHVHSLTFTWHDAFKGNKKCALASIHLEKASVLFNLGAVYSQIALAADRSTDVGIRIACGAFQSAAGAFAWLRESGAAAKAVAAGTTTVDITPECAGMLEKLMLAQAQECFFEKVIGGGKPPALCSKVARQVGILYEEAYTALSASPLSQHFDKTWVSHVQLKAAQFYADACYRYSLDLHEKEEIAEEIARLKIGMSALADAKKTTKGVAAQLLDSVNKLESNMKTNLERAMKENDRVYLMRVPAAGSLGALPAASLVKPTSLAEVLDASKERLFSSLVPDGSMKALSKYTEMVDNSIRTQAEKLQQASEITRVRLKEMDLPDSILSLEGNITLPMDLKEDVEAVQISGGPAGLESELQQLRDLSRVNQELLVQTEELLQKEANEDAQFRTQFGSRWTRPQSSTLTKNIQDRLNLFASNLKRAADSDSLIERGVKENYSLMSILDKRPIESSLPSISRPIMSLDGNEDAIVGALKQSLRQLESLGAQRAGLEDMLKEMKRKDDILPKLMVGVGSHDDLFKKEIAKYDPICADIADNIVAQEQLLLQIQAQNEQFAAVFNLEDYKAARERCYKQIAAAVVKYQEFKKNINEGLNFYVTLQEAIGKIKQQCSDFIMTRNIQCREMMEDVQRKLPGFRFSSSSRSSMQRNAASVPPDESSPSPPPPHAQAPYASPPGVDSRHGYSQPEARPAYSQPYPPSYGATPQQPTYGAQHPGQYQPPPGHDCGQPAYPGWRGPYPYYNAPQPQQSVPCPQAPYNATGAYPPHQSNYYRPQ

SEQ ID NO: 14287 - DNA, 1329 bp, Zea mays subsp. mays
  misc_feature (1)..(1329): Ceres Seq. ID no. 13503166
  misc_feature: MA Experiment ID: 108687 Result: Down-regulated in Transcription
  misc_feature: MA Experiment 108687 PARAMETER Experiment Name: Zm_Embryos-Flowers__P Parameter: Tissue Value: Embryo vs. Aerial+
gctttaaatccgcctcctcccagcgtctccctcctcccggcctgtcccctcacctccctccccctatctctccaccgccgcagctagctgcgacgtcatgcactcgccggcgccaccgccaccgcatactatctacaattagccagccgtaggcttacctatcctgtgtcaagcaagcctctcgcaagcaacaaggaaggaagctagctagttttatagctgctgtcggcggcggcggctgaagcgacgtgcctgagctaggatttaggttgagatcaggagagggagaaggcggcggcgatggggcgcgggaaggtgcagctgaagcggatcgagaacaagatcaaccgccaggtgacattctccaagcgccgctcggggctactcaagaaggcgcacgagatctccgtgctctgcgacgccgaggtcgcgctcatcatcttctccaccaagggcaagctctacgagtactctaccgattcatgtatggacaaaattcttgaacggtatgagcgctactcctatgcagaaaaggttctcatttccgcagaatatgaaactcagggcaattggtgccatgaatatagaaaactaaaggcgaaggtcgagacaatacagaaatgtcaaaagcacctcatgggagaggatcttgaaactttgaatctcaaagagcttcagcaactagagcagcagctggagagttcactgaaacatatcagaacaaggaagagccagcttatggtcgagtcaatttcagcgctccaacggaaggagaagtcactgcaggaggagaacaaggttctgcagaaggagctcgcggagaagcagaaagaccagcggcagcaagtgcaacgggaccaaactcaacagcagaccagttcgtcttccacgtccttcatgttaagggaagctgccccaacaacaaatgtcagcatcttccctgtggcagcaggcgggagggtggtggaaggggcagcagcgcagccgcaggctcgcgttggactgccaccatggatgcttagccatctgagctgctgaaggtttgccctcaccgtcgcgatgtgatagcccaaaatccagcaagtcttccccggaccccggactgtccccgcttctccgcctggtgcagtatcgtcgtgatcgcgagaagcagcagcagcggtttgccgtattttttaccactgtgtataagtagcatatctgcaatgtgtatattttgttcaccgttcctgctggggcggccgcacggtactttacgcatgtaatatatgtgcttcatcaaatcactttcactaccatagcatgtgccggtttgtggtagtttcatgt

SEQ ID NO: 14288 - protein, 245 aa, Zea mays subsp. mays
  peptide (1)..(245): Ceres Seq. ID no. 13503167
  misc_feature (75)..(174): Pfam Name: K-box region Pfam Description: K-box region
  misc_feature (75)..(174): Pfam Name: K-box region Pfam Description: K-box region
  misc_feature (1)..(245): Homolog of NCBI NO: 29372764 NR Description: m4 [Zea mays]
  misc_feature (1)..(244): Homolog of NCBI NO: 29372748 NR Description: putative MADS-domain transcription factor [Zea
  misc_feature (1)..(244): Homolog of NCBI NO: 21070923 NR Description: AP1-like MADS-box protein [Oryza sativa (japonica
  misc_feature (1)..(244): Homolog of NCBI NO: 6606070 NR Description: MADS14 protein [Oryza sativa]
  misc_feature (1)..(244): Homolog of NCBI NO: 12019658 NR Description: FDRMADS6 [Oryza sativa]
  misc_feature (1)..(244): Homolog of NCBI NO: 29372748 NR Description: putative MADS-domain transcription factor [Zea
  misc_feature (1)..(244): Homolog of NCBI NO: 6606070 NR Description: MADS14 protein [Oryza sativa]
  misc_feature (1)..(244): Homolog of NCBI NO: 28630953 NR Description: MADS1 [Lolium perenne]
  misc_feature (1)..(244): Homolog of NCBI NO: 30721847 NR Description: MADS-box protein TaVRT-1 [Triticum aestivum]
  misc_feature (1)..(244): Homolog of NCBI NO: 4204232 NR Description: MADS-box protein 1 [Lolium temulentum]
  misc_feature (1)..(244): Homolog of NCBI NO: 30090030 NR Description: MADS box transcription factor AP1 [Triticum
  misc_feature (1)..(244): Homolog of NCBI NO: 7592642 NR Description: AP1-like MADS box protein [Oryza sativa]
  misc_feature (1)..(244): Homolog of NCBI NO: 12019658 NR Description: FDRMADS6 [Oryza sativa]
  misc_feature (1)..(244): Homolog of NCBI NO: 21070923 NR Description: AP1-like MADS-box protein [Oryza sativa (japonica
  misc_feature (1)..(245): Homolog of NCBI NO: 29372764 NR Description: m4 [Zea mays]
  misc_feature (1)..(244): Homolog of NCBI NO: 7592642 NR Description: AP1-like MADS box protein [Oryza sativa]
  misc_feature (1)..(244): Homolog of NCBI NO: 30090030 NR Description: MADS box transcription factor AP1 [Triticum
  misc_feature (1)..(244): Homolog of NCBI NO: 4204232 NR Description: MADS-box protein 1 [Lolium temulentum]
  misc_feature (1)..(244): Homolog of NCBI NO: 30721847 NR Description: MADS-box protein TaVRT-1 [Triticum aestivum]
  misc_feature (1)..(244): Homolog of NCBI NO: 28630953 NR Description: MADS1 [Lolium perenne]
MGRGKVQLKRIENKINRQVTFSKRRSGLLKKAHEISVLCDAEVALIIFSTKGKLYEYSTDSCMDKILERYERYSYAEKVLISAEYETQGNWCHEYRKLKAKVETIQKCQKHLMGEDLETLNLKELQQLEQQLESSLKHIRTRKSQLMVESISALQRKEKSLQEENKVLQKELAEKQKDQRQQVQRDQTQQQTSSSSTSFMLREAAPTTNVSIFPVAAGGRVVEGAAAQPQARVGLPPWMLSHLSC

SEQ ID NO: 14289 - protein, 183 aa, Zea mays subsp. mays
  peptide (1)..(183): Ceres Seq. ID no. 13503168
  misc_feature (13)..(112): Pfam Name: K-box region Pfam Description: K-box region
  misc_feature (13)..(112): Pfam Name: K-box region Pfam Description: K-box region
  misc_feature (1)..(183): Homolog of NCBI NO: 29372764 NR Description: m4 [Zea mays]
  misc_feature (1)..(182): Homolog of NCBI NO: 29372748 NR Description: putative MADS-domain transcription factor [Zea
  misc_feature (1)..(182): Homolog of NCBI NO: 21070923 NR Description: AP1-like MADS-box protein [Oryza sativa (japonica
  misc_feature (1)..(182): Homolog of NCBI NO: 6606070 NR Description: MADS14 protein [Oryza sativa]
  misc_feature (1)..(182): Homolog of NCBI NO: 12019658 NR Description: FDRMADS6 [Oryza sativa]
  misc_feature (1)..(182): Homolog of NCBI NO: 29372748 NR Description: putative MADS-domain transcription factor [Zea
  misc_feature (1)..(182): Homolog of NCBI NO: 6606070 NR Description: MADS14 protein [Oryza sativa]
  misc_feature (1)..(182): Homolog of NCBI NO: 28630953 NR Description: MADS1 [Lolium perenne]
  misc_feature (1)..(182): Homolog of NCBI NO: 30721847 NR Description: MADS-box protein TaVRT-1 [Triticum aestivum]
  misc_feature (1)..(182): Homolog of NCBI NO: 4204232 NR Description: MADS-box protein 1 [Lolium temulentum]
  misc_feature (1)..(182): Homolog of NCBI NO: 30090030 NR Description: MADS box transcription factor AP1 [Triticum
  misc_feature (1)..(182): Homolog of NCBI NO: 7592642 NR Description: AP1-like MADS box protein [Oryza sativa]
  misc_feature (1)..(182): Homolog of NCBI NO: 12019658 NR Description: FDRMADS6 [Oryza sativa]
  misc_feature (1)..(182): Homolog of NCBI NO: 21070923 NR Description: AP1-like MADS-box protein [Oryza sativa (japonica
  misc_feature (1)..(183): Homolog of NCBI NO: 29372764 NR Description: m4 [Zea mays]
  misc_feature (1)..(182): Homolog of NCBI NO: 7592642 NR Description: AP1-like MADS box protein [Oryza sativa]
  misc_feature (1)..(182): Homolog of NCBI NO: 30090030 NR Description: MADS box transcription factor AP1 [Triticum
  misc_feature (1)..(182): Homolog of NCBI NO: 4204232 NR Description: MADS-box protein 1 [Lolium temulentum]
  misc_feature (1)..(182): Homolog of NCBI NO: 30721847 NR Description: MADS-box protein TaVRT-1 [Triticum aestivum]
  misc_feature (1)..(182): Homolog of NCBI NO: 28630953 NR Description: MADS1 [Lolium perenne]
MDKILERYERYSYAEKVLISAEYETQGNWCHEYRKLKAKVETIQKCQKHLMGEDLETLNLKELQQLEQQLESSLKHIRTRKSQLMVESISALQRKEKSLQEENKVLQKELAEKQKDQRQQVQRDQTQQQTSSSSTSFMLREAAPTTNVSIFPVAAGGRVVEGAAAQPQARVGLPPWMLSHLSC

SEQ ID NO: 14290 - protein, 133 aa, Zea mays subsp. mays
  peptide (1)..(133): Ceres Seq. ID no. 13503169
  misc_feature (1)..(62): Pfam Name: K-box region Pfam Description: K-box region
  misc_feature (1)..(62): Pfam Name: K-box region Pfam Description: K-box region
  misc_feature (1)..(133): Homolog of NCBI NO: 29372764 NR Description: m4 [Zea mays]
  misc_feature (1)..(132): Homolog of NCBI NO: 29372748 NR Description: putative MADS-domain transcription factor [Zea
  misc_feature (1)..(132): Homolog of NCBI NO: 21070923 NR Description: AP1-like MADS-box protein [Oryza sativa (japonica
  misc_feature (1)..(132): Homolog of NCBI NO: 6606070 NR Description: MADS14 protein [Oryza sativa]
  misc_feature (1)..(132): Homolog of NCBI NO: 12019658 NR Description: FDRMADS6 [Oryza sativa]
  misc_feature (1)..(132): Homolog of NCBI NO: 29372748 NR Description: putative MADS-domain transcription factor [Zea
  misc_feature (1)..(132): Homolog of NCBI NO: 6606070 NR Description: MADS14 protein [Oryza sativa]
  misc_feature (1)..(132): Homolog of NCBI NO: 28630953 NR Description: MADS1 [Lolium perenne]
  misc_feature (1)..(132): Homolog of NCBI NO: 30721847 NR Description: MADS-box protein TaVRT-1 [Triticum aestivum]
  misc_feature (1)..(132): Homolog of NCBI NO: 4204232 NR Description: MADS-box protein 1 [Lolium temulentum]
  misc_feature (1)..(132): Homolog of NCBI NO: 30090030 NR Description: MADS box transcription factor AP1 [Triticum
  misc_feature (1)..(132): Homolog of NCBI NO: 7592642 NR Description: AP1-like MADS box protein [Oryza sativa]
  misc_feature (1)..(132): Homolog of NCBI NO: 12019658 NR Description: FDRMADS6 [Oryza sativa]
  misc_feature (1)..(132): Homolog of NCBI NO: 21070923 NR Description: AP1-like MADS-box protein [Oryza sativa (japonica
  misc_feature (1)..(133): Homolog of NCBI NO: 29372764 NR Description: m4 [Zea mays]
  misc_feature (1)..(132): Homolog of NCBI NO: 7592642 NR Description: AP1-like MADS box protein [Oryza sativa]
  misc_feature (1)..(132): Homolog of NCBI NO: 30090030 NR Description: MADS box transcription factor AP1 [Triticum
  misc_feature (1)..(132): Homolog of NCBI NO: 4204232 NR Description: MADS-box protein 1 [Lolium temulentum]
  misc_feature (1)..(132): Homolog of NCBI NO: 30721847 NR Description: MADS-box protein TaVRT-1 [Triticum aestivum]
  misc_feature (1)..(132): Homolog of NCBI NO: 28630953 NR Description: MADS1 [Lolium perenne]
MGEDLETLNLKELQQLEQQLESSLKHIRTRKSQLMVESISALQRKEKSLQEENKVLQKELAEKQKDQRQQVQRDQTQQQTSSSSTSFMLREAAPTTNVSIFPVAAGGRVVEGAAAQPQARVGLPPWMLSHLSC

SEQ ID NO: 14291 - DNA, 2088 bp, Zea mays subsp. mays
  misc_feature (1)..(2088): Ceres Seq. ID no. 12435689
  misc_feature: MA Experiment ID: 108523 Result: Up-regulated in Transcription
  misc_feature: MA Experiment 108523 PARAMETER Experiment Name: Zm_42deg_Heat_P Parameter: Age (day) Value: 8
  misc_feature: MA Experiment 108523 PARAMETER Experiment Name: Zm_42deg_Heat_P Parameter: Organism Value: Zea mays
  misc_feature: MA Experiment 108523 PARAMETER Experiment Name: Zm_42deg_Heat_P Parameter: Plant Line Value: 35A19
  misc_feature: MA Experiment 108523 PARAMETER Experiment Name: Zm_42deg_Heat_P Parameter: Temperature (deg C) Value: 42 vs. 22
  misc_feature: MA Experiment 108523 PARAMETER Experiment Name: Zm_42deg_Heat_P Parameter: Timepoint (hr) Value: 6
  misc_feature: MA Experiment 108523 PARAMETER Experiment Name: Zm_42deg_Heat_P Parameter: Tissue Value: Aerial
  misc_feature: MA Experiment ID: 108529 Result: Down-regulated in Transcription
  misc_feature: MA Experiment 108529 PARAMETER Experiment Name: Zm_Imbibed_Seeds_P Parameter: Age (day) Value: 5 vs. 2
  misc_feature: MA Experiment 108529 PARAMETER Experiment Name: Zm_Imbibed_Seeds_P Parameter: Organism Value: Zea mays
  misc_feature: MA Experiment 108529 PARAMETER Experiment Name: Zm_Imbibed_Seeds_P Parameter: Plant Line Value: 35A19
  misc_feature: MA Experiment 108529 PARAMETER Experiment Name: Zm_Imbibed_Seeds_P Parameter: Tissue Value: Roots vs. Embryo
  misc_feature: MA Experiment ID: 108543 Result: Down-regulated in Transcription
  misc_feature: MA Experiment ID: 108545 Result: Up-regulated in Transcription
  misc_feature: MA Experiment 108545 PARAMETER Experiment Name: Zm_Imbibed_Seeds_P Parameter: Age (day) Value: 3 vs. 2
  misc_feature: MA Experiment 108545 PARAMETER Experiment Name: Zm_Imbibed_Seeds_P Parameter: Organism Value: Zea mays
  misc_feature: MA Experiment 108545 PARAMETER Experiment Name: Zm_Imbibed_Seeds_P Parameter: Plant Line Value: 35A19
  misc_feature: MA Experiment 108545 PARAMETER Experiment Name: Zm_Imbibed_Seeds_P Parameter: Tissue Value: Aerial vs. Embryo
  misc_feature: MA Experiment ID: 108687 Result: Up-regulated in Transcription
  misc_feature: MA Experiment 108687 PARAMETER Experiment Name: Zm_Embryos-Flowers__P Parameter: Tissue Value: Embryo vs. Aerial+
  misc_feature: MA Experiment ID: 20000535 Result: Up-regulated in Transcription
  misc_feature: MA Experiment 20000535 PARAMETER Experiment Name: Zm_Hybrid_Seed_Dev_P Parameter: DAP Value: 30 vs. 12
  misc_feature: MA Experiment 20000535 PARAMETER Experiment Name: Zm_Hybrid_Seed_Dev_P Parameter: Organism Value: Zea mays
  misc_feature: MA Experiment 20000535 PARAMETER Experiment Name: Zm_Hybrid_Seed_Dev_P Parameter: Plant Line Value: 35A19
  misc_feature: MA Experiment 20000535 PARAMETER Experiment Name: Zm_Hybrid_Seed_Dev_P Parameter: Tissue Value: Embryo vs. Unfert Floret
  misc_feature: MA Experiment ID: 20000626 Result: Down-regulated in Transcription
  misc_feature: MA Experiment 20000626 PARAMETER Experiment Name: Zm_Herbicide-Treatments_P Parameter: Timepoint (hr) Value: 12
  misc_feature: MA Experiment 20000626 PARAMETER Experiment Name: Zm_Herbicide-Treatments_P Parameter: Tissue Value: Aerial
  misc_feature: MA Experiment 20000626 PARAMETER Experiment Name: Zm_Herbicide-Treatments_P Parameter: Treatment Value: Roundup vs. No Treatment
tacaaaaaagtgctgcgcatatgcacacaaagggcaggaggaggaacggcacgcgcgccaggaccgcaggagcacacacctcagtgcgccagcgttctgcacctcgctagctcgtcgtgtcttgcctgcgctgtcgtcgctgacccttgagatctgcagactccatggaggctgcagcagcgacgacggcggcggcgcttcttcctcccgctcggaaggtgttcatcctgcccttgcttctcctcctggctgcatcacgagcttcgtctgatggagtgcaatatgattatagagcttacactgagtgcaaacctcaccctgagcctgctctgtacaacggtggcgtcctccgctgggcgagcaaaataacggacttcagaacggaggacgaaggcaactactccccggcatttgtgctctacaacatgtcggcggcgactgcgtacagcttctcttgctgggtgaaaatcgacgggccagaaagcgcacatgtgaaggcgaagatactgaccgtggagaacgcagcgtcgcagtgcgtcggcaccgctatcgcgcgcaacgactgctggtcttttctcaagggtggctttactctcaactccacgtctcaaacctcggtgctctatttgcagactgcgagcccaaatgcttcgacgatctcaatcagaagcccctccttgcagccattctcacccgatgagtggaatcagcacagggaggagcgtatccaacagattcggaagcgtttcgtgaacctgcatgtctccgacggcaacggcagccgcgtggtcggggcggacgtggccgtgcaccagatcaccagagacttccccttcggctccgccatcagcaagagcatcctcgggaacaggccgtaccaggactggttcaacgcgcggttcaacgcggcggtgttcgagaacgagctcaagtggtacgcgacggagccgtcgcctgggaaggaggagtacgcggcggcggaccagctgctgcggttcgtgcagtccaacgacgtgacggcgcgcgggcacaacatcttctgggaggaccccaggtacacgccggcgtgggtgaagaacctgacgggcccgcagctgcgcgccgcggtggcaggccgcgtccagagcctgctgtcgcggtacaagggcgacttcgngcactgggacgtgagcaacgagatgctgcacttcgacttctacgaggaccggctgggcggcaacgccacggccgacttcttcagcacggccaggcgcgccgacccgctggccacgctcttcctcaacgacttcaacgtggtggaggcgtgcgacgacctcagctccagcgccgactcctacgtgtccaggcttcgccagctcgccgacgacgccggggtcaccttcgagggcatcgggctggagggccacttcgccaagcccaacgtcccctacgtgcgcgccgtgctcgacaagctgggcacgctccgcctgcccgtctggctcaccgaggtcgacgtcagcgccgccttcgaccacgccacgcaggccgcgtacctagaggacgtcctccgcgaaggcttcgcgcacccggccgtcgacggcatcgtgctgtggacggccatgggcgccaacgccacctgctaccagatgtgcctcacggacgccgacttcaccaacctcccggccggagacgtcgtcgacaggctgctgggggagtggcagaccaaggaggtgctgggagccaccgatgaccgcggctccttcaacttcagcgccttccacggcgagtacaggctctccgtcacctatctcaaccgcactgccgacgccaccttctcgctgcctcgcagcgacgacaccaagcacatcaacatccgcctaccgcctggacctgcagcctgatctcattattagaaatgtactactagaatttaagaactaaatatactgtggtgcatcagctgtgttaattggtacgtgtccgtggattgatacaactactactatacgcgcgcaactatctcgacctcttatgatgaaactagtacaatgagtgtgttgtgatggtacacaaattacgcatagtatctttaaaaactctattgtagtt

SEQ ID NO: 14292 - protein, 571 aa, Zea mays subsp. mays
  peptide (1)..(571): Ceres Seq. ID no. 12435690
  misc_feature (213)..(508): Pfam Name: Glycosyl hydrolase family 10 Pfam Description: Glycosyl hydrolase family 10
  misc_feature (19)..(565): Homolog of NCBI NO: 28416709 NR Description: At4g38650 [Arabidopsis thaliana]
  misc_feature (146)..(565): Homolog of NCBI NO: 15233983 NR Description: glycosyl hydrolase family 10; protein id:
  misc_feature (94)..(558): Homolog of NCBI NO: 30689830 NR Description: glycosyl hydrolase family 10 [Arabidopsis
  misc_feature (24)..(62): Homolog of NCBI NO: 30689830 NR Description: glycosyl hydrolase family 10 [Arabidopsis
  misc_feature (73)..(557): Homolog of NCBI NO: 23429644 NR Description: endoxylanase [Carica papaya]
  misc_feature (94)..(552): Homolog of NCBI NO: 15235134 NR Description: glycosyl hydrolase family 10; protein id:
  misc_feature (94)..(558): Homolog of NCBI NO: 7485619 NR Description: hypothetical protein F17I5.30 - Arabidopsis >gi|3297808|emb|CAA19866.1| putative protein [Arabidopsis >gi|7270333|emb|CAB80101.1| putative protein [Arabidopsis
  misc_feature (94)..(560): Homolog of NCBI NO: 15235131 NR Description: glycosyl hydrolase family 10; protein id:
  misc_feature (92)..(549): Homolog of NCBI NO: 37533262 NR Description: putative 1,4-beta-xylanase [Oryza sativa
  misc_feature (66)..(565): Homolog of NCBI NO: 37533260 NR Description: putative 1,4-beta-xylanase [Oryza sativa
  misc_feature (331)..(331): Xaa is any aa, unknown or other
MEAAAATTAAALLPPARKVFILPLLLLLAASRASSDGVQYDYRAYTECKPHPEPALYNGGVLRWASKITDFRTEDEGNYSPAFVLYNMSAATAYSFSCWVKIDGPESAHVKAKILTVENAASQCVGTAIARNDCWSFLKGGFTLNSTSQTSVLYLQTASPNASTISIRSPSLQPFSPDEWNQHREERIQQIRKRFVNLHVSDGNGSRVVGADVAVHQITRDFPFGSAISKSILGNRPYQDWFNARFNAAVFENELKWYATEPSPGKEEYAAADQLLRFVQSNDVTARGHNIFWEDPRYTPAWVKNLTGPQLRAAVAGRVQSLLSRYKGDFXHWDVSNEMLHFDFYEDRLGGNATADFFSTARRADPLATLFLNDFNVVEACDDLSSSADSYVSRLRQLADDAGVTFEGIGLEGHFAKPNVPYVRAVLDKLGTLRLPVWLTEVDVSAAFDHATQAAYLEDVLREGFAHPAVDGIVLWTAMGANATCYQMCLTDADFTNLPAGDVVDRLLGEWQTKEVLGATDDRGSFNFSAFHGEYRLSVTYLNRTADATFSLPRSDDTKHINIRLPPGPAA

SEQ ID NO: 14293 - protein, 484 aa, Zea mays subsp. mays
  peptide (1)..(484): Ceres Seq. ID no. 12435691
  misc_feature (126)..(421): Pfam Name: Glycosyl hydrolase family 10 Pfam Description: Glycosyl hydrolase family 10
  misc_feature (1)..(478): Homolog of NCBI NO: 28416709 NR Description: At4g38650 [Arabidopsis thaliana]
  misc_feature (59)..(478): Homolog of NCBI NO: 15233983 NR Description: glycosyl hydrolase family 10; protein id:
  misc_feature (7)..(471): Homolog of NCBI NO: 30689830 NR Description: glycosyl hydrolase family 10 [Arabidopsis
  misc_feature (1)..(470): Homolog of NCBI NO: 23429644 NR Description: endoxylanase [Carica papaya]
  misc_feature (7)..(465): Homolog of NCBI NO: 15235134 NR Description: glycosyl hydrolase family 10; protein id:
  misc_feature (7)..(471): Homolog of NCBI NO: 7485619 NR Description: hypothetical protein F17I5.30 - Arabidopsis >gi|3297808|emb|CAA19866.1| putative protein [Arabidopsis >gi|7270333|emb|CAB80101.1| putative protein [Arabidopsis
  misc_feature (7)..(473): Homolog of NCBI NO: 15235131 NR Description: glycosyl hydrolase family 10; protein id:
  misc_feature (5)..(462): Homolog of NCBI NO: 37533262 NR Description: putative 1,4-beta-xylanase [Oryza sativa
  misc_feature (1)..(478): Homolog of NCBI NO: 37533260 NR Description: putative 1,4-beta-xylanase [Oryza sativa
  misc_feature (1)..(478): Homolog of NCBI NO: 40363757 NR Description: putative 1,4-beta-xylanase [Triticum aestivum]
  misc_feature (244)..(244): Xaa is any aa, unknown or other
MSAATAYSFSCWVKIDGPESAHVKAKILTVENAASQCVGTAIARNDCWSFLKGGFTLNSTSQTSVLYLQTASPNASTISIRSPSLQPFSPDEWNQHREERIQQIRKRFVNLHVSDGNGSRVVGADVAVHQITRDFPFGSAISKSILGNRPYQDWFNARFNAAVFENELKWYATEPSPGKEEYAAADQLLRFVQSNDVTARGHNIFWEDPRYTPAWVKNLTGPQLRAAVAGRVQSLLSRYKGDFXHWDVSNEMLHFDFYEDRLGGNATADFFSTARRADPLATLFLNDFNVVEACDDLSSSADSYVSRLRQLADDAGVTFEGIGLEGHFAKPNVPYVRAVLDKLGTLRLPVWLTEVDVSAAFDHATQAAYLEDVLREGFAHPAVDGIVLWTAMGANATCYQMCLTDADFTNLPAGDVVDRLLGEWQTKEVLGATDDRGSFNFSAFHGEYRLSVTYLNRTADATFSLPRSDDTKHINIRLPPGPAA

SEQ ID NO: 14294 - DNA, 555 bp, Zea mays subsp. mays
  misc_feature (1)..(555): Ceres Seq. ID no. 3315214
  misc_feature: MA Experiment ID: 108535 Result: Down-regulated in Transcription
  misc_feature: MA Experiment 108535 PARAMETER Experiment Name: Zm_Meristem_P Parameter: Age (day) Value: 8
  misc_feature: MA Experiment 108535 PARAMETER Experiment Name: Zm_Meristem_P Parameter: Organism Value: Zea mays
  misc_feature: MA Experiment 108535 PARAMETER Experiment Name: Zm_Meristem_P Parameter: Plant Line Value: 35A19
  misc_feature: MA Experiment 108535 PARAMETER Experiment Name: Zm_Meristem_P Parameter: Tissue Value: Root Meristem vs. Above Root Meristem
  misc_feature: MA Experiment ID: 108689 Result: Down-regulated in Transcription
  misc_feature: MA Experiment 108689 PARAMETER Experiment Name: Zm_Drought_Roots_P Parameter: Age (day) Value: 9
  misc_feature: MA Experiment 108689 PARAMETER Experiment Name: Zm_Drought_Roots_P Parameter: Organism Value: Zea mays
  misc_feature: MA Experiment 108689 PARAMETER Experiment Name: Zm_Drought_Roots_P Parameter: Plant Line Value: 35A19
  misc_feature: MA Experiment 108689 PARAMETER Experiment Name: Zm_Drought_Roots_P Parameter: Timepoint (hr) Value: 24
  misc_feature: MA Experiment 108689 PARAMETER Experiment Name: Zm_Drought_Roots_P Parameter: Tissue Value: Roots
  misc_feature: MA Experiment 108689 PARAMETER Experiment Name: Zm_Drought_Roots_P Parameter: Treatment Value: Drought vs. No Drought
  misc_feature: MA Experiment ID: 20000627 Result: Up-regulated in Transcription
  misc_feature: MA Experiment 20000627 PARAMETER Experiment Name: Zm_Herbicide-Treatments_P Parameter: Timepoint (hr) Value: 12
  misc_feature: MA Experiment 20000627 PARAMETER Experiment Name: Zm_Herbicide-Treatments_P Parameter: Tissue Value: Aerial
  misc_feature: MA Experiment 20000627 PARAMETER Experiment Name: Zm_Herbicide-Treatments_P Parameter: Treatment Value: Finale vs. No Treatment
gctcattcacggcaaattaagcgagcgccggccgaggcagacacaaccagcagcaacttgcatcggcacggacgaccgattgagagcctcggcgttcgtacgccacgccaccaagagactctgtgcaaaggagcaagaatgtatccggccaagcccgccgcctccgccagcgagccggtggtcggcatccccatcagcagccccggcgcggttgcggtcgggccggtcgtcggcaagtggtcctccggcctctgcgcctgctccgacgactgcggcctctgctgcctgacgtgctggtgcccgtgcatcacgttcggccgcgtcgcggagatcgtggaccgcggcgcgacgtcgttcggcgtggcggggaccatctacacgctgctggcctgcttcacgggctgccactggatctactcctgcacgtaccgctccaggatgcgcgcgcagctcggcctccccgaagcctgctgctgcgactgctgcgtccacttctgctgcgagccctgcgcgctctcccagcagtacagggagctcaaggcccgcggattcgac

SEQ ID NO: 14295 - protein, 185 aa, Zea mays subsp. mays
  peptide (1)..(185): Ceres Seq. ID no. 3315215
  misc_feature (78)..(180): Pfam Name: Protein of unknown function, DUF614 Pfam Description: Protein of unknown function, DUF614
  misc_feature (50)..(184): Homolog of NCBI NO: 34897270 NR Description: hypothetical protein [Oryza sativa (japonica group)] >gi|28372688|gb|AAO39872.1| hypothetical protein [Oryza
  misc_feature (75)..(184): Homolog of NCBI NO: 34897268 NR Description: unknown protein [Oryza sativa (japonica
  misc_feature (78)..(184): Homolog of NCBI NO: 15223920 NR Description: unknown protein; protein id: At1g14870.1, by cDNA: gi_18252924 [Arabidopsis thaliana] F10B6.27 [Arabidopsis thaliana] >gi|18252925|gb|AAL62389.1|
  misc_feature (47)..(139): Homolog of NCBI NO: 31249752 NR Description: hypothetical protein [Oryza sativa (japonica
  misc_feature (65)..(180): Homolog of NCBI NO: 15221456 NR Description: hypothetical protein; protein id: At1g68610.1
  misc_feature (50)..(184): Homolog of NCBI NO: 34897274 NR Description: hypothetical protein [Oryza sativa (japonica group)] >gi|28372695|gb|AAO39879.1| hypothetical protein [Oryza
  misc_feature (47)..(184): Homolog of NCBI NO: 37530512 NR Description: unknown protein [Oryza sativa (japonica
  misc_feature (80)..(184): Homolog of NCBI NO: 4105794 NR Description: PGPS/D12 [Petunia x hybrida]
  misc_feature (78)..(184): Homolog of NCBI NO: 15223921 NR Description: unknown protein; protein id: At1g14880.1 thaliana] >gi|8778224|gb|AAF79233.1|AC006917_18 F10B6.29 thaliana] >gi|26452733|dbj|BAC43448.1| unknown protein
  misc_feature (64)..(184): Homolog of NCBI NO: 8272626 NR Description: ORFX [Lycopersicon esculentum] fw2.2 [Lycopersicon esculentum] >gi|27413997|gb|AAO12186.1| fw2.2 esculentum] >gi|27413999|gb|AAO12187.1| fw2.2 [Lycopersicon
AHSRQIKRAPAEADTTSSNLHRHGRPIESLGVRTPRHQETLCKGARMYPAKPAASASEPVVGIPISSPGAVAVGPVVGKWSSGLCACSDDCGLCCLTCWCPCITFGRVAEIVDRGATSFGVAGTIYTLLACFTGCHWIYSCTYRSRMRAQLGLPEACCCDCCVHFCCEPCALSQQYRELKARGFD

SEQ ID NO: 14296 - protein, 139 aa, Zea mays subsp. mays
  peptide (1)..(139): Ceres Seq. ID no. 3315216
  misc_feature (32)..(134): Pfam Name: Protein of unknown function, DUF614 Pfam Description: Protein of unknown function, DUF614
  misc_feature (4)..(138): Homolog of NCBI NO: 34897274 NR Description: hypothetical protein [Oryza sativa (japonica group)] >gi|28372695|gb|AAO39879.1| hypothetical protein [Oryza
  misc_feature (4)..(138): Homolog of NCBI NO: 34897270 NR Description: hypothetical protein [Oryza sativa (japonica group)] >gi|28372688|gb|AAO39872.1| hypothetical protein [Oryza
  misc_feature (29)..(138): Homolog of NCBI NO: 34897268 NR Description: unknown protein [Oryza sativa (japonica
  misc_feature (32)..(138): Homolog of NCBI NO: 15223920 NR Description: unknown protein; protein id: At1g14870.1, by cDNA: gi_18252924 [Arabidopsis thaliana] F10B6.27 [Arabidopsis thaliana] >gi|18252925|gb|AAL62389.1|
  misc_feature (1)..(93): Homolog of NCBI NO: 31249752 NR Description: hypothetical protein [Oryza sativa (japonica
  misc_feature (19)..(134): Homolog of NCBI NO: 15221456 NR Description: hypothetical protein; protein id: At1g68610.1
  misc_feature (1)..(138): Homolog of NCBI NO: 37530512 NR Description: unknown protein [Oryza sativa (japonica
  misc_feature (34)..(138): Homolog of NCBI NO: 4105794 NR Description: PGPS/D12 [Petunia x hybrida]
  misc_feature (32)..(138): Homolog of NCBI NO: 15223921 NR Description: unknown protein; protein id: At1g14880.1 thaliana] >gi|8778224|gb|AAF79233.1|AC006917_18 F10B6.29 thaliana] >gi|26452733|dbj|BAC43448.1| unknown protein
  misc_feature (18)..(138): Homolog of NCBI NO: 8272626 NR Description: ORFX [Lycopersicon esculentum] fw2.2 [Lycopersicon esculentum] >gi|27413997|gb|AAO12186.1| fw2.2 esculentum] >gi|27413999|gb|AAO12187.1| fw2.2 [Lycopersicon
MYPAKPAASASEPVVGIPISSPGAVAVGPVVGKWSSGLCACSDDCGLCCLTCWCPCITFGRVAEIVDRGATSFGVAGTIYTLLACFTGCHWIYSCTYRSRMRAQLGLPEACCCDCCVHFCCEPCALSQQYRELKARGFD

SEQ ID NO: 14297 - protein, 95 aa, Zea mays subsp. mays
  peptide (1)..(95): Ceres Seq. ID no. 3315217
  misc_feature (4)..(95): Homolog of NCBI NO: 26986938 NR Description: alginate regulatory protein AlgP [Pseudomonas KT2440] >gi|24981549|gb|AAN65827.1|AE016211_5 alginate regulatory
  misc_feature (22)..(95): Homolog of NCBI NO: 15600253 NR Description: polyhydroxyalkanoate synthesis protein PhaF aeruginosa PA01] >gi|11350815|pir||G83013 polyhydroxyalkanoate
  misc_feature (38)..(95): Homolog of NCBI NO: 94816 NR Description: regulatory protein algR3 - Pseudomonas aeruginosa
  misc_feature (38)..(95): Homolog of NCBI NO: 151046 NR Description: alginate regulatory protein AlgR3
  misc_feature (28)..(95): Homolog of NCBI NO: 26986938 NR Description: alginate regulatory protein AlgP [Pseudomonas KT2440] >gi|24981549|gb|AAN65827.1|AE016211_5 alginate regulatory
  misc_feature (36)..(95): Homolog of NCBI NO: 13592175 NR Description: ppg3 [Leishmania major]
  misc_feature (38)..(95): Homolog of NCBI NO: 151002 NR Description: transcription regulatory protein
  misc_feature (51)..(95): Homolog of NCBI NO: 11359723 NR Description: proteophosphoglycan, membrane-associated - Leishmania major (fragment) >gi|5420389|emb|CAB46680.1|
  misc_feature (8)..(95): Homolog of NCBI NO: 26986938 NR Description: alginate regulatory protein AlgP [Pseudomonas KT2440] >gi|24981549|gb|AAN65827.1|AE016211_5 alginate regulatory
  misc_feature (51)..(95): Homolog of NCBI NO: 25143299 NR Description: pre-mRNA splicing SR protein related RSR-1 (68.2
LIHGKLSERRPRQTQPAATCIGTDDRLRASAFVRHATKRLCAKEQECIRPSPPPPPASRWSASPSAAPARLRSGRSSASGPPASAPAPTTAASAA

SEQ ID NO: 14298 - DNA, 642 bp, Zea mays subsp. mays
  misc_feature (1)..(642): Ceres Seq. ID no. 14306056
  misc_feature: MA Experiment ID: 108530 Result: Down-regulated in Transcription
  misc_feature: MA Experiment 108530 PARAMETER Experiment Name: Zm_Imbibed_Seeds_P Parameter: Age (day) Value: 6 vs. 2
  misc_feature: MA Experiment 108530 PARAMETER Experiment Name: Zm_Imbibed_Seeds_P Parameter: Organism Value: Zea mays
  misc_feature: MA Experiment 108530 PARAMETER Experiment Name: Zm_Imbibed_Seeds_P Parameter: Plant Line Value: 35A19
  misc_feature: MA Experiment 108530 PARAMETER Experiment Name: Zm_Imbibed_Seeds_P Parameter: Tissue Value: Aerial vs. Embryo
  misc_feature: MA Experiment ID: 108535 Result: Up-regulated in Transcription
  misc_feature: MA Experiment 108535 PARAMETER Experiment Name: Zm_Meristem_P Parameter: Age (day) Value: 8
  misc_feature: MA Experiment 108535 PARAMETER Experiment Name: Zm_Meristem_P Parameter: Organism Value: Zea mays
  misc_feature: MA Experiment 108535 PARAMETER Experiment Name: Zm_Meristem_P Parameter: Plant Line Value: 35A19
  misc_feature: MA Experiment 108535 PARAMETER Experiment Name: Zm_Meristem_P Parameter: Tissue Value: Root Meristem vs. Above Root Meristem
  misc_feature: MA Experiment ID: 108544 Result: Down-regulated in Transcription
  misc_feature: MA Experiment ID: 108597 Result: Up-regulated in Transcription
  misc_feature: MA Experiment 108597 PARAMETER Experiment Name: Zm_100uM_ABA_P Parameter: Age (day) Value: 9
  misc_feature: MA Experiment 108597 PARAMETER Experiment Name: Zm_100uM_ABA_P Parameter: Organism Value: Zea mays
  misc_feature: MA Experiment 108597 PARAMETER Experiment Name: Zm_100uM_ABA_P Parameter: Plant Line Value: 35A19
  misc_feature: MA Experiment 108597 PARAMETER Experiment Name: Zm_100uM_ABA_P Parameter: Timepoint (hr) Value: 24
  misc_feature: MA Experiment 108597 PARAMETER Experiment Name: Zm_100uM_ABA_P Parameter: Tissue Value: Aerial
  misc_feature: MA Experiment 108597 PARAMETER Experiment Name: Zm_100uM_ABA_P Parameter: Treatment Value: 100uM ABA vs. No Treatment
  misc_feature: MA Experiment ID: 20000487 Result: Up-regulated in Transcription
  misc_feature: MA Experiment 20000487 PARAMETER Experiment Name: Zm_50mM_NH4NO3_L_to_H_P Parameter: Organism Value: Zea mays
  misc_feature: MA Experiment 20000487 PARAMETER Experiment Name: Zm_50mM_NH4NO3_L_to_H_P Parameter: Timepoint (hr) Value: 4
  misc_feature: MA Experiment 20000487 PARAMETER Experiment Name: Zm_50mM_NH4NO3_L_to_H_P Parameter: Tissue Value: Leaves
  misc_feature: MA Experiment 20000487 PARAMETER Experiment Name: Zm_50mM_NH4NO3_L_to_H_P Parameter: Treatment Value: 50mM NH4NO3 vs. 100mM Mannitol
  misc_feature: MA Experiment ID: 20000492 Result: Up-regulated in Transcription
  misc_feature: MA Experiment 20000492 PARAMETER Experiment Name: Zm_Hybrid_Seed_Dev_P Parameter: DAP Value: 12
  misc_feature: MA Experiment 20000492 PARAMETER Experiment Name: Zm_Hybrid_Seed_Dev_P Parameter: Organism Value: Zea mays
  misc_feature: MA Experiment 20000492 PARAMETER Experiment Name: Zm_Hybrid_Seed_Dev_P Parameter: Plant Line Value: 35A19
  misc_feature: MA Experiment 20000492 PARAMETER Experiment Name: Zm_Hybrid_Seed_Dev_P Parameter: Tissue Value: Fert Kernel vs. Unfert Floret
  misc_feature: MA Experiment ID: 20000626 Result: Up-regulated in Transcription
  misc_feature: MA Experiment 20000626 PARAMETER Experiment Name: Zm_Herbicide-Treatments_P Parameter: Timepoint (hr) Value: 12
  misc_feature: MA Experiment 20000626 PARAMETER Experiment Name: Zm_Herbicide-Treatments_P Parameter: Tissue Value: Aerial
  misc_feature: MA Experiment 20000626 PARAMETER Experiment Name: Zm_Herbicide-Treatments_P Parameter: Treatment Value: Roundup vs. No Treatment
aatgcctcaccacgccggttatgtgaacgggcactaagagagcttccaaagaagactggtgaacagttagttatcctatctcaggttctaatggatgatatcaatgtcggttatgaaaggcttgctgaactacaggtaaagaaggtaaatgatgtggaggttgaaaacctgaagcacctgtgcagcctcgtggaaggctgcaccgaagaaaacttaaggtttgacttggacgatgaaagagtcattgtcctgaagtaccagaacgcaaggcttgccacatcccgggtcctcaaacggcacaggataccgtcagccatatcgagcgaccttgtcgaagatcaagtaactgatggcgaggttgagacgtcatgcaccagctaatgctagactcttttttagacctaattgggagttccctgctgtagctcagctcaagaagcgagctgcattgttggcgaggcaagcgcacctgcctgcctgcctgcctggagtacatggtatcacttcctccctttagggcggctttagttttgacataaggaggagtgtctttagaaaataagattatgagctccggggcttttcagtctgaatgtaacggtaacataaccattctttactagaacatttattttttccgtc

SEQ ID NO: 14299 - protein, 126 aa, Zea mays subsp. mays
  peptide (1)..(126): Ceres Seq. ID no. 14306057
  misc_feature (1)..(126): Homolog of NCBI NO: 18421592 NR Description: DegP protease [Arabidopsis thaliana]
  misc_feature (9)..(114): Homolog of NCBI NO: 18408327 NR Description: DegP protease [Arabidopsis thaliana]
  misc_feature (14)..(114): Homolog of NCBI NO: 2190559 NR Description: F5I14.16 [Arabidopsis thaliana]
  misc_feature (20)..(116): Homolog of NCBI NO: 18421999 NR Description: DegP protease [Arabidopsis thaliana]
  misc_feature (20)..(116): Homolog of NCBI NO: 9758082 NR Description: contains similarity to serine
  misc_feature (7)..(109): Homolog of NCBI NO: 18408329 NR Description: DegP protease [Arabidopsis thaliana]
  misc_feature (17)..(109): Homolog of NCBI NO: 18401169 NR Description: DegP protease [Arabidopsis thaliana]
  misc_feature (17)..(109): Homolog of NCBI NO: 9279654 NR Description: contains similarity to serine
  misc_feature (3)..(114): Homolog of NCBI NO: 18421957 NR Description: DegP protease [Arabidopsis thaliana]
  misc_feature (28)..(117): Homolog of NCBI NO: 18401167 NR Description: DegP protease [Arabidopsis thaliana]
NASPRRLCERALRELPKKTGEQLVILSQVLMDDINVGYERLAELQVKKVNDVEVENLKHLCSLVEGCTEENLRFDLDDERVIVLKYQNARLATSRVLKRHRIPSAISSDLVEDQVTDGEVETSCTS

SEQ ID NO: 14300 - protein, 96 aa, Zea mays subsp. mays
  peptide (1)..(96): Ceres Seq. ID no. 14306058
  misc_feature (1)..(96): Homolog of NCBI NO: 18421592 NR Description: DegP protease [Arabidopsis thaliana]
  misc_feature (1)..(84): Homolog of NCBI NO: 18408327 NR Description: DegP protease [Arabidopsis thaliana]
  misc_feature (1)..(84): Homolog of NCBI NO: 2190559 NR Description: F5I14.16 [Arabidopsis thaliana]
  misc_feature (1)..(86): Homolog of NCBI NO: 18421999 NR Description: DegP protease [Arabidopsis thaliana]
  misc_feature (1)..(86): Homolog of NCBI NO: 9758082 NR Description: contains similarity to serine
  misc_feature (1)..(79): Homolog of NCBI NO: 18408329 NR Description: DegP protease [Arabidopsis thaliana]
  misc_feature (1)..(79): Homolog of NCBI NO: 18401169 NR Description: DegP protease [Arabidopsis thaliana]
  misc_feature (1)..(79): Homolog of NCBI NO: 9279654 NR Description: contains similarity to serine
  misc_feature (1)..(84): Homolog of NCBI NO: 18421957 NR Description: DegP protease [Arabidopsis thaliana]
  misc_feature (1)..(87): Homolog of NCBI NO: 18401167 NR Description: DegP protease [Arabidopsis thaliana]
MDDINVGYERLAELQVKKVNDVEVENLKHLCSLVEGCTEENLRFDLDDERVIVLKYQNARLATSRVLKRHRIPSAISSDLVEDQVTDGEVETSCTS

SEQ ID NO: 14301 - DNA, 958 bp, Zea mays subsp. mays
  misc_feature (1)..(958): Ceres Seq. ID no. 15180611
  misc_feature: MA Experiment ID: 108535 Result: Up-regulated in Transcription
  misc_feature: MA Experiment 108535 PARAMETER Experiment Name: Zm_Meristem_P Parameter: Age (day) Value: 8
  misc_feature: MA Experiment 108535 PARAMETER Experiment Name: Zm_Meristem_P Parameter: Organism Value: Zea mays
  misc_feature: MA Experiment 108535 PARAMETER Experiment Name: Zm_Meristem_P Parameter: Plant Line Value: 35A19
  misc_feature: MA Experiment 108535 PARAMETER Experiment Name: Zm_Meristem_P Parameter: Tissue Value: Root Meristem vs. Above Root Meristem
  misc_feature: MA Experiment ID: 108542 Result: Down-regulated in Transcription
  misc_feature: MA Experiment 108542 PARAMETER Experiment Name: Zm_150mM_NaCl_P Parameter: Age (day) Value: 8
  misc_feature: MA Experiment 108542 PARAMETER Experiment Name: Zm_150mM_NaCl_P Parameter: Organism Value: Zea mays
  misc_feature: MA Experiment 108542 PARAMETER Experiment Name: Zm_150mM_NaCl_P Parameter: Plant Line Value: 35A19
  misc_feature: MA Experiment 108542 PARAMETER Experiment Name: Zm_150mM_NaCl_P Parameter: Timepoint (hr) Value: 6
  misc_feature: MA Experiment 108542 PARAMETER Experiment Name: Zm_150mM_NaCl_P Parameter: Tissue Value: Aerial
  misc_feature: MA Experiment 108542 PARAMETER Experiment Name: Zm_150mM_NaCl_P Parameter: Treatment Value: 150mM NaCl vs. No Treatment
  misc_feature: MA Experiment ID: 108544 Result: Down-regulated in Transcription
  misc_feature: MA Experiment ID: 108556 Result: Down-regulated in Transcription
  misc_feature: MA Experiment 108556 PARAMETER Experiment Name: Zm_Drought_P Parameter: Age (day) Value: 9
  misc_feature: MA Experiment 108556 PARAMETER Experiment Name: Zm_Drought_P Parameter: Organism Value: Zea mays
  misc_feature: MA Experiment 108556 PARAMETER Experiment Name: Zm_Drought_P Parameter: Plant Line Value: 35A19
  misc_feature: MA Experiment 108556 PARAMETER Experiment Name: Zm_Drought_P Parameter: Timepoint (hr) Value: 24
  misc_feature: MA Experiment 108556 PARAMETER Experiment Name: Zm_Drought_P Parameter: Tissue Value: Aerial
  misc_feature: MA Experiment 108556 PARAMETER Experiment Name: Zm_Drought_P Parameter: Treatment Value: Drought vs. No Drought
  misc_feature: MA Experiment ID: 108597 Result: Down-regulated in Transcription
  misc_feature: MA Experiment 108597 PARAMETER Experiment Name: Zm_100uM_ABA_P Parameter: Age (day) Value: 9
  misc_feature: MA Experiment 108597 PARAMETER Experiment Name: Zm_100uM_ABA_P Parameter: Organism Value: Zea mays
  misc_feature: MA Experiment 108597 PARAMETER Experiment Name: Zm_100uM_ABA_P Parameter: Plant Line Value: 35A19
  misc_feature: MA Experiment 108597 PARAMETER Experiment Name: Zm_100uM_ABA_P Parameter: Timepoint (hr) Value: 24
  misc_feature: MA Experiment 108597 PARAMETER Experiment Name: Zm_100uM_ABA_P Parameter: Tissue Value: Aerial
  misc_feature: MA Experiment 108597 PARAMETER Experiment Name: Zm_100uM_ABA_P Parameter: Treatment Value: 100uM ABA vs. No Treatment
  misc_feature: MA Experiment ID: 20000477 Result: Down-regulated in Transcription
  misc_feature: MA Experiment 20000477 PARAMETER Experiment Name: Zm_5mM_SA_P Parameter: Age (day) Value: 10
  misc_feature: MA Experiment 20000477 PARAMETER Experiment Name: Zm_5mM_SA_P Parameter: Organism Value: Zea mays
  misc_feature: MA Experiment 20000477 PARAMETER Experiment Name: Zm_5mM_SA_P Parameter: Plant Line Value: 35A19
  misc_feature: MA Experiment 20000477 PARAMETER Experiment Name: Zm_5mM_SA_P Parameter: Timepoint (hr) Value: 48
  misc_feature: MA Experiment 20000477 PARAMETER Experiment Name: Zm_5mM_SA_P Parameter: Tissue Value: Aerial
  misc_feature: MA Experiment 20000477 PARAMETER Experiment Name: Zm_5mM_SA_P Parameter: Treatment Value: 5mM SA vs. No Treatment
  misc_feature: MA Experiment ID: 20000479 Result: Down-regulated in Transcription
  misc_feature: MA Experiment 20000479 PARAMETER Experiment Name: Zm_Drought_P Parameter: Age (day) Value: 10
  misc_feature: MA Experiment 20000479 PARAMETER Experiment Name: Zm_Drought_P Parameter: Organism Value: Zea mays
  misc_feature: MA Experiment 20000479 PARAMETER Experiment Name: Zm_Drought_P Parameter: Plant Line Value: 35A19
  misc_feature: MA Experiment 20000479 PARAMETER Experiment Name: Zm_Drought_P Parameter: Timepoint (hr) Value: 48
  misc_feature: MA Experiment 20000479 PARAMETER Experiment Name: Zm_Drought_P Parameter: Tissue Value: Aerial
  misc_feature: MA Experiment 20000479 PARAMETER Experiment Name: Zm_Drought_P Parameter: Treatment Value: Drought vs. No Drought
  misc_feature: MA Experiment ID: 20000632 Result: Down-regulated in Transcription
  misc_feature: MA Experiment 20000632 PARAMETER Experiment Name: Zm_Herbicide-Treatments_P Parameter: Timepoint (hr) Value: 4
  misc_feature: MA Experiment 20000632 PARAMETER Experiment Name: Zm_Herbicide-Treatments_P Parameter: Tissue Value: Aerial
  misc_feature: MA Experiment 20000632 PARAMETER Experiment Name: Zm_Herbicide-Treatments_P Parameter: Treatment Value: Glean vs. No Treatment
atcccgcacatgcacgtgatgcatgtattgttaagagccaccttctatgcttctttgtaccatttggatgcggttcagtggtgcatattgtttgagctgtttctgttttgaactactgatacgctgtgaactttaatgttcgtggttctcagataaactagaaaacctatgctaacgaaacatctagcacatcttggatcagccctgcgatctcaaatggttaatgtatttccggcagctagaaacaccccaaactctgttctctgatttaacaaaaaaaaaccagttacccaccacccagcatgagcggacatgtgcatttgttggcatttgagctctcgtccaatgattgttgcgcaggtgacggagaacgggaagcaggagcggcatctagtggcgacggtggggaagtacagcgtggtgtggaacttcctgcaggtgaagaacagccaccacgagtgctaccagtaccaggaggggctgaagagctgctattgctacaaggtgatccccaaggacgagtccatcgtggccagccgcttcatgcacgacaagtactcggtcagcgactccccggaggctccactggtggtggccacgcccatgaaggtcacctccttcagcatatccagcaggcactaactagcctccttgctccgccccgcaacttcgctgccggccgacgcgttccccttggctcctcggcctccggtgatctggtaacattttgttaagcaattgtttgtgcgacggttgcctgttccattgccttctaagttggttcaaattaattagtgatttgctgtgttgagtcgatacgcaacgttgaagaggggatggtagtgtctgttgggttagctacatattgctgaacaatctgatttagctgtgaggaagtggctaatggttgtaagaaagctgaaagttgtttgattaaaataattgttaactaaaaaag

SEQ ID NO: 14302 - protein, 143 aa, Zea mays subsp. mays
  peptide (1)..(143): Ceres Seq. ID no. 15180612
MSGHVHLLAFELSSNDCCAGDGEREAGAASSGDGGEVQRGVELPAGEEQPPRVLPVPGGAEELLLLQGDPQGRVHRGQPLHARQVLGQRLPGGSTGGGHAHEGHLLQHIQQALTSLLAPPRNFAAGRRVPLGSSASGDLVTFC

SEQ ID NO: 14303 - protein, 109 aa, Zea mays subsp. mays
  peptide (1)..(109): Ceres Seq. ID no. 15180613
  misc_feature (17)..(108): Homolog of NCBI NO: 7488984 NR Description: dem protein - tomato >gi|2190419|emb|CAA73973.1|
  misc_feature (17)..(108): Homolog of NCBI NO: 37223342 NR Description: DEM2 [Lycopersicon esculentum]
  misc_feature (17)..(108): Homolog of NCBI NO: 37223344 NR Description: DEM2 [Lycopersicon esculentum]
  misc_feature (17)..(108): Homolog of NCBI NO: 15234174 NR Description: Dem -related protein [Arabidopsis thaliana]
  misc_feature (17)..(106): Homolog of NCBI NO: 729273 NR Description: CYPRO4 PROTEIN >gi|322804|pir||S28592 cypro4
  misc_feature (17)..(108): Homolog of NCBI NO: 15230321 NR Description: dem-related protein [Arabidopsis thaliana]
MCICWHLSSRPMIVAQVTENGKQERHLVATVGKYSVVWNFLQVKNSHHECYQYQEGLKSCYCYKVIPKDESIVASRFMHDKYSVSDSPEAPLVVATPMKVTSFSISSRH

SEQ ID NO: 14304 - protein, 98 aa, Zea mays subsp. mays
  peptide (1)..(98): Ceres Seq. ID no. 15180614
  misc_feature (6)..(97): Homolog of NCBI NO: 7488984 NR Description: dem protein - tomato >gi|2190419|emb|CAA73973.1|
  misc_feature (6)..(97): Homolog of NCBI NO: 37223342 NR Description: DEM2 [Lycopersicon esculentum]
  misc_feature (6)..(97): Homolog of NCBI NO: 37223344 NR Description: DEM2 [Lycopersicon esculentum]
  misc_feature (6)..(97): Homolog of NCBI NO: 15234174 NR Description: Dem -related protein [Arabidopsis thaliana]
  misc_feature (6)..(95): Homolog of NCBI NO: 729273 NR Description: CYPRO4 PROTEIN >gi|322804|pir||S28592 cypro4
  misc_feature (6)..(97): Homolog of NCBI NO: 15230321 NR Description: dem-related protein [Arabidopsis thaliana]
MIVAQVTENGKQERHLVATVGKYSVVWNFLQVKNSHHECYQYQEGLKSCYCYKVIPKDESIVASRFMHDKYSVSDSPEAPLVVATPMKVTSFSISSRH

SEQ ID NO: 14305 - DNA, 543 bp, Zea mays subsp. mays
  misc_feature (1)..(543): Ceres Seq. ID no. 3424909
  misc_feature: MA Experiment ID: 108523 Result: Up-regulated in Transcription
  misc_feature: MA Experiment 108523 PARAMETER Experiment Name: Zm_42deg_Heat_P Parameter: Age (day) Value: 8
  misc_feature: MA Experiment 108523 PARAMETER Experiment Name: Zm_42deg_Heat_P Parameter: Organism Value: Zea mays
  misc_feature: MA Experiment 108523 PARAMETER Experiment Name: Zm_42deg_Heat_P Parameter: Plant Line Value: 35A19
  misc_feature: MA Experiment 108523 PARAMETER Experiment Name: Zm_42deg_Heat_P Parameter: Temperature (deg C) Value: 42 vs. 22
  misc_feature: MA Experiment 108523 PARAMETER Experiment Name: Zm_42deg_Heat_P Parameter: Timepoint (hr) Value: 6
  misc_feature: MA Experiment 108523 PARAMETER Experiment Name: Zm_42deg_Heat_P Parameter: Tissue Value: Aerial
  misc_feature: MA Experiment ID: 108535 Result: Up-regulated in Transcription
  misc_feature: MA Experiment 108535 PARAMETER Experiment Name: Zm_Meristem_P Parameter: Age (day) Value: 8
  misc_feature: MA Experiment 108535 PARAMETER Experiment Name: Zm_Meristem_P Parameter: Organism Value: Zea mays
  misc_feature: MA Experiment 108535 PARAMETER Experiment Name: Zm_Meristem_P Parameter: Plant Line Value: 35A19
  misc_feature: MA Experiment 108535 PARAMETER Experiment Name: Zm_Meristem_P Parameter: Tissue Value: Root Meristem vs. Above Root Meristem
tgtccatgctgctgctcatccgcaggtccgtactactgggtgragwrcaagcctgacaagcccataccagttagtcagccgaaccaagggagcgtgcgagggaggaaggagaagaagcggatcaagcagcacgaggactttatcatggatgagaagaagaagcgcatagctcagtattctgctgctgttaagataaaggaggtagaacaaacagaaaggaagatggctgttgtggcaagagagcgagcatgggcagcaaggttgatagagctaaaatagcttgaggaagaaattaaagctgtaatggcataagggcctgctctggaaaatggcaaggcgtctaacctgtttctgctactctattttctcctcctttgttcctacatagtttaaattgtcacaattcttgtgatggaatggaagaccagtaccacttctttcaacagtaatatcaaatgctggaactgttttttaatacaagactctcattagaccatgtttggaggttccgtttacttttgatgtaatttaraacaagtgatg

SEQ ID NO: 14306 - protein, 92 aa, Zea mays subsp. mays
  peptide (1)..(92): Ceres Seq. ID no. 3424910
  misc_feature (9)..(92): Homolog of NCBI NO: 18409234 NR Description: expressed protein; protein id: At3g51010.1, by cDNA: 14475. [Arabidopsis thaliana] >gi|11280693|pir||T45732
  misc_feature (9)..(92): Homolog of NCBI NO: 21553452 NR Description: unknown [Arabidopsis thaliana]
  misc_feature (15)..(15): Xaa is any aa, unknown or other
  misc_feature (16)..(16): Xaa is any aa, unknown or other
CPCCCSSAGPYYWVXXKPDKPIPVSQPNQGSVRGRKEKKRIKQHEDFIMDEKKKRIAQYSAAVKIKEVEQTERKMAVVARERAWAARLIELK

SEQ ID NO: 14307 - protein, 55 aa, Zea mays subsp. mays
  peptide (1)..(55): Ceres Seq. ID no. 3424911
  misc_feature (14)..(14): Xaa is any aa, unknown or other
  misc_feature (15)..(15): Xaa is any aa, unknown or other
  misc_feature (16)..(16): Xaa is any aa, unknown or other
VHAAAHPQVRTTGXXXSLTSPYQLVSRTKGACEGGRRRSGSSSTRTLSWMRRRSA

SEQ ID NO: 14308 - protein, 44 aa, Zea mays subsp. mays
  peptide (1)..(44): Ceres Seq. ID no. 4910235
  misc_feature (1)..(44): Homolog of NCBI NO: 18409234 NR Description: expressed protein; protein id: At3g51010.1, by cDNA: 14475. [Arabidopsis thaliana] >gi|11280693|pir||T45732
  misc_feature (1)..(44): Homolog of NCBI NO: 21553452 NR Description: unknown [Arabidopsis thaliana]
MDEKKKRIAQYSAAVKIKEVEQTERKMAVVARERAWAARLIELK

SEQ ID NO: 14309 - DNA, 741 bp, Zea mays subsp. mays
  misc_feature (1)..(741): Ceres Seq. ID no. 12468867
  misc_feature: MA Experiment ID: 108543 Result: Up-regulated in Transcription
  misc_feature: MA Experiment ID: 20000480 Result: Down-regulated in Transcription
  misc_feature: MA Experiment 20000480 PARAMETER Experiment Name: Zm_Drought_P Parameter: Age (day) Value: 11
  misc_feature: MA Experiment 20000480 PARAMETER Experiment Name: Zm_Drought_P Parameter: Organism Value: Zea mays
  misc_feature: MA Experiment 20000480 PARAMETER Experiment Name: Zm_Drought_P Parameter: Plant Line Value: 35A19
  misc_feature: MA Experiment 20000480 PARAMETER Experiment Name: Zm_Drought_P Parameter: Timepoint (hr) Value: 72
  misc_feature: MA Experiment 20000480 PARAMETER Experiment Name: Zm_Drought_P Parameter: Tissue Value: Aerial
  misc_feature: MA Experiment 20000480 PARAMETER Experiment Name: Zm_Drought_P Parameter: Treatment Value: Drought vs. No Drought
  misc_feature: MA Experiment ID: 20001610 Result: Up-regulated in Transcription
  misc_feature: MA Experiment 20001610 PARAMETER Experiment Name: Zm_50ppm_KNO3_L-to-H_P Parameter: Age (day) Value: 19
  misc_feature: MA Experiment 20001610 PARAMETER Experiment Name: Zm_50ppm_KNO3_L-to-H_P Parameter: Organism Value: Zea mays
  misc_feature: MA Experiment 20001610 PARAMETER Experiment Name: Zm_50ppm_KNO3_L-to-H_P Parameter: Plant Line Value: 35A19
  misc_feature: MA Experiment 20001610 PARAMETER Experiment Name: Zm_50ppm_KNO3_L-to-H_P Parameter: Timepoint (hr) Value: 2
  misc_feature: MA Experiment 20001610 PARAMETER Experiment Name: Zm_50ppm_KNO3_L-to-H_P Parameter: Tissue Value: Roots
  misc_feature: MA Experiment 20001610 PARAMETER Experiment Name: Zm_50ppm_KNO3_L-to-H_P Parameter: Treatment Value: 50ppm KNO3 vs. 50ppm KCl
tgacttgcttattggcaccccagattcggcatccaagaactatgtggagcagcagtacgagtactgtgtgaaggtggtcagatggttggagcatgaagggcacatggacaatgacttccgtgtgaagttcctcacttggttcagtctgaaggcaacagcgcaggacaggcgaatcgttggcgccttagtagatgttcttatcggtgatcctgcaagcttggttgcccaactggttgatgcattcaaggatatcatctacaccaaggagaagccctttcaaacacaacagaaggatgcacgctgcaagatttggcactagaaaccttcataactgctctgtgtcgctgtgtgacatcatttttctggtaattttctggcgactgaatgatgaactactgaagttatatcacctagcagattgcgtgcggattctgttgagatggatattgtgcactctcttaaaggttataagatgctgtagatgcttcatttggcattcaggtccatcagatctctcatttgttcattcaaattcagtcggtaggcagactattaatccatgaagacaatcatggtggaaccatgtgctggtaatcatgaatcggttntgagtttaggtttcgactagtaagtagttgaagcttgttagcagacaagcaactgtattcatatgtggaatgctatggtggatntgcaagctaactattgtgaattcatatcatgacttaanagatgtttatt

SEQ ID NO: 14310 - protein, 123 aa, Zea mays subsp. mays
  peptide (1)..(123): Ceres Seq. ID no. 12468868
MFLSVILQAWLPNWLMHSRISSTPRRSPFKHNRRMHAARFGTRNLHNCSVSLCDIIFLVIFWRLNDELLKLYHLADCVRILLRWILCTLLKVIRCCRCFIWHSGPSDLSFVHSNSVGRQTINP

SEQ ID NO: 14311 - protein, 108 aa, Zea mays subsp. mays
  peptide (1)..(108): Ceres Seq. ID no. 12468869
MHSRISSTPRRSPFKHNRRMHAARFGTRNLHNCSVSLCDIIFLVIFWRLNDELLKLYHLADCVRILLRWILCTLLKVIRCCRCFIWHSGPSDLSFVHSNSVGRQTINP

SEQ ID NO: 14312 - protein, 105 aa, Zea mays subsp. mays
  peptide (1)..(105): Ceres Seq. ID no. 12468870
  misc_feature (1)..(105): Homolog of NCBI NO: 38637254 NR Description: putative coiled-coil protein [Oryza sativa
  misc_feature (8)..(88): Homolog of NCBI NO: 15230113 NR Description: hypothetical protein; protein id: At3g24440.1 thaliana] >gi|9294095|dbj|BAB01947.1|
  misc_feature (8)..(105): Homolog of NCBI NO: 30688585 NR Description: coiled-coil protein [Arabidopsis thaliana] putative protein [Arabidopsis thaliana]
  misc_feature (8)..(105): Homolog of NCBI NO: 15234667 NR Description: putative protein; protein id: At4g30200.1, by cDNA: gi_11177136 [Arabidopsis thaliana]
  misc_feature (7)..(88): Homolog of NCBI NO: 30680490 NR Description: hypothetical protein [Arabidopsis thaliana]
  misc_feature (7)..(88): Homolog of NCBI NO: 7485789 NR Description: hypothetical protein At2g18870 [imported] - thaliana >gi|3004550|gb|AAC09023.1| unknown protein [Arabidopsis
  misc_feature (8)..(105): Homolog of NCBI NO: 15242117 NR Description: putative protein; protein id: At5g57380.1 thaliana] >gi|9757932|dbj|BAB08475.1|
  misc_feature (19)..(91): Homolog of NCBI NO: 15224250 NR Description: hypothetical protein; protein id: At2g18880.1
  misc_feature (19)..(91): Homolog of NCBI NO: 30350861 NR Description: hypothetical protein At2g18880 [Arabidopsis
DLLIGTPDSASKNYVEQQYEYCVKVVRWLEHEGHMDNDFRVKFLTWFSLKATAQDRRIVGALVDVLIGDPASLVAQLVDAFKDIIYTKEKPFQTQQKDARCKIWH

SEQ ID NO: 14313 - DNA, 482 bp, Zea mays subsp. mays
  misc_feature (1)..(482): Ceres Seq. ID no. 12468860
  misc_feature: MA Experiment ID: 108559 Result: Up-regulated in Transcription
  misc_feature: MA Experiment 108559 PARAMETER Experiment Name: Zm_5mM_NO_P Parameter: Age (day) Value: 8
  misc_feature: MA Experiment 108559 PARAMETER Experiment Name: Zm_5mM_NO_P Parameter: Organism Value: Zea mays
  misc_feature: MA Experiment 108559 PARAMETER Experiment Name: Zm_5mM_NO_P Parameter: Plant Line Value: 35A19
  misc_feature: MA Experiment 108559 PARAMETER Experiment Name: Zm_5mM_NO_P Parameter: Timepoint (hr) Value: 12
  misc_feature: MA Experiment 108559 PARAMETER Experiment Name: Zm_5mM_NO_P Parameter: Tissue Value: Aerial
  misc_feature: MA Experiment 108559 PARAMETER Experiment Name: Zm_5mM_NO_P Parameter: Treatment Value: 5mM NO vs. No Treatment
taagtgcatttgcaccacaaacaaaagaggatgggcttctgcatactgcctgtggaactccaaactatgtagcgcctgaggtgctcgctgataaaggctatgatggtatggctgcagatgtatggtcctgtggcataatcttgtttgttcttatggccggatacttacccttcgatgatgccaatctgatgagactgtacaaactgatctgccatgcaactttttcttgcccaccatggttttcttctggagcaaggaagtttattaagcgcattctcgatcctaaccctgataccaggataaaaattgcagaaattttggaagatgaatggttcaaaaaaggctataaaccaccacattttgaacaaggcgaagatgttaaccttgacgacgttgatgctgcattcaatgattcagaggaccgtcttgtagcagagaaaagagaaaagccagaatcaatgaatgcatttgctcttatttcg

SEQ ID NO: 14314 - protein, 160 aa, Zea mays subsp. mays
  peptide (1)..(160): Ceres Seq. ID no. 12468861
  misc_feature (1)..(111): Pfam Name: Protein kinase domain Pfam Description: Protein kinase domain
  misc_feature (1)..(159): Homolog of NCBI NO: 34902248 NR Description: Putative serine/threonine kinase [Oryza sativa
  misc_feature (1)..(159): Homolog of NCBI NO: 14423524 NR Description: similar to wpk4 protein kinase [Arabidopsis >gi|20259788|gb|AAM13241.1| similar to wpk4 protein kinase
  misc_feature (1)..(159): Homolog of NCBI NO: 15223317 NR Description: serine threonine kinase, putative; protein id: supported by cDNA: gi_14423523, supported by cDNA: gi_20259787
  misc_feature (1)..(159): Homolog of NCBI NO: 30677901 NR Description: CBL-interacting protein kinase 9 [Arabidopsis
  misc_feature (1)..(159): Homolog of NCBI NO: 25387057 NR Description: protein T25K16.13 [imported] - Arabidopsis >gi|6715641|gb|AAF26468.1|AC007323_9 T25K16.13 [Arabidopsis
  misc_feature (1)..(159): Homolog of NCBI NO: 30677898 NR Description: CBL-interacting protein kinase 9 [Arabidopsis
  misc_feature (1)..(159): Homolog of NCBI NO: 30683328 NR Description: CBL-interacting protein kinase 3 [Arabidopsis
  misc_feature (1)..(159): Homolog of NCBI NO: 30683336 NR Description: CBL-interacting protein kinase 3 [Arabidopsis
  misc_feature (1)..(159): Homolog of NCBI NO: 30683332 NR Description: CBL-interacting protein kinase 3 [Arabidopsis
  misc_feature (1)..(159): Homolog of NCBI NO: 34393400 NR Description: putative CBL-interacting protein kinase 23 [Oryza
SAFAPQTKEDGLLHTACGTPNYVAPEVLADKGYDGMAADVWSCGIILFVLMAGYLPFDDANLMRLYKLICHATFSCPPWFSSGARKFIKRILDPNPDTRIKIAEILEDEWFKKGYKPPHFEQGEDVNLDDVDAAFNDSEDRLVAEKREKPESMNAFALIS

SEQ ID NO: 14315 - protein, 125 aa, Zea mays subsp. mays
  peptide (1)..(125): Ceres Seq. ID no. 12468862
  misc_feature (1)..(76): Pfam Name: Protein kinase domain Pfam Description: Protein kinase domain
  misc_feature (1)..(124): Homolog of NCBI NO: 34902248 NR Description: Putative serine/threonine kinase [Oryza sativa
  misc_feature (1)..(124): Homolog of NCBI NO: 14423524 NR Description: similar to wpk4 protein kinase [Arabidopsis >gi|20259788|gb|AAM13241.1| similar to wpk4 protein kinase
  misc_feature (1)..(124): Homolog of NCBI NO: 15223317 NR Description: serine threonine kinase, putative; protein id: supported by cDNA: gi_14423523, supported by cDNA: gi_20259787
  misc_feature (1)..(124): Homolog of NCBI NO: 30677901 NR Description: CBL-interacting protein kinase 9 [Arabidopsis
  misc_feature (1)..(124): Homolog of NCBI NO: 25387057 NR Description: protein T25K16.13 [imported] - Arabidopsis >gi|6715641|gb|AAF26468.1|AC007323_9 T25K16.13 [Arabidopsis
  misc_feature (1)..(124): Homolog of NCBI NO: 30677898 NR Description: CBL-interacting protein kinase 9 [Arabidopsis
  misc_feature (1)..(124): Homolog of NCBI NO: 30683328 NR Description: CBL-interacting protein kinase 3 [Arabidopsis
  misc_feature (1)..(124): Homolog of NCBI NO: 30683332 NR Description: CBL-interacting protein kinase 3 [Arabidopsis
  misc_feature (1)..(124): Homolog of NCBI NO: 30683336 NR Description: CBL-interacting protein kinase 3 [Arabidopsis
  misc_feature (1)..(124): Homolog of NCBI NO: 34393400 NR Description: putative CBL-interacting protein kinase 23 [Oryza
MAADVWSCGIILFVLMAGYLPFDDANLMRLYKLICHATFSCPPWFSSGARKFIKRILDPNPDTRIKIAEILEDEWFKKGYKPPHFEQGEDVNLDDVDAAFNDSEDRLVAEKREKPESMNAFALIS

SEQ ID NO: 14316 - protein, 110 aa, Zea mays subsp. mays
  peptide (1)..(110): Ceres Seq. ID no. 12468863
  misc_feature (1)..(61): Pfam Name: Protein kinase domain Pfam Description: Protein kinase domain
  misc_feature (1)..(109): Homolog of NCBI NO: 34902248 NR Description: Putative serine/threonine kinase [Oryza sativa
  misc_feature (1)..(109): Homolog of NCBI NO: 14423524 NR Description: similar to wpk4 protein kinase [Arabidopsis >gi|20259788|gb|AAM13241.1| similar to wpk4 protein kinase
  misc_feature (1)..(109): Homolog of NCBI NO: 15223317 NR Description: serine threonine kinase, putative; protein id: supported by cDNA: gi_14423523, supported by cDNA: gi_20259787
  misc_feature (1)..(109): Homolog of NCBI NO: 30677901 NR Description: CBL-interacting protein kinase 9 [Arabidopsis
  misc_feature (1)..(109): Homolog of NCBI NO: 25387057 NR Description: protein T25K16.13 [imported] - Arabidopsis >gi|6715641|gb|AAF26468.1|AC007323_9 T25K16.13 [Arabidopsis
  misc_feature (1)..(109): Homolog of NCBI NO: 30677898 NR Description: CBL-interacting protein kinase 9 [Arabidopsis
  misc_feature (1)..(109): Homolog of NCBI NO: 30683328 NR Description: CBL-interacting protein kinase 3 [Arabidopsis
  misc_feature (1)..(109): Homolog of NCBI NO: 30683332 NR Description: CBL-interacting protein kinase 3 [Arabidopsis
  misc_feature (1)..(109): Homolog of NCBI NO: 30683336 NR Description: CBL-interacting protein kinase 3 [Arabidopsis
  misc_feature (1)..(109): Homolog of NCBI NO: 34393400 NR Description: putative CBL-interacting protein kinase 23 [Oryza
MAGYLPFDDANLMRLYKLICHATFSCPPWFSSGARKFIKRILDPNPDTRIKIAEILEDEWFKKGYKPPHFEQGEDVNLDDVDAAFNDSEDRLVAEKREKPESMNAFALIS

SEQ ID NO: 14317 - DNA, 828 bp, Zea mays subsp. mays
  misc_feature (1)..(828): Ceres Seq. ID no. 12468845
  misc_feature: MA Experiment ID: 108543 Result: Up-regulated in Transcription
  misc_feature: MA Experiment ID: 20000477 Result: Down-regulated in Transcription
  misc_feature: MA Experiment 20000477 PARAMETER Experiment Name: Zm_5mM_SA_P Parameter: Age (day) Value: 10
  misc_feature: MA Experiment 20000477 PARAMETER Experiment Name: Zm_5mM_SA_P Parameter: Organism Value: Zea mays
  misc_feature: MA Experiment 20000477 PARAMETER Experiment Name: Zm_5mM_SA_P Parameter: Plant Line Value: 35A19
  misc_feature: MA Experiment 20000477 PARAMETER Experiment Name: Zm_5mM_SA_P Parameter: Timepoint (hr) Value: 48
  misc_feature: MA Experiment 20000477 PARAMETER Experiment Name: Zm_5mM_SA_P Parameter: Tissue Value: Aerial
  misc_feature: MA Experiment 20000477 PARAMETER Experiment Name: Zm_5mM_SA_P Parameter: Treatment Value: 5mM SA vs. No Treatment
gaagaaccatgccatcttccgttttngcgcaattccccagataatggcaattggaacatgtgctctttgctacaataacgtgcatgtctttagaggagttgtaaagatgagacgtggtctcacggcacgaataattgacgagacaaattcaatgtcagacgtctataccgctttctatgagttttcttcattgatagagtcaaagattgatgacaatgatccaaatgctgctctaacacggagacacgtgaattcaataaagcaaacttgcaagtcatctggtttggtaaagaggagggggtaccatttggacacatcaccttacaggcctatgctggtgagtaacccgtaatcaggaaattcatgttagcactcttctatataatttgtcgatattcttctgtgatcccctcagatcatgattgtcctcctgctggtggctatccttttcggggcactgtataccaagtgatgcacttgtagctggcctttttcccctatggagacgagacaaactctgccaatctgatccttttcgtactctgtagtccccaatggctgcaggaagttcgaaattactggctgtagaagtgtagatcatacggcagcatgctactgcttccatgactccgttactgctctcgattcgtttcttcattatgttttctcgcgcgttgtatcgtttgaagctgttttaagcaacggaaaaaaataccatgtgacacgtgtatcctacgaacatgggtttctgtttagttagcagtgggcgcactgtattatgttgtcttgttgacatgtcatgttttcaaagctgacgtgtttgtgttt

SEQ ID NO: 14318 - protein, 116 aa, Zea mays subsp. mays
  peptide (1)..(116): Ceres Seq. ID no. 12468846
  misc_feature (1)..(54): Pfam Name: Squalene/phytoene synthase Pfam Description: Squalene/phytoene synthase
  misc_feature (1)..(113): Homolog of NCBI NO: 7434086 NR Description: farnesyl-diphosphate farnesyltransferase (EC
  misc_feature (1)..(113): Homolog of NCBI NO: 2463565 NR Description: squalene synthase [Oryza sativa (japonica
  misc_feature (1)..(113): Homolog of NCBI NO: 34394799 NR Description: putative squalene synthase [Oryza sativa
  misc_feature (4)..(114): Homolog of NCBI NO: 2780361 NR Description: squalene synthase [Panax ginseng]
  misc_feature (1)..(113): Homolog of NCBI NO: 5360655 NR Description: squalene synthase [Solanum tuberosum]
  misc_feature (9)..(9): Xaa is any aa, unknown or other
KNHAIFRFXAIPQIMAIGTCALCYNNVHVFRGVVKMRRGLTARIIDETNSMSDVYTAFYEFSSLIESKIDDNDPNAALTRRHVNSIKQTCKSSGLVKRRGYHLDTSPYRPMLVSNP

SEQ ID NO: 14319 - protein, 102 aa, Zea mays subsp. mays
  peptide (1)..(102): Ceres Seq. ID no. 12468847
  misc_feature (1)..(99): Homolog of NCBI NO: 7434086 NR Description: farnesyl-diphosphate farnesyltransferase (EC
  misc_feature (1)..(99): Homolog of NCBI NO: 2463565 NR Description: squalene synthase [Oryza sativa (japonica
  misc_feature (1)..(99): Homolog of NCBI NO: 34394799 NR Description: putative squalene synthase [Oryza sativa
  misc_feature (1)..(100): Homolog of NCBI NO: 2780361 NR Description: squalene synthase [Panax ginseng]
  misc_feature (1)..(99): Homolog of NCBI NO: 5360655 NR Description: squalene synthase [Solanum tuberosum]
MAIGTCALCYNNVHVFRGVVKMRRGLTARIIDETNSMSDVYTAFYEFSSLIESKIDDNDPNAALTRRHVNSIKQTCKSSGLVKRRGYHLDTSPYRPMLVSNP

SEQ ID NO: 14320 - protein, 81 aa, Zea mays subsp. mays
  peptide (1)..(81): Ceres Seq. ID no. 12468848
  misc_feature (1)..(78): Homolog of NCBI NO: 7434086 NR Description: farnesyl-diphosphate farnesyltransferase (EC
  misc_feature (1)..(78): Homolog of NCBI NO: 2463565 NR Description: squalene synthase [Oryza sativa (japonica
  misc_feature (1)..(78): Homolog of NCBI NO: 34394799 NR Description: putative squalene synthase [Oryza sativa
  misc_feature (1)..(79): Homolog of NCBI NO: 2780361 NR Description: squalene synthase [Panax ginseng]
  misc_feature (1)..(78): Homolog of NCBI NO: 5360655 NR Description: squalene synthase [Solanum tuberosum]
MRRGLTARIIDETNSMSDVYTAFYEFSSLIESKIDDNDPNAALTRRHVNSIKQTCKSSGLVKRRGYHLDTSPYRPMLVSNP

SEQ ID NO: 14321 - DNA, 1749 bp, Zea mays subsp. mays; identical to SEQ ID NO: 11078
  misc_feature (1)..(1749): Ceres Seq. ID no. 12390530
  misc_feature: MA Experiment ID: 108689 Result: Up-regulated in Transcription
  misc_feature: MA Experiment 108689 PARAMETER Experiment Name: Zm_Drought_Roots_P Parameter: Age (day) Value: 9
  misc_feature: MA Experiment 108689 PARAMETER Experiment Name: Zm_Drought_Roots_P Parameter: Organism Value: Zea mays
  misc_feature: MA Experiment 108689 PARAMETER Experiment Name: Zm_Drought_Roots_P Parameter: Plant Line Value: 35A19
  misc_feature: MA Experiment 108689 PARAMETER Experiment Name: Zm_Drought_Roots_P Parameter: Timepoint (hr) Value: 24
  misc_feature: MA Experiment 108689 PARAMETER Experiment Name: Zm_Drought_Roots_P Parameter: Tissue Value: Roots
  misc_feature: MA Experiment 108689 PARAMETER Experiment Name: Zm_Drought_Roots_P Parameter: Treatment Value: Drought vs. No Drought

SEQ ID NO: 14322 - protein, 174 aa, Zea mays subsp. mays; identical to SEQ ID NO: 11079
  peptide (1)..(174): Ceres Seq. ID no. 12390531
  misc_feature (1)..(173): Homolog of NCBI NO: 15144509 NR Description: unknown [Lycopersicon esculentum]
  misc_feature (73)..(173): Homolog of NCBI NO: 15809848 NR Description: AT4g38060/F20D10_180 [Arabidopsis thaliana] unknown protein [Arabidopsis thaliana]
  misc_feature (1)..(171): Homolog of NCBI NO: 15238477 NR Description: putative protein; protein id: At5g65480.1, by cDNA: gi_16604319, supported by cDNA: gi_19699193 [Arabidopsis >gi|8978277|dbj|BAA98168.1| gene_id:K19O4.1~pir||T05633~similar
  misc_feature (1)..(173): Homolog of NCBI NO: 15144509 NR Description: unknown [Lycopersicon esculentum]
  misc_feature (73)..(173): Homolog of NCBI NO: 15809848 NR Description: AT4g38060/F20D10_180 [Arabidopsis thaliana] unknown protein [Arabidopsis thaliana]
  misc_feature (1)..(171): Homolog of NCBI NO: 15238477 NR Description: putative protein; protein id: At5g65480.1, by cDNA: gi_16604319, supported by cDNA: gi_19699193 [Arabidopsis >gi|8978277|dbj|BAA98168.1| gene_id:K19O4.1~pir||T05633~similar

SEQ ID NO: 14323 - protein, 172 aa, Zea mays subsp. mays; identical to SEQ ID NO: 11080
  peptide (1)..(172): Ceres Seq. ID no. 12390532
  misc_feature (1)..(171): Homolog of NCBI NO: 15144509 NR Description: unknown [Lycopersicon esculentum]
  misc_feature (71)..(171): Homolog of NCBI NO: 15809848 NR Description: AT4g38060/F20D10_180 [Arabidopsis thaliana] unknown protein [Arabidopsis thaliana]
  misc_feature (1)..(169): Homolog of NCBI NO: 15238477 NR Description: putative protein; protein id: At5g65480.1, by cDNA: gi_16604319, supported by cDNA: gi_19699193 [Arabidopsis >gi|8978277|dbj|BAA98168.1| gene_id:K19O4.1~pir||T05633~similar
  misc_feature (1)..(171): Homolog of NCBI NO: 15144509 NR Description: unknown [Lycopersicon esculentum]
  misc_feature (71)..(171): Homolog of NCBI NO: 15809848 NR Description: AT4g38060/F20D10_180 [Arabidopsis thaliana] unknown protein [Arabidopsis thaliana]
  misc_feature (1)..(169): Homolog of NCBI NO: 15238477 NR Description: putative protein; protein id: At5g65480.1, by cDNA: gi_16604319, supported by cDNA: gi_19699193 [Arabidopsis >gi|8978277|dbj|BAA98168.1| gene_id:K19O4.1~pir||T05633~similar

SEQ ID NO: 14324 - protein, 94 aa, Zea mays subsp. mays; identical to SEQ ID NO: 11081
  peptide (1)..(94): Ceres Seq. ID no. 12390533
  misc_feature (1)..(93): Homolog of NCBI NO: 15144509 NR Description: unknown [Lycopersicon esculentum]
  misc_feature (1)..(93): Homolog of NCBI NO: 15809848 NR Description: AT4g38060/F20D10_180 [Arabidopsis thaliana] unknown protein [Arabidopsis thaliana]
  misc_feature (1)..(91): Homolog of NCBI NO: 15238477 NR Description: putative protein; protein id: At5g65480.1, by cDNA: gi_16604319, supported by cDNA: gi_19699193 [Arabidopsis >gi|8978277|dbj|BAA98168.1| gene_id:K19O4.1~pir||T05633~similar
  misc_feature (1)..(93): Homolog of NCBI NO: 15144509 NR Description: unknown [Lycopersicon esculentum]
  misc_feature (1)..(93): Homolog of NCBI NO: 15809848 NR Description: AT4g38060/F20D10_180 [Arabidopsis thaliana] unknown protein [Arabidopsis thaliana]
  misc_feature (1)..(91): Homolog of NCBI NO: 15238477 NR Description: putative protein; protein id: At5g65480.1, by cDNA: gi_16604319, supported by cDNA: gi_19699193 [Arabidopsis >gi|8978277|dbj|BAA98168.1| gene_id:K19O4.1~pir||T05633~similar

SEQ ID NO: 14325 - DNA, 667 bp, Zea mays subsp. mays
  misc_feature (1)..(667): Ceres Seq. ID no. 12468824
  misc_feature: MA Experiment ID: 108526 Result: Up-regulated in Transcription
  misc_feature: MA Experiment 108526 PARAMETER Experiment Name: Zm_5mM_NO_P Parameter: Age (day) Value: 8
  misc_feature: MA Experiment 108526 PARAMETER Experiment Name: Zm_5mM_NO_P Parameter: Organism Value: Zea mays
  misc_feature: MA Experiment 108526 PARAMETER Experiment Name: Zm_5mM_NO_P Parameter: Plant Line Value: 35A19
  misc_feature: MA Experiment 108526 PARAMETER Experiment Name: Zm_5mM_NO_P Parameter: Timepoint (hr) Value: 1
  misc_feature: MA Experiment 108526 PARAMETER Experiment Name: Zm_5mM_NO_P Parameter: Tissue Value: Aerial
  misc_feature: MA Experiment 108526 PARAMETER Experiment Name: Zm_5mM_NO_P Parameter: Treatment Value: 5mM NO vs. No Treatment
  misc_feature: MA Experiment ID: 108527 Result: Up-regulated in Transcription
  misc_feature: MA Experiment 108527 PARAMETER Experiment Name: Zm_5mM_NO_P Parameter: Age (day) Value: 8
  misc_feature: MA Experiment 108527 PARAMETER Experiment Name: Zm_5mM_NO_P Parameter: Organism Value: Zea mays
  misc_feature: MA Experiment 108527 PARAMETER Experiment Name: Zm_5mM_NO_P Parameter: Plant Line Value: 35A19
  misc_feature: MA Experiment 108527 PARAMETER Experiment Name: Zm_5mM_NO_P Parameter: Timepoint (hr) Value: 6
  misc_feature: MA Experiment 108527 PARAMETER Experiment Name: Zm_5mM_NO_P Parameter: Tissue Value: Aerial
  misc_feature: MA Experiment 108527 PARAMETER Experiment Name: Zm_5mM_NO_P Parameter: Treatment Value: 5mM NO vs. No Treatment
  misc_feature: MA Experiment ID: 108530 Result: Up-regulated in Transcription
  misc_feature: MA Experiment 108530 PARAMETER Experiment Name: Zm_Imbibed_Seeds_P Parameter: Age (day) Value: 6 vs. 2
  misc_feature: MA Experiment 108530 PARAMETER Experiment Name: Zm_Imbibed_Seeds_P Parameter: Organism Value: Zea mays
  misc_feature: MA Experiment 108530 PARAMETER Experiment Name: Zm_Imbibed_Seeds_P Parameter: Plant Line Value: 35A19
  misc_feature: MA Experiment 108530 PARAMETER Experiment Name: Zm_Imbibed_Seeds_P Parameter: Tissue Value: Aerial vs. Embryo
  misc_feature: MA Experiment ID: 108547 Result: Up-regulated in Transcription
  misc_feature: MA Experiment 108547 PARAMETER Experiment Name: Zm_Imbibed_Seeds_P Parameter: Age (day) Value: 4 vs. 2
  misc_feature: MA Experiment 108547 PARAMETER Experiment Name: Zm_Imbibed_Seeds_P Parameter: Organism Value: Zea mays
  misc_feature: MA Experiment 108547 PARAMETER Experiment Name: Zm_Imbibed_Seeds_P Parameter: Plant Line Value: 35A19
  misc_feature: MA Experiment 108547 PARAMETER Experiment Name: Zm_Imbibed_Seeds_P Parameter: Tissue Value: Aerial vs. Embryo
  misc_feature: MA Experiment ID: 20000492 Result: Down-regulated in Transcription
  misc_feature: MA Experiment 20000492 PARAMETER Experiment Name: Zm_Hybrid_Seed_Dev_P Parameter: DAP Value: 12
  misc_feature: MA Experiment 20000492 PARAMETER Experiment Name: Zm_Hybrid_Seed_Dev_P Parameter: Organism Value: Zea mays
  misc_feature: MA Experiment 20000492 PARAMETER Experiment Name: Zm_Hybrid_Seed_Dev_P Parameter: Plant Line Value: 35A19
  misc_feature: MA Experiment 20000492 PARAMETER Experiment Name: Zm_Hybrid_Seed_Dev_P Parameter: Tissue Value: Fert Kernel vs. Unfert Floret
  misc_feature: MA Experiment ID: 20000535 Result: Down-regulated in Transcription
  misc_feature: MA Experiment 20000535 PARAMETER Experiment Name: Zm_Hybrid_Seed_Dev_P Parameter: DAP Value: 30 vs. 12
  misc_feature: MA Experiment 20000535 PARAMETER Experiment Name: Zm_Hybrid_Seed_Dev_P Parameter: Organism Value: Zea mays
  misc_feature: MA Experiment 20000535 PARAMETER Experiment Name: Zm_Hybrid_Seed_Dev_P Parameter: Plant Line Value: 35A19
  misc_feature: MA Experiment 20000535 PARAMETER Experiment Name: Zm_Hybrid_Seed_Dev_P Parameter: Tissue Value: Embryo vs. Unfert Floret
gttcaccgagaccttggactactattcggccatgttcgagtcaatcgacacgaacctgccacgggacaacaaggagcggatcaacgtggagcagcactgtcttgccaaggacatcgtgaacatcatcgcctgcgaggggaaggaccgggtggagcgtcacgagctcctgggcaaatggcggtcgaggctgaccatggccgggttcagaccatacccgctgagctcgtacgtgaactcggtgatcaggaagctccttgcctgctactcggacaagtacaccctggaagagaaggatggcgcgatgctgctcggctggaagaacaggaagttgatatctgcttctgcttggcactgacagtaacgttttcagaagaccggaagtacacgtcaactcttacatatatatatgtatgtatgcataatgaattacctggtctgctttccgcaaaaaaggacgccctttgttgnacatgtacatgatgctgtacccttagttttcctgaagtgcagaccagagaagagaacattgacattagattgtagctgntaagctgtatggtaattacagttttnttttgctntcatgtattcacccctgtcatggacttttccaagngtatttttagntaatcagcatgcatacatgctgagatgctttttagtnttc

SEQ ID NO: 14326 - protein, 159 aa, Zea mays subsp. mays
  peptide (1)..(159): Ceres Seq. ID no. 12468825
  misc_feature (156)..(156): Xaa is any aa, unknown or other
VHRDLGLLFGHVRVNRHEPATGQQGADQRGAALSCQGHREHHRLRGEGPGGASRAPGQMAVEADHGRVQTIPAELVRELGDQEAPCLLLGQVHPGREGWRDAARLEEQEVDICFCLALTVTFSEDRKYTSTLTYIYVCMHNELPGLLSAKKDALCXTCT

SEQ ID NO: 14327 - protein, 117 aa, Zea mays subsp. mays
  peptide (1)..(117): Ceres Seq. ID no. 12468826
  misc_feature (36)..(117): Homolog of NCBI NO: 25989332 NR Description: chitin-inducible gibberellin-responsive protein
  misc_feature (1)..(116): Homolog of NCBI NO: 15238903 NR Description: SCARECROW gene regulator-like; protein id: supported by cDNA: gi_8132288 [Arabidopsis thaliana] phytochrome A signal transduction 1 protein [Arabidopsis
  misc_feature (1)..(116): Homolog of NCBI NO: 26450054 NR Description: putative SCARECROW gene regulator [Arabidopsis
  misc_feature (1)..(117): Homolog of NCBI NO: 25989334 NR Description: chitin-inducible gibberellin-responsive protein
  misc_feature (1)..(116): Homolog of NCBI NO: 11358827 NR Description: scarecrow-like protein 5 [imported] - Arabidopsis
  misc_feature (1)..(116): Homolog of NCBI NO: 23397333 NR Description: putative scarecrow protein [Arabidopsis thaliana]
  misc_feature (1)..(116): Homolog of NCBI NO: 25405382 NR Description: scarecrow-like protein [imported] - Arabidopsis >gi|9454552|gb|AAF87875.1|AC012561_8 Putative transcription
  misc_feature (1)..(116): Homolog of NCBI NO: 30694805 NR Description: scarecrow-like transcription factor 5 (SCL5) thaliana] >gi|24030207|gb|AAN41283.1| putative scarecrow protein
  misc_feature (1)..(116): Homolog of NCBI NO: 14517552 NR Description: F17J6.12/F17J6.12 [Arabidopsis thaliana]
  misc_feature (1)..(116): Homolog of NCBI NO: 37533564 NR Description: putative SCARECROW gene regulator-like [Oryza
FTETLDYYSAMFESIDTNLPRDNKERINVEQHCLAKDIVNIIACEGKDRVERHELLGKWRSRLTMAGFRPYPLSSYVNSVIRKLLACYSDKYTLEEKDGAMLLGWKNRKLISASAWH

SEQ ID NO: 14328 - protein, 107 aa, Zea mays subsp. mays
  peptide (1)..(107): Ceres Seq. ID no. 12468827
  misc_feature (26)..(107): Homolog of NCBI NO: 25989332 NR Description: chitin-inducible gibberellin-responsive protein
  misc_feature (1)..(106): Homolog of NCBI NO: 15238903 NR Description: SCARECROW gene regulator-like; protein id: supported by cDNA: gi_8132288 [Arabidopsis thaliana] phytochrome A signal transduction 1 protein [Arabidopsis
  misc_feature (1)..(106): Homolog of NCBI NO: 26450054 NR Description: putative SCARECROW gene regulator [Arabidopsis
  misc_feature (1)..(107): Homolog of NCBI NO: 25989334 NR Description: chitin-inducible gibberellin-responsive protein
  misc_feature (1)..(106): Homolog of NCBI NO: 11358827 NR Description: scarecrow-like protein 5 [imported] - Arabidopsis
  misc_feature (1)..(106): Homolog of NCBI NO: 23397333 NR Description: putative scarecrow protein [Arabidopsis thaliana]
  misc_feature (1)..(106): Homolog of NCBI NO: 25405382 NR Description: scarecrow-like protein [imported] - Arabidopsis >gi|9454552|gb|AAF87875.1|AC012561_8 Putative transcription
  misc_feature (1)..(106): Homolog of NCBI NO: 30694805 NR Description: scarecrow-like transcription factor 5 (SCL5) thaliana] >gi|24030207|gb|AAN41283.1| putative scarecrow protein
  misc_feature (1)..(106): Homolog of NCBI NO: 14517552 NR Description: F17J6.12/F17J6.12 [Arabidopsis thaliana]
  misc_feature (1)..(106): Homolog of NCBI NO: 37533564 NR Description: putative SCARECROW gene regulator-like [Oryza
MFESIDTNLPRDNKERINVEQHCLAKDIVNIIACEGKDRVERHELLGKWRSRLTMAGFRPYPLSSYVNSVIRKLLACYSDKYTLEEKDGAMLLGWKNRKLISASAWH

SEQ ID NO: 14329 - DNA, 383 bp, Zea mays subsp. mays
  misc_feature (1)..(383): Ceres Seq. ID no. 3477243
  misc_feature: MA Experiment ID: 108522 Result: Down-regulated in Transcription
  misc_feature: MA Experiment 108522 PARAMETER Experiment Name: Zm_42deg_Heat_P Parameter: Age (day) Value: 8
  misc_feature: MA Experiment 108522 PARAMETER Experiment Name: Zm_42deg_Heat_P Parameter: Organism Value: Zea mays
  misc_feature: MA Experiment 108522 PARAMETER Experiment Name: Zm_42deg_Heat_P Parameter: Plant Line Value: 35A19
  misc_feature: MA Experiment 108522 PARAMETER Experiment Name: Zm_42deg_Heat_P Parameter: Temperature (deg C) Value: 42 vs. 22
  misc_feature: MA Experiment 108522 PARAMETER Experiment Name: Zm_42deg_Heat_P Parameter: Timepoint (hr) Value: 1
  misc_feature: MA Experiment 108522 PARAMETER Experiment Name: Zm_42deg_Heat_P Parameter: Tissue Value: Aerial
  misc_feature: MA Experiment ID: 108527 Result: Down-regulated in Transcription
  misc_feature: MA Experiment 108527 PARAMETER Experiment Name: Zm_5mM_NO_P Parameter: Age (day) Value: 8
  misc_feature: MA Experiment 108527 PARAMETER Experiment Name: Zm_5mM_NO_P Parameter: Organism Value: Zea mays
  misc_feature: MA Experiment 108527 PARAMETER Experiment Name: Zm_5mM_NO_P Parameter: Plant Line Value: 35A19
  misc_feature: MA Experiment 108527 PARAMETER Experiment Name: Zm_5mM_NO_P Parameter: Timepoint (hr) Value: 6
  misc_feature: MA Experiment 108527 PARAMETER Experiment Name: Zm_5mM_NO_P Parameter: Tissue Value: Aerial
  misc_feature: MA Experiment 108527 PARAMETER Experiment Name: Zm_5mM_NO_P Parameter: Treatment Value: 5mM NO vs. No Treatment
  misc_feature: MA Experiment ID: 20000534 Result: Down-regulated in Transcription
  misc_feature: MA Experiment 20000534 PARAMETER Experiment Name: Zm_Hybrid_Pollen_P Parameter: Age (day) Value: 8
  misc_feature: MA Experiment 20000534 PARAMETER Experiment Name: Zm_Hybrid_Pollen_P Parameter: Organism Value: Zea mays
  misc_feature: MA Experiment 20000534 PARAMETER Experiment Name: Zm_Hybrid_Pollen_P Parameter: Plant Line Value: 35A19
  misc_feature: MA Experiment 20000534 PARAMETER Experiment Name: Zm_Hybrid_Pollen_P Parameter: Tissue Value: Pollen vs. Aerial
tttttataacatatacaatggktgatggttgggctggggtasctggtgagatattgagattgaagccactagtgatcttccacctgaaaaactttttcttggtcaagactgagaaagacagggaagaggcaatggaccctggaagtattggttttgactcaagcgaacctcaaattcagctgtatttcttacttggtcttgtctatgcggcagtgacaccatttttgctcccttttgtattgatattctttgggtttgcgtacgttgtataccgccaccagataataaatgtgtataatcaagaatacgagagtgcagcagcattttggccaagtgttcatggacgcataatcacagcgttgattgtatcacagctgcttctc

SEQ ID NO: 14330 - protein, 127 aa, Zea mays subsp. mays
  peptide (1)..(127): Ceres Seq. ID no. 3477244
  misc_feature (1)..(126): Pfam Name: Domain of unknown function DUF221 Pfam Description: Domain of unknown function DUF221
  misc_feature (1)..(126): Homolog of NCBI NO: 34913548 NR Description: OJ1029_F04.25 [Oryza sativa (japonica
  misc_feature (1)..(126): Homolog of NCBI NO: 15233100 NR Description: unknown protein; protein id: At3g21620.1 thaliana] >gi|11994398|dbj|BAB02357.1|
  misc_feature (1)..(126): Homolog of NCBI NO: 15233476 NR Description: unknown protein; protein id: At4g04340.1, by cDNA: gi_15810532, supported by cDNA: gi_20260619 [Arabidopsis >gi|25407261|pir||H85054 hypothetical protein AT4g04340
  misc_feature (1)..(126): Homolog of NCBI NO: 15810533 NR Description: unknown protein [Arabidopsis thaliana]
  misc_feature (1)..(126): Homolog of NCBI NO: 15234725 NR Description: putative protein; protein id: At4g22120.1
  misc_feature (1)..(126): Homolog of NCBI NO: 7486105 NR Description: hypothetical protein F24O1.3 - Arabidopsis
  misc_feature (1)..(126): Homolog of NCBI NO: 25404887 NR Description: protein F24O1.4 [imported] - Arabidopsis thaliana
  misc_feature (1)..(126): Homolog of NCBI NO: 17381104 NR Description: unknown protein [Arabidopsis thaliana]
  misc_feature (1)..(126): Homolog of NCBI NO: 22328665 NR Description: hypothetical protein; protein id: At4g15430.1,
  misc_feature (1)..(126): Homolog of NCBI NO: 25402694 NR Description: hypothetical protein [imported] - Arabidopsis >gi|3157932|gb|AAC17615.1| Similar to hypothetical protein HYP1
  misc_feature (7)..(7): Xaa is any aa, unknown or other
  misc_feature (14)..(14): Xaa is any aa, unknown or other
FITYTMXDGWAGVXGEILRLKPLVIFHLKNFFLVKTEKDREEAMDPGSIGFDSSEPQIQLYFLLGLVYAAVTPFLLPFVLIFFGFAYVVYRHQIINVYNQEYESAAAFWPSVHGRIITALIVSQLLL

SEQ ID NO: 14331 - protein, 122 aa, Zea mays subsp. mays
  peptide (1)..(122): Ceres Seq. ID no. 3477245
  misc_feature (1)..(121): Pfam Name: Domain of unknown function DUF221 Pfam Description: Domain of unknown function DUF221
  misc_feature (1)..(121): Homolog of NCBI NO: 34913548 NR Description: OJ1029_F04.25 [Oryza sativa (japonica
  misc_feature (1)..(121): Homolog of NCBI NO: 15233100 NR Description: unknown protein; protein id: At3g21620.1 thaliana] >gi|11994398|dbj|BAB02357.1|
  misc_feature (1)..(121): Homolog of NCBI NO: 15233476 NR Description: unknown protein; protein id: At4g04340.1, by cDNA: gi_15810532, supported by cDNA: gi_20260619 [Arabidopsis >gi|25407261|pir||H85054 hypothetical protein AT4g04340
  misc_feature (1)..(121): Homolog of NCBI NO: 15810533 NR Description: unknown protein [Arabidopsis thaliana]
  misc_feature (1)..(121): Homolog of NCBI NO: 15234725 NR Description: putative protein; protein id: At4g22120.1
  misc_feature (1)..(121): Homolog of NCBI NO: 7486105 NR Description: hypothetical protein F24O1.3 - Arabidopsis
  misc_feature (1)..(121): Homolog of NCBI NO: 25404887 NR Description: protein F24O1.4 [imported] - Arabidopsis thaliana
  misc_feature (1)..(121): Homolog of NCBI NO: 17381104 NR Description: unknown protein [Arabidopsis thaliana]
  misc_feature (1)..(121): Homolog of NCBI NO: 22328665 NR Description: hypothetical protein; protein id: At4g15430.1,
  misc_feature (1)..(121): Homolog of NCBI NO: 25402694 NR Description: hypothetical protein [imported] - Arabidopsis >gi|3157932|gb|AAC17615.1| Similar to hypothetical protein HYP1
  misc_feature (2)..(2): Xaa is any aa, unknown or other
  misc_feature (9)..(9): Xaa is any aa, unknown or other
MXDGWAGVXGEILRLKPLVIFHLKNFFLVKTEKDREEAMDPGSIGFDSSEPQIQLYFLLGLVYAAVTPFLLPFVLIFFGFAYVVYRHQIINVYNQEYESAAAFWPSVHGRIITALIVSQLLL

SEQ ID NO: 14332 - protein, 84 aa, Zea mays subsp. mays
  peptide (1)..(84): Ceres Seq. ID no. 3477246
  misc_feature (1)..(83): Pfam Name: Domain of unknown function DUF221 Pfam Description: Domain of unknown function DUF221
  misc_feature (1)..(83): Homolog of NCBI NO: 34913548 NR Description: OJ1029_F04.25 [Oryza sativa (japonica
  misc_feature (1)..(83): Homolog of NCBI NO: 15233100 NR Description: unknown protein; protein id: At3g21620.1 thaliana] >gi|11994398|dbj|BAB02357.1|
  misc_feature (1)..(83): Homolog of NCBI NO: 15233476 NR Description: unknown protein; protein id: At4g04340.1, by cDNA: gi_15810532, supported by cDNA: gi_20260619 [Arabidopsis >gi|25407261|pir||H85054 hypothetical protein AT4g04340
  misc_feature (1)..(83): Homolog of NCBI NO: 15810533 NR Description: unknown protein [Arabidopsis thaliana]
  misc_feature (1)..(83): Homolog of NCBI NO: 15234725 NR Description: putative protein; protein id: At4g22120.1
  misc_feature (1)..(83): Homolog of NCBI NO: 7486105 NR Description: hypothetical protein F24O1.3 - Arabidopsis
  misc_feature (1)..(83): Homolog of NCBI NO: 25404887 NR Description: protein F24O1.4 [imported] - Arabidopsis thaliana
  misc_feature (1)..(83): Homolog of NCBI NO: 17381104 NR Description: unknown protein [Arabidopsis thaliana]
  misc_feature (1)..(83): Homolog of NCBI NO: 22328665 NR Description: hypothetical protein; protein id: At4g15430.1,
  misc_feature (1)..(83): Homolog of NCBI NO: 25402694 NR Description: hypothetical protein [imported] - Arabidopsis >gi|3157932|gb|AAC17615.1| Similar to hypothetical protein HYP1
MDPGSIGFDSSEPQIQLYFLLGLVYAAVTPFLLPFVLIFFGFAYVVYRHQIINVYNQEYESAAAFWPSVHGRIITALIVSQLLL

SEQ ID NO: 14333 - DNA, 566 bp, Zea mays subsp. mays
  misc_feature (1)..(566): Ceres Seq. ID no. 13564026
  misc_feature: MA Experiment ID: 108522 Result: Up-regulated in Transcription
  misc_feature: MA Experiment 108522 PARAMETER Experiment Name: Zm_42deg_Heat_P Parameter: Age (day) Value: 8
  misc_feature: MA Experiment 108522 PARAMETER Experiment Name: Zm_42deg_Heat_P Parameter: Organism Value: Zea mays
  misc_feature: MA Experiment 108522 PARAMETER Experiment Name: Zm_42deg_Heat_P Parameter: Plant Line Value: 35A19
  misc_feature: MA Experiment 108522 PARAMETER Experiment Name: Zm_42deg_Heat_P Parameter: Temperature (deg C) Value: 42 vs. 22
  misc_feature: MA Experiment 108522 PARAMETER Experiment Name: Zm_42deg_Heat_P Parameter: Timepoint (hr) Value: 1
  misc_feature: MA Experiment 108522 PARAMETER Experiment Name: Zm_42deg_Heat_P Parameter: Tissue Value: Aerial
agcagaggcggtggagctgttctggaggatgagaaaggcgagggttaaggatgacgcagtgactatggttgccctgctataaaagcctgtgcggagctgggtgacctagaacttgggcggtgggtgcatgcacgagtggacttggaagggtggcagcggaggactgtgttgctggacaatgctctcatccatatgtatgtgaagtgtggtgctgtggaagatgcacatcgcttgtttgggatgatgccaaggcggagctccgtttcttggactactatgatctcgggtcttgcaatgcatggtcacccccaggaggcgctggacttgttccagagaatgcaggatcggcctgatggtgccacgctgctggcagttctgcgggcatgcagtctggcagggaggattgatgatgcacggtggtactttgaaagtatggaaagagtttacgggataaatccagagatacaacactatggatgcatggttgacatgctctgttgctggagacggttgaatgaarcacttgagcttgkggagaaaatgccattccagccaaacgagggtgc

SEQ ID NO: 14334 - protein, 124 aa, Zea mays subsp. mays
  peptide (1)..(124): Ceres Seq. ID no. 13564027
  misc_feature (1)..(27): Pfam Name: PPR repeat Pfam Description: PPR repeat
  misc_feature (1)..(123): Homolog of NCBI NO: 34910594 NR Description: putative selenium-binding protein [Oryza sativa
  misc_feature (1)..(122): Homolog of NCBI NO: 15225375 NR Description: pentatricopeptide (PPR) repeat-containing protein
  misc_feature (1)..(123): Homolog of NCBI NO: 7487134 NR Description: hypothetical protein T18B16.160 - Arabidopsis >gi|2828294|emb|CAA16708.1| putatative protein [Arabidopsis >gi|7268714|emb|CAB78921.1| putatative protein [Arabidopsis
  misc_feature (1)..(122): Homolog of NCBI NO: 15227724 NR Description: pentatricopeptide (PPR) repeat-containing protein
  misc_feature (1)..(122): Homolog of NCBI NO: 28392910 NR Description: putative selenium-binding protein [Arabidopsis
  misc_feature (1)..(122): Homolog of NCBI NO: 38345581 NR Description: OSJNBa0027H06.17 [Oryza sativa (japonica
  misc_feature (1)..(122): Homolog of NCBI NO: 9759241 NR Description: gene_id:MNC17.11~pir||T04732~strong similarity to
  misc_feature (1)..(122): Homolog of NCBI NO: 15228653 NR Description: pentatricopeptide (PPR) repeat-containing protein thaliana] >gi|9293916|dbj|BAB01819.1|
  misc_feature (1)..(122): Homolog of NCBI NO: 15237835 NR Description: pentatricopeptide (PPR) repeat-containing protein
  misc_feature (1)..(121): Homolog of NCBI NO: 22773237 NR Description: Hypothetical protein [Oryza sativa (japonica
  misc_feature (110)..(110): Xaa is any aa, unknown or other
  misc_feature (114)..(114): Xaa is any aa, unknown or other
MYVKCGAVEDAHRLFGMMPRRSSVSWTTMISGLAMHGHPQEALDLFQRMQDRPDGATLLAVLRACSLAGRIDDARWYFESMERVYGINPEIQHYGCMVDMLCCWRRLNEXLELXEKMPFQPNEG

SEQ ID NO: 14335 - protein, 108 aa, Zea mays subsp. mays
  peptide (1)..(108): Ceres Seq. ID no. 13564028
  misc_feature (1)..(107): Homolog of NCBI NO: 34910594 NR Description: putative selenium-binding protein [Oryza sativa
  misc_feature (1)..(106): Homolog of NCBI NO: 15225375 NR Description: pentatricopeptide (PPR) repeat-containing protein
  misc_feature (1)..(107): Homolog of NCBI NO: 7487134 NR Description: hypothetical protein T18B16.160 - Arabidopsis >gi|2828294|emb|CAA16708.1| putatative protein [Arabidopsis >gi|7268714|emb|CAB78921.1| putatative protein [Arabidopsis
  misc_feature (1)..(106): Homolog of NCBI NO: 15227724 NR Description: pentatricopeptide (PPR) repeat-containing protein
  misc_feature (1)..(106): Homolog of NCBI NO: 28392910 NR Description: putative selenium-binding protein [Arabidopsis
  misc_feature (1)..(106): Homolog of NCBI NO: 38345581 NR Description: OSJNBa0027H06.17 [Oryza sativa (japonica
  misc_feature (1)..(106): Homolog of NCBI NO: 9759241 NR Description: gene_id:MNC17.11~pir||T04732~strong similarity to
  misc_feature (1)..(106): Homolog of NCBI NO: 15228653 NR Description: pentatricopeptide (PPR) repeat-containing protein thaliana] >gi|9293916|dbj|BAB01819.1|
  misc_feature (1)..(106): Homolog of NCBI NO: 15237835 NR Description: pentatricopeptide (PPR) repeat-containing protein
  misc_feature (1)..(105): Homolog of NCBI NO: 22773237 NR Description: Hypothetical protein [Oryza sativa (japonica
  misc_feature (94)..(94): Xaa is any aa, unknown or other
  misc_feature (98)..(98): Xaa is any aa, unknown or other
MMPRRSSVSWTTMISGLAMHGHPQEALDLFQRMQDRPDGATLLAVLRACSLAGRIDDARWYFESMERVYGINPEIQHYGCMVDMLCCWRRLNEXLELXEKMPFQPNEG

SEQ ID NO: 14336 - protein, 107 aa, Zea mays subsp. mays
  peptide (1)..(107): Ceres Seq. ID no. 13564029
  misc_feature (1)..(106): Homolog of NCBI NO: 34910594 NR Description: putative selenium-binding protein [Oryza sativa
  misc_feature (1)..(105): Homolog of NCBI NO: 15225375 NR Description: pentatricopeptide (PPR) repeat-containing protein
  misc_feature (1)..(106): Homolog of NCBI NO: 7487134 NR Description: hypothetical protein T18B16.160 - Arabidopsis >gi|2828294|emb|CAA16708.1| putatative protein [Arabidopsis >gi|7268714|emb|CAB78921.1| putatative protein [Arabidopsis
  misc_feature (1)..(105): Homolog of NCBI NO: 15227724 NR Description: pentatricopeptide (PPR) repeat-containing protein
  misc_feature (1)..(105): Homolog of NCBI NO: 28392910 NR Description: putative selenium-binding protein [Arabidopsis
  misc_feature (1)..(105): Homolog of NCBI NO: 38345581 NR Description: OSJNBa0027H06.17 [Oryza sativa (japonica
  misc_feature (1)..(105): Homolog of NCBI NO: 9759241 NR Description: gene_id:MNC17.11~pir||T04732~strong similarity to
  misc_feature (1)..(105): Homolog of NCBI NO: 15228653 NR Description: pentatricopeptide (PPR) repeat-containing protein thaliana] >gi|9293916|dbj|BAB01819.1|
  misc_feature (1)..(105): Homolog of NCBI NO: 15237835 NR Description: pentatricopeptide (PPR) repeat-containing protein
  misc_feature (1)..(104): Homolog of NCBI NO: 22773237 NR Description: Hypothetical protein [Oryza sativa (japonica
  misc_feature (93)..(93): Xaa is any aa, unknown or other
  misc_feature (97)..(97): Xaa is any aa, unknown or other
MPRRSSVSWTTMISGLAMHGHPQEALDLFQRMQDRPDGATLLAVLRACSLAGRIDDARWYFESMERVYGINPEIQHYGCMVDMLCCWRRLNEXLELXEKMPFQPNEG

SEQ ID NO: 14337 - DNA, 496 bp, Zea mays subsp. mays
  misc_feature (1)..(496): Ceres Seq. ID no. 3477512
  misc_feature: MA Experiment ID: 108535 Result: Up-regulated in Transcription
  misc_feature: MA Experiment 108535 PARAMETER Experiment Name: Zm_Meristem_P Parameter: Age (day) Value: 8
  misc_feature: MA Experiment 108535 PARAMETER Experiment Name: Zm_Meristem_P Parameter: Organism Value: Zea mays
  misc_feature: MA Experiment 108535 PARAMETER Experiment Name: Zm_Meristem_P Parameter: Plant Line Value: 35A19
  misc_feature: MA Experiment 108535 PARAMETER Experiment Name: Zm_Meristem_P Parameter: Tissue Value: Root Meristem vs. Above Root Meristem
  misc_feature: MA Experiment ID: 108543 Result: Up-regulated in Transcription
  misc_feature: MA Experiment ID: 20000479 Result: Down-regulated in Transcription
  misc_feature: MA Experiment 20000479 PARAMETER Experiment Name: Zm_Drought_P Parameter: Age (day) Value: 10
  misc_feature: MA Experiment 20000479 PARAMETER Experiment Name: Zm_Drought_P Parameter: Organism Value: Zea mays
  misc_feature: MA Experiment 20000479 PARAMETER Experiment Name: Zm_Drought_P Parameter: Plant Line Value: 35A19
  misc_feature: MA Experiment 20000479 PARAMETER Experiment Name: Zm_Drought_P Parameter: Timepoint (hr) Value: 48
  misc_feature: MA Experiment 20000479 PARAMETER Experiment Name: Zm_Drought_P Parameter: Tissue Value: Aerial
  misc_feature: MA Experiment 20000479 PARAMETER Experiment Name: Zm_Drought_P Parameter: Treatment Value: Drought vs. No Drought
agcgtcgccctcgtcgacgaggtcaccgtmrtccgcgacagggtcaccagggtctcgcgaggctgctgcttcgtgatctgcccatcaagggaggaggctgataaggctgtgactacataccacaacaagcgcacactacctggggcctcaagtccattgcaagtaaaatatgccgatggggagttggaaagattggagcacaagctcttcgttggaatgctccccaaaaatgtaacacatgctgaaatgacggatttattttcaaaatatggaaatataaaggatttacagattctgagaggctctcagcaaacgagcaaagctggttgtgcctttctaaaatatgaaacaaaagagcaagctgtggctgctatagaagctctaaatggaacacacaaaatagagggttcaagtgttcccttggttgtcaaatgggctgacactgaaaaggaaaggcaggctcgaaaagcacaaaaagctcaanttccagtcttct

SEQ ID NO: 14338 - protein, 165 aa, Zea mays subsp. mays
  peptide (1)..(165): Ceres Seq. ID no. 3477513
  misc_feature (69)..(141): Pfam Name: RNA recognition motif. (a.k.a. RRM, RBD, or RNP domain) Pfam Description: RNA recognition motif. (a.k.a. RRM, RBD, or RNP
  misc_feature (2)..(161): Homolog of NCBI NO: 34907248 NR Description: putative ribonucleoprotein [Oryza sativa cultivar- group)] >gi|20160777|dbj|BAB89718.1| putative
  misc_feature (3)..(164): Homolog of NCBI NO: 7488303 NR Description: ribonucleoprotein homolog T4I9.1 - Arabidopsis >gi|3924594|gb|AAC79095.1| putative ribonucleoprotein thaliana] >gi|4262139|gb|AAD14439.1| putative ribonucleoprotein
  misc_feature (3)..(164): Homolog of NCBI NO: 18412143 NR Description: RNA-binding CELF protein, putative; protein id: supported by cDNA: 114653. [Arabidopsis thaliana]
  misc_feature (3)..(164): Homolog of NCBI NO: 30679366 NR Description: RNA-binding protein, putative [Arabidopsis >gi|17529054|gb|AAL38737.1| putative ribonucleoprotein
  misc_feature (3)..(164): Homolog of NCBI NO: 22329313 NR Description: RNA-binding CELF protein, putative; protein id: [Arabidopsis thaliana] >gi|26449591|dbj|BAC41921.1| putative [Arabidopsis thaliana] >gi|28950997|gb|AAO63422.1| At1g03457
  misc_feature (3)..(164): Homolog of NCBI NO: 7488302 NR Description: ribonucleoprotein homolog F21B7.26 - Arabidopsis
  misc_feature (3)..(164): Homolog of NCBI NO: 25386552 NR Description: protein F21B7.8 [imported] - Arabidopsis thaliana
  misc_feature (1)..(161): Homolog of NCBI NO: 33354192 NR Description: putative CUG triplet repeat RNA-binding protein 1
  misc_feature (1)..(161): Homolog of NCBI NO: 33354193 NR Description: flowering time control protein FCA-like protein
  misc_feature (66)..(161): Homolog of NCBI NO: 34899186 NR Description: CUG triplet repeat RNA-binding protein 1 [Oryza
  misc_feature (10)..(10): Xaa is any aa, unknown or other
  misc_feature (11)..(11): Xaa is any aa, unknown or other
  misc_feature (162)..(162): Xaa is any aa, unknown or other
SVALVDEVTXXRDRVTRVSRGCCFVICPSREEADKAVTTYHNKRTLPGASSPLQVKYADGELERLEHKLFVGMLPKNVTHAEMTDLFSKYGNIKDLQILRGSQQTSKAGCAFLKYETKEQAVAAIEALNGTHKIEGSSVPLVVKWADTEKERQARKAQKAQXPVF

SEQ ID NO: 14339 - protein, 93 aa, Zea mays subsp. mays
  peptide (1)..(93): Ceres Seq. ID no. 3477514
  misc_feature (1)..(69): Pfam Name: RNA recognition motif. (a.k.a. RRM, RBD, or RNP domain) Pfam Description: RNA recognition motif. (a.k.a. RRM, RBD, or RNP
  misc_feature (1)..(89): Homolog of NCBI NO: 34907248 NR Description: putative ribonucleoprotein [Oryza sativa cultivar- group)] >gi|20160777|dbj|BAB89718.1| putative
  misc_feature (1)..(92): Homolog of NCBI NO: 7488303 NR Description: ribonucleoprotein homolog T4I9.1 - Arabidopsis >gi|3924594|gb|AAC79095.1| putative ribonucleoprotein thaliana] >gi|4262139|gb|AAD14439.1| putative ribonucleoprotein
  misc_feature (1)..(92): Homolog of NCBI NO: 18412143 NR Description: RNA-binding CELF protein, putative; protein id: supported by cDNA: 114653. [Arabidopsis thaliana]
  misc_feature (1)..(92): Homolog of NCBI NO: 30679366 NR Description: RNA-binding protein, putative [Arabidopsis >gi|17529054|gb|AAL38737.1| putative ribonucleoprotein
  misc_feature (1)..(92): Homolog of NCBI NO: 22329313 NR Description: RNA-binding CELF protein, putative; protein id: [Arabidopsis thaliana] >gi|26449591|dbj|BAC41921.1| putative [Arabidopsis thaliana] >gi|28950997|gb|AAO63422.1| At1g03457
  misc_feature (1)..(92): Homolog of NCBI NO: 7488302 NR Description: ribonucleoprotein homolog F21B7.26 - Arabidopsis
  misc_feature (1)..(92): Homolog of NCBI NO: 25386552 NR Description: protein F21B7.8 [imported] - Arabidopsis thaliana
  misc_feature (1)..(89): Homolog of NCBI NO: 33354192 NR Description: putative CUG triplet repeat RNA-binding protein 1
  misc_feature (1)..(89): Homolog of NCBI NO: 33354193 NR Description: flowering time control protein FCA-like protein
  misc_feature (1)..(89): Homolog of NCBI NO: 34899186 NR Description: CUG triplet repeat RNA-binding protein 1 [Oryza
  misc_feature (90)..(90): Xaa is any aa, unknown or other
MLPKNVTHAEMTDLFSKYGNIKDLQILRGSQQTSKAGCAFLKYETKEQAVAAIEALNGTHKIEGSSVPLVVKWADTEKERQARKAQKAQXPVF

SEQ ID NO: 14340 - protein, 83 aa, Zea mays subsp. mays
  peptide (1)..(83): Ceres Seq. ID no. 3477515
  misc_feature (1)..(59): Pfam Name: RNA recognition motif. (a.k.a. RRM, RBD, or RNP domain) Pfam Description: RNA recognition motif. (a.k.a. RRM, RBD, or RNP
  misc_feature (1)..(79): Homolog of NCBI NO: 34907248 NR Description: putative ribonucleoprotein [Oryza sativa cultivar- group)] >gi|20160777|dbj|BAB89718.1| putative
  misc_feature (1)..(82): Homolog of NCBI NO: 7488303 NR Description: ribonucleoprotein homolog T4I9.1 - Arabidopsis >gi|3924594|gb|AAC79095.1| putative ribonucleoprotein thaliana] >gi|4262139|gb|AAD14439.1| putative ribonucleoprotein
  misc_feature (1)..(82): Homolog of NCBI NO: 18412143 NR Description: RNA-binding CELF protein, putative; protein id: supported by cDNA: 114653. [Arabidopsis thaliana]
  misc_feature (1)..(82): Homolog of NCBI NO: 30679366 NR Description: RNA-binding protein, putative [Arabidopsis >gi|17529054|gb|AAL38737.1| putative ribonucleoprotein
  misc_feature (1)..(82): Homolog of NCBI NO: 22329313 NR Description: RNA-binding CELF protein, putative; protein id: [Arabidopsis thaliana] >gi|26449591|dbj|BAC41921.1| putative [Arabidopsis thaliana] >gi|28950997|gb|AAO63422.1| At1g03457
  misc_feature (1)..(82): Homolog of NCBI NO: 7488302 NR Description: ribonucleoprotein homolog F21B7.26 - Arabidopsis
  misc_feature (1)..(82): Homolog of NCBI NO: 25386552 NR Description: protein F21B7.8 [imported] - Arabidopsis thaliana
  misc_feature (1)..(79): Homolog of NCBI NO: 33354192 NR Description: putative CUG triplet repeat RNA-binding protein 1
  misc_feature (1)..(79): Homolog of NCBI NO: 33354193 NR Description: flowering time control protein FCA-like protein
  misc_feature (1)..(79): Homolog of NCBI NO: 34899186 NR Description: CUG triplet repeat RNA-binding protein 1 [Oryza
  misc_feature (80)..(80): Xaa is any aa, unknown or other
MTDLFSKYGNIKDLQILRGSQQTSKAGCAFLKYETKEQAVAAIEALNGTHKIEGSSVPLVVKWADTEKERQARKAQKAQXPVF

SEQ ID NO: 14341 - DNA, 1144 bp, Zea mays subsp. mays; identical to SEQ ID NO: 13990
  misc_feature (1)..(1144): Ceres Seq. ID no. 13598993
  misc_feature: MA Experiment ID: 108547 Result: Up-regulated in Transcription
  misc_feature: MA Experiment 108547 PARAMETER Experiment Name: Zm_Imbibed_Seeds_P Parameter: Age (day) Value: 4 vs. 2
  misc_feature: MA Experiment 108547 PARAMETER Experiment Name: Zm_Imbibed_Seeds_P Parameter: Organism Value: Zea mays
  misc_feature: MA Experiment 108547 PARAMETER Experiment Name: Zm_Imbibed_Seeds_P Parameter: Plant Line Value: 35A19
  misc_feature: MA Experiment 108547 PARAMETER Experiment Name: Zm_Imbibed_Seeds_P Parameter: Tissue Value: Aerial vs. Embryo
  misc_feature: MA Experiment ID: 20000479 Result: Up-regulated in Transcription
  misc_feature: MA Experiment 20000479 PARAMETER Experiment Name: Zm_Drought_P Parameter: Age (day) Value: 10
  misc_feature: MA Experiment 20000479 PARAMETER Experiment Name: Zm_Drought_P Parameter: Organism Value: Zea mays
  misc_feature: MA Experiment 20000479 PARAMETER Experiment Name: Zm_Drought_P Parameter: Plant Line Value: 35A19
  misc_feature: MA Experiment 20000479 PARAMETER Experiment Name: Zm_Drought_P Parameter: Timepoint (hr) Value: 48
  misc_feature: MA Experiment 20000479 PARAMETER Experiment Name: Zm_Drought_P Parameter: Tissue Value: Aerial
  misc_feature: MA Experiment 20000479 PARAMETER Experiment Name: Zm_Drought_P Parameter: Treatment Value: Drought vs. No Drought
  misc_feature: MA Experiment ID: 20000630 Result: Down-regulated in Transcription
  misc_feature: MA Experiment 20000630 PARAMETER Experiment Name: Zm_Herbicide-Treatments_P Parameter: Timepoint (hr) Value: 4
  misc_feature: MA Experiment 20000630 PARAMETER Experiment Name: Zm_Herbicide-Treatments_P Parameter: Tissue Value: Aerial
  misc_feature: MA Experiment 20000630 PARAMETER Experiment Name: Zm_Herbicide-Treatments_P Parameter: Treatment Value: Roundup vs. No Treatment

SEQ ID NO: 14342 - protein, 238 aa, Zea mays subsp. mays; identical to SEQ ID NO: 13991
  peptide (1)..(238): Ceres Seq. ID no. 13598994
  misc_feature (71)..(153): Pfam Name: mttA/Hcf106 family Pfam Description: mttA/Hcf106 family
  misc_feature (71)..(153): Pfam Name: mttA/Hcf106 family Pfam Description: mttA/Hcf106 family
  misc_feature (1)..(238): Homolog of NCBI NO: 7542514 NR Description: HCF106C precursor protein [Zea mays]
  misc_feature (1)..(238): Homolog of NCBI NO: 7489747 NR Description: HCF106 protein precursor, chloroplast - maize
  misc_feature (4)..(197): Homolog of NCBI NO: 15277532 NR Description: HCF106 [Pisum sativum]
  misc_feature (2)..(228): Homolog of NCBI NO: 15237156 NR Description: HCF106 (gb|AAD32652.1) [Arabidopsis thaliana] HCF106 [Arabidopsis thaliana] >gi|10177410|dbj|BAB10541.1| HCF106 thaliana] >gi|26452484|dbj|BAC43327.1| putative HCF106
  misc_feature (67)..(127): Homolog of NCBI NO: 22298928 NR Description: ORF_ID:tsl1385~hypothetical protein
  misc_feature (1)..(238): Homolog of NCBI NO: 7489747 NR Description: HCF106 protein precursor, chloroplast - maize
  misc_feature (2)..(228): Homolog of NCBI NO: 15237156 NR Description: HCF106 (gb|AAD32652.1) [Arabidopsis thaliana] HCF106 [Arabidopsis thaliana] >gi|10177410|dbj|BAB10541.1| HCF106 thaliana] >gi|26452484|dbj|BAC43327.1| putative HCF106
  misc_feature (65)..(155): Homolog of NCBI NO: 4877984 NR Description: THA4 [Zea mays]
  misc_feature (68)..(217): Homolog of NCBI NO: 22960273 NR Description: hypothetical protein [Rhodobacter sphaeroides]
  misc_feature (67)..(159): Homolog of NCBI NO: 33864103 NR Description: mttA/Hcf106 family [Prochlorococcus marinus str.
  misc_feature (67)..(149): Homolog of NCBI NO: 16329622 NR Description: hypothetical protein [Synechocystis sp. PCC 6803]
  misc_feature (68)..(162): Homolog of NCBI NO: 37522572 NR Description: hypothetical protein gsr3003 [Gloeobacter
  misc_feature (67)..(127): Homolog of NCBI NO: 22298928 NR Description: ORF_ID:tsl1385~hypothetical protein
  misc_feature (4)..(197): Homolog of NCBI NO: 15277532 NR Description: HCF106 [Pisum sativum]
  misc_feature (1)..(238): Homolog of NCBI NO: 7542514 NR Description: HCF106C precursor protein [Zea mays]
  misc_feature (68)..(162): Homolog of NCBI NO: 37522572 NR Description: hypothetical protein gsr3003 [Gloeobacter
  misc_feature (67)..(149): Homolog of NCBI NO: 16329622 NR Description: hypothetical protein [Synechocystis sp. PCC 6803]
  misc_feature (67)..(159): Homolog of NCBI NO: 33864103 NR Description: mttA/Hcf106 family [Prochlorococcus marinus str.
  misc_feature (68)..(217): Homolog of NCBI NO: 22960273 NR Description: hypothetical protein [Rhodobacter sphaeroides]
  misc_feature (65)..(155): Homolog of NCBI NO: 4877984 NR Description: THA4 [Zea mays]

SEQ ID NO: 14343 - protein, 190 aa, Zea mays subsp. mays; identical to SEQ ID NO: 13992
  peptide (1)..(190): Ceres Seq. ID no. 13598995
  misc_feature (23)..(105): Pfam Name: mttA/Hcf106 family Pfam Description: mttA/Hcf106 family
  misc_feature (23)..(105): Pfam Name: mttA/Hcf106 family Pfam Description: mttA/Hcf106 family
  misc_feature (1)..(190): Homolog of NCBI NO: 7542514 NR Description: HCF106C precursor protein [Zea mays]
  misc_feature (1)..(190): Homolog of NCBI NO: 7489747 NR Description: HCF106 protein precursor, chloroplast - maize
  misc_feature (1)..(149): Homolog of NCBI NO: 15277532 NR Description: HCF106 [Pisum sativum]
  misc_feature (1)..(180): Homolog of NCBI NO: 15237156 NR Description: HCF106 (gb|AAD32652.1) [Arabidopsis thaliana] HCF106 [Arabidopsis thaliana] >gi|10177410|dbj|BAB10541.1| HCF106 thaliana] >gi|26452484|dbj|BAC43327.1| putative HCF106
  misc_feature (19)..(79): Homolog of NCBI NO: 22298928 NR Description: ORF_ID:tsl1385~hypothetical protein
  misc_feature (1)..(190): Homolog of NCBI NO: 7489747 NR Description: HCF106 protein precursor, chloroplast - maize
  misc_feature (1)..(180): Homolog of NCBI NO: 15237156 NR Description: HCF106 (gb|AAD32652.1) [Arabidopsis thaliana] HCF106 [Arabidopsis thaliana] >gi|10177410|dbj|BAB10541.1| HCF106 thaliana] >gi|26452484|dbj|BAC43327.1| putative HCF106
  misc_feature (17)..(107): Homolog of NCBI NO: 4877984 NR Description: THA4 [Zea mays]
  misc_feature (20)..(169): Homolog of NCBI NO: 22960273 NR Description: hypothetical protein [Rhodobacter sphaeroides]
  misc_feature (19)..(111): Homolog of NCBI NO: 33864103 NR Description: mttA/Hcf106 family [Prochlorococcus marinus str.
  misc_feature (19)..(101): Homolog of NCBI NO: 16329622 NR Description: hypothetical protein [Synechocystis sp. PCC 6803]
  misc_feature (20)..(114): Homolog of NCBI NO: 37522572 NR Description: hypothetical protein gsr3003 [Gloeobacter
  misc_feature (19)..(79): Homolog of NCBI NO: 22298928 NR Description: ORF_ID:tsl1385~hypothetical protein
  misc_feature (1)..(149): Homolog of NCBI NO: 15277532 NR Description: HCF106 [Pisum sativum]
  misc_feature (1)..(190): Homolog of NCBI NO: 7542514 NR Description: HCF106C precursor protein [Zea mays]
  misc_feature (20)..(114): Homolog of NCBI NO: 37522572 NR Description: hypothetical protein gsr3003 [Gloeobacter
  misc_feature (19)..(101): Homolog of NCBI NO: 16329622 NR Description: hypothetical protein [Synechocystis sp. PCC 6803]
  misc_feature (19)..(111): Homolog of NCBI NO: 33864103 NR Description: mttA/Hcf106 family [Prochlorococcus marinus str.
  misc_feature (20)..(169): Homolog of NCBI NO: 22960273 NR Description: hypothetical protein [Rhodobacter sphaeroides]
  misc_feature (17)..(107): Homolog of NCBI NO: 4877984 NR Description: THA4 [Zea mays]

SEQ ID NO: 14344 - protein, 133 aa, Zea mays subsp. mays; identical to SEQ ID NO: 13993
  peptide (1)..(133): Ceres Seq. ID no. 13598996

SEQ ID NO: 14345 - DNA, 1094 bp, Zea mays subsp. mays
  misc_feature (1)..(1094): Ceres Seq. ID no. 13504098
  misc_feature: MA Experiment ID: 108504 Result: Up-regulated in Transcription
  misc_feature: MA Experiment 108504 PARAMETER Experiment Name: Zm_Drought_P Parameter: Age (day) Value: 8
  misc_feature: MA Experiment 108504 PARAMETER Experiment Name: Zm_Drought_P Parameter: Organism Value: Zea mays
  misc_feature: MA Experiment 108504 PARAMETER Experiment Name: Zm_Drought_P Parameter: Plant Line Value: 35A19
  misc_feature: MA Experiment 108504 PARAMETER Experiment Name: Zm_Drought_P Parameter: Timepoint (hr) Value: 12
  misc_feature: MA Experiment 108504 PARAMETER Experiment Name: Zm_Drought_P Parameter: Tissue Value: Aerial
  misc_feature: MA Experiment 108504 PARAMETER Experiment Name: Zm_Drought_P Parameter: Treatment Value: Drought vs. No Drought
  misc_feature: MA Experiment ID: 108522 Result: Up-regulated in Transcription
  misc_feature: MA Experiment 108522 PARAMETER Experiment Name: Zm_42deg_Heat_P Parameter: Age (day) Value: 8
  misc_feature: MA Experiment 108522 PARAMETER Experiment Name: Zm_42deg_Heat_P Parameter: Organism Value: Zea mays
  misc_feature: MA Experiment 108522 PARAMETER Experiment Name: Zm_42deg_Heat_P Parameter: Plant Line Value: 35A19
  misc_feature: MA Experiment 108522 PARAMETER Experiment Name: Zm_42deg_Heat_P Parameter: Temperature (deg C) Value: 42 vs. 22
  misc_feature: MA Experiment 108522 PARAMETER Experiment Name: Zm_42deg_Heat_P Parameter: Timepoint (hr) Value: 1
  misc_feature: MA Experiment 108522 PARAMETER Experiment Name: Zm_42deg_Heat_P Parameter: Tissue Value: Aerial
  misc_feature: MA Experiment ID: 108523 Result: Up-regulated in Transcription
  misc_feature: MA Experiment 108523 PARAMETER Experiment Name: Zm_42deg_Heat_P Parameter: Age (day) Value: 8
  misc_feature: MA Experiment 108523 PARAMETER Experiment Name: Zm_42deg_Heat_P Parameter: Organism Value: Zea mays
  misc_feature: MA Experiment 108523 PARAMETER Experiment Name: Zm_42deg_Heat_P Parameter: Plant Line Value: 35A19
  misc_feature: MA Experiment 108523 PARAMETER Experiment Name: Zm_42deg_Heat_P Parameter: Temperature (deg C) Value: 42 vs. 22
  misc_feature: MA Experiment 108523 PARAMETER Experiment Name: Zm_42deg_Heat_P Parameter: Timepoint (hr) Value: 6
  misc_feature: MA Experiment 108523 PARAMETER Experiment Name: Zm_42deg_Heat_P Parameter: Tissue Value: Aerial
  misc_feature: MA Experiment ID: 108526 Result: Up-regulated in Transcription
  misc_feature: MA Experiment 108526 PARAMETER Experiment Name: Zm_5mM_NO_P Parameter: Age (day) Value: 8
  misc_feature: MA Experiment 108526 PARAMETER Experiment Name: Zm_5mM_NO_P Parameter: Organism Value: Zea mays
  misc_feature: MA Experiment 108526 PARAMETER Experiment Name: Zm_5mM_NO_P Parameter: Plant Line Value: 35A19
  misc_feature: MA Experiment 108526 PARAMETER Experiment Name: Zm_5mM_NO_P Parameter: Timepoint (hr) Value: 1
  misc_feature: MA Experiment 108526 PARAMETER Experiment Name: Zm_5mM_NO_P Parameter: Tissue Value: Aerial
  misc_feature: MA Experiment 108526 PARAMETER Experiment Name: Zm_5mM_NO_P Parameter: Treatment Value: 5mM NO vs. No Treatment
  misc_feature: MA Experiment ID: 108527 Result: Up-regulated in Transcription
  misc_feature: MA Experiment 108527 PARAMETER Experiment Name: Zm_5mM_NO_P Parameter: Age (day) Value: 8
  misc_feature: MA Experiment 108527 PARAMETER Experiment Name: Zm_5mM_NO_P Parameter: Organism Value: Zea mays
  misc_feature: MA Experiment 108527 PARAMETER Experiment Name: Zm_5mM_NO_P Parameter: Plant Line Value: 35A19
  misc_feature: MA Experiment 108527 PARAMETER Experiment Name: Zm_5mM_NO_P Parameter: Timepoint (hr) Value: 6
  misc_feature: MA Experiment 108527 PARAMETER Experiment Name: Zm_5mM_NO_P Parameter: Tissue Value: Aerial
  misc_feature: MA Experiment 108527 PARAMETER Experiment Name: Zm_5mM_NO_P Parameter: Treatment Value: 5mM NO vs. No Treatment
  misc_feature: MA Experiment ID: 108533 Result: Up-regulated in Transcription
  misc_feature: MA Experiment 108533 PARAMETER Experiment Name: Zm_4deg_Cold_P Parameter: Age (hr) Value: 8
  misc_feature: MA Experiment 108533 PARAMETER Experiment Name: Zm_4deg_Cold_P Parameter: Organism Value: Zea mays
  misc_feature: MA Experiment 108533 PARAMETER Experiment Name: Zm_4deg_Cold_P Parameter: Plant Line Value: 35A19
  misc_feature: MA Experiment 108533 PARAMETER Experiment Name: Zm_4deg_Cold_P Parameter: Temperature (deg C) Value: 4 vs. 22
  misc_feature: MA Experiment 108533 PARAMETER Experiment Name: Zm_4deg_Cold_P Parameter: Timepoint (hr) Value: 1
  misc_feature: MA Experiment 108533 PARAMETER Experiment Name: Zm_4deg_Cold_P Parameter: Tissue Value: Aerial
  misc_feature: MA Experiment ID: 108534 Result: Up-regulated in Transcription
  misc_feature: MA Experiment 108534 PARAMETER Experiment Name: Zm_4deg_Cold_P Parameter: Age (hr) Value: 8
  misc_feature: MA Experiment 108534 PARAMETER Experiment Name: Zm_4deg_Cold_P Parameter: Organism Value: Zea mays
  misc_feature: MA Experiment 108534 PARAMETER Experiment Name: Zm_4deg_Cold_P Parameter: Plant Line Value: 35A19
  misc_feature: MA Experiment 108534 PARAMETER Experiment Name: Zm_4deg_Cold_P Parameter: Temperature (deg C) Value: 4 vs. 22
  misc_feature: MA Experiment 108534 PARAMETER Experiment Name: Zm_4deg_Cold_P Parameter: Timepoint (hr) Value: 6
  misc_feature: MA Experiment 108534 PARAMETER Experiment Name: Zm_4deg_Cold_P Parameter: Tissue Value: Aerial
  misc_feature: MA Experiment ID: 108542 Result: Up-regulated in Transcription
  misc_feature: MA Experiment 108542 PARAMETER Experiment Name: Zm_150mM_NaCl_P Parameter: Age (day) Value: 8
  misc_feature: MA Experiment 108542 PARAMETER Experiment Name: Zm_150mM_NaCl_P Parameter: Organism Value: Zea mays
  misc_feature: MA Experiment 108542 PARAMETER Experiment Name: Zm_150mM_NaCl_P Parameter: Plant Line Value: 35A19
  misc_feature: MA Experiment 108542 PARAMETER Experiment Name: Zm_150mM_NaCl_P Parameter: Timepoint (hr) Value: 6
  misc_feature: MA Experiment 108542 PARAMETER Experiment Name: Zm_150mM_NaCl_P Parameter: Tissue Value: Aerial
  misc_feature: MA Experiment 108542 PARAMETER Experiment Name: Zm_150mM_NaCl_P Parameter: Treatment Value: 150mM NaCl vs. No Treatment
  misc_feature: MA Experiment ID: 108556 Result: Up-regulated in Transcription
  misc_feature: MA Experiment 108556 PARAMETER Experiment Name: Zm_Drought_P Parameter: Age (day) Value: 9
  misc_feature: MA Experiment 108556 PARAMETER Experiment Name: Zm_Drought_P Parameter: Organism Value: Zea mays
  misc_feature: MA Experiment 108556 PARAMETER Experiment Name: Zm_Drought_P Parameter: Plant Line Value: 35A19
  misc_feature: MA Experiment 108556 PARAMETER Experiment Name: Zm_Drought_P Parameter: Timepoint (hr) Value: 24
  misc_feature: MA Experiment 108556 PARAMETER Experiment Name: Zm_Drought_P Parameter: Tissue Value: Aerial
  misc_feature: MA Experiment 108556 PARAMETER Experiment Name: Zm_Drought_P Parameter: Treatment Value: Drought vs. No Drought
  misc_feature: MA Experiment ID: 108559 Result: Up-regulated in Transcription
  misc_feature: MA Experiment 108559 PARAMETER Experiment Name: Zm_5mM_NO_P Parameter: Age (day) Value: 8
  misc_feature: MA Experiment 108559 PARAMETER Experiment Name: Zm_5mM_NO_P Parameter: Organism Value: Zea mays
  misc_feature: MA Experiment 108559 PARAMETER Experiment Name: Zm_5mM_NO_P Parameter: Plant Line Value: 35A19
  misc_feature: MA Experiment 108559 PARAMETER Experiment Name: Zm_5mM_NO_P Parameter: Timepoint (hr) Value: 12
  misc_feature: MA Experiment 108559 PARAMETER Experiment Name: Zm_5mM_NO_P Parameter: Tissue Value: Aerial
  misc_feature: MA Experiment 108559 PARAMETER Experiment Name: Zm_5mM_NO_P Parameter: Treatment Value: 5mM NO vs. No Treatment
  misc_feature: MA Experiment ID: 108597 Result: Up-regulated in Transcription
  misc_feature: MA Experiment 108597 PARAMETER Experiment Name: Zm_100uM_ABA_P Parameter: Age (day) Value: 9
  misc_feature: MA Experiment 108597 PARAMETER Experiment Name: Zm_100uM_ABA_P Parameter: Organism Value: Zea mays
  misc_feature: MA Experiment 108597 PARAMETER Experiment Name: Zm_100uM_ABA_P Parameter: Plant Line Value: 35A19
  misc_feature: MA Experiment 108597 PARAMETER Experiment Name: Zm_100uM_ABA_P Parameter: Timepoint (hr) Value: 24
  misc_feature: MA Experiment 108597 PARAMETER Experiment Name: Zm_100uM_ABA_P Parameter: Tissue Value: Aerial
  misc_feature: MA Experiment 108597 PARAMETER Experiment Name: Zm_100uM_ABA_P Parameter: Treatment Value: 100uM ABA vs. No Treatment
  misc_feature: MA Experiment ID: 20000479 Result: Up-regulated in Transcription
  misc_feature: MA Experiment 20000479 PARAMETER Experiment Name: Zm_Drought_P Parameter: Age (day) Value: 10
  misc_feature: MA Experiment 20000479 PARAMETER Experiment Name: Zm_Drought_P Parameter: Organism Value: Zea mays
  misc_feature: MA Experiment 20000479 PARAMETER Experiment Name: Zm_Drought_P Parameter: Plant Line Value: 35A19
  misc_feature: MA Experiment 20000479 PARAMETER Experiment Name: Zm_Drought_P Parameter: Timepoint (hr) Value: 48
  misc_feature: MA Experiment 20000479 PARAMETER Experiment Name: Zm_Drought_P Parameter: Tissue Value: Aerial
  misc_feature: MA Experiment 20000479 PARAMETER Experiment Name: Zm_Drought_P Parameter: Treatment Value: Drought vs. No Drought
  misc_feature: MA Experiment ID: 20000480 Result: Up-regulated in Transcription
  misc_feature: MA Experiment 20000480 PARAMETER Experiment Name: Zm_Drought_P Parameter: Age (day) Value: 11
  misc_feature: MA Experiment 20000480 PARAMETER Experiment Name: Zm_Drought_P Parameter: Organism Value: Zea mays
  misc_feature: MA Experiment 20000480 PARAMETER Experiment Name: Zm_Drought_P Parameter: Plant Line Value: 35A19
  misc_feature: MA Experiment 20000480 PARAMETER Experiment Name: Zm_Drought_P Parameter: Timepoint (hr) Value: 72
  misc_feature: MA Experiment 20000480 PARAMETER Experiment Name: Zm_Drought_P Parameter: Tissue Value: Aerial
  misc_feature: MA Experiment 20000480 PARAMETER Experiment Name: Zm_Drought_P Parameter: Treatment Value: Drought vs. No Drought
  misc_feature: MA Experiment ID: 20000630 Result: Up-regulated in Transcription
  misc_feature: MA Experiment 20000630 PARAMETER Experiment Name: Zm_Herbicide-Treatments_P Parameter: Timepoint (hr) Value: 4
  misc_feature: MA Experiment 20000630 PARAMETER Experiment Name: Zm_Herbicide-Treatments_P Parameter: Tissue Value: Aerial
  misc_feature: MA Experiment 20000630 PARAMETER Experiment Name: Zm_Herbicide-Treatments_P Parameter: Treatment Value: Roundup vs. No Treatment
cccagctccgcgccgtgtacgggcacaccttctcgtactgcctggtggagcacggcagcgacgccggcagcaaggtggtgttcggggaggactacttggtgctggcgcatccgcagctcaagtacacggcgttcgcgcccacgtcgtcgccggcggacacattctattacgtgaagctcaagggcgtgctggtgggcggcgacctgctgaacatcagctcggacacgtgggacgtgggcaaggacgggtccggcggcacgatcatcgactccggcacgacgctgagctacttcgtggagccggcgtaccaggtgatccggcaagcgttcgtcgatcgcatgagcaggctgtaccctctgatcccggacttcccggtgctgaacccgtgctacaacgtctctggcgtggagcgacccgaggtgccggagatgtcgctgctgttcgccgacggtgccgtgtgggacttccccgcggagaactacttngtccggctggacccggacggcatcatgtgcctggcggtccggggcaccccgcgcaccggcatgtccatcatcggtaacttccagcagcagaactttcacgtcgtgtacgacctgcagaacaaccggctgggcttcgcgccgcggcggtgcgccgaggtgtagtgtatagccgccggcgaggcctcctgagactgagaggacgaacaattcgaactcagtcctcgcttgattgattggattgggaggcaaattgggtgtagaaatttttggttgggaaggacggtggcacgtacgcaagctctaatacatagttttttttgttgcatttatctccaaggagagaaggttagggatattttattaaggaccgttcaggtgggttgtaacgggaaaatactgattttgttcccatgtacaatacctgtttcttcactcaaattttagaaattgtaagttgtagattaagaatgagagtgcacacaatcttttttttaagtaattgctcatgaagatatgattacaactacggaatagattccatcttttagaatatcatgcacaaattattcttattctatcaaatgctatgtaaggccctatttcaatgtc

SEQ ID NO: 14346 - protein, 214 aa, Zea mays subsp. mays
  peptide (1)..(214): Ceres Seq. ID no. 13504099
  misc_feature (1)..(208): Pfam Name: Eukaryotic aspartyl protease Pfam Description: Eukaryotic aspartyl protease
  misc_feature (1)..(208): Pfam Name: Eukaryotic aspartyl protease Pfam Description: Eukaryotic aspartyl protease
  misc_feature (1)..(214): Homolog of NCBI NO: 15231625 NR Description: expressed protein [Arabidopsis thaliana]
  misc_feature (1)..(214): Homolog of NCBI NO: 15228044 NR Description: chloroplast nucleoid DNA binding protein -related thaliana] >gi|20197868|gb|AAM15292.1| putative chloroplast DNA binding protein [Arabidopsis thaliana]
  misc_feature (1)..(214): Homolog of NCBI NO: 25408826 NR Description: hypothetical protein At2g42980 [imported] -
  misc_feature (6)..(212): Homolog of NCBI NO: 15223368 NR Description: chloroplast nucleoid DNA binding protein -related
  misc_feature (1)..(212): Homolog of NCBI NO: 15230868 NR Description: expressed protein [Arabidopsis thaliana]
  misc_feature (1)..(214): Homolog of NCBI NO: 15228044 NR Description: chloroplast nucleoid DNA binding protein -related thaliana] >gi|20197868|gb|AAM15292.1| putative chloroplast DNA binding protein [Arabidopsis thaliana]
  misc_feature (6)..(212): Homolog of NCBI NO: 15223368 NR Description: chloroplast nucleoid DNA binding protein -related
  misc_feature (1)..(211): Homolog of NCBI NO: 28392860 NR Description: unknown protein [Arabidopsis thaliana]
  misc_feature (1)..(211): Homolog of NCBI NO: 15231010 NR Description: expressed protein [Arabidopsis thaliana]
  misc_feature (1)..(211): Homolog of NCBI NO: 15290061 NR Description: nucleoid DNA-binding protein cnd41-like protein
  misc_feature (1)..(211): Homolog of NCBI NO: 15228618 NR Description: expressed protein [Arabidopsis thaliana]
  misc_feature (6)..(212): Homolog of NCBI NO: 21594980 NR Description: chloroplast nucleoid DNA binding protein,
  misc_feature (1)..(212): Homolog of NCBI NO: 15230868 NR Description: expressed protein [Arabidopsis thaliana]
  misc_feature (1)..(214): Homolog of NCBI NO: 25408826 NR Description: hypothetical protein At2g42980 [imported] -
  misc_feature (1)..(214): Homolog of NCBI NO: 15231625 NR Description: expressed protein [Arabidopsis thaliana]
  misc_feature (6)..(212): Homolog of NCBI NO: 21594980 NR Description: chloroplast nucleoid DNA binding protein,
  misc_feature (1)..(211): Homolog of NCBI NO: 15228618 NR Description: expressed protein [Arabidopsis thaliana]
  misc_feature (1)..(211): Homolog of NCBI NO: 15290061 NR Description: nucleoid DNA-binding protein cnd41-like protein
  misc_feature (1)..(211): Homolog of NCBI NO: 15231010 NR Description: expressed protein [Arabidopsis thaliana]
  misc_feature (1)..(211): Homolog of NCBI NO: 28392860 NR Description: unknown protein [Arabidopsis thaliana]
  misc_feature (161)..(161): Xaa is any aa, unknown or other
QLRAVYGHTFSYCLVEHGSDAGSKVVFGEDYLVLAHPQLKYTAFAPTSSPADTFYYVKLKGVLVGGDLLNISSDTWDVGKDGSGGTIIDSGTTLSYFVEPAYQVIRQAFVDRMSRLYPLIPDFPVLNPCYNVSGVERPEVPEMSLLFADGAVWDFPAENYXVRLDPDGIMCLAVRGTPRTGMSIIGNFQQQNFHVVYDLQNNRLGFAPRRCAEV

SEQ ID NO: 14347 - protein, 186 aa, Zea mays subsp. mays
  peptide (1)..(186): Ceres Seq. ID no. 13504100
  misc_feature (162)..(162): Xaa is any aa, unknown or other
PAPRRVRAHLLVLPGGARQRRRQQGGVRGGLLGAGASAAQVHGVRAHVVAGGHILLREAQGRAGGRRPAEHQLGHVGRGQGRVRRHDHRLRHDAELLRGAGVPGDPASVRRSHEQAVPSDPGLPGAEPVLQRLWRGATRGAGDVAAVRRRCRVGLPRGELLXPAGPGRHHVPGGPGHPAHRHVHHR

SEQ ID NO: 14348 - DNA, 503 bp, Zea mays subsp. mays
  misc_feature (1)..(503): Ceres Seq. ID no. 3477685
  misc_feature: MA Experiment ID: 108515 Result: Down-regulated in Transcription
  misc_feature: MA Experiment 108515 PARAMETER Experiment Name: Zm_2mM_SA_P Parameter: Age (day) Value: 8
  misc_feature: MA Experiment 108515 PARAMETER Experiment Name: Zm_2mM_SA_P Parameter: Organism Value: Zea mays
  misc_feature: MA Experiment 108515 PARAMETER Experiment Name: Zm_2mM_SA_P Parameter: Plant Line Value: 35A19
  misc_feature: MA Experiment 108515 PARAMETER Experiment Name: Zm_2mM_SA_P Parameter: Timepoint (hr) Value: 12
  misc_feature: MA Experiment 108515 PARAMETER Experiment Name: Zm_2mM_SA_P Parameter: Tissue Value: Aerial
  misc_feature: MA Experiment 108515 PARAMETER Experiment Name: Zm_2mM_SA_P Parameter: Treatment Value: 2mM SA vs. No Treatment
actttgttgatcctgagagaattgagcatggtagcccattaaggttacctggccacccagtgaatggtcagccgatggatctggagggctggtcagggattcaaacagaggcttctcagcatatgggggttctacaagcatcatcaatgggctggaatggtgctcctgtacttgctgccactcctgttgtcaagaaagtcatgaggctggatgttccagtagacaagtatcctaactacaactttgttggtcgtttattggggccgcgaggtaactccctgaaaagggttgaagcttcaacccaatgtagagtttacattcgaggacggggttctgtgaaagactctgttaaggaagacaagctgagggataaacctgggtatgaacaccttaatgaacaactgcatgtgcttgtggaagcagagtttccagcagatatggttgatgtgcgtcttaatcaagctgtgtccatcctaraggatcttcttaaaccaattgacgag

SEQ ID NO: 14349 - protein, 167 aa, Zea mays subsp. mays
  peptide (1)..(167): Ceres Seq. ID no. 3477686
  misc_feature (68)..(122): Pfam Name: KH domain Pfam Description: KH domain
  misc_feature (1)..(166): Homolog of NCBI NO: 34907446 NR Description: P0434C04.5 [Oryza sativa (japonica
  misc_feature (1)..(166): Homolog of NCBI NO: 16930473 NR Description: At1g09660/F21M12_5 [Arabidopsis thaliana]
  misc_feature (1)..(166): Homolog of NCBI NO: 22329449 NR Description: KH domain quaking protein, putative; protein id: supported by cDNA: gi_16930472, supported by cDNA: gi_19310522 thaliana] >gi|26452384|dbj|BAC43277.1| putative elongation factor
  misc_feature (1)..(166): Homolog of NCBI NO: 12322716 NR Description: unknown protein; 28504-31237 [Arabidopsis
  misc_feature (1)..(166): Homolog of NCBI NO: 30680583 NR Description: KH domain protein [Arabidopsis thaliana]
  misc_feature (1)..(166): Homolog of NCBI NO: 15224909 NR Description: KH domain protein; protein id: At2g38610.1, by cDNA: gi_14596032, supported by cDNA: gi_17473661, supported
  misc_feature (6)..(166): Homolog of NCBI NO: 15236738 NR Description: KH domain protein; protein id: At4g26480.1
  misc_feature (6)..(166): Homolog of NCBI NO: 20268733 NR Description: unknown protein [Arabidopsis thaliana]
  misc_feature (3)..(166): Homolog of NCBI NO: 34900448 NR Description: contains EST C27129(C51039)~similar to
  misc_feature (5)..(166): Homolog of NCBI NO: 40645104 NR Description: hypothetical protein [Nicotiana tabacum]
  misc_feature (159)..(159): Xaa is any aa, unknown or other
FVDPERIEHGSPLRLPGHPVNGQPMDLEGWSGIQTEASQHMGVLQASSMGWNGAPVLAATPVVKKVMRLDVPVDKYPNYNFVGRLLGPRGNSLKRVEASTQCRVYIRGRGSVKDSVKEDKLRDKPGYEHLNEQLHVLVEAEFPADMVDVRLNQAVSILXDLLKPIDE

SEQ ID NO: 14350 - protein, 143 aa, Zea mays subsp. mays
  peptide (1)..(143): Ceres Seq. ID no. 3477687
  misc_feature (44)..(98): Pfam Name: KH domain Pfam Description: KH domain
  misc_feature (1)..(142): Homolog of NCBI NO: 34907446 NR Description: P0434C04.5 [Oryza sativa (japonica
  misc_feature (1)..(142): Homolog of NCBI NO: 16930473 NR Description: At1g09660/F21M12_5 [Arabidopsis thaliana]
  misc_feature (1)..(142): Homolog of NCBI NO: 22329449 NR Description: KH domain quaking protein, putative; protein id: supported by cDNA: gi_16930472, supported by cDNA: gi_19310522 thaliana] >gi|26452384|dbj|BAC43277.1| putative elongation factor
  misc_feature (1)..(142): Homolog of NCBI NO: 12322716 NR Description: unknown protein; 28504-31237 [Arabidopsis
  misc_feature (1)..(142): Homolog of NCBI NO: 30680583 NR Description: KH domain protein [Arabidopsis thaliana]
  misc_feature (1)..(142): Homolog of NCBI NO: 15224909 NR Description: KH domain protein; protein id: At2g38610.1, by cDNA: gi_14596032, supported by cDNA: gi_17473661, supported
  misc_feature (1)..(142): Homolog of NCBI NO: 15236738 NR Description: KH domain protein; protein id: At4g26480.1
  misc_feature (1)..(142): Homolog of NCBI NO: 20268733 NR Description: unknown protein [Arabidopsis thaliana]
  misc_feature (1)..(142): Homolog of NCBI NO: 34900448 NR Description: contains EST C27129(C51039)~similar to
  misc_feature (1)..(142): Homolog of NCBI NO: 40645104 NR Description: hypothetical protein [Nicotiana tabacum]
  misc_feature (135)..(135): Xaa is any aa, unknown or other
MDLEGWSGIQTEASQHMGVLQASSMGWNGAPVLAATPVVKKVMRLDVPVDKYPNYNFVGRLLGPRGNSLKRVEASTQCRVYIRGRGSVKDSVKEDKLRDKPGYEHLNEQLHVLVEAEFPADMVDVRLNQAVSILXDLLKPIDE

SEQ ID NO: 14351 - protein, 127 aa, Zea mays subsp. mays
  peptide (1)..(127): Ceres Seq. ID no. 3477688
  misc_feature (28)..(82): Pfam Name: KH domain Pfam Description: KH domain
  misc_feature (1)..(126): Homolog of NCBI NO: 34907446 NR Description: P0434C04.5 [Oryza sativa (japonica
  misc_feature (1)..(126): Homolog of NCBI NO: 16930473 NR Description: At1g09660/F21M12_5 [Arabidopsis thaliana]
  misc_feature (1)..(126): Homolog of NCBI NO: 22329449 NR Description: KH domain quaking protein, putative; protein id: supported by cDNA: gi_16930472, supported by cDNA: gi_19310522 thaliana] >gi|26452384|dbj|BAC43277.1| putative elongation factor
  misc_feature (1)..(126): Homolog of NCBI NO: 12322716 NR Description: unknown protein; 28504-31237 [Arabidopsis
  misc_feature (1)..(126): Homolog of NCBI NO: 30680583 NR Description: KH domain protein [Arabidopsis thaliana]
  misc_feature (1)..(126): Homolog of NCBI NO: 15224909 NR Description: KH domain protein; protein id: At2g38610.1, by cDNA: gi_14596032, supported by cDNA: gi_17473661, supported
  misc_feature (1)..(126): Homolog of NCBI NO: 15236738 NR Description: KH domain protein; protein id: At4g26480.1
  misc_feature (1)..(126): Homolog of NCBI NO: 20268733 NR Description: unknown protein [Arabidopsis thaliana]
  misc_feature (1)..(126): Homolog of NCBI NO: 34900448 NR Description: contains EST C27129(C51039)~similar to
  misc_feature (1)..(126): Homolog of NCBI NO: 40645104 NR Description: hypothetical protein [Nicotiana tabacum]
  misc_feature (119)..(119): Xaa is any aa, unknown or other
MGVLQASSMGWNGAPVLAATPVVKKVMRLDVPVDKYPNYNFVGRLLGPRGNSLKRVEASTQCRVYIRGRGSVKDSVKEDKLRDKPGYEHLNEQLHVLVEAEFPADMVDVRLNQAVSILXDLLKPIDE

SEQ ID NO: 14352 - DNA, 520 bp, Zea mays subsp. mays
  misc_feature (1)..(520): Ceres Seq. ID no. 3477628
  misc_feature: MA Experiment ID: 20000492 Result: Up-regulated in Transcription
  misc_feature: MA Experiment 20000492 PARAMETER Experiment Name: Zm_Hybrid_Seed_Dev_P Parameter: DAP Value: 12
  misc_feature: MA Experiment 20000492 PARAMETER Experiment Name: Zm_Hybrid_Seed_Dev_P Parameter: Organism Value: Zea mays
  misc_feature: MA Experiment 20000492 PARAMETER Experiment Name: Zm_Hybrid_Seed_Dev_P Parameter: Plant Line Value: 35A19
  misc_feature: MA Experiment 20000492 PARAMETER Experiment Name: Zm_Hybrid_Seed_Dev_P Parameter: Tissue Value: Fert Kernel vs. Unfert Floret
gacctgaccggcgggatcaagttctgctctaagttacctgtccagaagaagcagcagcagcagcaggctgcctgccagaagctgatcataaagcacggcgccctgaagaagctcagcctgtggggctgttcagcgatcgacgccttgtacgtgaactgcccggagctggtcgatctgaacctcaacgcgtgcacgaaccttcatccagagcggctgctgatccagtgccccaagctgaaggacgtgcacgtcagcgggtgccgcgacatgctgatcggcgccgtcaggaaccaggtcctgaacgagttcgcggccgccgagccccggctgccctgcaagcggctggccgacgggtcgaagcgcgtgcacgtgccccacttcatgatcgagcagctggaggagcaggagaaatggggcgggccgcggaagagccagtgcaccgtccacctcacataggcagataggctaggccggccgctgggcgctggcgagtgctactgstggcctgtgaagtgaggcc

SEQ ID NO: 14353 - protein, 151 aa, Zea mays subsp. mays
  peptide (1)..(151): Ceres Seq. ID no. 3477629
  misc_feature (26)..(148): Homolog of NCBI NO: 18087570 NR Description: AT3g54650/T5N23_10 [Arabidopsis thaliana]
  misc_feature (26)..(100): Homolog of NCBI NO: 18410106 NR Description: F-box protein family, AtFBL17; protein id:
DLTGGIKFCSKLPVQKKQQQQQAACQKLIIKHGALKKLSLWGCSAIDALYVNCPELVDLNLNACTNLHPERLLIQCPKLKDVHVSGCRDMLIGAVRNQVLNEFAAAEPRLPCKRLADGSKRVHVPHFMIEQLEEQEKWGGPRKSQCTVHLT

SEQ ID NO: 14354 - DNA, 583 bp, Zea mays subsp. mays
  misc_feature (1)..(583): Ceres Seq. ID no. 3477594
  misc_feature: MA Experiment ID: 108504 Result: Down-regulated in Transcription
  misc_feature: MA Experiment 108504 PARAMETER Experiment Name: Zm_Drought_P Parameter: Age (day) Value: 8
  misc_feature: MA Experiment 108504 PARAMETER Experiment Name: Zm_Drought_P Parameter: Organism Value: Zea mays
  misc_feature: MA Experiment 108504 PARAMETER Experiment Name: Zm_Drought_P Parameter: Plant Line Value: 35A19
  misc_feature: MA Experiment 108504 PARAMETER Experiment Name: Zm_Drought_P Parameter: Timepoint (hr) Value: 12
  misc_feature: MA Experiment 108504 PARAMETER Experiment Name: Zm_Drought_P Parameter: Tissue Value: Aerial
  misc_feature: MA Experiment 108504 PARAMETER Experiment Name: Zm_Drought_P Parameter: Treatment Value: Drought vs. No Drought
  misc_feature: MA Experiment ID: 108556 Result: Down-regulated in Transcription
  misc_feature: MA Experiment 108556 PARAMETER Experiment Name: Zm_Drought_P Parameter: Age (day) Value: 9
  misc_feature: MA Experiment 108556 PARAMETER Experiment Name: Zm_Drought_P Parameter: Organism Value: Zea mays
  misc_feature: MA Experiment 108556 PARAMETER Experiment Name: Zm_Drought_P Parameter: Plant Line Value: 35A19
  misc_feature: MA Experiment 108556 PARAMETER Experiment Name: Zm_Drought_P Parameter: Timepoint (hr) Value: 24
  misc_feature: MA Experiment 108556 PARAMETER Experiment Name: Zm_Drought_P Parameter: Tissue Value: Aerial
  misc_feature: MA Experiment 108556 PARAMETER Experiment Name: Zm_Drought_P Parameter: Treatment Value: Drought vs. No Drought
  misc_feature: MA Experiment ID: 20000480 Result: Down-regulated in Transcription
  misc_feature: MA Experiment 20000480 PARAMETER Experiment Name: Zm_Drought_P Parameter: Age (day) Value: 11
  misc_feature: MA Experiment 20000480 PARAMETER Experiment Name: Zm_Drought_P Parameter: Organism Value: Zea mays
  misc_feature: MA Experiment 20000480 PARAMETER Experiment Name: Zm_Drought_P Parameter: Plant Line Value: 35A19
  misc_feature: MA Experiment 20000480 PARAMETER Experiment Name: Zm_Drought_P Parameter: Timepoint (hr) Value: 72
  misc_feature: MA Experiment 20000480 PARAMETER Experiment Name: Zm_Drought_P Parameter: Tissue Value: Aerial
  misc_feature: MA Experiment 20000480 PARAMETER Experiment Name: Zm_Drought_P Parameter: Treatment Value: Drought vs. No Drought
  misc_feature: MA Experiment ID: 20000487 Result: Up-regulated in Transcription
  misc_feature: MA Experiment 20000487 PARAMETER Experiment Name: Zm_50mM_NH4NO3_L_to_H_P Parameter: Organism Value: Zea mays
  misc_feature: MA Experiment 20000487 PARAMETER Experiment Name: Zm_50mM_NH4NO3_L_to_H_P Parameter: Timepoint (hr) Value: 4
  misc_feature: MA Experiment 20000487 PARAMETER Experiment Name: Zm_50mM_NH4NO3_L_to_H_P Parameter: Tissue Value: Leaves
  misc_feature: MA Experiment 20000487 PARAMETER Experiment Name: Zm_50mM_NH4NO3_L_to_H_P Parameter: Treatment Value: 50mM NH4NO3 vs. 100mM Mannitol
  misc_feature: MA Experiment ID: 20000488 Result: Up-regulated in Transcription
  misc_feature: MA Experiment 20000488 PARAMETER Experiment Name: Zm_50mM_NH4NO3_L_to_H_P Parameter: Organism Value: Zea mays
  misc_feature: MA Experiment 20000488 PARAMETER Experiment Name: Zm_50mM_NH4NO3_L_to_H_P Parameter: Timepoint (hr) Value: 8
  misc_feature: MA Experiment 20000488 PARAMETER Experiment Name: Zm_50mM_NH4NO3_L_to_H_P Parameter: Tissue Value: Leaves
  misc_feature: MA Experiment 20000488 PARAMETER Experiment Name: Zm_50mM_NH4NO3_L_to_H_P Parameter: Treatment Value: 50mM NH4NO3 vs. 100mM Mannitol
attatatcttgcaatctttcagagccaaaaagaggattactatgaggaacaaacaggctgcattaagtggctcaatgattttgctgagtaccataataagatgcttcaggaggagttggagaaactcaggaatcttcaccctgatgtgaccatcatttatgctgattactatggtgctgcattgaacatattccgtgccccactccagtttggtttcacagtcccattgaatgcgtgttgtggaagtgatgccccatacaactgttccccttcaatattgtgcgggcgtcctggatctacagtgtgtcctgacccatcaaaatacatctcatgggacggcttacacttcactgaggcgagttacaaagttgtcattcaaggagtacttggggggtatgccaagcctcccctttcaraaacctgcaagggtgcggaattcaaagtttctcagcttcaccaatgtacagataatccaacaaacactgtgtcatacgatgctttgagctcttttatttgatctgctcgtaaaagaagtgcatttagagttacagtgggcagcataratgatgttgcaggaccgaac

SEQ ID NO: 14355 - protein, 171 aa, Zea mays subsp. mays
  peptide (1)..(171): Ceres Seq. ID no. 3477595
  misc_feature (1)..(128): Pfam Name: GDSL-like Lipase/Acylhydrolase Pfam Description: GDSL-like Lipase/Acylhydrolase
  misc_feature (1)..(137): Homolog of NCBI NO: 34911800 NR Description: lipase-like protein [Oryza sativa (japonica
  misc_feature (1)..(152): Homolog of NCBI NO: 15218731 NR Description: lipase, putative; protein id: At1g28600.1, by cDNA: 37307., supported by cDNA: gi_14326569 [Arabidopsis >gi|14326570|gb|AAK60329.1|AF385739_1 At1g28600/F1K23_6
  misc_feature (1)..(152): Homolog of NCBI NO: 21593234 NR Description: lipase, putative [Arabidopsis thaliana]
  misc_feature (1)..(155): Homolog of NCBI NO: 10764858 NR Description: F1K23.17 [Arabidopsis thaliana]
  misc_feature (2)..(152): Homolog of NCBI NO: 15225872 NR Description: putative lipase; protein id: At2g27360.1
  misc_feature (2)..(145): Homolog of NCBI NO: 15218728 NR Description: lipase, putative; protein id: At1g28590.1
  misc_feature (2)..(145): Homolog of NCBI NO: 19347801 NR Description: putative lipase [Arabidopsis thaliana]
  misc_feature (2)..(138): Homolog of NCBI NO: 34911804 NR Description: lipase-like protein [Oryza sativa (japonica
  misc_feature (2)..(145): Homolog of NCBI NO: 10764858 NR Description: F1K23.17 [Arabidopsis thaliana]
  misc_feature (2)..(151): Homolog of NCBI NO: 12597843 NR Description: lipase, putative [Arabidopsis thaliana]
  misc_feature (139)..(139): Xaa is any aa, unknown or other
LYLAIFQSQKEDYYEEQTGCIKWLNDFAEYHNKMLQEELEKLRNLHPDVTIIYADYYGAALNIFRAPLQFGFTVPLNACCGSDAPYNCSPSILCGRPGSTVCPDPSKYISWDGLHFTEASYKVVIQGVLGGYAKPPLSXTCKGAEFKVSQLHQCTDNPTNTVSYDALSSFI

SEQ ID NO: 14356 - protein, 138 aa, Zea mays subsp. mays
  peptide (1)..(138): Ceres Seq. ID no. 3477596
  misc_feature (1)..(95): Pfam Name: GDSL-like Lipase/Acylhydrolase Pfam Description: GDSL-like Lipase/Acylhydrolase
  misc_feature (1)..(104): Homolog of NCBI NO: 34911800 NR Description: lipase-like protein [Oryza sativa (japonica
  misc_feature (1)..(119): Homolog of NCBI NO: 15218731 NR Description: lipase, putative; protein id: At1g28600.1, by cDNA: 37307., supported by cDNA: gi_14326569 [Arabidopsis >gi|14326570|gb|AAK60329.1|AF385739_1 At1g28600/F1K23_6
  misc_feature (1)..(119): Homolog of NCBI NO: 21593234 NR Description: lipase, putative [Arabidopsis thaliana]
  misc_feature (1)..(122): Homolog of NCBI NO: 10764858 NR Description: F1K23.17 [Arabidopsis thaliana]
  misc_feature (1)..(119): Homolog of NCBI NO: 15225872 NR Description: putative lipase; protein id: At2g27360.1
  misc_feature (1)..(112): Homolog of NCBI NO: 15218728 NR Description: lipase, putative; protein id: At1g28590.1
  misc_feature (1)..(112): Homolog of NCBI NO: 19347801 NR Description: putative lipase [Arabidopsis thaliana]
  misc_feature (1)..(105): Homolog of NCBI NO: 34911804 NR Description: lipase-like protein [Oryza sativa (japonica
  misc_feature (1)..(112): Homolog of NCBI NO: 10764858 NR Description: F1K23.17 [Arabidopsis thaliana]
  misc_feature (1)..(118): Homolog of NCBI NO: 12597843 NR Description: lipase, putative [Arabidopsis thaliana]
  misc_feature (106)..(106): Xaa is any aa, unknown or other
MLQEELEKLRNLHPDVTIIYADYYGAALNIFRAPLQFGFTVPLNACCGSDAPYNCSPSILCGRPGSTVCPDPSKYISWDGLHFTEASYKVVIQGVLGGYAKPPLSXTCKGAEFKVSQLHQCTDNPTNTVSYDALSSFI

SEQ ID NO: 14357 - protein, 90 aa, Zea mays subsp. mays
  peptide (1)..(90): Ceres Seq. ID no. 3477597
  misc_feature (62)..(62): Xaa is any aa, unknown or other
MRVVEVMPHTTVPLQYCAGVLDLQCVLTHQNTSHGTAYTSLRRVTKLSFKEYLGGMPSLPFXKPARVRNSKFLSFTNVQIIQQTLCHTML

SEQ ID NO: 14358 - DNA, 1127 bp, Zea mays subsp. mays
  misc_feature (1)..(1127): Ceres Seq. ID no. 14305770
  misc_feature: MA Experiment ID: 108515 Result: Up-regulated in Transcription
  misc_feature: MA Experiment 108515 PARAMETER Experiment Name: Zm_2mM_SA_P Parameter: Age (day) Value: 8
  misc_feature: MA Experiment 108515 PARAMETER Experiment Name: Zm_2mM_SA_P Parameter: Organism Value: Zea mays
  misc_feature: MA Experiment 108515 PARAMETER Experiment Name: Zm_2mM_SA_P Parameter: Plant Line Value: 35A19
  misc_feature: MA Experiment 108515 PARAMETER Experiment Name: Zm_2mM_SA_P Parameter: Timepoint (hr) Value: 12
  misc_feature: MA Experiment 108515 PARAMETER Experiment Name: Zm_2mM_SA_P Parameter: Tissue Value: Aerial
  misc_feature: MA Experiment 108515 PARAMETER Experiment Name: Zm_2mM_SA_P Parameter: Treatment Value: 2mM SA vs. No Treatment
  misc_feature: MA Experiment ID: 108527 Result: Up-regulated in Transcription
  misc_feature: MA Experiment 108527 PARAMETER Experiment Name: Zm_5mM_NO_P Parameter: Age (day) Value: 8
  misc_feature: MA Experiment 108527 PARAMETER Experiment Name: Zm_5mM_NO_P Parameter: Organism Value: Zea mays
  misc_feature: MA Experiment 108527 PARAMETER Experiment Name: Zm_5mM_NO_P Parameter: Plant Line Value: 35A19
  misc_feature: MA Experiment 108527 PARAMETER Experiment Name: Zm_5mM_NO_P Parameter: Timepoint (hr) Value: 6
  misc_feature: MA Experiment 108527 PARAMETER Experiment Name: Zm_5mM_NO_P Parameter: Tissue Value: Aerial
  misc_feature: MA Experiment 108527 PARAMETER Experiment Name: Zm_5mM_NO_P Parameter: Treatment Value: 5mM NO vs. No Treatment
  misc_feature: MA Experiment ID: 108535 Result: Up-regulated in Transcription
  misc_feature: MA Experiment 108535 PARAMETER Experiment Name: Zm_Meristem_P Parameter: Age (day) Value: 8
  misc_feature: MA Experiment 108535 PARAMETER Experiment Name: Zm_Meristem_P Parameter: Organism Value: Zea mays
  misc_feature: MA Experiment 108535 PARAMETER Experiment Name: Zm_Meristem_P Parameter: Plant Line Value: 35A19
  misc_feature: MA Experiment 108535 PARAMETER Experiment Name: Zm_Meristem_P Parameter: Tissue Value: Root Meristem vs. Above Root Meristem
  misc_feature: MA Experiment ID: 108544 Result: Down-regulated in Transcription
  misc_feature: MA Experiment ID: 108559 Result: Up-regulated in Transcription
  misc_feature: MA Experiment 108559 PARAMETER Experiment Name: Zm_5mM_NO_P Parameter: Age (day) Value: 8
  misc_feature: MA Experiment 108559 PARAMETER Experiment Name: Zm_5mM_NO_P Parameter: Organism Value: Zea mays
  misc_feature: MA Experiment 108559 PARAMETER Experiment Name: Zm_5mM_NO_P Parameter: Plant Line Value: 35A19
  misc_feature: MA Experiment 108559 PARAMETER Experiment Name: Zm_5mM_NO_P Parameter: Timepoint (hr) Value: 12
  misc_feature: MA Experiment 108559 PARAMETER Experiment Name: Zm_5mM_NO_P Parameter: Tissue Value: Aerial
  misc_feature: MA Experiment 108559 PARAMETER Experiment Name: Zm_5mM_NO_P Parameter: Treatment Value: 5mM NO vs. No Treatment
  misc_feature: MA Experiment ID: 20000626 Result: Up-regulated in Transcription
  misc_feature: MA Experiment 20000626 PARAMETER Experiment Name: Zm_Herbicide-Treatments_P Parameter: Timepoint (hr) Value: 12
  misc_feature: MA Experiment 20000626 PARAMETER Experiment Name: Zm_Herbicide-Treatments_P Parameter: Tissue Value: Aerial
  misc_feature: MA Experiment 20000626 PARAMETER Experiment Name: Zm_Herbicide-Treatments_P Parameter: Treatment Value: Roundup vs. No Treatment
gaaaaaccacgatcccaagtggtggctaggggagccgctctgggccaccgctgccgcccagggggtcctgcctgccacattcttctggccgggttcggaggttacgaagggttcctggaactgccccgacaagtactgccgccactacaatggctcggtgccgtttgaggagagggtcgacaccatccttggctattttgatctcccgcctaaccaaatgccacagttcctgacgctgtactttgaggatcctgatcaccaggggcaccaggtgggtcctgacgatccttcaatcaccgatgcggtcgtacatatcgatgagatgctcgggaggctcattgctggtttggaggctaggggaatgtttgaggatgtgaacattatattggtaggtgaccatggtatggttgggacctgcgataggaagcttgtgtttctcgaagagttggctccatggatcgagttgaagtcagattgggttctgtcaatgactccattgctggcaatcaggccgccagatggtgtgtcgccagctgaggttgtggccaagatgaatgaggggcttggatctgggaaggtgaagaatggggaatatttgaagatgtacttaaaagaggatttgcctactcgcctgcattattcagagagttacaggatcccgccaatcatcgggctggttggggaagggtataagatcgagatgaagcgctccaagagaaatgagtgtggaggagcccatgggtacgacaatgccttcttctcaatgaggaccatattcgccgcacatggacctcgttttcagggtggtagaactgtgccctcatttgagaatgtggagatatacaatgtcatggcttccattctcaatttgaagcctgctccaaacaatggttcagcttctttccctggcacgattctgttgccgaacaaatgatgttggattggttttgtaggagtaagggcacatggatgtatgatggtgttctcatttggttattgtattgtacctcttaaattagacttctgccacatcactgtatctgagcaaaaatgctgctagtagagagttgcttctctctagtgacaacatttggaaacatgttccacatcaaacgtttggctgctcg

SEQ ID NO: 14359 - protein, 310 aa, Zea mays subsp. mays
  peptide (1)..(310): Ceres Seq. ID no. 14305771
  misc_feature (2)..(290): Pfam Name: Type I phosphodiesterase / nucleotide pyrophosphatase Pfam Description: Type I phosphodiesterase / nucleotide
  misc_feature (1)..(309): Homolog of NCBI NO: 15233665 NR Description: nucleotide pyrophosphatase -related protein thaliana] >gi|7487981|pir||T09933 probable phosphodiesterase I
  misc_feature (77)..(308): Homolog of NCBI NO: 13877571 NR Description: nucleotide pyrophosphatase-like protein
  misc_feature (1)..(298): Homolog of NCBI NO: 4159883 NR Description: phosphodiesterase I beta [Homo sapiens]
  misc_feature (2)..(308): Homolog of NCBI NO: 15233659 NR Description: nucleotide pyrophosphatase - like protein thaliana] >gi|7487979|pir||T09931 probable phosphodiesterase I
  misc_feature (1)..(308): Homolog of NCBI NO: 15233662 NR Description: nucleotide pyrophosphatase - like protein thaliana] >gi|7487980|pir||T09932 probable phosphodiesterase I
  misc_feature (1)..(308): Homolog of NCBI NO: 27808612 NR Description: At4g29690 [Arabidopsis thaliana]
  misc_feature (2)..(309): Homolog of NCBI NO: 12081942 NR Description: nucleotide pyrophosphatase-like protein [Spinacia
  misc_feature (2)..(310): Homolog of NCBI NO: 34903578 NR Description: nucleotide pyrophosphatase homolog [Oryza sativa
  misc_feature (4)..(298): Homolog of NCBI NO: 9453796 NR Description: dJ131F15.2 (phosphodiesterase I/nucleotide
  misc_feature (4)..(298): Homolog of NCBI NO: 13324677 NR Description: ectonucleotide pyrophosphatase/phosphodiesterase
KNHDPKWWLGEPLWATAAAQGVLPATFFWPGSEVTKGSWNCPDKYCRHYNGSVPFEERVDTILGYFDLPPNQMPQFLTLYFEDPDHQGHQVGPDDPSITDAVVHIDEMLGRLIAGLEARGMFEDVNIILVGDHGMVGTCDRKLVFLEELAPWIELKSDWVLSMTPLLAIRPPDGVSPAEVVAKMNEGLGSGKVKNGEYLKMYLKEDLPTRLHYSESYRIPPIIGLVGEGYKIEMKRSKRNECGGAHGYDNAFFSMRTIFAAHGPRFQGGRTVPSFENVEIYNVMASILNLKPAPNNGSASFPGTILLPNK

SEQ ID NO: 14360 - protein, 238 aa, Zea mays subsp. mays
  peptide (1)..(238): Ceres Seq. ID no. 14305772
  misc_feature (1)..(218): Pfam Name: Type I phosphodiesterase / nucleotide pyrophosphatase Pfam Description: Type I phosphodiesterase / nucleotide
  misc_feature (1)..(238): Homolog of NCBI NO: 34903578 NR Description: nucleotide pyrophosphatase homolog [Oryza sativa
  misc_feature (1)..(236): Homolog of NCBI NO: 15233659 NR Description: nucleotide pyrophosphatase - like protein thaliana] >gi|7487979|pir||T09931 probable phosphodiesterase I
  misc_feature (1)..(237): Homolog of NCBI NO: 12081942 NR Description: nucleotide pyrophosphatase-like protein [Spinacia
  misc_feature (1)..(236): Homolog of NCBI NO: 15233662 NR Description: nucleotide pyrophosphatase - like protein thaliana] >gi|7487980|pir||T09932 probable phosphodiesterase I
  misc_feature (1)..(236): Homolog of NCBI NO: 27808612 NR Description: At4g29690 [Arabidopsis thaliana]
  misc_feature (1)..(237): Homolog of NCBI NO: 15233665 NR Description: nucleotide pyrophosphatase -related protein thaliana] >gi|7487981|pir||T09933 probable phosphodiesterase I
  misc_feature (5)..(236): Homolog of NCBI NO: 13877571 NR Description: nucleotide pyrophosphatase-like protein
  misc_feature (1)..(226): Homolog of NCBI NO: 4159883 NR Description: phosphodiesterase I beta [Homo sapiens]
  misc_feature (1)..(226): Homolog of NCBI NO: 9453796 NR Description: dJ131F15.2 (phosphodiesterase I/nucleotide
  misc_feature (1)..(226): Homolog of NCBI NO: 13324677 NR Description: ectonucleotide pyrophosphatase/phosphodiesterase
MPQFLTLYFEDPDHQGHQVGPDDPSITDAVVHIDEMLGRLIAGLEARGMFEDVNIILVGDHGMVGTCDRKLVFLEELAPWIELKSDWVLSMTPLLAIRPPDGVSPAEVVAKMNEGLGSGKVKNGEYLKMYLKEDLPTRLHYSESYRIPPIIGLVGEGYKIEMKRSKRNECGGAHGYDNAFFSMRTIFAAHGPRFQGGRTVPSFENVEIYNVMASILNLKPAPNNGSASFPGTILLPNK

SEQ ID NO: 14361 - protein, 203 aa, Zea mays subsp. mays
  peptide (1)..(203): Ceres Seq. ID no. 14305773
  misc_feature (1)..(183): Pfam Name: Type I phosphodiesterase / nucleotide pyrophosphatase Pfam Description: Type I phosphodiesterase / nucleotide
  misc_feature (1)..(203): Homolog of NCBI NO: 34903578 NR Description: nucleotide pyrophosphatase homolog [Oryza sativa
  misc_feature (1)..(201): Homolog of NCBI NO: 15233659 NR Description: nucleotide pyrophosphatase - like protein thaliana] >gi|7487979|pir||T09931 probable phosphodiesterase I
  misc_feature (1)..(202): Homolog of NCBI NO: 12081942 NR Description: nucleotide pyrophosphatase-like protein [Spinacia
  misc_feature (1)..(201): Homolog of NCBI NO: 15233662 NR Description: nucleotide pyrophosphatase - like protein thaliana] >gi|7487980|pir||T09932 probable phosphodiesterase I
  misc_feature (1)..(201): Homolog of NCBI NO: 27808612 NR Description: At4g29690 [Arabidopsis thaliana]
  misc_feature (1)..(202): Homolog of NCBI NO: 15233665 NR Description: nucleotide pyrophosphatase -related protein thaliana] >gi|7487981|pir||T09933 probable phosphodiesterase I
  misc_feature (1)..(201): Homolog of NCBI NO: 13877571 NR Description: nucleotide pyrophosphatase-like protein
  misc_feature (1)..(191): Homolog of NCBI NO: 4159883 NR Description: phosphodiesterase I beta [Homo sapiens]
  misc_feature (1)..(191): Homolog of NCBI NO: 9453796 NR Description: dJ131F15.2 (phosphodiesterase I/nucleotide
  misc_feature (1)..(191): Homolog of NCBI NO: 13324677 NR Description: ectonucleotide pyrophosphatase/phosphodiesterase
MLGRLIAGLEARGMFEDVNIILVGDHGMVGTCDRKLVFLEELAPWIELKSDWVLSMTPLLAIRPPDGVSPAEVVAKMNEGLGSGKVKNGEYLKMYLKEDLPTRLHYSESYRIPPIIGLVGEGYKIEMKRSKRNECGGAHGYDNAFFSMRTIFAAHGPRFQGGRTVPSFENVEIYNVMASILNLKPAPNNGSASFPGTILLPNK

SEQ ID NO: 14362 - DNA, 763 bp, Zea mays subsp. mays
  misc_feature (1)..(763): Ceres Seq. ID no. 15169969
  misc_feature: MA Experiment ID: 108528 Result: Down-regulated in Transcription
  misc_feature: MA Experiment 108528 PARAMETER Experiment Name: Zm_Imbibed_Seeds_P Parameter: Age (day) Value: 5 vs. 2
  misc_feature: MA Experiment 108528 PARAMETER Experiment Name: Zm_Imbibed_Seeds_P Parameter: Organism Value: Zea mays
  misc_feature: MA Experiment 108528 PARAMETER Experiment Name: Zm_Imbibed_Seeds_P Parameter: Plant Line Value: 35A19
  misc_feature: MA Experiment 108528 PARAMETER Experiment Name: Zm_Imbibed_Seeds_P Parameter: Tissue Value: Aerial vs. Embryo
  misc_feature: MA Experiment ID: 108530 Result: Down-regulated in Transcription
  misc_feature: MA Experiment 108530 PARAMETER Experiment Name: Zm_Imbibed_Seeds_P Parameter: Age (day) Value: 6 vs. 2
  misc_feature: MA Experiment 108530 PARAMETER Experiment Name: Zm_Imbibed_Seeds_P Parameter: Organism Value: Zea mays
  misc_feature: MA Experiment 108530 PARAMETER Experiment Name: Zm_Imbibed_Seeds_P Parameter: Plant Line Value: 35A19
  misc_feature: MA Experiment 108530 PARAMETER Experiment Name: Zm_Imbibed_Seeds_P Parameter: Tissue Value: Aerial vs. Embryo
  misc_feature: MA Experiment ID: 108543 Result: Up-regulated in Transcription
  misc_feature: MA Experiment ID: 108545 Result: Down-regulated in Transcription
  misc_feature: MA Experiment 108545 PARAMETER Experiment Name: Zm_Imbibed_Seeds_P Parameter: Age (day) Value: 3 vs. 2
  misc_feature: MA Experiment 108545 PARAMETER Experiment Name: Zm_Imbibed_Seeds_P Parameter: Organism Value: Zea mays
  misc_feature: MA Experiment 108545 PARAMETER Experiment Name: Zm_Imbibed_Seeds_P Parameter: Plant Line Value: 35A19
  misc_feature: MA Experiment 108545 PARAMETER Experiment Name: Zm_Imbibed_Seeds_P Parameter: Tissue Value: Aerial vs. Embryo
  misc_feature: MA Experiment ID: 108547 Result: Down-regulated in Transcription
  misc_feature: MA Experiment 108547 PARAMETER Experiment Name: Zm_Imbibed_Seeds_P Parameter: Age (day) Value: 4 vs. 2
  misc_feature: MA Experiment 108547 PARAMETER Experiment Name: Zm_Imbibed_Seeds_P Parameter: Organism Value: Zea mays
  misc_feature: MA Experiment 108547 PARAMETER Experiment Name: Zm_Imbibed_Seeds_P Parameter: Plant Line Value: 35A19
  misc_feature: MA Experiment 108547 PARAMETER Experiment Name: Zm_Imbibed_Seeds_P Parameter: Tissue Value: Aerial vs. Embryo
  misc_feature: MA Experiment ID: 108689 Result: Down-regulated in Transcription
  misc_feature: MA Experiment 108689 PARAMETER Experiment Name: Zm_Drought_Roots_P Parameter: Age (day) Value: 9
  misc_feature: MA Experiment 108689 PARAMETER Experiment Name: Zm_Drought_Roots_P Parameter: Organism Value: Zea mays
  misc_feature: MA Experiment 108689 PARAMETER Experiment Name: Zm_Drought_Roots_P Parameter: Plant Line Value: 35A19
  misc_feature: MA Experiment 108689 PARAMETER Experiment Name: Zm_Drought_Roots_P Parameter: Timepoint (hr) Value: 24
  misc_feature: MA Experiment 108689 PARAMETER Experiment Name: Zm_Drought_Roots_P Parameter: Tissue Value: Roots
  misc_feature: MA Experiment 108689 PARAMETER Experiment Name: Zm_Drought_Roots_P Parameter: Treatment Value: Drought vs. No Drought
  misc_feature: MA Experiment ID: 20000630 Result: Up-regulated in Transcription
  misc_feature: MA Experiment 20000630 PARAMETER Experiment Name: Zm_Herbicide-Treatments_P Parameter: Timepoint (hr) Value: 4
  misc_feature: MA Experiment 20000630 PARAMETER Experiment Name: Zm_Herbicide-Treatments_P Parameter: Tissue Value: Aerial
  misc_feature: MA Experiment 20000630 PARAMETER Experiment Name: Zm_Herbicide-Treatments_P Parameter: Treatment Value: Roundup vs. No Treatment
atcacaagcgcttagtgatcagttaatactaagggcaggcacacctctgcttcgcgctagtgatcaagcaagtgctttctgtactctgcagcaatggcaggcaaggcctcggtcgcgctgttcctcgccgtgaacctggtggtgttcgccatggccagcgcctgcggtggcaactgccccacgccgaccccgtccaccccgtcgacgccgaccccgacgccggcctcgttcggcaagtgcccccgcgacgcgctcaagctgggcgtgtgcgccaacgtgctgggactgatcaaggccaaggtgggcgtgccgcccacggagccatgctgcccgctgctgaagggactcgtcgacctcgaggccgccgtgtgcctctgcaccgccatcaagggcgaggtcctcggaatcaagctcaacctgcccgtcgacctcagcctcatcctcaaccactgcggcaagaccgtgcccaccggattcaaatgcctctaagctagccgcgagcatgcggatatatatgtgttcttttggttgccattcgcctgcagacttcttgtcgtttgctacttattaagcgagtgctagctctgcatgcatgactacgtcctttgcatgttgatgagcaactttcgatacttttgggtgtttgttttatgtaagtgcttcgtcctttacatcgacagtgtcccagaactatttgtactgttattcttttatttgtacccagcaatctgctcgatgaaataaagcttattatatttattgg

SEQ ID NO: 14363 - protein, 131 aa, Zea mays subsp. mays
  peptide (1)..(131): Ceres Seq. ID no. 15169970
  misc_feature (49)..(130): Pfam Name: Protease inhibitor/seed storage/LTP family Pfam Description: Protease inhibitor/seed storage/LTP family
  misc_feature (1)..(130): Homolog of NCBI NO: 38345484 NR Description: OSJNBa0010H02.22 [Oryza sativa (japonica
  misc_feature (1)..(130): Homolog of NCBI NO: 38345485 NR Description: OSJNBa0010H02.23 [Oryza sativa (japonica
  misc_feature (1)..(130): Homolog of NCBI NO: 1084461 NR Description: root-specific protein RCc3 - rice
  misc_feature (1)..(130): Homolog of NCBI NO: 7484770 NR Description: extensin like protein - black poplar extensin like protein [Populus nigra] >gi|1199774|dbj|BAA11855.1|
  misc_feature (1)..(131): Homolog of NCBI NO: 37536722 NR Description: putative lipid transfer protein [Oryza sativa
  misc_feature (1)..(130): Homolog of NCBI NO: 37536718 NR Description: putative lipid transfer protein [Oryza sativa
  misc_feature (1)..(130): Homolog of NCBI NO: 39748092 NR Description: lipid transfer protein-like protein [Oryza sativa
  misc_feature (5)..(131): Homolog of NCBI NO: 21360370 NR Description: extensin-like protein [Citrus junos]
  misc_feature (29)..(130): Homolog of NCBI NO: 7488729 NR Description: CIC protein, cold-inducible - alfalfa
  misc_feature (29)..(130): Homolog of NCBI NO: 15235390 NR Description: protease inhibitor/seed storage/lipid transfer (LTP) family [Arabidopsis thaliana] >gi|7487996|pir||T07642
MAGKASVALFLAVNLVVFAMASACGGNCPTPTPSTPSTPTPTPASFGKCPRDALKLGVCANVLGLIKAKVGVPPTEPCCPLLKGLVDLEAAVCLCTAIKGEVLGIKLNLPVDLSLILNHCGKTVPTGFKCL

SEQ ID NO: 14364 - protein, 112 aa, Zea mays subsp. mays
  peptide (1)..(112): Ceres Seq. ID no. 15169971
  misc_feature (30)..(111): Pfam Name: Protease inhibitor/seed storage/LTP family Pfam Description: Protease inhibitor/seed storage/LTP family
  misc_feature (1)..(111): Homolog of NCBI NO: 38345484 NR Description: OSJNBa0010H02.22 [Oryza sativa (japonica
  misc_feature (1)..(111): Homolog of NCBI NO: 38345485 NR Description: OSJNBa0010H02.23 [Oryza sativa (japonica
  misc_feature (1)..(111): Homolog of NCBI NO: 1084461 NR Description: root-specific protein RCc3 - rice
  misc_feature (1)..(111): Homolog of NCBI NO: 7484770 NR Description: extensin like protein - black poplar extensin like protein [Populus nigra] >gi|1199774|dbj|BAA11855.1|
  misc_feature (1)..(112): Homolog of NCBI NO: 37536722 NR Description: putative lipid transfer protein [Oryza sativa
  misc_feature (1)..(111): Homolog of NCBI NO: 37536718 NR Description: putative lipid transfer protein [Oryza sativa
  misc_feature (1)..(111): Homolog of NCBI NO: 39748092 NR Description: lipid transfer protein-like protein [Oryza sativa
  misc_feature (1)..(112): Homolog of NCBI NO: 21360370 NR Description: extensin-like protein [Citrus junos]
  misc_feature (10)..(111): Homolog of NCBI NO: 7488729 NR Description: CIC protein, cold-inducible - alfalfa
  misc_feature (10)..(111): Homolog of NCBI NO: 15235390 NR Description: protease inhibitor/seed storage/lipid transfer (LTP) family [Arabidopsis thaliana] >gi|7487996|pir||T07642
MASACGGNCPTPTPSTPSTPTPTPASFGKCPRDALKLGVCANVLGLIKAKVGVPPTEPCCPLLKGLVDLEAAVCLCTAIKGEVLGIKLNLPVDLSLILNHCGKTVPTGFKCL

SEQ ID NO: 14365 - DNA, 437 bp, Zea mays subsp. mays
  misc_feature (1)..(437): Ceres Seq. ID no. 3477340
  misc_feature: MA Experiment ID: 108527 Result: Down-regulated in Transcription
  misc_feature: MA Experiment 108527 PARAMETER Experiment Name: Zm_5mM_NO_P Parameter: Age (day) Value: 8
  misc_feature: MA Experiment 108527 PARAMETER Experiment Name: Zm_5mM_NO_P Parameter: Organism Value: Zea mays
  misc_feature: MA Experiment 108527 PARAMETER Experiment Name: Zm_5mM_NO_P Parameter: Plant Line Value: 35A19
  misc_feature: MA Experiment 108527 PARAMETER Experiment Name: Zm_5mM_NO_P Parameter: Timepoint (hr) Value: 6
  misc_feature: MA Experiment 108527 PARAMETER Experiment Name: Zm_5mM_NO_P Parameter: Tissue Value: Aerial
  misc_feature: MA Experiment 108527 PARAMETER Experiment Name: Zm_5mM_NO_P Parameter: Treatment Value: 5mM NO vs. No Treatment
  misc_feature: MA Experiment ID: 108556 Result: Down-regulated in Transcription
  misc_feature: MA Experiment 108556 PARAMETER Experiment Name: Zm_Drought_P Parameter: Age (day) Value: 9
  misc_feature: MA Experiment 108556 PARAMETER Experiment Name: Zm_Drought_P Parameter: Organism Value: Zea mays
  misc_feature: MA Experiment 108556 PARAMETER Experiment Name: Zm_Drought_P Parameter: Plant Line Value: 35A19
  misc_feature: MA Experiment 108556 PARAMETER Experiment Name: Zm_Drought_P Parameter: Timepoint (hr) Value: 24
  misc_feature: MA Experiment 108556 PARAMETER Experiment Name: Zm_Drought_P Parameter: Tissue Value: Aerial
  misc_feature: MA Experiment 108556 PARAMETER Experiment Name: Zm_Drought_P Parameter: Treatment Value: Drought vs. No Drought
  misc_feature: MA Experiment ID: 20000108 Result: Up-regulated in Transcription
  misc_feature: MA Experiment 20000108 PARAMETER Experiment Name: Zm_Root-Tips_P Parameter: Age (day) Value: 12
  misc_feature: MA Experiment 20000108 PARAMETER Experiment Name: Zm_Root-Tips_P Parameter: Organism Value: Zea mays
  misc_feature: MA Experiment 20000108 PARAMETER Experiment Name: Zm_Root-Tips_P Parameter: Tissue Value: Root tips vs. Root mid region    35
  misc_feature: MA Experiment 20000108 PARAMETER Experiment Name: Zm_Root-Tips_P Parameter: Tissue Value: Root tips vs. Root mid region   Sequence Listing-Misc Features (4)
  misc_feature: MA Experiment ID: 20000534 Result: Down-regulated in Transcription
  misc_feature: MA Experiment 20000534 PARAMETER Experiment Name: Zm_Hybrid_Pollen_P Parameter: Age (day) Value: 8
  misc_feature: MA Experiment 20000534 PARAMETER Experiment Name: Zm_Hybrid_Pollen_P Parameter: Organism Value: Zea mays
  misc_feature: MA Experiment 20000534 PARAMETER Experiment Name: Zm_Hybrid_Pollen_P Parameter: Plant Line Value: 35A19
  misc_feature: MA Experiment 20000534 PARAMETER Experiment Name: Zm_Hybrid_Pollen_P Parameter: Tissue Value: Pollen vs. Aerial
gtggctctcaacttggatttcgatcaagtcaaggagtttgtcaaggascggctgggggttgaggttgagatgggtggctgcaaggctccaatcacgaccttcatcgtcgagccatttgtgccacatgatcaagagtactacctttcgattgtctcagagaggttgggcagcaccatcagcttctcagagtgtggagggattgagatcgaggagaactgggacaaggttaagactattttccttcctactgagaagccaatgacgtctgattcatgtgctcctttgattgcaacccttccattggaggcacscggaaaaawtggtgacttcattaaaggagtgtttgccgtcttcctagacttggatttctcattttyttgaratgaatccgttcaccatggtcaatggggagccatatcctctggacatgagaggag

SEQ ID NO: 14366 - protein, 126 aa, Zea mays subsp. mays
  peptide (1)..(126): Ceres Seq. ID no. 3477341
  misc_feature (1)..(125): Homolog of NCBI NO: 15217510 NR Description: unknown protein; protein id: At1g09430.1
  misc_feature (1)..(125): Homolog of NCBI NO: 15220186 NR Description: ATP citrate-lyase, putative; protein id: supported by cDNA: 36439., supported by cDNA: gi_15810348, by cDNA: gi_16648641, supported by cDNA: gi_20453213, supported
  misc_feature (1)..(125): Homolog of NCBI NO: 21593129 NR Description: ATP citrate-lyase, putative [Arabidopsis thaliana]
  misc_feature (1)..(125): Homolog of NCBI NO: 15919089 NR Description: ATP citrate lyase b-subunit [Lupinus albus]
  misc_feature (1)..(125): Homolog of NCBI NO: 15219818 NR Description: ATP citrate-lyase, putative; protein id: supported by cDNA: gi_19698852 [Arabidopsis thaliana]
  misc_feature (1)..(125): Homolog of NCBI NO: 19698853 NR Description: similar to ATP-citrate-lyase [Arabidopsis
  misc_feature (3)..(125): Homolog of NCBI NO: 19114158 NR Description: putative ATP-citrate (pro-S-) lyase (EC 4.1.3.8)
  misc_feature (1)..(125): Homolog of NCBI NO: 29293809 NR Description: ATP citrate lyase [Mus musculus]
  misc_feature (1)..(125): Homolog of NCBI NO: 7159697 NR Description: ATP-citrat-lyase [Gibberella pulicaris]
  misc_feature (1)..(125): Homolog of NCBI NO: 8392839 NR Description: ATP citrate lyase [Rattus norvegicus]
  misc_feature (16)..(16): Xaa is any aa, unknown or other
  misc_feature (104)..(104): Xaa is any aa, unknown or other
  misc_feature (107)..(107): Xaa is any aa, unknown or other
  misc_feature (126)..(126): Xaa is any aa, unknown or other
VALNLDFDQVKEFVKXRLGVEVEMGGCKAPITTFIVEPFVPHDQEYYLSIVSERLGSTISFSECGGIEIEENWDKVKTIFLPTEKPMTSDSCAPLIATLPLEAXGKXGDFIKGVFAVFLDLDFSFX

SEQ ID NO: 14367 - protein, 103 aa, Zea mays subsp. mays
  peptide (1)..(103): Ceres Seq. ID no. 3477342
  misc_feature (1)..(102): Homolog of NCBI NO: 15217510 NR Description: unknown protein; protein id: At1g09430.1
  misc_feature (1)..(102): Homolog of NCBI NO: 15220186 NR Description: ATP citrate-lyase, putative; protein id: supported by cDNA: 36439., supported by cDNA: gi_15810348, by cDNA: gi_16648641, supported by cDNA: gi_20453213, supported
  misc_feature (1)..(102): Homolog of NCBI NO: 21593129 NR Description: ATP citrate-lyase, putative [Arabidopsis thaliana]
  misc_feature (1)..(102): Homolog of NCBI NO: 15919089 NR Description: ATP citrate lyase b-subunit [Lupinus albus]
  misc_feature (1)..(102): Homolog of NCBI NO: 15219818 NR Description: ATP citrate-lyase, putative; protein id: supported by cDNA: gi_19698852 [Arabidopsis thaliana]
  misc_feature (1)..(102): Homolog of NCBI NO: 19698853 NR Description: similar to ATP-citrate-lyase [Arabidopsis
  misc_feature (1)..(102): Homolog of NCBI NO: 19114158 NR Description: putative ATP-citrate (pro-S-) lyase (EC 4.1.3.8)
  misc_feature (1)..(102): Homolog of NCBI NO: 29293809 NR Description: ATP citrate lyase [Mus musculus]
  misc_feature (1)..(102): Homolog of NCBI NO: 7159697 NR Description: ATP-citrat-lyase [Gibberella pulicaris]
  misc_feature (1)..(102): Homolog of NCBI NO: 8392839 NR Description: ATP citrate lyase [Rattus norvegicus]
  misc_feature (81)..(81): Xaa is any aa, unknown or other
  misc_feature (84)..(84): Xaa is any aa, unknown or other
  misc_feature (103)..(103): Xaa is any aa, unknown or other
MGGCKAPITTFIVEPFVPHDQEYYLSIVSERLGSTISFSECGGIEIEENWDKVKTIFLPTEKPMTSDSCAPLIATLPLEAXGKXGDFIKGVFAVFLDLDFSFX

SEQ ID NO: 14368 - protein, 86 aa, Zea mays subsp. mays
  peptide (1)..(86): Ceres Seq. ID no. 3477343
  misc_feature (16)..(16): Xaa is any aa, unknown or other
WLSTWISIKSRSLSRXGWGLRLRWVAARLQSRPSSSSHLCHMIKSTTFRLSQRGWAAPSASQSVEGLRSRRTGTRLRLFSFLLRSQ

SEQ ID NO: 14369 - DNA, 1080 bp, Zea mays subsp. mays
  misc_feature (1)..(1080): Ceres Seq. ID no. 12634491
  misc_feature: MA Experiment ID: 108522 Result: Down-regulated in Transcription
  misc_feature: MA Experiment 108522 PARAMETER Experiment Name: Zm_42deg_Heat_P Parameter: Age (day) Value: 8
  misc_feature: MA Experiment 108522 PARAMETER Experiment Name: Zm_42deg_Heat_P Parameter: Organism Value: Zea mays
  misc_feature: MA Experiment 108522 PARAMETER Experiment Name: Zm_42deg_Heat_P Parameter: Plant Line Value: 35A19
  misc_feature: MA Experiment 108522 PARAMETER Experiment Name: Zm_42deg_Heat_P Parameter: Temperature (deg C) Value: 42 vs. 22
  misc_feature: MA Experiment 108522 PARAMETER Experiment Name: Zm_42deg_Heat_P Parameter: Timepoint (hr) Value: 1
  misc_feature: MA Experiment 108522 PARAMETER Experiment Name: Zm_42deg_Heat_P Parameter: Tissue Value: Aerial
  misc_feature: MA Experiment ID: 108527 Result: Down-regulated in Transcription
  misc_feature: MA Experiment 108527 PARAMETER Experiment Name: Zm_5mM_NO_P Parameter: Age (day) Value: 8
  misc_feature: MA Experiment 108527 PARAMETER Experiment Name: Zm_5mM_NO_P Parameter: Organism Value: Zea mays
  misc_feature: MA Experiment 108527 PARAMETER Experiment Name: Zm_5mM_NO_P Parameter: Plant Line Value: 35A19
  misc_feature: MA Experiment 108527 PARAMETER Experiment Name: Zm_5mM_NO_P Parameter: Timepoint (hr) Value: 6
  misc_feature: MA Experiment 108527 PARAMETER Experiment Name: Zm_5mM_NO_P Parameter: Tissue Value: Aerial
  misc_feature: MA Experiment 108527 PARAMETER Experiment Name: Zm_5mM_NO_P Parameter: Treatment Value: 5mM NO vs. No Treatment
  misc_feature: MA Experiment ID: 20000108 Result: Up-regulated in Transcription
  misc_feature: MA Experiment 20000108 PARAMETER Experiment Name: Zm_Root-Tips_P Parameter: Age (day) Value: 12
  misc_feature: MA Experiment 20000108 PARAMETER Experiment Name: Zm_Root-Tips_P Parameter: Organism Value: Zea mays
  misc_feature: MA Experiment 20000108 PARAMETER Experiment Name: Zm_Root-Tips_P Parameter: Tissue Value: Root tips vs. Root mid region    35
  misc_feature: MA Experiment 20000108 PARAMETER Experiment Name: Zm_Root-Tips_P Parameter: Tissue Value: Root tips vs. Root mid region   Sequence Listing-Misc Features (4)
  misc_feature: MA Experiment ID: 20000479 Result: Down-regulated in Transcription
  misc_feature: MA Experiment 20000479 PARAMETER Experiment Name: Zm_Drought_P Parameter: Age (day) Value: 10
  misc_feature: MA Experiment 20000479 PARAMETER Experiment Name: Zm_Drought_P Parameter: Organism Value: Zea mays
  misc_feature: MA Experiment 20000479 PARAMETER Experiment Name: Zm_Drought_P Parameter: Plant Line Value: 35A19
  misc_feature: MA Experiment 20000479 PARAMETER Experiment Name: Zm_Drought_P Parameter: Timepoint (hr) Value: 48
  misc_feature: MA Experiment 20000479 PARAMETER Experiment Name: Zm_Drought_P Parameter: Tissue Value: Aerial
  misc_feature: MA Experiment 20000479 PARAMETER Experiment Name: Zm_Drought_P Parameter: Treatment Value: Drought vs. No Drought
  misc_feature: MA Experiment ID: 20000487 Result: Up-regulated in Transcription
  misc_feature: MA Experiment 20000487 PARAMETER Experiment Name: Zm_50mM_NH4NO3_L_to_H_P Parameter: Organism Value: Zea mays
  misc_feature: MA Experiment 20000487 PARAMETER Experiment Name: Zm_50mM_NH4NO3_L_to_H_P Parameter: Timepoint (hr) Value: 4
  misc_feature: MA Experiment 20000487 PARAMETER Experiment Name: Zm_50mM_NH4NO3_L_to_H_P Parameter: Tissue Value: Leaves
  misc_feature: MA Experiment 20000487 PARAMETER Experiment Name: Zm_50mM_NH4NO3_L_to_H_P Parameter: Treatment Value: 50mM NH4NO3 vs. 100mM Mannitol
actcaattatcaaaaccaaactagggacattcaaatggttggcttactttttgctacagagttgcctcttcgcatggctgatttcggagtgcttcatagaaatgagcttagtggtgcacttactggtttgacacgggttagaagattccagcaggatgatgctcatatcttctgcagagaggaccaaatcaaggacgaggttaaggctgttttggaattcatcaattatgtttacgagatatttggcttcaaatatgagttggagttgtctacgagaccagagaagtatctaggtgaagttgaaacttggaacaaagctgaacaacaattgacagaagctttaaatgagtttgggaagccatggaagattaatgaaggggatggtgctttctacggcccaaaaattgatattggtgtgtttgatgcccttaagaggaaatttcagtgtgcaaccctacagctggattttcagctgcccattcggttcaagctggcttattctgctgaggatgaagccaaaattgaaaggcctgtgatgatacacagggcaatcctaggttcggttgaaaggatgcttgccattcttttggagcattacaatggtaaatggcccttatggctaagccctcgccaggccattgtttgctcggtatcttctggttcagtggaatatgcgaaacaggttcttgccactctacatgaagctggttttcatgttgatattgacgcgagtgacaggacaatacaaaagaaggtacgggaagctcaactggcccaattcaactacattcttgtcgtaggtgcacaagaggccgagactggaaatatatgcgttagggtaagagacaatgctgacctggtcacaacgagtgtagatggcttcatcacacgtttgagggacgaaatcgcagccttcaaatgattttgatgctgcataatttcctactactcgtttgtgattttgacgagtttttagtgaccagcatcgagttcctcgtgttactgttcttgtttgtatgaagctaaaaggttgtctttttgttattaattacagatgcgaagttaaatactgccgctagt

SEQ ID NO: 14370 - protein, 306 aa, Zea mays subsp. mays
  peptide (1)..(306): Ceres Seq. ID no. 12634492
  misc_feature (20)..(85): Pfam Name: tRNA synthetase class II core domain (G, H, P, S and T) Pfam Description: tRNA synthetase class II core domain (G, H, P,
  misc_feature (20)..(306): Homolog of NCBI NO: 38175524 NR Description: putative threonyl-tRNA synthetase [Oryza sativa
  misc_feature (20)..(306): Homolog of NCBI NO: 20429011 NR Description: threonyl-tRNA synthetase [Oryza sativa (japonica
  misc_feature (20)..(305): Homolog of NCBI NO: 11271129 NR Description: threonine-tRNA ligase (EC 6.1.1.3) [imported] -
  misc_feature (20)..(305): Homolog of NCBI NO: 15081626 NR Description: AT5g26830/F2P16_90 [Arabidopsis thaliana]
  misc_feature (20)..(305): Homolog of NCBI NO: 30690426 NR Description: threonyl-tRNA synthetase [Arabidopsis thaliana]
  misc_feature (20)..(305): Homolog of NCBI NO: 7437517 NR Description: threonine-tRNA ligase (EC 6.1.1.3) - Arabidopsis
  misc_feature (20)..(304): Homolog of NCBI NO: 21428938 NR Description: GH20022p [Drosophila melanogaster]
  misc_feature (20)..(304): Homolog of NCBI NO: 24583839 NR Description: Threonyl-tRNA synthetase CG5353-PA
  misc_feature (20)..(304): Homolog of NCBI NO: 24583842 NR Description: Threonyl-tRNA synthetase CG5353-PC
  misc_feature (20)..(304): Homolog of NCBI NO: 25013040 NR Description: RH56418p [Drosophila melanogaster]
LNYQNQTRDIQMVGLLFATELPLRMADFGVLHRNELSGALTGLTRVRRFQQDDAHIFCREDQIKDEVKAVLEFINYVYEIFGFKYELELSTRPEKYLGEVETWNKAEQQLTEALNEFGKPWKINEGDGAFYGPKIDIGVFDALKRKFQCATLQLDFQLPIRFKLAYSAEDEAKIERPVMIHRAILGSVERMLAILLEHYNGKWPLWLSPRQAIVCSVSSGSVEYAKQVLATLHEAGFHVDIDASDRTIQKKVREAQLAQFNYILVVGAQEAETGNICVRVRDNADLVTTSVDGFITRLRDEIAAFK

SEQ ID NO: 14371 - protein, 295 aa, Zea mays subsp. mays
  peptide (1)..(295): Ceres Seq. ID no. 12634493
  misc_feature (9)..(74): Pfam Name: tRNA synthetase class II core domain (G, H, P, S and T) Pfam Description: tRNA synthetase class II core domain (G, H, P,
  misc_feature (9)..(295): Homolog of NCBI NO: 38175524 NR Description: putative threonyl-tRNA synthetase [Oryza sativa
  misc_feature (9)..(295): Homolog of NCBI NO: 20429011 NR Description: threonyl-tRNA synthetase [Oryza sativa (japonica
  misc_feature (9)..(294): Homolog of NCBI NO: 11271129 NR Description: threonine-tRNA ligase (EC 6.1.1.3) [imported] -
  misc_feature (9)..(294): Homolog of NCBI NO: 15081626 NR Description: AT5g26830/F2P16_90 [Arabidopsis thaliana]
  misc_feature (9)..(294): Homolog of NCBI NO: 30690426 NR Description: threonyl-tRNA synthetase [Arabidopsis thaliana]
  misc_feature (9)..(294): Homolog of NCBI NO: 7437517 NR Description: threonine-tRNA ligase (EC 6.1.1.3) - Arabidopsis
  misc_feature (9)..(293): Homolog of NCBI NO: 21428938 NR Description: GH20022p [Drosophila melanogaster]
  misc_feature (9)..(293): Homolog of NCBI NO: 25013040 NR Description: RH56418p [Drosophila melanogaster]
  misc_feature (9)..(293): Homolog of NCBI NO: 24583842 NR Description: Threonyl-tRNA synthetase CG5353-PC
  misc_feature (9)..(293): Homolog of NCBI NO: 24583839 NR Description: Threonyl-tRNA synthetase CG5353-PA
MVGLLFATELPLRMADFGVLHRNELSGALTGLTRVRRFQQDDAHIFCREDQIKDEVKAVLEFINYVYEIFGFKYELELSTRPEKYLGEVETWNKAEQQLTEALNEFGKPWKINEGDGAFYGPKIDIGVFDALKRKFQCATLQLDFQLPIRFKLAYSAEDEAKIERPVMIHRAILGSVERMLAILLEHYNGKWPLWLSPRQAIVCSVSSGSVEYAKQVLATLHEAGFHVDIDASDRTIQKKVREAQLAQFNYILVVGAQEAETGNICVRVRDNADLVTTSVDGFITRLRDEIAAFK

SEQ ID NO: 14372 - protein, 282 aa, Zea mays subsp. mays
  peptide (1)..(282): Ceres Seq. ID no. 12634494
  misc_feature (1)..(61): Pfam Name: tRNA synthetase class II core domain (G, H, P, S and T) Pfam Description: tRNA synthetase class II core domain (G, H, P,
  misc_feature (1)..(282): Homolog of NCBI NO: 38175524 NR Description: putative threonyl-tRNA synthetase [Oryza sativa
  misc_feature (1)..(282): Homolog of NCBI NO: 20429011 NR Description: threonyl-tRNA synthetase [Oryza sativa (japonica
  misc_feature (1)..(281): Homolog of NCBI NO: 11271129 NR Description: threonine-tRNA ligase (EC 6.1.1.3) [imported] -
  misc_feature (1)..(281): Homolog of NCBI NO: 15081626 NR Description: AT5g26830/F2P16_90 [Arabidopsis thaliana]
  misc_feature (1)..(281): Homolog of NCBI NO: 30690426 NR Description: threonyl-tRNA synthetase [Arabidopsis thaliana]
  misc_feature (1)..(281): Homolog of NCBI NO: 7437517 NR Description: threonine-tRNA ligase (EC 6.1.1.3) - Arabidopsis
  misc_feature (1)..(280): Homolog of NCBI NO: 21428938 NR Description: GH20022p [Drosophila melanogaster]
  misc_feature (1)..(280): Homolog of NCBI NO: 24583839 NR Description: Threonyl-tRNA synthetase CG5353-PA
  misc_feature (1)..(280): Homolog of NCBI NO: 24583842 NR Description: Threonyl-tRNA synthetase CG5353-PC
  misc_feature (1)..(280): Homolog of NCBI NO: 25013040 NR Description: RH56418p [Drosophila melanogaster]
MADFGVLHRNELSGALTGLTRVRRFQQDDAHIFCREDQIKDEVKAVLEFINYVYEIFGFKYELELSTRPEKYLGEVETWNKAEQQLTEALNEFGKPWKINEGDGAFYGPKIDIGVFDALKRKFQCATLQLDFQLPIRFKLAYSAEDEAKIERPVMIHRAILGSVERMLAILLEHYNGKWPLWLSPRQAIVCSVSSGSVEYAKQVLATLHEAGFHVDIDASDRTIQKKVREAQLAQFNYILVVGAQEAETGNICVRVRDNADLVTTSVDGFITRLRDEIAAFK

SEQ ID NO: 14373 - DNA, 480 bp, Zea mays subsp. mays
  misc_feature (1)..(480): Ceres Seq. ID no. 13571785
  misc_feature: MA Experiment ID: 108522 Result: Down-regulated in Transcription
  misc_feature: MA Experiment 108522 PARAMETER Experiment Name: Zm_42deg_Heat_P Parameter: Age (day) Value: 8
  misc_feature: MA Experiment 108522 PARAMETER Experiment Name: Zm_42deg_Heat_P Parameter: Organism Value: Zea mays
  misc_feature: MA Experiment 108522 PARAMETER Experiment Name: Zm_42deg_Heat_P Parameter: Plant Line Value: 35A19
  misc_feature: MA Experiment 108522 PARAMETER Experiment Name: Zm_42deg_Heat_P Parameter: Temperature (deg C) Value: 42 vs. 22
  misc_feature: MA Experiment 108522 PARAMETER Experiment Name: Zm_42deg_Heat_P Parameter: Timepoint (hr) Value: 1
  misc_feature: MA Experiment 108522 PARAMETER Experiment Name: Zm_42deg_Heat_P Parameter: Tissue Value: Aerial
tttactgaactgcactgaccactattcagcattaggtttccgtcsmtatgagaacatagatgtatcatctcttaagagagaatacaagaaaaaggctatgttagtccatcctgataagaatatgggcaatgataaagctgctgatgcatttaaaaagcttcaaaatgcatatgagattcttcttgattcactgaaacgcaagacatatgatgatgagttgaggagggaagacctcttgaactacttcaggcagagtgtttctcaaaagaatggaagaaacagtactttccaacatgggttcagcccttcagaaggtgttgatgaaggtccttatggtctttccagaagaatagcttgtaaaaagtgcagcgactttcatctttggatttatactggaagagctaaatcacaagcgagatggtgtcaggactgcaaggagttccatcaagctaaagatggcgatggatgggtcgaacagtc

SEQ ID NO: 14374 - protein, 159 aa, Zea mays subsp. mays
  peptide (1)..(159): Ceres Seq. ID no. 13571786
  misc_feature (6)..(73): Pfam Name: DnaJ domain Pfam Description: DnaJ domain
  misc_feature (1)..(158): Homolog of NCBI NO: 15240510 NR Description: DnaJ protein family [Arabidopsis thaliana] contains similarity to unknown
  misc_feature (59)..(158): Homolog of NCBI NO: 29371958 NR Description: DNAJ-like protein [Oryza sativa (japonica
  misc_feature (1)..(158): Homolog of NCBI NO: 6069485 NR Description: S-locus protein 5 [Brassica rapa]
  misc_feature (1)..(158): Homolog of NCBI NO: 15219309 NR Description: S-locus protein, putative [Arabidopsis thaliana]
  misc_feature (1)..(158): Homolog of NCBI NO: 25518299 NR Description: hypothetical protein F19K19.3 - Arabidopsis >gi|9989051|gb|AAG10814.1|AC011808_2 Similar to DNAJ proteins
  misc_feature (1)..(158): Homolog of NCBI NO: 7487909 NR Description: hypothetical protein YUP8H12R.35 - Arabidopsis >gi|3152572|gb|AAC17053.1| Contains homology to DNAJ heatshock
  misc_feature (1)..(77): Homolog of NCBI NO: 30699386 NR Description: S-locus protein, putative [Arabidopsis thaliana]
  misc_feature (6)..(101): Homolog of NCBI NO: 27904644 NR Description: chaperone protein DnaJ [Buchnera aphidicola pistaciae)] >gi|27904041|gb|AAO26875.1| chaperone protein DnaJ
  misc_feature (1)..(158): Homolog of NCBI NO: 15291559 NR Description: GH27269p [Drosophila melanogaster]
  misc_feature (1)..(158): Homolog of NCBI NO: 24643995 NR Description: CG14650-PA [Drosophila melanogaster]
  misc_feature (15)..(15): Xaa is any aa, unknown or other
LLNCTDHYSALGFRXYENIDVSSLKREYKKKAMLVHPDKNMGNDKAADAFKKLQNAYEILLDSLKRKTYDDELRREDLLNYFRQSVSQKNGRNSTFQHGFSPSEGVDEGPYGLSRRIACKKCSDFHLWIYTGRAKSQARWCQDCKEFHQAKDGDGWVEQ

SEQ ID NO: 14375 - protein, 127 aa, Zea mays subsp. mays
  peptide (1)..(127): Ceres Seq. ID no. 13571787
  misc_feature (1)..(126): Homolog of NCBI NO: 15240510 NR Description: DnaJ protein family [Arabidopsis thaliana] contains similarity to unknown
  misc_feature (27)..(126): Homolog of NCBI NO: 29371958 NR Description: DNAJ-like protein [Oryza sativa (japonica
  misc_feature (1)..(126): Homolog of NCBI NO: 6069485 NR Description: S-locus protein 5 [Brassica rapa]
  misc_feature (1)..(126): Homolog of NCBI NO: 15219309 NR Description: S-locus protein, putative [Arabidopsis thaliana]
  misc_feature (1)..(126): Homolog of NCBI NO: 25518299 NR Description: hypothetical protein F19K19.3 - Arabidopsis >gi|9989051|gb|AAG10814.1|AC011808_2 Similar to DNAJ proteins
  misc_feature (1)..(126): Homolog of NCBI NO: 7487909 NR Description: hypothetical protein YUP8H12R.35 - Arabidopsis >gi|3152572|gb|AAC17053.1| Contains homology to DNAJ heatshock
  misc_feature (1)..(45): Homolog of NCBI NO: 30699386 NR Description: S-locus protein, putative [Arabidopsis thaliana]
  misc_feature (1)..(69): Homolog of NCBI NO: 27904644 NR Description: chaperone protein DnaJ [Buchnera aphidicola pistaciae)] >gi|27904041|gb|AAO26875.1| chaperone protein DnaJ
  misc_feature (1)..(126): Homolog of NCBI NO: 15291559 NR Description: GH27269p [Drosophila melanogaster]
  misc_feature (1)..(126): Homolog of NCBI NO: 24643995 NR Description: CG14650-PA [Drosophila melanogaster]
MLVHPDKNMGNDKAADAFKKLQNAYEILLDSLKRKTYDDELRREDLLNYFRQSVSQKNGRNSTFQHGFSPSEGVDEGPYGLSRRIACKKCSDFHLWIYTGRAKSQARWCQDCKEFHQAKDGDGWVEQ

SEQ ID NO: 14376 - protein, 119 aa, Zea mays subsp. mays
  peptide (1)..(119): Ceres Seq. ID no. 13571788
  misc_feature (1)..(61): Homolog of NCBI NO: 27904644 NR Description: chaperone protein DnaJ [Buchnera aphidicola pistaciae)] >gi|27904041|gb|AAO26875.1| chaperone protein DnaJ
  misc_feature (1)..(118): Homolog of NCBI NO: 15291559 NR Description: GH27269p [Drosophila melanogaster]
  misc_feature (1)..(118): Homolog of NCBI NO: 24643995 NR Description: CG14650-PA [Drosophila melanogaster]
  misc_feature (1)..(118): Homolog of NCBI NO: 15240510 NR Description: DnaJ protein family [Arabidopsis thaliana] contains similarity to unknown
  misc_feature (19)..(118): Homolog of NCBI NO: 29371958 NR Description: DNAJ-like protein [Oryza sativa (japonica
  misc_feature (1)..(118): Homolog of NCBI NO: 6069485 NR Description: S-locus protein 5 [Brassica rapa]
  misc_feature (1)..(118): Homolog of NCBI NO: 15219309 NR Description: S-locus protein, putative [Arabidopsis thaliana]
  misc_feature (1)..(118): Homolog of NCBI NO: 25518299 NR Description: hypothetical protein F19K19.3 - Arabidopsis >gi|9989051|gb|AAG10814.1|AC011808_2 Similar to DNAJ proteins
  misc_feature (1)..(118): Homolog of NCBI NO: 7487909 NR Description: hypothetical protein YUP8H12R.35 - Arabidopsis >gi|3152572|gb|AAC17053.1| Contains homology to DNAJ heatshock
  misc_feature (1)..(37): Homolog of NCBI NO: 30699386 NR Description: S-locus protein, putative [Arabidopsis thaliana]
MGNDKAADAFKKLQNAYEILLDSLKRKTYDDELRREDLLNYFRQSVSQKNGRNSTFQHGFSPSEGVDEGPYGLSRRIACKKCSDFHLWIYTGRAKSQARWCQDCKEFHQAKDGDGWVEQ

SEQ ID NO: 14377 - DNA, 1458 bp, Zea mays subsp. mays
  misc_feature (1)..(1458): Ceres Seq. ID no. 13586374
  misc_feature: MA Experiment ID: 108523 Result: Down-regulated in Transcription
  misc_feature: MA Experiment 108523 PARAMETER Experiment Name: Zm_42deg_Heat_P Parameter: Age (day) Value: 8
  misc_feature: MA Experiment 108523 PARAMETER Experiment Name: Zm_42deg_Heat_P Parameter: Organism Value: Zea mays
  misc_feature: MA Experiment 108523 PARAMETER Experiment Name: Zm_42deg_Heat_P Parameter: Plant Line Value: 35A19
  misc_feature: MA Experiment 108523 PARAMETER Experiment Name: Zm_42deg_Heat_P Parameter: Temperature (deg C) Value: 42 vs. 22
  misc_feature: MA Experiment 108523 PARAMETER Experiment Name: Zm_42deg_Heat_P Parameter: Timepoint (hr) Value: 6
  misc_feature: MA Experiment 108523 PARAMETER Experiment Name: Zm_42deg_Heat_P Parameter: Tissue Value: Aerial
  misc_feature: MA Experiment ID: 108528 Result: Up-regulated in Transcription
  misc_feature: MA Experiment 108528 PARAMETER Experiment Name: Zm_Imbibed_Seeds_P Parameter: Age (day) Value: 5 vs. 2
  misc_feature: MA Experiment 108528 PARAMETER Experiment Name: Zm_Imbibed_Seeds_P Parameter: Organism Value: Zea mays
  misc_feature: MA Experiment 108528 PARAMETER Experiment Name: Zm_Imbibed_Seeds_P Parameter: Plant Line Value: 35A19
  misc_feature: MA Experiment 108528 PARAMETER Experiment Name: Zm_Imbibed_Seeds_P Parameter: Tissue Value: Aerial vs. Embryo
  misc_feature: MA Experiment ID: 108529 Result: Up-regulated in Transcription
  misc_feature: MA Experiment 108529 PARAMETER Experiment Name: Zm_Imbibed_Seeds_P Parameter: Age (day) Value: 5 vs. 2
  misc_feature: MA Experiment 108529 PARAMETER Experiment Name: Zm_Imbibed_Seeds_P Parameter: Organism Value: Zea mays
  misc_feature: MA Experiment 108529 PARAMETER Experiment Name: Zm_Imbibed_Seeds_P Parameter: Plant Line Value: 35A19
  misc_feature: MA Experiment 108529 PARAMETER Experiment Name: Zm_Imbibed_Seeds_P Parameter: Tissue Value: Roots vs. Embryo
  misc_feature: MA Experiment ID: 108530 Result: Up-regulated in Transcription
  misc_feature: MA Experiment 108530 PARAMETER Experiment Name: Zm_Imbibed_Seeds_P Parameter: Age (day) Value: 6 vs. 2
  misc_feature: MA Experiment 108530 PARAMETER Experiment Name: Zm_Imbibed_Seeds_P Parameter: Organism Value: Zea mays
  misc_feature: MA Experiment 108530 PARAMETER Experiment Name: Zm_Imbibed_Seeds_P Parameter: Plant Line Value: 35A19
  misc_feature: MA Experiment 108530 PARAMETER Experiment Name: Zm_Imbibed_Seeds_P Parameter: Tissue Value: Aerial vs. Embryo
  misc_feature: MA Experiment ID: 108534 Result: Down-regulated in Transcription
  misc_feature: MA Experiment 108534 PARAMETER Experiment Name: Zm_4deg_Cold_P Parameter: Age (hr) Value: 8
  misc_feature: MA Experiment 108534 PARAMETER Experiment Name: Zm_4deg_Cold_P Parameter: Organism Value: Zea mays
  misc_feature: MA Experiment 108534 PARAMETER Experiment Name: Zm_4deg_Cold_P Parameter: Plant Line Value: 35A19
  misc_feature: MA Experiment 108534 PARAMETER Experiment Name: Zm_4deg_Cold_P Parameter: Temperature (deg C) Value: 4 vs. 22
  misc_feature: MA Experiment 108534 PARAMETER Experiment Name: Zm_4deg_Cold_P Parameter: Timepoint (hr) Value: 6
  misc_feature: MA Experiment 108534 PARAMETER Experiment Name: Zm_4deg_Cold_P Parameter: Tissue Value: Aerial
  misc_feature: MA Experiment ID: 108535 Result: Down-regulated in Transcription
  misc_feature: MA Experiment 108535 PARAMETER Experiment Name: Zm_Meristem_P Parameter: Age (day) Value: 8
  misc_feature: MA Experiment 108535 PARAMETER Experiment Name: Zm_Meristem_P Parameter: Organism Value: Zea mays
  misc_feature: MA Experiment 108535 PARAMETER Experiment Name: Zm_Meristem_P Parameter: Plant Line Value: 35A19
  misc_feature: MA Experiment 108535 PARAMETER Experiment Name: Zm_Meristem_P Parameter: Tissue Value: Root Meristem vs. Above Root Meristem
  misc_feature: MA Experiment ID: 108543 Result: Down-regulated in Transcription
  misc_feature: MA Experiment ID: 108545 Result: Up-regulated in Transcription
  misc_feature: MA Experiment 108545 PARAMETER Experiment Name: Zm_Imbibed_Seeds_P Parameter: Age (day) Value: 3 vs. 2
  misc_feature: MA Experiment 108545 PARAMETER Experiment Name: Zm_Imbibed_Seeds_P Parameter: Organism Value: Zea mays
  misc_feature: MA Experiment 108545 PARAMETER Experiment Name: Zm_Imbibed_Seeds_P Parameter: Plant Line Value: 35A19
  misc_feature: MA Experiment 108545 PARAMETER Experiment Name: Zm_Imbibed_Seeds_P Parameter: Tissue Value: Aerial vs. Embryo
  misc_feature: MA Experiment ID: 108546 Result: Up-regulated in Transcription
  misc_feature: MA Experiment 108546 PARAMETER Experiment Name: Zm_Imbibed_Seeds_P Parameter: Age (day) Value: 3 vs. 2
  misc_feature: MA Experiment 108546 PARAMETER Experiment Name: Zm_Imbibed_Seeds_P Parameter: Organism Value: Zea mays
  misc_feature: MA Experiment 108546 PARAMETER Experiment Name: Zm_Imbibed_Seeds_P Parameter: Plant Line Value: 35A19
  misc_feature: MA Experiment 108546 PARAMETER Experiment Name: Zm_Imbibed_Seeds_P Parameter: Tissue Value: Roots vs. Embryo
  misc_feature: MA Experiment ID: 108547 Result: Up-regulated in Transcription
  misc_feature: MA Experiment 108547 PARAMETER Experiment Name: Zm_Imbibed_Seeds_P Parameter: Age (day) Value: 4 vs. 2
  misc_feature: MA Experiment 108547 PARAMETER Experiment Name: Zm_Imbibed_Seeds_P Parameter: Organism Value: Zea mays
  misc_feature: MA Experiment 108547 PARAMETER Experiment Name: Zm_Imbibed_Seeds_P Parameter: Plant Line Value: 35A19
  misc_feature: MA Experiment 108547 PARAMETER Experiment Name: Zm_Imbibed_Seeds_P Parameter: Tissue Value: Aerial vs. Embryo
  misc_feature: MA Experiment ID: 20000108 Result: Down-regulated in Transcription
  misc_feature: MA Experiment 20000108 PARAMETER Experiment Name: Zm_Root-Tips_P Parameter: Age (day) Value: 12
  misc_feature: MA Experiment 20000108 PARAMETER Experiment Name: Zm_Root-Tips_P Parameter: Organism Value: Zea mays
  misc_feature: MA Experiment 20000108 PARAMETER Experiment Name: Zm_Root-Tips_P Parameter: Tissue Value: Root tips vs. Root mid region    35
  misc_feature: MA Experiment 20000108 PARAMETER Experiment Name: Zm_Root-Tips_P Parameter: Tissue Value: Root tips vs. Root mid region   Sequence Listing-Misc Features (4)
  misc_feature: MA Experiment ID: 20000535 Result: Down-regulated in Transcription
  misc_feature: MA Experiment 20000535 PARAMETER Experiment Name: Zm_Hybrid_Seed_Dev_P Parameter: DAP Value: 30 vs. 12
  misc_feature: MA Experiment 20000535 PARAMETER Experiment Name: Zm_Hybrid_Seed_Dev_P Parameter: Organism Value: Zea mays
  misc_feature: MA Experiment 20000535 PARAMETER Experiment Name: Zm_Hybrid_Seed_Dev_P Parameter: Plant Line Value: 35A19
  misc_feature: MA Experiment 20000535 PARAMETER Experiment Name: Zm_Hybrid_Seed_Dev_P Parameter: Tissue Value: Embryo vs. Unfert Floret
  misc_feature: MA Experiment ID: 20001608 Result: Down-regulated in Transcription
  misc_feature: MA Experiment 20001608 PARAMETER Experiment Name: Zm_50ppm_KNO3_L-to-H_P Parameter: Age (day) Value: 21
  misc_feature: MA Experiment 20001608 PARAMETER Experiment Name: Zm_50ppm_KNO3_L-to-H_P Parameter: Organism Value: Zea mays
  misc_feature: MA Experiment 20001608 PARAMETER Experiment Name: Zm_50ppm_KNO3_L-to-H_P Parameter: Plant Line Value: 35A19
  misc_feature: MA Experiment 20001608 PARAMETER Experiment Name: Zm_50ppm_KNO3_L-to-H_P Parameter: Timepoint (hr) Value: 48
  misc_feature: MA Experiment 20001608 PARAMETER Experiment Name: Zm_50ppm_KNO3_L-to-H_P Parameter: Tissue Value: Shoots
  misc_feature: MA Experiment 20001608 PARAMETER Experiment Name: Zm_50ppm_KNO3_L-to-H_P Parameter: Treatment Value: 50ppm KNO3 vs. 50ppm KCl
aaaaaacaacaactacttcctagtataaagtgacagtagcgggggagaagggaacgaaccaagcaacccaatccaaaccagacaagcaaggaatcccccgatggctcatcgcgttctcctcctcctctctctcgcgtcggccgccgcggttgccgccgccgtcgacgcggaggacccgctgatccggcaggtggttcccggtggagatgacaacgatctggagctgaacgcggagtcccacttcctgagcttcgtgcagcggttcggcaagtcctacaaggacgccgacgagcacgcgtaccggctgtccgttttcaaggacaacctgcgccgcgcgcgccggcaccagctgctggacccgtcggcggagcacggcgtcactaagttctccgacctcacgccggcagagttccgccggacctacctcggcctccgcaagtcccggcgcgctctcctcagagaactcggggagtcggcgcacgaggcgcccgtgctccccaccgatggtctccccgacgatttcgactggagggaccacggtgccgtcggccccgtcaagaaccagggttcgtgcgggtcgtgctggtcgttcagcgcgtctggagcgctggagggtgcgcactacctcgcaactggcaagctggaggtgctttcggagcagcagttcgtcgactgtgaccacgagtgtgattcatcggagcctgattcatgtgattcgggttgcaatggtgggctaatgacgacggcattcagttatctccagaaggccggtggccttgagagtgagaaggattacccttacactgggagtgatggcaaatgcaagtttgacaagtccaagattgttgcttcagttcagaacttcagtgttgtgtctgtggacgaggctcaaatttctgctaacctcatcaaacatgggccattggcaatcggcatcaatgctgcctacatgcagacatacatcggaggcgtgtcatgcccatacatctgtggcaggcaccttgaccatggtgttctccttgttggatatggtgcttctggtttcgcccccattcgcctgaaggacaagccttactggatcatcaagaactcgtggggcgagaactggggggagaacggatactacaagatatgcaggggttccaacgttcgcaacaagtgcggcgtcgattccatggtctctaccgtgtccgcagtccacgcctcgaaggagtagactctggtcagcggtgataatcgtgattccatatattgtagaactataatccctgctagtaatccatttgtgctgtttatgtatcgaaggcagcaaagatgtgtgaaagcggcaatgggatgcttgctgtaaggtaatatgtttggcttgctaggcatgctacacgctatttggatgtagcaacgttatcaccagctgtatacgctttttaatcgacaacatttgaataatatgtacataac

SEQ ID NO: 14378 - protein, 371 aa, Zea mays subsp. mays
  peptide (1)..(371): Ceres Seq. ID no. 13586375
  misc_feature (137)..(364): Pfam Name: Papain family cysteine protease Pfam Description: Papain family cysteine protease
  misc_feature (1)..(371): Homolog of NCBI NO: 1706260 NR Description: Cysteine proteinase 1 precursor
  misc_feature (6)..(369): Homolog of NCBI NO: 15705865 NR Description: cysteine proteinase precursor [Sandersonia
  misc_feature (6)..(369): Homolog of NCBI NO: 5051468 NR Description: putative preprocysteine proteinase [Nicotiana
  misc_feature (6)..(369): Homolog of NCBI NO: 4757570 NR Description: cysteine proteinase precursor [Solanum melongena]
  misc_feature (6)..(369): Homolog of NCBI NO: 28192375 NR Description: CPR2-like cysteine proteinase [Nicotiana tabacum]
  misc_feature (6)..(371): Homolog of NCBI NO: 7435795 NR Description: cysteine proteinase (EC 3.4.22.-) 2 precursor - bean >gi|2511691|emb|CAB17075.1| cysteine proteinase precursor
  misc_feature (6)..(369): Homolog of NCBI NO: 419782 NR Description: cysteine proteinase (EC 3.4.22.-) precursor
  misc_feature (4)..(369): Homolog of NCBI NO: 100203 NR Description: cysteine proteinase (EC 3.4.22.-) precursor -
  misc_feature (6)..(369): Homolog of NCBI NO: 419781 NR Description: cysteine proteinase (EC 3.4.22.-) precursor
  misc_feature (1)..(366): Homolog of NCBI NO: 7381219 NR Description: papain-like cysteine proteinase isoform I
MAHRVLLLLSLASAAAVAAAVDAEDPLIRQVVPGGDDNDLELNAESHFLSFVQRFGKSYKDADEHAYRLSVFKDNLRRARRHQLLDPSAEHGVTKFSDLTPAEFRRTYLGLRKSRRALLRELGESAHEAPVLPTDGLPDDFDWRDHGAVGPVKNQGSCGSCWSFSASGALEGAHYLATGKLEVLSEQQFVDCDHECDSSEPDSCDSGCNGGLMTTAFSYLQKAGGLESEKDYPYTGSDGKCKFDKSKIVASVQNFSVVSVDEAQISANLIKHGPLAIGINAAYMQTYIGGVSCPYICGRHLDHGVLLVGYGASGFAPIRLKDKPYWIIKNSWGENWGENGYYKICRGSNVRNKCGVDSMVSTVSAVHASKE

SEQ ID NO: 14379 - DNA, 520 bp, Zea mays subsp. mays
  misc_feature (1)..(520): Ceres Seq. ID no. 3604118
  misc_feature: MA Experiment ID: 108528 Result: Up-regulated in Transcription
  misc_feature: MA Experiment 108528 PARAMETER Experiment Name: Zm_Imbibed_Seeds_P Parameter: Age (day) Value: 5 vs. 2
  misc_feature: MA Experiment 108528 PARAMETER Experiment Name: Zm_Imbibed_Seeds_P Parameter: Organism Value: Zea mays
  misc_feature: MA Experiment 108528 PARAMETER Experiment Name: Zm_Imbibed_Seeds_P Parameter: Plant Line Value: 35A19
  misc_feature: MA Experiment 108528 PARAMETER Experiment Name: Zm_Imbibed_Seeds_P Parameter: Tissue Value: Aerial vs. Embryo
  misc_feature: MA Experiment ID: 108530 Result: Up-regulated in Transcription
  misc_feature: MA Experiment 108530 PARAMETER Experiment Name: Zm_Imbibed_Seeds_P Parameter: Age (day) Value: 6 vs. 2
  misc_feature: MA Experiment 108530 PARAMETER Experiment Name: Zm_Imbibed_Seeds_P Parameter: Organism Value: Zea mays
  misc_feature: MA Experiment 108530 PARAMETER Experiment Name: Zm_Imbibed_Seeds_P Parameter: Plant Line Value: 35A19
  misc_feature: MA Experiment 108530 PARAMETER Experiment Name: Zm_Imbibed_Seeds_P Parameter: Tissue Value: Aerial vs. Embryo
  misc_feature: MA Experiment ID: 108535 Result: Down-regulated in Transcription
  misc_feature: MA Experiment 108535 PARAMETER Experiment Name: Zm_Meristem_P Parameter: Age (day) Value: 8
  misc_feature: MA Experiment 108535 PARAMETER Experiment Name: Zm_Meristem_P Parameter: Organism Value: Zea mays
  misc_feature: MA Experiment 108535 PARAMETER Experiment Name: Zm_Meristem_P Parameter: Plant Line Value: 35A19
  misc_feature: MA Experiment 108535 PARAMETER Experiment Name: Zm_Meristem_P Parameter: Tissue Value: Root Meristem vs. Above Root Meristem
  misc_feature: MA Experiment ID: 108547 Result: Up-regulated in Transcription
  misc_feature: MA Experiment 108547 PARAMETER Experiment Name: Zm_Imbibed_Seeds_P Parameter: Age (day) Value: 4 vs. 2
  misc_feature: MA Experiment 108547 PARAMETER Experiment Name: Zm_Imbibed_Seeds_P Parameter: Organism Value: Zea mays
  misc_feature: MA Experiment 108547 PARAMETER Experiment Name: Zm_Imbibed_Seeds_P Parameter: Plant Line Value: 35A19
  misc_feature: MA Experiment 108547 PARAMETER Experiment Name: Zm_Imbibed_Seeds_P Parameter: Tissue Value: Aerial vs. Embryo
  misc_feature: MA Experiment ID: 20000108 Result: Down-regulated in Transcription
  misc_feature: MA Experiment 20000108 PARAMETER Experiment Name: Zm_Root-Tips_P Parameter: Age (day) Value: 12
  misc_feature: MA Experiment 20000108 PARAMETER Experiment Name: Zm_Root-Tips_P Parameter: Organism Value: Zea mays
  misc_feature: MA Experiment 20000108 PARAMETER Experiment Name: Zm_Root-Tips_P Parameter: Tissue Value: Root tips vs. Root mid region    35
  misc_feature: MA Experiment 20000108 PARAMETER Experiment Name: Zm_Root-Tips_P Parameter: Tissue Value: Root tips vs. Root mid region   Sequence Listing-Misc Features (4)
gtgttcatgcaatggaagcagkcatggcttgttgggagctcsaacaaactttacaaagccttacaggtgcatctcctggtgagggcactggggcaactatgtctgacgatgaagacaatcaggtggacagtgagagcaacatgtttgatggaaatgaggggtcagatggaatgggatttggcccattaatgttgactgagggtgagagatccttagttgagcgtgtccggcaggagctaaagcatgagcttaagcaggggtacagagacaaacttgtggatattcgggaagagatattgcggaagcgaagagctgggaaactccctggcgacactgcttctaccttaaaagcctggtggcaagctcattctaagtggccgtacccaaccgaggaagacaaggctcgactggtgcaggaaacagggctacaactgaagcagatcaataactggtttatcaaccagcgtaagcggaactggcacaacaattcggcgtcatcctygtcggacaaaagcaagag

SEQ ID NO: 14380 - protein, 172 aa, Zea mays subsp. mays
  peptide (1)..(172): Ceres Seq. ID no. 3604119
  misc_feature (126)..(155): Pfam Name: Homeobox domain Pfam Description: Homeobox domain
  misc_feature (1)..(171): Homolog of NCBI NO: 14149139 NR Description: KNOX family class 2 homeodomain protein [Oryza
  misc_feature (4)..(171): Homolog of NCBI NO: 14090235 NR Description: homeobox gene [Oryza sativa (japonica
  misc_feature (1)..(171): Homolog of NCBI NO: 33333542 NR Description: knotted 7 [Hordeum vulgare]
  misc_feature (1)..(171): Homolog of NCBI NO: 14149137 NR Description: KNOX family class 2 homeodomain protein [Oryza
  misc_feature (4)..(171): Homolog of NCBI NO: 14090233 NR Description: homeobox gene [Oryza sativa (japonica
  misc_feature (1)..(171): Homolog of NCBI NO: 3023961 NR Description: Homeobox protein knotted-1 like 3 (KNAP3)
  misc_feature (1)..(171): Homolog of NCBI NO: 6016226 NR Description: Homeobox protein knotted-1 like LET12
  misc_feature (1)..(171): Homolog of NCBI NO: 4098244 NR Description: homeobox 1 protein [Lycopersicon esculentum]
  misc_feature (1)..(171): Homolog of NCBI NO: 7446245 NR Description: homeobox protein NTH23 - common tobacco
  misc_feature (1)..(171): Homolog of NCBI NO: 7446252 NR Description: probable homeobox protein OSH45, splice form OSH45
  misc_feature (7)..(7): Xaa is any aa, unknown or other
  misc_feature (14)..(14): Xaa is any aa, unknown or other
  misc_feature (167)..(167): Xaa is any aa, unknown or other
VHAMEAXMACWELXQTLQSLTGASPGEGTGATMSDDEDNQVDSESNMFDGNEGSDGMGFGPLMLTEGERSLVERVRQELKHELKQGYRDKLVDIREEILRKRRAGKLPGDTASTLKAWWQAHSKWPYPTEEDKARLVQETGLQLKQINNWFINQRKRNWHNNSASSXSDKSK

SEQ ID NO: 14381 - protein, 169 aa, Zea mays subsp. mays
  peptide (1)..(169): Ceres Seq. ID no. 3604120
  misc_feature (123)..(152): Pfam Name: Homeobox domain Pfam Description: Homeobox domain
  misc_feature (1)..(168): Homolog of NCBI NO: 14149139 NR Description: KNOX family class 2 homeodomain protein [Oryza
  misc_feature (1)..(168): Homolog of NCBI NO: 14090235 NR Description: homeobox gene [Oryza sativa (japonica
  misc_feature (1)..(168): Homolog of NCBI NO: 33333542 NR Description: knotted 7 [Hordeum vulgare]
  misc_feature (1)..(168): Homolog of NCBI NO: 14149137 NR Description: KNOX family class 2 homeodomain protein [Oryza
  misc_feature (1)..(168): Homolog of NCBI NO: 14090233 NR Description: homeobox gene [Oryza sativa (japonica
  misc_feature (1)..(168): Homolog of NCBI NO: 3023961 NR Description: Homeobox protein knotted-1 like 3 (KNAP3)
  misc_feature (1)..(168): Homolog of NCBI NO: 6016226 NR Description: Homeobox protein knotted-1 like LET12
  misc_feature (1)..(168): Homolog of NCBI NO: 4098244 NR Description: homeobox 1 protein [Lycopersicon esculentum]
  misc_feature (1)..(168): Homolog of NCBI NO: 7446245 NR Description: homeobox protein NTH23 - common tobacco
  misc_feature (1)..(168): Homolog of NCBI NO: 7446252 NR Description: probable homeobox protein OSH45, splice form OSH45
  misc_feature (4)..(4): Xaa is any aa, unknown or other
  misc_feature (11)..(11): Xaa is any aa, unknown or other
  misc_feature (164)..(164): Xaa is any aa, unknown or other
MEAXMACWELXQTLQSLTGASPGEGTGATMSDDEDNQVDSESNMFDGNEGSDGMGFGPLMLTEGERSLVERVRQELKHELKQGYRDKLVDIREEILRKRRAGKLPGDTASTLKAWWQAHSKWPYPTEEDKARLVQETGLQLKQINNWFINQRKRNWHNNSASSXSDKSK

SEQ ID NO: 14382 - protein, 165 aa, Zea mays subsp. mays
  peptide (1)..(165): Ceres Seq. ID no. 3604121
  misc_feature (119)..(148): Pfam Name: Homeobox domain Pfam Description: Homeobox domain
  misc_feature (1)..(164): Homolog of NCBI NO: 14149139 NR Description: KNOX family class 2 homeodomain protein [Oryza
  misc_feature (1)..(164): Homolog of NCBI NO: 14090235 NR Description: homeobox gene [Oryza sativa (japonica
  misc_feature (1)..(164): Homolog of NCBI NO: 33333542 NR Description: knotted 7 [Hordeum vulgare]
  misc_feature (1)..(164): Homolog of NCBI NO: 14149137 NR Description: KNOX family class 2 homeodomain protein [Oryza
  misc_feature (1)..(164): Homolog of NCBI NO: 14090233 NR Description: homeobox gene [Oryza sativa (japonica
  misc_feature (1)..(164): Homolog of NCBI NO: 3023961 NR Description: Homeobox protein knotted-1 like 3 (KNAP3)
  misc_feature (1)..(164): Homolog of NCBI NO: 6016226 NR Description: Homeobox protein knotted-1 like LET12
  misc_feature (1)..(164): Homolog of NCBI NO: 4098244 NR Description: homeobox 1 protein [Lycopersicon esculentum]
  misc_feature (1)..(164): Homolog of NCBI NO: 7446245 NR Description: homeobox protein NTH23 - common tobacco
  misc_feature (1)..(164): Homolog of NCBI NO: 7446252 NR Description: probable homeobox protein OSH45, splice form OSH45
  misc_feature (7)..(7): Xaa is any aa, unknown or other
  misc_feature (160)..(160): Xaa is any aa, unknown or other
MACWELXQTLQSLTGASPGEGTGATMSDDEDNQVDSESNMFDGNEGSDGMGFGPLMLTEGERSLVERVRQELKHELKQGYRDKLVDIREEILRKRRAGKLPGDTASTLKAWWQAHSKWPYPTEEDKARLVQETGLQLKQINNWFINQRKRNWHNNSASSXSDKSK

SEQ ID NO: 14383 - DNA, 717 bp, Zea mays subsp. mays
  misc_feature (1)..(717): Ceres Seq. ID no. 12469010
  misc_feature: MA Experiment ID: 108523 Result: Up-regulated in Transcription
  misc_feature: MA Experiment 108523 PARAMETER Experiment Name: Zm_42deg_Heat_P Parameter: Age (day) Value: 8
  misc_feature: MA Experiment 108523 PARAMETER Experiment Name: Zm_42deg_Heat_P Parameter: Organism Value: Zea mays
  misc_feature: MA Experiment 108523 PARAMETER Experiment Name: Zm_42deg_Heat_P Parameter: Plant Line Value: 35A19
  misc_feature: MA Experiment 108523 PARAMETER Experiment Name: Zm_42deg_Heat_P Parameter: Temperature (deg C) Value: 42 vs. 22
  misc_feature: MA Experiment 108523 PARAMETER Experiment Name: Zm_42deg_Heat_P Parameter: Timepoint (hr) Value: 6
  misc_feature: MA Experiment 108523 PARAMETER Experiment Name: Zm_42deg_Heat_P Parameter: Tissue Value: Aerial
  misc_feature: MA Experiment ID: 108543 Result: Up-regulated in Transcription
  misc_feature: MA Experiment ID: 108689 Result: Down-regulated in Transcription
  misc_feature: MA Experiment 108689 PARAMETER Experiment Name: Zm_Drought_Roots_P Parameter: Age (day) Value: 9
  misc_feature: MA Experiment 108689 PARAMETER Experiment Name: Zm_Drought_Roots_P Parameter: Organism Value: Zea mays
  misc_feature: MA Experiment 108689 PARAMETER Experiment Name: Zm_Drought_Roots_P Parameter: Plant Line Value: 35A19
  misc_feature: MA Experiment 108689 PARAMETER Experiment Name: Zm_Drought_Roots_P Parameter: Timepoint (hr) Value: 24
  misc_feature: MA Experiment 108689 PARAMETER Experiment Name: Zm_Drought_Roots_P Parameter: Tissue Value: Roots
  misc_feature: MA Experiment 108689 PARAMETER Experiment Name: Zm_Drought_Roots_P Parameter: Treatment Value: Drought vs. No Drought
  misc_feature: MA Experiment ID: 20000626 Result: Down-regulated in Transcription
  misc_feature: MA Experiment 20000626 PARAMETER Experiment Name: Zm_Herbicide-Treatments_P Parameter: Timepoint (hr) Value: 12
  misc_feature: MA Experiment 20000626 PARAMETER Experiment Name: Zm_Herbicide-Treatments_P Parameter: Tissue Value: Aerial
  misc_feature: MA Experiment 20000626 PARAMETER Experiment Name: Zm_Herbicide-Treatments_P Parameter: Treatment Value: Roundup vs. No Treatment
gaagctagccggcgattgaaaactgagctattaatacagatggatgggttgactaagacagatgagcttgtttttgttctagcagcaacaaatttaccatgggagttggatgcagcaatgctgcgtcggctggagaagcgtattcttgttccattgccagagccggatgctagacatgctatgtttgaagagctcctgccatatacacctggcacaatggagattccctatgatgttcttgtggagaaaactgaagggtattctggctctgatattcgcctggtatgcaaggaagcagcaatgcagcccctaagacgggtaatggcagttcttgaaggcaggaaagaagaggtccctgagagtgagttgcctgaagttggcccagtaactacagaagatattgaacttgctttgaggaatacaagaccgtctgctcatcttcacgcacatagatacgaaaagttcaaccaagattatggcagtcatgtacatggctaaaggggagaagcttgttgtagggtttaatttgtatgctcatgcgtgggccattaggtgactactgaattcatcgacatgctgaggtatccttgtaaacactatgcttatccttgtatgctatacactatcattcatttgatgagcaataagctgtttggtaactcagtctcacctggataaggagaaactacgattttccctgcatttggctcgatttat

SEQ ID NO: 14384 - protein, 165 aa, Zea mays subsp. mays
  peptide (1)..(165): Ceres Seq. ID no. 12469011
  misc_feature (1)..(105): Pfam Name: ATPase family associated with various cellular Pfam Description: ATPase family associated with various cellular
  misc_feature (1)..(163): Homolog of NCBI NO: 34911050 NR Description: putative katanin [Oryza sativa (japonica
  misc_feature (1)..(163): Homolog of NCBI NO: 34909678 NR Description: katanin p60 subunit A 1-like [Oryza sativa
  misc_feature (1)..(163): Homolog of NCBI NO: 18403587 NR Description: putative katanin; protein id: At2g34560.1, by cDNA: 119620. [Arabidopsis thaliana] putative katanin [Arabidopsis thaliana]
  misc_feature (1)..(163): Homolog of NCBI NO: 25408335 NR Description: probable katanin [imported] - Arabidopsis thaliana
  misc_feature (1)..(161): Homolog of NCBI NO: 34190544 NR Description: Unknown (protein for MGC:33211) [Homo sapiens]
  misc_feature (1)..(161): Homolog of NCBI NO: 11071772 NR Description: probable AAA ATPase [Leishmania major]
  misc_feature (1)..(145): Homolog of NCBI NO: 17508421 NR Description: Katanin, defective MEIosis MEI-1 (51.7 kD) [Caenorhabditis elegans] >gi|462591|sp|P34808|MEI1_CAEEL MEIOTIC
  misc_feature (1)..(139): Homolog of NCBI NO: 39595436 NR Description: Hypothetical protein CBG04086 [Caenorhabditis
  misc_feature (1)..(145): Homolog of NCBI NO: 32563584 NR Description: AAA ATPase, central region, defective MEIosis
  misc_feature (1)..(161): Homolog of NCBI NO: 5901990 NR Description: katanin p60 subunit A 1 [Homo sapiens]
EASRRLKTELLIQMDGLTKTDELVFVLAATNLPWELDAAMLRRLEKRILVPLPEPDARHAMFEELLPYTPGTMEIPYDVLVEKTEGYSGSDIRLVCKEAAMQPLRRVMAVLEGRKEEVPESELPEVGPVTTEDIELALRNTRPSAHLHAHRYEKFNQDYGSHVHG

SEQ ID NO: 14385 - protein, 152 aa, Zea mays subsp. mays
  peptide (1)..(152): Ceres Seq. ID no. 12469012
  misc_feature (1)..(92): Pfam Name: ATPase family associated with various cellular Pfam Description: ATPase family associated with various cellular
  misc_feature (1)..(150): Homolog of NCBI NO: 34911050 NR Description: putative katanin [Oryza sativa (japonica
  misc_feature (1)..(150): Homolog of NCBI NO: 34909678 NR Description: katanin p60 subunit A 1-like [Oryza sativa
  misc_feature (1)..(150): Homolog of NCBI NO: 18403587 NR Description: putative katanin; protein id: At2g34560.1, by cDNA: 119620. [Arabidopsis thaliana] putative katanin [Arabidopsis thaliana]
  misc_feature (1)..(150): Homolog of NCBI NO: 25408335 NR Description: probable katanin [imported] - Arabidopsis thaliana
  misc_feature (1)..(148): Homolog of NCBI NO: 34190544 NR Description: Unknown (protein for MGC:33211) [Homo sapiens]
  misc_feature (1)..(148): Homolog of NCBI NO: 11071772 NR Description: probable AAA ATPase [Leishmania major]
  misc_feature (1)..(132): Homolog of NCBI NO: 17508421 NR Description: Katanin, defective MEIosis MEI-1 (51.7 kD) [Caenorhabditis elegans] >gi|462591|sp|P34808|MEI1_CAEEL MEIOTIC
  misc_feature (1)..(126): Homolog of NCBI NO: 39595436 NR Description: Hypothetical protein CBG04086 [Caenorhabditis
  misc_feature (1)..(132): Homolog of NCBI NO: 32563584 NR Description: AAA ATPase, central region, defective MEIosis
  misc_feature (1)..(148): Homolog of NCBI NO: 5901990 NR Description: katanin p60 subunit A 1 [Homo sapiens]
MDGLTKTDELVFVLAATNLPWELDAAMLRRLEKRILVPLPEPDARHAMFEELLPYTPGTMEIPYDVLVEKTEGYSGSDIRLVCKEAAMQPLRRVMAVLEGRKEEVPESELPEVGPVTTEDIELALRNTRPSAHLHAHRYEKFNQDYGSHVHG

SEQ ID NO: 14386 - protein, 126 aa, Zea mays subsp. mays
  peptide (1)..(126): Ceres Seq. ID no. 12469013
  misc_feature (1)..(66): Pfam Name: ATPase family associated with various cellular Pfam Description: ATPase family associated with various cellular
  misc_feature (1)..(124): Homolog of NCBI NO: 34911050 NR Description: putative katanin [Oryza sativa (japonica
  misc_feature (1)..(124): Homolog of NCBI NO: 34909678 NR Description: katanin p60 subunit A 1-like [Oryza sativa
  misc_feature (1)..(124): Homolog of NCBI NO: 18403587 NR Description: putative katanin; protein id: At2g34560.1, by cDNA: 119620. [Arabidopsis thaliana] putative katanin [Arabidopsis thaliana]
  misc_feature (1)..(124): Homolog of NCBI NO: 25408335 NR Description: probable katanin [imported] - Arabidopsis thaliana
  misc_feature (1)..(122): Homolog of NCBI NO: 34190544 NR Description: Unknown (protein for MGC:33211) [Homo sapiens]
  misc_feature (1)..(122): Homolog of NCBI NO: 11071772 NR Description: probable AAA ATPase [Leishmania major]
  misc_feature (1)..(106): Homolog of NCBI NO: 17508421 NR Description: Katanin, defective MEIosis MEI-1 (51.7 kD) [Caenorhabditis elegans] >gi|462591|sp|P34808|MEI1_CAEEL MEIOTIC
  misc_feature (1)..(100): Homolog of NCBI NO: 39595436 NR Description: Hypothetical protein CBG04086 [Caenorhabditis
  misc_feature (1)..(106): Homolog of NCBI NO: 32563584 NR Description: AAA ATPase, central region, defective MEIosis
  misc_feature (1)..(122): Homolog of NCBI NO: 5901990 NR Description: katanin p60 subunit A 1 [Homo sapiens]
MLRRLEKRILVPLPEPDARHAMFEELLPYTPGTMEIPYDVLVEKTEGYSGSDIRLVCKEAAMQPLRRVMAVLEGRKEEVPESELPEVGPVTTEDIELALRNTRPSAHLHAHRYEKFNQDYGSHVHG

SEQ ID NO: 14387 - DNA, 651 bp, Zea mays subsp. mays
  misc_feature (1)..(651): Ceres Seq. ID no. 13501289
  misc_feature: MA Experiment ID: 108504 Result: Up-regulated in Transcription
  misc_feature: MA Experiment 108504 PARAMETER Experiment Name: Zm_Drought_P Parameter: Age (day) Value: 8
  misc_feature: MA Experiment 108504 PARAMETER Experiment Name: Zm_Drought_P Parameter: Organism Value: Zea mays
  misc_feature: MA Experiment 108504 PARAMETER Experiment Name: Zm_Drought_P Parameter: Plant Line Value: 35A19
  misc_feature: MA Experiment 108504 PARAMETER Experiment Name: Zm_Drought_P Parameter: Timepoint (hr) Value: 12
  misc_feature: MA Experiment 108504 PARAMETER Experiment Name: Zm_Drought_P Parameter: Tissue Value: Aerial
  misc_feature: MA Experiment 108504 PARAMETER Experiment Name: Zm_Drought_P Parameter: Treatment Value: Drought vs. No Drought
  misc_feature: MA Experiment ID: 108522 Result: Up-regulated in Transcription
  misc_feature: MA Experiment 108522 PARAMETER Experiment Name: Zm_42deg_Heat_P Parameter: Age (day) Value: 8
  misc_feature: MA Experiment 108522 PARAMETER Experiment Name: Zm_42deg_Heat_P Parameter: Organism Value: Zea mays
  misc_feature: MA Experiment 108522 PARAMETER Experiment Name: Zm_42deg_Heat_P Parameter: Plant Line Value: 35A19
  misc_feature: MA Experiment 108522 PARAMETER Experiment Name: Zm_42deg_Heat_P Parameter: Temperature (deg C) Value: 42 vs. 22
  misc_feature: MA Experiment 108522 PARAMETER Experiment Name: Zm_42deg_Heat_P Parameter: Timepoint (hr) Value: 1
  misc_feature: MA Experiment 108522 PARAMETER Experiment Name: Zm_42deg_Heat_P Parameter: Tissue Value: Aerial
  misc_feature: MA Experiment ID: 108523 Result: Up-regulated in Transcription
  misc_feature: MA Experiment 108523 PARAMETER Experiment Name: Zm_42deg_Heat_P Parameter: Age (day) Value: 8
  misc_feature: MA Experiment 108523 PARAMETER Experiment Name: Zm_42deg_Heat_P Parameter: Organism Value: Zea mays
  misc_feature: MA Experiment 108523 PARAMETER Experiment Name: Zm_42deg_Heat_P Parameter: Plant Line Value: 35A19
  misc_feature: MA Experiment 108523 PARAMETER Experiment Name: Zm_42deg_Heat_P Parameter: Temperature (deg C) Value: 42 vs. 22
  misc_feature: MA Experiment 108523 PARAMETER Experiment Name: Zm_42deg_Heat_P Parameter: Timepoint (hr) Value: 6
  misc_feature: MA Experiment 108523 PARAMETER Experiment Name: Zm_42deg_Heat_P Parameter: Tissue Value: Aerial
  misc_feature: MA Experiment ID: 108527 Result: Up-regulated in Transcription
  misc_feature: MA Experiment 108527 PARAMETER Experiment Name: Zm_5mM_NO_P Parameter: Age (day) Value: 8
  misc_feature: MA Experiment 108527 PARAMETER Experiment Name: Zm_5mM_NO_P Parameter: Organism Value: Zea mays
  misc_feature: MA Experiment 108527 PARAMETER Experiment Name: Zm_5mM_NO_P Parameter: Plant Line Value: 35A19
  misc_feature: MA Experiment 108527 PARAMETER Experiment Name: Zm_5mM_NO_P Parameter: Timepoint (hr) Value: 6
  misc_feature: MA Experiment 108527 PARAMETER Experiment Name: Zm_5mM_NO_P Parameter: Tissue Value: Aerial
  misc_feature: MA Experiment 108527 PARAMETER Experiment Name: Zm_5mM_NO_P Parameter: Treatment Value: 5mM NO vs. No Treatment
  misc_feature: MA Experiment ID: 108529 Result: Up-regulated in Transcription
  misc_feature: MA Experiment 108529 PARAMETER Experiment Name: Zm_Imbibed_Seeds_P Parameter: Age (day) Value: 5 vs. 2
  misc_feature: MA Experiment 108529 PARAMETER Experiment Name: Zm_Imbibed_Seeds_P Parameter: Organism Value: Zea mays
  misc_feature: MA Experiment 108529 PARAMETER Experiment Name: Zm_Imbibed_Seeds_P Parameter: Plant Line Value: 35A19
  misc_feature: MA Experiment 108529 PARAMETER Experiment Name: Zm_Imbibed_Seeds_P Parameter: Tissue Value: Roots vs. Embryo
  misc_feature: MA Experiment ID: 108530 Result: Up-regulated in Transcription
  misc_feature: MA Experiment 108530 PARAMETER Experiment Name: Zm_Imbibed_Seeds_P Parameter: Age (day) Value: 6 vs. 2
  misc_feature: MA Experiment 108530 PARAMETER Experiment Name: Zm_Imbibed_Seeds_P Parameter: Organism Value: Zea mays
  misc_feature: MA Experiment 108530 PARAMETER Experiment Name: Zm_Imbibed_Seeds_P Parameter: Plant Line Value: 35A19
  misc_feature: MA Experiment 108530 PARAMETER Experiment Name: Zm_Imbibed_Seeds_P Parameter: Tissue Value: Aerial vs. Embryo
  misc_feature: MA Experiment ID: 108534 Result: Up-regulated in Transcription
  misc_feature: MA Experiment 108534 PARAMETER Experiment Name: Zm_4deg_Cold_P Parameter: Age (hr) Value: 8
  misc_feature: MA Experiment 108534 PARAMETER Experiment Name: Zm_4deg_Cold_P Parameter: Organism Value: Zea mays
  misc_feature: MA Experiment 108534 PARAMETER Experiment Name: Zm_4deg_Cold_P Parameter: Plant Line Value: 35A19
  misc_feature: MA Experiment 108534 PARAMETER Experiment Name: Zm_4deg_Cold_P Parameter: Temperature (deg C) Value: 4 vs. 22
  misc_feature: MA Experiment 108534 PARAMETER Experiment Name: Zm_4deg_Cold_P Parameter: Timepoint (hr) Value: 6
  misc_feature: MA Experiment 108534 PARAMETER Experiment Name: Zm_4deg_Cold_P Parameter: Tissue Value: Aerial
  misc_feature: MA Experiment ID: 108535 Result: Down-regulated in Transcription
  misc_feature: MA Experiment 108535 PARAMETER Experiment Name: Zm_Meristem_P Parameter: Age (day) Value: 8
  misc_feature: MA Experiment 108535 PARAMETER Experiment Name: Zm_Meristem_P Parameter: Organism Value: Zea mays
  misc_feature: MA Experiment 108535 PARAMETER Experiment Name: Zm_Meristem_P Parameter: Plant Line Value: 35A19
  misc_feature: MA Experiment 108535 PARAMETER Experiment Name: Zm_Meristem_P Parameter: Tissue Value: Root Meristem vs. Above Root Meristem
  misc_feature: MA Experiment ID: 108540 Result: Up-regulated in Transcription
  misc_feature: MA Experiment 108540 PARAMETER Experiment Name: Zm_20percent_PEG_P Parameter: Age (day) Value: 8
  misc_feature: MA Experiment 108540 PARAMETER Experiment Name: Zm_20percent_PEG_P Parameter: Organism Value: Zea mays
  misc_feature: MA Experiment 108540 PARAMETER Experiment Name: Zm_20percent_PEG_P Parameter: Plant Line Value: 35A19
  misc_feature: MA Experiment 108540 PARAMETER Experiment Name: Zm_20percent_PEG_P Parameter: Timepoint (hr) Value: 6
  misc_feature: MA Experiment 108540 PARAMETER Experiment Name: Zm_20percent_PEG_P Parameter: Tissue Value: Aerial
  misc_feature: MA Experiment 108540 PARAMETER Experiment Name: Zm_20percent_PEG_P Parameter: Treatment Value: 20percent PEG vs. No Treatment
  misc_feature: MA Experiment ID: 108556 Result: Up-regulated in Transcription
  misc_feature: MA Experiment 108556 PARAMETER Experiment Name: Zm_Drought_P Parameter: Age (day) Value: 9
  misc_feature: MA Experiment 108556 PARAMETER Experiment Name: Zm_Drought_P Parameter: Organism Value: Zea mays
  misc_feature: MA Experiment 108556 PARAMETER Experiment Name: Zm_Drought_P Parameter: Plant Line Value: 35A19
  misc_feature: MA Experiment 108556 PARAMETER Experiment Name: Zm_Drought_P Parameter: Timepoint (hr) Value: 24
  misc_feature: MA Experiment 108556 PARAMETER Experiment Name: Zm_Drought_P Parameter: Tissue Value: Aerial
  misc_feature: MA Experiment 108556 PARAMETER Experiment Name: Zm_Drought_P Parameter: Treatment Value: Drought vs. No Drought
  misc_feature: MA Experiment ID: 108559 Result: Up-regulated in Transcription
  misc_feature: MA Experiment 108559 PARAMETER Experiment Name: Zm_5mM_NO_P Parameter: Age (day) Value: 8
  misc_feature: MA Experiment 108559 PARAMETER Experiment Name: Zm_5mM_NO_P Parameter: Organism Value: Zea mays
  misc_feature: MA Experiment 108559 PARAMETER Experiment Name: Zm_5mM_NO_P Parameter: Plant Line Value: 35A19
  misc_feature: MA Experiment 108559 PARAMETER Experiment Name: Zm_5mM_NO_P Parameter: Timepoint (hr) Value: 12
  misc_feature: MA Experiment 108559 PARAMETER Experiment Name: Zm_5mM_NO_P Parameter: Tissue Value: Aerial
  misc_feature: MA Experiment 108559 PARAMETER Experiment Name: Zm_5mM_NO_P Parameter: Treatment Value: 5mM NO vs. No Treatment
  misc_feature: MA Experiment ID: 108689 Result: Down-regulated in Transcription
  misc_feature: MA Experiment 108689 PARAMETER Experiment Name: Zm_Drought_Roots_P Parameter: Age (day) Value: 9
  misc_feature: MA Experiment 108689 PARAMETER Experiment Name: Zm_Drought_Roots_P Parameter: Organism Value: Zea mays
  misc_feature: MA Experiment 108689 PARAMETER Experiment Name: Zm_Drought_Roots_P Parameter: Plant Line Value: 35A19
  misc_feature: MA Experiment 108689 PARAMETER Experiment Name: Zm_Drought_Roots_P Parameter: Timepoint (hr) Value: 24
  misc_feature: MA Experiment 108689 PARAMETER Experiment Name: Zm_Drought_Roots_P Parameter: Tissue Value: Roots
  misc_feature: MA Experiment 108689 PARAMETER Experiment Name: Zm_Drought_Roots_P Parameter: Treatment Value: Drought vs. No Drought
  misc_feature: MA Experiment ID: 20000477 Result: Up-regulated in Transcription
  misc_feature: MA Experiment 20000477 PARAMETER Experiment Name: Zm_5mM_SA_P Parameter: Age (day) Value: 10
  misc_feature: MA Experiment 20000477 PARAMETER Experiment Name: Zm_5mM_SA_P Parameter: Organism Value: Zea mays
  misc_feature: MA Experiment 20000477 PARAMETER Experiment Name: Zm_5mM_SA_P Parameter: Plant Line Value: 35A19
  misc_feature: MA Experiment 20000477 PARAMETER Experiment Name: Zm_5mM_SA_P Parameter: Timepoint (hr) Value: 48
  misc_feature: MA Experiment 20000477 PARAMETER Experiment Name: Zm_5mM_SA_P Parameter: Tissue Value: Aerial
  misc_feature: MA Experiment 20000477 PARAMETER Experiment Name: Zm_5mM_SA_P Parameter: Treatment Value: 5mM SA vs. No Treatment
  misc_feature: MA Experiment ID: 20000478 Result: Up-regulated in Transcription
  misc_feature: MA Experiment 20000478 PARAMETER Experiment Name: Zm_5mM_SA_P Parameter: Age (day) Value: 11
  misc_feature: MA Experiment 20000478 PARAMETER Experiment Name: Zm_5mM_SA_P Parameter: Organism Value: Zea mays
  misc_feature: MA Experiment 20000478 PARAMETER Experiment Name: Zm_5mM_SA_P Parameter: Plant Line Value: 35A19
  misc_feature: MA Experiment 20000478 PARAMETER Experiment Name: Zm_5mM_SA_P Parameter: Timepoint (hr) Value: 72
  misc_feature: MA Experiment 20000478 PARAMETER Experiment Name: Zm_5mM_SA_P Parameter: Tissue Value: Aerial
  misc_feature: MA Experiment 20000478 PARAMETER Experiment Name: Zm_5mM_SA_P Parameter: Treatment Value: 5mM SA vs. No Treatment
  misc_feature: MA Experiment ID: 20000492 Result: Down-regulated in Transcription
  misc_feature: MA Experiment 20000492 PARAMETER Experiment Name: Zm_Hybrid_Seed_Dev_P Parameter: DAP Value: 12
  misc_feature: MA Experiment 20000492 PARAMETER Experiment Name: Zm_Hybrid_Seed_Dev_P Parameter: Organism Value: Zea mays
  misc_feature: MA Experiment 20000492 PARAMETER Experiment Name: Zm_Hybrid_Seed_Dev_P Parameter: Plant Line Value: 35A19
  misc_feature: MA Experiment 20000492 PARAMETER Experiment Name: Zm_Hybrid_Seed_Dev_P Parameter: Tissue Value: Fert Kernel vs. Unfert Floret
  misc_feature: MA Experiment ID: 20000535 Result: Down-regulated in Transcription
  misc_feature: MA Experiment 20000535 PARAMETER Experiment Name: Zm_Hybrid_Seed_Dev_P Parameter: DAP Value: 30 vs. 12
  misc_feature: MA Experiment 20000535 PARAMETER Experiment Name: Zm_Hybrid_Seed_Dev_P Parameter: Organism Value: Zea mays
  misc_feature: MA Experiment 20000535 PARAMETER Experiment Name: Zm_Hybrid_Seed_Dev_P Parameter: Plant Line Value: 35A19
  misc_feature: MA Experiment 20000535 PARAMETER Experiment Name: Zm_Hybrid_Seed_Dev_P Parameter: Tissue Value: Embryo vs. Unfert Floret
  misc_feature: MA Experiment ID: 20000626 Result: Up-regulated in Transcription
  misc_feature: MA Experiment 20000626 PARAMETER Experiment Name: Zm_Herbicide-Treatments_P Parameter: Timepoint (hr) Value: 12
  misc_feature: MA Experiment 20000626 PARAMETER Experiment Name: Zm_Herbicide-Treatments_P Parameter: Tissue Value: Aerial
  misc_feature: MA Experiment 20000626 PARAMETER Experiment Name: Zm_Herbicide-Treatments_P Parameter: Treatment Value: Roundup vs. No Treatment
  misc_feature: MA Experiment ID: 20000629 Result: Up-regulated in Transcription
  misc_feature: MA Experiment 20000629 PARAMETER Experiment Name: Zm_Herbicide-Treatments_P Parameter: Timepoint (hr) Value: 12
  misc_feature: MA Experiment 20000629 PARAMETER Experiment Name: Zm_Herbicide-Treatments_P Parameter: Tissue Value: Aerial
  misc_feature: MA Experiment 20000629 PARAMETER Experiment Name: Zm_Herbicide-Treatments_P Parameter: Treatment Value: Trimec vs. No Treatment
tgccaagtcccaacatcttgagctcgatcgcaaaccctcagacacttcttcccccagccgacgtacatgaagcacccgagagacgccggcgccatgccgctctccctcgcgctgtccctcggcgccggcgtggcccccgggcacggcagcagcaagcggccccggcgcgcggcgggcggcggggacggcgagttggtctgcaagacgtgcagccgcgccttcgtctcgttccaggcgctgggcgggcaccggacaagccacctgagggccggccggcacggccttgcgctcgggatgcccgcgccggcgccggcgaangaggcgccgccgcccgcgacgacccacctgtgccacgtctgcgggctcggcttccagatgggccangcgctaggcggccacatgcggcgccaccgcgaggaggctgccgccaccaccgcgcaggcgccgcccgtcctcctccagctcttcgtgtagagttttgcccgtccacggagtctagctagtagaggaattcttcgcgttcctgtcgtcactcgtgagtctgctgcgcatcgtagattcacagtacagttgttggcgtcaattcattcattcattcatttagttgtatacatgtaaataactgattagttattttattgttcctaatct

SEQ ID NO: 14388 - protein, 166 aa, Zea mays subsp. mays
  peptide (1)..(166): Ceres Seq. ID no. 13501290
  misc_feature (106)..(106): Xaa is any aa, unknown or other
  misc_feature (128)..(128): Xaa is any aa, unknown or other
PSPNILSSIANPQTLLPPADVHEAPERRRRHAALPRAVPRRRRGPRARQQQAAPARGGRRGRRVGLQDVQPRLRLVPGAGRAPDKPPEGRPARPCARDARAGAGEXGAAARDDPPVPRLRARLPDGPXARRPHAAPPRGGCRHHRAGAARPPPALRVEFCPSTESS

SEQ ID NO: 14389 - protein, 135 aa, Zea mays subsp. mays
  peptide (1)..(135): Ceres Seq. ID no. 13501291
  misc_feature (45)..(65): Pfam Name: Zinc finger, C2H2 type Pfam Description: Zinc finger, C2H2 type
  misc_feature (2)..(135): Homolog of NCBI NO: 29124117 NR Description: putative Cys2/His2 zinc-finger protein [Oryza
  misc_feature (1)..(121): Homolog of NCBI NO: 29124140 NR Description: putative Cys2/His2 zinc-finger protein [Oryza
  misc_feature (13)..(123): Homolog of NCBI NO: 18652814 NR Description: C2H2 zinc finger protein [Oryza sativa]
  misc_feature (13)..(123): Homolog of NCBI NO: 34908122 NR Description: P0031D11.19 [Oryza sativa (japonica
  misc_feature (18)..(123): Homolog of NCBI NO: 30420734 NR Description: zinc finger transcription factor ZFP19 [Oryza
  misc_feature (18)..(123): Homolog of NCBI NO: 34908110 NR Description: P0031D11.12 [Oryza sativa (japonica
  misc_feature (45)..(130): Homolog of NCBI NO: 2346978 NR Description: ZPT2-14 [Petunia x hybrida]
  misc_feature (38)..(121): Homolog of NCBI NO: 15238538 NR Description: zinc finger protein Zat12 [Arabidopsis thaliana] zinc finger protein [Arabidopsis thaliana] zinc finger protein [Arabidopsis thaliana]
  misc_feature (31)..(121): Homolog of NCBI NO: 15231334 NR Description: zinc finger -related protein [Arabidopsis
  misc_feature (45)..(118): Homolog of NCBI NO: 15231333 NR Description: zinc finger -related protein [Arabidopsis
  misc_feature (84)..(84): Xaa is any aa, unknown or other
  misc_feature (106)..(106): Xaa is any aa, unknown or other
MKHPRDAGAMPLSLALSLGAGVAPGHGSSKRPRRAAGGGDGELVCKTCSRAFVSFQALGGHRTSHLRAGRHGLALGMPAPAPAXEAPPPATTHLCHVCGLGFQMGXALGGHMRRHREEAAATTAQAPPVLLQLFV

SEQ ID NO: 14390 - protein, 126 aa, Zea mays subsp. mays
  peptide (1)..(126): Ceres Seq. ID no. 13501292
  misc_feature (36)..(56): Pfam Name: Zinc finger, C2H2 type Pfam Description: Zinc finger, C2H2 type
  misc_feature (1)..(126): Homolog of NCBI NO: 29124117 NR Description: putative Cys2/His2 zinc-finger protein [Oryza
  misc_feature (1)..(112): Homolog of NCBI NO: 29124140 NR Description: putative Cys2/His2 zinc-finger protein [Oryza
  misc_feature (4)..(114): Homolog of NCBI NO: 18652814 NR Description: C2H2 zinc finger protein [Oryza sativa]
  misc_feature (4)..(114): Homolog of NCBI NO: 34908122 NR Description: P0031D11.19 [Oryza sativa (japonica
  misc_feature (9)..(114): Homolog of NCBI NO: 30420734 NR Description: zinc finger transcription factor ZFP19 [Oryza
  misc_feature (9)..(114): Homolog of NCBI NO: 34908110 NR Description: P0031D11.12 [Oryza sativa (japonica
  misc_feature (36)..(121): Homolog of NCBI NO: 2346978 NR Description: ZPT2-14 [Petunia x hybrida]
  misc_feature (29)..(112): Homolog of NCBI NO: 15238538 NR Description: zinc finger protein Zat12 [Arabidopsis thaliana] zinc finger protein [Arabidopsis thaliana] zinc finger protein [Arabidopsis thaliana]
  misc_feature (22)..(112): Homolog of NCBI NO: 15231334 NR Description: zinc finger -related protein [Arabidopsis
  misc_feature (36)..(109): Homolog of NCBI NO: 15231333 NR Description: zinc finger -related protein [Arabidopsis
  misc_feature (75)..(75): Xaa is any aa, unknown or other
  misc_feature (97)..(97): Xaa is any aa, unknown or other
MPLSLALSLGAGVAPGHGSSKRPRRAAGGGDGELVCKTCSRAFVSFQALGGHRTSHLRAGRHGLALGMPAPAPAXEAPPPATTHLCHVCGLGFQMGXALGGHMRRHREEAAATTAQAPPVLLQLFV

SEQ ID NO: 14391 - DNA, 497 bp, Zea mays subsp. mays
  misc_feature (1)..(497): Ceres Seq. ID no. 6405274
  misc_feature: MA Experiment ID: 108535 Result: Up-regulated in Transcription
  misc_feature: MA Experiment 108535 PARAMETER Experiment Name: Zm_Meristem_P Parameter: Age (day) Value: 8
  misc_feature: MA Experiment 108535 PARAMETER Experiment Name: Zm_Meristem_P Parameter: Organism Value: Zea mays
  misc_feature: MA Experiment 108535 PARAMETER Experiment Name: Zm_Meristem_P Parameter: Plant Line Value: 35A19
  misc_feature: MA Experiment 108535 PARAMETER Experiment Name: Zm_Meristem_P Parameter: Tissue Value: Root Meristem vs. Above Root Meristem
tttctgtgcaagcaaccttcccttataaattcgttgtgagcaagttcttgcagcctggagcttatgatctggttggttacatagtgtatgagatcgaccagcacccttaccagaatgtattctacaatggcactattgaggtcgttgaggctggaggcttactcagtgttgagtctgtgttcctcatcacccttggaatcgctctttttggtctctttggattatgggcatatggccaggttcagcagctctcgaagaaaacgaagaaggcccccaaggtggagctcggaactggaacaactgatgccaacatcgatgagtggctggagggcacttcgtttgtgcagagaagcaaatccaagaagaagcagacctgaagctagctctccagagtagttaatccttggaggatctagaatgaggcatttgagggtagcccttcacaagtgacttctgcagaaagataratgcctaaggaggkgctgaaaaatgtagtt

SEQ ID NO: 14392 - protein, 124 aa, Zea mays subsp. mays
  peptide (1)..(124): Ceres Seq. ID no. 6405275
  misc_feature (1)..(122): Homolog of NCBI NO: 21555380 NR Description: putative signal sequence receptor, alpha subunit
  misc_feature (1)..(122): Homolog of NCBI NO: 547391 NR Description: alpha-subunit; putative
  misc_feature (1)..(122): Homolog of NCBI NO: 18399609 NR Description: putative signal sequence receptor, alpha subunit alpha); protein id: At2g21160.1, supported by cDNA: 27787.,
  misc_feature (1)..(122): Homolog of NCBI NO: 25335776 NR Description: hypothetical protein At2g21160 [imported] -
  misc_feature (1)..(123): Homolog of NCBI NO: 15227250 NR Description: putative TRAP protein; protein id: At2g16595.1 thaliana] >gi|20197462|gb|AAM15085.1| putative TRAP protein thaliana] >gi|20198182|gb|AAM15448.1| putative TRAP protein
SVQATFPYKFVVSKFLQPGAYDLVGYIVYEIDQHPYQNVFYNGTIEVVEAGGLLSVESVFLITLGIALFGLFGLWAYGQVQQLSKKTKKAPKVELGTGTTDANIDEWLEGTSFVQRSKSKKKQT

SEQ ID NO: 14393 - protein, 102 aa, Zea mays subsp. mays
  peptide (1)..(102): Ceres Seq. ID no. 6405276
MRSTSTLTRMYSTMALLRSLRLEAYSVLSLCSSSPLESLFLVSLDYGHMARFSSSRRKRRRPPRWSSELEQLMPTSMSGWRALRLCREANPRRSRPEASSPE

SEQ ID NO: 14394 - protein, 93 aa, Zea mays subsp. mays
  peptide (1)..(93): Ceres Seq. ID no. 6405277
MYSTMALLRSLRLEAYSVLSLCSSSPLESLFLVSLDYGHMARFSSSRRKRRRPPRWSSELEQLMPTSMSGWRALRLCREANPRRSRPEASSPE

SEQ ID NO: 14395 - DNA, 1222 bp, Zea mays subsp. mays
  misc_feature (1)..(1222): Ceres Seq. ID no. 13623625
  misc_feature: MA Experiment ID: 20000488 Result: Down-regulated in Transcription
  misc_feature: MA Experiment 20000488 PARAMETER Experiment Name: Zm_50mM_NH4NO3_L_to_H_P Parameter: Organism Value: Zea mays
  misc_feature: MA Experiment 20000488 PARAMETER Experiment Name: Zm_50mM_NH4NO3_L_to_H_P Parameter: Timepoint (hr) Value: 8
  misc_feature: MA Experiment 20000488 PARAMETER Experiment Name: Zm_50mM_NH4NO3_L_to_H_P Parameter: Tissue Value: Leaves
  misc_feature: MA Experiment 20000488 PARAMETER Experiment Name: Zm_50mM_NH4NO3_L_to_H_P Parameter: Treatment Value: 50mM NH4NO3 vs. 100mM Mannitol
  misc_feature: MA Experiment ID: 20000534 Result: Up-regulated in Transcription
  misc_feature: MA Experiment 20000534 PARAMETER Experiment Name: Zm_Hybrid_Pollen_P Parameter: Age (day) Value: 8
  misc_feature: MA Experiment 20000534 PARAMETER Experiment Name: Zm_Hybrid_Pollen_P Parameter: Organism Value: Zea mays
  misc_feature: MA Experiment 20000534 PARAMETER Experiment Name: Zm_Hybrid_Pollen_P Parameter: Plant Line Value: 35A19
  misc_feature: MA Experiment 20000534 PARAMETER Experiment Name: Zm_Hybrid_Pollen_P Parameter: Tissue Value: Pollen vs. Aerial
actaccgctgcgagtggccgctcccgcaggttctgctctccgccttctccatccacaacgagaccctcaacgtctggacgcatcttataggatttttcatctttctcgctctgaccatatacacagcaacacaagttccaaatgcagtagatatccggagcttgcagcatttgccagatgtactgagaaaggctgatattcataagattcaggcagagcttgtgtcatgtcttccgtcgttacctcacctttcagatctacaaaagctgaaggatgagctgaagacctcttggaattctatggaggttcttccatctctgtcccgttggcatctcttggagttactcgcaaattgtctgccacacagatttacccatcccaatgaaacaagtttgtctgttcttcaaagcatgaaggaggatctagcaagcctgattgcaccgcaactgatcagaccaattgcgcggtggccattctatgccttcttgggaggagccatgttctgcctccttgccagcagcacttgccaccttctctcctgccattctcgccgcctagcatacattatgcttcggcttgattacgcaggcatcgcagctctaatcgccacgtccttctaccctccagtatactattctttcatgtgctaccccttcttttgcaacctgtacctcagtttcataaccatcctaggagtggcaactatcgcgttctctctacttccggtcttccagaatccggagttcagaaccatcagagcatgcctcttctttggcatgggtgcatctggcgtgatacctgttcttcacaagctggtcctcttctggcaccaaccggaggcattgcacacgaccggatacgaaattctgatggggctcttctacgggctgggagcattggtatatgcggcacgggtacctgagcgctggatgcctgggaagtttgacatcgccgggcacagccaccagctgttccacgtcttggttgttgccggagcctacacacactaccacgcagggcttgtgtacctcaagtggagagacctgcaaggctgctgaaaggtgctgcatcgttgaggatgtggatagattgtagattccgtgaattcaggctgaaggtcatggtctgttgtaaattgtaacagtaatcatgaaacaattgctacaagtctaccaggtagtcgggcttccattaataatcaattgaagactagtatttatgc

SEQ ID NO: 14396 - protein, 351 aa, Zea mays subsp. mays
  peptide (1)..(351): Ceres Seq. ID no. 13623626
  misc_feature (15)..(300): Pfam Name: Uncharacterised protein family (Hly-III / UPF0073) Pfam Description: Uncharacterised protein family (Hly-III /
  misc_feature (15)..(300): Pfam Name: Uncharacterised protein family (Hly-III / UPF0073) Pfam Description: Uncharacterised protein family (Hly-III /
  misc_feature (1)..(300): Homolog of NCBI NO: 20330770 NR Description: Hypothetical protein [Oryza sativa (japonica
  misc_feature (48)..(351): Homolog of NCBI NO: 15235657 NR Description: expressed protein [Arabidopsis thaliana]
  misc_feature (48)..(340): Homolog of NCBI NO: 15233813 NR Description: expressed protein [Arabidopsis thaliana]
  misc_feature (153)..(335): Homolog of NCBI NO: 13272399 NR Description: hypothetical protein [Arabidopsis thaliana]
  misc_feature (153)..(335): Homolog of NCBI NO: 18400468 NR Description: expressed protein [Arabidopsis thaliana] unknown protein [Arabidopsis thaliana] expressed protein [Arabidopsis thaliana]
  misc_feature (48)..(351): Homolog of NCBI NO: 15235657 NR Description: expressed protein [Arabidopsis thaliana]
  misc_feature (153)..(335): Homolog of NCBI NO: 13272399 NR Description: hypothetical protein [Arabidopsis thaliana]
  misc_feature (1)..(44): Homolog of NCBI NO: 18377749 NR Description: unknown protein [Arabidopsis thaliana]
  misc_feature (153)..(346): Homolog of NCBI NO: 30688829 NR Description: expressed protein [Arabidopsis thaliana]
  misc_feature (153)..(346): Homolog of NCBI NO: 18377749 NR Description: unknown protein [Arabidopsis thaliana]
  misc_feature (1)..(44): Homolog of NCBI NO: 18400468 NR Description: expressed protein [Arabidopsis thaliana] unknown protein [Arabidopsis thaliana] expressed protein [Arabidopsis thaliana]
  misc_feature (1)..(44): Homolog of NCBI NO: 13272399 NR Description: hypothetical protein [Arabidopsis thaliana]
  misc_feature (153)..(335): Homolog of NCBI NO: 18400468 NR Description: expressed protein [Arabidopsis thaliana] unknown protein [Arabidopsis thaliana] expressed protein [Arabidopsis thaliana]
  misc_feature (48)..(340): Homolog of NCBI NO: 15233813 NR Description: expressed protein [Arabidopsis thaliana]
  misc_feature (1)..(300): Homolog of NCBI NO: 20330770 NR Description: Hypothetical protein [Oryza sativa (japonica
  misc_feature (1)..(44): Homolog of NCBI NO: 13272399 NR Description: hypothetical protein [Arabidopsis thaliana]
  misc_feature (1)..(44): Homolog of NCBI NO: 18400468 NR Description: expressed protein [Arabidopsis thaliana] unknown protein [Arabidopsis thaliana] expressed protein [Arabidopsis thaliana]
  misc_feature (153)..(346): Homolog of NCBI NO: 18377749 NR Description: unknown protein [Arabidopsis thaliana]
  misc_feature (153)..(346): Homolog of NCBI NO: 30688829 NR Description: expressed protein [Arabidopsis thaliana]
  misc_feature (1)..(44): Homolog of NCBI NO: 18377749 NR Description: unknown protein [Arabidopsis thaliana]
YRCEWPLPQVLLSAFSIHNETLNVWTHLIGFFIFLALTIYTATQVPNAVDIRSLQHLPDVLRKADIHKIQAELVSCLPSLPHLSDLQKLKDELKTSWNSMEVLPSLSRWHLLELLANCLPHRFTHPNETSLSVLQSMKEDLASLIAPQLIRPIARWPFYAFLGGAMFCLLASSTCHLLSCHSRRLAYIMLRLDYAGIAALIATSFYPPVYYSFMCYPFFCNLYLSFITILGVATIAFSLLPVFQNPEFRTIRACLFFGMGASGVIPVLHKLVLFWHQPEALHTTGYEILMGLFYGLGALVYAARVPERWMPGKFDIAGHSHQLFHVLVVAGAYTHYHAGLVYLKWRDLQGC

SEQ ID NO: 14397 - protein, 252 aa, Zea mays subsp. mays
  peptide (1)..(252): Ceres Seq. ID no. 13623627
  misc_feature (1)..(201): Pfam Name: Uncharacterised protein family (Hly-III / UPF0073) Pfam Description: Uncharacterised protein family (Hly-III /
  misc_feature (1)..(201): Pfam Name: Uncharacterised protein family (Hly-III / UPF0073) Pfam Description: Uncharacterised protein family (Hly-III /
  misc_feature (1)..(201): Homolog of NCBI NO: 20330770 NR Description: Hypothetical protein [Oryza sativa (japonica
  misc_feature (1)..(252): Homolog of NCBI NO: 15235657 NR Description: expressed protein [Arabidopsis thaliana]
  misc_feature (1)..(241): Homolog of NCBI NO: 15233813 NR Description: expressed protein [Arabidopsis thaliana]
  misc_feature (54)..(236): Homolog of NCBI NO: 13272399 NR Description: hypothetical protein [Arabidopsis thaliana]
  misc_feature (54)..(236): Homolog of NCBI NO: 18400468 NR Description: expressed protein [Arabidopsis thaliana] unknown protein [Arabidopsis thaliana] expressed protein [Arabidopsis thaliana]
  misc_feature (1)..(252): Homolog of NCBI NO: 15235657 NR Description: expressed protein [Arabidopsis thaliana]
  misc_feature (54)..(236): Homolog of NCBI NO: 13272399 NR Description: hypothetical protein [Arabidopsis thaliana]
  misc_feature (73)..(236): Homolog of NCBI NO: 25309925 NR Description: hypothetical protein At2g24150 [imported] -
  misc_feature (41)..(247): Homolog of NCBI NO: 25407688 NR Description: hypothetical protein AT4g30850 [imported] - thaliana >gi|2980781|emb|CAA18208.1| putative protein thaliana] >gi|7269986|emb|CAB79803.1| putative protein
  misc_feature (1)..(252): Homolog of NCBI NO: 15241302 NR Description: expressed protein [Arabidopsis thaliana] AT5g20270/F5O24_160 [Arabidopsis thaliana] unknown [Arabidopsis thaliana] >gi|23506109|gb|AAN28914.1|
  misc_feature (54)..(247): Homolog of NCBI NO: 30688829 NR Description: expressed protein [Arabidopsis thaliana]
  misc_feature (54)..(247): Homolog of NCBI NO: 18377749 NR Description: unknown protein [Arabidopsis thaliana]
  misc_feature (54)..(236): Homolog of NCBI NO: 18400468 NR Description: expressed protein [Arabidopsis thaliana] unknown protein [Arabidopsis thaliana] expressed protein [Arabidopsis thaliana]
  misc_feature (1)..(241): Homolog of NCBI NO: 15233813 NR Description: expressed protein [Arabidopsis thaliana]
  misc_feature (1)..(201): Homolog of NCBI NO: 20330770 NR Description: Hypothetical protein [Oryza sativa (japonica
  misc_feature (54)..(247): Homolog of NCBI NO: 18377749 NR Description: unknown protein [Arabidopsis thaliana]
  misc_feature (54)..(247): Homolog of NCBI NO: 30688829 NR Description: expressed protein [Arabidopsis thaliana]
  misc_feature (1)..(252): Homolog of NCBI NO: 15241302 NR Description: expressed protein [Arabidopsis thaliana] AT5g20270/F5O24_160 [Arabidopsis thaliana] unknown [Arabidopsis thaliana] >gi|23506109|gb|AAN28914.1|
  misc_feature (41)..(247): Homolog of NCBI NO: 25407688 NR Description: hypothetical protein AT4g30850 [imported] - thaliana >gi|2980781|emb|CAA18208.1| putative protein thaliana] >gi|7269986|emb|CAB79803.1| putative protein
  misc_feature (73)..(236): Homolog of NCBI NO: 25309925 NR Description: hypothetical protein At2g24150 [imported] -
MEVLPSLSRWHLLELLANCLPHRFTHPNETSLSVLQSMKEDLASLIAPQLIRPIARWPFYAFLGGAMFCLLASSTCHLLSCHSRRLAYIMLRLDYAGIAALIATSFYPPVYYSFMCYPFFCNLYLSFITILGVATIAFSLLPVFQNPEFRTIRACLFFGMGASGVIPVLHKLVLFWHQPEALHTTGYEILMGLFYGLGALVYAARVPERWMPGKFDIAGHSHQLFHVLVVAGAYTHYHAGLVYLKWRDLQGC

SEQ ID NO: 14398 - protein, 215 aa, Zea mays subsp. mays
  peptide (1)..(215): Ceres Seq. ID no. 13623628
  misc_feature (1)..(164): Pfam Name: Uncharacterised protein family (Hly-III / UPF0073) Pfam Description: Uncharacterised protein family (Hly-III /
  misc_feature (1)..(164): Pfam Name: Uncharacterised protein family (Hly-III / UPF0073) Pfam Description: Uncharacterised protein family (Hly-III /
  misc_feature (1)..(164): Homolog of NCBI NO: 20330770 NR Description: Hypothetical protein [Oryza sativa (japonica
  misc_feature (1)..(215): Homolog of NCBI NO: 15235657 NR Description: expressed protein [Arabidopsis thaliana]
  misc_feature (1)..(204): Homolog of NCBI NO: 15233813 NR Description: expressed protein [Arabidopsis thaliana]
  misc_feature (17)..(199): Homolog of NCBI NO: 13272399 NR Description: hypothetical protein [Arabidopsis thaliana]
  misc_feature (17)..(199): Homolog of NCBI NO: 18400468 NR Description: expressed protein [Arabidopsis thaliana] unknown protein [Arabidopsis thaliana] expressed protein [Arabidopsis thaliana]
  misc_feature (17)..(210): Homolog of NCBI NO: 18377749 NR Description: unknown protein [Arabidopsis thaliana]
  misc_feature (17)..(210): Homolog of NCBI NO: 30688829 NR Description: expressed protein [Arabidopsis thaliana]
  misc_feature (1)..(215): Homolog of NCBI NO: 15241302 NR Description: expressed protein [Arabidopsis thaliana] AT5g20270/F5O24_160 [Arabidopsis thaliana] unknown [Arabidopsis thaliana] >gi|23506109|gb|AAN28914.1|
  misc_feature (4)..(210): Homolog of NCBI NO: 25407688 NR Description: hypothetical protein AT4g30850 [imported] - thaliana >gi|2980781|emb|CAA18208.1| putative protein thaliana] >gi|7269986|emb|CAB79803.1| putative protein
  misc_feature (36)..(199): Homolog of NCBI NO: 25309925 NR Description: hypothetical protein At2g24150 [imported] -
  misc_feature (17)..(199): Homolog of NCBI NO: 13272399 NR Description: hypothetical protein [Arabidopsis thaliana]
  misc_feature (17)..(199): Homolog of NCBI NO: 18400468 NR Description: expressed protein [Arabidopsis thaliana] unknown protein [Arabidopsis thaliana] expressed protein [Arabidopsis thaliana]
  misc_feature (17)..(210): Homolog of NCBI NO: 18377749 NR Description: unknown protein [Arabidopsis thaliana]
  misc_feature (17)..(210): Homolog of NCBI NO: 30688829 NR Description: expressed protein [Arabidopsis thaliana]
  misc_feature (1)..(215): Homolog of NCBI NO: 15241302 NR Description: expressed protein [Arabidopsis thaliana] AT5g20270/F5O24_160 [Arabidopsis thaliana] unknown [Arabidopsis thaliana] >gi|23506109|gb|AAN28914.1|
  misc_feature (4)..(210): Homolog of NCBI NO: 25407688 NR Description: hypothetical protein AT4g30850 [imported] - thaliana >gi|2980781|emb|CAA18208.1| putative protein thaliana] >gi|7269986|emb|CAB79803.1| putative protein
  misc_feature (1)..(204): Homolog of NCBI NO: 15233813 NR Description: expressed protein [Arabidopsis thaliana]
  misc_feature (1)..(215): Homolog of NCBI NO: 15235657 NR Description: expressed protein [Arabidopsis thaliana]
  misc_feature (1)..(164): Homolog of NCBI NO: 20330770 NR Description: Hypothetical protein [Oryza sativa (japonica
  misc_feature (36)..(199): Homolog of NCBI NO: 25309925 NR Description: hypothetical protein At2g24150 [imported] -
MKEDLASLIAPQLIRPIARWPFYAFLGGAMFCLLASSTCHLLSCHSRRLAYIMLRLDYAGIAALIATSFYPPVYYSFMCYPFFCNLYLSFITILGVATIAFSLLPVFQNPEFRTIRACLFFGMGASGVIPVLHKLVLFWHQPEALHTTGYEILMGLFYGLGALVYAARVPERWMPGKFDIAGHSHQLFHVLVVAGAYTHYHAGLVYLKWRDLQGC

SEQ ID NO: 14399 - DNA, 454 bp, Zea mays subsp. mays
  misc_feature (1)..(454): Ceres Seq. ID no. 3603843
  misc_feature: MA Experiment ID: 108535 Result: Up-regulated in Transcription
  misc_feature: MA Experiment 108535 PARAMETER Experiment Name: Zm_Meristem_P Parameter: Age (day) Value: 8
  misc_feature: MA Experiment 108535 PARAMETER Experiment Name: Zm_Meristem_P Parameter: Organism Value: Zea mays
  misc_feature: MA Experiment 108535 PARAMETER Experiment Name: Zm_Meristem_P Parameter: Plant Line Value: 35A19
  misc_feature: MA Experiment 108535 PARAMETER Experiment Name: Zm_Meristem_P Parameter: Tissue Value: Root Meristem vs. Above Root Meristem
  misc_feature: MA Experiment ID: 108556 Result: Down-regulated in Transcription
  misc_feature: MA Experiment 108556 PARAMETER Experiment Name: Zm_Drought_P Parameter: Age (day) Value: 9
  misc_feature: MA Experiment 108556 PARAMETER Experiment Name: Zm_Drought_P Parameter: Organism Value: Zea mays
  misc_feature: MA Experiment 108556 PARAMETER Experiment Name: Zm_Drought_P Parameter: Plant Line Value: 35A19
  misc_feature: MA Experiment 108556 PARAMETER Experiment Name: Zm_Drought_P Parameter: Timepoint (hr) Value: 24
  misc_feature: MA Experiment 108556 PARAMETER Experiment Name: Zm_Drought_P Parameter: Tissue Value: Aerial
  misc_feature: MA Experiment 108556 PARAMETER Experiment Name: Zm_Drought_P Parameter: Treatment Value: Drought vs. No Drought
  misc_feature: MA Experiment ID: 20000108 Result: Up-regulated in Transcription
  misc_feature: MA Experiment 20000108 PARAMETER Experiment Name: Zm_Root-Tips_P Parameter: Age (day) Value: 12
  misc_feature: MA Experiment 20000108 PARAMETER Experiment Name: Zm_Root-Tips_P Parameter: Organism Value: Zea mays
  misc_feature: MA Experiment 20000108 PARAMETER Experiment Name: Zm_Root-Tips_P Parameter: Tissue Value: Root tips vs. Root mid region    35
  misc_feature: MA Experiment 20000108 PARAMETER Experiment Name: Zm_Root-Tips_P Parameter: Tissue Value: Root tips vs. Root mid region   Sequence Listing-Misc Features (4)
agagagtcttactttagaarkgaaactgacagctggaccmcmbaaagcagcactagagcatctgaggaagaagattgaaatatcaacagagaaaatacgtttagctaaggtgaaagaggaacatgcaaaaaagacttgggaagttgctgcmcaakttgttaargacgaakaggatgctaagcagaaattatgtgatgacctaaaccatstaktccaggagagtgctgctycccaatatgcawgattkgaggagctgaagaaacgttkagaatctctaaatcccataagggattctgttattgtgtcaggkgtttatactgcacarcatgctactctgaattcagtacctcascaaccaactgcacaaaatcctgcagatgtaactggccgtcagaatattgccacaaagcctgcttctatgcaacagcagcctatacctgcggaggcagaaaag

SEQ ID NO: 14400 - protein, 151 aa, Zea mays subsp. mays
  peptide (1)..(151): Ceres Seq. ID no. 3603844
  misc_feature (16)..(150): Homolog of NCBI NO: 37531870 NR Description: hypothetical protein [Oryza sativa (japonica group)] >gi|22725983|gb|AAN04983.1| hypothetical protein [Oryza
  misc_feature (2)..(150): Homolog of NCBI NO: 18423326 NR Description: expressed protein; protein id: At5g51840.1,
  misc_feature (2)..(150): Homolog of NCBI NO: 21593113 NR Description: unknown [Arabidopsis thaliana]
  misc_feature (2)..(44): Homolog of NCBI NO: 10177883 NR Description: gene_id:MIO24.2~unknown protein [Arabidopsis
  misc_feature (7)..(7): Xaa is any aa, unknown or other
  misc_feature (13)..(13): Xaa is any aa, unknown or other
  misc_feature (14)..(14): Xaa is any aa, unknown or other
  misc_feature (50)..(50): Xaa is any aa, unknown or other
  misc_feature (52)..(52): Xaa is any aa, unknown or other
  misc_feature (54)..(54): Xaa is any aa, unknown or other
  misc_feature (57)..(57): Xaa is any aa, unknown or other
  misc_feature (70)..(70): Xaa is any aa, unknown or other
  misc_feature (71)..(71): Xaa is any aa, unknown or other
  misc_feature (77)..(77): Xaa is any aa, unknown or other
  misc_feature (81)..(81): Xaa is any aa, unknown or other
  misc_feature (82)..(82): Xaa is any aa, unknown or other
  misc_feature (89)..(89): Xaa is any aa, unknown or other
  misc_feature (103)..(103): Xaa is any aa, unknown or other
  misc_feature (108)..(108): Xaa is any aa, unknown or other
  misc_feature (117)..(117): Xaa is any aa, unknown or other
ESLTLEXKLTAGXXKAALEHLRKKIEISTEKIRLAKVKEEHAKKTWEVAXQXVXDEXDAKQKLCDDLNHXXQESAAXQYAXXEELKKRXESLNPIRDSVIVSXVYTAXHATLNSVPXQPTAQNPADVTGRQNIATKPASMQQQPIPAEAEK

SEQ ID NO: 14401 - DNA, 665 bp, Zea mays subsp. mays
  misc_feature (1)..(665): Ceres Seq. ID no. 12420368
  misc_feature: MA Experiment ID: 108545 Result: Up-regulated in Transcription
  misc_feature: MA Experiment 108545 PARAMETER Experiment Name: Zm_Imbibed_Seeds_P Parameter: Age (day) Value: 3 vs. 2
  misc_feature: MA Experiment 108545 PARAMETER Experiment Name: Zm_Imbibed_Seeds_P Parameter: Organism Value: Zea mays
  misc_feature: MA Experiment 108545 PARAMETER Experiment Name: Zm_Imbibed_Seeds_P Parameter: Plant Line Value: 35A19
  misc_feature: MA Experiment 108545 PARAMETER Experiment Name: Zm_Imbibed_Seeds_P Parameter: Tissue Value: Aerial vs. Embryo
  misc_feature: MA Experiment ID: 108547 Result: Up-regulated in Transcription
  misc_feature: MA Experiment 108547 PARAMETER Experiment Name: Zm_Imbibed_Seeds_P Parameter: Age (day) Value: 4 vs. 2
  misc_feature: MA Experiment 108547 PARAMETER Experiment Name: Zm_Imbibed_Seeds_P Parameter: Organism Value: Zea mays
  misc_feature: MA Experiment 108547 PARAMETER Experiment Name: Zm_Imbibed_Seeds_P Parameter: Plant Line Value: 35A19
  misc_feature: MA Experiment 108547 PARAMETER Experiment Name: Zm_Imbibed_Seeds_P Parameter: Tissue Value: Aerial vs. Embryo
ttggtactatgtgggagcgttgcgctgcgagtggcggcttcttatcatgttgggcttgggtggtttctcaaggcccatctgtactgtaacggctcattgttaggtgagaagtaaggaagagtaacagacctacgcgcttcgcacgagacgctcgacgcacgaaactggtgctttaatagagtagagattaaaagatttcatgcaaagttttgatttactgattctgttcaataagcttttctatttttccaacagattgtgagtaggattaagaaagagtgccctaatgtaccccttgtgttgtatataaatggaaatggaggtttacttgagcgcatgaagaacacaggagctgatgttattgggcttgactggacagtggacatgactgatggaaggaggcgccttggtaatggcattagtgtacaagggaatgtggatccagcatttttgttctcaccattaccagtactgactgatgaaattcataggttagtaaaggctcaaagatttccatttaatttacgttattttgtgtttttgcttaatgctcatgtgcaattcattaatgagatcacctaaagtgttgcttgagcagtgtactatacatcttcatgtcaggtatgattggttgcctgcactatgataaacctgcattacacccc

SEQ ID NO: 14402 - protein, 81 aa, Zea mays subsp. mays
  peptide (1)..(81): Ceres Seq. ID no. 12420369
  misc_feature (1)..(56): Pfam Name: Uroporphyrinogen decarboxylase (URO-D) Pfam Description: Uroporphyrinogen decarboxylase (URO-D)
  misc_feature (1)..(56): Homolog of NCBI NO: 34912796 NR Description: putative uroporphyrinogen decarboxylase [Oryza
  misc_feature (1)..(55): Homolog of NCBI NO: 8777476 NR Description: uroporphyrinogen decarboxylase [Arabidopsis >gi|22531275|gb|AAM97141.1| putative uroporphyrinogen
  misc_feature (1)..(55): Homolog of NCBI NO: 16323119 NR Description: AT3g14930/K15M2_7 [Arabidopsis thaliana]
  misc_feature (1)..(55): Homolog of NCBI NO: 18400577 NR Description: uroporphyrinogen decarboxylase, putative; protein At3g14930.1, supported by cDNA: gi_16323118 [Arabidopsis
  misc_feature (1)..(55): Homolog of NCBI NO: 14334768 NR Description: putative uroporphyrinogen decarboxylase
  misc_feature (1)..(55): Homolog of NCBI NO: 15226690 NR Description: putative uroporphyrinogen decarboxylase; protein At2g40490.1, supported by cDNA: gi_14334767 [Arabidopsis >gi|6014937|sp|O22886|DCUP_ARATH Uroporphyrinogen decarboxylase,
  misc_feature (1)..(55): Homolog of NCBI NO: 16975230 NR Description: Chain A, Crystal Structure And Substrate Binding
  misc_feature (1)..(55): Homolog of NCBI NO: 2501647 NR Description: Uroporphyrinogen decarboxylase, chloroplast
  misc_feature (1)..(55): Homolog of NCBI NO: 2501646 NR Description: Uroporphyrinogen decarboxylase (UPD)
  misc_feature (1)..(55): Homolog of NCBI NO: 6014938 NR Description: Uroporphyrinogen decarboxylase, chloroplast
MKNTGADVIGLDWTVDMTDGRRRLGNGISVQGNVDPAFLFSPLPVLTDEIHRLVKAQRFPFNLRYFVFLLNAHVQFINEIT

SEQ ID NO: 14403 - protein, 65 aa, Zea mays subsp. mays
  peptide (1)..(65): Ceres Seq. ID no. 12420370
  misc_feature (1)..(40): Homolog of NCBI NO: 34912796 NR Description: putative uroporphyrinogen decarboxylase [Oryza
  misc_feature (1)..(39): Homolog of NCBI NO: 8777476 NR Description: uroporphyrinogen decarboxylase [Arabidopsis >gi|22531275|gb|AAM97141.1| putative uroporphyrinogen
  misc_feature (1)..(39): Homolog of NCBI NO: 18400577 NR Description: uroporphyrinogen decarboxylase, putative; protein At3g14930.1, supported by cDNA: gi_16323118 [Arabidopsis
  misc_feature (1)..(39): Homolog of NCBI NO: 16323119 NR Description: AT3g14930/K15M2_7 [Arabidopsis thaliana]
  misc_feature (1)..(39): Homolog of NCBI NO: 14334768 NR Description: putative uroporphyrinogen decarboxylase
  misc_feature (1)..(39): Homolog of NCBI NO: 15226690 NR Description: putative uroporphyrinogen decarboxylase; protein At2g40490.1, supported by cDNA: gi_14334767 [Arabidopsis >gi|6014937|sp|O22886|DCUP_ARATH Uroporphyrinogen decarboxylase,
  misc_feature (1)..(39): Homolog of NCBI NO: 16975230 NR Description: Chain A, Crystal Structure And Substrate Binding
  misc_feature (1)..(39): Homolog of NCBI NO: 2501647 NR Description: Uroporphyrinogen decarboxylase, chloroplast
  misc_feature (1)..(39): Homolog of NCBI NO: 2501646 NR Description: Uroporphyrinogen decarboxylase (UPD)
  misc_feature (1)..(39): Homolog of NCBI NO: 6014938 NR Description: Uroporphyrinogen decarboxylase, chloroplast
MTDGRRRLGNGISVQGNVDPAFLFSPLPVLTDEIHRLVKAQRFPFNLRYFVFLLNAHVQFINEIT

SEQ ID NO: 14404 - DNA, 578 bp, Zea mays subsp. mays
  misc_feature (1)..(578): Ceres Seq. ID no. 12361361
  misc_feature: MA Experiment ID: 108544 Result: Up-regulated in Transcription
  misc_feature: MA Experiment ID: 108689 Result: Up-regulated in Transcription
  misc_feature: MA Experiment 108689 PARAMETER Experiment Name: Zm_Drought_Roots_P Parameter: Age (day) Value: 9
  misc_feature: MA Experiment 108689 PARAMETER Experiment Name: Zm_Drought_Roots_P Parameter: Organism Value: Zea mays
  misc_feature: MA Experiment 108689 PARAMETER Experiment Name: Zm_Drought_Roots_P Parameter: Plant Line Value: 35A19
  misc_feature: MA Experiment 108689 PARAMETER Experiment Name: Zm_Drought_Roots_P Parameter: Timepoint (hr) Value: 24
  misc_feature: MA Experiment 108689 PARAMETER Experiment Name: Zm_Drought_Roots_P Parameter: Tissue Value: Roots
  misc_feature: MA Experiment 108689 PARAMETER Experiment Name: Zm_Drought_Roots_P Parameter: Treatment Value: Drought vs. No Drought
  misc_feature: MA Experiment ID: 20000478 Result: Up-regulated in Transcription
  misc_feature: MA Experiment 20000478 PARAMETER Experiment Name: Zm_5mM_SA_P Parameter: Age (day) Value: 11
  misc_feature: MA Experiment 20000478 PARAMETER Experiment Name: Zm_5mM_SA_P Parameter: Organism Value: Zea mays
  misc_feature: MA Experiment 20000478 PARAMETER Experiment Name: Zm_5mM_SA_P Parameter: Plant Line Value: 35A19
  misc_feature: MA Experiment 20000478 PARAMETER Experiment Name: Zm_5mM_SA_P Parameter: Timepoint (hr) Value: 72
  misc_feature: MA Experiment 20000478 PARAMETER Experiment Name: Zm_5mM_SA_P Parameter: Tissue Value: Aerial
  misc_feature: MA Experiment 20000478 PARAMETER Experiment Name: Zm_5mM_SA_P Parameter: Treatment Value: 5mM SA vs. No Treatment
  misc_feature: MA Experiment ID: 20000480 Result: Up-regulated in Transcription
  misc_feature: MA Experiment 20000480 PARAMETER Experiment Name: Zm_Drought_P Parameter: Age (day) Value: 11
  misc_feature: MA Experiment 20000480 PARAMETER Experiment Name: Zm_Drought_P Parameter: Organism Value: Zea mays
  misc_feature: MA Experiment 20000480 PARAMETER Experiment Name: Zm_Drought_P Parameter: Plant Line Value: 35A19
  misc_feature: MA Experiment 20000480 PARAMETER Experiment Name: Zm_Drought_P Parameter: Timepoint (hr) Value: 72
  misc_feature: MA Experiment 20000480 PARAMETER Experiment Name: Zm_Drought_P Parameter: Tissue Value: Aerial
  misc_feature: MA Experiment 20000480 PARAMETER Experiment Name: Zm_Drought_P Parameter: Treatment Value: Drought vs. No Drought
catgtcccaatgcacaaggttccagtcggacagttcaaagtccccaagttcaagatatcctttggatttgaggcatctgagttgctcaaaggtctcgggctccagcttccgtttagtgctgaagcggacctgtcggggttagttgattcaccagagggacggaacttgtctgtttcgtccgtattccacaagtcatttgtcgaagtgaacgaggaaggaacggaggccgctgccgcatctgctgcaacagttgtgctccggtcgttcacgatgcctcaggatttcgtcgcagatcaccctttcatgttcctgattcgcgaagacttgactggtgtggtgttgtttgtcggccacgtggtgaatcccctccttgctccatagtgtgttgttcagaagtgtggccttggtgcggttccatccccttacagatgtgtggctttgacagctgatcaagctttatgtgtaatctgccatgttttgtttttgaataaatagatgcttgatcgatgtatgtaaggctgcgagatgatagttcagaattggtatgtgtggtcatggactcatggtacttactgtgt

SEQ ID NO: 14405 - protein, 126 aa, Zea mays subsp. mays
  peptide (1)..(126): Ceres Seq. ID no. 12361362
  misc_feature (1)..(122): Pfam Name: Serpin (serine protease inhibitor) Pfam Description: Serpin (serine protease inhibitor)
  misc_feature (1)..(125): Homolog of NCBI NO: 40539102 NR Description: putative serine protease inhibitor [Oryza sativa
  misc_feature (1)..(125): Homolog of NCBI NO: 421989 NR Description: serpin - barley >gi|19071|emb|CAA78822.1| protein [Hordeum vulgare subsp. vulgare] >gi|444778|prf||1908213A protein
  misc_feature (1)..(125): Homolog of NCBI NO: 4868129 NR Description: barley protein Z homolog [Avena fatua]
  misc_feature (1)..(125): Homolog of NCBI NO: 7438222 NR Description: serpin homolog WZS3 - wheat
  misc_feature (1)..(123): Homolog of NCBI NO: 5734506 NR Description: serpin [Triticum aestivum]
  misc_feature (1)..(123): Homolog of NCBI NO: 26224736 NR Description: serpin-like protein [Citrus x paradisi]
  misc_feature (1)..(125): Homolog of NCBI NO: 40539102 NR Description: putative serine protease inhibitor [Oryza sativa
  misc_feature (1)..(125): Homolog of NCBI NO: 7438221 NR Description: serpin WZS2 - wheat >gi|1885350|emb|CAA72273.1|
  misc_feature (1)..(125): Homolog of NCBI NO: 2130110 NR Description: serpin - wheat >gi|871551|emb|CAA90071.1| serpin
  misc_feature (1)..(125): Homolog of NCBI NO: 5734504 NR Description: serpin [Triticum aestivum]
HVPMHKVPVGQFKVPKFKISFGFEASELLKGLGLQLPFSAEADLSGLVDSPEGRNLSVSSVFHKSFVEVNEEGTEAAAASAATVVLRSFTMPQDFVADHPFMFLIREDLTGVVLFVGHVVNPLLAP

SEQ ID NO: 14406 - protein, 123 aa, Zea mays subsp. mays
  peptide (1)..(123): Ceres Seq. ID no. 12361363
  misc_feature (1)..(119): Pfam Name: Serpin (serine protease inhibitor) Pfam Description: Serpin (serine protease inhibitor)
  misc_feature (1)..(122): Homolog of NCBI NO: 40539102 NR Description: putative serine protease inhibitor [Oryza sativa
  misc_feature (1)..(122): Homolog of NCBI NO: 421989 NR Description: serpin - barley >gi|19071|emb|CAA78822.1| protein [Hordeum vulgare subsp. vulgare] >gi|444778|prf||1908213A protein
  misc_feature (1)..(122): Homolog of NCBI NO: 4868129 NR Description: barley protein Z homolog [Avena fatua]
  misc_feature (1)..(122): Homolog of NCBI NO: 7438222 NR Description: serpin homolog WZS3 - wheat
  misc_feature (1)..(120): Homolog of NCBI NO: 5734506 NR Description: serpin [Triticum aestivum]
  misc_feature (1)..(120): Homolog of NCBI NO: 26224736 NR Description: serpin-like protein [Citrus x paradisi]
  misc_feature (1)..(122): Homolog of NCBI NO: 40539102 NR Description: putative serine protease inhibitor [Oryza sativa
  misc_feature (1)..(122): Homolog of NCBI NO: 7438221 NR Description: serpin WZS2 - wheat >gi|1885350|emb|CAA72273.1|
  misc_feature (1)..(122): Homolog of NCBI NO: 2130110 NR Description: serpin - wheat >gi|871551|emb|CAA90071.1| serpin
  misc_feature (1)..(122): Homolog of NCBI NO: 5734504 NR Description: serpin [Triticum aestivum]
MHKVPVGQFKVPKFKISFGFEASELLKGLGLQLPFSAEADLSGLVDSPEGRNLSVSSVFHKSFVEVNEEGTEAAAASAATVVLRSFTMPQDFVADHPFMFLIREDLTGVVLFVGHVVNPLLAP

SEQ ID NO: 14407 - DNA, 610 bp, Zea mays subsp. mays
  misc_feature (1)..(610): Ceres Seq. ID no. 3609410
  misc_feature: MA Experiment ID: 108534 Result: Up-regulated in Transcription
  misc_feature: MA Experiment 108534 PARAMETER Experiment Name: Zm_4deg_Cold_P Parameter: Age (hr) Value: 8
  misc_feature: MA Experiment 108534 PARAMETER Experiment Name: Zm_4deg_Cold_P Parameter: Organism Value: Zea mays
  misc_feature: MA Experiment 108534 PARAMETER Experiment Name: Zm_4deg_Cold_P Parameter: Plant Line Value: 35A19
  misc_feature: MA Experiment 108534 PARAMETER Experiment Name: Zm_4deg_Cold_P Parameter: Temperature (deg C) Value: 4 vs. 22
  misc_feature: MA Experiment 108534 PARAMETER Experiment Name: Zm_4deg_Cold_P Parameter: Timepoint (hr) Value: 6
  misc_feature: MA Experiment 108534 PARAMETER Experiment Name: Zm_4deg_Cold_P Parameter: Tissue Value: Aerial
  misc_feature: MA Experiment ID: 108535 Result: Down-regulated in Transcription
  misc_feature: MA Experiment 108535 PARAMETER Experiment Name: Zm_Meristem_P Parameter: Age (day) Value: 8
  misc_feature: MA Experiment 108535 PARAMETER Experiment Name: Zm_Meristem_P Parameter: Organism Value: Zea mays
  misc_feature: MA Experiment 108535 PARAMETER Experiment Name: Zm_Meristem_P Parameter: Plant Line Value: 35A19
  misc_feature: MA Experiment 108535 PARAMETER Experiment Name: Zm_Meristem_P Parameter: Tissue Value: Root Meristem vs. Above Root Meristem
  misc_feature: MA Experiment ID: 108689 Result: Down-regulated in Transcription
  misc_feature: MA Experiment 108689 PARAMETER Experiment Name: Zm_Drought_Roots_P Parameter: Age (day) Value: 9
  misc_feature: MA Experiment 108689 PARAMETER Experiment Name: Zm_Drought_Roots_P Parameter: Organism Value: Zea mays
  misc_feature: MA Experiment 108689 PARAMETER Experiment Name: Zm_Drought_Roots_P Parameter: Plant Line Value: 35A19
  misc_feature: MA Experiment 108689 PARAMETER Experiment Name: Zm_Drought_Roots_P Parameter: Timepoint (hr) Value: 24
  misc_feature: MA Experiment 108689 PARAMETER Experiment Name: Zm_Drought_Roots_P Parameter: Tissue Value: Roots
  misc_feature: MA Experiment 108689 PARAMETER Experiment Name: Zm_Drought_Roots_P Parameter: Treatment Value: Drought vs. No Drought
  misc_feature: MA Experiment ID: 20000492 Result: Down-regulated in Transcription
  misc_feature: MA Experiment 20000492 PARAMETER Experiment Name: Zm_Hybrid_Seed_Dev_P Parameter: DAP Value: 12
  misc_feature: MA Experiment 20000492 PARAMETER Experiment Name: Zm_Hybrid_Seed_Dev_P Parameter: Organism Value: Zea mays
  misc_feature: MA Experiment 20000492 PARAMETER Experiment Name: Zm_Hybrid_Seed_Dev_P Parameter: Plant Line Value: 35A19
  misc_feature: MA Experiment 20000492 PARAMETER Experiment Name: Zm_Hybrid_Seed_Dev_P Parameter: Tissue Value: Fert Kernel vs. Unfert Floret
  misc_feature: MA Experiment ID: 20000535 Result: Down-regulated in Transcription
  misc_feature: MA Experiment 20000535 PARAMETER Experiment Name: Zm_Hybrid_Seed_Dev_P Parameter: DAP Value: 30 vs. 12
  misc_feature: MA Experiment 20000535 PARAMETER Experiment Name: Zm_Hybrid_Seed_Dev_P Parameter: Organism Value: Zea mays
  misc_feature: MA Experiment 20000535 PARAMETER Experiment Name: Zm_Hybrid_Seed_Dev_P Parameter: Plant Line Value: 35A19
  misc_feature: MA Experiment 20000535 PARAMETER Experiment Name: Zm_Hybrid_Seed_Dev_P Parameter: Tissue Value: Embryo vs. Unfert Floret
ttgacgtggttacgttgtgtgcgtgcgttcagaggtgtggctgtgccggaccagtcaagcccatatggtgtccgactgctgatcaaggactacccctatgccgttgacgggctcgtcatctggtgggcgatcgagcggtgggtcaaggagtacctggacatctactaccctaacgacggcgagctccagcgtgacgtggagctgcaggcgtggtggaaggaggtgcgtgaggaggcgcacggcgacctcaaggaccgagactggtggcccaggatggacaccgtccagcagctggctagggcgtgcacgaccatcatctgggtggcatccgcgctgcacgcggctgtcaactttgggcagtacccatacgccgggtacctcccgaaccggccgacggtcagccggcgcccgatgccggagccaggcagccacgactacaagaagctgggagcggggcaraaggaggcggacatggtgttcatccgcaccatcaccagccagttccagaccatcctgggcatctcgctcatcgaagatcctctccaagcactcctncgacgaggtgtacctcggccagcgtgacgagcctgagcgctggacgtcaracgcc

SEQ ID NO: 14408 - protein, 193 aa, Zea mays subsp. mays
  peptide (1)..(193): Ceres Seq. ID no. 3609411
  misc_feature (11)..(178): Pfam Name: Lipoxygenase Pfam Description: Lipoxygenase
  misc_feature (11)..(178): Homolog of NCBI NO: 19033554 NR Description: putative lipoxygenase [Oryza sativa (japonica
  misc_feature (11)..(178): Homolog of NCBI NO: 7433147 NR Description: probable lipoxygenase (EC 1.13.11.12) - barley
  misc_feature (11)..(178): Homolog of NCBI NO: 19033550 NR Description: putative lipoxygenase [Oryza sativa (japonica group)] >gi|28273354|gb|AAO38440.1| putative lipoxygenase [Oryza
  misc_feature (11)..(178): Homolog of NCBI NO: 38636549 NR Description: 9-lipoxigenase [Oryza sativa (japonica
  misc_feature (11)..(178): Homolog of NCBI NO: 4887227 NR Description: lipoxygenase [Zea mays]
  misc_feature (11)..(178): Homolog of NCBI NO: 31126788 NR Description: lipoxygenase L-2; lipoxygenase [Oryza sativa
  misc_feature (11)..(178): Homolog of NCBI NO: 12620877 NR Description: lipoxygenase [Zea mays]
  misc_feature (11)..(178): Homolog of NCBI NO: 18481649 NR Description: lipoxygenase [Zea mays]
  misc_feature (11)..(178): Homolog of NCBI NO: 8515851 NR Description: lipoxygenase [Zea mays]
  misc_feature (11)..(178): Homolog of NCBI NO: 19033549 NR Description: putative lipoxygenase [Oryza sativa (japonica group)] >gi|28273355|gb|AAO38441.1| putative lipoxygenase [Oryza
  misc_feature (153)..(153): Xaa is any aa, unknown or other
  misc_feature (185)..(185): Xaa is any aa, unknown or other
LTWLRCVRAFRGVAVPDQSSPYGVRLLIKDYPYAVDGLVIWWAIERWVKEYLDIYYPNDGELQRDVELQAWWKEVREEAHGDLKDRDWWPRMDTVQQLARACTTIIWVASALHAAVNFGQYPYAGYLPNRPTVSRRPMPEPGSHDYKKLGAGXKEADMVFIRTITSQFQTILGISLIEDPLQALXRRGVPRPA

SEQ ID NO: 14409 - protein, 171 aa, Zea mays subsp. mays
  peptide (1)..(171): Ceres Seq. ID no. 3609412
  misc_feature (146)..(170): Homolog of NCBI NO: 19033554 NR Description: putative lipoxygenase [Oryza sativa (japonica
  misc_feature (146)..(170): Homolog of NCBI NO: 7433147 NR Description: probable lipoxygenase (EC 1.13.11.12) - barley
  misc_feature (146)..(169): Homolog of NCBI NO: 19033550 NR Description: putative lipoxygenase [Oryza sativa (japonica group)] >gi|28273354|gb|AAO38440.1| putative lipoxygenase [Oryza
  misc_feature (146)..(169): Homolog of NCBI NO: 38636549 NR Description: 9-lipoxigenase [Oryza sativa (japonica
  misc_feature (146)..(170): Homolog of NCBI NO: 4887227 NR Description: lipoxygenase [Zea mays]
  misc_feature (146)..(170): Homolog of NCBI NO: 31126788 NR Description: lipoxygenase L-2; lipoxygenase [Oryza sativa
  misc_feature (146)..(170): Homolog of NCBI NO: 12620877 NR Description: lipoxygenase [Zea mays]
  misc_feature (146)..(170): Homolog of NCBI NO: 18481649 NR Description: lipoxygenase [Zea mays]
  misc_feature (146)..(170): Homolog of NCBI NO: 8515851 NR Description: lipoxygenase [Zea mays]
  misc_feature (146)..(170): Homolog of NCBI NO: 19033549 NR Description: putative lipoxygenase [Oryza sativa (japonica group)] >gi|28273355|gb|AAO38441.1| putative lipoxygenase [Oryza
  misc_feature (121)..(121): Xaa is any aa, unknown or other
  misc_feature (153)..(153): Xaa is any aa, unknown or other
  misc_feature (170)..(170): Xaa is any aa, unknown or other
MPLTGSSSGGRSSGGSRSTWTSTTLTTASSSVTWSCRRGGRRCVRRRTATSRTETGGPGWTPSSSWLGRARPSSGWHPRCTRLSTLGSTHTPGTSRTGRRSAGARCRSQAATTTRSWERGXRRRTWCSSAPSPASSRPSWASRSSKILSKHSXDEVYLGQRDEPERWTSXA

SEQ ID NO: 14410 - protein, 102 aa, Zea mays subsp. mays
  peptide (1)..(102): Ceres Seq. ID no. 3609413
  misc_feature (1)..(87): Pfam Name: Lipoxygenase Pfam Description: Lipoxygenase
  misc_feature (1)..(87): Homolog of NCBI NO: 19033554 NR Description: putative lipoxygenase [Oryza sativa (japonica
  misc_feature (1)..(87): Homolog of NCBI NO: 7433147 NR Description: probable lipoxygenase (EC 1.13.11.12) - barley
  misc_feature (1)..(87): Homolog of NCBI NO: 19033550 NR Description: putative lipoxygenase [Oryza sativa (japonica group)] >gi|28273354|gb|AAO38440.1| putative lipoxygenase [Oryza
  misc_feature (1)..(87): Homolog of NCBI NO: 38636549 NR Description: 9-lipoxigenase [Oryza sativa (japonica
  misc_feature (1)..(87): Homolog of NCBI NO: 4887227 NR Description: lipoxygenase [Zea mays]
  misc_feature (1)..(87): Homolog of NCBI NO: 31126788 NR Description: lipoxygenase L-2; lipoxygenase [Oryza sativa
  misc_feature (1)..(87): Homolog of NCBI NO: 12620877 NR Description: lipoxygenase [Zea mays]
  misc_feature (1)..(87): Homolog of NCBI NO: 18481649 NR Description: lipoxygenase [Zea mays]
  misc_feature (1)..(87): Homolog of NCBI NO: 8515851 NR Description: lipoxygenase [Zea mays]
  misc_feature (1)..(87): Homolog of NCBI NO: 19033549 NR Description: putative lipoxygenase [Oryza sativa (japonica group)] >gi|28273355|gb|AAO38441.1| putative lipoxygenase [Oryza
  misc_feature (62)..(62): Xaa is any aa, unknown or other
  misc_feature (94)..(94): Xaa is any aa, unknown or other
MDTVQQLARACTTIIWVASALHAAVNFGQYPYAGYLPNRPTVSRRPMPEPGSHDYKKLGAGXKEADMVFIRTITSQFQTILGISLIEDPLQALXRRGVPRPA

SEQ ID NO: 14411 - DNA, 1621 bp, Zea mays subsp. mays
  misc_feature (1)..(1621): Ceres Seq. ID no. 13491087
  misc_feature: MA Experiment ID: 108528 Result: Down-regulated in Transcription
  misc_feature: MA Experiment 108528 PARAMETER Experiment Name: Zm_Imbibed_Seeds_P Parameter: Age (day) Value: 5 vs. 2
  misc_feature: MA Experiment 108528 PARAMETER Experiment Name: Zm_Imbibed_Seeds_P Parameter: Organism Value: Zea mays
  misc_feature: MA Experiment 108528 PARAMETER Experiment Name: Zm_Imbibed_Seeds_P Parameter: Plant Line Value: 35A19
  misc_feature: MA Experiment 108528 PARAMETER Experiment Name: Zm_Imbibed_Seeds_P Parameter: Tissue Value: Aerial vs. Embryo
  misc_feature: MA Experiment ID: 108530 Result: Down-regulated in Transcription
  misc_feature: MA Experiment 108530 PARAMETER Experiment Name: Zm_Imbibed_Seeds_P Parameter: Age (day) Value: 6 vs. 2
  misc_feature: MA Experiment 108530 PARAMETER Experiment Name: Zm_Imbibed_Seeds_P Parameter: Organism Value: Zea mays
  misc_feature: MA Experiment 108530 PARAMETER Experiment Name: Zm_Imbibed_Seeds_P Parameter: Plant Line Value: 35A19
  misc_feature: MA Experiment 108530 PARAMETER Experiment Name: Zm_Imbibed_Seeds_P Parameter: Tissue Value: Aerial vs. Embryo
  misc_feature: MA Experiment ID: 108543 Result: Up-regulated in Transcription
  misc_feature: MA Experiment ID: 108544 Result: Up-regulated in Transcription
  misc_feature: MA Experiment ID: 108545 Result: Down-regulated in Transcription
  misc_feature: MA Experiment 108545 PARAMETER Experiment Name: Zm_Imbibed_Seeds_P Parameter: Age (day) Value: 3 vs. 2
  misc_feature: MA Experiment 108545 PARAMETER Experiment Name: Zm_Imbibed_Seeds_P Parameter: Organism Value: Zea mays
  misc_feature: MA Experiment 108545 PARAMETER Experiment Name: Zm_Imbibed_Seeds_P Parameter: Plant Line Value: 35A19
  misc_feature: MA Experiment 108545 PARAMETER Experiment Name: Zm_Imbibed_Seeds_P Parameter: Tissue Value: Aerial vs. Embryo
  misc_feature: MA Experiment ID: 108547 Result: Down-regulated in Transcription
  misc_feature: MA Experiment 108547 PARAMETER Experiment Name: Zm_Imbibed_Seeds_P Parameter: Age (day) Value: 4 vs. 2
  misc_feature: MA Experiment 108547 PARAMETER Experiment Name: Zm_Imbibed_Seeds_P Parameter: Organism Value: Zea mays
  misc_feature: MA Experiment 108547 PARAMETER Experiment Name: Zm_Imbibed_Seeds_P Parameter: Plant Line Value: 35A19
  misc_feature: MA Experiment 108547 PARAMETER Experiment Name: Zm_Imbibed_Seeds_P Parameter: Tissue Value: Aerial vs. Embryo
  misc_feature: MA Experiment ID: 108559 Result: Down-regulated in Transcription
  misc_feature: MA Experiment 108559 PARAMETER Experiment Name: Zm_5mM_NO_P Parameter: Age (day) Value: 8
  misc_feature: MA Experiment 108559 PARAMETER Experiment Name: Zm_5mM_NO_P Parameter: Organism Value: Zea mays
  misc_feature: MA Experiment 108559 PARAMETER Experiment Name: Zm_5mM_NO_P Parameter: Plant Line Value: 35A19
  misc_feature: MA Experiment 108559 PARAMETER Experiment Name: Zm_5mM_NO_P Parameter: Timepoint (hr) Value: 12
  misc_feature: MA Experiment 108559 PARAMETER Experiment Name: Zm_5mM_NO_P Parameter: Tissue Value: Aerial
  misc_feature: MA Experiment 108559 PARAMETER Experiment Name: Zm_5mM_NO_P Parameter: Treatment Value: 5mM NO vs. No Treatment
  misc_feature: MA Experiment ID: 20000480 Result: Down-regulated in Transcription
  misc_feature: MA Experiment 20000480 PARAMETER Experiment Name: Zm_Drought_P Parameter: Age (day) Value: 11
  misc_feature: MA Experiment 20000480 PARAMETER Experiment Name: Zm_Drought_P Parameter: Organism Value: Zea mays
  misc_feature: MA Experiment 20000480 PARAMETER Experiment Name: Zm_Drought_P Parameter: Plant Line Value: 35A19
  misc_feature: MA Experiment 20000480 PARAMETER Experiment Name: Zm_Drought_P Parameter: Timepoint (hr) Value: 72
  misc_feature: MA Experiment 20000480 PARAMETER Experiment Name: Zm_Drought_P Parameter: Tissue Value: Aerial
  misc_feature: MA Experiment 20000480 PARAMETER Experiment Name: Zm_Drought_P Parameter: Treatment Value: Drought vs. No Drought
  misc_feature: MA Experiment ID: 20000492 Result: Down-regulated in Transcription
  misc_feature: MA Experiment 20000492 PARAMETER Experiment Name: Zm_Hybrid_Seed_Dev_P Parameter: DAP Value: 12
  misc_feature: MA Experiment 20000492 PARAMETER Experiment Name: Zm_Hybrid_Seed_Dev_P Parameter: Organism Value: Zea mays
  misc_feature: MA Experiment 20000492 PARAMETER Experiment Name: Zm_Hybrid_Seed_Dev_P Parameter: Plant Line Value: 35A19
  misc_feature: MA Experiment 20000492 PARAMETER Experiment Name: Zm_Hybrid_Seed_Dev_P Parameter: Tissue Value: Fert Kernel vs. Unfert Floret
  misc_feature: MA Experiment ID: 20000535 Result: Down-regulated in Transcription
  misc_feature: MA Experiment 20000535 PARAMETER Experiment Name: Zm_Hybrid_Seed_Dev_P Parameter: DAP Value: 30 vs. 12
  misc_feature: MA Experiment 20000535 PARAMETER Experiment Name: Zm_Hybrid_Seed_Dev_P Parameter: Organism Value: Zea mays
  misc_feature: MA Experiment 20000535 PARAMETER Experiment Name: Zm_Hybrid_Seed_Dev_P Parameter: Plant Line Value: 35A19
  misc_feature: MA Experiment 20000535 PARAMETER Experiment Name: Zm_Hybrid_Seed_Dev_P Parameter: Tissue Value: Embryo vs. Unfert Floret
  misc_feature: MA Experiment ID: 20001612 Result: Up-regulated in Transcription
  misc_feature: MA Experiment 20001612 PARAMETER Experiment Name: Zm_50ppm_KNO3_L-to-H_P Parameter: Age (day) Value: 19
  misc_feature: MA Experiment 20001612 PARAMETER Experiment Name: Zm_50ppm_KNO3_L-to-H_P Parameter: Organism Value: Zea mays
  misc_feature: MA Experiment 20001612 PARAMETER Experiment Name: Zm_50ppm_KNO3_L-to-H_P Parameter: Plant Line Value: 35A19
  misc_feature: MA Experiment 20001612 PARAMETER Experiment Name: Zm_50ppm_KNO3_L-to-H_P Parameter: Timepoint (hr) Value: 8
  misc_feature: MA Experiment 20001612 PARAMETER Experiment Name: Zm_50ppm_KNO3_L-to-H_P Parameter: Tissue Value: Roots
  misc_feature: MA Experiment 20001612 PARAMETER Experiment Name: Zm_50ppm_KNO3_L-to-H_P Parameter: Treatment Value: 50ppm KNO3 vs. 50ppm KCl
  misc_feature: MA Experiment ID: 20001614 Result: Up-regulated in Transcription
  misc_feature: MA Experiment 20001614 PARAMETER Experiment Name: Zm_50ppm_KNO3_L-to-H_P Parameter: Age (day) Value: 21
  misc_feature: MA Experiment 20001614 PARAMETER Experiment Name: Zm_50ppm_KNO3_L-to-H_P Parameter: Organism Value: Zea mays
  misc_feature: MA Experiment 20001614 PARAMETER Experiment Name: Zm_50ppm_KNO3_L-to-H_P Parameter: Plant Line Value: 35A19
  misc_feature: MA Experiment 20001614 PARAMETER Experiment Name: Zm_50ppm_KNO3_L-to-H_P Parameter: Timepoint (hr) Value: 48
  misc_feature: MA Experiment 20001614 PARAMETER Experiment Name: Zm_50ppm_KNO3_L-to-H_P Parameter: Tissue Value: Roots
  misc_feature: MA Experiment 20001614 PARAMETER Experiment Name: Zm_50ppm_KNO3_L-to-H_P Parameter: Treatment Value: 50ppm KNO3 vs. 50ppm KCl
gactctcctcagtaactatagtttttttgttccttgggaggatagaaaaaatatatccttggttttcttgaacagataacatttcaggtgtgcttctgaagggagatttcgttgaacaggatgaatgcattggcagcaaccagcaggaacttcaagcaggcagctaagctgctgggcctcgactccaagctggagaagagcttgctcattccattcagggagatcaaggttgaatgcacaatcccaaaagatgatggaactttggcatcctatgttggatttagggttcaacatgataatgctaggggacctatgaagggtggaatcagataccaccatgaggttgatcctgatgaagttaatgccttggcacaattgatgacttggaaaacagcagtagctaacataccatatggaggagccaaaggtggaattggatgtagccctggagacctgagcatctctgagcttgagaggcttacccgagtttttactcagaaaatccatgacttgattggcatccatactgacgttccagctccagatatgggcaccaactcacagacaatggcatggatacttgacgaatactcaaagttccatggttactcacctgctgttgtgacaggaaagcctgtggacctcggaggatcattgggaagagacgccgctactggaaggggagttctgtttgctactgaagctttgcttgcagagcatggcaaaggcattgcaggccagcgtttcgtcatacagggattcggtaacgttggttcctgggcagctcagctgataagtgaagccggtggcaaggtgattgctatcagtgacgtcacaggcgccgtcaaaaacgtcgatggcctcgacatcgcgcagctagtgaagcactcggcggagaacaaggggatcaagggcttcaaggggggagacgccatcgctccagactcgttgctcactgaagagtgcgacgtcctcatcccggcagcgcttgggggagtcataaacaaggataatgctaacgacataaaggcaaagtacatcatcgaggctgccaatcaccccacagatccagaggcagacgagatcctgtcaaagaaaggcgtcctcatcctccccgacatactggccaactctggcggcgtcacagtgagctacttcgagtgggtacaaaacatccaggggttcatgtgggacgaggagaaggtaaacgcggagctgcggacgtacatcacgcgcgcctttggaaacgtgaagcagatgtgccggagccacagctgcgacctccgcatgggcgccttcacgctgggcgtcaaccgcgtcgcgcgcgccaccgtcctcaggggatgggaagcatgacctccctccgtgtcgtccgtgtgcccctccctgttgtatcctcttggtcttggtcttgggcccttgtttttctttggttaattattatcgatcaacggagatccgagaaaaaacgggctcagttaataattccaagaagtgcgtcttcttggagataaatagcggaaggagagttataataagtctgtaactgtaacccatagctgagatgctgtctgcaagcaacaatggcaatggcaatggcaatgccatctggatttcgtgc

SEQ ID NO: 14412 - protein, 411 aa, Zea mays subsp. mays
  peptide (1)..(411): Ceres Seq. ID no. 13491088
  misc_feature (176)..(408): Pfam Name: Glutamate/Leucine/Phenylalanine/Valine dehydrogenase Pfam Description: Glutamate/Leucine/Phenylalanine/Valine
  misc_feature (1)..(411): Homolog of NCBI NO: 12643763 NR Description: Glutamate dehydrogenase (GDH)
  misc_feature (1)..(411): Homolog of NCBI NO: 7431775 NR Description: glutamate dehydrogenase (EC 1.4.1.2) - maize
  misc_feature (1)..(411): Homolog of NCBI NO: 1931629 NR Description: glutamate dehydrogenase mutant [Zea mays]
  misc_feature (1)..(411): Homolog of NCBI NO: 28269441 NR Description: glutamate dehydrogenase [Oryza sativa (japonica
  misc_feature (1)..(411): Homolog of NCBI NO: 4150965 NR Description: glutamate dehydrogenase [Asparagus officinalis]
  misc_feature (1)..(411): Homolog of NCBI NO: 20873461 NR Description: glutamate dehydrogenase [Nicotiana tabacum]
  misc_feature (1)..(411): Homolog of NCBI NO: 12643806 NR Description: Glutamate dehydrogenase B (GDH B)
  misc_feature (1)..(411): Homolog of NCBI NO: 21314959 NR Description: NADH-glutamate dehydrogenase [Lycopersicon
  misc_feature (1)..(411): Homolog of NCBI NO: 7431768 NR Description: glutamate dehydrogenase (EC 1.4.1.-) B - tobacco >gi|4688955|emb|CAA69601.2| NADH glutamate dehydrogenase
  misc_feature (1)..(411): Homolog of NCBI NO: 15238762 NR Description: glutamate dehydrogenase (EC 1.4.1.-) 1 [Arabidopsis thaliana] >gi|12229807|sp|Q43314|DHE1_ARATH
MNALAATSRNFKQAAKLLGLDSKLEKSLLIPFREIKVECTIPKDDGTLASYVGFRVQHDNARGPMKGGIRYHHEVDPDEVNALAQLMTWKTAVANIPYGGAKGGIGCSPGDLSISELERLTRVFTQKIHDLIGIHTDVPAPDMGTNSQTMAWILDEYSKFHGYSPAVVTGKPVDLGGSLGRDAATGRGVLFATEALLAEHGKGIAGQRFVIQGFGNVGSWAAQLISEAGGKVIAISDVTGAVKNVDGLDIAQLVKHSAENKGIKGFKGGDAIAPDSLLTEECDVLIPAALGGVINKDNANDIKAKYIIEAANHPTDPEADEILSKKGVLILPDILANSGGVTVSYFEWVQNIQGFMWDEEKVNAELRTYITRAFGNVKQMCRSHSCDLRMGAFTLGVNRVARATVLRGWEA

SEQ ID NO: 14413 - protein, 347 aa, Zea mays subsp. mays
  peptide (1)..(347): Ceres Seq. ID no. 13491089
  misc_feature (112)..(344): Pfam Name: Glutamate/Leucine/Phenylalanine/Valine dehydrogenase Pfam Description: Glutamate/Leucine/Phenylalanine/Valine
  misc_feature (1)..(347): Homolog of NCBI NO: 12643763 NR Description: Glutamate dehydrogenase (GDH)
  misc_feature (1)..(347): Homolog of NCBI NO: 7431775 NR Description: glutamate dehydrogenase (EC 1.4.1.2) - maize
  misc_feature (1)..(347): Homolog of NCBI NO: 1931629 NR Description: glutamate dehydrogenase mutant [Zea mays]
  misc_feature (1)..(347): Homolog of NCBI NO: 28269441 NR Description: glutamate dehydrogenase [Oryza sativa (japonica
  misc_feature (1)..(347): Homolog of NCBI NO: 4150965 NR Description: glutamate dehydrogenase [Asparagus officinalis]
  misc_feature (1)..(347): Homolog of NCBI NO: 20873461 NR Description: glutamate dehydrogenase [Nicotiana tabacum]
  misc_feature (1)..(347): Homolog of NCBI NO: 12643806 NR Description: Glutamate dehydrogenase B (GDH B)
  misc_feature (1)..(347): Homolog of NCBI NO: 21314959 NR Description: NADH-glutamate dehydrogenase [Lycopersicon
  misc_feature (1)..(347): Homolog of NCBI NO: 7431768 NR Description: glutamate dehydrogenase (EC 1.4.1.-) B - tobacco >gi|4688955|emb|CAA69601.2| NADH glutamate dehydrogenase
  misc_feature (1)..(347): Homolog of NCBI NO: 15238762 NR Description: glutamate dehydrogenase (EC 1.4.1.-) 1 [Arabidopsis thaliana] >gi|12229807|sp|Q43314|DHE1_ARATH
MKGGIRYHHEVDPDEVNALAQLMTWKTAVANIPYGGAKGGIGCSPGDLSISELERLTRVFTQKIHDLIGIHTDVPAPDMGTNSQTMAWILDEYSKFHGYSPAVVTGKPVDLGGSLGRDAATGRGVLFATEALLAEHGKGIAGQRFVIQGFGNVGSWAAQLISEAGGKVIAISDVTGAVKNVDGLDIAQLVKHSAENKGIKGFKGGDAIAPDSLLTEECDVLIPAALGGVINKDNANDIKAKYIIEAANHPTDPEADEILSKKGVLILPDILANSGGVTVSYFEWVQNIQGFMWDEEKVNAELRTYITRAFGNVKQMCRSHSCDLRMGAFTLGVNRVARATVLRGWEA

SEQ ID NO: 14414 - protein, 325 aa, Zea mays subsp. mays
  peptide (1)..(325): Ceres Seq. ID no. 13491090
  misc_feature (90)..(322): Pfam Name: Glutamate/Leucine/Phenylalanine/Valine dehydrogenase Pfam Description: Glutamate/Leucine/Phenylalanine/Valine
  misc_feature (1)..(325): Homolog of NCBI NO: 12643763 NR Description: Glutamate dehydrogenase (GDH)
  misc_feature (1)..(325): Homolog of NCBI NO: 7431775 NR Description: glutamate dehydrogenase (EC 1.4.1.2) - maize
  misc_feature (1)..(325): Homolog of NCBI NO: 1931629 NR Description: glutamate dehydrogenase mutant [Zea mays]
  misc_feature (1)..(325): Homolog of NCBI NO: 28269441 NR Description: glutamate dehydrogenase [Oryza sativa (japonica
  misc_feature (1)..(325): Homolog of NCBI NO: 4150965 NR Description: glutamate dehydrogenase [Asparagus officinalis]
  misc_feature (1)..(325): Homolog of NCBI NO: 20873461 NR Description: glutamate dehydrogenase [Nicotiana tabacum]
  misc_feature (1)..(325): Homolog of NCBI NO: 12643806 NR Description: Glutamate dehydrogenase B (GDH B)
  misc_feature (1)..(325): Homolog of NCBI NO: 21314959 NR Description: NADH-glutamate dehydrogenase [Lycopersicon
  misc_feature (1)..(325): Homolog of NCBI NO: 7431768 NR Description: glutamate dehydrogenase (EC 1.4.1.-) B - tobacco >gi|4688955|emb|CAA69601.2| NADH glutamate dehydrogenase
  misc_feature (1)..(325): Homolog of NCBI NO: 15238762 NR Description: glutamate dehydrogenase (EC 1.4.1.-) 1 [Arabidopsis thaliana] >gi|12229807|sp|Q43314|DHE1_ARATH
MTWKTAVANIPYGGAKGGIGCSPGDLSISELERLTRVFTQKIHDLIGIHTDVPAPDMGTNSQTMAWILDEYSKFHGYSPAVVTGKPVDLGGSLGRDAATGRGVLFATEALLAEHGKGIAGQRFVIQGFGNVGSWAAQLISEAGGKVIAISDVTGAVKNVDGLDIAQLVKHSAENKGIKGFKGGDAIAPDSLLTEECDVLIPAALGGVINKDNANDIKAKYIIEAANHPTDPEADEILSKKGVLILPDILANSGGVTVSYFEWVQNIQGFMWDEEKVNAELRTYITRAFGNVKQMCRSHSCDLRMGAFTLGVNRVARATVLRGWEA

SEQ ID NO: 14415 - DNA, 1113 bp, Zea mays subsp. mays
  misc_feature (1)..(1113): Ceres Seq. ID no. 13635288
  misc_feature: MA Experiment ID: 108515 Result: Up-regulated in Transcription
  misc_feature: MA Experiment 108515 PARAMETER Experiment Name: Zm_2mM_SA_P Parameter: Age (day) Value: 8
  misc_feature: MA Experiment 108515 PARAMETER Experiment Name: Zm_2mM_SA_P Parameter: Organism Value: Zea mays
  misc_feature: MA Experiment 108515 PARAMETER Experiment Name: Zm_2mM_SA_P Parameter: Plant Line Value: 35A19
  misc_feature: MA Experiment 108515 PARAMETER Experiment Name: Zm_2mM_SA_P Parameter: Timepoint (hr) Value: 12
  misc_feature: MA Experiment 108515 PARAMETER Experiment Name: Zm_2mM_SA_P Parameter: Tissue Value: Aerial
  misc_feature: MA Experiment 108515 PARAMETER Experiment Name: Zm_2mM_SA_P Parameter: Treatment Value: 2mM SA vs. No Treatment
  misc_feature: MA Experiment ID: 108526 Result: Up-regulated in Transcription
  misc_feature: MA Experiment 108526 PARAMETER Experiment Name: Zm_5mM_NO_P Parameter: Age (day) Value: 8
  misc_feature: MA Experiment 108526 PARAMETER Experiment Name: Zm_5mM_NO_P Parameter: Organism Value: Zea mays
  misc_feature: MA Experiment 108526 PARAMETER Experiment Name: Zm_5mM_NO_P Parameter: Plant Line Value: 35A19
  misc_feature: MA Experiment 108526 PARAMETER Experiment Name: Zm_5mM_NO_P Parameter: Timepoint (hr) Value: 1
  misc_feature: MA Experiment 108526 PARAMETER Experiment Name: Zm_5mM_NO_P Parameter: Tissue Value: Aerial
  misc_feature: MA Experiment 108526 PARAMETER Experiment Name: Zm_5mM_NO_P Parameter: Treatment Value: 5mM NO vs. No Treatment
  misc_feature: MA Experiment ID: 108527 Result: Up-regulated in Transcription
  misc_feature: MA Experiment 108527 PARAMETER Experiment Name: Zm_5mM_NO_P Parameter: Age (day) Value: 8
  misc_feature: MA Experiment 108527 PARAMETER Experiment Name: Zm_5mM_NO_P Parameter: Organism Value: Zea mays
  misc_feature: MA Experiment 108527 PARAMETER Experiment Name: Zm_5mM_NO_P Parameter: Plant Line Value: 35A19
  misc_feature: MA Experiment 108527 PARAMETER Experiment Name: Zm_5mM_NO_P Parameter: Timepoint (hr) Value: 6
  misc_feature: MA Experiment 108527 PARAMETER Experiment Name: Zm_5mM_NO_P Parameter: Tissue Value: Aerial
  misc_feature: MA Experiment 108527 PARAMETER Experiment Name: Zm_5mM_NO_P Parameter: Treatment Value: 5mM NO vs. No Treatment
  misc_feature: MA Experiment ID: 108528 Result: Down-regulated in Transcription
  misc_feature: MA Experiment 108528 PARAMETER Experiment Name: Zm_Imbibed_Seeds_P Parameter: Age (day) Value: 5 vs. 2
  misc_feature: MA Experiment 108528 PARAMETER Experiment Name: Zm_Imbibed_Seeds_P Parameter: Organism Value: Zea mays
  misc_feature: MA Experiment 108528 PARAMETER Experiment Name: Zm_Imbibed_Seeds_P Parameter: Plant Line Value: 35A19
  misc_feature: MA Experiment 108528 PARAMETER Experiment Name: Zm_Imbibed_Seeds_P Parameter: Tissue Value: Aerial vs. Embryo
  misc_feature: MA Experiment ID: 108530 Result: Down-regulated in Transcription
  misc_feature: MA Experiment 108530 PARAMETER Experiment Name: Zm_Imbibed_Seeds_P Parameter: Age (day) Value: 6 vs. 2
  misc_feature: MA Experiment 108530 PARAMETER Experiment Name: Zm_Imbibed_Seeds_P Parameter: Organism Value: Zea mays
  misc_feature: MA Experiment 108530 PARAMETER Experiment Name: Zm_Imbibed_Seeds_P Parameter: Plant Line Value: 35A19
  misc_feature: MA Experiment 108530 PARAMETER Experiment Name: Zm_Imbibed_Seeds_P Parameter: Tissue Value: Aerial vs. Embryo
  misc_feature: MA Experiment ID: 108545 Result: Down-regulated in Transcription
  misc_feature: MA Experiment 108545 PARAMETER Experiment Name: Zm_Imbibed_Seeds_P Parameter: Age (day) Value: 3 vs. 2
  misc_feature: MA Experiment 108545 PARAMETER Experiment Name: Zm_Imbibed_Seeds_P Parameter: Organism Value: Zea mays
  misc_feature: MA Experiment 108545 PARAMETER Experiment Name: Zm_Imbibed_Seeds_P Parameter: Plant Line Value: 35A19
  misc_feature: MA Experiment 108545 PARAMETER Experiment Name: Zm_Imbibed_Seeds_P Parameter: Tissue Value: Aerial vs. Embryo
  misc_feature: MA Experiment ID: 108547 Result: Down-regulated in Transcription
  misc_feature: MA Experiment 108547 PARAMETER Experiment Name: Zm_Imbibed_Seeds_P Parameter: Age (day) Value: 4 vs. 2
  misc_feature: MA Experiment 108547 PARAMETER Experiment Name: Zm_Imbibed_Seeds_P Parameter: Organism Value: Zea mays
  misc_feature: MA Experiment 108547 PARAMETER Experiment Name: Zm_Imbibed_Seeds_P Parameter: Plant Line Value: 35A19
  misc_feature: MA Experiment 108547 PARAMETER Experiment Name: Zm_Imbibed_Seeds_P Parameter: Tissue Value: Aerial vs. Embryo
  misc_feature: MA Experiment ID: 108556 Result: Down-regulated in Transcription
  misc_feature: MA Experiment 108556 PARAMETER Experiment Name: Zm_Drought_P Parameter: Age (day) Value: 9
  misc_feature: MA Experiment 108556 PARAMETER Experiment Name: Zm_Drought_P Parameter: Organism Value: Zea mays
  misc_feature: MA Experiment 108556 PARAMETER Experiment Name: Zm_Drought_P Parameter: Plant Line Value: 35A19
  misc_feature: MA Experiment 108556 PARAMETER Experiment Name: Zm_Drought_P Parameter: Timepoint (hr) Value: 24
  misc_feature: MA Experiment 108556 PARAMETER Experiment Name: Zm_Drought_P Parameter: Tissue Value: Aerial
  misc_feature: MA Experiment 108556 PARAMETER Experiment Name: Zm_Drought_P Parameter: Treatment Value: Drought vs. No Drought
  misc_feature: MA Experiment ID: 108559 Result: Up-regulated in Transcription
  misc_feature: MA Experiment 108559 PARAMETER Experiment Name: Zm_5mM_NO_P Parameter: Age (day) Value: 8
  misc_feature: MA Experiment 108559 PARAMETER Experiment Name: Zm_5mM_NO_P Parameter: Organism Value: Zea mays
  misc_feature: MA Experiment 108559 PARAMETER Experiment Name: Zm_5mM_NO_P Parameter: Plant Line Value: 35A19
  misc_feature: MA Experiment 108559 PARAMETER Experiment Name: Zm_5mM_NO_P Parameter: Timepoint (hr) Value: 12
  misc_feature: MA Experiment 108559 PARAMETER Experiment Name: Zm_5mM_NO_P Parameter: Tissue Value: Aerial
  misc_feature: MA Experiment 108559 PARAMETER Experiment Name: Zm_5mM_NO_P Parameter: Treatment Value: 5mM NO vs. No Treatment
  misc_feature: MA Experiment ID: 108597 Result: Down-regulated in Transcription
  misc_feature: MA Experiment 108597 PARAMETER Experiment Name: Zm_100uM_ABA_P Parameter: Age (day) Value: 9
  misc_feature: MA Experiment 108597 PARAMETER Experiment Name: Zm_100uM_ABA_P Parameter: Organism Value: Zea mays
  misc_feature: MA Experiment 108597 PARAMETER Experiment Name: Zm_100uM_ABA_P Parameter: Plant Line Value: 35A19
  misc_feature: MA Experiment 108597 PARAMETER Experiment Name: Zm_100uM_ABA_P Parameter: Timepoint (hr) Value: 24
  misc_feature: MA Experiment 108597 PARAMETER Experiment Name: Zm_100uM_ABA_P Parameter: Tissue Value: Aerial
  misc_feature: MA Experiment 108597 PARAMETER Experiment Name: Zm_100uM_ABA_P Parameter: Treatment Value: 100uM ABA vs. No Treatment
  misc_feature: MA Experiment ID: 108687 Result: Up-regulated in Transcription
  misc_feature: MA Experiment 108687 PARAMETER Experiment Name: Zm_Embryos-Flowers__P Parameter: Tissue Value: Embryo vs. Aerial+
  misc_feature: MA Experiment ID: 108688 Result: Down-regulated in Transcription
  misc_feature: MA Experiment 108688 PARAMETER Experiment Name: Zm_Embryos-Flowers__P Parameter: Tissue Value: Immature Flowers vs. Aerial+
  misc_feature: MA Experiment ID: 108689 Result: Down-regulated in Transcription
  misc_feature: MA Experiment 108689 PARAMETER Experiment Name: Zm_Drought_Roots_P Parameter: Age (day) Value: 9
  misc_feature: MA Experiment 108689 PARAMETER Experiment Name: Zm_Drought_Roots_P Parameter: Organism Value: Zea mays
  misc_feature: MA Experiment 108689 PARAMETER Experiment Name: Zm_Drought_Roots_P Parameter: Plant Line Value: 35A19
  misc_feature: MA Experiment 108689 PARAMETER Experiment Name: Zm_Drought_Roots_P Parameter: Timepoint (hr) Value: 24
  misc_feature: MA Experiment 108689 PARAMETER Experiment Name: Zm_Drought_Roots_P Parameter: Tissue Value: Roots
  misc_feature: MA Experiment 108689 PARAMETER Experiment Name: Zm_Drought_Roots_P Parameter: Treatment Value: Drought vs. No Drought
  misc_feature: MA Experiment ID: 20000108 Result: Down-regulated in Transcription
  misc_feature: MA Experiment 20000108 PARAMETER Experiment Name: Zm_Root-Tips_P Parameter: Age (day) Value: 12
  misc_feature: MA Experiment 20000108 PARAMETER Experiment Name: Zm_Root-Tips_P Parameter: Organism Value: Zea mays
  misc_feature: MA Experiment 20000108 PARAMETER Experiment Name: Zm_Root-Tips_P Parameter: Tissue Value: Root tips vs. Root mid region    35
  misc_feature: MA Experiment 20000108 PARAMETER Experiment Name: Zm_Root-Tips_P Parameter: Tissue Value: Root tips vs. Root mid region   Sequence Listing-Misc Features (4)
  misc_feature: MA Experiment ID: 20000477 Result: Up-regulated in Transcription
  misc_feature: MA Experiment 20000477 PARAMETER Experiment Name: Zm_5mM_SA_P Parameter: Age (day) Value: 10
  misc_feature: MA Experiment 20000477 PARAMETER Experiment Name: Zm_5mM_SA_P Parameter: Organism Value: Zea mays
  misc_feature: MA Experiment 20000477 PARAMETER Experiment Name: Zm_5mM_SA_P Parameter: Plant Line Value: 35A19
  misc_feature: MA Experiment 20000477 PARAMETER Experiment Name: Zm_5mM_SA_P Parameter: Timepoint (hr) Value: 48
  misc_feature: MA Experiment 20000477 PARAMETER Experiment Name: Zm_5mM_SA_P Parameter: Tissue Value: Aerial
  misc_feature: MA Experiment 20000477 PARAMETER Experiment Name: Zm_5mM_SA_P Parameter: Treatment Value: 5mM SA vs. No Treatment
  misc_feature: MA Experiment ID: 20000480 Result: Down-regulated in Transcription
  misc_feature: MA Experiment 20000480 PARAMETER Experiment Name: Zm_Drought_P Parameter: Age (day) Value: 11
  misc_feature: MA Experiment 20000480 PARAMETER Experiment Name: Zm_Drought_P Parameter: Organism Value: Zea mays
  misc_feature: MA Experiment 20000480 PARAMETER Experiment Name: Zm_Drought_P Parameter: Plant Line Value: 35A19
  misc_feature: MA Experiment 20000480 PARAMETER Experiment Name: Zm_Drought_P Parameter: Timepoint (hr) Value: 72
  misc_feature: MA Experiment 20000480 PARAMETER Experiment Name: Zm_Drought_P Parameter: Tissue Value: Aerial
  misc_feature: MA Experiment 20000480 PARAMETER Experiment Name: Zm_Drought_P Parameter: Treatment Value: Drought vs. No Drought
  misc_feature: MA Experiment ID: 20000626 Result: Up-regulated in Transcription
  misc_feature: MA Experiment 20000626 PARAMETER Experiment Name: Zm_Herbicide-Treatments_P Parameter: Timepoint (hr) Value: 12
  misc_feature: MA Experiment 20000626 PARAMETER Experiment Name: Zm_Herbicide-Treatments_P Parameter: Tissue Value: Aerial
  misc_feature: MA Experiment 20000626 PARAMETER Experiment Name: Zm_Herbicide-Treatments_P Parameter: Treatment Value: Roundup vs. No Treatment
  misc_feature: MA Experiment ID: 20000627 Result: Up-regulated in Transcription
  misc_feature: MA Experiment 20000627 PARAMETER Experiment Name: Zm_Herbicide-Treatments_P Parameter: Timepoint (hr) Value: 12
  misc_feature: MA Experiment 20000627 PARAMETER Experiment Name: Zm_Herbicide-Treatments_P Parameter: Tissue Value: Aerial
  misc_feature: MA Experiment 20000627 PARAMETER Experiment Name: Zm_Herbicide-Treatments_P Parameter: Treatment Value: Finale vs. No Treatment
  misc_feature: MA Experiment ID: 20000630 Result: Up-regulated in Transcription
  misc_feature: MA Experiment 20000630 PARAMETER Experiment Name: Zm_Herbicide-Treatments_P Parameter: Timepoint (hr) Value: 4
  misc_feature: MA Experiment 20000630 PARAMETER Experiment Name: Zm_Herbicide-Treatments_P Parameter: Tissue Value: Aerial
  misc_feature: MA Experiment 20000630 PARAMETER Experiment Name: Zm_Herbicide-Treatments_P Parameter: Treatment Value: Roundup vs. No Treatment
atcaaccaaaccctctaatccatttcggcatttccaacgccttcgccctaccagccacgtcgcttcgaggccgatcgaccgagcagctggtggcaatggcggcggcggcggaggtcgtgctgctggacttctgggtgagccccttcgggcagcgctgccggatcgcgctggcggagaagggcgtggcctacgagtaccgcgagcaggacctcctggacaagggcgagctgctcctccgctccaaccccatccacaagaagatccccgtcctgctccacgccggcaggcccgtctgcgagtcgctcgtcatcctccagtacatcgacgaggcctggccggacgtcgcgccgctcctccccaaggacgacccctacgcccgcgcgcaggcgcgtttctgggccgattacatcgacaagaagatctatgacagccagactcggctgtggaagttcgagggcgaggcgcgggagcaggcgaagaaggacctggtggaggtcctggagaccctggagggggagctcgccgacaagcctttcttcggcggcggcgccctcggcttcgtggacgtggctctggtgcccttcacgtcctggttcctcgcctacgagaagctgggcgggttcagcgtccaggagcactgccccaggatcgtggcctgggccgcgcgctgcagggagcgggagagcgtggccaaggccatgtccgaccctgccaaggtgctcgagttcgtccagttcctccagagcaagttcggggccaagtgatcggaagcattgcgtgtgctgctagcctgatatgccctatgcaggccaggctggtgctttgatctgctcgatcagctctatgcccatgctagcgttgcatagcgcagttgatgtgtgatgtgtctggttggttgtagctgctctttgcctggtttcgtacgtcagtgtaaggtttcaggttttcagtgtctggggtagctctgcgttgcccttgcccctgccccctacctagcggctcttgagctcttcggctcgccagcaataaagttgcagaggctttagctaaaagtttctgtattttttagttgacgattattggtccaatgtattcgggaattttgttctctct

SEQ ID NO: 14416 - protein, 253 aa, Zea mays subsp. mays
  peptide (1)..(253): Ceres Seq. ID no. 13635289
  misc_feature (32)..(253): Homolog of NCBI NO: 4468796 NR Description: GST6 protein [Zea mays]
  misc_feature (40)..(251): Homolog of NCBI NO: 7447304 NR Description: glutathione transferase (EC 2.5.1.18) - maize
  misc_feature (35)..(253): Homolog of NCBI NO: 11177831 NR Description: putative glutathione S-transferase OsGSTU5 [Oryza
  misc_feature (32)..(251): Homolog of NCBI NO: 6683765 NR Description: glutathione-S-transferase [Hordeum vulgare]
  misc_feature (32)..(251): Homolog of NCBI NO: 20067419 NR Description: glutathione transferase [Triticum aestivum]
  misc_feature (32)..(251): Homolog of NCBI NO: 20067417 NR Description: glutathione transferase [Triticum aestivum]
  misc_feature (32)..(251): Homolog of NCBI NO: 20067415 NR Description: glutathione transferase [Triticum aestivum]
  misc_feature (32)..(253): Homolog of NCBI NO: 33357806 NR Description: Chain A, Crystal Structure Solution Of Rice Gst1 In Complex With Glutathione. >gi|33357807|pdb|1OYJ|B Chain B, Structure Solution Of Rice Gst1 (Osgstu1) In Complex With Gst1
  misc_feature (34)..(251): Homolog of NCBI NO: 416652 NR Description: PROBABLE GLUTATHIONE S-TRANSFERASE (AUXIN-INDUCED
  misc_feature (34)..(251): Homolog of NCBI NO: 1346215 NR Description: PROBABLE GLUTATHIONE S-TRANSFERASE PARC
  misc_feature (32)..(253): Homolog of NCBI NO: 4468796 NR Description: GST6 protein [Zea mays]
  misc_feature (40)..(251): Homolog of NCBI NO: 7447304 NR Description: glutathione transferase (EC 2.5.1.18) - maize
  misc_feature (35)..(253): Homolog of NCBI NO: 11177831 NR Description: putative glutathione S-transferase OsGSTU5 [Oryza
  misc_feature (32)..(251): Homolog of NCBI NO: 6683765 NR Description: glutathione-S-transferase [Hordeum vulgare]
  misc_feature (32)..(251): Homolog of NCBI NO: 20067419 NR Description: glutathione transferase [Triticum aestivum]
  misc_feature (32)..(251): Homolog of NCBI NO: 20067417 NR Description: glutathione transferase [Triticum aestivum]
  misc_feature (32)..(251): Homolog of NCBI NO: 20067415 NR Description: glutathione transferase [Triticum aestivum]
  misc_feature (32)..(253): Homolog of NCBI NO: 33357806 NR Description: Chain A, Crystal Structure Solution Of Rice Gst1 In Complex With Glutathione. >gi|33357807|pdb|1OYJ|B Chain B, Structure Solution Of Rice Gst1 (Osgstu1) In Complex With Gst1
  misc_feature (34)..(251): Homolog of NCBI NO: 416652 NR Description: PROBABLE GLUTATHIONE S-TRANSFERASE (AUXIN-INDUCED
  misc_feature (34)..(251): Homolog of NCBI NO: 1346215 NR Description: PROBABLE GLUTATHIONE S-TRANSFERASE PARC
QPNPLIHFGISNAFALPATSLRGRSTEQLVAMAAAAEVVLLDFWVSPFGQRCRIALAEKGVAYEYREQDLLDKGELLLRSNPIHKKIPVLLHAGRPVCESLVILQYIDEAWPDVAPLLPKDDPYARAQARFWADYIDKKIYDSQTRLWKFEGEAREQAKKDLVEVLETLEGELADKPFFGGGALGFVDVALVPFTSWFLAYEKLGGFSVQEHCPRIVAWAARCRERESVAKAMSDPAKVLEFVQFLQSKFGAK

SEQ ID NO: 14417 - protein, 222 aa, Zea mays subsp. mays
  peptide (1)..(222): Ceres Seq. ID no. 13635290
  misc_feature (1)..(222): Homolog of NCBI NO: 4468796 NR Description: GST6 protein [Zea mays]
  misc_feature (9)..(220): Homolog of NCBI NO: 7447304 NR Description: glutathione transferase (EC 2.5.1.18) - maize
  misc_feature (4)..(222): Homolog of NCBI NO: 11177831 NR Description: putative glutathione S-transferase OsGSTU5 [Oryza
  misc_feature (1)..(220): Homolog of NCBI NO: 6683765 NR Description: glutathione-S-transferase [Hordeum vulgare]
  misc_feature (1)..(220): Homolog of NCBI NO: 20067419 NR Description: glutathione transferase [Triticum aestivum]
  misc_feature (1)..(220): Homolog of NCBI NO: 20067417 NR Description: glutathione transferase [Triticum aestivum]
  misc_feature (1)..(220): Homolog of NCBI NO: 20067415 NR Description: glutathione transferase [Triticum aestivum]
  misc_feature (1)..(222): Homolog of NCBI NO: 33357806 NR Description: Chain A, Crystal Structure Solution Of Rice Gst1 In Complex With Glutathione. >gi|33357807|pdb|1OYJ|B Chain B, Structure Solution Of Rice Gst1 (Osgstu1) In Complex With Gst1
  misc_feature (3)..(220): Homolog of NCBI NO: 416652 NR Description: PROBABLE GLUTATHIONE S-TRANSFERASE (AUXIN-INDUCED
  misc_feature (3)..(220): Homolog of NCBI NO: 1346215 NR Description: PROBABLE GLUTATHIONE S-TRANSFERASE PARC
  misc_feature (4)..(222): Homolog of NCBI NO: 11177831 NR Description: putative glutathione S-transferase OsGSTU5 [Oryza
  misc_feature (1)..(220): Homolog of NCBI NO: 6683765 NR Description: glutathione-S-transferase [Hordeum vulgare]
  misc_feature (1)..(220): Homolog of NCBI NO: 20067419 NR Description: glutathione transferase [Triticum aestivum]
  misc_feature (1)..(220): Homolog of NCBI NO: 20067417 NR Description: glutathione transferase [Triticum aestivum]
  misc_feature (1)..(220): Homolog of NCBI NO: 20067415 NR Description: glutathione transferase [Triticum aestivum]
  misc_feature (1)..(222): Homolog of NCBI NO: 33357806 NR Description: Chain A, Crystal Structure Solution Of Rice Gst1 In Complex With Glutathione. >gi|33357807|pdb|1OYJ|B Chain B, Structure Solution Of Rice Gst1 (Osgstu1) In Complex With Gst1
  misc_feature (3)..(220): Homolog of NCBI NO: 416652 NR Description: PROBABLE GLUTATHIONE S-TRANSFERASE (AUXIN-INDUCED
  misc_feature (3)..(220): Homolog of NCBI NO: 1346215 NR Description: PROBABLE GLUTATHIONE S-TRANSFERASE PARC
  misc_feature (1)..(222): Homolog of NCBI NO: 4468796 NR Description: GST6 protein [Zea mays]
  misc_feature (9)..(220): Homolog of NCBI NO: 7447304 NR Description: glutathione transferase (EC 2.5.1.18) - maize
MAAAAEVVLLDFWVSPFGQRCRIALAEKGVAYEYREQDLLDKGELLLRSNPIHKKIPVLLHAGRPVCESLVILQYIDEAWPDVAPLLPKDDPYARAQARFWADYIDKKIYDSQTRLWKFEGEAREQAKKDLVEVLETLEGELADKPFFGGGALGFVDVALVPFTSWFLAYEKLGGFSVQEHCPRIVAWAARCRERESVAKAMSDPAKVLEFVQFLQSKFGAK

SEQ ID NO: 14418 - protein, 141 aa, Zea mays subsp. mays
  peptide (1)..(141): Ceres Seq. ID no. 13635291
STKPSNPFRHFQRLRPTSHVASRPIDRAAGGNGGGGGGRAAGLLGEPLRAALPDRAGGEGRGLRVPRAGPPGQGRAAPPLQPHPQEDPRPAPRRQARLRVARHPPVHRRGLAGRRAAPPQGRPLRPRAGAFLGRLHRQEDL

SEQ ID NO: 14419 - DNA, 626 bp, Zea mays subsp. mays
  misc_feature (1)..(626): Ceres Seq. ID no. 3609334
  misc_feature: MA Experiment ID: 108504 Result: Down-regulated in Transcription
  misc_feature: MA Experiment 108504 PARAMETER Experiment Name: Zm_Drought_P Parameter: Age (day) Value: 8
  misc_feature: MA Experiment 108504 PARAMETER Experiment Name: Zm_Drought_P Parameter: Organism Value: Zea mays
  misc_feature: MA Experiment 108504 PARAMETER Experiment Name: Zm_Drought_P Parameter: Plant Line Value: 35A19
  misc_feature: MA Experiment 108504 PARAMETER Experiment Name: Zm_Drought_P Parameter: Timepoint (hr) Value: 12
  misc_feature: MA Experiment 108504 PARAMETER Experiment Name: Zm_Drought_P Parameter: Tissue Value: Aerial
  misc_feature: MA Experiment 108504 PARAMETER Experiment Name: Zm_Drought_P Parameter: Treatment Value: Drought vs. No Drought
  misc_feature: MA Experiment ID: 108522 Result: Up-regulated in Transcription
  misc_feature: MA Experiment 108522 PARAMETER Experiment Name: Zm_42deg_Heat_P Parameter: Age (day) Value: 8
  misc_feature: MA Experiment 108522 PARAMETER Experiment Name: Zm_42deg_Heat_P Parameter: Organism Value: Zea mays
  misc_feature: MA Experiment 108522 PARAMETER Experiment Name: Zm_42deg_Heat_P Parameter: Plant Line Value: 35A19
  misc_feature: MA Experiment 108522 PARAMETER Experiment Name: Zm_42deg_Heat_P Parameter: Temperature (deg C) Value: 42 vs. 22
  misc_feature: MA Experiment 108522 PARAMETER Experiment Name: Zm_42deg_Heat_P Parameter: Timepoint (hr) Value: 1
  misc_feature: MA Experiment 108522 PARAMETER Experiment Name: Zm_42deg_Heat_P Parameter: Tissue Value: Aerial
  misc_feature: MA Experiment ID: 108540 Result: Down-regulated in Transcription
  misc_feature: MA Experiment 108540 PARAMETER Experiment Name: Zm_20percent_PEG_P Parameter: Age (day) Value: 8
  misc_feature: MA Experiment 108540 PARAMETER Experiment Name: Zm_20percent_PEG_P Parameter: Organism Value: Zea mays
  misc_feature: MA Experiment 108540 PARAMETER Experiment Name: Zm_20percent_PEG_P Parameter: Plant Line Value: 35A19
  misc_feature: MA Experiment 108540 PARAMETER Experiment Name: Zm_20percent_PEG_P Parameter: Timepoint (hr) Value: 6
  misc_feature: MA Experiment 108540 PARAMETER Experiment Name: Zm_20percent_PEG_P Parameter: Tissue Value: Aerial
  misc_feature: MA Experiment 108540 PARAMETER Experiment Name: Zm_20percent_PEG_P Parameter: Treatment Value: 20percent PEG vs. No Treatment
  misc_feature: MA Experiment ID: 108543 Result: Up-regulated in Transcription
  misc_feature: MA Experiment ID: 108544 Result: Down-regulated in Transcription
  misc_feature: MA Experiment ID: 108545 Result: Down-regulated in Transcription
  misc_feature: MA Experiment 108545 PARAMETER Experiment Name: Zm_Imbibed_Seeds_P Parameter: Age (day) Value: 3 vs. 2
  misc_feature: MA Experiment 108545 PARAMETER Experiment Name: Zm_Imbibed_Seeds_P Parameter: Organism Value: Zea mays
  misc_feature: MA Experiment 108545 PARAMETER Experiment Name: Zm_Imbibed_Seeds_P Parameter: Plant Line Value: 35A19
  misc_feature: MA Experiment 108545 PARAMETER Experiment Name: Zm_Imbibed_Seeds_P Parameter: Tissue Value: Aerial vs. Embryo
  misc_feature: MA Experiment ID: 108556 Result: Down-regulated in Transcription
  misc_feature: MA Experiment 108556 PARAMETER Experiment Name: Zm_Drought_P Parameter: Age (day) Value: 9
  misc_feature: MA Experiment 108556 PARAMETER Experiment Name: Zm_Drought_P Parameter: Organism Value: Zea mays
  misc_feature: MA Experiment 108556 PARAMETER Experiment Name: Zm_Drought_P Parameter: Plant Line Value: 35A19
  misc_feature: MA Experiment 108556 PARAMETER Experiment Name: Zm_Drought_P Parameter: Timepoint (hr) Value: 24
  misc_feature: MA Experiment 108556 PARAMETER Experiment Name: Zm_Drought_P Parameter: Tissue Value: Aerial
  misc_feature: MA Experiment 108556 PARAMETER Experiment Name: Zm_Drought_P Parameter: Treatment Value: Drought vs. No Drought
  misc_feature: MA Experiment ID: 108597 Result: Down-regulated in Transcription
  misc_feature: MA Experiment 108597 PARAMETER Experiment Name: Zm_100uM_ABA_P Parameter: Age (day) Value: 9
  misc_feature: MA Experiment 108597 PARAMETER Experiment Name: Zm_100uM_ABA_P Parameter: Organism Value: Zea mays
  misc_feature: MA Experiment 108597 PARAMETER Experiment Name: Zm_100uM_ABA_P Parameter: Plant Line Value: 35A19
  misc_feature: MA Experiment 108597 PARAMETER Experiment Name: Zm_100uM_ABA_P Parameter: Timepoint (hr) Value: 24
  misc_feature: MA Experiment 108597 PARAMETER Experiment Name: Zm_100uM_ABA_P Parameter: Tissue Value: Aerial
  misc_feature: MA Experiment 108597 PARAMETER Experiment Name: Zm_100uM_ABA_P Parameter: Treatment Value: 100uM ABA vs. No Treatment
  misc_feature: MA Experiment ID: 20000478 Result: Down-regulated in Transcription
  misc_feature: MA Experiment 20000478 PARAMETER Experiment Name: Zm_5mM_SA_P Parameter: Age (day) Value: 11
  misc_feature: MA Experiment 20000478 PARAMETER Experiment Name: Zm_5mM_SA_P Parameter: Organism Value: Zea mays
  misc_feature: MA Experiment 20000478 PARAMETER Experiment Name: Zm_5mM_SA_P Parameter: Plant Line Value: 35A19
  misc_feature: MA Experiment 20000478 PARAMETER Experiment Name: Zm_5mM_SA_P Parameter: Timepoint (hr) Value: 72
  misc_feature: MA Experiment 20000478 PARAMETER Experiment Name: Zm_5mM_SA_P Parameter: Tissue Value: Aerial
  misc_feature: MA Experiment 20000478 PARAMETER Experiment Name: Zm_5mM_SA_P Parameter: Treatment Value: 5mM SA vs. No Treatment
  misc_feature: MA Experiment ID: 20000480 Result: Down-regulated in Transcription
  misc_feature: MA Experiment 20000480 PARAMETER Experiment Name: Zm_Drought_P Parameter: Age (day) Value: 11
  misc_feature: MA Experiment 20000480 PARAMETER Experiment Name: Zm_Drought_P Parameter: Organism Value: Zea mays
  misc_feature: MA Experiment 20000480 PARAMETER Experiment Name: Zm_Drought_P Parameter: Plant Line Value: 35A19
  misc_feature: MA Experiment 20000480 PARAMETER Experiment Name: Zm_Drought_P Parameter: Timepoint (hr) Value: 72
  misc_feature: MA Experiment 20000480 PARAMETER Experiment Name: Zm_Drought_P Parameter: Tissue Value: Aerial
  misc_feature: MA Experiment 20000480 PARAMETER Experiment Name: Zm_Drought_P Parameter: Treatment Value: Drought vs. No Drought
  misc_feature: MA Experiment ID: 20001606 Result: Up-regulated in Transcription
  misc_feature: MA Experiment 20001606 PARAMETER Experiment Name: Zm_50ppm_KNO3_L-to-H_P Parameter: Age (day) Value: 19
  misc_feature: MA Experiment 20001606 PARAMETER Experiment Name: Zm_50ppm_KNO3_L-to-H_P Parameter: Organism Value: Zea mays
  misc_feature: MA Experiment 20001606 PARAMETER Experiment Name: Zm_50ppm_KNO3_L-to-H_P Parameter: Plant Line Value: 35A19
  misc_feature: MA Experiment 20001606 PARAMETER Experiment Name: Zm_50ppm_KNO3_L-to-H_P Parameter: Timepoint (hr) Value: 8
  misc_feature: MA Experiment 20001606 PARAMETER Experiment Name: Zm_50ppm_KNO3_L-to-H_P Parameter: Tissue Value: Shoots
  misc_feature: MA Experiment 20001606 PARAMETER Experiment Name: Zm_50ppm_KNO3_L-to-H_P Parameter: Treatment Value: 50ppm KNO3 vs. 50ppm KCl
aagaactcgagaccgccaagagcagctcatcagttgagaagagctatgaactgcctgatggacaagtgatcacaataggcgcagagcgcttcagatgcccggaggttctcttccagccatccttcattggtatggaagctccaggaatccacgagacgacctacaactccatcatgaagtgtgacgttgatatcaggaaggacctgtatggcaacattgtcctcagtggtggatccaccatgttccctggcatcgccgaccgaatgagcaaggagatcactgcgctcgcgccaagcagcatgaagatcaaggtcgtcgctccaccagagaggaagtacagtgtctggatcggaggatcaatccttgcatccctgagcacatttcagcagatgtggatctcaagggctgagtatgaggagtctggtccagctattgtccacaggaagtgcttctagacgtcacctagccttaattctcctctggaaataccttcgtttgatgacatatctatgggtggttgctctgctatagctcgcagtttttgkgtttgccaatatatccggtaacattgkggagtcagccgtccactgtatgaagtatgtagtttgggttatatatatattgat

SEQ ID NO: 14420 - protein, 150 aa, Zea mays subsp. mays
  peptide (1)..(150): Ceres Seq. ID no. 3609335
  misc_feature (1)..(150): Pfam Name: Actin Pfam Description: Actin
  misc_feature (1)..(150): Homolog of NCBI NO: 37535954 NR Description: actin [Oryza sativa (japonica cultivar-group)]
  misc_feature (1)..(150): Homolog of NCBI NO: 9965319 NR Description: actin [Setaria italica]
  misc_feature (1)..(150): Homolog of NCBI NO: 15242516 NR Description: ACTIN 2/7 (sp|P53492); protein id: At5g09810.1, by cDNA: gi_1049306, supported by cDNA: gi_17065251, supported by gi_17381047, supported by cDNA: gi_20465864 [Arabidopsis
  misc_feature (1)..(150): Homolog of NCBI NO: 40714662 NR Description: actin [Oryza sativa (japonica cultivar-group)]
  misc_feature (1)..(150): Homolog of NCBI NO: 11276972 NR Description: actin [imported] - rape
  misc_feature (1)..(150): Homolog of NCBI NO: 2244734 NR Description: actin [Gossypium hirsutum]
  misc_feature (1)..(150): Homolog of NCBI NO: 32186890 NR Description: actin [Gossypium hirsutum]
  misc_feature (1)..(150): Homolog of NCBI NO: 32186904 NR Description: actin [Gossypium hirsutum]
  misc_feature (1)..(150): Homolog of NCBI NO: 32186892 NR Description: actin [Gossypium hirsutum]
  misc_feature (1)..(150): Homolog of NCBI NO: 32186896 NR Description: actin [Gossypium hirsutum]
ELETAKSSSSVEKSYELPDGQVITIGAERFRCPEVLFQPSFIGMEAPGIHETTYNSIMKCDVDIRKDLYGNIVLSGGSTMFPGIADRMSKEITALAPSSMKIKVVAPPERKYSVWIGGSILASLSTFQQMWISRAEYEESGPAIVHRKCF

SEQ ID NO: 14421 - protein, 107 aa, Zea mays subsp. mays
  peptide (1)..(107): Ceres Seq. ID no. 3609336
  misc_feature (1)..(107): Pfam Name: Actin Pfam Description: Actin
  misc_feature (1)..(107): Homolog of NCBI NO: 37535954 NR Description: actin [Oryza sativa (japonica cultivar-group)]
  misc_feature (1)..(107): Homolog of NCBI NO: 9965319 NR Description: actin [Setaria italica]
  misc_feature (1)..(107): Homolog of NCBI NO: 15242516 NR Description: ACTIN 2/7 (sp|P53492); protein id: At5g09810.1, by cDNA: gi_1049306, supported by cDNA: gi_17065251, supported by gi_17381047, supported by cDNA: gi_20465864 [Arabidopsis
  misc_feature (1)..(107): Homolog of NCBI NO: 40714662 NR Description: actin [Oryza sativa (japonica cultivar-group)]
  misc_feature (1)..(107): Homolog of NCBI NO: 11276972 NR Description: actin [imported] - rape
  misc_feature (1)..(107): Homolog of NCBI NO: 2244734 NR Description: actin [Gossypium hirsutum]
  misc_feature (1)..(107): Homolog of NCBI NO: 32186890 NR Description: actin [Gossypium hirsutum]
  misc_feature (1)..(107): Homolog of NCBI NO: 32186904 NR Description: actin [Gossypium hirsutum]
  misc_feature (1)..(107): Homolog of NCBI NO: 32186892 NR Description: actin [Gossypium hirsutum]
  misc_feature (1)..(107): Homolog of NCBI NO: 32186896 NR Description: actin [Gossypium hirsutum]
MEAPGIHETTYNSIMKCDVDIRKDLYGNIVLSGGSTMFPGIADRMSKEITALAPSSMKIKVVAPPERKYSVWIGGSILASLSTFQQMWISRAEYEESGPAIVHRKCF

SEQ ID NO: 14422 - protein, 93 aa, Zea mays subsp. mays
  peptide (1)..(93): Ceres Seq. ID no. 3609337
  misc_feature (1)..(93): Pfam Name: Actin Pfam Description: Actin
  misc_feature (1)..(93): Homolog of NCBI NO: 37535954 NR Description: actin [Oryza sativa (japonica cultivar-group)]
  misc_feature (1)..(93): Homolog of NCBI NO: 9965319 NR Description: actin [Setaria italica]
  misc_feature (1)..(93): Homolog of NCBI NO: 15242516 NR Description: ACTIN 2/7 (sp|P53492); protein id: At5g09810.1, by cDNA: gi_1049306, supported by cDNA: gi_17065251, supported by gi_17381047, supported by cDNA: gi_20465864 [Arabidopsis
  misc_feature (1)..(93): Homolog of NCBI NO: 40714662 NR Description: actin [Oryza sativa (japonica cultivar-group)]
  misc_feature (1)..(93): Homolog of NCBI NO: 11276972 NR Description: actin [imported] - rape
  misc_feature (1)..(93): Homolog of NCBI NO: 2244734 NR Description: actin [Gossypium hirsutum]
  misc_feature (1)..(93): Homolog of NCBI NO: 32186890 NR Description: actin [Gossypium hirsutum]
  misc_feature (1)..(93): Homolog of NCBI NO: 32186896 NR Description: actin [Gossypium hirsutum]
  misc_feature (1)..(93): Homolog of NCBI NO: 32186904 NR Description: actin [Gossypium hirsutum]
  misc_feature (1)..(93): Homolog of NCBI NO: 32186892 NR Description: actin [Gossypium hirsutum]
MKCDVDIRKDLYGNIVLSGGSTMFPGIADRMSKEITALAPSSMKIKVVAPPERKYSVWIGGSILASLSTFQQMWISRAEYEESGPAIVHRKCF

SEQ ID NO: 14423 - DNA, 1073 bp, Zea mays subsp. mays
  misc_feature (1)..(1073): Ceres Seq. ID no. 12595306
  misc_feature: MA Experiment ID: 108528 Result: Down-regulated in Transcription
  misc_feature: MA Experiment 108528 PARAMETER Experiment Name: Zm_Imbibed_Seeds_P Parameter: Age (day) Value: 5 vs. 2
  misc_feature: MA Experiment 108528 PARAMETER Experiment Name: Zm_Imbibed_Seeds_P Parameter: Organism Value: Zea mays
  misc_feature: MA Experiment 108528 PARAMETER Experiment Name: Zm_Imbibed_Seeds_P Parameter: Plant Line Value: 35A19
  misc_feature: MA Experiment 108528 PARAMETER Experiment Name: Zm_Imbibed_Seeds_P Parameter: Tissue Value: Aerial vs. Embryo
  misc_feature: MA Experiment ID: 108529 Result: Up-regulated in Transcription
  misc_feature: MA Experiment 108529 PARAMETER Experiment Name: Zm_Imbibed_Seeds_P Parameter: Age (day) Value: 5 vs. 2
  misc_feature: MA Experiment 108529 PARAMETER Experiment Name: Zm_Imbibed_Seeds_P Parameter: Organism Value: Zea mays
  misc_feature: MA Experiment 108529 PARAMETER Experiment Name: Zm_Imbibed_Seeds_P Parameter: Plant Line Value: 35A19
  misc_feature: MA Experiment 108529 PARAMETER Experiment Name: Zm_Imbibed_Seeds_P Parameter: Tissue Value: Roots vs. Embryo
  misc_feature: MA Experiment ID: 108530 Result: Down-regulated in Transcription
  misc_feature: MA Experiment 108530 PARAMETER Experiment Name: Zm_Imbibed_Seeds_P Parameter: Age (day) Value: 6 vs. 2
  misc_feature: MA Experiment 108530 PARAMETER Experiment Name: Zm_Imbibed_Seeds_P Parameter: Organism Value: Zea mays
  misc_feature: MA Experiment 108530 PARAMETER Experiment Name: Zm_Imbibed_Seeds_P Parameter: Plant Line Value: 35A19
  misc_feature: MA Experiment 108530 PARAMETER Experiment Name: Zm_Imbibed_Seeds_P Parameter: Tissue Value: Aerial vs. Embryo
  misc_feature: MA Experiment ID: 108535 Result: Down-regulated in Transcription
  misc_feature: MA Experiment 108535 PARAMETER Experiment Name: Zm_Meristem_P Parameter: Age (day) Value: 8
  misc_feature: MA Experiment 108535 PARAMETER Experiment Name: Zm_Meristem_P Parameter: Organism Value: Zea mays
  misc_feature: MA Experiment 108535 PARAMETER Experiment Name: Zm_Meristem_P Parameter: Plant Line Value: 35A19
  misc_feature: MA Experiment 108535 PARAMETER Experiment Name: Zm_Meristem_P Parameter: Tissue Value: Root Meristem vs. Above Root Meristem
  misc_feature: MA Experiment ID: 108543 Result: Up-regulated in Transcription
  misc_feature: MA Experiment ID: 108545 Result: Down-regulated in Transcription
  misc_feature: MA Experiment 108545 PARAMETER Experiment Name: Zm_Imbibed_Seeds_P Parameter: Age (day) Value: 3 vs. 2
  misc_feature: MA Experiment 108545 PARAMETER Experiment Name: Zm_Imbibed_Seeds_P Parameter: Organism Value: Zea mays
  misc_feature: MA Experiment 108545 PARAMETER Experiment Name: Zm_Imbibed_Seeds_P Parameter: Plant Line Value: 35A19
  misc_feature: MA Experiment 108545 PARAMETER Experiment Name: Zm_Imbibed_Seeds_P Parameter: Tissue Value: Aerial vs. Embryo
  misc_feature: MA Experiment ID: 108546 Result: Up-regulated in Transcription
  misc_feature: MA Experiment 108546 PARAMETER Experiment Name: Zm_Imbibed_Seeds_P Parameter: Age (day) Value: 3 vs. 2
  misc_feature: MA Experiment 108546 PARAMETER Experiment Name: Zm_Imbibed_Seeds_P Parameter: Organism Value: Zea mays
  misc_feature: MA Experiment 108546 PARAMETER Experiment Name: Zm_Imbibed_Seeds_P Parameter: Plant Line Value: 35A19
  misc_feature: MA Experiment 108546 PARAMETER Experiment Name: Zm_Imbibed_Seeds_P Parameter: Tissue Value: Roots vs. Embryo
  misc_feature: MA Experiment ID: 108547 Result: Down-regulated in Transcription
  misc_feature: MA Experiment 108547 PARAMETER Experiment Name: Zm_Imbibed_Seeds_P Parameter: Age (day) Value: 4 vs. 2
  misc_feature: MA Experiment 108547 PARAMETER Experiment Name: Zm_Imbibed_Seeds_P Parameter: Organism Value: Zea mays
  misc_feature: MA Experiment 108547 PARAMETER Experiment Name: Zm_Imbibed_Seeds_P Parameter: Plant Line Value: 35A19
  misc_feature: MA Experiment 108547 PARAMETER Experiment Name: Zm_Imbibed_Seeds_P Parameter: Tissue Value: Aerial vs. Embryo
  misc_feature: MA Experiment ID: 108687 Result: Down-regulated in Transcription
  misc_feature: MA Experiment 108687 PARAMETER Experiment Name: Zm_Embryos-Flowers__P Parameter: Tissue Value: Embryo vs. Aerial+
  misc_feature: MA Experiment ID: 20000478 Result: Down-regulated in Transcription
  misc_feature: MA Experiment 20000478 PARAMETER Experiment Name: Zm_5mM_SA_P Parameter: Age (day) Value: 11
  misc_feature: MA Experiment 20000478 PARAMETER Experiment Name: Zm_5mM_SA_P Parameter: Organism Value: Zea mays
  misc_feature: MA Experiment 20000478 PARAMETER Experiment Name: Zm_5mM_SA_P Parameter: Plant Line Value: 35A19
  misc_feature: MA Experiment 20000478 PARAMETER Experiment Name: Zm_5mM_SA_P Parameter: Timepoint (hr) Value: 72
  misc_feature: MA Experiment 20000478 PARAMETER Experiment Name: Zm_5mM_SA_P Parameter: Tissue Value: Aerial
  misc_feature: MA Experiment 20000478 PARAMETER Experiment Name: Zm_5mM_SA_P Parameter: Treatment Value: 5mM SA vs. No Treatment
  misc_feature: MA Experiment ID: 20001612 Result: Down-regulated in Transcription
  misc_feature: MA Experiment 20001612 PARAMETER Experiment Name: Zm_50ppm_KNO3_L-to-H_P Parameter: Age (day) Value: 19
  misc_feature: MA Experiment 20001612 PARAMETER Experiment Name: Zm_50ppm_KNO3_L-to-H_P Parameter: Organism Value: Zea mays
  misc_feature: MA Experiment 20001612 PARAMETER Experiment Name: Zm_50ppm_KNO3_L-to-H_P Parameter: Plant Line Value: 35A19
  misc_feature: MA Experiment 20001612 PARAMETER Experiment Name: Zm_50ppm_KNO3_L-to-H_P Parameter: Timepoint (hr) Value: 8
  misc_feature: MA Experiment 20001612 PARAMETER Experiment Name: Zm_50ppm_KNO3_L-to-H_P Parameter: Tissue Value: Roots
  misc_feature: MA Experiment 20001612 PARAMETER Experiment Name: Zm_50ppm_KNO3_L-to-H_P Parameter: Treatment Value: 50ppm KNO3 vs. 50ppm KCl
aacatatcaagctcagagcctcagagcgccagccaagtcttgcggtcgcgaagagcaacgcaacaagatggtgaagctcgcattcggaagcgtcggcgactccttcagcgtcacctccatcaaggcctacgtggcggagttcatcgccaccctcctcttcgtcttcgccggcgtgggttccgccatcgccttcgggcaactgacgaatggcggcgcgctggaccctgcgggactggtggcgatcgcggtggcgcacgcgctggccctcttcgtgggcgtctccgtggccgcgaacacctccggcggccacctgaaccccgccgtgacgttcggcctggccgtgggcggccacatcaccgtcctcaccggcctcttctactgggtggcccagctgctgggcgcgtccgtggcgtgcctgctcctcaggttcgtgacccacggcaaggccatcccgacccacggcgtctccggcggcaccaccgagctggagggcgtcgtgttcgagatcgtcatcaccttcgcgctcgtctacaccgtgtacgccaccgccgccgaccccaagaagggctccctcggcaccatcgcgcccatcgccatcggcttcatcgtcggcgccaacatcctcgccgcggggcccttcagcggcggctccatgaaccccgcccgctccttcggccccgccgtcgccgcggccgacttcgccggcaactgggtctactgggtcggcccgctcatcggcggcggactcgctggcctcgtctacggcgacgtcttcatcggcggctcctaccagcaggtcgccgaccaggactacgcctaagtagtgtgctccgttcgtctggattcagctcatccaacgcaggcgcgcgtttcgatcggcgtcgtcatttgctttgctcttcatttcatcacgttatgtaacgtgccaatgatgtgtgtcgtcctggtctgttccattccgtccttgtattcatttcccttcttttttcggggtaaaatcgatgtaaagatctcatccgatctgccgttttcgatcgccttggagtgggaaaaaacaggtgattttcgtttcg

SEQ ID NO: 14424 - protein, 306 aa, Zea mays subsp. mays
  peptide (1)..(306): Ceres Seq. ID no. 12595307
  misc_feature (31)..(193): Pfam Name: Aminotransferase class-III Pfam Description: Aminotransferase class-III
  misc_feature (31)..(193): Pfam Name: Aminotransferase class-III Pfam Description: Aminotransferase class-III
NISSSEPQSASQVLRSRRATQQDGEARIRKRRRLLQRHLHQGLRGGVHRHPPLRLRRRGFRHRLRATDEWRRAGPCGTGGDRGGARAGPLRGRLRGREHLRRPPEPRRDVRPGRGRPHHRPHRPLLLGGPAAGRVRGVPAPQVRDPRQGHPDPRRLRRHHRAGGRRVRDRHHLRARLHRVRHRRRPQEGLPRHHRAHRHRLHRRRQHPRRGALQRRLHEPRPLLRPRRRRGRLRRQLGLLGRPAHRRRTRWPRLRRRLHRRLLPAGRRPGLRLSSVLRSSGFSSSNAGARFDRRRHLLCSSFHHVM

SEQ ID NO: 14425 - protein, 272 aa, Zea mays subsp. mays
  peptide (1)..(272): Ceres Seq. ID no. 12595308
  misc_feature (33)..(254): Pfam Name: Major intrinsic protein Pfam Description: Major intrinsic protein
  misc_feature (33)..(254): Pfam Name: Major intrinsic protein Pfam Description: Major intrinsic protein
  misc_feature (23)..(272): Homolog of NCBI NO: 13447823 NR Description: tonoplast membrane integral protein ZmTIP2-2 [Zea
  misc_feature (23)..(272): Homolog of NCBI NO: 13447821 NR Description: tonoplast membrane integral protein ZmTIP2-1 [Zea
  misc_feature (23)..(272): Homolog of NCBI NO: 14140156 NR Description: putative aquaporin [Oryza sativa]
  misc_feature (23)..(271): Homolog of NCBI NO: 7441255 NR Description: probable tonoplast aquaporin - maize
  misc_feature (23)..(271): Homolog of NCBI NO: 9623335 NR Description: tonoplast intrinsic protein 1 [Hordeum vulgare]
  misc_feature (23)..(272): Homolog of NCBI NO: 13447821 NR Description: tonoplast membrane integral protein ZmTIP2-1 [Zea
  misc_feature (23)..(271): Homolog of NCBI NO: 7441255 NR Description: probable tonoplast aquaporin - maize
  misc_feature (23)..(272): Homolog of NCBI NO: 126959 NR Description: Tonoplast intrinsic protein, root-specific RB7-5A
  misc_feature (23)..(272): Homolog of NCBI NO: 11276918 NR Description: membrane channel protein [imported] - potato >gi|1518057|gb|AAB67881.1| membrane channel protein [Solanum
  misc_feature (23)..(272): Homolog of NCBI NO: 2058706 NR Description: Rb7 [Lycopersicon esculentum]
  misc_feature (23)..(272): Homolog of NCBI NO: 7441268 NR Description: probable membrane protein - carrot
  misc_feature (23)..(271): Homolog of NCBI NO: 29650739 NR Description: tonoplast water channel [Zea mays]
  misc_feature (23)..(271): Homolog of NCBI NO: 9623335 NR Description: tonoplast intrinsic protein 1 [Hordeum vulgare]
  misc_feature (23)..(272): Homolog of NCBI NO: 14140156 NR Description: putative aquaporin [Oryza sativa]
  misc_feature (23)..(272): Homolog of NCBI NO: 13447823 NR Description: tonoplast membrane integral protein ZmTIP2-2 [Zea
  misc_feature (23)..(271): Homolog of NCBI NO: 29650739 NR Description: tonoplast water channel [Zea mays]
  misc_feature (23)..(272): Homolog of NCBI NO: 7441268 NR Description: probable membrane protein - carrot
  misc_feature (23)..(272): Homolog of NCBI NO: 2058706 NR Description: Rb7 [Lycopersicon esculentum]
  misc_feature (23)..(272): Homolog of NCBI NO: 11276918 NR Description: membrane channel protein [imported] - potato >gi|1518057|gb|AAB67881.1| membrane channel protein [Solanum
  misc_feature (23)..(272): Homolog of NCBI NO: 126959 NR Description: Tonoplast intrinsic protein, root-specific RB7-5A
TYQAQSLRAPAKSCGREEQRNKMVKLAFGSVGDSFSVTSIKAYVAEFIATLLFVFAGVGSAIAFGQLTNGGALDPAGLVAIAVAHALALFVGVSVAANTSGGHLNPAVTFGLAVGGHITVLTGLFYWVAQLLGASVACLLLRFVTHGKAIPTHGVSGGTTELEGVVFEIVITFALVYTVYATAADPKKGSLGTIAPIAIGFIVGANILAAGPFSGGSMNPARSFGPAVAAADFAGNWVYWVGPLIGGGLAGLVYGDVFIGGSYQQVADQDYA

SEQ ID NO: 14426 - protein, 250 aa, Zea mays subsp. mays
  peptide (1)..(250): Ceres Seq. ID no. 12595309
  misc_feature (11)..(232): Pfam Name: Major intrinsic protein Pfam Description: Major intrinsic protein
  misc_feature (11)..(232): Pfam Name: Major intrinsic protein Pfam Description: Major intrinsic protein
  misc_feature (1)..(250): Homolog of NCBI NO: 13447823 NR Description: tonoplast membrane integral protein ZmTIP2-2 [Zea
  misc_feature (1)..(250): Homolog of NCBI NO: 13447821 NR Description: tonoplast membrane integral protein ZmTIP2-1 [Zea
  misc_feature (1)..(250): Homolog of NCBI NO: 14140156 NR Description: putative aquaporin [Oryza sativa]
  misc_feature (1)..(249): Homolog of NCBI NO: 7441255 NR Description: probable tonoplast aquaporin - maize
  misc_feature (1)..(249): Homolog of NCBI NO: 9623335 NR Description: tonoplast intrinsic protein 1 [Hordeum vulgare]
  misc_feature (1)..(250): Homolog of NCBI NO: 13447821 NR Description: tonoplast membrane integral protein ZmTIP2-1 [Zea
  misc_feature (1)..(249): Homolog of NCBI NO: 7441255 NR Description: probable tonoplast aquaporin - maize
  misc_feature (1)..(250): Homolog of NCBI NO: 126959 NR Description: Tonoplast intrinsic protein, root-specific RB7-5A
  misc_feature (1)..(250): Homolog of NCBI NO: 11276918 NR Description: membrane channel protein [imported] - potato >gi|1518057|gb|AAB67881.1| membrane channel protein [Solanum
  misc_feature (1)..(250): Homolog of NCBI NO: 2058706 NR Description: Rb7 [Lycopersicon esculentum]
  misc_feature (1)..(250): Homolog of NCBI NO: 7441268 NR Description: probable membrane protein - carrot
  misc_feature (1)..(249): Homolog of NCBI NO: 29650739 NR Description: tonoplast water channel [Zea mays]
  misc_feature (1)..(249): Homolog of NCBI NO: 9623335 NR Description: tonoplast intrinsic protein 1 [Hordeum vulgare]
  misc_feature (1)..(250): Homolog of NCBI NO: 14140156 NR Description: putative aquaporin [Oryza sativa]
  misc_feature (1)..(250): Homolog of NCBI NO: 13447823 NR Description: tonoplast membrane integral protein ZmTIP2-2 [Zea
  misc_feature (1)..(249): Homolog of NCBI NO: 29650739 NR Description: tonoplast water channel [Zea mays]
  misc_feature (1)..(250): Homolog of NCBI NO: 7441268 NR Description: probable membrane protein - carrot
  misc_feature (1)..(250): Homolog of NCBI NO: 2058706 NR Description: Rb7 [Lycopersicon esculentum]
  misc_feature (1)..(250): Homolog of NCBI NO: 11276918 NR Description: membrane channel protein [imported] - potato >gi|1518057|gb|AAB67881.1| membrane channel protein [Solanum
  misc_feature (1)..(250): Homolog of NCBI NO: 126959 NR Description: Tonoplast intrinsic protein, root-specific RB7-5A
MVKLAFGSVGDSFSVTSIKAYVAEFIATLLFVFAGVGSAIAFGQLTNGGALDPAGLVAIAVAHALALFVGVSVAANTSGGHLNPAVTFGLAVGGHITVLTGLFYWVAQLLGASVACLLLRFVTHGKAIPTHGVSGGTTELEGVVFEIVITFALVYTVYATAADPKKGSLGTIAPIAIGFIVGANILAAGPFSGGSMNPARSFGPAVAAADFAGNWVYWVGPLIGGGLAGLVYGDVFIGGSYQQVADQDYA

SEQ ID NO: 14427 - DNA, 542 bp, Zea mays subsp. mays
  misc_feature (1)..(542): Ceres Seq. ID no. 12468596
  misc_feature: MA Experiment ID: 108522 Result: Down-regulated in Transcription
  misc_feature: MA Experiment 108522 PARAMETER Experiment Name: Zm_42deg_Heat_P Parameter: Age (day) Value: 8
  misc_feature: MA Experiment 108522 PARAMETER Experiment Name: Zm_42deg_Heat_P Parameter: Organism Value: Zea mays
  misc_feature: MA Experiment 108522 PARAMETER Experiment Name: Zm_42deg_Heat_P Parameter: Plant Line Value: 35A19
  misc_feature: MA Experiment 108522 PARAMETER Experiment Name: Zm_42deg_Heat_P Parameter: Temperature (deg C) Value: 42 vs. 22
  misc_feature: MA Experiment 108522 PARAMETER Experiment Name: Zm_42deg_Heat_P Parameter: Timepoint (hr) Value: 1
  misc_feature: MA Experiment 108522 PARAMETER Experiment Name: Zm_42deg_Heat_P Parameter: Tissue Value: Aerial
  misc_feature: MA Experiment ID: 108523 Result: Down-regulated in Transcription
  misc_feature: MA Experiment 108523 PARAMETER Experiment Name: Zm_42deg_Heat_P Parameter: Age (day) Value: 8
  misc_feature: MA Experiment 108523 PARAMETER Experiment Name: Zm_42deg_Heat_P Parameter: Organism Value: Zea mays
  misc_feature: MA Experiment 108523 PARAMETER Experiment Name: Zm_42deg_Heat_P Parameter: Plant Line Value: 35A19
  misc_feature: MA Experiment 108523 PARAMETER Experiment Name: Zm_42deg_Heat_P Parameter: Temperature (deg C) Value: 42 vs. 22
  misc_feature: MA Experiment 108523 PARAMETER Experiment Name: Zm_42deg_Heat_P Parameter: Timepoint (hr) Value: 6
  misc_feature: MA Experiment 108523 PARAMETER Experiment Name: Zm_42deg_Heat_P Parameter: Tissue Value: Aerial
  misc_feature: MA Experiment ID: 108527 Result: Down-regulated in Transcription
  misc_feature: MA Experiment 108527 PARAMETER Experiment Name: Zm_5mM_NO_P Parameter: Age (day) Value: 8
  misc_feature: MA Experiment 108527 PARAMETER Experiment Name: Zm_5mM_NO_P Parameter: Organism Value: Zea mays
  misc_feature: MA Experiment 108527 PARAMETER Experiment Name: Zm_5mM_NO_P Parameter: Plant Line Value: 35A19
  misc_feature: MA Experiment 108527 PARAMETER Experiment Name: Zm_5mM_NO_P Parameter: Timepoint (hr) Value: 6
  misc_feature: MA Experiment 108527 PARAMETER Experiment Name: Zm_5mM_NO_P Parameter: Tissue Value: Aerial
  misc_feature: MA Experiment 108527 PARAMETER Experiment Name: Zm_5mM_NO_P Parameter: Treatment Value: 5mM NO vs. No Treatment
  misc_feature: MA Experiment ID: 108528 Result: Up-regulated in Transcription
  misc_feature: MA Experiment 108528 PARAMETER Experiment Name: Zm_Imbibed_Seeds_P Parameter: Age (day) Value: 5 vs. 2
  misc_feature: MA Experiment 108528 PARAMETER Experiment Name: Zm_Imbibed_Seeds_P Parameter: Organism Value: Zea mays
  misc_feature: MA Experiment 108528 PARAMETER Experiment Name: Zm_Imbibed_Seeds_P Parameter: Plant Line Value: 35A19
  misc_feature: MA Experiment 108528 PARAMETER Experiment Name: Zm_Imbibed_Seeds_P Parameter: Tissue Value: Aerial vs. Embryo
  misc_feature: MA Experiment ID: 108529 Result: Up-regulated in Transcription
  misc_feature: MA Experiment 108529 PARAMETER Experiment Name: Zm_Imbibed_Seeds_P Parameter: Age (day) Value: 5 vs. 2
  misc_feature: MA Experiment 108529 PARAMETER Experiment Name: Zm_Imbibed_Seeds_P Parameter: Organism Value: Zea mays
  misc_feature: MA Experiment 108529 PARAMETER Experiment Name: Zm_Imbibed_Seeds_P Parameter: Plant Line Value: 35A19
  misc_feature: MA Experiment 108529 PARAMETER Experiment Name: Zm_Imbibed_Seeds_P Parameter: Tissue Value: Roots vs. Embryo
  misc_feature: MA Experiment ID: 108530 Result: Up-regulated in Transcription
  misc_feature: MA Experiment 108530 PARAMETER Experiment Name: Zm_Imbibed_Seeds_P Parameter: Age (day) Value: 6 vs. 2
  misc_feature: MA Experiment 108530 PARAMETER Experiment Name: Zm_Imbibed_Seeds_P Parameter: Organism Value: Zea mays
  misc_feature: MA Experiment 108530 PARAMETER Experiment Name: Zm_Imbibed_Seeds_P Parameter: Plant Line Value: 35A19
  misc_feature: MA Experiment 108530 PARAMETER Experiment Name: Zm_Imbibed_Seeds_P Parameter: Tissue Value: Aerial vs. Embryo
  misc_feature: MA Experiment ID: 108534 Result: Down-regulated in Transcription
  misc_feature: MA Experiment 108534 PARAMETER Experiment Name: Zm_4deg_Cold_P Parameter: Age (hr) Value: 8
  misc_feature: MA Experiment 108534 PARAMETER Experiment Name: Zm_4deg_Cold_P Parameter: Organism Value: Zea mays
  misc_feature: MA Experiment 108534 PARAMETER Experiment Name: Zm_4deg_Cold_P Parameter: Plant Line Value: 35A19
  misc_feature: MA Experiment 108534 PARAMETER Experiment Name: Zm_4deg_Cold_P Parameter: Temperature (deg C) Value: 4 vs. 22
  misc_feature: MA Experiment 108534 PARAMETER Experiment Name: Zm_4deg_Cold_P Parameter: Timepoint (hr) Value: 6
  misc_feature: MA Experiment 108534 PARAMETER Experiment Name: Zm_4deg_Cold_P Parameter: Tissue Value: Aerial
  misc_feature: MA Experiment ID: 108535 Result: Down-regulated in Transcription
  misc_feature: MA Experiment 108535 PARAMETER Experiment Name: Zm_Meristem_P Parameter: Age (day) Value: 8
  misc_feature: MA Experiment 108535 PARAMETER Experiment Name: Zm_Meristem_P Parameter: Organism Value: Zea mays
  misc_feature: MA Experiment 108535 PARAMETER Experiment Name: Zm_Meristem_P Parameter: Plant Line Value: 35A19
  misc_feature: MA Experiment 108535 PARAMETER Experiment Name: Zm_Meristem_P Parameter: Tissue Value: Root Meristem vs. Above Root Meristem
  misc_feature: MA Experiment ID: 108546 Result: Up-regulated in Transcription
  misc_feature: MA Experiment 108546 PARAMETER Experiment Name: Zm_Imbibed_Seeds_P Parameter: Age (day) Value: 3 vs. 2
  misc_feature: MA Experiment 108546 PARAMETER Experiment Name: Zm_Imbibed_Seeds_P Parameter: Organism Value: Zea mays
  misc_feature: MA Experiment 108546 PARAMETER Experiment Name: Zm_Imbibed_Seeds_P Parameter: Plant Line Value: 35A19
  misc_feature: MA Experiment 108546 PARAMETER Experiment Name: Zm_Imbibed_Seeds_P Parameter: Tissue Value: Roots vs. Embryo
  misc_feature: MA Experiment ID: 108547 Result: Up-regulated in Transcription
  misc_feature: MA Experiment 108547 PARAMETER Experiment Name: Zm_Imbibed_Seeds_P Parameter: Age (day) Value: 4 vs. 2
  misc_feature: MA Experiment 108547 PARAMETER Experiment Name: Zm_Imbibed_Seeds_P Parameter: Organism Value: Zea mays
  misc_feature: MA Experiment 108547 PARAMETER Experiment Name: Zm_Imbibed_Seeds_P Parameter: Plant Line Value: 35A19
  misc_feature: MA Experiment 108547 PARAMETER Experiment Name: Zm_Imbibed_Seeds_P Parameter: Tissue Value: Aerial vs. Embryo
  misc_feature: MA Experiment ID: 108559 Result: Down-regulated in Transcription
  misc_feature: MA Experiment 108559 PARAMETER Experiment Name: Zm_5mM_NO_P Parameter: Age (day) Value: 8
  misc_feature: MA Experiment 108559 PARAMETER Experiment Name: Zm_5mM_NO_P Parameter: Organism Value: Zea mays
  misc_feature: MA Experiment 108559 PARAMETER Experiment Name: Zm_5mM_NO_P Parameter: Plant Line Value: 35A19
  misc_feature: MA Experiment 108559 PARAMETER Experiment Name: Zm_5mM_NO_P Parameter: Timepoint (hr) Value: 12
  misc_feature: MA Experiment 108559 PARAMETER Experiment Name: Zm_5mM_NO_P Parameter: Tissue Value: Aerial
  misc_feature: MA Experiment 108559 PARAMETER Experiment Name: Zm_5mM_NO_P Parameter: Treatment Value: 5mM NO vs. No Treatment
  misc_feature: MA Experiment ID: 108687 Result: Down-regulated in Transcription
  misc_feature: MA Experiment 108687 PARAMETER Experiment Name: Zm_Embryos-Flowers__P Parameter: Tissue Value: Embryo vs. Aerial+
  misc_feature: MA Experiment ID: 108688 Result: Down-regulated in Transcription
  misc_feature: MA Experiment 108688 PARAMETER Experiment Name: Zm_Embryos-Flowers__P Parameter: Tissue Value: Immature Flowers vs. Aerial+
  misc_feature: MA Experiment ID: 20000535 Result: Down-regulated in Transcription
  misc_feature: MA Experiment 20000535 PARAMETER Experiment Name: Zm_Hybrid_Seed_Dev_P Parameter: DAP Value: 30 vs. 12
  misc_feature: MA Experiment 20000535 PARAMETER Experiment Name: Zm_Hybrid_Seed_Dev_P Parameter: Organism Value: Zea mays
  misc_feature: MA Experiment 20000535 PARAMETER Experiment Name: Zm_Hybrid_Seed_Dev_P Parameter: Plant Line Value: 35A19
  misc_feature: MA Experiment 20000535 PARAMETER Experiment Name: Zm_Hybrid_Seed_Dev_P Parameter: Tissue Value: Embryo vs. Unfert Floret
gctagtgtttgagggcataagcgtggatgaatctgggaagcagcatttccttgatgcgtcagttgcttacaagcgtgcagtcctgaacgccattgagtacattgctagatttgggtactcgaaggagcaggtgtatctcttactatcatgctgtccctgtgagggtaggatctctggaatagttgactctcctaatgcagtggcaactcttgccatccctacagcaatatttgatcaggatataaagccaaaacacctgagaggaagaccgggaccaaagttgataaggcttccagatctcctgagctgttcaaacaatgggcatattcctgtcacccaagaccaaagtggtacaagggcgtcctaggggcgtatatgatctggaagctgatgccgtatccttctacctatacacacaaataatcgtgttggtgtttccaacaatgtagatcttttatttgttgggcagtcatcatgtatgaggaatagagacacctgagtggtgccatattttcagtgcctgtattgctacaaagttgttc

SEQ ID NO: 14428 - protein, 121 aa, Zea mays subsp. mays
  peptide (1)..(121): Ceres Seq. ID no. 12468597
  misc_feature (1)..(80): Pfam Name: Acetamidase/Formamidase family Pfam Description: Acetamidase/Formamidase family
  misc_feature (1)..(120): Homolog of NCBI NO: 34909818 NR Description: putative formamidase [Oryza sativa (japonica group)] >gi|15289900|dbj|BAB63595.1| putative formamidase [Oryza
  misc_feature (1)..(118): Homolog of NCBI NO: 7488106 NR Description: probable formamidase (EC 3.5.1.49) F19F18.40 -
  misc_feature (1)..(118): Homolog of NCBI NO: 18420069 NR Description: formamidase - like protein; protein id:
  misc_feature (1)..(118): Homolog of NCBI NO: 21592429 NR Description: formamidase-like protein [Arabidopsis thaliana]
  misc_feature (1)..(118): Homolog of NCBI NO: 18420071 NR Description: formamidase - like protein; protein id: supported by cDNA: gi_14334653 [Arabidopsis thaliana]
  misc_feature (1)..(118): Homolog of NCBI NO: 14334654 NR Description: putative formamidase [Arabidopsis thaliana]
  misc_feature (1)..(83): Homolog of NCBI NO: 33592607 NR Description: formamidase [Bordetella pertussis]
  misc_feature (1)..(83): Homolog of NCBI NO: 33595862 NR Description: formamidase [Bordetella parapertussis]
  misc_feature (1)..(83): Homolog of NCBI NO: 33600391 NR Description: formamidase [Bordetella bronchiseptica]
  misc_feature (1)..(101): Homolog of NCBI NO: 22984629 NR Description: hypothetical protein [Burkholderia fungorum]
LVFEGISVDESGKQHFLDASVAYKRAVLNAIEYIARFGYSKEQVYLLLSCCPCEGRISGIVDSPNAVATLAIPTAIFDQDIKPKHLRGRPGPKLIRLPDLLSCSNNGHIPVTQDQSGTRAS

SEQ ID NO: 14429 - DNA, 2328 bp, Zea mays subsp. mays
  misc_feature (1)..(2328): Ceres Seq. ID no. 13635296
  misc_feature: MA Experiment ID: 108543 Result: Up-regulated in Transcription
  misc_feature: MA Experiment ID: 20000487 Result: Up-regulated in Transcription
  misc_feature: MA Experiment 20000487 PARAMETER Experiment Name: Zm_50mM_NH4NO3_L_to_H_P Parameter: Organism Value: Zea mays
  misc_feature: MA Experiment 20000487 PARAMETER Experiment Name: Zm_50mM_NH4NO3_L_to_H_P Parameter: Timepoint (hr) Value: 4
  misc_feature: MA Experiment 20000487 PARAMETER Experiment Name: Zm_50mM_NH4NO3_L_to_H_P Parameter: Tissue Value: Leaves
  misc_feature: MA Experiment 20000487 PARAMETER Experiment Name: Zm_50mM_NH4NO3_L_to_H_P Parameter: Treatment Value: 50mM NH4NO3 vs. 100mM Mannitol
  misc_feature: MA Experiment ID: 20000535 Result: Up-regulated in Transcription
  misc_feature: MA Experiment 20000535 PARAMETER Experiment Name: Zm_Hybrid_Seed_Dev_P Parameter: DAP Value: 30 vs. 12
  misc_feature: MA Experiment 20000535 PARAMETER Experiment Name: Zm_Hybrid_Seed_Dev_P Parameter: Organism Value: Zea mays
  misc_feature: MA Experiment 20000535 PARAMETER Experiment Name: Zm_Hybrid_Seed_Dev_P Parameter: Plant Line Value: 35A19
  misc_feature: MA Experiment 20000535 PARAMETER Experiment Name: Zm_Hybrid_Seed_Dev_P Parameter: Tissue Value: Embryo vs. Unfert Floret
  misc_feature: MA Experiment ID: 20000633 Result: Down-regulated in Transcription
  misc_feature: MA Experiment 20000633 PARAMETER Experiment Name: Zm_Herbicide-Treatments_P Parameter: Timepoint (hr) Value: 4
  misc_feature: MA Experiment 20000633 PARAMETER Experiment Name: Zm_Herbicide-Treatments_P Parameter: Tissue Value: Aerial
  misc_feature: MA Experiment 20000633 PARAMETER Experiment Name: Zm_Herbicide-Treatments_P Parameter: Treatment Value: Trimec vs. No Treatment
  misc_feature: MA Experiment ID: 20001613 Result: Up-regulated in Transcription
  misc_feature: MA Experiment 20001613 PARAMETER Experiment Name: Zm_50ppm_KNO3_L-to-H_P Parameter: Age (day) Value: 20
  misc_feature: MA Experiment 20001613 PARAMETER Experiment Name: Zm_50ppm_KNO3_L-to-H_P Parameter: Organism Value: Zea mays
  misc_feature: MA Experiment 20001613 PARAMETER Experiment Name: Zm_50ppm_KNO3_L-to-H_P Parameter: Plant Line Value: 35A19
  misc_feature: MA Experiment 20001613 PARAMETER Experiment Name: Zm_50ppm_KNO3_L-to-H_P Parameter: Timepoint (hr) Value: 24
  misc_feature: MA Experiment 20001613 PARAMETER Experiment Name: Zm_50ppm_KNO3_L-to-H_P Parameter: Tissue Value: Roots
  misc_feature: MA Experiment 20001613 PARAMETER Experiment Name: Zm_50ppm_KNO3_L-to-H_P Parameter: Treatment Value: 50ppm KNO3 vs. 50ppm KCl
aaaatcgacgacgacgtctaatctatttaaggctgaaatccaccttgcctgcgtggccctcctccccatcgcgtctgtccgctacccctccccgaccagatcgctacgagacgccgcgcgatccgacccaggccgacgccgacgacccctctcgccgccggcggccatggcgtacggcgaccgcgtcaccaccttcgaggactccgagaaggagagcgagtacggctatgtccgcaaggtctctggacctgtggttgtggctgatggaatgggtggtgctgccatgtatgaacttgttcgtgtcggacatgataacctcattggggaaattatccgtcttgagggcgattcgagctacaatccaagtttatgaggaaacagctggactgatggttaatgaccctgtattgagaacaagaaagcctctttcagttgaattgggacctggaattcttggaaacatttttgacggtatccagcgrcctctaaaaaccatcgctattaagtcaggagatgtgtatattcctcgtggtgtttcagttcctgcccttgacaaagatgtattgtgggaatttcagccaacgaagctaggtgttggagatgtcatcacaggtggagatctatacgctactgtttttgagaacacattgatgcagcaccatgttgctcttccaccgggttctatggggaaaataagttacattgcaccagctggccagtacaacctgcaggacacagtgctagaattggaatttcagggcataaaaaagaaatttaccatgcttcagacatggcctgtgcgttcaccaaggcctgttgcatcgaagcttgctgcggatacacctcttctgacagggcagcgtgtactggatgcactattcccctcggttctgggaggcacttgtgctattccaggagcatttggctgtggaaaaactgtcattagtcaggcactttccaagtactccaattccgaagctgtggtttatgtgggctgtggtgaacgaggaaatgagatggctgaggttctcatggactttccccagttgacgatgacattgcctgatggccgtgaggagtctgtcatgaagagaacaacactggtggctaacacatcaaacatgcctgtcgctgctcgtgaagcttccatttacactggaattacaattgctgagtatttccgtgatatgggctacaacgtcagtatgatggctgactccacctcccggtgggctgaggcattgcgtgagatctcagggcgtttggctgaaatgcctgctgatagtggttacccagcttacttggctgcrcgtttggcatccttttatgaacgtgctggtaaggtraaatgyctgggaagtccagacaggamtggcagtgtcacaattgttggagcygtctctcctccwggtggtgatttttcagaccctgttacctcygcaaccctcagtattgttcaggtcttctggggtttagataaaaagctcgctcaaaggaagcatttcccatctgtgaattggctcatttcctattcgaaatactccaaggcccttgagtcyttttaygagaarttygatccagatttcattgatattaggacaaaagcacgygaggtgttgcagagggaggacgatctraatgaaattgtgcagcttgttggtaaagaygcgctggcagaatctgacaagattacrctggagacagcaaagctwytgagagaagattatttggcacaaaatgcattyaccccatatgataagttctgcccattctacaaatccgtttggatgatgcgcaacattattcacttcaacacattggcaaatcaggctgtggagcgggcagctggtactgacggccataagataacatacagtgtcataaagcatcggttgggggatctattttatcgcctagtatcccaaaagttcgaggatcctgcagaaggygaagaagctttggtcggcaagtttaagaaactktaygaygaccttaccactgggttccgcaacctagaagatgaggcacrgtgaactgctgtagattttgtgtaagacaataatggctgccaaatgttttataaggtacggaagttgtagattgmgaccatgtatgagaattttccccaccgctactcatytctttgcccaccactattttagtcatcagtgctggatgggcayyytgtttatttcgacgtaccctttattgctatagcattgtaataagcgatgggcatgcttgtagttgaataagtacaatgtccatgtattcaaacatcagcgtcatgtttatttgnttgttgaaaaaactatgttgcctttttgg

SEQ ID NO: 14430 - protein, 676 aa, Zea mays subsp. mays
  peptide (1)..(676): Ceres Seq. ID no. 15220344
  misc_feature (324)..(517): Pfam Name: ATP synthase alpha/beta family, Pfam Description: ATP synthase alpha/beta family,
  misc_feature (324)..(517): Pfam Name: ATP synthase alpha/beta family, Pfam Description: ATP synthase alpha/beta family,
  misc_feature (324)..(517): Pfam Name: ATP synthase alpha/beta family, Pfam Description: ATP synthase alpha/beta family,
  misc_feature (107)..(674): Homolog of NCBI NO: 137460 NR Description: Vacuolar ATP synthase catalytic subunit A
  misc_feature (107)..(675): Homolog of NCBI NO: 11527563 NR Description: vacuolar proton-ATPase [Hordeum vulgare subsp.
  misc_feature (107)..(674): Homolog of NCBI NO: 401322 NR Description: Vacuolar ATP synthase catalytic subunit A
  misc_feature (107)..(674): Homolog of NCBI NO: 3169287 NR Description: vacuolar H+-ATPase catalytic subunit [Gossypium
  misc_feature (107)..(674): Homolog of NCBI NO: 2506211 NR Description: Vacuolar ATP synthase catalytic subunit A
  misc_feature (107)..(674): Homolog of NCBI NO: 2493122 NR Description: Vacuolar ATP synthase catalytic subunit A
  misc_feature (107)..(674): Homolog of NCBI NO: 12585490 NR Description: Vacuolar ATP synthase catalytic subunit A
  misc_feature (107)..(674): Homolog of NCBI NO: 15982954 NR Description: V-ATPase catalytic subunit A [Prunus persica]
  misc_feature (107)..(674): Homolog of NCBI NO: 3169287 NR Description: vacuolar H+-ATPase catalytic subunit [Gossypium
  misc_feature (107)..(674): Homolog of NCBI NO: 401322 NR Description: Vacuolar ATP synthase catalytic subunit A
  misc_feature (107)..(675): Homolog of NCBI NO: 11527563 NR Description: vacuolar proton-ATPase [Hordeum vulgare subsp.
  misc_feature (107)..(674): Homolog of NCBI NO: 137460 NR Description: Vacuolar ATP synthase catalytic subunit A
  misc_feature (107)..(674): Homolog of NCBI NO: 2506211 NR Description: Vacuolar ATP synthase catalytic subunit A
  misc_feature (107)..(674): Homolog of NCBI NO: 3169287 NR Description: vacuolar H+-ATPase catalytic subunit [Gossypium
  misc_feature (107)..(674): Homolog of NCBI NO: 401322 NR Description: Vacuolar ATP synthase catalytic subunit A
  misc_feature (107)..(675): Homolog of NCBI NO: 11527563 NR Description: vacuolar proton-ATPase [Hordeum vulgare subsp.
  misc_feature (107)..(674): Homolog of NCBI NO: 137460 NR Description: Vacuolar ATP synthase catalytic subunit A
  misc_feature (107)..(674): Homolog of NCBI NO: 27884018 NR Description: vacuolar H+-ATPase A2 subunit isoform; V-ATPase
  misc_feature (107)..(674): Homolog of NCBI NO: 27883932 NR Description: vacuolar H+-ATPase A1 subunit isoform; V-ATPase
  misc_feature (107)..(674): Homolog of NCBI NO: 15982954 NR Description: V-ATPase catalytic subunit A [Prunus persica]
  misc_feature (107)..(674): Homolog of NCBI NO: 12585490 NR Description: Vacuolar ATP synthase catalytic subunit A
  misc_feature (107)..(674): Homolog of NCBI NO: 2493122 NR Description: Vacuolar ATP synthase catalytic subunit A
  misc_feature (107)..(674): Homolog of NCBI NO: 2506211 NR Description: Vacuolar ATP synthase catalytic subunit A
  misc_feature (107)..(674): Homolog of NCBI NO: 27883932 NR Description: vacuolar H+-ATPase A1 subunit isoform; V-ATPase
  misc_feature (107)..(674): Homolog of NCBI NO: 27884018 NR Description: vacuolar H+-ATPase A2 subunit isoform; V-ATPase
  misc_feature (107)..(674): Homolog of NCBI NO: 2493122 NR Description: Vacuolar ATP synthase catalytic subunit A
  misc_feature (107)..(674): Homolog of NCBI NO: 12585490 NR Description: Vacuolar ATP synthase catalytic subunit A
  misc_feature (107)..(674): Homolog of NCBI NO: 15982954 NR Description: V-ATPase catalytic subunit A [Prunus persica]
  misc_feature (107)..(674): Homolog of NCBI NO: 27883932 NR Description: vacuolar H+-ATPase A1 subunit isoform; V-ATPase
  misc_feature (107)..(674): Homolog of NCBI NO: 27884018 NR Description: vacuolar H+-ATPase A2 subunit isoform; V-ATPase
  misc_feature (160)..(160): Xaa is any aa, unknown or other
  misc_feature (436)..(436): Xaa is any aa, unknown or other
  misc_feature (448)..(448): Xaa is any aa, unknown or other
  misc_feature (450)..(450): Xaa is any aa, unknown or other
  misc_feature (457)..(457): Xaa is any aa, unknown or other
  misc_feature (465)..(465): Xaa is any aa, unknown or other
  misc_feature (469)..(469): Xaa is any aa, unknown or other
  misc_feature (479)..(479): Xaa is any aa, unknown or other
  misc_feature (519)..(519): Xaa is any aa, unknown or other
  misc_feature (521)..(521): Xaa is any aa, unknown or other
  misc_feature (523)..(523): Xaa is any aa, unknown or other
  misc_feature (524)..(524): Xaa is any aa, unknown or other
  misc_feature (536)..(536): Xaa is any aa, unknown or other
  misc_feature (545)..(545): Xaa is any aa, unknown or other
  misc_feature (555)..(555): Xaa is any aa, unknown or other
  misc_feature (564)..(564): Xaa is any aa, unknown or other
  misc_feature (570)..(570): Xaa is any aa, unknown or other
  misc_feature (571)..(571): Xaa is any aa, unknown or other
  misc_feature (581)..(581): Xaa is any aa, unknown or other
  misc_feature (649)..(649): Xaa is any aa, unknown or other
  misc_feature (660)..(660): Xaa is any aa, unknown or other
  misc_feature (661)..(661): Xaa is any aa, unknown or other
  misc_feature (662)..(662): Xaa is any aa, unknown or other
  misc_feature (676)..(676): Xaa is any aa, unknown or other
NRRRRLIYLRLKSTLPAWPSSPSRLSATPPRPDRYETPRDPTQADADDPSRRRRPWRTATASPPSRTPRRRASTAMSARSLDLWLWLMEWVVLPCMNLFVSDMITSLGKLSVLRAIRATIQVYEETAGLMVNDPVLRTRKPLSVELGPGILGNIFDGIQXPLKTIAIKSGDVYIPRGVSVPALDKDVLWEFQPTKLGVGDVITGGDLYATVFENTLMQHHVALPPGSMGKISYIAPAGQYNLQDTVLELEFQGIKKKFTMLQTWPVRSPRPVASKLAADTPLLTGQRVLDALFPSVLGGTCAIPGAFGCGKTVISQALSKYSNSEAVVYVGCGERGNEMAEVLMDFPQLTMTLPDGREESVMKRTTLVANTSNMPVAAREASIYTGITIAEYFRDMGYNVSMMADSTSRWAEALREISGRLAEMPADSGYPAYLAXRLASFYERAGKXKXLGSPDRXGSVTIVGXVSPXGGDFSDPVTXATLSIVQVFWGLDKKLAQRKHFPSVNWLISYSKYSKALEXFXEXXDPDFIDIRTKAXEVLQREDDXNEIVQLVGKXALAESDKIXLETAKXXREDYLAQNAXTPYDKFCPFYKSVWMMRNIIHFNTLANQAVERAAGTDGHKITYSVIKHRLGDLFYRLVSQKFEDPAEXEEALVGKFKKXXXDLTTGFRNLEDEAX

SEQ ID NO: 14431 - protein, 601 aa, Zea mays subsp. mays
  peptide (1)..(601): Ceres Seq. ID no. 15220345
  misc_feature (249)..(442): Pfam Name: ATP synthase alpha/beta family, Pfam Description: ATP synthase alpha/beta family,
  misc_feature (249)..(442): Pfam Name: ATP synthase alpha/beta family, Pfam Description: ATP synthase alpha/beta family,
  misc_feature (249)..(442): Pfam Name: ATP synthase alpha/beta family, Pfam Description: ATP synthase alpha/beta family,
  misc_feature (32)..(599): Homolog of NCBI NO: 137460 NR Description: Vacuolar ATP synthase catalytic subunit A
  misc_feature (32)..(600): Homolog of NCBI NO: 11527563 NR Description: vacuolar proton-ATPase [Hordeum vulgare subsp.
  misc_feature (32)..(599): Homolog of NCBI NO: 401322 NR Description: Vacuolar ATP synthase catalytic subunit A
  misc_feature (32)..(599): Homolog of NCBI NO: 3169287 NR Description: vacuolar H+-ATPase catalytic subunit [Gossypium
  misc_feature (32)..(599): Homolog of NCBI NO: 2506211 NR Description: Vacuolar ATP synthase catalytic subunit A
  misc_feature (32)..(600): Homolog of NCBI NO: 11527563 NR Description: vacuolar proton-ATPase [Hordeum vulgare subsp.
  misc_feature (32)..(599): Homolog of NCBI NO: 3169287 NR Description: vacuolar H+-ATPase catalytic subunit [Gossypium
  misc_feature (32)..(599): Homolog of NCBI NO: 401322 NR Description: Vacuolar ATP synthase catalytic subunit A
  misc_feature (32)..(600): Homolog of NCBI NO: 11527563 NR Description: vacuolar proton-ATPase [Hordeum vulgare subsp.
  misc_feature (32)..(599): Homolog of NCBI NO: 137460 NR Description: Vacuolar ATP synthase catalytic subunit A
  misc_feature (32)..(599): Homolog of NCBI NO: 27884018 NR Description: vacuolar H+-ATPase A2 subunit isoform; V-ATPase
  misc_feature (32)..(599): Homolog of NCBI NO: 27883932 NR Description: vacuolar H+-ATPase A1 subunit isoform; V-ATPase
  misc_feature (32)..(599): Homolog of NCBI NO: 15982954 NR Description: V-ATPase catalytic subunit A [Prunus persica]
  misc_feature (32)..(599): Homolog of NCBI NO: 12585490 NR Description: Vacuolar ATP synthase catalytic subunit A
  misc_feature (32)..(599): Homolog of NCBI NO: 2493122 NR Description: Vacuolar ATP synthase catalytic subunit A
  misc_feature (32)..(599): Homolog of NCBI NO: 2506211 NR Description: Vacuolar ATP synthase catalytic subunit A
  misc_feature (32)..(599): Homolog of NCBI NO: 27884018 NR Description: vacuolar H+-ATPase A2 subunit isoform; V-ATPase
  misc_feature (32)..(599): Homolog of NCBI NO: 27883932 NR Description: vacuolar H+-ATPase A1 subunit isoform; V-ATPase
  misc_feature (32)..(599): Homolog of NCBI NO: 15982954 NR Description: V-ATPase catalytic subunit A [Prunus persica]
  misc_feature (32)..(599): Homolog of NCBI NO: 12585490 NR Description: Vacuolar ATP synthase catalytic subunit A
  misc_feature (32)..(599): Homolog of NCBI NO: 2493122 NR Description: Vacuolar ATP synthase catalytic subunit A
  misc_feature (32)..(599): Homolog of NCBI NO: 2506211 NR Description: Vacuolar ATP synthase catalytic subunit A
  misc_feature (32)..(599): Homolog of NCBI NO: 3169287 NR Description: vacuolar H+-ATPase catalytic subunit [Gossypium
  misc_feature (32)..(599): Homolog of NCBI NO: 401322 NR Description: Vacuolar ATP synthase catalytic subunit A
  misc_feature (32)..(599): Homolog of NCBI NO: 137460 NR Description: Vacuolar ATP synthase catalytic subunit A
  misc_feature (32)..(599): Homolog of NCBI NO: 2493122 NR Description: Vacuolar ATP synthase catalytic subunit A
  misc_feature (32)..(599): Homolog of NCBI NO: 12585490 NR Description: Vacuolar ATP synthase catalytic subunit A
  misc_feature (32)..(599): Homolog of NCBI NO: 15982954 NR Description: V-ATPase catalytic subunit A [Prunus persica]
  misc_feature (32)..(599): Homolog of NCBI NO: 27883932 NR Description: vacuolar H+-ATPase A1 subunit isoform; V-ATPase
  misc_feature (32)..(599): Homolog of NCBI NO: 27884018 NR Description: vacuolar H+-ATPase A2 subunit isoform; V-ATPase
  misc_feature (85)..(85): Xaa is any aa, unknown or other
  misc_feature (361)..(361): Xaa is any aa, unknown or other
  misc_feature (373)..(373): Xaa is any aa, unknown or other
  misc_feature (375)..(375): Xaa is any aa, unknown or other
  misc_feature (382)..(382): Xaa is any aa, unknown or other
  misc_feature (390)..(390): Xaa is any aa, unknown or other
  misc_feature (394)..(394): Xaa is any aa, unknown or other
  misc_feature (404)..(404): Xaa is any aa, unknown or other
  misc_feature (444)..(444): Xaa is any aa, unknown or other
  misc_feature (446)..(446): Xaa is any aa, unknown or other
  misc_feature (448)..(448): Xaa is any aa, unknown or other
  misc_feature (449)..(449): Xaa is any aa, unknown or other
  misc_feature (461)..(461): Xaa is any aa, unknown or other
  misc_feature (470)..(470): Xaa is any aa, unknown or other
  misc_feature (480)..(480): Xaa is any aa, unknown or other
  misc_feature (489)..(489): Xaa is any aa, unknown or other
  misc_feature (495)..(495): Xaa is any aa, unknown or other
  misc_feature (496)..(496): Xaa is any aa, unknown or other
  misc_feature (506)..(506): Xaa is any aa, unknown or other
  misc_feature (574)..(574): Xaa is any aa, unknown or other
  misc_feature (585)..(585): Xaa is any aa, unknown or other
  misc_feature (586)..(586): Xaa is any aa, unknown or other
  misc_feature (587)..(587): Xaa is any aa, unknown or other
  misc_feature (601)..(601): Xaa is any aa, unknown or other
MSARSLDLWLWLMEWVVLPCMNLFVSDMITSLGKLSVLRAIRATIQVYEETAGLMVNDPVLRTRKPLSVELGPGILGNIFDGIQXPLKTIAIKSGDVYIPRGVSVPALDKDVLWEFQPTKLGVGDVITGGDLYATVFENTLMQHHVALPPGSMGKISYIAPAGQYNLQDTVLELEFQGIKKKFTMLQTWPVRSPRPVASKLAADTPLLTGQRVLDALFPSVLGGTCAIPGAFGCGKTVISQALSKYSNSEAVVYVGCGERGNEMAEVLMDFPQLTMTLPDGREESVMKRTTLVANTSNMPVAAREASIYTGITIAEYFRDMGYNVSMMADSTSRWAEALREISGRLAEMPADSGYPAYLAXRLASFYERAGKXKXLGSPDRXGSVTIVGXVSPXGGDFSDPVTXATLSIVQVFWGLDKKLAQRKHFPSVNWLISYSKYSKALEXFXEXXDPDFIDIRTKAXEVLQREDDXNEIVQLVGKXALAESDKIXLETAKXXREDYLAQNAXTPYDKFCPFYKSVWMMRNIIHFNTLANQAVERAAGTDGHKITYSVIKHRLGDLFYRLVSQKFEDPAEXEEALVGKFKKXXXDLTTGFRNLEDEAX

SEQ ID NO: 14432 - protein, 589 aa, Zea mays subsp. mays
  peptide (1)..(589): Ceres Seq. ID no. 15220346
  misc_feature (237)..(430): Pfam Name: ATP synthase alpha/beta family, Pfam Description: ATP synthase alpha/beta family,
  misc_feature (237)..(430): Pfam Name: ATP synthase alpha/beta family, Pfam Description: ATP synthase alpha/beta family,
  misc_feature (237)..(430): Pfam Name: ATP synthase alpha/beta family, Pfam Description: ATP synthase alpha/beta family,
  misc_feature (20)..(587): Homolog of NCBI NO: 137460 NR Description: Vacuolar ATP synthase catalytic subunit A
  misc_feature (20)..(588): Homolog of NCBI NO: 11527563 NR Description: vacuolar proton-ATPase [Hordeum vulgare subsp.
  misc_feature (20)..(587): Homolog of NCBI NO: 401322 NR Description: Vacuolar ATP synthase catalytic subunit A
  misc_feature (20)..(587): Homolog of NCBI NO: 3169287 NR Description: vacuolar H+-ATPase catalytic subunit [Gossypium
  misc_feature (20)..(587): Homolog of NCBI NO: 2506211 NR Description: Vacuolar ATP synthase catalytic subunit A
  misc_feature (20)..(588): Homolog of NCBI NO: 11527563 NR Description: vacuolar proton-ATPase [Hordeum vulgare subsp.
  misc_feature (20)..(587): Homolog of NCBI NO: 3169287 NR Description: vacuolar H+-ATPase catalytic subunit [Gossypium
  misc_feature (20)..(587): Homolog of NCBI NO: 401322 NR Description: Vacuolar ATP synthase catalytic subunit A
  misc_feature (20)..(588): Homolog of NCBI NO: 11527563 NR Description: vacuolar proton-ATPase [Hordeum vulgare subsp.
  misc_feature (20)..(587): Homolog of NCBI NO: 137460 NR Description: Vacuolar ATP synthase catalytic subunit A
  misc_feature (20)..(587): Homolog of NCBI NO: 27884018 NR Description: vacuolar H+-ATPase A2 subunit isoform; V-ATPase
  misc_feature (20)..(587): Homolog of NCBI NO: 27883932 NR Description: vacuolar H+-ATPase A1 subunit isoform; V-ATPase
  misc_feature (20)..(587): Homolog of NCBI NO: 15982954 NR Description: V-ATPase catalytic subunit A [Prunus persica]
  misc_feature (20)..(587): Homolog of NCBI NO: 12585490 NR Description: Vacuolar ATP synthase catalytic subunit A
  misc_feature (20)..(587): Homolog of NCBI NO: 2493122 NR Description: Vacuolar ATP synthase catalytic subunit A
  misc_feature (20)..(587): Homolog of NCBI NO: 2506211 NR Description: Vacuolar ATP synthase catalytic subunit A
  misc_feature (20)..(587): Homolog of NCBI NO: 27884018 NR Description: vacuolar H+-ATPase A2 subunit isoform; V-ATPase
  misc_feature (20)..(587): Homolog of NCBI NO: 27883932 NR Description: vacuolar H+-ATPase A1 subunit isoform; V-ATPase
  misc_feature (20)..(587): Homolog of NCBI NO: 15982954 NR Description: V-ATPase catalytic subunit A [Prunus persica]
  misc_feature (20)..(587): Homolog of NCBI NO: 12585490 NR Description: Vacuolar ATP synthase catalytic subunit A
  misc_feature (20)..(587): Homolog of NCBI NO: 2493122 NR Description: Vacuolar ATP synthase catalytic subunit A
  misc_feature (20)..(587): Homolog of NCBI NO: 2506211 NR Description: Vacuolar ATP synthase catalytic subunit A
  misc_feature (20)..(587): Homolog of NCBI NO: 3169287 NR Description: vacuolar H+-ATPase catalytic subunit [Gossypium
  misc_feature (20)..(587): Homolog of NCBI NO: 401322 NR Description: Vacuolar ATP synthase catalytic subunit A
  misc_feature (20)..(587): Homolog of NCBI NO: 137460 NR Description: Vacuolar ATP synthase catalytic subunit A
  misc_feature (20)..(587): Homolog of NCBI NO: 2493122 NR Description: Vacuolar ATP synthase catalytic subunit A
  misc_feature (20)..(587): Homolog of NCBI NO: 12585490 NR Description: Vacuolar ATP synthase catalytic subunit A
  misc_feature (20)..(587): Homolog of NCBI NO: 15982954 NR Description: V-ATPase catalytic subunit A [Prunus persica]
  misc_feature (20)..(587): Homolog of NCBI NO: 27883932 NR Description: vacuolar H+-ATPase A1 subunit isoform; V-ATPase
  misc_feature (20)..(587): Homolog of NCBI NO: 27884018 NR Description: vacuolar H+-ATPase A2 subunit isoform; V-ATPase
  misc_feature (73)..(73): Xaa is any aa, unknown or other
  misc_feature (349)..(349): Xaa is any aa, unknown or other
  misc_feature (361)..(361): Xaa is any aa, unknown or other
  misc_feature (363)..(363): Xaa is any aa, unknown or other
  misc_feature (370)..(370): Xaa is any aa, unknown or other
  misc_feature (378)..(378): Xaa is any aa, unknown or other
  misc_feature (382)..(382): Xaa is any aa, unknown or other
  misc_feature (392)..(392): Xaa is any aa, unknown or other
  misc_feature (432)..(432): Xaa is any aa, unknown or other
  misc_feature (434)..(434): Xaa is any aa, unknown or other
  misc_feature (436)..(436): Xaa is any aa, unknown or other
  misc_feature (437)..(437): Xaa is any aa, unknown or other
  misc_feature (449)..(449): Xaa is any aa, unknown or other
  misc_feature (458)..(458): Xaa is any aa, unknown or other
  misc_feature (468)..(468): Xaa is any aa, unknown or other
  misc_feature (477)..(477): Xaa is any aa, unknown or other
  misc_feature (483)..(483): Xaa is any aa, unknown or other
  misc_feature (484)..(484): Xaa is any aa, unknown or other
  misc_feature (494)..(494): Xaa is any aa, unknown or other
  misc_feature (562)..(562): Xaa is any aa, unknown or other
  misc_feature (573)..(573): Xaa is any aa, unknown or other
  misc_feature (574)..(574): Xaa is any aa, unknown or other
  misc_feature (575)..(575): Xaa is any aa, unknown or other
  misc_feature (589)..(589): Xaa is any aa, unknown or other
MEWVVLPCMNLFVSDMITSLGKLSVLRAIRATIQVYEETAGLMVNDPVLRTRKPLSVELGPGILGNIFDGIQXPLKTIAIKSGDVYIPRGVSVPALDKDVLWEFQPTKLGVGDVITGGDLYATVFENTLMQHHVALPPGSMGKISYIAPAGQYNLQDTVLELEFQGIKKKFTMLQTWPVRSPRPVASKLAADTPLLTGQRVLDALFPSVLGGTCAIPGAFGCGKTVISQALSKYSNSEAVVYVGCGERGNEMAEVLMDFPQLTMTLPDGREESVMKRTTLVANTSNMPVAAREASIYTGITIAEYFRDMGYNVSMMADSTSRWAEALREISGRLAEMPADSGYPAYLAXRLASFYERAGKXKXLGSPDRXGSVTIVGXVSPXGGDFSDPVTXATLSIVQVFWGLDKKLAQRKHFPSVNWLISYSKYSKALEXFXEXXDPDFIDIRTKAXEVLQREDDXNEIVQLVGKXALAESDKIXLETAKXXREDYLAQNAXTPYDKFCPFYKSVWMMRNIIHFNTLANQAVERAAGTDGHKITYSVIKHRLGDLFYRLVSQKFEDPAEXEEALVGKFKKXXXDLTTGFRNLEDEAX

SEQ ID NO: 14433 - DNA, 1152 bp, Zea mays subsp. mays
  misc_feature (1)..(1152): Ceres Seq. ID no. 12436476
  misc_feature: MA Experiment ID: 108523 Result: Up-regulated in Transcription
  misc_feature: MA Experiment 108523 PARAMETER Experiment Name: Zm_42deg_Heat_P Parameter: Age (day) Value: 8
  misc_feature: MA Experiment 108523 PARAMETER Experiment Name: Zm_42deg_Heat_P Parameter: Organism Value: Zea mays
  misc_feature: MA Experiment 108523 PARAMETER Experiment Name: Zm_42deg_Heat_P Parameter: Plant Line Value: 35A19
  misc_feature: MA Experiment 108523 PARAMETER Experiment Name: Zm_42deg_Heat_P Parameter: Temperature (deg C) Value: 42 vs. 22
  misc_feature: MA Experiment 108523 PARAMETER Experiment Name: Zm_42deg_Heat_P Parameter: Timepoint (hr) Value: 6
  misc_feature: MA Experiment 108523 PARAMETER Experiment Name: Zm_42deg_Heat_P Parameter: Tissue Value: Aerial
aggctccactgctaaacgccggtaatggcccaggctccggcgcgcgccgcttccgccgtacgtctcttcgacgcgcactgccacctgcaagacccccgcatcgcggccgtcgcccctgcccttatacgagccgccggcgcatccggcgtcgcacgcttcgctgtcaacggcacctccgagaaggactggcacctggtgaagcagatggccgaggatcacccagccgtcgtcccctgcttcggcctgcacccttggtgggtacccgagaggtcgccggattggatgaatttgctccggcggttcttcgccgaaaccccggaggcggctgttggggagattggtctggacaaaggttcacatggaaaaaccatcaacttcggagaacaggttgaagtgttccagcgacagctcgaactagctaaggaattggagagacctgtttctgttcattgtgtgcgggcatttggtgatcttctggaagtattgaagcaaactggacctttcccagcaggcgtgttgttacattcttatatgggatctgcagaaatggtgtctgcccttgcaaatttaggctgttacttttcactatctggcttcttgacaggcatgaaatccactaaagctaagcacatgctgaagtcgattcccctggataggattcttttagagacagatgcacctgatgcattaccaagattggacaatgtttctgtatcaccagtccatgttcacagttcagatgcagatactgaaaagcgtcacatggattcagagtcacaggctgctaatgcatcaaatgagtccttgaaccatccagaaaatatccatattgttttggagtatgtcgcatcactccttgaaatgacagagtcagaattggcggagttgagttacaagaatgctaccaagctgttttcttatcctggctccaaagttcaacatgaacctgaagacatctaaatcgggttcaacactaccttactcactggtcagcaaatctgaaacctgttctttttagttttgactcctggtttttctcctcttcttaatgctgtttgtgtaccggattgtagggtcctcccagacacaatgtttgagaaactgaaatggctgtacatcactgttaatattggtgaaataaaacagataccg

SEQ ID NO: 14434 - protein, 311 aa, Zea mays subsp. mays
  peptide (1)..(311): Ceres Seq. ID no. 12436477
  misc_feature (12)..(299): Pfam Name: TatD related DNase Pfam Description: TatD related DNase
  misc_feature (1)..(311): Homolog of NCBI NO: 38345538 NR Description: OSJNBa0020J04.13 [Oryza sativa (japonica
  misc_feature (12)..(304): Homolog of NCBI NO: 18418353 NR Description: putative protein; protein id: At5g17570.1,
  misc_feature (12)..(304): Homolog of NCBI NO: 11357936 NR Description: hypothetical protein K10A8_50 - Arabidopsis >gi|9755782|emb|CAC01901.1| putative protein [Arabidopsis
  misc_feature (12)..(261): Homolog of NCBI NO: 15228573 NR Description: unknown protein; protein id: At3g03500.1 thaliana] >gi|6017102|gb|AAF01585.1|AC009895_6 unknown protein
  misc_feature (14)..(223): Homolog of NCBI NO: 23097502 NR Description: hypothetical protein [Oceanobacillus iheyensis >gi|22775725|dbj|BAC12003.1| hypothetical conserved protein
  misc_feature (248)..(298): Homolog of NCBI NO: 23097502 NR Description: hypothetical protein [Oceanobacillus iheyensis >gi|22775725|dbj|BAC12003.1| hypothetical conserved protein
  misc_feature (16)..(224): Homolog of NCBI NO: 15677535 NR Description: conserved hypothetical protein [Neisseria
  misc_feature (14)..(223): Homolog of NCBI NO: 16077107 NR Description: similar to hypothetical proteins [Bacillus
  misc_feature (262)..(297): Homolog of NCBI NO: 16077107 NR Description: similar to hypothetical proteins [Bacillus
  misc_feature (14)..(223): Homolog of NCBI NO: 39998376 NR Description: hydrolase, TatD family [Geobacter sulfurreducens >gi|39985322|gb|AAR36677.1| hydrolase, TatD family [Geobacter
MAQAPARAASAVRLFDAHCHLQDPRIAAVAPALIRAAGASGVARFAVNGTSEKDWHLVKQMAEDHPAVVPCFGLHPWWVPERSPDWMNLLRRFFAETPEAAVGEIGLDKGSHGKTINFGEQVEVFQRQLELAKELERPVSVHCVRAFGDLLEVLKQTGPFPAGVLLHSYMGSAEMVSALANLGCYFSLSGFLTGMKSTKAKHMLKSIPLDRILLETDAPDALPRLDNVSVSPVHVHSSDADTEKRHMDSESQAANASNESLNHPENIHIVLEYVASLLEMTESELAELSYKNATKLFSYPGSKVQHEPEDI

SEQ ID NO: 14435 - protein, 251 aa, Zea mays subsp. mays
  peptide (1)..(251): Ceres Seq. ID no. 12436478
  misc_feature (1)..(239): Pfam Name: TatD related DNase Pfam Description: TatD related DNase
  misc_feature (1)..(251): Homolog of NCBI NO: 38345538 NR Description: OSJNBa0020J04.13 [Oryza sativa (japonica
  misc_feature (1)..(244): Homolog of NCBI NO: 18418353 NR Description: putative protein; protein id: At5g17570.1,
  misc_feature (1)..(244): Homolog of NCBI NO: 11357936 NR Description: hypothetical protein K10A8_50 - Arabidopsis >gi|9755782|emb|CAC01901.1| putative protein [Arabidopsis
  misc_feature (1)..(201): Homolog of NCBI NO: 15228573 NR Description: unknown protein; protein id: At3g03500.1 thaliana] >gi|6017102|gb|AAF01585.1|AC009895_6 unknown protein
  misc_feature (1)..(163): Homolog of NCBI NO: 23097502 NR Description: hypothetical protein [Oceanobacillus iheyensis >gi|22775725|dbj|BAC12003.1| hypothetical conserved protein
  misc_feature (188)..(238): Homolog of NCBI NO: 23097502 NR Description: hypothetical protein [Oceanobacillus iheyensis >gi|22775725|dbj|BAC12003.1| hypothetical conserved protein
  misc_feature (1)..(164): Homolog of NCBI NO: 15677535 NR Description: conserved hypothetical protein [Neisseria
  misc_feature (1)..(163): Homolog of NCBI NO: 16077107 NR Description: similar to hypothetical proteins [Bacillus
  misc_feature (202)..(237): Homolog of NCBI NO: 16077107 NR Description: similar to hypothetical proteins [Bacillus
  misc_feature (1)..(163): Homolog of NCBI NO: 39998376 NR Description: hydrolase, TatD family [Geobacter sulfurreducens >gi|39985322|gb|AAR36677.1| hydrolase, TatD family [Geobacter
MAEDHPAVVPCFGLHPWWVPERSPDWMNLLRRFFAETPEAAVGEIGLDKGSHGKTINFGEQVEVFQRQLELAKELERPVSVHCVRAFGDLLEVLKQTGPFPAGVLLHSYMGSAEMVSALANLGCYFSLSGFLTGMKSTKAKHMLKSIPLDRILLETDAPDALPRLDNVSVSPVHVHSSDADTEKRHMDSESQAANASNESLNHPENIHIVLEYVASLLEMTESELAELSYKNATKLFSYPGSKVQHEPEDI

SEQ ID NO: 14436 - protein, 225 aa, Zea mays subsp. mays
  peptide (1)..(225): Ceres Seq. ID no. 12436479
  misc_feature (1)..(213): Pfam Name: TatD related DNase Pfam Description: TatD related DNase
  misc_feature (1)..(137): Homolog of NCBI NO: 23097502 NR Description: hypothetical protein [Oceanobacillus iheyensis >gi|22775725|dbj|BAC12003.1| hypothetical conserved protein
  misc_feature (162)..(212): Homolog of NCBI NO: 23097502 NR Description: hypothetical protein [Oceanobacillus iheyensis >gi|22775725|dbj|BAC12003.1| hypothetical conserved protein
  misc_feature (1)..(138): Homolog of NCBI NO: 15677535 NR Description: conserved hypothetical protein [Neisseria
  misc_feature (1)..(225): Homolog of NCBI NO: 38345538 NR Description: OSJNBa0020J04.13 [Oryza sativa (japonica
  misc_feature (1)..(218): Homolog of NCBI NO: 11357936 NR Description: hypothetical protein K10A8_50 - Arabidopsis >gi|9755782|emb|CAC01901.1| putative protein [Arabidopsis
  misc_feature (1)..(175): Homolog of NCBI NO: 15228573 NR Description: unknown protein; protein id: At3g03500.1 thaliana] >gi|6017102|gb|AAF01585.1|AC009895_6 unknown protein
  misc_feature (1)..(218): Homolog of NCBI NO: 18418353 NR Description: putative protein; protein id: At5g17570.1,
  misc_feature (1)..(137): Homolog of NCBI NO: 16077107 NR Description: similar to hypothetical proteins [Bacillus
  misc_feature (176)..(211): Homolog of NCBI NO: 16077107 NR Description: similar to hypothetical proteins [Bacillus
  misc_feature (1)..(137): Homolog of NCBI NO: 39998376 NR Description: hydrolase, TatD family [Geobacter sulfurreducens >gi|39985322|gb|AAR36677.1| hydrolase, TatD family [Geobacter
MNLLRRFFAETPEAAVGEIGLDKGSHGKTINFGEQVEVFQRQLELAKELERPVSVHCVRAFGDLLEVLKQTGPFPAGVLLHSYMGSAEMVSALANLGCYFSLSGFLTGMKSTKAKHMLKSIPLDRILLETDAPDALPRLDNVSVSPVHVHSSDADTEKRHMDSESQAANASNESLNHPENIHIVLEYVASLLEMTESELAELSYKNATKLFSYPGSKVQHEPEDI

SEQ ID NO: 14437 - DNA, 1320 bp, Zea mays subsp. mays
  misc_feature (1)..(1320): Ceres Seq. ID no. 13505046
  misc_feature: MA Experiment ID: 108543 Result: Up-regulated in Transcription
  misc_feature: MA Experiment ID: 108544 Result: Down-regulated in Transcription
  misc_feature: MA Experiment ID: 108556 Result: Down-regulated in Transcription
  misc_feature: MA Experiment 108556 PARAMETER Experiment Name: Zm_Drought_P Parameter: Age (day) Value: 9
  misc_feature: MA Experiment 108556 PARAMETER Experiment Name: Zm_Drought_P Parameter: Organism Value: Zea mays
  misc_feature: MA Experiment 108556 PARAMETER Experiment Name: Zm_Drought_P Parameter: Plant Line Value: 35A19
  misc_feature: MA Experiment 108556 PARAMETER Experiment Name: Zm_Drought_P Parameter: Timepoint (hr) Value: 24
  misc_feature: MA Experiment 108556 PARAMETER Experiment Name: Zm_Drought_P Parameter: Tissue Value: Aerial
  misc_feature: MA Experiment 108556 PARAMETER Experiment Name: Zm_Drought_P Parameter: Treatment Value: Drought vs. No Drought
  misc_feature: MA Experiment ID: 20000477 Result: Down-regulated in Transcription
  misc_feature: MA Experiment 20000477 PARAMETER Experiment Name: Zm_5mM_SA_P Parameter: Age (day) Value: 10
  misc_feature: MA Experiment 20000477 PARAMETER Experiment Name: Zm_5mM_SA_P Parameter: Organism Value: Zea mays
  misc_feature: MA Experiment 20000477 PARAMETER Experiment Name: Zm_5mM_SA_P Parameter: Plant Line Value: 35A19
  misc_feature: MA Experiment 20000477 PARAMETER Experiment Name: Zm_5mM_SA_P Parameter: Timepoint (hr) Value: 48
  misc_feature: MA Experiment 20000477 PARAMETER Experiment Name: Zm_5mM_SA_P Parameter: Tissue Value: Aerial
  misc_feature: MA Experiment 20000477 PARAMETER Experiment Name: Zm_5mM_SA_P Parameter: Treatment Value: 5mM SA vs. No Treatment
  misc_feature: MA Experiment ID: 20000478 Result: Down-regulated in Transcription
  misc_feature: MA Experiment 20000478 PARAMETER Experiment Name: Zm_5mM_SA_P Parameter: Age (day) Value: 11
  misc_feature: MA Experiment 20000478 PARAMETER Experiment Name: Zm_5mM_SA_P Parameter: Organism Value: Zea mays
  misc_feature: MA Experiment 20000478 PARAMETER Experiment Name: Zm_5mM_SA_P Parameter: Plant Line Value: 35A19
  misc_feature: MA Experiment 20000478 PARAMETER Experiment Name: Zm_5mM_SA_P Parameter: Timepoint (hr) Value: 72
  misc_feature: MA Experiment 20000478 PARAMETER Experiment Name: Zm_5mM_SA_P Parameter: Tissue Value: Aerial
  misc_feature: MA Experiment 20000478 PARAMETER Experiment Name: Zm_5mM_SA_P Parameter: Treatment Value: 5mM SA vs. No Treatment
  misc_feature: MA Experiment ID: 20000479 Result: Down-regulated in Transcription
  misc_feature: MA Experiment 20000479 PARAMETER Experiment Name: Zm_Drought_P Parameter: Age (day) Value: 10
  misc_feature: MA Experiment 20000479 PARAMETER Experiment Name: Zm_Drought_P Parameter: Organism Value: Zea mays
  misc_feature: MA Experiment 20000479 PARAMETER Experiment Name: Zm_Drought_P Parameter: Plant Line Value: 35A19
  misc_feature: MA Experiment 20000479 PARAMETER Experiment Name: Zm_Drought_P Parameter: Timepoint (hr) Value: 48
  misc_feature: MA Experiment 20000479 PARAMETER Experiment Name: Zm_Drought_P Parameter: Tissue Value: Aerial
  misc_feature: MA Experiment 20000479 PARAMETER Experiment Name: Zm_Drought_P Parameter: Treatment Value: Drought vs. No Drought
  misc_feature: MA Experiment ID: 20000480 Result: Down-regulated in Transcription
  misc_feature: MA Experiment 20000480 PARAMETER Experiment Name: Zm_Drought_P Parameter: Age (day) Value: 11
  misc_feature: MA Experiment 20000480 PARAMETER Experiment Name: Zm_Drought_P Parameter: Organism Value: Zea mays
  misc_feature: MA Experiment 20000480 PARAMETER Experiment Name: Zm_Drought_P Parameter: Plant Line Value: 35A19
  misc_feature: MA Experiment 20000480 PARAMETER Experiment Name: Zm_Drought_P Parameter: Timepoint (hr) Value: 72
  misc_feature: MA Experiment 20000480 PARAMETER Experiment Name: Zm_Drought_P Parameter: Tissue Value: Aerial
  misc_feature: MA Experiment 20000480 PARAMETER Experiment Name: Zm_Drought_P Parameter: Treatment Value: Drought vs. No Drought
  misc_feature: MA Experiment ID: 20000492 Result: Down-regulated in Transcription
  misc_feature: MA Experiment 20000492 PARAMETER Experiment Name: Zm_Hybrid_Seed_Dev_P Parameter: DAP Value: 12
  misc_feature: MA Experiment 20000492 PARAMETER Experiment Name: Zm_Hybrid_Seed_Dev_P Parameter: Organism Value: Zea mays
  misc_feature: MA Experiment 20000492 PARAMETER Experiment Name: Zm_Hybrid_Seed_Dev_P Parameter: Plant Line Value: 35A19
  misc_feature: MA Experiment 20000492 PARAMETER Experiment Name: Zm_Hybrid_Seed_Dev_P Parameter: Tissue Value: Fert Kernel vs. Unfert Floret
  misc_feature: MA Experiment ID: 20000535 Result: Down-regulated in Transcription
  misc_feature: MA Experiment 20000535 PARAMETER Experiment Name: Zm_Hybrid_Seed_Dev_P Parameter: DAP Value: 30 vs. 12
  misc_feature: MA Experiment 20000535 PARAMETER Experiment Name: Zm_Hybrid_Seed_Dev_P Parameter: Organism Value: Zea mays
  misc_feature: MA Experiment 20000535 PARAMETER Experiment Name: Zm_Hybrid_Seed_Dev_P Parameter: Plant Line Value: 35A19
  misc_feature: MA Experiment 20000535 PARAMETER Experiment Name: Zm_Hybrid_Seed_Dev_P Parameter: Tissue Value: Embryo vs. Unfert Floret
ggaactgaaaggaaacattagggttttttgtagagttcgaccacttcttcgatttgagggtgattccaatggtccggaaggtgcctctatctcttttccaacatctgtagagtctactggacgtagcattgatttgataaaccaagggcaaaagctctccttctcatatgacaaggtttttgaccatggtgcgtcacaggaagatgtgtttgtggaaatatcgcaactagtccaaagtgcccttgatgggtacaaggtatgcatatttgcatatggtcaaactggatctggtaaaacttatacaatgatgggtaaaccaggaaatgatcaaaaagggataatacctcgttctttggagcaaattttcaagaccagtcggtttctagaatctcaaggatggaattattccatgcaagcatcaatgttggaaatatacaatgagaccattcgtgatttgttagcacctggtcggtctaacagttttgagtctagtaaacaatgcactataaagcatgaccctcatgggaatattgtgtcggaccttacaattattgatgtctttggtattgctgatgtgactagtctactagagaaagcatcccagagtaggtctgtgggtaagactcagatgaatgaacagtcgtccagaagtcattttgtattcacattaaagatatctggatctaacgagaacacaggccaaaatgtccaaggagtccttaacttgattgatttagctgggagtgagcgtcttgctaaaagtggctccacaggtgatcgcttgaaggaaactcagtcaatcaataaaagcttgtcggctttgagcgatgtaatcttcgcgatcgcaaaaggagatgaccacgttccgttcagaaattcaaaacttacatacctattgcagccttgccttggaggtgactcgaaagctctcatgtttgtcaacatttcaccggaggcatcctccgttggtgagacgatatgctcgttgaggtttgcttcaagggtgaatgcttgtgagattggaataccaagacgtcacacataagcccgtcccttcgttctaggctgaattatgggtgaaggtagctgtagggatcatggtaatgtgatatataatgtgttggtttgtgccgcatttggccacaaaggtgatgcccaacagaattcttgtaacttgtacagtgtaggtgatggtgttttgctgagagcagcatatgtacgagtgctgacatcttgtcatgctttccttactttttggtgtagcagacttgggtcatgttaattgtgatcgtgggttcgaatgtgaaactaccttttctc

SEQ ID NO: 14438 - protein, 347 aa, Zea mays subsp. mays
  peptide (1)..(347): Ceres Seq. ID no. 13505047
  misc_feature (1)..(347): Homolog of NCBI NO: 15208457 NR Description: kinesin heavy chain [Zea mays]
  misc_feature (1)..(346): Homolog of NCBI NO: 39546247 NR Description: OSJNBa0089N06.17 [Oryza sativa (japonica
  misc_feature (1)..(347): Homolog of NCBI NO: 25295723 NR Description: kinesin-like protein [imported] - Arabidopsis
  misc_feature (1)..(347): Homolog of NCBI NO: 30680014 NR Description: kinesin-like protein A, putative [Arabidopsis
  misc_feature (1)..(347): Homolog of NCBI NO: 34849893 NR Description: At4g05190 [Arabidopsis thaliana]
  misc_feature (1)..(347): Homolog of NCBI NO: 15233583 NR Description: kinesin-like protein A (katA) [Arabidopsis
  misc_feature (1)..(347): Homolog of NCBI NO: 10176794 NR Description: kinesin-like protein [Arabidopsis thaliana]
  misc_feature (1)..(347): Homolog of NCBI NO: 18423656 NR Description: kinesin-like protein C (katC) [Arabidopsis
  misc_feature (1)..(347): Homolog of NCBI NO: 18416938 NR Description: kinesin-like protein B (katB) [Arabidopsis
  misc_feature (1)..(347): Homolog of NCBI NO: 33354214 NR Description: kinesin-related protein KLPA-like protein [Oryza
ELKGNIRVFCRVRPLLRFEGDSNGPEGASISFPTSVESTGRSIDLINQGQKLSFSYDKVFDHGASQEDVFVEISQLVQSALDGYKVCIFAYGQTGSGKTYTMMGKPGNDQKGIIPRSLEQIFKTSRFLESQGWNYSMQASMLEIYNETIRDLLAPGRSNSFESSKQCTIKHDPHGNIVSDLTIIDVFGIADVTSLLEKASQSRSVGKTQMNEQSSRSHFVFTLKISGSNENTGQNVQGVLNLIDLAGSERLAKSGSTGDRLKETQSINKSLSALSDVIFAIAKGDDHVPFRNSKLTYLLQPCLGGDSKALMFVNISPEASSVGETICSLRFASRVNACEIGIPRRHT

SEQ ID NO: 14439 - protein, 246 aa, Zea mays subsp. mays
  peptide (1)..(246): Ceres Seq. ID no. 13505048
  misc_feature (1)..(246): Homolog of NCBI NO: 15208457 NR Description: kinesin heavy chain [Zea mays]
  misc_feature (1)..(245): Homolog of NCBI NO: 39546247 NR Description: OSJNBa0089N06.17 [Oryza sativa (japonica
  misc_feature (1)..(246): Homolog of NCBI NO: 25295723 NR Description: kinesin-like protein [imported] - Arabidopsis
  misc_feature (1)..(246): Homolog of NCBI NO: 30680014 NR Description: kinesin-like protein A, putative [Arabidopsis
  misc_feature (1)..(246): Homolog of NCBI NO: 34849893 NR Description: At4g05190 [Arabidopsis thaliana]
  misc_feature (1)..(246): Homolog of NCBI NO: 15233583 NR Description: kinesin-like protein A (katA) [Arabidopsis
  misc_feature (1)..(246): Homolog of NCBI NO: 10176794 NR Description: kinesin-like protein [Arabidopsis thaliana]
  misc_feature (1)..(246): Homolog of NCBI NO: 18423656 NR Description: kinesin-like protein C (katC) [Arabidopsis
  misc_feature (1)..(246): Homolog of NCBI NO: 18416938 NR Description: kinesin-like protein B (katB) [Arabidopsis
  misc_feature (1)..(246): Homolog of NCBI NO: 33354214 NR Description: kinesin-related protein KLPA-like protein [Oryza
MMGKPGNDQKGIIPRSLEQIFKTSRFLESQGWNYSMQASMLEIYNETIRDLLAPGRSNSFESSKQCTIKHDPHGNIVSDLTIIDVFGIADVTSLLEKASQSRSVGKTQMNEQSSRSHFVFTLKISGSNENTGQNVQGVLNLIDLAGSERLAKSGSTGDRLKETQSINKSLSALSDVIFAIAKGDDHVPFRNSKLTYLLQPCLGGDSKALMFVNISPEASSVGETICSLRFASRVNACEIGIPRRHT

SEQ ID NO: 14440 - protein, 245 aa, Zea mays subsp. mays
  peptide (1)..(245): Ceres Seq. ID no. 13505049
  misc_feature (1)..(245): Homolog of NCBI NO: 15208457 NR Description: kinesin heavy chain [Zea mays]
  misc_feature (1)..(244): Homolog of NCBI NO: 39546247 NR Description: OSJNBa0089N06.17 [Oryza sativa (japonica
  misc_feature (1)..(245): Homolog of NCBI NO: 25295723 NR Description: kinesin-like protein [imported] - Arabidopsis
  misc_feature (1)..(245): Homolog of NCBI NO: 30680014 NR Description: kinesin-like protein A, putative [Arabidopsis
  misc_feature (1)..(245): Homolog of NCBI NO: 34849893 NR Description: At4g05190 [Arabidopsis thaliana]
  misc_feature (1)..(245): Homolog of NCBI NO: 15233583 NR Description: kinesin-like protein A (katA) [Arabidopsis
  misc_feature (1)..(245): Homolog of NCBI NO: 10176794 NR Description: kinesin-like protein [Arabidopsis thaliana]
  misc_feature (1)..(245): Homolog of NCBI NO: 18423656 NR Description: kinesin-like protein C (katC) [Arabidopsis
  misc_feature (1)..(245): Homolog of NCBI NO: 18416938 NR Description: kinesin-like protein B (katB) [Arabidopsis
  misc_feature (1)..(245): Homolog of NCBI NO: 33354214 NR Description: kinesin-related protein KLPA-like protein [Oryza
MGKPGNDQKGIIPRSLEQIFKTSRFLESQGWNYSMQASMLEIYNETIRDLLAPGRSNSFESSKQCTIKHDPHGNIVSDLTIIDVFGIADVTSLLEKASQSRSVGKTQMNEQSSRSHFVFTLKISGSNENTGQNVQGVLNLIDLAGSERLAKSGSTGDRLKETQSINKSLSALSDVIFAIAKGDDHVPFRNSKLTYLLQPCLGGDSKALMFVNISPEASSVGETICSLRFASRVNACEIGIPRRHT

SEQ ID NO: 14441 - DNA, 2294 bp, Zea mays subsp. mays
  misc_feature (1)..(2294): Ceres Seq. ID no. 13587778
  misc_feature: MA Experiment ID: 108527 Result: Down-regulated in Transcription
  misc_feature: MA Experiment 108527 PARAMETER Experiment Name: Zm_5mM_NO_P Parameter: Age (day) Value: 8
  misc_feature: MA Experiment 108527 PARAMETER Experiment Name: Zm_5mM_NO_P Parameter: Organism Value: Zea mays
  misc_feature: MA Experiment 108527 PARAMETER Experiment Name: Zm_5mM_NO_P Parameter: Plant Line Value: 35A19
  misc_feature: MA Experiment 108527 PARAMETER Experiment Name: Zm_5mM_NO_P Parameter: Timepoint (hr) Value: 6
  misc_feature: MA Experiment 108527 PARAMETER Experiment Name: Zm_5mM_NO_P Parameter: Tissue Value: Aerial
  misc_feature: MA Experiment 108527 PARAMETER Experiment Name: Zm_5mM_NO_P Parameter: Treatment Value: 5mM NO vs. No Treatment
  misc_feature: MA Experiment ID: 108532 Result: Down-regulated in Transcription
  misc_feature: MA Experiment 108532 PARAMETER Experiment Name: Zm_20uM_KNO3_H-to-L_P Parameter: Age (day) Value: 11
  misc_feature: MA Experiment 108532 PARAMETER Experiment Name: Zm_20uM_KNO3_H-to-L_P Parameter: Organism Value: Zea mays
  misc_feature: MA Experiment 108532 PARAMETER Experiment Name: Zm_20uM_KNO3_H-to-L_P Parameter: Plant Line Value: 35A19
  misc_feature: MA Experiment 108532 PARAMETER Experiment Name: Zm_20uM_KNO3_H-to-L_P Parameter: Timepoint (hr) Value: 16
  misc_feature: MA Experiment 108532 PARAMETER Experiment Name: Zm_20uM_KNO3_H-to-L_P Parameter: Tissue Value: Roots
  misc_feature: MA Experiment 108532 PARAMETER Experiment Name: Zm_20uM_KNO3_H-to-L_P Parameter: Treatment Value: 20uM KNO3 vs. 60mM KNO3
  misc_feature: MA Experiment ID: 108543 Result: Up-regulated in Transcription
  misc_feature: MA Experiment ID: 108544 Result: Up-regulated in Transcription
  misc_feature: MA Experiment ID: 108556 Result: Up-regulated in Transcription
  misc_feature: MA Experiment 108556 PARAMETER Experiment Name: Zm_Drought_P Parameter: Age (day) Value: 9
  misc_feature: MA Experiment 108556 PARAMETER Experiment Name: Zm_Drought_P Parameter: Organism Value: Zea mays
  misc_feature: MA Experiment 108556 PARAMETER Experiment Name: Zm_Drought_P Parameter: Plant Line Value: 35A19
  misc_feature: MA Experiment 108556 PARAMETER Experiment Name: Zm_Drought_P Parameter: Timepoint (hr) Value: 24
  misc_feature: MA Experiment 108556 PARAMETER Experiment Name: Zm_Drought_P Parameter: Tissue Value: Aerial
  misc_feature: MA Experiment 108556 PARAMETER Experiment Name: Zm_Drought_P Parameter: Treatment Value: Drought vs. No Drought
  misc_feature: MA Experiment ID: 108597 Result: Up-regulated in Transcription
  misc_feature: MA Experiment 108597 PARAMETER Experiment Name: Zm_100uM_ABA_P Parameter: Age (day) Value: 9
  misc_feature: MA Experiment 108597 PARAMETER Experiment Name: Zm_100uM_ABA_P Parameter: Organism Value: Zea mays
  misc_feature: MA Experiment 108597 PARAMETER Experiment Name: Zm_100uM_ABA_P Parameter: Plant Line Value: 35A19
  misc_feature: MA Experiment 108597 PARAMETER Experiment Name: Zm_100uM_ABA_P Parameter: Timepoint (hr) Value: 24
  misc_feature: MA Experiment 108597 PARAMETER Experiment Name: Zm_100uM_ABA_P Parameter: Tissue Value: Aerial
  misc_feature: MA Experiment 108597 PARAMETER Experiment Name: Zm_100uM_ABA_P Parameter: Treatment Value: 100uM ABA vs. No Treatment
  misc_feature: MA Experiment ID: 20000480 Result: Up-regulated in Transcription
  misc_feature: MA Experiment 20000480 PARAMETER Experiment Name: Zm_Drought_P Parameter: Age (day) Value: 11
  misc_feature: MA Experiment 20000480 PARAMETER Experiment Name: Zm_Drought_P Parameter: Organism Value: Zea mays
  misc_feature: MA Experiment 20000480 PARAMETER Experiment Name: Zm_Drought_P Parameter: Plant Line Value: 35A19
  misc_feature: MA Experiment 20000480 PARAMETER Experiment Name: Zm_Drought_P Parameter: Timepoint (hr) Value: 72
  misc_feature: MA Experiment 20000480 PARAMETER Experiment Name: Zm_Drought_P Parameter: Tissue Value: Aerial
  misc_feature: MA Experiment 20000480 PARAMETER Experiment Name: Zm_Drought_P Parameter: Treatment Value: Drought vs. No Drought
ttgaccccaacgatcttaacgtcctcaacacgctcttcaccagtctgaattctcctgggcagctcacaggttggcaggcgaatgggggtgatccttgtggccagtcatggaagggcattacttgctcaggatcaggggtcactaaaatccaattacctaacttgtcactcactggaaatttggcctacaacatgaataacttgggttcattagttgagcttgacatgagccaaaataaccttggcggtggaggtcaagtacagtacaatcttcccaatatgaagcttgagaaactcaatcttgcaggaaatcaatttggtggaaatttaccctactcaatttcgacgatgcctaatcttaagtatttaaaccttaatcataaccaactacaaggaaacatcagtgatgtattttccaacctttacagtttgtcagaactggatctgtcctttaattcccttactggtgatctaccacaaagtttcactggattgtcaagcctgaaaaaagtgtatttgcagaacaaccaatttactggtaatatcaatgtcttagccaatctcccccttgaaactttgaatgttgcgaacaaccatttcactggttggattcctagtcagcttaagaagataaacagtctacagactgatggaaattcttggagcacaggaccagcgccacctccacctccatacacagcgccgcctcctcctccaaaccattggaatgctgatggttcatcaagttcatcaagttctggtggaagatctgggataggtggtggaggtgtagcaggaatcattatatcgttgctggttgttggatcagttgttgcatttcttgtgatcaaaagaagaaaacgcaaagctgctatgaaagaacattttgaacagcaccagccattcacttccttcccttcaaatgaagttaaagacatgaagcctgtctgcgaggccaccacagtagacatagagtctttggcttcacctgcttcagttaatctgaaaccacctccgaagatagaacgaaacaaatcatttgatgatgacgatgatttttcaaacaagcttgttgcaaagaaaagtaatataacacctataaatgcaactgtttattcagttgcagatctacagatggcaacagatagctttagcttcgacaaccttgttggagagggtacttttggacgtgtttacagggcacaattcaatgatggaaaggttctggcgatcaagaaattagatagtactgtgatgccatttcaatcatctgatgactttgctgaactggtctcgaacatttcaaaattgcaccatccgaatctgaatgagcttgtgggctattgcatggaacatggccagcacttgcttgtgtatgatttccacaggaatggatcacttcatgatctactccacctttcagatgagtacagcaagccacttagctggaacactcgtatcaagatcgcactcggctctgcccgtgcactggagtaccttcatgaaatatgttctccatccatcatccataagaatttcaagtcgtcaaacattttgctggactcagaattcaatccacacctttcagatgctggacttgcaagctttattcctgatgctgaattccaggcagcagaacaaagtgccggatacactgccccagaagtggacatgaccggtcagtacaccttcaagagtgatgtctacagctttggagttgtcatgcttgaactattgacaggacgtagaccatttgacagctctagacccaggtcagagcagtcacttgtgcggtgggcaacaccccagctgcatgacatcgacgcattggacaggatggtcgatcctgcactcaagggtctatacccagccaaatctctatcccgatttgctgatgtccttgccctgtgtgtccagcctgaaccagaattcaggccaccaatgtcagaggtggtgcaagcattggttcgacttgtgcagagggccaacatgacgaagaggatgcttgatggggatacttctcggcgaccagatgacctggaccaagatttcatatgacaagctgaactcttgtcagattgtatttatttcgttcgactagcggcccaagcaagagacataatcacacaagaggaagaaacagaactctgtcagcttcgccagtacataatcacaagtttttcctggtagcaaagttgtgctatatggttgtactgtgtctacaaaatagtaccttgatcttacgctaatggcatattgttataattctttggtaacttatatgcaaatccccag

SEQ ID NO: 14442 - protein, 684 aa, Zea mays subsp. mays
  peptide (1)..(684): Ceres Seq. ID no. 13587779
  misc_feature (1)..(684): Homolog of NCBI NO: 29367551 NR Description: putative leucine-rich repeat transmembrane
  misc_feature (79)..(410): Homolog of NCBI NO: 37533916 NR Description: putative leucine-rich repeat transmembrane
  misc_feature (406)..(684): Homolog of NCBI NO: 37533916 NR Description: putative leucine-rich repeat transmembrane
  misc_feature (1)..(680): Homolog of NCBI NO: 15220928 NR Description: leucine-rich repeat transmembrane protein kinase putative [Arabidopsis thaliana] >gi|25387064|pir||F96577
  misc_feature (1)..(666): Homolog of NCBI NO: 30683104 NR Description: leucine-rich repeat transmembrane protein kinase, [Arabidopsis thaliana] >gi|9279582|dbj|BAB01040.1|
  misc_feature (1)..(272): Homolog of NCBI NO: 37533916 NR Description: putative leucine-rich repeat transmembrane
  misc_feature (24)..(378): Homolog of NCBI NO: 7489785 NR Description: leucine-rich repeat transmembrane protein kinase
  misc_feature (1)..(683): Homolog of NCBI NO: 15219262 NR Description: leucine-rich repeat transmembrane protein kinase,
  misc_feature (332)..(658): Homolog of NCBI NO: 1931637 NR Description: receptor-associated kinase isolog; 3024-808
  misc_feature (371)..(654): Homolog of NCBI NO: 13897308 NR Description: SERK1 protein [Zea mays]
DPNDLNVLNTLFTSLNSPGQLTGWQANGGDPCGQSWKGITCSGSGVTKIQLPNLSLTGNLAYNMNNLGSLVELDMSQNNLGGGGQVQYNLPNMKLEKLNLAGNQFGGNLPYSISTMPNLKYLNLNHNQLQGNISDVFSNLYSLSELDLSFNSLTGDLPQSFTGLSSLKKVYLQNNQFTGNINVLANLPLETLNVANNHFTGWIPSQLKKINSLQTDGNSWSTGPAPPPPPYTAPPPPPNHWNADGSSSSSSSGGRSGIGGGGVAGIIISLLVVGSVVAFLVIKRRKRKAAMKEHFEQHQPFTSFPSNEVKDMKPVCEATTVDIESLASPASVNLKPPPKIERNKSFDDDDDFSNKLVAKKSNITPINATVYSVADLQMATDSFSFDNLVGEGTFGRVYRAQFNDGKVLAIKKLDSTVMPFQSSDDFAELVSNISKLHHPNLNELVGYCMEHGQHLLVYDFHRNGSLHDLLHLSDEYSKPLSWNTRIKIALGSARALEYLHEICSPSIIHKNFKSSNILLDSEFNPHLSDAGLASFIPDAEFQAAEQSAGYTAPEVDMTGQYTFKSDVYSFGVVMLELLTGRRPFDSSRPRSEQSLVRWATPQLHDIDALDRMVDPALKGLYPAKSLSRFADVLALCVQPEPEFRPPMSEVVQALVRLVQRANMTKRMLDGDTSRRPDDLDQDFI

SEQ ID NO: 14443 - protein, 621 aa, Zea mays subsp. mays
  peptide (1)..(621): Ceres Seq. ID no. 13587780
  misc_feature (1)..(621): Homolog of NCBI NO: 29367551 NR Description: putative leucine-rich repeat transmembrane
  misc_feature (16)..(347): Homolog of NCBI NO: 37533916 NR Description: putative leucine-rich repeat transmembrane
  misc_feature (343)..(621): Homolog of NCBI NO: 37533916 NR Description: putative leucine-rich repeat transmembrane
  misc_feature (1)..(617): Homolog of NCBI NO: 15220928 NR Description: leucine-rich repeat transmembrane protein kinase putative [Arabidopsis thaliana] >gi|25387064|pir||F96577
  misc_feature (1)..(603): Homolog of NCBI NO: 30683104 NR Description: leucine-rich repeat transmembrane protein kinase, [Arabidopsis thaliana] >gi|9279582|dbj|BAB01040.1|
  misc_feature (1)..(209): Homolog of NCBI NO: 37533916 NR Description: putative leucine-rich repeat transmembrane
  misc_feature (1)..(315): Homolog of NCBI NO: 7489785 NR Description: leucine-rich repeat transmembrane protein kinase
  misc_feature (1)..(620): Homolog of NCBI NO: 15219262 NR Description: leucine-rich repeat transmembrane protein kinase,
  misc_feature (269)..(595): Homolog of NCBI NO: 1931637 NR Description: receptor-associated kinase isolog; 3024-808
  misc_feature (308)..(591): Homolog of NCBI NO: 13897308 NR Description: SERK1 protein [Zea mays]
MNNLGSLVELDMSQNNLGGGGQVQYNLPNMKLEKLNLAGNQFGGNLPYSISTMPNLKYLNLNHNQLQGNISDVFSNLYSLSELDLSFNSLTGDLPQSFTGLSSLKKVYLQNNQFTGNINVLANLPLETLNVANNHFTGWIPSQLKKINSLQTDGNSWSTGPAPPPPPYTAPPPPPNHWNADGSSSSSSSGGRSGIGGGGVAGIIISLLVVGSVVAFLVIKRRKRKAAMKEHFEQHQPFTSFPSNEVKDMKPVCEATTVDIESLASPASVNLKPPPKIERNKSFDDDDDFSNKLVAKKSNITPINATVYSVADLQMATDSFSFDNLVGEGTFGRVYRAQFNDGKVLAIKKLDSTVMPFQSSDDFAELVSNISKLHHPNLNELVGYCMEHGQHLLVYDFHRNGSLHDLLHLSDEYSKPLSWNTRIKIALGSARALEYLHEICSPSIIHKNFKSSNILLDSEFNPHLSDAGLASFIPDAEFQAAEQSAGYTAPEVDMTGQYTFKSDVYSFGVVMLELLTGRRPFDSSRPRSEQSLVRWATPQLHDIDALDRMVDPALKGLYPAKSLSRFADVLALCVQPEPEFRPPMSEVVQALVRLVQRANMTKRMLDGDTSRRPDDLDQDFI

SEQ ID NO: 14444 - protein, 610 aa, Zea mays subsp. mays
  peptide (1)..(610): Ceres Seq. ID no. 13587781
  misc_feature (1)..(610): Homolog of NCBI NO: 29367551 NR Description: putative leucine-rich repeat transmembrane
  misc_feature (5)..(336): Homolog of NCBI NO: 37533916 NR Description: putative leucine-rich repeat transmembrane
  misc_feature (332)..(610): Homolog of NCBI NO: 37533916 NR Description: putative leucine-rich repeat transmembrane
  misc_feature (1)..(606): Homolog of NCBI NO: 15220928 NR Description: leucine-rich repeat transmembrane protein kinase putative [Arabidopsis thaliana] >gi|25387064|pir||F96577
  misc_feature (1)..(592): Homolog of NCBI NO: 30683104 NR Description: leucine-rich repeat transmembrane protein kinase, [Arabidopsis thaliana] >gi|9279582|dbj|BAB01040.1|
  misc_feature (1)..(198): Homolog of NCBI NO: 37533916 NR Description: putative leucine-rich repeat transmembrane
  misc_feature (1)..(304): Homolog of NCBI NO: 7489785 NR Description: leucine-rich repeat transmembrane protein kinase
  misc_feature (1)..(609): Homolog of NCBI NO: 15219262 NR Description: leucine-rich repeat transmembrane protein kinase,
  misc_feature (258)..(584): Homolog of NCBI NO: 1931637 NR Description: receptor-associated kinase isolog; 3024-808
  misc_feature (297)..(580): Homolog of NCBI NO: 13897308 NR Description: SERK1 protein [Zea mays]
MSQNNLGGGGQVQYNLPNMKLEKLNLAGNQFGGNLPYSISTMPNLKYLNLNHNQLQGNISDVFSNLYSLSELDLSFNSLTGDLPQSFTGLSSLKKVYLQNNQFTGNINVLANLPLETLNVANNHFTGWIPSQLKKINSLQTDGNSWSTGPAPPPPPYTAPPPPPNHWNADGSSSSSSSGGRSGIGGGGVAGIIISLLVVGSVVAFLVIKRRKRKAAMKEHFEQHQPFTSFPSNEVKDMKPVCEATTVDIESLASPASVNLKPPPKIERNKSFDDDDDFSNKLVAKKSNITPINATVYSVADLQMATDSFSFDNLVGEGTFGRVYRAQFNDGKVLAIKKLDSTVMPFQSSDDFAELVSNISKLHHPNLNELVGYCMEHGQHLLVYDFHRNGSLHDLLHLSDEYSKPLSWNTRIKIALGSARALEYLHEICSPSIIHKNFKSSNILLDSEFNPHLSDAGLASFIPDAEFQAAEQSAGYTAPEVDMTGQYTFKSDVYSFGVVMLELLTGRRPFDSSRPRSEQSLVRWATPQLHDIDALDRMVDPALKGLYPAKSLSRFADVLALCVQPEPEFRPPMSEVVQALVRLVQRANMTKRMLDGDTSRRPDDLDQDFI

SEQ ID NO: 14445 - DNA, 510 bp, Zea mays subsp. mays
  misc_feature (1)..(510): Ceres Seq. ID no. 3623923
  misc_feature: MA Experiment ID: 108522 Result: Up-regulated in Transcription
  misc_feature: MA Experiment 108522 PARAMETER Experiment Name: Zm_42deg_Heat_P Parameter: Age (day) Value: 8
  misc_feature: MA Experiment 108522 PARAMETER Experiment Name: Zm_42deg_Heat_P Parameter: Organism Value: Zea mays
  misc_feature: MA Experiment 108522 PARAMETER Experiment Name: Zm_42deg_Heat_P Parameter: Plant Line Value: 35A19
  misc_feature: MA Experiment 108522 PARAMETER Experiment Name: Zm_42deg_Heat_P Parameter: Temperature (deg C) Value: 42 vs. 22
  misc_feature: MA Experiment 108522 PARAMETER Experiment Name: Zm_42deg_Heat_P Parameter: Timepoint (hr) Value: 1
  misc_feature: MA Experiment 108522 PARAMETER Experiment Name: Zm_42deg_Heat_P Parameter: Tissue Value: Aerial
  misc_feature: MA Experiment ID: 108535 Result: Down-regulated in Transcription
  misc_feature: MA Experiment 108535 PARAMETER Experiment Name: Zm_Meristem_P Parameter: Age (day) Value: 8
  misc_feature: MA Experiment 108535 PARAMETER Experiment Name: Zm_Meristem_P Parameter: Organism Value: Zea mays
  misc_feature: MA Experiment 108535 PARAMETER Experiment Name: Zm_Meristem_P Parameter: Plant Line Value: 35A19
  misc_feature: MA Experiment 108535 PARAMETER Experiment Name: Zm_Meristem_P Parameter: Tissue Value: Root Meristem vs. Above Root Meristem
  misc_feature: MA Experiment ID: 108543 Result: Up-regulated in Transcription
  misc_feature: MA Experiment ID: 108544 Result: Up-regulated in Transcription
  misc_feature: MA Experiment ID: 108546 Result: Down-regulated in Transcription
  misc_feature: MA Experiment 108546 PARAMETER Experiment Name: Zm_Imbibed_Seeds_P Parameter: Age (day) Value: 3 vs. 2
  misc_feature: MA Experiment 108546 PARAMETER Experiment Name: Zm_Imbibed_Seeds_P Parameter: Organism Value: Zea mays
  misc_feature: MA Experiment 108546 PARAMETER Experiment Name: Zm_Imbibed_Seeds_P Parameter: Plant Line Value: 35A19
  misc_feature: MA Experiment 108546 PARAMETER Experiment Name: Zm_Imbibed_Seeds_P Parameter: Tissue Value: Roots vs. Embryo
  misc_feature: MA Experiment ID: 108687 Result: Down-regulated in Transcription
  misc_feature: MA Experiment 108687 PARAMETER Experiment Name: Zm_Embryos-Flowers__P Parameter: Tissue Value: Embryo vs. Aerial+
  misc_feature: MA Experiment ID: 108689 Result: Up-regulated in Transcription
  misc_feature: MA Experiment 108689 PARAMETER Experiment Name: Zm_Drought_Roots_P Parameter: Age (day) Value: 9
  misc_feature: MA Experiment 108689 PARAMETER Experiment Name: Zm_Drought_Roots_P Parameter: Organism Value: Zea mays
  misc_feature: MA Experiment 108689 PARAMETER Experiment Name: Zm_Drought_Roots_P Parameter: Plant Line Value: 35A19
  misc_feature: MA Experiment 108689 PARAMETER Experiment Name: Zm_Drought_Roots_P Parameter: Timepoint (hr) Value: 24
  misc_feature: MA Experiment 108689 PARAMETER Experiment Name: Zm_Drought_Roots_P Parameter: Tissue Value: Roots
  misc_feature: MA Experiment 108689 PARAMETER Experiment Name: Zm_Drought_Roots_P Parameter: Treatment Value: Drought vs. No Drought
  misc_feature: MA Experiment ID: 20000477 Result: Up-regulated in Transcription
  misc_feature: MA Experiment 20000477 PARAMETER Experiment Name: Zm_5mM_SA_P Parameter: Age (day) Value: 10
  misc_feature: MA Experiment 20000477 PARAMETER Experiment Name: Zm_5mM_SA_P Parameter: Organism Value: Zea mays
  misc_feature: MA Experiment 20000477 PARAMETER Experiment Name: Zm_5mM_SA_P Parameter: Plant Line Value: 35A19
  misc_feature: MA Experiment 20000477 PARAMETER Experiment Name: Zm_5mM_SA_P Parameter: Timepoint (hr) Value: 48
  misc_feature: MA Experiment 20000477 PARAMETER Experiment Name: Zm_5mM_SA_P Parameter: Tissue Value: Aerial
  misc_feature: MA Experiment 20000477 PARAMETER Experiment Name: Zm_5mM_SA_P Parameter: Treatment Value: 5mM SA vs. No Treatment
  misc_feature: MA Experiment ID: 20000478 Result: Up-regulated in Transcription
  misc_feature: MA Experiment 20000478 PARAMETER Experiment Name: Zm_5mM_SA_P Parameter: Age (day) Value: 11
  misc_feature: MA Experiment 20000478 PARAMETER Experiment Name: Zm_5mM_SA_P Parameter: Organism Value: Zea mays
  misc_feature: MA Experiment 20000478 PARAMETER Experiment Name: Zm_5mM_SA_P Parameter: Plant Line Value: 35A19
  misc_feature: MA Experiment 20000478 PARAMETER Experiment Name: Zm_5mM_SA_P Parameter: Timepoint (hr) Value: 72
  misc_feature: MA Experiment 20000478 PARAMETER Experiment Name: Zm_5mM_SA_P Parameter: Tissue Value: Aerial
  misc_feature: MA Experiment 20000478 PARAMETER Experiment Name: Zm_5mM_SA_P Parameter: Treatment Value: 5mM SA vs. No Treatment
  misc_feature: MA Experiment ID: 20000532 Result: Up-regulated in Transcription
  misc_feature: MA Experiment 20000532 PARAMETER Experiment Name: Zm_0.001percent_MeJA_P Parameter: Age (day) Value: 10
  misc_feature: MA Experiment 20000532 PARAMETER Experiment Name: Zm_0.001percent_MeJA_P Parameter: Organism Value: Zea mays
  misc_feature: MA Experiment 20000532 PARAMETER Experiment Name: Zm_0.001percent_MeJA_P Parameter: Plant Line Value: 35A19
  misc_feature: MA Experiment 20000532 PARAMETER Experiment Name: Zm_0.001percent_MeJA_P Parameter: Timepoint (hr) Value: 48
  misc_feature: MA Experiment 20000532 PARAMETER Experiment Name: Zm_0.001percent_MeJA_P Parameter: Tissue Value: Aerial
  misc_feature: MA Experiment 20000532 PARAMETER Experiment Name: Zm_0.001percent_MeJA_P Parameter: Treatment Value: 0.001percent MeJA vs. No Treatment
aatatggtggatattcgkgrtgttgctgatgctcttcttctgacttacgaaaagccarargcgtctggacgatacatctgcagttcacatgcaataaaaatttctgatatgataaacatactgaagaccatgtatccgtcttacccttatcccaaaaattttgtggaagatgatgtcaactctgtatacagctctgagaaactgcagaagctggggtggaccttcaagcctatagaggaatccctccgtgacactgttgaatcctacaaggcatttggcatcctgaattgaacatccaactaggactgtttccatctgctgttgcctccgaactcctcctgaataatgtaggcgcagttaaacagcagcagcactgccgatctctttatttttcaatattgktatctagtggttcaggaccaaataagtaggccaggtgctgactgttgtatggtttgkggcctattgkcgttgctaaaaactagaaatgcgcgtmctaatgttgcattg

SEQ ID NO: 14446 - protein, 96 aa, Zea mays subsp. mays
  peptide (1)..(96): Ceres Seq. ID no. 3623924
  misc_feature (1)..(90): Homolog of NCBI NO: 15226134 NR Description: putative cinnamoyl-CoA reductase; protein id: supported by cDNA: 11254. [Arabidopsis thaliana]
  misc_feature (1)..(90): Homolog of NCBI NO: 15226135 NR Description: putative cinnamoyl-CoA reductase; protein id: supported by cDNA: gi_20260487 [Arabidopsis thaliana]
  misc_feature (2)..(95): Homolog of NCBI NO: 6554472 NR Description: putative cinnamoyl-CoA reductase; 14056-15506
  misc_feature (2)..(95): Homolog of NCBI NO: 15223068 NR Description: putative cinnamoyl-CoA reductase; protein id:
  misc_feature (3)..(95): Homolog of NCBI NO: 3341511 NR Description: cinnamoyl-CoA reductase [Saccharum officinarum]
  misc_feature (3)..(95): Homolog of NCBI NO: 9964087 NR Description: cinnamoyl CoA reductase [Lolium perenne]
  misc_feature (3)..(95): Homolog of NCBI NO: 3242328 NR Description: cinnamoyl-CoA reductase [Zea mays]
  misc_feature (3)..(95): Homolog of NCBI NO: 7431410 NR Description: cinnamoyl CoA reductase - maize
  misc_feature (3)..(95): Homolog of NCBI NO: 25140432 NR Description: cinnamoyl CoA reductase [Hordeum vulgare]
  misc_feature (3)..(95): Homolog of NCBI NO: 34905082 NR Description: putative dihydroflavonol 4-reductase [Oryza
  misc_feature (6)..(6): Xaa is any aa, unknown or other
  misc_feature (7)..(7): Xaa is any aa, unknown or other
  misc_feature (20)..(20): Xaa is any aa, unknown or other
NMVDIXXVADALLLTYEKPXASGRYICSSHAIKISDMINILKTMYPSYPYPKNFVEDDVNSVYSSEKLQKLGWTFKPIEESLRDTVESYKAFGILN

SEQ ID NO: 14447 - protein, 95 aa, Zea mays subsp. mays
  peptide (1)..(95): Ceres Seq. ID no. 3623925
  misc_feature (1)..(89): Homolog of NCBI NO: 15226134 NR Description: putative cinnamoyl-CoA reductase; protein id: supported by cDNA: 11254. [Arabidopsis thaliana]
  misc_feature (1)..(89): Homolog of NCBI NO: 15226135 NR Description: putative cinnamoyl-CoA reductase; protein id: supported by cDNA: gi_20260487 [Arabidopsis thaliana]
  misc_feature (1)..(94): Homolog of NCBI NO: 6554472 NR Description: putative cinnamoyl-CoA reductase; 14056-15506
  misc_feature (1)..(94): Homolog of NCBI NO: 15223068 NR Description: putative cinnamoyl-CoA reductase; protein id:
  misc_feature (2)..(94): Homolog of NCBI NO: 3341511 NR Description: cinnamoyl-CoA reductase [Saccharum officinarum]
  misc_feature (2)..(94): Homolog of NCBI NO: 9964087 NR Description: cinnamoyl CoA reductase [Lolium perenne]
  misc_feature (2)..(94): Homolog of NCBI NO: 3242328 NR Description: cinnamoyl-CoA reductase [Zea mays]
  misc_feature (2)..(94): Homolog of NCBI NO: 7431410 NR Description: cinnamoyl CoA reductase - maize
  misc_feature (2)..(94): Homolog of NCBI NO: 25140432 NR Description: cinnamoyl CoA reductase [Hordeum vulgare]
  misc_feature (2)..(94): Homolog of NCBI NO: 34905082 NR Description: putative dihydroflavonol 4-reductase [Oryza
  misc_feature (5)..(5): Xaa is any aa, unknown or other
  misc_feature (6)..(6): Xaa is any aa, unknown or other
  misc_feature (19)..(19): Xaa is any aa, unknown or other
MVDIXXVADALLLTYEKPXASGRYICSSHAIKISDMINILKTMYPSYPYPKNFVEDDVNSVYSSEKLQKLGWTFKPIEESLRDTVESYKAFGILN

SEQ ID NO: 14448 - protein, 60 aa, Zea mays subsp. mays
  peptide (1)..(60): Ceres Seq. ID no. 3623926
  misc_feature (1)..(54): Homolog of NCBI NO: 15226134 NR Description: putative cinnamoyl-CoA reductase; protein id: supported by cDNA: 11254. [Arabidopsis thaliana]
  misc_feature (1)..(54): Homolog of NCBI NO: 15226135 NR Description: putative cinnamoyl-CoA reductase; protein id: supported by cDNA: gi_20260487 [Arabidopsis thaliana]
  misc_feature (1)..(59): Homolog of NCBI NO: 6554472 NR Description: putative cinnamoyl-CoA reductase; 14056-15506
  misc_feature (1)..(59): Homolog of NCBI NO: 15223068 NR Description: putative cinnamoyl-CoA reductase; protein id:
  misc_feature (1)..(59): Homolog of NCBI NO: 3341511 NR Description: cinnamoyl-CoA reductase [Saccharum officinarum]
  misc_feature (1)..(59): Homolog of NCBI NO: 9964087 NR Description: cinnamoyl CoA reductase [Lolium perenne]
  misc_feature (1)..(59): Homolog of NCBI NO: 3242328 NR Description: cinnamoyl-CoA reductase [Zea mays]
  misc_feature (1)..(59): Homolog of NCBI NO: 7431410 NR Description: cinnamoyl CoA reductase - maize
  misc_feature (1)..(59): Homolog of NCBI NO: 25140432 NR Description: cinnamoyl CoA reductase [Hordeum vulgare]
  misc_feature (1)..(59): Homolog of NCBI NO: 34905082 NR Description: putative dihydroflavonol 4-reductase [Oryza
MINILKTMYPSYPYPKNFVEDDVNSVYSSEKLQKLGWTFKPIEESLRDTVESYKAFGILN

SEQ ID NO: 14449 - DNA, 1396 bp, Zea mays subsp. mays
  misc_feature (1)..(1396): Ceres Seq. ID no. 13636262
  misc_feature: MA Experiment ID: 108504 Result: Down-regulated in Transcription
  misc_feature: MA Experiment 108504 PARAMETER Experiment Name: Zm_Drought_P Parameter: Age (day) Value: 8
  misc_feature: MA Experiment 108504 PARAMETER Experiment Name: Zm_Drought_P Parameter: Organism Value: Zea mays
  misc_feature: MA Experiment 108504 PARAMETER Experiment Name: Zm_Drought_P Parameter: Plant Line Value: 35A19
  misc_feature: MA Experiment 108504 PARAMETER Experiment Name: Zm_Drought_P Parameter: Timepoint (hr) Value: 12
  misc_feature: MA Experiment 108504 PARAMETER Experiment Name: Zm_Drought_P Parameter: Tissue Value: Aerial
  misc_feature: MA Experiment 108504 PARAMETER Experiment Name: Zm_Drought_P Parameter: Treatment Value: Drought vs. No Drought
  misc_feature: MA Experiment ID: 108522 Result: Up-regulated in Transcription
  misc_feature: MA Experiment 108522 PARAMETER Experiment Name: Zm_42deg_Heat_P Parameter: Age (day) Value: 8
  misc_feature: MA Experiment 108522 PARAMETER Experiment Name: Zm_42deg_Heat_P Parameter: Organism Value: Zea mays
  misc_feature: MA Experiment 108522 PARAMETER Experiment Name: Zm_42deg_Heat_P Parameter: Plant Line Value: 35A19
  misc_feature: MA Experiment 108522 PARAMETER Experiment Name: Zm_42deg_Heat_P Parameter: Temperature (deg C) Value: 42 vs. 22
  misc_feature: MA Experiment 108522 PARAMETER Experiment Name: Zm_42deg_Heat_P Parameter: Timepoint (hr) Value: 1
  misc_feature: MA Experiment 108522 PARAMETER Experiment Name: Zm_42deg_Heat_P Parameter: Tissue Value: Aerial
  misc_feature: MA Experiment ID: 108523 Result: Up-regulated in Transcription
  misc_feature: MA Experiment 108523 PARAMETER Experiment Name: Zm_42deg_Heat_P Parameter: Age (day) Value: 8
  misc_feature: MA Experiment 108523 PARAMETER Experiment Name: Zm_42deg_Heat_P Parameter: Organism Value: Zea mays
  misc_feature: MA Experiment 108523 PARAMETER Experiment Name: Zm_42deg_Heat_P Parameter: Plant Line Value: 35A19
  misc_feature: MA Experiment 108523 PARAMETER Experiment Name: Zm_42deg_Heat_P Parameter: Temperature (deg C) Value: 42 vs. 22
  misc_feature: MA Experiment 108523 PARAMETER Experiment Name: Zm_42deg_Heat_P Parameter: Timepoint (hr) Value: 6
  misc_feature: MA Experiment 108523 PARAMETER Experiment Name: Zm_42deg_Heat_P Parameter: Tissue Value: Aerial
  misc_feature: MA Experiment ID: 108529 Result: Down-regulated in Transcription
  misc_feature: MA Experiment 108529 PARAMETER Experiment Name: Zm_Imbibed_Seeds_P Parameter: Age (day) Value: 5 vs. 2
  misc_feature: MA Experiment 108529 PARAMETER Experiment Name: Zm_Imbibed_Seeds_P Parameter: Organism Value: Zea mays
  misc_feature: MA Experiment 108529 PARAMETER Experiment Name: Zm_Imbibed_Seeds_P Parameter: Plant Line Value: 35A19
  misc_feature: MA Experiment 108529 PARAMETER Experiment Name: Zm_Imbibed_Seeds_P Parameter: Tissue Value: Roots vs. Embryo
  misc_feature: MA Experiment ID: 108533 Result: Up-regulated in Transcription
  misc_feature: MA Experiment 108533 PARAMETER Experiment Name: Zm_4deg_Cold_P Parameter: Age (hr) Value: 8
  misc_feature: MA Experiment 108533 PARAMETER Experiment Name: Zm_4deg_Cold_P Parameter: Organism Value: Zea mays
  misc_feature: MA Experiment 108533 PARAMETER Experiment Name: Zm_4deg_Cold_P Parameter: Plant Line Value: 35A19
  misc_feature: MA Experiment 108533 PARAMETER Experiment Name: Zm_4deg_Cold_P Parameter: Temperature (deg C) Value: 4 vs. 22
  misc_feature: MA Experiment 108533 PARAMETER Experiment Name: Zm_4deg_Cold_P Parameter: Timepoint (hr) Value: 1
  misc_feature: MA Experiment 108533 PARAMETER Experiment Name: Zm_4deg_Cold_P Parameter: Tissue Value: Aerial
  misc_feature: MA Experiment ID: 108534 Result: Up-regulated in Transcription
  misc_feature: MA Experiment 108534 PARAMETER Experiment Name: Zm_4deg_Cold_P Parameter: Age (hr) Value: 8
  misc_feature: MA Experiment 108534 PARAMETER Experiment Name: Zm_4deg_Cold_P Parameter: Organism Value: Zea mays
  misc_feature: MA Experiment 108534 PARAMETER Experiment Name: Zm_4deg_Cold_P Parameter: Plant Line Value: 35A19
  misc_feature: MA Experiment 108534 PARAMETER Experiment Name: Zm_4deg_Cold_P Parameter: Temperature (deg C) Value: 4 vs. 22
  misc_feature: MA Experiment 108534 PARAMETER Experiment Name: Zm_4deg_Cold_P Parameter: Timepoint (hr) Value: 6
  misc_feature: MA Experiment 108534 PARAMETER Experiment Name: Zm_4deg_Cold_P Parameter: Tissue Value: Aerial
  misc_feature: MA Experiment ID: 108543 Result: Up-regulated in Transcription
  misc_feature: MA Experiment ID: 108599 Result: Down-regulated in Transcription
  misc_feature: MA Experiment 108599 PARAMETER Experiment Name: Zm_RT1_P Parameter: Age (day) Value: 11
  misc_feature: MA Experiment 108599 PARAMETER Experiment Name: Zm_RT1_P Parameter: Organism Value: Zea mays
  misc_feature: MA Experiment 108599 PARAMETER Experiment Name: Zm_RT1_P Parameter: Plant Line Value: rt1 mut vs. rt1 wt
  misc_feature: MA Experiment 108599 PARAMETER Experiment Name: Zm_RT1_P Parameter: Tissue Value: Roots
  misc_feature: MA Experiment ID: 20000478 Result: Down-regulated in Transcription
  misc_feature: MA Experiment 20000478 PARAMETER Experiment Name: Zm_5mM_SA_P Parameter: Age (day) Value: 11
  misc_feature: MA Experiment 20000478 PARAMETER Experiment Name: Zm_5mM_SA_P Parameter: Organism Value: Zea mays
  misc_feature: MA Experiment 20000478 PARAMETER Experiment Name: Zm_5mM_SA_P Parameter: Plant Line Value: 35A19
  misc_feature: MA Experiment 20000478 PARAMETER Experiment Name: Zm_5mM_SA_P Parameter: Timepoint (hr) Value: 72
  misc_feature: MA Experiment 20000478 PARAMETER Experiment Name: Zm_5mM_SA_P Parameter: Tissue Value: Aerial
  misc_feature: MA Experiment 20000478 PARAMETER Experiment Name: Zm_5mM_SA_P Parameter: Treatment Value: 5mM SA vs. No Treatment
  misc_feature: MA Experiment ID: 20000488 Result: Down-regulated in Transcription
  misc_feature: MA Experiment 20000488 PARAMETER Experiment Name: Zm_50mM_NH4NO3_L_to_H_P Parameter: Organism Value: Zea mays
  misc_feature: MA Experiment 20000488 PARAMETER Experiment Name: Zm_50mM_NH4NO3_L_to_H_P Parameter: Timepoint (hr) Value: 8
  misc_feature: MA Experiment 20000488 PARAMETER Experiment Name: Zm_50mM_NH4NO3_L_to_H_P Parameter: Tissue Value: Leaves
  misc_feature: MA Experiment 20000488 PARAMETER Experiment Name: Zm_50mM_NH4NO3_L_to_H_P Parameter: Treatment Value: 50mM NH4NO3 vs. 100mM Mannitol
  misc_feature: MA Experiment ID: 20000533 Result: Down-regulated in Transcription
  misc_feature: MA Experiment 20000533 PARAMETER Experiment Name: Zm_0.001percent_MeJA_P Parameter: Age (day) Value: 11
  misc_feature: MA Experiment 20000533 PARAMETER Experiment Name: Zm_0.001percent_MeJA_P Parameter: Organism Value: Zea mays
  misc_feature: MA Experiment 20000533 PARAMETER Experiment Name: Zm_0.001percent_MeJA_P Parameter: Plant Line Value: 35A19
  misc_feature: MA Experiment 20000533 PARAMETER Experiment Name: Zm_0.001percent_MeJA_P Parameter: Timepoint (hr) Value: 72
  misc_feature: MA Experiment 20000533 PARAMETER Experiment Name: Zm_0.001percent_MeJA_P Parameter: Tissue Value: Aerial
  misc_feature: MA Experiment 20000533 PARAMETER Experiment Name: Zm_0.001percent_MeJA_P Parameter: Treatment Value: 0.001percent MeJA vs. No Treatment
  misc_feature: MA Experiment ID: 20000535 Result: Up-regulated in Transcription
  misc_feature: MA Experiment 20000535 PARAMETER Experiment Name: Zm_Hybrid_Seed_Dev_P Parameter: DAP Value: 30 vs. 12
  misc_feature: MA Experiment 20000535 PARAMETER Experiment Name: Zm_Hybrid_Seed_Dev_P Parameter: Organism Value: Zea mays
  misc_feature: MA Experiment 20000535 PARAMETER Experiment Name: Zm_Hybrid_Seed_Dev_P Parameter: Plant Line Value: 35A19
  misc_feature: MA Experiment 20000535 PARAMETER Experiment Name: Zm_Hybrid_Seed_Dev_P Parameter: Tissue Value: Embryo vs. Unfert Floret
  misc_feature: MA Experiment ID: 20001605 Result: Up-regulated in Transcription
  misc_feature: MA Experiment 20001605 PARAMETER Experiment Name: Zm_50ppm_KNO3_L-to-H_P Parameter: Age (day) Value: 19
  misc_feature: MA Experiment 20001605 PARAMETER Experiment Name: Zm_50ppm_KNO3_L-to-H_P Parameter: Organism Value: Zea mays
  misc_feature: MA Experiment 20001605 PARAMETER Experiment Name: Zm_50ppm_KNO3_L-to-H_P Parameter: Plant Line Value: 35A19
  misc_feature: MA Experiment 20001605 PARAMETER Experiment Name: Zm_50ppm_KNO3_L-to-H_P Parameter: Timepoint (hr) Value: 4
  misc_feature: MA Experiment 20001605 PARAMETER Experiment Name: Zm_50ppm_KNO3_L-to-H_P Parameter: Tissue Value: Shoots
  misc_feature: MA Experiment 20001605 PARAMETER Experiment Name: Zm_50ppm_KNO3_L-to-H_P Parameter: Treatment Value: 50ppm KNO3 vs. 50ppm KCl
caattaaccctcactaaagggaacaaaagctggagctccaccgcggtggcggccgctctagaactagtggatcccccgggctgcaggaattcgcacgagaccattacctagaacatcctaatcgaaaaaagttccatatccaacacacacagcaacgctcgctcggcactgtcactagctagttgctctactagagggcgggtatagagctgcctgcaatccgccgctgagaagggaggatcggaagcgacgatgaggtcgtttgctcctgtctttctgtcggcggtcgtggcctggctggagctggcgggcaccgcgcagggcggcaacttctaccaggacacagagatgacctggggcgatggccgcggcaaggtagtggacggcgggcgcgggctggacctgacgctggaccgcacgtccggctccgggttccagtccaagagcgagtacctgttcggcaagatcgacatgcagatcaagctggtgccaggcaactccgctggcacggtcaccaccttctacctgtcgtccccagggcgacgcgcacgacgagatcgacttcgagttcctgggcaacgtgagcggggagccctacacgctgcacaccaacgtgttcacgcgcggacagggccagcgggagcagcagttccgcctctggttcgaccctaccactgccttccacacctactccatcctgtggaacccgcagcacgtgatcttcgcggtggacggcaccccggtgcgggacttcaagaaccacgaggcgcgcggggtggcgttcccgaggatgcagcccatgaggctgtacgccagcctgtggaacgccgacgactgggccacgcagggcgggcgcgtcaaggcggactggtccaaggcccccttcgtcgcctccttccgcggtttcagcgccgacgcctgcgtctgggacggcggcaggcagcgctgccctgagggcaccatggaggccgccgccgtcgcgggtgccggctccggccgcggctggtggaaccagcagctcagcgacatgagctaccgccgcatgcgctgggtgcagcgcaagttcatgatctacaactactgcgccgacgccaagcgcttcccgcagggcgtgcccgccgagtgcaagctccggtgagggagcgaggtttgttgggacgtccgtggggcatcaaaaccaagcacgatccctagtcgtggaaagtagaaaccaggcatcgattcgatcgtcgtcgacggtcttagtagtagctacttatttcgcagtgggcgatgaaagaatggtgtcatgtaaatgtagctctagtcgtgtcgcattctttgatttgttgtttcagcagcaccggatgtacaagtattgagtttgggctagcaagaataagtaatctttttcggc

SEQ ID NO: 14450 - protein, 233 aa, Zea mays subsp. mays
  peptide (1)..(233): Ceres Seq. ID no. 13636263
  misc_feature (27)..(96): Pfam Name: Glycosyl hydrolases family 16 Pfam Description: Glycosyl hydrolases family 16
  misc_feature (27)..(96): Pfam Name: Glycosyl hydrolases family 16 Pfam Description: Glycosyl hydrolases family 16
  misc_feature (27)..(96): Pfam Name: Glycosyl hydrolases family 16 Pfam Description: Glycosyl hydrolases family 16
  misc_feature (26)..(96): Homolog of NCBI NO: 29500891 NR Description: putative xyloglucan endotransglycosylase [Cucumis >gi|29500899|emb|CAD87533.1| putative xyloglucan
  misc_feature (12)..(96): Homolog of NCBI NO: 7447413 NR Description: xyloglucan endo-1,4-beta-D-glucanase (EC 3.2.1.-) barley >gi|1890577|emb|CAA63663.1| xyloglucan
  misc_feature (5)..(81): Homolog of NCBI NO: 14330332 NR Description: Xet1 protein [Festuca pratensis]
  misc_feature (9)..(96): Homolog of NCBI NO: 8886867 NR Description: xyloglucan endotransglycosylase XET2 [Asparagus
  misc_feature (1)..(96): Homolog of NCBI NO: 8886865 NR Description: xyloglucan endotransglycosylase XET1 [Asparagus
  misc_feature (5)..(81): Homolog of NCBI NO: 14330332 NR Description: Xet1 protein [Festuca pratensis]
  misc_feature (1)..(96): Homolog of NCBI NO: 8886865 NR Description: xyloglucan endotransglycosylase XET1 [Asparagus
  misc_feature (9)..(96): Homolog of NCBI NO: 8886867 NR Description: xyloglucan endotransglycosylase XET2 [Asparagus
  misc_feature (5)..(81): Homolog of NCBI NO: 14330332 NR Description: Xet1 protein [Festuca pratensis]
  misc_feature (12)..(96): Homolog of NCBI NO: 7447413 NR Description: xyloglucan endo-1,4-beta-D-glucanase (EC 3.2.1.-) barley >gi|1890577|emb|CAA63663.1| xyloglucan
  misc_feature (26)..(96): Homolog of NCBI NO: 29500891 NR Description: putative xyloglucan endotransglycosylase [Cucumis >gi|29500899|emb|CAD87533.1| putative xyloglucan
  misc_feature (7)..(96): Homolog of NCBI NO: 22947852 NR Description: xyloglucan endotransglycosylase [Malus x
  misc_feature (1)..(96): Homolog of NCBI NO: 17064792 NR Description: xyloglucan endo-1, 4-beta-D-glucanase (XTR-6)
  misc_feature (1)..(96): Homolog of NCBI NO: 15235997 NR Description: xyloglucan endotransglycosylase (XTR-6)
  misc_feature (6)..(96): Homolog of NCBI NO: 15242781 NR Description: xyloglucan endotransglycosylase (TCH4)
  misc_feature (9)..(96): Homolog of NCBI NO: 7447412 NR Description: xyloglucan endo-1,4-beta-D-glucanase (EC 3.2.1.-) barley >gi|1890575|emb|CAA63662.1| xyloglucan
  misc_feature (26)..(96): Homolog of NCBI NO: 29500891 NR Description: putative xyloglucan endotransglycosylase [Cucumis >gi|29500899|emb|CAD87533.1| putative xyloglucan
  misc_feature (7)..(96): Homolog of NCBI NO: 22947852 NR Description: xyloglucan endotransglycosylase [Malus x
  misc_feature (1)..(96): Homolog of NCBI NO: 17064792 NR Description: xyloglucan endo-1, 4-beta-D-glucanase (XTR-6)
  misc_feature (1)..(96): Homolog of NCBI NO: 15235997 NR Description: xyloglucan endotransglycosylase (XTR-6)
  misc_feature (6)..(96): Homolog of NCBI NO: 15242781 NR Description: xyloglucan endotransglycosylase (TCH4)
  misc_feature (9)..(96): Homolog of NCBI NO: 7447412 NR Description: xyloglucan endo-1,4-beta-D-glucanase (EC 3.2.1.-) barley >gi|1890575|emb|CAA63662.1| xyloglucan
  misc_feature (1)..(96): Homolog of NCBI NO: 8886865 NR Description: xyloglucan endotransglycosylase XET1 [Asparagus
  misc_feature (9)..(96): Homolog of NCBI NO: 8886867 NR Description: xyloglucan endotransglycosylase XET2 [Asparagus
  misc_feature (12)..(96): Homolog of NCBI NO: 7447413 NR Description: xyloglucan endo-1,4-beta-D-glucanase (EC 3.2.1.-) barley >gi|1890577|emb|CAA63663.1| xyloglucan
  misc_feature (9)..(96): Homolog of NCBI NO: 7447412 NR Description: xyloglucan endo-1,4-beta-D-glucanase (EC 3.2.1.-) barley >gi|1890575|emb|CAA63662.1| xyloglucan
  misc_feature (6)..(96): Homolog of NCBI NO: 15242781 NR Description: xyloglucan endotransglycosylase (TCH4)
  misc_feature (1)..(96): Homolog of NCBI NO: 15235997 NR Description: xyloglucan endotransglycosylase (XTR-6)
  misc_feature (1)..(96): Homolog of NCBI NO: 17064792 NR Description: xyloglucan endo-1, 4-beta-D-glucanase (XTR-6)
  misc_feature (7)..(96): Homolog of NCBI NO: 22947852 NR Description: xyloglucan endotransglycosylase [Malus x
MRSFAPVFLSAVVAWLELAGTAQGGNFYQDTEMTWGDGRGKVVDGGRGLDLTLDRTSGSGFQSKSEYLFGKIDMQIKLVPGNSAGTVTTFYLSSPGRRARRDRLRVPGQRERGALHAAHQRVHARTGPAGAAVPPLVRPYHCLPHLLHPVEPAARDLRGGRHPGAGLQEPRGARGGVPEDAAHEAVRQPVERRRLGHAGRARQGGLVQGPLRRLLPRFQRRRLRLGRRQAALP

SEQ ID NO: 14451 - protein, 201 aa, Zea mays subsp. mays
  peptide (1)..(201): Ceres Seq. ID no. 13636264
  misc_feature (1)..(64): Pfam Name: Glycosyl hydrolases family 16 Pfam Description: Glycosyl hydrolases family 16
  misc_feature (1)..(64): Pfam Name: Glycosyl hydrolases family 16 Pfam Description: Glycosyl hydrolases family 16
  misc_feature (1)..(64): Pfam Name: Glycosyl hydrolases family 16 Pfam Description: Glycosyl hydrolases family 16
  misc_feature (1)..(64): Homolog of NCBI NO: 7447413 NR Description: xyloglucan endo-1,4-beta-D-glucanase (EC 3.2.1.-) barley >gi|1890577|emb|CAA63663.1| xyloglucan
  misc_feature (1)..(49): Homolog of NCBI NO: 14330332 NR Description: Xet1 protein [Festuca pratensis]
  misc_feature (1)..(64): Homolog of NCBI NO: 8886867 NR Description: xyloglucan endotransglycosylase XET2 [Asparagus
  misc_feature (1)..(64): Homolog of NCBI NO: 8886865 NR Description: xyloglucan endotransglycosylase XET1 [Asparagus
  misc_feature (1)..(64): Homolog of NCBI NO: 7447412 NR Description: xyloglucan endo-1,4-beta-D-glucanase (EC 3.2.1.-) barley >gi|1890575|emb|CAA63662.1| xyloglucan
  misc_feature (1)..(49): Homolog of NCBI NO: 14330332 NR Description: Xet1 protein [Festuca pratensis]
  misc_feature (1)..(64): Homolog of NCBI NO: 8886865 NR Description: xyloglucan endotransglycosylase XET1 [Asparagus
  misc_feature (1)..(64): Homolog of NCBI NO: 8886867 NR Description: xyloglucan endotransglycosylase XET2 [Asparagus
  misc_feature (1)..(49): Homolog of NCBI NO: 14330332 NR Description: Xet1 protein [Festuca pratensis]
  misc_feature (1)..(64): Homolog of NCBI NO: 7447413 NR Description: xyloglucan endo-1,4-beta-D-glucanase (EC 3.2.1.-) barley >gi|1890577|emb|CAA63663.1| xyloglucan
  misc_feature (1)..(64): Homolog of NCBI NO: 29500891 NR Description: putative xyloglucan endotransglycosylase [Cucumis >gi|29500899|emb|CAD87533.1| putative xyloglucan
  misc_feature (1)..(64): Homolog of NCBI NO: 22947852 NR Description: xyloglucan endotransglycosylase [Malus x
  misc_feature (1)..(64): Homolog of NCBI NO: 17064792 NR Description: xyloglucan endo-1, 4-beta-D-glucanase (XTR-6)
  misc_feature (1)..(64): Homolog of NCBI NO: 15235997 NR Description: xyloglucan endotransglycosylase (XTR-6)
  misc_feature (1)..(64): Homolog of NCBI NO: 15242781 NR Description: xyloglucan endotransglycosylase (TCH4)
  misc_feature (1)..(64): Homolog of NCBI NO: 7447412 NR Description: xyloglucan endo-1,4-beta-D-glucanase (EC 3.2.1.-) barley >gi|1890575|emb|CAA63662.1| xyloglucan
  misc_feature (1)..(64): Homolog of NCBI NO: 29500891 NR Description: putative xyloglucan endotransglycosylase [Cucumis >gi|29500899|emb|CAD87533.1| putative xyloglucan
  misc_feature (1)..(64): Homolog of NCBI NO: 22947852 NR Description: xyloglucan endotransglycosylase [Malus x
  misc_feature (1)..(64): Homolog of NCBI NO: 17064792 NR Description: xyloglucan endo-1, 4-beta-D-glucanase (XTR-6)
  misc_feature (1)..(64): Homolog of NCBI NO: 15235997 NR Description: xyloglucan endotransglycosylase (XTR-6)
  misc_feature (1)..(64): Homolog of NCBI NO: 15242781 NR Description: xyloglucan endotransglycosylase (TCH4)
  misc_feature (1)..(64): Homolog of NCBI NO: 7447412 NR Description: xyloglucan endo-1,4-beta-D-glucanase (EC 3.2.1.-) barley >gi|1890575|emb|CAA63662.1| xyloglucan
  misc_feature (1)..(64): Homolog of NCBI NO: 8886865 NR Description: xyloglucan endotransglycosylase XET1 [Asparagus
  misc_feature (1)..(64): Homolog of NCBI NO: 8886867 NR Description: xyloglucan endotransglycosylase XET2 [Asparagus
  misc_feature (1)..(64): Homolog of NCBI NO: 7447413 NR Description: xyloglucan endo-1,4-beta-D-glucanase (EC 3.2.1.-) barley >gi|1890577|emb|CAA63663.1| xyloglucan
  misc_feature (1)..(64): Homolog of NCBI NO: 15242781 NR Description: xyloglucan endotransglycosylase (TCH4)
  misc_feature (1)..(64): Homolog of NCBI NO: 15235997 NR Description: xyloglucan endotransglycosylase (XTR-6)
  misc_feature (1)..(64): Homolog of NCBI NO: 17064792 NR Description: xyloglucan endo-1, 4-beta-D-glucanase (XTR-6)
  misc_feature (1)..(64): Homolog of NCBI NO: 22947852 NR Description: xyloglucan endotransglycosylase [Malus x
  misc_feature (1)..(64): Homolog of NCBI NO: 29500891 NR Description: putative xyloglucan endotransglycosylase [Cucumis >gi|29500899|emb|CAD87533.1| putative xyloglucan
MTWGDGRGKVVDGGRGLDLTLDRTSGSGFQSKSEYLFGKIDMQIKLVPGNSAGTVTTFYLSSPGRRARRDRLRVPGQRERGALHAAHQRVHARTGPAGAAVPPLVRPYHCLPHLLHPVEPAARDLRGGRHPGAGLQEPRGARGGVPEDAAHEAVRQPVERRRLGHAGRARQGGLVQGPLRRLLPRFQRRRLRLGRRQAALP

SEQ ID NO: 14452 - protein, 160 aa, Zea mays subsp. mays
  peptide (1)..(160): Ceres Seq. ID no. 13636265
  misc_feature (1)..(23): Homolog of NCBI NO: 7447413 NR Description: xyloglucan endo-1,4-beta-D-glucanase (EC 3.2.1.-) barley >gi|1890577|emb|CAA63663.1| xyloglucan
  misc_feature (1)..(23): Homolog of NCBI NO: 8886867 NR Description: xyloglucan endotransglycosylase XET2 [Asparagus
  misc_feature (1)..(23): Homolog of NCBI NO: 8886865 NR Description: xyloglucan endotransglycosylase XET1 [Asparagus
  misc_feature (1)..(23): Homolog of NCBI NO: 7447412 NR Description: xyloglucan endo-1,4-beta-D-glucanase (EC 3.2.1.-) barley >gi|1890575|emb|CAA63662.1| xyloglucan
  misc_feature (1)..(23): Homolog of NCBI NO: 15242781 NR Description: xyloglucan endotransglycosylase (TCH4)
  misc_feature (1)..(23): Homolog of NCBI NO: 15235997 NR Description: xyloglucan endotransglycosylase (XTR-6)
  misc_feature (1)..(23): Homolog of NCBI NO: 17064792 NR Description: xyloglucan endo-1, 4-beta-D-glucanase (XTR-6)
  misc_feature (1)..(23): Homolog of NCBI NO: 22947852 NR Description: xyloglucan endotransglycosylase [Malus x
  misc_feature (1)..(23): Homolog of NCBI NO: 29500891 NR Description: putative xyloglucan endotransglycosylase [Cucumis >gi|29500899|emb|CAD87533.1| putative xyloglucan
  misc_feature (1)..(21): Homolog of NCBI NO: 28804632 NR Description: xyloglucan endotransglycosylase [Pyrus communis]
  misc_feature (1)..(23): Homolog of NCBI NO: 7447413 NR Description: xyloglucan endo-1,4-beta-D-glucanase (EC 3.2.1.-) barley >gi|1890577|emb|CAA63663.1| xyloglucan
  misc_feature (1)..(23): Homolog of NCBI NO: 8886867 NR Description: xyloglucan endotransglycosylase XET2 [Asparagus
  misc_feature (1)..(23): Homolog of NCBI NO: 8886865 NR Description: xyloglucan endotransglycosylase XET1 [Asparagus
  misc_feature (1)..(23): Homolog of NCBI NO: 7447412 NR Description: xyloglucan endo-1,4-beta-D-glucanase (EC 3.2.1.-) barley >gi|1890575|emb|CAA63662.1| xyloglucan
  misc_feature (1)..(23): Homolog of NCBI NO: 15242781 NR Description: xyloglucan endotransglycosylase (TCH4)
  misc_feature (1)..(23): Homolog of NCBI NO: 15235997 NR Description: xyloglucan endotransglycosylase (XTR-6)
  misc_feature (1)..(23): Homolog of NCBI NO: 17064792 NR Description: xyloglucan endo-1, 4-beta-D-glucanase (XTR-6)
  misc_feature (1)..(23): Homolog of NCBI NO: 22947852 NR Description: xyloglucan endotransglycosylase [Malus x
  misc_feature (1)..(23): Homolog of NCBI NO: 29500891 NR Description: putative xyloglucan endotransglycosylase [Cucumis >gi|29500899|emb|CAD87533.1| putative xyloglucan
  misc_feature (1)..(21): Homolog of NCBI NO: 28804632 NR Description: xyloglucan endotransglycosylase [Pyrus communis]
  misc_feature (1)..(23): Homolog of NCBI NO: 7447413 NR Description: xyloglucan endo-1,4-beta-D-glucanase (EC 3.2.1.-) barley >gi|1890577|emb|CAA63663.1| xyloglucan
  misc_feature (1)..(23): Homolog of NCBI NO: 8886867 NR Description: xyloglucan endotransglycosylase XET2 [Asparagus
  misc_feature (1)..(23): Homolog of NCBI NO: 8886865 NR Description: xyloglucan endotransglycosylase XET1 [Asparagus
  misc_feature (1)..(23): Homolog of NCBI NO: 7447412 NR Description: xyloglucan endo-1,4-beta-D-glucanase (EC 3.2.1.-) barley >gi|1890575|emb|CAA63662.1| xyloglucan
  misc_feature (1)..(23): Homolog of NCBI NO: 15242781 NR Description: xyloglucan endotransglycosylase (TCH4)
  misc_feature (1)..(23): Homolog of NCBI NO: 15235997 NR Description: xyloglucan endotransglycosylase (XTR-6)
  misc_feature (1)..(23): Homolog of NCBI NO: 17064792 NR Description: xyloglucan endo-1, 4-beta-D-glucanase (XTR-6)
  misc_feature (1)..(23): Homolog of NCBI NO: 22947852 NR Description: xyloglucan endotransglycosylase [Malus x
  misc_feature (1)..(23): Homolog of NCBI NO: 29500891 NR Description: putative xyloglucan endotransglycosylase [Cucumis >gi|29500899|emb|CAD87533.1| putative xyloglucan
  misc_feature (1)..(21): Homolog of NCBI NO: 28804632 NR Description: xyloglucan endotransglycosylase [Pyrus communis]
MQIKLVPGNSAGTVTTFYLSSPGRRARRDRLRVPGQRERGALHAAHQRVHARTGPAGAAVPPLVRPYHCLPHLLHPVEPAARDLRGGRHPGAGLQEPRGARGGVPEDAAHEAVRQPVERRRLGHAGRARQGGLVQGPLRRLLPRFQRRRLRLGRRQAALP

SEQ ID NO: 14453 - DNA, 2328 bp, Zea mays subsp. mays; identical to SEQ ID NO: 14429
  misc_feature (1)..(2328): Ceres Seq. ID no. 13635296
  misc_feature: MA Experiment ID: 108543 Result: Up-regulated in Transcription
  misc_feature: MA Experiment ID: 20000487 Result: Up-regulated in Transcription
  misc_feature: MA Experiment 20000487 PARAMETER Experiment Name: Zm_50mM_NH4NO3_L_to_H_P Parameter: Organism Value: Zea mays
  misc_feature: MA Experiment 20000487 PARAMETER Experiment Name: Zm_50mM_NH4NO3_L_to_H_P Parameter: Timepoint (hr) Value: 4
  misc_feature: MA Experiment 20000487 PARAMETER Experiment Name: Zm_50mM_NH4NO3_L_to_H_P Parameter: Tissue Value: Leaves
  misc_feature: MA Experiment 20000487 PARAMETER Experiment Name: Zm_50mM_NH4NO3_L_to_H_P Parameter: Treatment Value: 50mM NH4NO3 vs. 100mM Mannitol
  misc_feature: MA Experiment ID: 20000535 Result: Up-regulated in Transcription
  misc_feature: MA Experiment 20000535 PARAMETER Experiment Name: Zm_Hybrid_Seed_Dev_P Parameter: DAP Value: 30 vs. 12
  misc_feature: MA Experiment 20000535 PARAMETER Experiment Name: Zm_Hybrid_Seed_Dev_P Parameter: Organism Value: Zea mays
  misc_feature: MA Experiment 20000535 PARAMETER Experiment Name: Zm_Hybrid_Seed_Dev_P Parameter: Plant Line Value: 35A19
  misc_feature: MA Experiment 20000535 PARAMETER Experiment Name: Zm_Hybrid_Seed_Dev_P Parameter: Tissue Value: Embryo vs. Unfert Floret
  misc_feature: MA Experiment ID: 20000633 Result: Down-regulated in Transcription
  misc_feature: MA Experiment 20000633 PARAMETER Experiment Name: Zm_Herbicide-Treatments_P Parameter: Timepoint (hr) Value: 4
  misc_feature: MA Experiment 20000633 PARAMETER Experiment Name: Zm_Herbicide-Treatments_P Parameter: Tissue Value: Aerial
  misc_feature: MA Experiment 20000633 PARAMETER Experiment Name: Zm_Herbicide-Treatments_P Parameter: Treatment Value: Trimec vs. No Treatment
  misc_feature: MA Experiment ID: 20001613 Result: Up-regulated in Transcription
  misc_feature: MA Experiment 20001613 PARAMETER Experiment Name: Zm_50ppm_KNO3_L-to-H_P Parameter: Age (day) Value: 20
  misc_feature: MA Experiment 20001613 PARAMETER Experiment Name: Zm_50ppm_KNO3_L-to-H_P Parameter: Organism Value: Zea mays
  misc_feature: MA Experiment 20001613 PARAMETER Experiment Name: Zm_50ppm_KNO3_L-to-H_P Parameter: Plant Line Value: 35A19
  misc_feature: MA Experiment 20001613 PARAMETER Experiment Name: Zm_50ppm_KNO3_L-to-H_P Parameter: Timepoint (hr) Value: 24
  misc_feature: MA Experiment 20001613 PARAMETER Experiment Name: Zm_50ppm_KNO3_L-to-H_P Parameter: Tissue Value: Roots
  misc_feature: MA Experiment 20001613 PARAMETER Experiment Name: Zm_50ppm_KNO3_L-to-H_P Parameter: Treatment Value: 50ppm KNO3 vs. 50ppm KCl

SEQ ID NO: 14454 - protein, 676 aa, Zea mays subsp. mays; identical to SEQ ID NO: 14430
  peptide (1)..(676): Ceres Seq. ID no. 15220344
  misc_feature (324)..(517): Pfam Name: ATP synthase alpha/beta family, Pfam Description: ATP synthase alpha/beta family,
  misc_feature (324)..(517): Pfam Name: ATP synthase alpha/beta family, Pfam Description: ATP synthase alpha/beta family,
  misc_feature (324)..(517): Pfam Name: ATP synthase alpha/beta family, Pfam Description: ATP synthase alpha/beta family,
  misc_feature (107)..(674): Homolog of NCBI NO: 137460 NR Description: Vacuolar ATP synthase catalytic subunit A
  misc_feature (107)..(675): Homolog of NCBI NO: 11527563 NR Description: vacuolar proton-ATPase [Hordeum vulgare subsp.
  misc_feature (107)..(674): Homolog of NCBI NO: 401322 NR Description: Vacuolar ATP synthase catalytic subunit A
  misc_feature (107)..(674): Homolog of NCBI NO: 3169287 NR Description: vacuolar H+-ATPase catalytic subunit [Gossypium
  misc_feature (107)..(674): Homolog of NCBI NO: 2506211 NR Description: Vacuolar ATP synthase catalytic subunit A
  misc_feature (107)..(674): Homolog of NCBI NO: 2493122 NR Description: Vacuolar ATP synthase catalytic subunit A
  misc_feature (107)..(674): Homolog of NCBI NO: 12585490 NR Description: Vacuolar ATP synthase catalytic subunit A
  misc_feature (107)..(674): Homolog of NCBI NO: 15982954 NR Description: V-ATPase catalytic subunit A [Prunus persica]
  misc_feature (107)..(674): Homolog of NCBI NO: 3169287 NR Description: vacuolar H+-ATPase catalytic subunit [Gossypium
  misc_feature (107)..(674): Homolog of NCBI NO: 401322 NR Description: Vacuolar ATP synthase catalytic subunit A
  misc_feature (107)..(675): Homolog of NCBI NO: 11527563 NR Description: vacuolar proton-ATPase [Hordeum vulgare subsp.
  misc_feature (107)..(674): Homolog of NCBI NO: 137460 NR Description: Vacuolar ATP synthase catalytic subunit A
  misc_feature (107)..(674): Homolog of NCBI NO: 2506211 NR Description: Vacuolar ATP synthase catalytic subunit A
  misc_feature (107)..(674): Homolog of NCBI NO: 3169287 NR Description: vacuolar H+-ATPase catalytic subunit [Gossypium
  misc_feature (107)..(674): Homolog of NCBI NO: 401322 NR Description: Vacuolar ATP synthase catalytic subunit A
  misc_feature (107)..(675): Homolog of NCBI NO: 11527563 NR Description: vacuolar proton-ATPase [Hordeum vulgare subsp.
  misc_feature (107)..(674): Homolog of NCBI NO: 137460 NR Description: Vacuolar ATP synthase catalytic subunit A
  misc_feature (107)..(674): Homolog of NCBI NO: 27884018 NR Description: vacuolar H+-ATPase A2 subunit isoform; V-ATPase
  misc_feature (107)..(674): Homolog of NCBI NO: 27883932 NR Description: vacuolar H+-ATPase A1 subunit isoform; V-ATPase
  misc_feature (107)..(674): Homolog of NCBI NO: 15982954 NR Description: V-ATPase catalytic subunit A [Prunus persica]
  misc_feature (107)..(674): Homolog of NCBI NO: 12585490 NR Description: Vacuolar ATP synthase catalytic subunit A
  misc_feature (107)..(674): Homolog of NCBI NO: 2493122 NR Description: Vacuolar ATP synthase catalytic subunit A
  misc_feature (107)..(674): Homolog of NCBI NO: 2506211 NR Description: Vacuolar ATP synthase catalytic subunit A
  misc_feature (107)..(674): Homolog of NCBI NO: 27883932 NR Description: vacuolar H+-ATPase A1 subunit isoform; V-ATPase
  misc_feature (107)..(674): Homolog of NCBI NO: 27884018 NR Description: vacuolar H+-ATPase A2 subunit isoform; V-ATPase
  misc_feature (107)..(674): Homolog of NCBI NO: 2493122 NR Description: Vacuolar ATP synthase catalytic subunit A
  misc_feature (107)..(674): Homolog of NCBI NO: 12585490 NR Description: Vacuolar ATP synthase catalytic subunit A
  misc_feature (107)..(674): Homolog of NCBI NO: 15982954 NR Description: V-ATPase catalytic subunit A [Prunus persica]
  misc_feature (107)..(674): Homolog of NCBI NO: 27883932 NR Description: vacuolar H+-ATPase A1 subunit isoform; V-ATPase
  misc_feature (107)..(674): Homolog of NCBI NO: 27884018 NR Description: vacuolar H+-ATPase A2 subunit isoform; V-ATPase
  misc_feature (160)..(160): Xaa is any aa, unknown or other
  misc_feature (436)..(436): Xaa is any aa, unknown or other
  misc_feature (448)..(448): Xaa is any aa, unknown or other
  misc_feature (450)..(450): Xaa is any aa, unknown or other
  misc_feature (457)..(457): Xaa is any aa, unknown or other
  misc_feature (465)..(465): Xaa is any aa, unknown or other
  misc_feature (469)..(469): Xaa is any aa, unknown or other
  misc_feature (479)..(479): Xaa is any aa, unknown or other
  misc_feature (519)..(519): Xaa is any aa, unknown or other
  misc_feature (521)..(521): Xaa is any aa, unknown or other
  misc_feature (523)..(523): Xaa is any aa, unknown or other
  misc_feature (524)..(524): Xaa is any aa, unknown or other
  misc_feature (536)..(536): Xaa is any aa, unknown or other
  misc_feature (545)..(545): Xaa is any aa, unknown or other
  misc_feature (555)..(555): Xaa is any aa, unknown or other
  misc_feature (564)..(564): Xaa is any aa, unknown or other
  misc_feature (570)..(570): Xaa is any aa, unknown or other
  misc_feature (571)..(571): Xaa is any aa, unknown or other
  misc_feature (581)..(581): Xaa is any aa, unknown or other
  misc_feature (649)..(649): Xaa is any aa, unknown or other
  misc_feature (660)..(660): Xaa is any aa, unknown or other
  misc_feature (661)..(661): Xaa is any aa, unknown or other
  misc_feature (662)..(662): Xaa is any aa, unknown or other
  misc_feature (676)..(676): Xaa is any aa, unknown or other

SEQ ID NO: 14455 - protein, 601 aa, Zea mays subsp. mays; identical to SEQ ID NO: 14431
  peptide (1)..(601): Ceres Seq. ID no. 15220345
  misc_feature (249)..(442): Pfam Name: ATP synthase alpha/beta family, Pfam Description: ATP synthase alpha/beta family,
  misc_feature (249)..(442): Pfam Name: ATP synthase alpha/beta family, Pfam Description: ATP synthase alpha/beta family,
  misc_feature (249)..(442): Pfam Name: ATP synthase alpha/beta family, Pfam Description: ATP synthase alpha/beta family,
  misc_feature (32)..(599): Homolog of NCBI NO: 137460 NR Description: Vacuolar ATP synthase catalytic subunit A
  misc_feature (32)..(600): Homolog of NCBI NO: 11527563 NR Description: vacuolar proton-ATPase [Hordeum vulgare subsp.
  misc_feature (32)..(599): Homolog of NCBI NO: 401322 NR Description: Vacuolar ATP synthase catalytic subunit A
  misc_feature (32)..(599): Homolog of NCBI NO: 3169287 NR Description: vacuolar H+-ATPase catalytic subunit [Gossypium
  misc_feature (32)..(599): Homolog of NCBI NO: 2506211 NR Description: Vacuolar ATP synthase catalytic subunit A
  misc_feature (32)..(600): Homolog of NCBI NO: 11527563 NR Description: vacuolar proton-ATPase [Hordeum vulgare subsp.
  misc_feature (32)..(599): Homolog of NCBI NO: 3169287 NR Description: vacuolar H+-ATPase catalytic subunit [Gossypium
  misc_feature (32)..(599): Homolog of NCBI NO: 401322 NR Description: Vacuolar ATP synthase catalytic subunit A
  misc_feature (32)..(600): Homolog of NCBI NO: 11527563 NR Description: vacuolar proton-ATPase [Hordeum vulgare subsp.
  misc_feature (32)..(599): Homolog of NCBI NO: 137460 NR Description: Vacuolar ATP synthase catalytic subunit A
  misc_feature (32)..(599): Homolog of NCBI NO: 27884018 NR Description: vacuolar H+-ATPase A2 subunit isoform; V-ATPase
  misc_feature (32)..(599): Homolog of NCBI NO: 27883932 NR Description: vacuolar H+-ATPase A1 subunit isoform; V-ATPase
  misc_feature (32)..(599): Homolog of NCBI NO: 15982954 NR Description: V-ATPase catalytic subunit A [Prunus persica]
  misc_feature (32)..(599): Homolog of NCBI NO: 12585490 NR Description: Vacuolar ATP synthase catalytic subunit A
  misc_feature (32)..(599): Homolog of NCBI NO: 2493122 NR Description: Vacuolar ATP synthase catalytic subunit A
  misc_feature (32)..(599): Homolog of NCBI NO: 2506211 NR Description: Vacuolar ATP synthase catalytic subunit A
  misc_feature (32)..(599): Homolog of NCBI NO: 27884018 NR Description: vacuolar H+-ATPase A2 subunit isoform; V-ATPase
  misc_feature (32)..(599): Homolog of NCBI NO: 27883932 NR Description: vacuolar H+-ATPase A1 subunit isoform; V-ATPase
  misc_feature (32)..(599): Homolog of NCBI NO: 15982954 NR Description: V-ATPase catalytic subunit A [Prunus persica]
  misc_feature (32)..(599): Homolog of NCBI NO: 12585490 NR Description: Vacuolar ATP synthase catalytic subunit A
  misc_feature (32)..(599): Homolog of NCBI NO: 2493122 NR Description: Vacuolar ATP synthase catalytic subunit A
  misc_feature (32)..(599): Homolog of NCBI NO: 2506211 NR Description: Vacuolar ATP synthase catalytic subunit A
  misc_feature (32)..(599): Homolog of NCBI NO: 3169287 NR Description: vacuolar H+-ATPase catalytic subunit [Gossypium
  misc_feature (32)..(599): Homolog of NCBI NO: 401322 NR Description: Vacuolar ATP synthase catalytic subunit A
  misc_feature (32)..(599): Homolog of NCBI NO: 137460 NR Description: Vacuolar ATP synthase catalytic subunit A
  misc_feature (32)..(599): Homolog of NCBI NO: 2493122 NR Description: Vacuolar ATP synthase catalytic subunit A
  misc_feature (32)..(599): Homolog of NCBI NO: 12585490 NR Description: Vacuolar ATP synthase catalytic subunit A
  misc_feature (32)..(599): Homolog of NCBI NO: 15982954 NR Description: V-ATPase catalytic subunit A [Prunus persica]
  misc_feature (32)..(599): Homolog of NCBI NO: 27883932 NR Description: vacuolar H+-ATPase A1 subunit isoform; V-ATPase
  misc_feature (32)..(599): Homolog of NCBI NO: 27884018 NR Description: vacuolar H+-ATPase A2 subunit isoform; V-ATPase
  misc_feature (85)..(85): Xaa is any aa, unknown or other
  misc_feature (361)..(361): Xaa is any aa, unknown or other
  misc_feature (373)..(373): Xaa is any aa, unknown or other
  misc_feature (375)..(375): Xaa is any aa, unknown or other
  misc_feature (382)..(382): Xaa is any aa, unknown or other
  misc_feature (390)..(390): Xaa is any aa, unknown or other
  misc_feature (394)..(394): Xaa is any aa, unknown or other
  misc_feature (404)..(404): Xaa is any aa, unknown or other
  misc_feature (444)..(444): Xaa is any aa, unknown or other
  misc_feature (446)..(446): Xaa is any aa, unknown or other
  misc_feature (448)..(448): Xaa is any aa, unknown or other
  misc_feature (449)..(449): Xaa is any aa, unknown or other
  misc_feature (461)..(461): Xaa is any aa, unknown or other
  misc_feature (470)..(470): Xaa is any aa, unknown or other
  misc_feature (480)..(480): Xaa is any aa, unknown or other
  misc_feature (489)..(489): Xaa is any aa, unknown or other
  misc_feature (495)..(495): Xaa is any aa, unknown or other
  misc_feature (496)..(496): Xaa is any aa, unknown or other
  misc_feature (506)..(506): Xaa is any aa, unknown or other
  misc_feature (574)..(574): Xaa is any aa, unknown or other
  misc_feature (585)..(585): Xaa is any aa, unknown or other
  misc_feature (586)..(586): Xaa is any aa, unknown or other
  misc_feature (587)..(587): Xaa is any aa, unknown or other
  misc_feature (601)..(601): Xaa is any aa, unknown or other

SEQ ID NO: 14456 - protein, 589 aa, Zea mays subsp. mays; identical to SEQ ID NO: 14432
  peptide (1)..(589): Ceres Seq. ID no. 15220346
  misc_feature (237)..(430): Pfam Name: ATP synthase alpha/beta family, Pfam Description: ATP synthase alpha/beta family,
  misc_feature (237)..(430): Pfam Name: ATP synthase alpha/beta family, Pfam Description: ATP synthase alpha/beta family,
  misc_feature (237)..(430): Pfam Name: ATP synthase alpha/beta family, Pfam Description: ATP synthase alpha/beta family,
  misc_feature (20)..(587): Homolog of NCBI NO: 137460 NR Description: Vacuolar ATP synthase catalytic subunit A
  misc_feature (20)..(588): Homolog of NCBI NO: 11527563 NR Description: vacuolar proton-ATPase [Hordeum vulgare subsp.
  misc_feature (20)..(587): Homolog of NCBI NO: 401322 NR Description: Vacuolar ATP synthase catalytic subunit A
  misc_feature (20)..(587): Homolog of NCBI NO: 3169287 NR Description: vacuolar H+-ATPase catalytic subunit [Gossypium
  misc_feature (20)..(587): Homolog of NCBI NO: 2506211 NR Description: Vacuolar ATP synthase catalytic subunit A
  misc_feature (20)..(588): Homolog of NCBI NO: 11527563 NR Description: vacuolar proton-ATPase [Hordeum vulgare subsp.
  misc_feature (20)..(587): Homolog of NCBI NO: 3169287 NR Description: vacuolar H+-ATPase catalytic subunit [Gossypium
  misc_feature (20)..(587): Homolog of NCBI NO: 401322 NR Description: Vacuolar ATP synthase catalytic subunit A
  misc_feature (20)..(588): Homolog of NCBI NO: 11527563 NR Description: vacuolar proton-ATPase [Hordeum vulgare subsp.
  misc_feature (20)..(587): Homolog of NCBI NO: 137460 NR Description: Vacuolar ATP synthase catalytic subunit A
  misc_feature (20)..(587): Homolog of NCBI NO: 27884018 NR Description: vacuolar H+-ATPase A2 subunit isoform; V-ATPase
  misc_feature (20)..(587): Homolog of NCBI NO: 27883932 NR Description: vacuolar H+-ATPase A1 subunit isoform; V-ATPase
  misc_feature (20)..(587): Homolog of NCBI NO: 15982954 NR Description: V-ATPase catalytic subunit A [Prunus persica]
  misc_feature (20)..(587): Homolog of NCBI NO: 12585490 NR Description: Vacuolar ATP synthase catalytic subunit A
  misc_feature (20)..(587): Homolog of NCBI NO: 2493122 NR Description: Vacuolar ATP synthase catalytic subunit A
  misc_feature (20)..(587): Homolog of NCBI NO: 2506211 NR Description: Vacuolar ATP synthase catalytic subunit A
  misc_feature (20)..(587): Homolog of NCBI NO: 27884018 NR Description: vacuolar H+-ATPase A2 subunit isoform; V-ATPase
  misc_feature (20)..(587): Homolog of NCBI NO: 27883932 NR Description: vacuolar H+-ATPase A1 subunit isoform; V-ATPase
  misc_feature (20)..(587): Homolog of NCBI NO: 15982954 NR Description: V-ATPase catalytic subunit A [Prunus persica]
  misc_feature (20)..(587): Homolog of NCBI NO: 12585490 NR Description: Vacuolar ATP synthase catalytic subunit A
  misc_feature (20)..(587): Homolog of NCBI NO: 2493122 NR Description: Vacuolar ATP synthase catalytic subunit A
  misc_feature (20)..(587): Homolog of NCBI NO: 2506211 NR Description: Vacuolar ATP synthase catalytic subunit A
  misc_feature (20)..(587): Homolog of NCBI NO: 3169287 NR Description: vacuolar H+-ATPase catalytic subunit [Gossypium
  misc_feature (20)..(587): Homolog of NCBI NO: 401322 NR Description: Vacuolar ATP synthase catalytic subunit A
  misc_feature (20)..(587): Homolog of NCBI NO: 137460 NR Description: Vacuolar ATP synthase catalytic subunit A
  misc_feature (20)..(587): Homolog of NCBI NO: 2493122 NR Description: Vacuolar ATP synthase catalytic subunit A
  misc_feature (20)..(587): Homolog of NCBI NO: 12585490 NR Description: Vacuolar ATP synthase catalytic subunit A
  misc_feature (20)..(587): Homolog of NCBI NO: 15982954 NR Description: V-ATPase catalytic subunit A [Prunus persica]
  misc_feature (20)..(587): Homolog of NCBI NO: 27883932 NR Description: vacuolar H+-ATPase A1 subunit isoform; V-ATPase
  misc_feature (20)..(587): Homolog of NCBI NO: 27884018 NR Description: vacuolar H+-ATPase A2 subunit isoform; V-ATPase
  misc_feature (73)..(73): Xaa is any aa, unknown or other
  misc_feature (349)..(349): Xaa is any aa, unknown or other
  misc_feature (361)..(361): Xaa is any aa, unknown or other
  misc_feature (363)..(363): Xaa is any aa, unknown or other
  misc_feature (370)..(370): Xaa is any aa, unknown or other
  misc_feature (378)..(378): Xaa is any aa, unknown or other
  misc_feature (382)..(382): Xaa is any aa, unknown or other
  misc_feature (392)..(392): Xaa is any aa, unknown or other
  misc_feature (432)..(432): Xaa is any aa, unknown or other
  misc_feature (434)..(434): Xaa is any aa, unknown or other
  misc_feature (436)..(436): Xaa is any aa, unknown or other
  misc_feature (437)..(437): Xaa is any aa, unknown or other
  misc_feature (449)..(449): Xaa is any aa, unknown or other
  misc_feature (458)..(458): Xaa is any aa, unknown or other
  misc_feature (468)..(468): Xaa is any aa, unknown or other
  misc_feature (477)..(477): Xaa is any aa, unknown or other
  misc_feature (483)..(483): Xaa is any aa, unknown or other
  misc_feature (484)..(484): Xaa is any aa, unknown or other
  misc_feature (494)..(494): Xaa is any aa, unknown or other
  misc_feature (562)..(562): Xaa is any aa, unknown or other
  misc_feature (573)..(573): Xaa is any aa, unknown or other
  misc_feature (574)..(574): Xaa is any aa, unknown or other
  misc_feature (575)..(575): Xaa is any aa, unknown or other
  misc_feature (589)..(589): Xaa is any aa, unknown or other

SEQ ID NO: 14457 - DNA, 1290 bp, Zea mays subsp. mays
  misc_feature (1)..(1290): Ceres Seq. ID no. 12436652
  misc_feature: MA Experiment ID: 108528 Result: Up-regulated in Transcription
  misc_feature: MA Experiment 108528 PARAMETER Experiment Name: Zm_Imbibed_Seeds_P Parameter: Age (day) Value: 5 vs. 2
  misc_feature: MA Experiment 108528 PARAMETER Experiment Name: Zm_Imbibed_Seeds_P Parameter: Organism Value: Zea mays
  misc_feature: MA Experiment 108528 PARAMETER Experiment Name: Zm_Imbibed_Seeds_P Parameter: Plant Line Value: 35A19
  misc_feature: MA Experiment 108528 PARAMETER Experiment Name: Zm_Imbibed_Seeds_P Parameter: Tissue Value: Aerial vs. Embryo
  misc_feature: MA Experiment ID: 108530 Result: Up-regulated in Transcription
  misc_feature: MA Experiment 108530 PARAMETER Experiment Name: Zm_Imbibed_Seeds_P Parameter: Age (day) Value: 6 vs. 2
  misc_feature: MA Experiment 108530 PARAMETER Experiment Name: Zm_Imbibed_Seeds_P Parameter: Organism Value: Zea mays
  misc_feature: MA Experiment 108530 PARAMETER Experiment Name: Zm_Imbibed_Seeds_P Parameter: Plant Line Value: 35A19
  misc_feature: MA Experiment 108530 PARAMETER Experiment Name: Zm_Imbibed_Seeds_P Parameter: Tissue Value: Aerial vs. Embryo
  misc_feature: MA Experiment ID: 108535 Result: Down-regulated in Transcription
  misc_feature: MA Experiment 108535 PARAMETER Experiment Name: Zm_Meristem_P Parameter: Age (day) Value: 8
  misc_feature: MA Experiment 108535 PARAMETER Experiment Name: Zm_Meristem_P Parameter: Organism Value: Zea mays
  misc_feature: MA Experiment 108535 PARAMETER Experiment Name: Zm_Meristem_P Parameter: Plant Line Value: 35A19
  misc_feature: MA Experiment 108535 PARAMETER Experiment Name: Zm_Meristem_P Parameter: Tissue Value: Root Meristem vs. Above Root Meristem
  misc_feature: MA Experiment ID: 108547 Result: Up-regulated in Transcription
  misc_feature: MA Experiment 108547 PARAMETER Experiment Name: Zm_Imbibed_Seeds_P Parameter: Age (day) Value: 4 vs. 2
  misc_feature: MA Experiment 108547 PARAMETER Experiment Name: Zm_Imbibed_Seeds_P Parameter: Organism Value: Zea mays
  misc_feature: MA Experiment 108547 PARAMETER Experiment Name: Zm_Imbibed_Seeds_P Parameter: Plant Line Value: 35A19
  misc_feature: MA Experiment 108547 PARAMETER Experiment Name: Zm_Imbibed_Seeds_P Parameter: Tissue Value: Aerial vs. Embryo
  misc_feature: MA Experiment ID: 108688 Result: Down-regulated in Transcription
  misc_feature: MA Experiment 108688 PARAMETER Experiment Name: Zm_Embryos-Flowers__P Parameter: Tissue Value: Immature Flowers vs. Aerial+
  misc_feature: MA Experiment ID: 108689 Result: Down-regulated in Transcription
  misc_feature: MA Experiment 108689 PARAMETER Experiment Name: Zm_Drought_Roots_P Parameter: Age (day) Value: 9
  misc_feature: MA Experiment 108689 PARAMETER Experiment Name: Zm_Drought_Roots_P Parameter: Organism Value: Zea mays
  misc_feature: MA Experiment 108689 PARAMETER Experiment Name: Zm_Drought_Roots_P Parameter: Plant Line Value: 35A19
  misc_feature: MA Experiment 108689 PARAMETER Experiment Name: Zm_Drought_Roots_P Parameter: Timepoint (hr) Value: 24
  misc_feature: MA Experiment 108689 PARAMETER Experiment Name: Zm_Drought_Roots_P Parameter: Tissue Value: Roots
  misc_feature: MA Experiment 108689 PARAMETER Experiment Name: Zm_Drought_Roots_P Parameter: Treatment Value: Drought vs. No Drought
  misc_feature: MA Experiment ID: 20000626 Result: Down-regulated in Transcription
  misc_feature: MA Experiment 20000626 PARAMETER Experiment Name: Zm_Herbicide-Treatments_P Parameter: Timepoint (hr) Value: 12
  misc_feature: MA Experiment 20000626 PARAMETER Experiment Name: Zm_Herbicide-Treatments_P Parameter: Tissue Value: Aerial
  misc_feature: MA Experiment 20000626 PARAMETER Experiment Name: Zm_Herbicide-Treatments_P Parameter: Treatment Value: Roundup vs. No Treatment
  misc_feature: MA Experiment ID: 20001608 Result: Up-regulated in Transcription
  misc_feature: MA Experiment 20001608 PARAMETER Experiment Name: Zm_50ppm_KNO3_L-to-H_P Parameter: Age (day) Value: 21
  misc_feature: MA Experiment 20001608 PARAMETER Experiment Name: Zm_50ppm_KNO3_L-to-H_P Parameter: Organism Value: Zea mays
  misc_feature: MA Experiment 20001608 PARAMETER Experiment Name: Zm_50ppm_KNO3_L-to-H_P Parameter: Plant Line Value: 35A19
  misc_feature: MA Experiment 20001608 PARAMETER Experiment Name: Zm_50ppm_KNO3_L-to-H_P Parameter: Timepoint (hr) Value: 48
  misc_feature: MA Experiment 20001608 PARAMETER Experiment Name: Zm_50ppm_KNO3_L-to-H_P Parameter: Tissue Value: Shoots
  misc_feature: MA Experiment 20001608 PARAMETER Experiment Name: Zm_50ppm_KNO3_L-to-H_P Parameter: Treatment Value: 50ppm KNO3 vs. 50ppm KCl
atcatattcccacctcgcgaacgaggacgaactgctacccccctcgcctcgccctcgccgcctcctctcccgttcccccaccaaccgcagcagcgagagcgagactgagaatggccgcggcgccgtcgtccctcgtgtcctcccatctctctcgcctcgccgacctccgccgcgcggcggcgccggccactcccaccgtcccacagcagcttcgcgtcggctgctcgcgccgccgcgcccagcgcgtcgtcgccatggctggatccggcaagttcttcgtcggaggcaactggaagtgcaacggaacaaaggactccgttagcaagcttgtctctgaactgaatgctgctaccctcgaaactgatgtagatgttgtggtggctcctccattcatctatatcgatcaggtcaagaattcactaacgggtcgcattgaggtttctgctcagaatgtgtggattggaaaaggaggagcctacaccggagagatcagtgcagaacaactggtggacatcggttgtcaatgggttattcttggacactcagagcgtagacatattattggtgaaaatgacgagtttattgggaagaaagctgcatatgcattgagccaaaatgttaaggttattgcctgcataggagagcttctggaagagagggaagcaggcaaaacttttgaagtatgttttgagcagatgaaggcttttgcagatagtatttccaactgggccgatgttgtgattgcatacgagcctgtttgggctattggaaccggaaaagttgctactcctgagcaggcccaggaagttcatgctgctgtacgcgattggttgacgaccaacatatcacctgatgttgcgtctagcacacgaataatctatggaggttctgtgaatgcagccaactgtgcagagctatcaaagaaagaagatatcgacggttttcttgttggtggtgcctcgttgaaggccccggacttcgccaccattatcaactcagtgaccgccaagaaagttgcagcctgatggaccaccctgtgagaaataagaggccatcagcgtgtcgcctcatctgccacgccttaaagcctgtataggaggtgatccgtgtgatggtgtgcccgtcacctcctgtttttgctgatttgcagcacggggacagaaaataatgttttgctctcgtggacctgcactgcacgtgacgaggagagttcagttgtcgtgagcgatgtacgttggggatattgtgatgtggtccttttctaaagaaaaaaaatgttgacggtcaagg

SEQ ID NO: 14458 - protein, 340 aa, Zea mays subsp. mays
  peptide (1)..(340): Ceres Seq. ID no. 12436653
  misc_feature (89)..(334): Pfam Name: Triosephosphate isomerase Pfam Description: Triosephosphate isomerase
  misc_feature (79)..(340): Homolog of NCBI NO: 1174745 NR Description: Triosephosphate isomerase, chloroplast precursor
  misc_feature (41)..(340): Homolog of NCBI NO: 1351271 NR Description: Triosephosphate isomerase, chloroplast precursor
  misc_feature (18)..(340): Homolog of NCBI NO: 15226479 NR Description: putative triosephosphate isomerase; protein id: supported by cDNA: 39351., supported by cDNA: gi_14190440, by cDNA: gi_15450568, supported by cDNA: gi_7839390 [Arabidopsis
  misc_feature (37)..(340): Homolog of NCBI NO: 13431949 NR Description: Triosephosphate isomerase, chloroplast precursor >gi|7650502|gb|AAF66071.1|AF257322_1 triosephosphate isomerase
  misc_feature (90)..(340): Homolog of NCBI NO: 1351282 NR Description: Triosephosphate isomerase, cytosolic (TIM)
  misc_feature (90)..(336): Homolog of NCBI NO: 136063 NR Description: TRIOSEPHOSPHATE ISOMERASE, CYTOSOLIC (TIM)
  misc_feature (90)..(336): Homolog of NCBI NO: 11124572 NR Description: triosephosphat-isomerase [Triticum aestivum]
  misc_feature (90)..(336): Homolog of NCBI NO: 1174749 NR Description: Triosephosphate isomerase, cytosolic (TIM)
  misc_feature (90)..(339): Homolog of NCBI NO: 1351279 NR Description: Triosephosphate isomerase, cytosolic (TIM)
  misc_feature (90)..(331): Homolog of NCBI NO: 7274156 NR Description: triosephosphate isomerase +
HIPTSRTRTNCYPPRLALAASSPVPPPTAAARARLRMAAAPSSLVSSHLSRLADLRRAAAPATPTVPQQLRVGCSRRRAQRVVAMAGSGKFFVGGNWKCNGTKDSVSKLVSELNAATLETDVDVVVAPPFIYIDQVKNSLTGRIEVSAQNVWIGKGGAYTGEISAEQLVDIGCQWVILGHSERRHIIGENDEFIGKKAAYALSQNVKVIACIGELLEEREAGKTFEVCFEQMKAFADSISNWADVVIAYEPVWAIGTGKVATPEQAQEVHAAVRDWLTTNISPDVASSTRIIYGGSVNAANCAELSKKEDIDGFLVGGASLKAPDFATIINSVTAKKVAA

SEQ ID NO: 14459 - protein, 304 aa, Zea mays subsp. mays
  peptide (1)..(304): Ceres Seq. ID no. 12436654
  misc_feature (53)..(298): Pfam Name: Triosephosphate isomerase Pfam Description: Triosephosphate isomerase
  misc_feature (43)..(304): Homolog of NCBI NO: 1174745 NR Description: Triosephosphate isomerase, chloroplast precursor
  misc_feature (5)..(304): Homolog of NCBI NO: 1351271 NR Description: Triosephosphate isomerase, chloroplast precursor
  misc_feature (1)..(304): Homolog of NCBI NO: 15226479 NR Description: putative triosephosphate isomerase; protein id: supported by cDNA: 39351., supported by cDNA: gi_14190440, by cDNA: gi_15450568, supported by cDNA: gi_7839390 [Arabidopsis
  misc_feature (1)..(304): Homolog of NCBI NO: 13431949 NR Description: Triosephosphate isomerase, chloroplast precursor >gi|7650502|gb|AAF66071.1|AF257322_1 triosephosphate isomerase
  misc_feature (54)..(304): Homolog of NCBI NO: 1351282 NR Description: Triosephosphate isomerase, cytosolic (TIM)
  misc_feature (54)..(300): Homolog of NCBI NO: 136063 NR Description: TRIOSEPHOSPHATE ISOMERASE, CYTOSOLIC (TIM)
  misc_feature (54)..(300): Homolog of NCBI NO: 11124572 NR Description: triosephosphat-isomerase [Triticum aestivum]
  misc_feature (54)..(300): Homolog of NCBI NO: 1174749 NR Description: Triosephosphate isomerase, cytosolic (TIM)
  misc_feature (54)..(303): Homolog of NCBI NO: 1351279 NR Description: Triosephosphate isomerase, cytosolic (TIM)
  misc_feature (54)..(295): Homolog of NCBI NO: 7274156 NR Description: triosephosphate isomerase +
MAAAPSSLVSSHLSRLADLRRAAAPATPTVPQQLRVGCSRRRAQRVVAMAGSGKFFVGGNWKCNGTKDSVSKLVSELNAATLETDVDVVVAPPFIYIDQVKNSLTGRIEVSAQNVWIGKGGAYTGEISAEQLVDIGCQWVILGHSERRHIIGENDEFIGKKAAYALSQNVKVIACIGELLEEREAGKTFEVCFEQMKAFADSISNWADVVIAYEPVWAIGTGKVATPEQAQEVHAAVRDWLTTNISPDVASSTRIIYGGSVNAANCAELSKKEDIDGFLVGGASLKAPDFATIINSVTAKKVAA

SEQ ID NO: 14460 - protein, 256 aa, Zea mays subsp. mays
  peptide (1)..(256): Ceres Seq. ID no. 12436655
  misc_feature (5)..(250): Pfam Name: Triosephosphate isomerase Pfam Description: Triosephosphate isomerase
  misc_feature (1)..(256): Homolog of NCBI NO: 1174745 NR Description: Triosephosphate isomerase, chloroplast precursor
  misc_feature (1)..(256): Homolog of NCBI NO: 1351271 NR Description: Triosephosphate isomerase, chloroplast precursor
  misc_feature (1)..(256): Homolog of NCBI NO: 15226479 NR Description: putative triosephosphate isomerase; protein id: supported by cDNA: 39351., supported by cDNA: gi_14190440, by cDNA: gi_15450568, supported by cDNA: gi_7839390 [Arabidopsis
  misc_feature (1)..(256): Homolog of NCBI NO: 13431949 NR Description: Triosephosphate isomerase, chloroplast precursor >gi|7650502|gb|AAF66071.1|AF257322_1 triosephosphate isomerase
  misc_feature (6)..(256): Homolog of NCBI NO: 1351282 NR Description: Triosephosphate isomerase, cytosolic (TIM)
  misc_feature (6)..(252): Homolog of NCBI NO: 136063 NR Description: TRIOSEPHOSPHATE ISOMERASE, CYTOSOLIC (TIM)
  misc_feature (6)..(252): Homolog of NCBI NO: 11124572 NR Description: triosephosphat-isomerase [Triticum aestivum]
  misc_feature (6)..(252): Homolog of NCBI NO: 1174749 NR Description: Triosephosphate isomerase, cytosolic (TIM)
  misc_feature (6)..(255): Homolog of NCBI NO: 1351279 NR Description: Triosephosphate isomerase, cytosolic (TIM)
  misc_feature (6)..(247): Homolog of NCBI NO: 7274156 NR Description: triosephosphate isomerase +
MAGSGKFFVGGNWKCNGTKDSVSKLVSELNAATLETDVDVVVAPPFIYIDQVKNSLTGRIEVSAQNVWIGKGGAYTGEISAEQLVDIGCQWVILGHSERRHIIGENDEFIGKKAAYALSQNVKVIACIGELLEEREAGKTFEVCFEQMKAFADSISNWADVVIAYEPVWAIGTGKVATPEQAQEVHAAVRDWLTTNISPDVASSTRIIYGGSVNAANCAELSKKEDIDGFLVGGASLKAPDFATIINSVTAKKVAA

SEQ ID NO: 14461 - DNA, 691 bp, Zea mays subsp. mays
  misc_feature (1)..(691): Ceres Seq. ID no. 12589525
  misc_feature: MA Experiment ID: 108530 Result: Down-regulated in Transcription
  misc_feature: MA Experiment 108530 PARAMETER Experiment Name: Zm_Imbibed_Seeds_P Parameter: Age (day) Value: 6 vs. 2
  misc_feature: MA Experiment 108530 PARAMETER Experiment Name: Zm_Imbibed_Seeds_P Parameter: Organism Value: Zea mays
  misc_feature: MA Experiment 108530 PARAMETER Experiment Name: Zm_Imbibed_Seeds_P Parameter: Plant Line Value: 35A19
  misc_feature: MA Experiment 108530 PARAMETER Experiment Name: Zm_Imbibed_Seeds_P Parameter: Tissue Value: Aerial vs. Embryo
  misc_feature: MA Experiment ID: 108543 Result: Up-regulated in Transcription
  misc_feature: MA Experiment ID: 108544 Result: Down-regulated in Transcription
cagctacgtaggccccccccccggggatatttcgaaaggccctgcaagacgttgagatcaaaggctatacgattccggcgggatggggcgtcatggtgtgcccaccggcagtgcacttaaaccccgacatctatgaagaccctctggcgttcaacccgtggagatggcagggcaaacctgaaatcaccggtgggacgaaacacttcatggcgtttggaggtggcctcaggttttgcgttggcactgatcttagcagggtcttgatggcaacattcatccacagcttggttacaaaatacagttggaggacggtaaaaggaggcaacatagtccggacccccggtctcggctttcctgatggcttccacatccaactttttcctagaaattgaaattggcccttttcaaacctctgactaggtcgtgcatgtaattaaattggataggtctcttaggaccaacgccgcaacagtaaaggattggaaatcatatacttagcctagtgttagcctgttagggtagacatcactagttacaagttcagtcatgttactggtactacctctaatctttgcaaggggtttttgtacttggttgtttgttttccatgtggttagtaatctacccatgtgtttgtatgtatatctggttatacatgtctaatgaaagaaaaaatacaggagctgtgctt

SEQ ID NO: 14462 - protein, 99 aa, Zea mays subsp. mays
  peptide (1)..(99): Ceres Seq. ID no. 12589526
  misc_feature (1)..(96): Pfam Name: Cytochrome P450 Pfam Description: Cytochrome P450
  misc_feature (1)..(99): Homolog of NCBI NO: 20520627 NR Description: putative cytochrome P450 [Oryza sativa (japonica
  misc_feature (1)..(99): Homolog of NCBI NO: 38567920 NR Description: OSJNBa0088I22.16 [Oryza sativa (japonica
  misc_feature (1)..(95): Homolog of NCBI NO: 30682922 NR Description: cytochrome P450, putative [Arabidopsis thaliana]
  misc_feature (1)..(95): Homolog of NCBI NO: 9502380 NR Description: T12C24.27 [Arabidopsis thaliana]
  misc_feature (1)..(99): Homolog of NCBI NO: 38567916 NR Description: OSJNBa0088I22.12 [Oryza sativa (japonica
  misc_feature (1)..(98): Homolog of NCBI NO: 6635860 NR Description: cytochrome P450 [Helianthus annuus]
  misc_feature (1)..(98): Homolog of NCBI NO: 27764671 NR Description: putative hydroxylase [Oryza sativa (japonica
  misc_feature (1)..(95): Homolog of NCBI NO: 18483228 NR Description: putative cytochrome P450-like protein [Sorghum
  misc_feature (1)..(95): Homolog of NCBI NO: 22530982 NR Description: cytochrome P450-like protein [Arabidopsis
  misc_feature (1)..(95): Homolog of NCBI NO: 30695352 NR Description: cytochrome p450 family [Arabidopsis thaliana]
MVCPPAVHLNPDIYEDPLAFNPWRWQGKPEITGGTKHFMAFGGGLRFCVGTDLSRVLMATFIHSLVTKYSWRTVKGGNIVRTPGLGFPDGFHIQLFPRN

SEQ ID NO: 14463 - protein, 61 aa, Zea mays subsp. mays
  peptide (1)..(61): Ceres Seq. ID no. 12589527
  misc_feature (1)..(58): Pfam Name: Cytochrome P450 Pfam Description: Cytochrome P450
  misc_feature (1)..(61): Homolog of NCBI NO: 20520627 NR Description: putative cytochrome P450 [Oryza sativa (japonica
  misc_feature (1)..(61): Homolog of NCBI NO: 38567920 NR Description: OSJNBa0088I22.16 [Oryza sativa (japonica
  misc_feature (1)..(57): Homolog of NCBI NO: 30682922 NR Description: cytochrome P450, putative [Arabidopsis thaliana]
  misc_feature (1)..(57): Homolog of NCBI NO: 9502380 NR Description: T12C24.27 [Arabidopsis thaliana]
  misc_feature (1)..(61): Homolog of NCBI NO: 38567916 NR Description: OSJNBa0088I22.12 [Oryza sativa (japonica
  misc_feature (1)..(60): Homolog of NCBI NO: 6635860 NR Description: cytochrome P450 [Helianthus annuus]
  misc_feature (1)..(60): Homolog of NCBI NO: 27764671 NR Description: putative hydroxylase [Oryza sativa (japonica
  misc_feature (1)..(57): Homolog of NCBI NO: 18483228 NR Description: putative cytochrome P450-like protein [Sorghum
  misc_feature (1)..(57): Homolog of NCBI NO: 22530982 NR Description: cytochrome P450-like protein [Arabidopsis
  misc_feature (1)..(57): Homolog of NCBI NO: 30695352 NR Description: cytochrome p450 family [Arabidopsis thaliana]
MAFGGGLRFCVGTDLSRVLMATFIHSLVTKYSWRTVKGGNIVRTPGLGFPDGFHIQLFPRN

SEQ ID NO: 14464 - DNA, 552 bp, Zea mays subsp. mays
  misc_feature (1)..(552): Ceres Seq. ID no. 13622879
  misc_feature: MA Experiment ID: 108503 Result: Up-regulated in Transcription
  misc_feature: MA Experiment 108503 PARAMETER Experiment Name: Zm_Drought_P Parameter: Age (day) Value: 8
  misc_feature: MA Experiment 108503 PARAMETER Experiment Name: Zm_Drought_P Parameter: Organism Value: Zea mays
  misc_feature: MA Experiment 108503 PARAMETER Experiment Name: Zm_Drought_P Parameter: Plant Line Value: 35A19
  misc_feature: MA Experiment 108503 PARAMETER Experiment Name: Zm_Drought_P Parameter: Timepoint (hr) Value: 6
  misc_feature: MA Experiment 108503 PARAMETER Experiment Name: Zm_Drought_P Parameter: Tissue Value: Aerial
  misc_feature: MA Experiment 108503 PARAMETER Experiment Name: Zm_Drought_P Parameter: Treatment Value: Drought vs. No Drought
  misc_feature: MA Experiment ID: 108504 Result: Up-regulated in Transcription
  misc_feature: MA Experiment 108504 PARAMETER Experiment Name: Zm_Drought_P Parameter: Age (day) Value: 8
  misc_feature: MA Experiment 108504 PARAMETER Experiment Name: Zm_Drought_P Parameter: Organism Value: Zea mays
  misc_feature: MA Experiment 108504 PARAMETER Experiment Name: Zm_Drought_P Parameter: Plant Line Value: 35A19
  misc_feature: MA Experiment 108504 PARAMETER Experiment Name: Zm_Drought_P Parameter: Timepoint (hr) Value: 12
  misc_feature: MA Experiment 108504 PARAMETER Experiment Name: Zm_Drought_P Parameter: Tissue Value: Aerial
  misc_feature: MA Experiment 108504 PARAMETER Experiment Name: Zm_Drought_P Parameter: Treatment Value: Drought vs. No Drought
  misc_feature: MA Experiment ID: 108527 Result: Down-regulated in Transcription
  misc_feature: MA Experiment 108527 PARAMETER Experiment Name: Zm_5mM_NO_P Parameter: Age (day) Value: 8
  misc_feature: MA Experiment 108527 PARAMETER Experiment Name: Zm_5mM_NO_P Parameter: Organism Value: Zea mays
  misc_feature: MA Experiment 108527 PARAMETER Experiment Name: Zm_5mM_NO_P Parameter: Plant Line Value: 35A19
  misc_feature: MA Experiment 108527 PARAMETER Experiment Name: Zm_5mM_NO_P Parameter: Timepoint (hr) Value: 6
  misc_feature: MA Experiment 108527 PARAMETER Experiment Name: Zm_5mM_NO_P Parameter: Tissue Value: Aerial
  misc_feature: MA Experiment 108527 PARAMETER Experiment Name: Zm_5mM_NO_P Parameter: Treatment Value: 5mM NO vs. No Treatment
  misc_feature: MA Experiment ID: 108597 Result: Up-regulated in Transcription
  misc_feature: MA Experiment 108597 PARAMETER Experiment Name: Zm_100uM_ABA_P Parameter: Age (day) Value: 9
  misc_feature: MA Experiment 108597 PARAMETER Experiment Name: Zm_100uM_ABA_P Parameter: Organism Value: Zea mays
  misc_feature: MA Experiment 108597 PARAMETER Experiment Name: Zm_100uM_ABA_P Parameter: Plant Line Value: 35A19
  misc_feature: MA Experiment 108597 PARAMETER Experiment Name: Zm_100uM_ABA_P Parameter: Timepoint (hr) Value: 24
  misc_feature: MA Experiment 108597 PARAMETER Experiment Name: Zm_100uM_ABA_P Parameter: Tissue Value: Aerial
  misc_feature: MA Experiment 108597 PARAMETER Experiment Name: Zm_100uM_ABA_P Parameter: Treatment Value: 100uM ABA vs. No Treatment
  misc_feature: MA Experiment ID: 108689 Result: Up-regulated in Transcription
  misc_feature: MA Experiment 108689 PARAMETER Experiment Name: Zm_Drought_Roots_P Parameter: Age (day) Value: 9
  misc_feature: MA Experiment 108689 PARAMETER Experiment Name: Zm_Drought_Roots_P Parameter: Organism Value: Zea mays
  misc_feature: MA Experiment 108689 PARAMETER Experiment Name: Zm_Drought_Roots_P Parameter: Plant Line Value: 35A19
  misc_feature: MA Experiment 108689 PARAMETER Experiment Name: Zm_Drought_Roots_P Parameter: Timepoint (hr) Value: 24
  misc_feature: MA Experiment 108689 PARAMETER Experiment Name: Zm_Drought_Roots_P Parameter: Tissue Value: Roots
  misc_feature: MA Experiment 108689 PARAMETER Experiment Name: Zm_Drought_Roots_P Parameter: Treatment Value: Drought vs. No Drought
  misc_feature: MA Experiment ID: 20000478 Result: Down-regulated in Transcription
  misc_feature: MA Experiment 20000478 PARAMETER Experiment Name: Zm_5mM_SA_P Parameter: Age (day) Value: 11
  misc_feature: MA Experiment 20000478 PARAMETER Experiment Name: Zm_5mM_SA_P Parameter: Organism Value: Zea mays
  misc_feature: MA Experiment 20000478 PARAMETER Experiment Name: Zm_5mM_SA_P Parameter: Plant Line Value: 35A19
  misc_feature: MA Experiment 20000478 PARAMETER Experiment Name: Zm_5mM_SA_P Parameter: Timepoint (hr) Value: 72
  misc_feature: MA Experiment 20000478 PARAMETER Experiment Name: Zm_5mM_SA_P Parameter: Tissue Value: Aerial
  misc_feature: MA Experiment 20000478 PARAMETER Experiment Name: Zm_5mM_SA_P Parameter: Treatment Value: 5mM SA vs. No Treatment
gatcaatgcaggagctcaagcctttgtaaattgttggagtgtgaccttggggagagcaagtgccactccccgagcacaatcatgaagatgttccagagttctatgttctgtttgcagccccagggtgactcctacacaagaagatctgcctttgactcgatgttggctggctgcgtgcctgttttcttccatcccggttcagcgtacgtccagtatacatggcatctcccaaagaactatacaacgtactctgtattcatccctgaagatgacgtccgttctggaaatgccagcattgaggagaggctaaagagtattcacccagatgtggtcaagcaaatgagagaggaggtcatcaatctgataccaaaggtgatatatgctgatccaagatcgaaactggagacattgaaagatgcatttgatgtttccatagaggcgatcattaacaaagtgacaaagttgagaagagatatcatcgcaggccaagaagacaaagattttatcgaagagaatagctggaagtatagtctgttagacgatggacagcgg

SEQ ID NO: 14465 - protein, 184 aa, Zea mays subsp. mays
  peptide (1)..(184): Ceres Seq. ID no. 13622880
  misc_feature (1)..(118): Pfam Name: Exostosin family Pfam Description: Exostosin family
  misc_feature (1)..(183): Homolog of NCBI NO: 27497206 NR Description: Unknown protein [Oryza sativa (japonica
  misc_feature (1)..(183): Homolog of NCBI NO: 25411977 NR Description: hypothetical protein At2g20370 [imported] - thaliana >gi|4512698|gb|AAD21751.1| unknown protein [Arabidopsis
  misc_feature (1)..(183): Homolog of NCBI NO: 30680972 NR Description: expressed protein [Arabidopsis thaliana]
  misc_feature (2)..(183): Homolog of NCBI NO: 37535066 NR Description: hypothetical protein [Oryza sativa (japonica group)] >gi|22165082|gb|AAM93699.1| hypothetical protein [Oryza
  misc_feature (2)..(183): Homolog of NCBI NO: 37535064 NR Description: putative exostosin family protein [Oryza sativa
  misc_feature (2)..(159): Homolog of NCBI NO: 27497204 NR Description: Hypothetical protein [Oryza sativa (japonica
  misc_feature (2)..(156): Homolog of NCBI NO: 27497203 NR Description: Hypothetical protein [Oryza sativa (japonica
  misc_feature (1)..(183): Homolog of NCBI NO: 15227020 NR Description: hypothetical protein [Arabidopsis thaliana]
  misc_feature (1)..(183): Homolog of NCBI NO: 37535048 NR Description: hypothetical protein [Oryza sativa (japonica group)] >gi|14140285|gb|AAK54291.1| hypothetical protein [Oryza
  misc_feature (1)..(177): Homolog of NCBI NO: 29824391 NR Description: unknown protein [Arabidopsis thaliana]
DQCRSSSLCKLLECDLGESKCHSPSTIMKMFQSSMFCLQPQGDSYTRRSAFDSMLAGCVPVFFHPGSAYVQYTWHLPKNYTTYSVFIPEDDVRSGNASIEERLKSIHPDVVKQMREEVINLIPKVIYADPRSKLETLKDAFDVSIEAIINKVTKLRRDIIAGQEDKDFIEENSWKYSLLDDGQR

SEQ ID NO: 14466 - protein, 157 aa, Zea mays subsp. mays
  peptide (1)..(157): Ceres Seq. ID no. 13622881
  misc_feature (1)..(91): Pfam Name: Exostosin family Pfam Description: Exostosin family
  misc_feature (1)..(156): Homolog of NCBI NO: 27497206 NR Description: Unknown protein [Oryza sativa (japonica
  misc_feature (1)..(156): Homolog of NCBI NO: 25411977 NR Description: hypothetical protein At2g20370 [imported] - thaliana >gi|4512698|gb|AAD21751.1| unknown protein [Arabidopsis
  misc_feature (1)..(156): Homolog of NCBI NO: 30680972 NR Description: expressed protein [Arabidopsis thaliana]
  misc_feature (1)..(156): Homolog of NCBI NO: 37535066 NR Description: hypothetical protein [Oryza sativa (japonica group)] >gi|22165082|gb|AAM93699.1| hypothetical protein [Oryza
  misc_feature (1)..(156): Homolog of NCBI NO: 37535064 NR Description: putative exostosin family protein [Oryza sativa
  misc_feature (1)..(132): Homolog of NCBI NO: 27497204 NR Description: Hypothetical protein [Oryza sativa (japonica
  misc_feature (1)..(129): Homolog of NCBI NO: 27497203 NR Description: Hypothetical protein [Oryza sativa (japonica
  misc_feature (1)..(156): Homolog of NCBI NO: 15227020 NR Description: hypothetical protein [Arabidopsis thaliana]
  misc_feature (1)..(156): Homolog of NCBI NO: 37535048 NR Description: hypothetical protein [Oryza sativa (japonica group)] >gi|14140285|gb|AAK54291.1| hypothetical protein [Oryza
  misc_feature (1)..(150): Homolog of NCBI NO: 29824391 NR Description: unknown protein [Arabidopsis thaliana]
MKMFQSSMFCLQPQGDSYTRRSAFDSMLAGCVPVFFHPGSAYVQYTWHLPKNYTTYSVFIPEDDVRSGNASIEERLKSIHPDVVKQMREEVINLIPKVIYADPRSKLETLKDAFDVSIEAIINKVTKLRRDIIAGQEDKDFIEENSWKYSLLDDGQR

SEQ ID NO: 14467 - protein, 155 aa, Zea mays subsp. mays
  peptide (1)..(155): Ceres Seq. ID no. 13622882
  misc_feature (1)..(89): Pfam Name: Exostosin family Pfam Description: Exostosin family
  misc_feature (1)..(154): Homolog of NCBI NO: 27497206 NR Description: Unknown protein [Oryza sativa (japonica
  misc_feature (1)..(154): Homolog of NCBI NO: 25411977 NR Description: hypothetical protein At2g20370 [imported] - thaliana >gi|4512698|gb|AAD21751.1| unknown protein [Arabidopsis
  misc_feature (1)..(154): Homolog of NCBI NO: 30680972 NR Description: expressed protein [Arabidopsis thaliana]
  misc_feature (1)..(154): Homolog of NCBI NO: 37535066 NR Description: hypothetical protein [Oryza sativa (japonica group)] >gi|22165082|gb|AAM93699.1| hypothetical protein [Oryza
  misc_feature (1)..(154): Homolog of NCBI NO: 37535064 NR Description: putative exostosin family protein [Oryza sativa
  misc_feature (1)..(130): Homolog of NCBI NO: 27497204 NR Description: Hypothetical protein [Oryza sativa (japonica
  misc_feature (1)..(127): Homolog of NCBI NO: 27497203 NR Description: Hypothetical protein [Oryza sativa (japonica
  misc_feature (1)..(154): Homolog of NCBI NO: 15227020 NR Description: hypothetical protein [Arabidopsis thaliana]
  misc_feature (1)..(154): Homolog of NCBI NO: 37535048 NR Description: hypothetical protein [Oryza sativa (japonica group)] >gi|14140285|gb|AAK54291.1| hypothetical protein [Oryza
  misc_feature (1)..(148): Homolog of NCBI NO: 29824391 NR Description: unknown protein [Arabidopsis thaliana]
MFQSSMFCLQPQGDSYTRRSAFDSMLAGCVPVFFHPGSAYVQYTWHLPKNYTTYSVFIPEDDVRSGNASIEERLKSIHPDVVKQMREEVINLIPKVIYADPRSKLETLKDAFDVSIEAIINKVTKLRRDIIAGQEDKDFIEENSWKYSLLDDGQR

SEQ ID NO: 14468 - DNA, 479 bp, Zea mays subsp. mays
  misc_feature (1)..(479): Ceres Seq. ID no. 4616752
  misc_feature: MA Experiment ID: 20000487 Result: Up-regulated in Transcription
  misc_feature: MA Experiment 20000487 PARAMETER Experiment Name: Zm_50mM_NH4NO3_L_to_H_P Parameter: Organism Value: Zea mays
  misc_feature: MA Experiment 20000487 PARAMETER Experiment Name: Zm_50mM_NH4NO3_L_to_H_P Parameter: Timepoint (hr) Value: 4
  misc_feature: MA Experiment 20000487 PARAMETER Experiment Name: Zm_50mM_NH4NO3_L_to_H_P Parameter: Tissue Value: Leaves
  misc_feature: MA Experiment 20000487 PARAMETER Experiment Name: Zm_50mM_NH4NO3_L_to_H_P Parameter: Treatment Value: 50mM NH4NO3 vs. 100mM Mannitol
ttcagaaccctagcgccccgcccgtcctgccgccgccgcagccgccatcgcacggccatgggtatcgatctcgtagccggcggccgcaacaagaagaccaagcgcacggcgcccaagtccgacgatgtctacctcaagctcctcgtcaagctctaccgcttccttgtgcgcaggacaaagagcaacttcaacgccgtgatcctcaagcgcctcttcatgagcaagaccaaccgcccgccgctctcgatgcgccgcctcgtcaggttcatggaggggaagggtgatcagatcgccgtgattgtgggcaccgtgaccgacgacaagaggatcagcgaggtgccggcgatgaaggtctgcgcgctcaggttcactgagacagcgagggccaggatcatcaatgctggcggagagtgcctcaccttcgaccagctcgcgctccgtgccccacttgggcaaaacacggttctgctgaggggtcc

SEQ ID NO: 14469 - protein, 159 aa, Zea mays subsp. mays
  peptide (1)..(159): Ceres Seq. ID no. 4616753
  misc_feature (20)..(158): Homolog of NCBI NO: 34393858 NR Description: putative cytoplasmic ribosomal protein L18 [Oryza
  misc_feature (20)..(158): Homolog of NCBI NO: 34897628 NR Description: cytoplasmic ribosomal protein L18 [Oryza sativa]
  misc_feature (20)..(158): Homolog of NCBI NO: 15241061 NR Description: 60S ribosomal protein - like; protein id: supported by cDNA: gi_15810152 [Arabidopsis thaliana] putative 60S ribosomal protein [Arabidopsis thaliana]
  misc_feature (20)..(158): Homolog of NCBI NO: 606970 NR Description: cytoplasmic ribosomal protein L18
  misc_feature (20)..(158): Homolog of NCBI NO: 15230011 NR Description: putative 60S ribosomal protein L18; protein id: supported by cDNA: gi_14335089, supported by cDNA: gi_16974508, by cDNA: gi_606969 [Arabidopsis thaliana]
  misc_feature (20)..(158): Homolog of NCBI NO: 28798549 NR Description: 60S ribosomal protein [Medicago sativa]
  misc_feature (23)..(158): Homolog of NCBI NO: 6094021 NR Description: 60S RIBOSOMAL PROTEIN L18
  misc_feature (21)..(158): Homolog of NCBI NO: 7440855 NR Description: ribosomal protein L18, cytosolic - Arabidopsis
  misc_feature (20)..(158): Homolog of NCBI NO: 28630354 NR Description: ribosomal protein L18 [Branchiostoma lanceolatum]
  misc_feature (20)..(158): Homolog of NCBI NO: 32450084 NR Description: Unknown (protein for MGC:64299) [Xenopus laevis]
FRTLAPRPSCRRRSRHRTAMGIDLVAGGRNKKTKRTAPKSDDVYLKLLVKLYRFLVRRTKSNFNAVILKRLFMSKTNRPPLSMRRLVRFMEGKGDQIAVIVGTVTDDKRISEVPAMKVCALRFTETARARIINAGGECLTFDQLALRAPLGQNTVLLRG

SEQ ID NO: 14470 - protein, 140 aa, Zea mays subsp. mays
  peptide (1)..(140): Ceres Seq. ID no. 4616754
  misc_feature (1)..(139): Homolog of NCBI NO: 15230011 NR Description: putative 60S ribosomal protein L18; protein id: supported by cDNA: gi_14335089, supported by cDNA: gi_16974508, by cDNA: gi_606969 [Arabidopsis thaliana]
  misc_feature (1)..(139): Homolog of NCBI NO: 28798549 NR Description: 60S ribosomal protein [Medicago sativa]
  misc_feature (4)..(139): Homolog of NCBI NO: 6094021 NR Description: 60S RIBOSOMAL PROTEIN L18
  misc_feature (2)..(139): Homolog of NCBI NO: 7440855 NR Description: ribosomal protein L18, cytosolic - Arabidopsis
  misc_feature (1)..(139): Homolog of NCBI NO: 28630354 NR Description: ribosomal protein L18 [Branchiostoma lanceolatum]
  misc_feature (1)..(139): Homolog of NCBI NO: 32450084 NR Description: Unknown (protein for MGC:64299) [Xenopus laevis]
  misc_feature (1)..(139): Homolog of NCBI NO: 34393858 NR Description: putative cytoplasmic ribosomal protein L18 [Oryza
  misc_feature (1)..(139): Homolog of NCBI NO: 34897628 NR Description: cytoplasmic ribosomal protein L18 [Oryza sativa]
  misc_feature (1)..(139): Homolog of NCBI NO: 15241061 NR Description: 60S ribosomal protein - like; protein id: supported by cDNA: gi_15810152 [Arabidopsis thaliana] putative 60S ribosomal protein [Arabidopsis thaliana]
  misc_feature (1)..(139): Homolog of NCBI NO: 606970 NR Description: cytoplasmic ribosomal protein L18
MGIDLVAGGRNKKTKRTAPKSDDVYLKLLVKLYRFLVRRTKSNFNAVILKRLFMSKTNRPPLSMRRLVRFMEGKGDQIAVIVGTVTDDKRISEVPAMKVCALRFTETARARIINAGGECLTFDQLALRAPLGQNTVLLRG

SEQ ID NO: 14471 - protein, 93 aa, Zea mays subsp. mays
  peptide (1)..(93): Ceres Seq. ID no. 4616755
QNPSAPPVLPPPQPPSHGHGYRSRSRRPQQEDQAHGAQVRRCLPQAPRQALPLPCAQDKEQLQRRDPQAPLHEQDQPPAALDAPPRQVHGGEG

SEQ ID NO: 14472 - DNA, 1187 bp, Zea mays subsp. mays
  misc_feature (1)..(1187): Ceres Seq. ID no. 12436465
  misc_feature: MA Experiment ID: 108534 Result: Up-regulated in Transcription
  misc_feature: MA Experiment 108534 PARAMETER Experiment Name: Zm_4deg_Cold_P Parameter: Age (hr) Value: 8
  misc_feature: MA Experiment 108534 PARAMETER Experiment Name: Zm_4deg_Cold_P Parameter: Organism Value: Zea mays
  misc_feature: MA Experiment 108534 PARAMETER Experiment Name: Zm_4deg_Cold_P Parameter: Plant Line Value: 35A19
  misc_feature: MA Experiment 108534 PARAMETER Experiment Name: Zm_4deg_Cold_P Parameter: Temperature (deg C) Value: 4 vs. 22
  misc_feature: MA Experiment 108534 PARAMETER Experiment Name: Zm_4deg_Cold_P Parameter: Timepoint (hr) Value: 6
  misc_feature: MA Experiment 108534 PARAMETER Experiment Name: Zm_4deg_Cold_P Parameter: Tissue Value: Aerial
  misc_feature: MA Experiment ID: 108544 Result: Down-regulated in Transcription
  misc_feature: MA Experiment ID: 20000480 Result: Down-regulated in Transcription
  misc_feature: MA Experiment 20000480 PARAMETER Experiment Name: Zm_Drought_P Parameter: Age (day) Value: 11
  misc_feature: MA Experiment 20000480 PARAMETER Experiment Name: Zm_Drought_P Parameter: Organism Value: Zea mays
  misc_feature: MA Experiment 20000480 PARAMETER Experiment Name: Zm_Drought_P Parameter: Plant Line Value: 35A19
  misc_feature: MA Experiment 20000480 PARAMETER Experiment Name: Zm_Drought_P Parameter: Timepoint (hr) Value: 72
  misc_feature: MA Experiment 20000480 PARAMETER Experiment Name: Zm_Drought_P Parameter: Tissue Value: Aerial
  misc_feature: MA Experiment 20000480 PARAMETER Experiment Name: Zm_Drought_P Parameter: Treatment Value: Drought vs. No Drought
  misc_feature: MA Experiment ID: 20000626 Result: Down-regulated in Transcription
  misc_feature: MA Experiment 20000626 PARAMETER Experiment Name: Zm_Herbicide-Treatments_P Parameter: Timepoint (hr) Value: 12
  misc_feature: MA Experiment 20000626 PARAMETER Experiment Name: Zm_Herbicide-Treatments_P Parameter: Tissue Value: Aerial
  misc_feature: MA Experiment 20000626 PARAMETER Experiment Name: Zm_Herbicide-Treatments_P Parameter: Treatment Value: Roundup vs. No Treatment
ggctggctgcccccgctgctctcctctcctccgagatcccggcaccgtcctgtcccgccgcgccgacagctccccgcctagactgctgcacgcgcggatctcgcgtcgccttccgcccagctgcgatgcatattcgcgccgccgccgccgccgccgccgcacttgtcctcctcctcgcgctctccgtccccgtctccgccgccgaccaggatgctaatggcgctgccgggaatggcactggagtcggcgccgaccgcctggaccgccgcaccaagatgttcctccaccacacggtgcgcgcggccgcggccggggcgcacgacacggggctggggctcctcgacgccttcttcgccagcctgtccatgatcgtcgtcagcgagattggcgatgagacgttcatcatcgcggcgctgatggcgatgcggcaccccaagtcgacggtgctctcgggcgcactgtcggcgcttgtagttatgacggtgctgtctactggactaggcaggattgttccgaatttgatatcgaggaagcacactaacagcgcggcgacagtcctctatgcattttttgggctacggctcctgtacatcgcttggaggtcagattccaaggcatcacagaagaaggaaatagaagaggtagaggaaaagctggaagcaggccaagggaagtcaacatttagacgtgttttctcgagattctgcactcctattttcctggagtcatttgtgttgaccttcttggcggagtggggcgaccgaagtcagatagctacaatagcgctggcgacccacaagaacgcggtcggagtcgctacgggagcgaccttggggcacaccatctgcacgtcgatcgcggtggtgggcggcagcatgctggcctccaagatatctcagggcacggtcgccaccgtcggaggcctcctcttccttgggttctctctttcgtcgtatttctacccgccattgtagtaccaccctgtcatgcgagccccctatttgtttcttggccagcttcctcattgatccagtgacccttgtcctgcggcattttttttcctgtactagtaaagcatacatggatatgtgtagtaggtagggatatatacgatcattgccaatgtataccatacaagtcatgtcatggattcaaaaacagacggaagagctttttgtcncgaattc

SEQ ID NO: 14473 - protein, 323 aa, Zea mays subsp. mays
  peptide (1)..(323): Ceres Seq. ID no. 12436466
  misc_feature (239)..(314): Pfam Name: Uncharacterized protein family UPF0016 Pfam Description: Uncharacterized protein family UPF0016
  misc_feature (108)..(323): Homolog of NCBI NO: 18421551 NR Description: transmembrane protein FT27/PFT27-like; protein At5g36290.1, supported by cDNA: 12993., supported by cDNA: [Arabidopsis thaliana] >gi|15450794|gb|AAK96668.1| transmembrane
  misc_feature (108)..(303): Homolog of NCBI NO: 9759042 NR Description: transmembrane protein FT27/PFT27-like
  misc_feature (207)..(322): Homolog of NCBI NO: 20385488 NR Description: transmembrane protein HTP-1 [Danio rerio]
  misc_feature (110)..(219): Homolog of NCBI NO: 20385488 NR Description: transmembrane protein HTP-1 [Danio rerio]
  misc_feature (96)..(268): Homolog of NCBI NO: 34877387 NR Description: similar to probable transmembrane protein FT27 -
  misc_feature (270)..(322): Homolog of NCBI NO: 34877387 NR Description: similar to probable transmembrane protein FT27 -
  misc_feature (113)..(319): Homolog of NCBI NO: 15420543 NR Description: putative membrane protein [Crithidia fasciculata]
  misc_feature (112)..(318): Homolog of NCBI NO: 15222613 NR Description: transmembrane protein, putative; protein id: supported by cDNA: 40780. [Arabidopsis thaliana]
  misc_feature (116)..(319): Homolog of NCBI NO: 17556152 NR Description: Uncharacterized protein family UPF0016 (32.1 kD) elegans] >gi|13491294|gb|AAK27882.1| Hypothetical protein
  misc_feature (112)..(318): Homolog of NCBI NO: 21593636 NR Description: transmembrane protein, putative [Arabidopsis
LAAPAALLSSEIPAPSCPAAPTAPRLDCCTRGSRVAFRPAAMHIRAAAAAAAALVLLLALSVPVSAADQDANGAAGNGTGVGADRLDRRTKMFLHHTVRAAAAGAHDTGLGLLDAFFASLSMIVVSEIGDETFIIAALMAMRHPKSTVLSGALSALVVMTVLSTGLGRIVPNLISRKHTNSAATVLYAFFGLRLLYIAWRSDSKASQKKEIEEVEEKLEAGQGKSTFRRVFSRFCTPIFLESFVLTFLAEWGDRSQIATIALATHKNAVGVATGATLGHTICTSIAVVGGSMLASKISQGTVATVGGLLFLGFSLSSYFYPPL

SEQ ID NO: 14474 - protein, 282 aa, Zea mays subsp. mays
  peptide (1)..(282): Ceres Seq. ID no. 12436467
  misc_feature (198)..(273): Pfam Name: Uncharacterized protein family UPF0016 Pfam Description: Uncharacterized protein family UPF0016
  misc_feature (67)..(282): Homolog of NCBI NO: 18421551 NR Description: transmembrane protein FT27/PFT27-like; protein At5g36290.1, supported by cDNA: 12993., supported by cDNA: [Arabidopsis thaliana] >gi|15450794|gb|AAK96668.1| transmembrane
  misc_feature (67)..(262): Homolog of NCBI NO: 9759042 NR Description: transmembrane protein FT27/PFT27-like
  misc_feature (166)..(281): Homolog of NCBI NO: 20385488 NR Description: transmembrane protein HTP-1 [Danio rerio]
  misc_feature (69)..(178): Homolog of NCBI NO: 20385488 NR Description: transmembrane protein HTP-1 [Danio rerio]
  misc_feature (55)..(227): Homolog of NCBI NO: 34877387 NR Description: similar to probable transmembrane protein FT27 -
  misc_feature (229)..(281): Homolog of NCBI NO: 34877387 NR Description: similar to probable transmembrane protein FT27 -
  misc_feature (72)..(278): Homolog of NCBI NO: 15420543 NR Description: putative membrane protein [Crithidia fasciculata]
  misc_feature (71)..(277): Homolog of NCBI NO: 15222613 NR Description: transmembrane protein, putative; protein id: supported by cDNA: 40780. [Arabidopsis thaliana]
  misc_feature (75)..(278): Homolog of NCBI NO: 17556152 NR Description: Uncharacterized protein family UPF0016 (32.1 kD) elegans] >gi|13491294|gb|AAK27882.1| Hypothetical protein
  misc_feature (71)..(277): Homolog of NCBI NO: 21593636 NR Description: transmembrane protein, putative [Arabidopsis
MHIRAAAAAAAALVLLLALSVPVSAADQDANGAAGNGTGVGADRLDRRTKMFLHHTVRAAAAGAHDTGLGLLDAFFASLSMIVVSEIGDETFIIAALMAMRHPKSTVLSGALSALVVMTVLSTGLGRIVPNLISRKHTNSAATVLYAFFGLRLLYIAWRSDSKASQKKEIEEVEEKLEAGQGKSTFRRVFSRFCTPIFLESFVLTFLAEWGDRSQIATIALATHKNAVGVATGATLGHTICTSIAVVGGSMLASKISQGTVATVGGLLFLGFSLSSYFYPPL

SEQ ID NO: 14475 - protein, 232 aa, Zea mays subsp. mays
  peptide (1)..(232): Ceres Seq. ID no. 12436468
  misc_feature (148)..(223): Pfam Name: Uncharacterized protein family UPF0016 Pfam Description: Uncharacterized protein family UPF0016
  misc_feature (17)..(232): Homolog of NCBI NO: 18421551 NR Description: transmembrane protein FT27/PFT27-like; protein At5g36290.1, supported by cDNA: 12993., supported by cDNA: [Arabidopsis thaliana] >gi|15450794|gb|AAK96668.1| transmembrane
  misc_feature (17)..(212): Homolog of NCBI NO: 9759042 NR Description: transmembrane protein FT27/PFT27-like
  misc_feature (116)..(231): Homolog of NCBI NO: 20385488 NR Description: transmembrane protein HTP-1 [Danio rerio]
  misc_feature (19)..(128): Homolog of NCBI NO: 20385488 NR Description: transmembrane protein HTP-1 [Danio rerio]
  misc_feature (5)..(177): Homolog of NCBI NO: 34877387 NR Description: similar to probable transmembrane protein FT27 -
  misc_feature (179)..(231): Homolog of NCBI NO: 34877387 NR Description: similar to probable transmembrane protein FT27 -
  misc_feature (22)..(228): Homolog of NCBI NO: 15420543 NR Description: putative membrane protein [Crithidia fasciculata]
  misc_feature (21)..(227): Homolog of NCBI NO: 15222613 NR Description: transmembrane protein, putative; protein id: supported by cDNA: 40780. [Arabidopsis thaliana]
  misc_feature (25)..(228): Homolog of NCBI NO: 17556152 NR Description: Uncharacterized protein family UPF0016 (32.1 kD) elegans] >gi|13491294|gb|AAK27882.1| Hypothetical protein
  misc_feature (21)..(227): Homolog of NCBI NO: 21593636 NR Description: transmembrane protein, putative [Arabidopsis
MFLHHTVRAAAAGAHDTGLGLLDAFFASLSMIVVSEIGDETFIIAALMAMRHPKSTVLSGALSALVVMTVLSTGLGRIVPNLISRKHTNSAATVLYAFFGLRLLYIAWRSDSKASQKKEIEEVEEKLEAGQGKSTFRRVFSRFCTPIFLESFVLTFLAEWGDRSQIATIALATHKNAVGVATGATLGHTICTSIAVVGGSMLASKISQGTVATVGGLLFLGFSLSSYFYPPL

SEQ ID NO: 14476 - DNA, 503 bp, Zea mays subsp. mays
  misc_feature (1)..(503): Ceres Seq. ID no. 3629574
  misc_feature: MA Experiment ID: 20000534 Result: Up-regulated in Transcription
  misc_feature: MA Experiment 20000534 PARAMETER Experiment Name: Zm_Hybrid_Pollen_P Parameter: Age (day) Value: 8
  misc_feature: MA Experiment 20000534 PARAMETER Experiment Name: Zm_Hybrid_Pollen_P Parameter: Organism Value: Zea mays
  misc_feature: MA Experiment 20000534 PARAMETER Experiment Name: Zm_Hybrid_Pollen_P Parameter: Plant Line Value: 35A19
  misc_feature: MA Experiment 20000534 PARAMETER Experiment Name: Zm_Hybrid_Pollen_P Parameter: Tissue Value: Pollen vs. Aerial
aattgatctaattcgccggatcggacagcaacttttggaatctgttgcattcatgcatcgtcttcagctaattcatactgatctgaaaccagagaacatcctcctcgtttcttcagattatgtcaagttacctgatcccaaggacggatcattctcaaggaaactgccaaaatcaagtgccattaaattgattgactttggaagtgcagcataccatcaccaggatcgcagttacattgtatctaccagacactatcgcgcccctgaagttattttgggacatggatggagctatccatgtgatatctggagtgttggttgtatacttgttgagctttgctcgggtgagacactgtttcagactcacgataacttggaacaccttgcaatgatggatagagttctaggtcctcttccacggcacatgctggaaagagccgaccagcatgcggagaagtacckcagaaaaggaggattgaactggccacaagcaataacaacag

SEQ ID NO: 14477 - protein, 167 aa, Zea mays subsp. mays
  peptide (1)..(167): Ceres Seq. ID no. 3629575
  misc_feature (1)..(166): Pfam Name: Protein kinase domain Pfam Description: Protein kinase domain
  misc_feature (1)..(166): Homolog of NCBI NO: 7489189 NR Description: protein kinase PK12 (EC 2.7.1.-), - common tobacco >gi|2911280|gb|AAC04324.1| PK12 protein kinase
  misc_feature (1)..(166): Homolog of NCBI NO: 601787 NR Description: protein kinase
  misc_feature (1)..(166): Homolog of NCBI NO: 15231839 NR Description: protein kinase (AME2/AFC1); protein id: supported by cDNA: gi_601786, supported by cDNA: gi_642131 thaliana] >gi|26454604|sp|P51566|AFC1_ARATH Protein kinase AFC1
  misc_feature (1)..(166): Homolog of NCBI NO: 30693861 NR Description: protein kinase (AME2/AFC1) [Arabidopsis thaliana]
  misc_feature (1)..(163): Homolog of NCBI NO: 7211773 NR Description: protein kinase MK5 [Mesembryanthemum crystallinum]
  misc_feature (1)..(163): Homolog of NCBI NO: 34908100 NR Description: putative protein kinase AFC1 [Oryza sativa
  misc_feature (1)..(166): Homolog of NCBI NO: 15233948 NR Description: protein kinase (AFC2); protein id: At4g24740.1, by cDNA: gi_601788, supported by cDNA: gi_642129 [Arabidopsis >gi|1703200|sp|P51567|AFC2_ARATH Protein kinase AFC2
  misc_feature (1)..(163): Homolog of NCBI NO: 34912246 NR Description: putative protein kinase AFC3 [Oryza sativa
  misc_feature (3)..(163): Homolog of NCBI NO: 601791 NR Description: protein kinase
  misc_feature (3)..(163): Homolog of NCBI NO: 15233872 NR Description: protein kinase AME3; protein id: At4g32660.1, by cDNA: gi_642133 [Arabidopsis thaliana]
  misc_feature (154)..(154): Xaa is any aa, unknown or other
IDLIRRIGQQLLESVAFMHRLQLIHTDLKPENILLVSSDYVKLPDPKDGSFSRKLPKSSAIKLIDFGSAAYHHQDRSYIVSTRHYRAPEVILGHGWSYPCDIWSVGCILVELCSGETLFQTHDNLEHLAMMDRVLGPLPRHMLERADQHAEKYXRKGGLNWPQAITT

SEQ ID NO: 14478 - protein, 150 aa, Zea mays subsp. mays
  peptide (1)..(150): Ceres Seq. ID no. 3629576
  misc_feature (1)..(149): Pfam Name: Protein kinase domain Pfam Description: Protein kinase domain
  misc_feature (1)..(149): Homolog of NCBI NO: 7489189 NR Description: protein kinase PK12 (EC 2.7.1.-), - common tobacco >gi|2911280|gb|AAC04324.1| PK12 protein kinase
  misc_feature (1)..(149): Homolog of NCBI NO: 601787 NR Description: protein kinase
  misc_feature (1)..(149): Homolog of NCBI NO: 15231839 NR Description: protein kinase (AME2/AFC1); protein id: supported by cDNA: gi_601786, supported by cDNA: gi_642131 thaliana] >gi|26454604|sp|P51566|AFC1_ARATH Protein kinase AFC1
  misc_feature (1)..(149): Homolog of NCBI NO: 30693861 NR Description: protein kinase (AME2/AFC1) [Arabidopsis thaliana]
  misc_feature (1)..(146): Homolog of NCBI NO: 7211773 NR Description: protein kinase MK5 [Mesembryanthemum crystallinum]
  misc_feature (1)..(146): Homolog of NCBI NO: 34908100 NR Description: putative protein kinase AFC1 [Oryza sativa
  misc_feature (1)..(149): Homolog of NCBI NO: 15233948 NR Description: protein kinase (AFC2); protein id: At4g24740.1, by cDNA: gi_601788, supported by cDNA: gi_642129 [Arabidopsis >gi|1703200|sp|P51567|AFC2_ARATH Protein kinase AFC2
  misc_feature (1)..(146): Homolog of NCBI NO: 34912246 NR Description: putative protein kinase AFC3 [Oryza sativa
  misc_feature (1)..(146): Homolog of NCBI NO: 601791 NR Description: protein kinase
  misc_feature (1)..(146): Homolog of NCBI NO: 15233872 NR Description: protein kinase AME3; protein id: At4g32660.1, by cDNA: gi_642133 [Arabidopsis thaliana]
  misc_feature (137)..(137): Xaa is any aa, unknown or other
MHRLQLIHTDLKPENILLVSSDYVKLPDPKDGSFSRKLPKSSAIKLIDFGSAAYHHQDRSYIVSTRHYRAPEVILGHGWSYPCDIWSVGCILVELCSGETLFQTHDNLEHLAMMDRVLGPLPRHMLERADQHAEKYXRKGGLNWPQAITT

SEQ ID NO: 14479 - DNA, 341 bp, Zea mays subsp. mays
  misc_feature (1)..(341): Ceres Seq. ID no. 3624239
  misc_feature: MA Experiment ID: 108527 Result: Up-regulated in Transcription
  misc_feature: MA Experiment 108527 PARAMETER Experiment Name: Zm_5mM_NO_P Parameter: Age (day) Value: 8
  misc_feature: MA Experiment 108527 PARAMETER Experiment Name: Zm_5mM_NO_P Parameter: Organism Value: Zea mays
  misc_feature: MA Experiment 108527 PARAMETER Experiment Name: Zm_5mM_NO_P Parameter: Plant Line Value: 35A19
  misc_feature: MA Experiment 108527 PARAMETER Experiment Name: Zm_5mM_NO_P Parameter: Timepoint (hr) Value: 6
  misc_feature: MA Experiment 108527 PARAMETER Experiment Name: Zm_5mM_NO_P Parameter: Tissue Value: Aerial
  misc_feature: MA Experiment 108527 PARAMETER Experiment Name: Zm_5mM_NO_P Parameter: Treatment Value: 5mM NO vs. No Treatment
  misc_feature: MA Experiment ID: 108534 Result: Up-regulated in Transcription
  misc_feature: MA Experiment 108534 PARAMETER Experiment Name: Zm_4deg_Cold_P Parameter: Age (hr) Value: 8
  misc_feature: MA Experiment 108534 PARAMETER Experiment Name: Zm_4deg_Cold_P Parameter: Organism Value: Zea mays
  misc_feature: MA Experiment 108534 PARAMETER Experiment Name: Zm_4deg_Cold_P Parameter: Plant Line Value: 35A19
  misc_feature: MA Experiment 108534 PARAMETER Experiment Name: Zm_4deg_Cold_P Parameter: Temperature (deg C) Value: 4 vs. 22
  misc_feature: MA Experiment 108534 PARAMETER Experiment Name: Zm_4deg_Cold_P Parameter: Timepoint (hr) Value: 6
  misc_feature: MA Experiment 108534 PARAMETER Experiment Name: Zm_4deg_Cold_P Parameter: Tissue Value: Aerial
  misc_feature: MA Experiment ID: 108535 Result: Down-regulated in Transcription
  misc_feature: MA Experiment 108535 PARAMETER Experiment Name: Zm_Meristem_P Parameter: Age (day) Value: 8
  misc_feature: MA Experiment 108535 PARAMETER Experiment Name: Zm_Meristem_P Parameter: Organism Value: Zea mays
  misc_feature: MA Experiment 108535 PARAMETER Experiment Name: Zm_Meristem_P Parameter: Plant Line Value: 35A19
  misc_feature: MA Experiment 108535 PARAMETER Experiment Name: Zm_Meristem_P Parameter: Tissue Value: Root Meristem vs. Above Root Meristem
  misc_feature: MA Experiment ID: 108536 Result: Up-regulated in Transcription
  misc_feature: MA Experiment 108536 PARAMETER Experiment Name: Zm_Meristem_P Parameter: Age (day) Value: 8
  misc_feature: MA Experiment 108536 PARAMETER Experiment Name: Zm_Meristem_P Parameter: Organism Value: Zea mays
  misc_feature: MA Experiment 108536 PARAMETER Experiment Name: Zm_Meristem_P Parameter: Plant Line Value: 35A19
  misc_feature: MA Experiment 108536 PARAMETER Experiment Name: Zm_Meristem_P Parameter: Tissue Value: Shoot Meristem vs. Above Shoot Meristem
  misc_feature: MA Experiment ID: 20000478 Result: Up-regulated in Transcription
  misc_feature: MA Experiment 20000478 PARAMETER Experiment Name: Zm_5mM_SA_P Parameter: Age (day) Value: 11
  misc_feature: MA Experiment 20000478 PARAMETER Experiment Name: Zm_5mM_SA_P Parameter: Organism Value: Zea mays
  misc_feature: MA Experiment 20000478 PARAMETER Experiment Name: Zm_5mM_SA_P Parameter: Plant Line Value: 35A19
  misc_feature: MA Experiment 20000478 PARAMETER Experiment Name: Zm_5mM_SA_P Parameter: Timepoint (hr) Value: 72
  misc_feature: MA Experiment 20000478 PARAMETER Experiment Name: Zm_5mM_SA_P Parameter: Tissue Value: Aerial
  misc_feature: MA Experiment 20000478 PARAMETER Experiment Name: Zm_5mM_SA_P Parameter: Treatment Value: 5mM SA vs. No Treatment
  misc_feature: MA Experiment ID: 20000479 Result: Up-regulated in Transcription
  misc_feature: MA Experiment 20000479 PARAMETER Experiment Name: Zm_Drought_P Parameter: Age (day) Value: 10
  misc_feature: MA Experiment 20000479 PARAMETER Experiment Name: Zm_Drought_P Parameter: Organism Value: Zea mays
  misc_feature: MA Experiment 20000479 PARAMETER Experiment Name: Zm_Drought_P Parameter: Plant Line Value: 35A19
  misc_feature: MA Experiment 20000479 PARAMETER Experiment Name: Zm_Drought_P Parameter: Timepoint (hr) Value: 48
  misc_feature: MA Experiment 20000479 PARAMETER Experiment Name: Zm_Drought_P Parameter: Tissue Value: Aerial
  misc_feature: MA Experiment 20000479 PARAMETER Experiment Name: Zm_Drought_P Parameter: Treatment Value: Drought vs. No Drought
  misc_feature: MA Experiment ID: 20000480 Result: Up-regulated in Transcription
  misc_feature: MA Experiment 20000480 PARAMETER Experiment Name: Zm_Drought_P Parameter: Age (day) Value: 11
  misc_feature: MA Experiment 20000480 PARAMETER Experiment Name: Zm_Drought_P Parameter: Organism Value: Zea mays
  misc_feature: MA Experiment 20000480 PARAMETER Experiment Name: Zm_Drought_P Parameter: Plant Line Value: 35A19
  misc_feature: MA Experiment 20000480 PARAMETER Experiment Name: Zm_Drought_P Parameter: Timepoint (hr) Value: 72
  misc_feature: MA Experiment 20000480 PARAMETER Experiment Name: Zm_Drought_P Parameter: Tissue Value: Aerial
  misc_feature: MA Experiment 20000480 PARAMETER Experiment Name: Zm_Drought_P Parameter: Treatment Value: Drought vs. No Drought
  misc_feature: MA Experiment ID: 20000630 Result: Up-regulated in Transcription
  misc_feature: MA Experiment 20000630 PARAMETER Experiment Name: Zm_Herbicide-Treatments_P Parameter: Timepoint (hr) Value: 4
  misc_feature: MA Experiment 20000630 PARAMETER Experiment Name: Zm_Herbicide-Treatments_P Parameter: Tissue Value: Aerial
  misc_feature: MA Experiment 20000630 PARAMETER Experiment Name: Zm_Herbicide-Treatments_P Parameter: Treatment Value: Roundup vs. No Treatment
tgcgcgccaactactacccgcggtgcccgcagccggacctgacgctgggcctctccgcgcactcggaccccggcgccctcaccgtcctcctcgcggacgagcacgtccgcggcctgcaggtccgccgcgccgccgccgacgactgggtcaccgtgcagcccgtccgcgacgccttcatcgtcaacgtcggcgaccaagtccagatactgagcaactccgtgtacaagagcgtggagcaccgggtggtcgtgaacgccgaggaggagcgcatttccctcgcgctcttctacaaccccaagggcgacgtccccatcrccccggcgccggadctggkggcggct

SEQ ID NO: 14480 - protein, 113 aa, Zea mays subsp. mays
  peptide (1)..(113): Ceres Seq. ID no. 3624240
  misc_feature (7)..(102): Pfam Name: Cupin Pfam Description: Cupin
  misc_feature (105)..(105): Xaa is any aa, unknown or other
  misc_feature (110)..(110): Xaa is any aa, unknown or other
  misc_feature (111)..(111): Xaa is any aa, unknown or other
ARQLLPAVPAAGPDAGPLRALGPRRPHRPPRGRARPRPAGPPRRRRRLGHRAARPRRLHRQRRRPSPDTEQLRVQERGAPGGRERRGGAHFPRALLQPQGRRPHXPGAGXXGG

SEQ ID NO: 14481 - protein, 113 aa, Zea mays subsp. mays
  peptide (1)..(113): Ceres Seq. ID no. 3624241
  misc_feature (1)..(72): Pfam Name: 2OG-Fe(II) oxygenase superfamily Pfam Description: 2OG-Fe(II) oxygenase superfamily
  misc_feature (1)..(72): Homolog of NCBI NO: 34907994 NR Description: leucoanthocyanidin dioxygenase-like protein
  misc_feature (64)..(110): Homolog of NCBI NO: 34907994 NR Description: leucoanthocyanidin dioxygenase-like protein
  misc_feature (1)..(110): Homolog of NCBI NO: 15229694 NR Description: putative leucoanthocyanidin dioxygenase; protein At3g11180.1 [Arabidopsis thaliana]
  misc_feature (1)..(110): Homolog of NCBI NO: 15228785 NR Description: leucoanthocyanidin dioxygenase -like protein; id: At3g55970.1 [Arabidopsis thaliana] >gi|11255840|pir||T49209
  misc_feature (1)..(110): Homolog of NCBI NO: 15239179 NR Description: leucoanthocyanidin dioxygenase-like protein; id: At5g05600.1, supported by cDNA: 13012., supported by cDNA: [Arabidopsis thaliana] >gi|10178137|dbj|BAB11549.1|
  misc_feature (1)..(110): Homolog of NCBI NO: 21537324 NR Description: leucoanthocyanidin dioxygenase-like protein
  misc_feature (1)..(112): Homolog of NCBI NO: 15224472 NR Description: putative anthocyanidin synthase; protein id: supported by cDNA: 256433., supported by cDNA: gi_17065133, by cDNA: gi_20259907 [Arabidopsis thaliana]
  misc_feature (1)..(112): Homolog of NCBI NO: 21554535 NR Description: putative anthocyanidin synthase [Arabidopsis
  misc_feature (15)..(110): Homolog of NCBI NO: 5813796 NR Description: unknown [Pisum sativum]
  misc_feature (3)..(112): Homolog of NCBI NO: 38345872 NR Description: OSJNBa0064M23.14 [Oryza sativa (japonica
  misc_feature (105)..(105): Xaa is any aa, unknown or other
  misc_feature (109)..(109): Xaa is any aa, unknown or other
  misc_feature (111)..(111): Xaa is any aa, unknown or other
RANYYPRCPQPDLTLGLSAHSDPGALTVLLADEHVRGLQVRRAAADDWVTVQPVRDAFIVNVGDQVQILSNSVYKSVEHRVVVNAEEERISLALFYNPKGDVPIXPAPXLXAA

SEQ ID NO: 14482 - DNA, 1073 bp, Zea mays subsp. mays; identical to SEQ ID NO: 14423
  misc_feature (1)..(1073): Ceres Seq. ID no. 12595306
  misc_feature: MA Experiment ID: 108528 Result: Down-regulated in Transcription
  misc_feature: MA Experiment 108528 PARAMETER Experiment Name: Zm_Imbibed_Seeds_P Parameter: Age (day) Value: 5 vs. 2
  misc_feature: MA Experiment 108528 PARAMETER Experiment Name: Zm_Imbibed_Seeds_P Parameter: Organism Value: Zea mays
  misc_feature: MA Experiment 108528 PARAMETER Experiment Name: Zm_Imbibed_Seeds_P Parameter: Plant Line Value: 35A19
  misc_feature: MA Experiment 108528 PARAMETER Experiment Name: Zm_Imbibed_Seeds_P Parameter: Tissue Value: Aerial vs. Embryo
  misc_feature: MA Experiment ID: 108529 Result: Up-regulated in Transcription
  misc_feature: MA Experiment 108529 PARAMETER Experiment Name: Zm_Imbibed_Seeds_P Parameter: Age (day) Value: 5 vs. 2
  misc_feature: MA Experiment 108529 PARAMETER Experiment Name: Zm_Imbibed_Seeds_P Parameter: Organism Value: Zea mays
  misc_feature: MA Experiment 108529 PARAMETER Experiment Name: Zm_Imbibed_Seeds_P Parameter: Plant Line Value: 35A19
  misc_feature: MA Experiment 108529 PARAMETER Experiment Name: Zm_Imbibed_Seeds_P Parameter: Tissue Value: Roots vs. Embryo
  misc_feature: MA Experiment ID: 108530 Result: Down-regulated in Transcription
  misc_feature: MA Experiment 108530 PARAMETER Experiment Name: Zm_Imbibed_Seeds_P Parameter: Age (day) Value: 6 vs. 2
  misc_feature: MA Experiment 108530 PARAMETER Experiment Name: Zm_Imbibed_Seeds_P Parameter: Organism Value: Zea mays
  misc_feature: MA Experiment 108530 PARAMETER Experiment Name: Zm_Imbibed_Seeds_P Parameter: Plant Line Value: 35A19
  misc_feature: MA Experiment 108530 PARAMETER Experiment Name: Zm_Imbibed_Seeds_P Parameter: Tissue Value: Aerial vs. Embryo
  misc_feature: MA Experiment ID: 108535 Result: Down-regulated in Transcription
  misc_feature: MA Experiment 108535 PARAMETER Experiment Name: Zm_Meristem_P Parameter: Age (day) Value: 8
  misc_feature: MA Experiment 108535 PARAMETER Experiment Name: Zm_Meristem_P Parameter: Organism Value: Zea mays
  misc_feature: MA Experiment 108535 PARAMETER Experiment Name: Zm_Meristem_P Parameter: Plant Line Value: 35A19
  misc_feature: MA Experiment 108535 PARAMETER Experiment Name: Zm_Meristem_P Parameter: Tissue Value: Root Meristem vs. Above Root Meristem
  misc_feature: MA Experiment ID: 108543 Result: Up-regulated in Transcription
  misc_feature: MA Experiment ID: 108545 Result: Down-regulated in Transcription
  misc_feature: MA Experiment 108545 PARAMETER Experiment Name: Zm_Imbibed_Seeds_P Parameter: Age (day) Value: 3 vs. 2
  misc_feature: MA Experiment 108545 PARAMETER Experiment Name: Zm_Imbibed_Seeds_P Parameter: Organism Value: Zea mays
  misc_feature: MA Experiment 108545 PARAMETER Experiment Name: Zm_Imbibed_Seeds_P Parameter: Plant Line Value: 35A19
  misc_feature: MA Experiment 108545 PARAMETER Experiment Name: Zm_Imbibed_Seeds_P Parameter: Tissue Value: Aerial vs. Embryo
  misc_feature: MA Experiment ID: 108546 Result: Up-regulated in Transcription
  misc_feature: MA Experiment 108546 PARAMETER Experiment Name: Zm_Imbibed_Seeds_P Parameter: Age (day) Value: 3 vs. 2
  misc_feature: MA Experiment 108546 PARAMETER Experiment Name: Zm_Imbibed_Seeds_P Parameter: Organism Value: Zea mays
  misc_feature: MA Experiment 108546 PARAMETER Experiment Name: Zm_Imbibed_Seeds_P Parameter: Plant Line Value: 35A19
  misc_feature: MA Experiment 108546 PARAMETER Experiment Name: Zm_Imbibed_Seeds_P Parameter: Tissue Value: Roots vs. Embryo
  misc_feature: MA Experiment ID: 108547 Result: Down-regulated in Transcription
  misc_feature: MA Experiment 108547 PARAMETER Experiment Name: Zm_Imbibed_Seeds_P Parameter: Age (day) Value: 4 vs. 2
  misc_feature: MA Experiment 108547 PARAMETER Experiment Name: Zm_Imbibed_Seeds_P Parameter: Organism Value: Zea mays
  misc_feature: MA Experiment 108547 PARAMETER Experiment Name: Zm_Imbibed_Seeds_P Parameter: Plant Line Value: 35A19
  misc_feature: MA Experiment 108547 PARAMETER Experiment Name: Zm_Imbibed_Seeds_P Parameter: Tissue Value: Aerial vs. Embryo
  misc_feature: MA Experiment ID: 108687 Result: Down-regulated in Transcription
  misc_feature: MA Experiment 108687 PARAMETER Experiment Name: Zm_Embryos-Flowers__P Parameter: Tissue Value: Embryo vs. Aerial+
  misc_feature: MA Experiment ID: 20000478 Result: Down-regulated in Transcription
  misc_feature: MA Experiment 20000478 PARAMETER Experiment Name: Zm_5mM_SA_P Parameter: Age (day) Value: 11
  misc_feature: MA Experiment 20000478 PARAMETER Experiment Name: Zm_5mM_SA_P Parameter: Organism Value: Zea mays
  misc_feature: MA Experiment 20000478 PARAMETER Experiment Name: Zm_5mM_SA_P Parameter: Plant Line Value: 35A19
  misc_feature: MA Experiment 20000478 PARAMETER Experiment Name: Zm_5mM_SA_P Parameter: Timepoint (hr) Value: 72
  misc_feature: MA Experiment 20000478 PARAMETER Experiment Name: Zm_5mM_SA_P Parameter: Tissue Value: Aerial
  misc_feature: MA Experiment 20000478 PARAMETER Experiment Name: Zm_5mM_SA_P Parameter: Treatment Value: 5mM SA vs. No Treatment
  misc_feature: MA Experiment ID: 20001612 Result: Down-regulated in Transcription
  misc_feature: MA Experiment 20001612 PARAMETER Experiment Name: Zm_50ppm_KNO3_L-to-H_P Parameter: Age (day) Value: 19
  misc_feature: MA Experiment 20001612 PARAMETER Experiment Name: Zm_50ppm_KNO3_L-to-H_P Parameter: Organism Value: Zea mays
  misc_feature: MA Experiment 20001612 PARAMETER Experiment Name: Zm_50ppm_KNO3_L-to-H_P Parameter: Plant Line Value: 35A19
  misc_feature: MA Experiment 20001612 PARAMETER Experiment Name: Zm_50ppm_KNO3_L-to-H_P Parameter: Timepoint (hr) Value: 8
  misc_feature: MA Experiment 20001612 PARAMETER Experiment Name: Zm_50ppm_KNO3_L-to-H_P Parameter: Tissue Value: Roots
  misc_feature: MA Experiment 20001612 PARAMETER Experiment Name: Zm_50ppm_KNO3_L-to-H_P Parameter: Treatment Value: 50ppm KNO3 vs. 50ppm KCl

SEQ ID NO: 14483 - protein, 306 aa, Zea mays subsp. mays; identical to SEQ ID NO: 14424
  peptide (1)..(306): Ceres Seq. ID no. 12595307
  misc_feature (31)..(193): Pfam Name: Aminotransferase class-III Pfam Description: Aminotransferase class-III
  misc_feature (31)..(193): Pfam Name: Aminotransferase class-III Pfam Description: Aminotransferase class-III

SEQ ID NO: 14484 - protein, 272 aa, Zea mays subsp. mays; identical to SEQ ID NO: 14425
  peptide (1)..(272): Ceres Seq. ID no. 12595308
  misc_feature (33)..(254): Pfam Name: Major intrinsic protein Pfam Description: Major intrinsic protein
  misc_feature (33)..(254): Pfam Name: Major intrinsic protein Pfam Description: Major intrinsic protein
  misc_feature (23)..(272): Homolog of NCBI NO: 13447823 NR Description: tonoplast membrane integral protein ZmTIP2-2 [Zea
  misc_feature (23)..(272): Homolog of NCBI NO: 13447821 NR Description: tonoplast membrane integral protein ZmTIP2-1 [Zea
  misc_feature (23)..(272): Homolog of NCBI NO: 14140156 NR Description: putative aquaporin [Oryza sativa]
  misc_feature (23)..(271): Homolog of NCBI NO: 7441255 NR Description: probable tonoplast aquaporin - maize
  misc_feature (23)..(271): Homolog of NCBI NO: 9623335 NR Description: tonoplast intrinsic protein 1 [Hordeum vulgare]
  misc_feature (23)..(272): Homolog of NCBI NO: 13447821 NR Description: tonoplast membrane integral protein ZmTIP2-1 [Zea
  misc_feature (23)..(271): Homolog of NCBI NO: 7441255 NR Description: probable tonoplast aquaporin - maize
  misc_feature (23)..(272): Homolog of NCBI NO: 126959 NR Description: Tonoplast intrinsic protein, root-specific RB7-5A
  misc_feature (23)..(272): Homolog of NCBI NO: 11276918 NR Description: membrane channel protein [imported] - potato >gi|1518057|gb|AAB67881.1| membrane channel protein [Solanum
  misc_feature (23)..(272): Homolog of NCBI NO: 2058706 NR Description: Rb7 [Lycopersicon esculentum]
  misc_feature (23)..(272): Homolog of NCBI NO: 7441268 NR Description: probable membrane protein - carrot
  misc_feature (23)..(271): Homolog of NCBI NO: 29650739 NR Description: tonoplast water channel [Zea mays]
  misc_feature (23)..(271): Homolog of NCBI NO: 9623335 NR Description: tonoplast intrinsic protein 1 [Hordeum vulgare]
  misc_feature (23)..(272): Homolog of NCBI NO: 14140156 NR Description: putative aquaporin [Oryza sativa]
  misc_feature (23)..(272): Homolog of NCBI NO: 13447823 NR Description: tonoplast membrane integral protein ZmTIP2-2 [Zea
  misc_feature (23)..(271): Homolog of NCBI NO: 29650739 NR Description: tonoplast water channel [Zea mays]
  misc_feature (23)..(272): Homolog of NCBI NO: 7441268 NR Description: probable membrane protein - carrot
  misc_feature (23)..(272): Homolog of NCBI NO: 2058706 NR Description: Rb7 [Lycopersicon esculentum]
  misc_feature (23)..(272): Homolog of NCBI NO: 11276918 NR Description: membrane channel protein [imported] - potato >gi|1518057|gb|AAB67881.1| membrane channel protein [Solanum
  misc_feature (23)..(272): Homolog of NCBI NO: 126959 NR Description: Tonoplast intrinsic protein, root-specific RB7-5A

SEQ ID NO: 14485 - protein, 250 aa, Zea mays subsp. mays; identical to SEQ ID NO: 14426
  peptide (1)..(250): Ceres Seq. ID no. 12595309
  misc_feature (11)..(232): Pfam Name: Major intrinsic protein Pfam Description: Major intrinsic protein
  misc_feature (11)..(232): Pfam Name: Major intrinsic protein Pfam Description: Major intrinsic protein
  misc_feature (1)..(250): Homolog of NCBI NO: 13447823 NR Description: tonoplast membrane integral protein ZmTIP2-2 [Zea
  misc_feature (1)..(250): Homolog of NCBI NO: 13447821 NR Description: tonoplast membrane integral protein ZmTIP2-1 [Zea
  misc_feature (1)..(250): Homolog of NCBI NO: 14140156 NR Description: putative aquaporin [Oryza sativa]
  misc_feature (1)..(249): Homolog of NCBI NO: 7441255 NR Description: probable tonoplast aquaporin - maize
  misc_feature (1)..(249): Homolog of NCBI NO: 9623335 NR Description: tonoplast intrinsic protein 1 [Hordeum vulgare]
  misc_feature (1)..(250): Homolog of NCBI NO: 13447821 NR Description: tonoplast membrane integral protein ZmTIP2-1 [Zea
  misc_feature (1)..(249): Homolog of NCBI NO: 7441255 NR Description: probable tonoplast aquaporin - maize
  misc_feature (1)..(250): Homolog of NCBI NO: 126959 NR Description: Tonoplast intrinsic protein, root-specific RB7-5A
  misc_feature (1)..(250): Homolog of NCBI NO: 11276918 NR Description: membrane channel protein [imported] - potato >gi|1518057|gb|AAB67881.1| membrane channel protein [Solanum
  misc_feature (1)..(250): Homolog of NCBI NO: 2058706 NR Description: Rb7 [Lycopersicon esculentum]
  misc_feature (1)..(250): Homolog of NCBI NO: 7441268 NR Description: probable membrane protein - carrot
  misc_feature (1)..(249): Homolog of NCBI NO: 29650739 NR Description: tonoplast water channel [Zea mays]
  misc_feature (1)..(249): Homolog of NCBI NO: 9623335 NR Description: tonoplast intrinsic protein 1 [Hordeum vulgare]
  misc_feature (1)..(250): Homolog of NCBI NO: 14140156 NR Description: putative aquaporin [Oryza sativa]
  misc_feature (1)..(250): Homolog of NCBI NO: 13447823 NR Description: tonoplast membrane integral protein ZmTIP2-2 [Zea
  misc_feature (1)..(249): Homolog of NCBI NO: 29650739 NR Description: tonoplast water channel [Zea mays]
  misc_feature (1)..(250): Homolog of NCBI NO: 7441268 NR Description: probable membrane protein - carrot
  misc_feature (1)..(250): Homolog of NCBI NO: 2058706 NR Description: Rb7 [Lycopersicon esculentum]
  misc_feature (1)..(250): Homolog of NCBI NO: 11276918 NR Description: membrane channel protein [imported] - potato >gi|1518057|gb|AAB67881.1| membrane channel protein [Solanum
  misc_feature (1)..(250): Homolog of NCBI NO: 126959 NR Description: Tonoplast intrinsic protein, root-specific RB7-5A

SEQ ID NO: 14486 - DNA, 572 bp, Zea mays subsp. mays
  misc_feature (1)..(572): Ceres Seq. ID no. 3629591
  misc_feature: MA Experiment ID: 108504 Result: Up-regulated in Transcription
  misc_feature: MA Experiment 108504 PARAMETER Experiment Name: Zm_Drought_P Parameter: Age (day) Value: 8
  misc_feature: MA Experiment 108504 PARAMETER Experiment Name: Zm_Drought_P Parameter: Organism Value: Zea mays
  misc_feature: MA Experiment 108504 PARAMETER Experiment Name: Zm_Drought_P Parameter: Plant Line Value: 35A19
  misc_feature: MA Experiment 108504 PARAMETER Experiment Name: Zm_Drought_P Parameter: Timepoint (hr) Value: 12
  misc_feature: MA Experiment 108504 PARAMETER Experiment Name: Zm_Drought_P Parameter: Tissue Value: Aerial
  misc_feature: MA Experiment 108504 PARAMETER Experiment Name: Zm_Drought_P Parameter: Treatment Value: Drought vs. No Drought
  misc_feature: MA Experiment ID: 108527 Result: Up-regulated in Transcription
  misc_feature: MA Experiment 108527 PARAMETER Experiment Name: Zm_5mM_NO_P Parameter: Age (day) Value: 8
  misc_feature: MA Experiment 108527 PARAMETER Experiment Name: Zm_5mM_NO_P Parameter: Organism Value: Zea mays
  misc_feature: MA Experiment 108527 PARAMETER Experiment Name: Zm_5mM_NO_P Parameter: Plant Line Value: 35A19
  misc_feature: MA Experiment 108527 PARAMETER Experiment Name: Zm_5mM_NO_P Parameter: Timepoint (hr) Value: 6
  misc_feature: MA Experiment 108527 PARAMETER Experiment Name: Zm_5mM_NO_P Parameter: Tissue Value: Aerial
  misc_feature: MA Experiment 108527 PARAMETER Experiment Name: Zm_5mM_NO_P Parameter: Treatment Value: 5mM NO vs. No Treatment
  misc_feature: MA Experiment ID: 108535 Result: Up-regulated in Transcription
  misc_feature: MA Experiment 108535 PARAMETER Experiment Name: Zm_Meristem_P Parameter: Age (day) Value: 8
  misc_feature: MA Experiment 108535 PARAMETER Experiment Name: Zm_Meristem_P Parameter: Organism Value: Zea mays
  misc_feature: MA Experiment 108535 PARAMETER Experiment Name: Zm_Meristem_P Parameter: Plant Line Value: 35A19
  misc_feature: MA Experiment 108535 PARAMETER Experiment Name: Zm_Meristem_P Parameter: Tissue Value: Root Meristem vs. Above Root Meristem
  misc_feature: MA Experiment ID: 108540 Result: Up-regulated in Transcription
  misc_feature: MA Experiment 108540 PARAMETER Experiment Name: Zm_20percent_PEG_P Parameter: Age (day) Value: 8
  misc_feature: MA Experiment 108540 PARAMETER Experiment Name: Zm_20percent_PEG_P Parameter: Organism Value: Zea mays
  misc_feature: MA Experiment 108540 PARAMETER Experiment Name: Zm_20percent_PEG_P Parameter: Plant Line Value: 35A19
  misc_feature: MA Experiment 108540 PARAMETER Experiment Name: Zm_20percent_PEG_P Parameter: Timepoint (hr) Value: 6
  misc_feature: MA Experiment 108540 PARAMETER Experiment Name: Zm_20percent_PEG_P Parameter: Tissue Value: Aerial
  misc_feature: MA Experiment 108540 PARAMETER Experiment Name: Zm_20percent_PEG_P Parameter: Treatment Value: 20percent PEG vs. No Treatment
  misc_feature: MA Experiment ID: 108556 Result: Up-regulated in Transcription
  misc_feature: MA Experiment 108556 PARAMETER Experiment Name: Zm_Drought_P Parameter: Age (day) Value: 9
  misc_feature: MA Experiment 108556 PARAMETER Experiment Name: Zm_Drought_P Parameter: Organism Value: Zea mays
  misc_feature: MA Experiment 108556 PARAMETER Experiment Name: Zm_Drought_P Parameter: Plant Line Value: 35A19
  misc_feature: MA Experiment 108556 PARAMETER Experiment Name: Zm_Drought_P Parameter: Timepoint (hr) Value: 24
  misc_feature: MA Experiment 108556 PARAMETER Experiment Name: Zm_Drought_P Parameter: Tissue Value: Aerial
  misc_feature: MA Experiment 108556 PARAMETER Experiment Name: Zm_Drought_P Parameter: Treatment Value: Drought vs. No Drought
  misc_feature: MA Experiment ID: 108559 Result: Up-regulated in Transcription
  misc_feature: MA Experiment 108559 PARAMETER Experiment Name: Zm_5mM_NO_P Parameter: Age (day) Value: 8
  misc_feature: MA Experiment 108559 PARAMETER Experiment Name: Zm_5mM_NO_P Parameter: Organism Value: Zea mays
  misc_feature: MA Experiment 108559 PARAMETER Experiment Name: Zm_5mM_NO_P Parameter: Plant Line Value: 35A19
  misc_feature: MA Experiment 108559 PARAMETER Experiment Name: Zm_5mM_NO_P Parameter: Timepoint (hr) Value: 12
  misc_feature: MA Experiment 108559 PARAMETER Experiment Name: Zm_5mM_NO_P Parameter: Tissue Value: Aerial
  misc_feature: MA Experiment 108559 PARAMETER Experiment Name: Zm_5mM_NO_P Parameter: Treatment Value: 5mM NO vs. No Treatment
  misc_feature: MA Experiment ID: 108597 Result: Up-regulated in Transcription
  misc_feature: MA Experiment 108597 PARAMETER Experiment Name: Zm_100uM_ABA_P Parameter: Age (day) Value: 9
  misc_feature: MA Experiment 108597 PARAMETER Experiment Name: Zm_100uM_ABA_P Parameter: Organism Value: Zea mays
  misc_feature: MA Experiment 108597 PARAMETER Experiment Name: Zm_100uM_ABA_P Parameter: Plant Line Value: 35A19
  misc_feature: MA Experiment 108597 PARAMETER Experiment Name: Zm_100uM_ABA_P Parameter: Timepoint (hr) Value: 24
  misc_feature: MA Experiment 108597 PARAMETER Experiment Name: Zm_100uM_ABA_P Parameter: Tissue Value: Aerial
  misc_feature: MA Experiment 108597 PARAMETER Experiment Name: Zm_100uM_ABA_P Parameter: Treatment Value: 100uM ABA vs. No Treatment
  misc_feature: MA Experiment ID: 20000477 Result: Up-regulated in Transcription
  misc_feature: MA Experiment 20000477 PARAMETER Experiment Name: Zm_5mM_SA_P Parameter: Age (day) Value: 10
  misc_feature: MA Experiment 20000477 PARAMETER Experiment Name: Zm_5mM_SA_P Parameter: Organism Value: Zea mays
  misc_feature: MA Experiment 20000477 PARAMETER Experiment Name: Zm_5mM_SA_P Parameter: Plant Line Value: 35A19
  misc_feature: MA Experiment 20000477 PARAMETER Experiment Name: Zm_5mM_SA_P Parameter: Timepoint (hr) Value: 48
  misc_feature: MA Experiment 20000477 PARAMETER Experiment Name: Zm_5mM_SA_P Parameter: Tissue Value: Aerial
  misc_feature: MA Experiment 20000477 PARAMETER Experiment Name: Zm_5mM_SA_P Parameter: Treatment Value: 5mM SA vs. No Treatment
  misc_feature: MA Experiment ID: 20000478 Result: Up-regulated in Transcription
  misc_feature: MA Experiment 20000478 PARAMETER Experiment Name: Zm_5mM_SA_P Parameter: Age (day) Value: 11
  misc_feature: MA Experiment 20000478 PARAMETER Experiment Name: Zm_5mM_SA_P Parameter: Organism Value: Zea mays
  misc_feature: MA Experiment 20000478 PARAMETER Experiment Name: Zm_5mM_SA_P Parameter: Plant Line Value: 35A19
  misc_feature: MA Experiment 20000478 PARAMETER Experiment Name: Zm_5mM_SA_P Parameter: Timepoint (hr) Value: 72
  misc_feature: MA Experiment 20000478 PARAMETER Experiment Name: Zm_5mM_SA_P Parameter: Tissue Value: Aerial
  misc_feature: MA Experiment 20000478 PARAMETER Experiment Name: Zm_5mM_SA_P Parameter: Treatment Value: 5mM SA vs. No Treatment
aaaagcaatacagtacttggagagaagagagtgtgagtacgaccagaaaatatccattgatttctacaaggaaggagatcccttgaaaccagctgtgacgggcgtcttartgttcgtttccactccagatccaattggcaacaagtactatcttggccctgctcctctgcaggatatggcaaggcaaattgctacagccaatggccctactggctataatagggattacctgttctcaatggagaaggcattagccagcattagccacgaagatgattcgatcatagagcttgcaaacgaggtgaggaaggtgctcaacagaacaaaggagaccaagatcactggtgccaatgcttccctgaaatcacatgcccctcttgtgcacctgtccgcgcttccagaaggcaccgttgtggactcgagatagcgagagccttggacgttggacctctactcggaatttacttccagctcttgcatgtttgkggccatcatgtactgattttcccttttcaacagttgtcgtgaggsttgkatcttctggagttaaaaaaaatgctaaaagccggcac

SEQ ID NO: 14487 - protein, 141 aa, Zea mays subsp. mays
  peptide (1)..(141): Ceres Seq. ID no. 3629592
  misc_feature (2)..(104): Pfam Name: ChaC-like protein Pfam Description: ChaC-like protein
  misc_feature (3)..(141): Homolog of NCBI NO: 31711499 NR Description: OsCTTP [Oryza sativa (indica cultivar-group)]
  misc_feature (2)..(122): Homolog of NCBI NO: 18417778 NR Description: unknown protein; protein id: At4g31290.1,
  misc_feature (2)..(122): Homolog of NCBI NO: 21593515 NR Description: unknown [Arabidopsis thaliana]
  misc_feature (2)..(140): Homolog of NCBI NO: 27525010 NR Description: putative cation transporter [Beta procumbens]
  misc_feature (2)..(112): Homolog of NCBI NO: 15239626 NR Description: putative protein; protein id: At5g26220.1 thaliana] >gi|26450775|dbj|BAC42496.1| unknown protein thaliana] >gi|28950749|gb|AAO63298.1| At5g26220 [Arabidopsis
  misc_feature (23)..(112): Homolog of NCBI NO: 7486723 NR Description: hypothetical protein F9D12.14 - Arabidopsis >gi|3319340|gb|AAC26229.1| contains similarity to E. coli cation
  misc_feature (2)..(119): Homolog of NCBI NO: 12083292 NR Description: unknown protein [Arabidopsis thaliana]
  misc_feature (2)..(119): Homolog of NCBI NO: 18401334 NR Description: expressed protein; protein id: At1g44790.1,
  misc_feature (5)..(119): Homolog of NCBI NO: 25349686 NR Description: hypothetical protein T12C22.6 [imported] - thaliana >gi|8655989|gb|AAF78262.1|AC020576_6 Contains similarity cation transport protein CHAC from Escherichia coli gi|2506988.
  misc_feature (2)..(103): Homolog of NCBI NO: 38344831 NR Description: OSJNBa0064H22.12 [Oryza sativa (japonica
  misc_feature (37)..(37): Xaa is any aa, unknown or other
KAIQYLERRECEYDQKISIDFYKEGDPLKPAVTGVLXFVSTPDPIGNKYYLGPAPLQDMARQIATANGPTGYNRDYLFSMEKALASISHEDDSIIELANEVRKVLNRTKETKITGANASLKSHAPLVHLSALPEGTVVDSR

SEQ ID NO: 14488 - protein, 83 aa, Zea mays subsp. mays
  peptide (1)..(83): Ceres Seq. ID no. 3629593
  misc_feature (1)..(83): Homolog of NCBI NO: 31711499 NR Description: OsCTTP [Oryza sativa (indica cultivar-group)]
  misc_feature (1)..(64): Homolog of NCBI NO: 18417778 NR Description: unknown protein; protein id: At4g31290.1,
  misc_feature (1)..(64): Homolog of NCBI NO: 21593515 NR Description: unknown [Arabidopsis thaliana]
  misc_feature (1)..(82): Homolog of NCBI NO: 27525010 NR Description: putative cation transporter [Beta procumbens]
  misc_feature (1)..(54): Homolog of NCBI NO: 15239626 NR Description: putative protein; protein id: At5g26220.1 thaliana] >gi|26450775|dbj|BAC42496.1| unknown protein thaliana] >gi|28950749|gb|AAO63298.1| At5g26220 [Arabidopsis
  misc_feature (1)..(54): Homolog of NCBI NO: 7486723 NR Description: hypothetical protein F9D12.14 - Arabidopsis >gi|3319340|gb|AAC26229.1| contains similarity to E. coli cation
  misc_feature (1)..(61): Homolog of NCBI NO: 12083292 NR Description: unknown protein [Arabidopsis thaliana]
  misc_feature (1)..(61): Homolog of NCBI NO: 18401334 NR Description: expressed protein; protein id: At1g44790.1,
  misc_feature (1)..(61): Homolog of NCBI NO: 25349686 NR Description: hypothetical protein T12C22.6 [imported] - thaliana >gi|8655989|gb|AAF78262.1|AC020576_6 Contains similarity cation transport protein CHAC from Escherichia coli gi|2506988.
  misc_feature (1)..(45): Homolog of NCBI NO: 38344831 NR Description: OSJNBa0064H22.12 [Oryza sativa (japonica
MARQIATANGPTGYNRDYLFSMEKALASISHEDDSIIELANEVRKVLNRTKETKITGANASLKSHAPLVHLSALPEGTVVDSR

SEQ ID NO: 14489 - DNA, 593 bp, Zea mays subsp. mays
  misc_feature (1)..(593): Ceres Seq. ID no. 12420357
  misc_feature: MA Experiment ID: 20000632 Result: Down-regulated in Transcription
  misc_feature: MA Experiment 20000632 PARAMETER Experiment Name: Zm_Herbicide-Treatments_P Parameter: Timepoint (hr) Value: 4
  misc_feature: MA Experiment 20000632 PARAMETER Experiment Name: Zm_Herbicide-Treatments_P Parameter: Tissue Value: Aerial
  misc_feature: MA Experiment 20000632 PARAMETER Experiment Name: Zm_Herbicide-Treatments_P Parameter: Treatment Value: Glean vs. No Treatment
tttgaatgctaaggatacagaaattgcgaggttgagagaggaaatcagaatattgtctgctcactggacgaacaaaaccaaggaacttgagtcacatttagaaaagcaccggagaactgatcaggagctgaagaagagggttctaaagcttgaattttgccttcaagaatcccagtctcagatgcgaaaattaaagaggatgggcgagagaagagacaaggctctcaaggagctcatggaccaggtggccacgaagcagccaaacagcatgtgccatggcaacaaggagaatttctgggagggccagggcttcaagttcatcgtgtctatgtcgatgctggcactagtgatcctcgcaaagcgatgaagcagcatcgcatacccaatcttgtgtaaagaaggtagagattccatctatcgttaggtgagcaactagctcatagcttaagcagatgtcgatgtagcgtttacattagtttgttgtttgtattcttgggcagctgtgcataatgcatggtcagaagttgcagtctgtaatccgtagtctctgctagggcatgtgaactcagaaggtgtnttgtactcacagctag

SEQ ID NO: 14490 - protein, 121 aa, Zea mays subsp. mays
  peptide (1)..(121): Ceres Seq. ID no. 12420358
  misc_feature (1)..(121): Homolog of NCBI NO: 18397379 NR Description: expressed protein; protein id: At3g05830.1, by cDNA: 110680., supported by cDNA: gi_4097949 [Arabidopsis >gi|6714396|gb|AAF26085.1|AC012393_11 hypothetical protein
  misc_feature (1)..(121): Homolog of NCBI NO: 22329439 NR Description: hypothetical protein; protein id: At1g09470.1
  misc_feature (1)..(112): Homolog of NCBI NO: 7485248 NR Description: hypothetical protein A_IG002P16.20 - Arabidopsis >gi|2191168|gb|AAB61054.1| contains similarity to myosin heavy
  misc_feature (18)..(111): Homolog of NCBI NO: 22329441 NR Description: similar to contains similarity to myosin heavy
  misc_feature (1)..(67): Homolog of NCBI NO: 25402551 NR Description: hypothetical protein [imported] - Arabidopsis >gi|3482922|gb|AAC33207.1| Hypothetical protein [Arabidopsis
  misc_feature (5)..(121): Homolog of NCBI NO: 34894370 NR Description: unnamed protein product [Oryza sativa (japonica group)] >gi|8468034|dbj|BAA96634.1| unnamed protein product
  misc_feature (1)..(121): Homolog of NCBI NO: 18421042 NR Description: putative protein; protein id: At5g26770.1,
  misc_feature (1)..(121): Homolog of NCBI NO: 4097950 NR Description: plant IF-like protein [Arabidopsis thaliana]
LNAKDTEIARLREEIRILSAHWTNKTKELESHLEKHRRTDQELKKRVLKLEFCLQESQSQMRKLKRMGERRDKALKELMDQVATKQPNSMCHGNKENFWEGQGFKFIVSMSMLALVILAKR

SEQ ID NO: 14491 - protein, 61 aa, Zea mays subsp. mays
  peptide (1)..(61): Ceres Seq. ID no. 12420359
  misc_feature (1)..(61): Homolog of NCBI NO: 18421042 NR Description: putative protein; protein id: At5g26770.1,
  misc_feature (1)..(61): Homolog of NCBI NO: 4097950 NR Description: plant IF-like protein [Arabidopsis thaliana]
  misc_feature (1)..(61): Homolog of NCBI NO: 18397379 NR Description: expressed protein; protein id: At3g05830.1, by cDNA: 110680., supported by cDNA: gi_4097949 [Arabidopsis >gi|6714396|gb|AAF26085.1|AC012393_11 hypothetical protein
  misc_feature (1)..(61): Homolog of NCBI NO: 22329439 NR Description: hypothetical protein; protein id: At1g09470.1
  misc_feature (1)..(52): Homolog of NCBI NO: 7485248 NR Description: hypothetical protein A_IG002P16.20 - Arabidopsis >gi|2191168|gb|AAB61054.1| contains similarity to myosin heavy
  misc_feature (1)..(51): Homolog of NCBI NO: 22329441 NR Description: similar to contains similarity to myosin heavy
  misc_feature (1)..(61): Homolog of NCBI NO: 34894370 NR Description: unnamed protein product [Oryza sativa (japonica group)] >gi|8468034|dbj|BAA96634.1| unnamed protein product
MRKLKRMGERRDKALKELMDQVATKQPNSMCHGNKENFWEGQGFKFIVSMSMLALVILAKR

SEQ ID NO: 14492 - DNA, 445 bp, Zea mays subsp. mays
  misc_feature (1)..(445): Ceres Seq. ID no. 12468480
  misc_feature: MA Experiment ID: 108535 Result: Up-regulated in Transcription
  misc_feature: MA Experiment 108535 PARAMETER Experiment Name: Zm_Meristem_P Parameter: Age (day) Value: 8
  misc_feature: MA Experiment 108535 PARAMETER Experiment Name: Zm_Meristem_P Parameter: Organism Value: Zea mays
  misc_feature: MA Experiment 108535 PARAMETER Experiment Name: Zm_Meristem_P Parameter: Plant Line Value: 35A19
  misc_feature: MA Experiment 108535 PARAMETER Experiment Name: Zm_Meristem_P Parameter: Tissue Value: Root Meristem vs. Above Root Meristem
  misc_feature: MA Experiment ID: 20000534 Result: Down-regulated in Transcription
  misc_feature: MA Experiment 20000534 PARAMETER Experiment Name: Zm_Hybrid_Pollen_P Parameter: Age (day) Value: 8
  misc_feature: MA Experiment 20000534 PARAMETER Experiment Name: Zm_Hybrid_Pollen_P Parameter: Organism Value: Zea mays
  misc_feature: MA Experiment 20000534 PARAMETER Experiment Name: Zm_Hybrid_Pollen_P Parameter: Plant Line Value: 35A19
  misc_feature: MA Experiment 20000534 PARAMETER Experiment Name: Zm_Hybrid_Pollen_P Parameter: Tissue Value: Pollen vs. Aerial
gaatctatctatggcatgaagtttgctgatgagaacttcaagatcaagcacactggaccaggccttctgtccatggccaatgctgggagagatacaaacggatctcagtttttcatcaccaccgtgacaacaagctggttggacgggaagcatgttgtgtttggcaaggtgttgtctggaatggatgttgtgtacaaggtggaagctgagggccggcagagcgggcaaccaaagagcaaggttgtcatagcagatagcggcgagctgccgatgtgatgagctgaactgatgttctatctggaaggatgttaagaagttgctggtgaccatttgtcgttctggaacttttattagtgcctgaaattggactgaaccagtttcttctgtttgctacagtgactttcttatttacttattagttgaaaaggttttaaaaggttgagtt

SEQ ID NO: 14493 - protein, 91 aa, Zea mays subsp. mays
  peptide (1)..(91): Ceres Seq. ID no. 12468481
  misc_feature (1)..(91): Homolog of NCBI NO: 11270326 NR Description: peptidylprolyl isomerase (EC 5.2.1.8) CYP5 - Arabidopsis thaliana >gi|2443755|gb|AAB71401.1| cyclophilin
  misc_feature (1)..(91): Homolog of NCBI NO: 15227674 NR Description: cyclophilin; protein id: At2g29960.1, supported cDNA: 19211., supported by cDNA: gi_15451025 [Arabidopsis
  misc_feature (1)..(91): Homolog of NCBI NO: 32351008 NR Description: cyclophilin [Triticum aestivum]
  misc_feature (1)..(91): Homolog of NCBI NO: 15237739 NR Description: cyclophilin ROC7; protein id: At5g58710.1, by cDNA: 25325., supported by cDNA: gi_15081669, supported by
  misc_feature (1)..(91): Homolog of NCBI NO: 21554007 NR Description: cyclophilin [Arabidopsis thaliana]
  misc_feature (1)..(91): Homolog of NCBI NO: 11270308 NR Description: peptidylprolyl isomerase (EC 5.2.1.8) F27K19.100
  misc_feature (1)..(91): Homolog of NCBI NO: 18410386 NR Description: cyclophilin-like protein; protein id:
  misc_feature (1)..(91): Homolog of NCBI NO: 27805448 NR Description: Peptidyl-prolyl cis-trans isomerase B precursor (Rotamase) (Cyclophilin B) >gi|849081|gb|AAD04195.1| cyclophilin
  misc_feature (1)..(89): Homolog of NCBI NO: 863016 NR Description: cyclophilin
  misc_feature (1)..(89): Homolog of NCBI NO: 17566266 NR Description: CYcloPhilin family CYP-7 (18.4 kD) (cyp-7)
ESIYGMKFADENFKIKHTGPGLLSMANAGRDTNGSQFFITTVTTSWLDGKHVVFGKVLSGMDVVYKVEAEGRQSGQPKSKVVIADSGELPM

SEQ ID NO: 14494 - protein, 86 aa, Zea mays subsp. mays
  peptide (1)..(86): Ceres Seq. ID no. 12468482
  misc_feature (1)..(86): Homolog of NCBI NO: 11270326 NR Description: peptidylprolyl isomerase (EC 5.2.1.8) CYP5 - Arabidopsis thaliana >gi|2443755|gb|AAB71401.1| cyclophilin
  misc_feature (1)..(86): Homolog of NCBI NO: 15227674 NR Description: cyclophilin; protein id: At2g29960.1, supported cDNA: 19211., supported by cDNA: gi_15451025 [Arabidopsis
  misc_feature (1)..(86): Homolog of NCBI NO: 32351008 NR Description: cyclophilin [Triticum aestivum]
  misc_feature (1)..(86): Homolog of NCBI NO: 15237739 NR Description: cyclophilin ROC7; protein id: At5g58710.1, by cDNA: 25325., supported by cDNA: gi_15081669, supported by
  misc_feature (1)..(86): Homolog of NCBI NO: 21554007 NR Description: cyclophilin [Arabidopsis thaliana]
  misc_feature (1)..(86): Homolog of NCBI NO: 11270308 NR Description: peptidylprolyl isomerase (EC 5.2.1.8) F27K19.100
  misc_feature (1)..(86): Homolog of NCBI NO: 18410386 NR Description: cyclophilin-like protein; protein id:
  misc_feature (1)..(86): Homolog of NCBI NO: 27805448 NR Description: Peptidyl-prolyl cis-trans isomerase B precursor (Rotamase) (Cyclophilin B) >gi|849081|gb|AAD04195.1| cyclophilin
  misc_feature (1)..(84): Homolog of NCBI NO: 863016 NR Description: cyclophilin
  misc_feature (1)..(84): Homolog of NCBI NO: 1480465 NR Description: cyclophilin Ovcyp-2
MKFADENFKIKHTGPGLLSMANAGRDTNGSQFFITTVTTSWLDGKHVVFGKVLSGMDVVYKVEAEGRQSGQPKSKVVIADSGELPM

SEQ ID NO: 14495 - protein, 67 aa, Zea mays subsp. mays
  peptide (1)..(67): Ceres Seq. ID no. 12468483
  misc_feature (1)..(67): Homolog of NCBI NO: 11270326 NR Description: peptidylprolyl isomerase (EC 5.2.1.8) CYP5 - Arabidopsis thaliana >gi|2443755|gb|AAB71401.1| cyclophilin
  misc_feature (1)..(67): Homolog of NCBI NO: 15227674 NR Description: cyclophilin; protein id: At2g29960.1, supported cDNA: 19211., supported by cDNA: gi_15451025 [Arabidopsis
  misc_feature (1)..(67): Homolog of NCBI NO: 32351008 NR Description: cyclophilin [Triticum aestivum]
  misc_feature (1)..(67): Homolog of NCBI NO: 15237739 NR Description: cyclophilin ROC7; protein id: At5g58710.1, by cDNA: 25325., supported by cDNA: gi_15081669, supported by
  misc_feature (1)..(67): Homolog of NCBI NO: 21554007 NR Description: cyclophilin [Arabidopsis thaliana]
  misc_feature (1)..(67): Homolog of NCBI NO: 11270308 NR Description: peptidylprolyl isomerase (EC 5.2.1.8) F27K19.100
  misc_feature (1)..(67): Homolog of NCBI NO: 18410386 NR Description: cyclophilin-like protein; protein id:
  misc_feature (1)..(67): Homolog of NCBI NO: 27805448 NR Description: Peptidyl-prolyl cis-trans isomerase B precursor (Rotamase) (Cyclophilin B) >gi|849081|gb|AAD04195.1| cyclophilin
  misc_feature (1)..(65): Homolog of NCBI NO: 863016 NR Description: cyclophilin
  misc_feature (1)..(65): Homolog of NCBI NO: 17566266 NR Description: CYcloPhilin family CYP-7 (18.4 kD) (cyp-7)
MANAGRDTNGSQFFITTVTTSWLDGKHVVFGKVLSGMDVVYKVEAEGRQSGQPKSKVVIADSGELPM

SEQ ID NO: 14496 - DNA, 1017 bp, Zea mays subsp. mays
  misc_feature (1)..(1017): Ceres Seq. ID no. 12567193
  misc_feature: MA Experiment ID: 108522 Result: Down-regulated in Transcription
  misc_feature: MA Experiment 108522 PARAMETER Experiment Name: Zm_42deg_Heat_P Parameter: Age (day) Value: 8
  misc_feature: MA Experiment 108522 PARAMETER Experiment Name: Zm_42deg_Heat_P Parameter: Organism Value: Zea mays
  misc_feature: MA Experiment 108522 PARAMETER Experiment Name: Zm_42deg_Heat_P Parameter: Plant Line Value: 35A19
  misc_feature: MA Experiment 108522 PARAMETER Experiment Name: Zm_42deg_Heat_P Parameter: Temperature (deg C) Value: 42 vs. 22
  misc_feature: MA Experiment 108522 PARAMETER Experiment Name: Zm_42deg_Heat_P Parameter: Timepoint (hr) Value: 1
  misc_feature: MA Experiment 108522 PARAMETER Experiment Name: Zm_42deg_Heat_P Parameter: Tissue Value: Aerial
  misc_feature: MA Experiment ID: 108527 Result: Up-regulated in Transcription
  misc_feature: MA Experiment 108527 PARAMETER Experiment Name: Zm_5mM_NO_P Parameter: Age (day) Value: 8
  misc_feature: MA Experiment 108527 PARAMETER Experiment Name: Zm_5mM_NO_P Parameter: Organism Value: Zea mays
  misc_feature: MA Experiment 108527 PARAMETER Experiment Name: Zm_5mM_NO_P Parameter: Plant Line Value: 35A19
  misc_feature: MA Experiment 108527 PARAMETER Experiment Name: Zm_5mM_NO_P Parameter: Timepoint (hr) Value: 6
  misc_feature: MA Experiment 108527 PARAMETER Experiment Name: Zm_5mM_NO_P Parameter: Tissue Value: Aerial
  misc_feature: MA Experiment 108527 PARAMETER Experiment Name: Zm_5mM_NO_P Parameter: Treatment Value: 5mM NO vs. No Treatment
  misc_feature: MA Experiment ID: 108529 Result: Down-regulated in Transcription
  misc_feature: MA Experiment 108529 PARAMETER Experiment Name: Zm_Imbibed_Seeds_P Parameter: Age (day) Value: 5 vs. 2
  misc_feature: MA Experiment 108529 PARAMETER Experiment Name: Zm_Imbibed_Seeds_P Parameter: Organism Value: Zea mays
  misc_feature: MA Experiment 108529 PARAMETER Experiment Name: Zm_Imbibed_Seeds_P Parameter: Plant Line Value: 35A19
  misc_feature: MA Experiment 108529 PARAMETER Experiment Name: Zm_Imbibed_Seeds_P Parameter: Tissue Value: Roots vs. Embryo
  misc_feature: MA Experiment ID: 108536 Result: Up-regulated in Transcription
  misc_feature: MA Experiment 108536 PARAMETER Experiment Name: Zm_Meristem_P Parameter: Age (day) Value: 8
  misc_feature: MA Experiment 108536 PARAMETER Experiment Name: Zm_Meristem_P Parameter: Organism Value: Zea mays
  misc_feature: MA Experiment 108536 PARAMETER Experiment Name: Zm_Meristem_P Parameter: Plant Line Value: 35A19
  misc_feature: MA Experiment 108536 PARAMETER Experiment Name: Zm_Meristem_P Parameter: Tissue Value: Shoot Meristem vs. Above Shoot Meristem
  misc_feature: MA Experiment ID: 108542 Result: Up-regulated in Transcription
  misc_feature: MA Experiment 108542 PARAMETER Experiment Name: Zm_150mM_NaCl_P Parameter: Age (day) Value: 8
  misc_feature: MA Experiment 108542 PARAMETER Experiment Name: Zm_150mM_NaCl_P Parameter: Organism Value: Zea mays
  misc_feature: MA Experiment 108542 PARAMETER Experiment Name: Zm_150mM_NaCl_P Parameter: Plant Line Value: 35A19
  misc_feature: MA Experiment 108542 PARAMETER Experiment Name: Zm_150mM_NaCl_P Parameter: Timepoint (hr) Value: 6
  misc_feature: MA Experiment 108542 PARAMETER Experiment Name: Zm_150mM_NaCl_P Parameter: Tissue Value: Aerial
  misc_feature: MA Experiment 108542 PARAMETER Experiment Name: Zm_150mM_NaCl_P Parameter: Treatment Value: 150mM NaCl vs. No Treatment
  misc_feature: MA Experiment ID: 108544 Result: Up-regulated in Transcription
  misc_feature: MA Experiment ID: 108545 Result: Down-regulated in Transcription
  misc_feature: MA Experiment 108545 PARAMETER Experiment Name: Zm_Imbibed_Seeds_P Parameter: Age (day) Value: 3 vs. 2
  misc_feature: MA Experiment 108545 PARAMETER Experiment Name: Zm_Imbibed_Seeds_P Parameter: Organism Value: Zea mays
  misc_feature: MA Experiment 108545 PARAMETER Experiment Name: Zm_Imbibed_Seeds_P Parameter: Plant Line Value: 35A19
  misc_feature: MA Experiment 108545 PARAMETER Experiment Name: Zm_Imbibed_Seeds_P Parameter: Tissue Value: Aerial vs. Embryo
  misc_feature: MA Experiment ID: 108556 Result: Up-regulated in Transcription
  misc_feature: MA Experiment 108556 PARAMETER Experiment Name: Zm_Drought_P Parameter: Age (day) Value: 9
  misc_feature: MA Experiment 108556 PARAMETER Experiment Name: Zm_Drought_P Parameter: Organism Value: Zea mays
  misc_feature: MA Experiment 108556 PARAMETER Experiment Name: Zm_Drought_P Parameter: Plant Line Value: 35A19
  misc_feature: MA Experiment 108556 PARAMETER Experiment Name: Zm_Drought_P Parameter: Timepoint (hr) Value: 24
  misc_feature: MA Experiment 108556 PARAMETER Experiment Name: Zm_Drought_P Parameter: Tissue Value: Aerial
  misc_feature: MA Experiment 108556 PARAMETER Experiment Name: Zm_Drought_P Parameter: Treatment Value: Drought vs. No Drought
  misc_feature: MA Experiment ID: 108559 Result: Up-regulated in Transcription
  misc_feature: MA Experiment 108559 PARAMETER Experiment Name: Zm_5mM_NO_P Parameter: Age (day) Value: 8
  misc_feature: MA Experiment 108559 PARAMETER Experiment Name: Zm_5mM_NO_P Parameter: Organism Value: Zea mays
  misc_feature: MA Experiment 108559 PARAMETER Experiment Name: Zm_5mM_NO_P Parameter: Plant Line Value: 35A19
  misc_feature: MA Experiment 108559 PARAMETER Experiment Name: Zm_5mM_NO_P Parameter: Timepoint (hr) Value: 12
  misc_feature: MA Experiment 108559 PARAMETER Experiment Name: Zm_5mM_NO_P Parameter: Tissue Value: Aerial
  misc_feature: MA Experiment 108559 PARAMETER Experiment Name: Zm_5mM_NO_P Parameter: Treatment Value: 5mM NO vs. No Treatment
  misc_feature: MA Experiment ID: 20000478 Result: Up-regulated in Transcription
  misc_feature: MA Experiment 20000478 PARAMETER Experiment Name: Zm_5mM_SA_P Parameter: Age (day) Value: 11
  misc_feature: MA Experiment 20000478 PARAMETER Experiment Name: Zm_5mM_SA_P Parameter: Organism Value: Zea mays
  misc_feature: MA Experiment 20000478 PARAMETER Experiment Name: Zm_5mM_SA_P Parameter: Plant Line Value: 35A19
  misc_feature: MA Experiment 20000478 PARAMETER Experiment Name: Zm_5mM_SA_P Parameter: Timepoint (hr) Value: 72
  misc_feature: MA Experiment 20000478 PARAMETER Experiment Name: Zm_5mM_SA_P Parameter: Tissue Value: Aerial
  misc_feature: MA Experiment 20000478 PARAMETER Experiment Name: Zm_5mM_SA_P Parameter: Treatment Value: 5mM SA vs. No Treatment
  misc_feature: MA Experiment ID: 20000487 Result: Up-regulated in Transcription
  misc_feature: MA Experiment 20000487 PARAMETER Experiment Name: Zm_50mM_NH4NO3_L_to_H_P Parameter: Organism Value: Zea mays
  misc_feature: MA Experiment 20000487 PARAMETER Experiment Name: Zm_50mM_NH4NO3_L_to_H_P Parameter: Timepoint (hr) Value: 4
  misc_feature: MA Experiment 20000487 PARAMETER Experiment Name: Zm_50mM_NH4NO3_L_to_H_P Parameter: Tissue Value: Leaves
  misc_feature: MA Experiment 20000487 PARAMETER Experiment Name: Zm_50mM_NH4NO3_L_to_H_P Parameter: Treatment Value: 50mM NH4NO3 vs. 100mM Mannitol
  misc_feature: MA Experiment ID: 20000488 Result: Up-regulated in Transcription
  misc_feature: MA Experiment 20000488 PARAMETER Experiment Name: Zm_50mM_NH4NO3_L_to_H_P Parameter: Organism Value: Zea mays
  misc_feature: MA Experiment 20000488 PARAMETER Experiment Name: Zm_50mM_NH4NO3_L_to_H_P Parameter: Timepoint (hr) Value: 8
  misc_feature: MA Experiment 20000488 PARAMETER Experiment Name: Zm_50mM_NH4NO3_L_to_H_P Parameter: Tissue Value: Leaves
  misc_feature: MA Experiment 20000488 PARAMETER Experiment Name: Zm_50mM_NH4NO3_L_to_H_P Parameter: Treatment Value: 50mM NH4NO3 vs. 100mM Mannitol
  misc_feature: MA Experiment ID: 20000535 Result: Up-regulated in Transcription
  misc_feature: MA Experiment 20000535 PARAMETER Experiment Name: Zm_Hybrid_Seed_Dev_P Parameter: DAP Value: 30 vs. 12
  misc_feature: MA Experiment 20000535 PARAMETER Experiment Name: Zm_Hybrid_Seed_Dev_P Parameter: Organism Value: Zea mays
  misc_feature: MA Experiment 20000535 PARAMETER Experiment Name: Zm_Hybrid_Seed_Dev_P Parameter: Plant Line Value: 35A19
  misc_feature: MA Experiment 20000535 PARAMETER Experiment Name: Zm_Hybrid_Seed_Dev_P Parameter: Tissue Value: Embryo vs. Unfert Floret
  misc_feature: MA Experiment ID: 20001605 Result: Up-regulated in Transcription
  misc_feature: MA Experiment 20001605 PARAMETER Experiment Name: Zm_50ppm_KNO3_L-to-H_P Parameter: Age (day) Value: 19
  misc_feature: MA Experiment 20001605 PARAMETER Experiment Name: Zm_50ppm_KNO3_L-to-H_P Parameter: Organism Value: Zea mays
  misc_feature: MA Experiment 20001605 PARAMETER Experiment Name: Zm_50ppm_KNO3_L-to-H_P Parameter: Plant Line Value: 35A19
  misc_feature: MA Experiment 20001605 PARAMETER Experiment Name: Zm_50ppm_KNO3_L-to-H_P Parameter: Timepoint (hr) Value: 4
  misc_feature: MA Experiment 20001605 PARAMETER Experiment Name: Zm_50ppm_KNO3_L-to-H_P Parameter: Tissue Value: Shoots
  misc_feature: MA Experiment 20001605 PARAMETER Experiment Name: Zm_50ppm_KNO3_L-to-H_P Parameter: Treatment Value: 50ppm KNO3 vs. 50ppm KCl
  misc_feature: MA Experiment ID: 20001606 Result: Up-regulated in Transcription
  misc_feature: MA Experiment 20001606 PARAMETER Experiment Name: Zm_50ppm_KNO3_L-to-H_P Parameter: Age (day) Value: 19
  misc_feature: MA Experiment 20001606 PARAMETER Experiment Name: Zm_50ppm_KNO3_L-to-H_P Parameter: Organism Value: Zea mays
  misc_feature: MA Experiment 20001606 PARAMETER Experiment Name: Zm_50ppm_KNO3_L-to-H_P Parameter: Plant Line Value: 35A19
  misc_feature: MA Experiment 20001606 PARAMETER Experiment Name: Zm_50ppm_KNO3_L-to-H_P Parameter: Timepoint (hr) Value: 8
  misc_feature: MA Experiment 20001606 PARAMETER Experiment Name: Zm_50ppm_KNO3_L-to-H_P Parameter: Tissue Value: Shoots
  misc_feature: MA Experiment 20001606 PARAMETER Experiment Name: Zm_50ppm_KNO3_L-to-H_P Parameter: Treatment Value: 50ppm KNO3 vs. 50ppm KCl
  misc_feature: MA Experiment ID: 20001610 Result: Up-regulated in Transcription
  misc_feature: MA Experiment 20001610 PARAMETER Experiment Name: Zm_50ppm_KNO3_L-to-H_P Parameter: Age (day) Value: 19
  misc_feature: MA Experiment 20001610 PARAMETER Experiment Name: Zm_50ppm_KNO3_L-to-H_P Parameter: Organism Value: Zea mays
  misc_feature: MA Experiment 20001610 PARAMETER Experiment Name: Zm_50ppm_KNO3_L-to-H_P Parameter: Plant Line Value: 35A19
  misc_feature: MA Experiment 20001610 PARAMETER Experiment Name: Zm_50ppm_KNO3_L-to-H_P Parameter: Timepoint (hr) Value: 2
  misc_feature: MA Experiment 20001610 PARAMETER Experiment Name: Zm_50ppm_KNO3_L-to-H_P Parameter: Tissue Value: Roots
  misc_feature: MA Experiment 20001610 PARAMETER Experiment Name: Zm_50ppm_KNO3_L-to-H_P Parameter: Treatment Value: 50ppm KNO3 vs. 50ppm KCl
  misc_feature: MA Experiment ID: 20001612 Result: Up-regulated in Transcription
  misc_feature: MA Experiment 20001612 PARAMETER Experiment Name: Zm_50ppm_KNO3_L-to-H_P Parameter: Age (day) Value: 19
  misc_feature: MA Experiment 20001612 PARAMETER Experiment Name: Zm_50ppm_KNO3_L-to-H_P Parameter: Organism Value: Zea mays
  misc_feature: MA Experiment 20001612 PARAMETER Experiment Name: Zm_50ppm_KNO3_L-to-H_P Parameter: Plant Line Value: 35A19
  misc_feature: MA Experiment 20001612 PARAMETER Experiment Name: Zm_50ppm_KNO3_L-to-H_P Parameter: Timepoint (hr) Value: 8
  misc_feature: MA Experiment 20001612 PARAMETER Experiment Name: Zm_50ppm_KNO3_L-to-H_P Parameter: Tissue Value: Roots
  misc_feature: MA Experiment 20001612 PARAMETER Experiment Name: Zm_50ppm_KNO3_L-to-H_P Parameter: Treatment Value: 50ppm KNO3 vs. 50ppm KCl
  misc_feature: MA Experiment ID: 20001614 Result: Up-regulated in Transcription
  misc_feature: MA Experiment 20001614 PARAMETER Experiment Name: Zm_50ppm_KNO3_L-to-H_P Parameter: Age (day) Value: 21
  misc_feature: MA Experiment 20001614 PARAMETER Experiment Name: Zm_50ppm_KNO3_L-to-H_P Parameter: Organism Value: Zea mays
  misc_feature: MA Experiment 20001614 PARAMETER Experiment Name: Zm_50ppm_KNO3_L-to-H_P Parameter: Plant Line Value: 35A19
  misc_feature: MA Experiment 20001614 PARAMETER Experiment Name: Zm_50ppm_KNO3_L-to-H_P Parameter: Timepoint (hr) Value: 48
  misc_feature: MA Experiment 20001614 PARAMETER Experiment Name: Zm_50ppm_KNO3_L-to-H_P Parameter: Tissue Value: Roots
  misc_feature: MA Experiment 20001614 PARAMETER Experiment Name: Zm_50ppm_KNO3_L-to-H_P Parameter: Treatment Value: 50ppm KNO3 vs. 50ppm KCl
gaggcctttaaatgccggcacagatgttggccggagcaggacgccacgaggcgaacaaccaactgcttccttccgcgccgccgccgcctacaacgaccacatcacgtgacttacctcttctccgcctcaagtgttcacggctccatcctctctagagtctaagcccatctcgcgaagccgctaacgccgaaaacgaccctacatatggaggcgaagaagtcgggtcccgccgctgccggagccgcggcgccgccgccggctaacgggtacttcagcaccgtcttctccgcgtcgcctgcggggagcgcaaatgacgcaaagcaggccgacctgtacacgatgctgaacaagcagacctccagagggcagaatggcagtggcattacagatggcaaatcacacggccgccctacttacaaggatggaaaacatgcttatccaaatgactcgtcagaatccccttactttggctcgtccgtgcattacggtggtcgggaattctacagcaacacgttacagaagcagccagccaatgaaccccagacaaaatacaaggaggacaagccggatggctctgctactagaggtgattggtggcaaggttcactttattactgaacaatctgctgggaactctccttttttttgtgaacaaggaataaaaaggagtggagctgagcttggtttgtcataatagtgttggaactgttgatgcgagccgttaggcatatggatcgaaagtaatagatgtaatccggtcggtggaggcagtatttagatgcatcatcacacctggacagacgtggatgtaggctgcgtccttttgtgttcctgttttcgctaagtgtgttcttgtggttttagatgtgcagtcgtgcagtgctgaacttactaatgaactggtaggtcagcctgaagtagttttgataaaagcagttgccaaagagtctgcagctcgcaggatcacctgctatatgtgcatgttcctgctatctttcggaaagatttgggttgtgc

SEQ ID NO: 14497 - protein, 137 aa, Zea mays subsp. mays
  peptide (1)..(137): Ceres Seq. ID no. 12567194
  misc_feature (1)..(137): Homolog of NCBI NO: 34908300 NR Description: P0005H10.22 [Oryza sativa (japonica
  misc_feature (17)..(137): Homolog of NCBI NO: 15241665 NR Description: putative protein; protein id: At5g02020.1, by cDNA: gi_16648747, supported by cDNA: gi_20334905 [Arabidopsis
  misc_feature (14)..(137): Homolog of NCBI NO: 22326622 NR Description: hypothetical protein; protein id: At5g05965.1
MEAKKSGPAAAGAAAPPPANGYFSTVFSASPAGSANDAKQADLYTMLNKQTSRGQNGSGITDGKSHGRPTYKDGKHAYPNDSSESPYFGSSVHYGGREFYSNTLQKQPANEPQTKYKEDKPDGSATRGDWWQGSLYY

SEQ ID NO: 14498 - protein, 107 aa, Zea mays subsp. mays
  peptide (1)..(107): Ceres Seq. ID no. 12567195
MAVALQMANHTAALLTRMENMLIQMTRQNPLTLARPCITVVGNSTATRYRSSQPMNPRQNTRRTSRMALLLEVIGGKVHFITEQSAGNSPFFCEQGIKRSGAELGLS

SEQ ID NO: 14499 - protein, 101 aa, Zea mays subsp. mays
  peptide (1)..(101): Ceres Seq. ID no. 12567196
MANHTAALLTRMENMLIQMTRQNPLTLARPCITVVGNSTATRYRSSQPMNPRQNTRRTSRMALLLEVIGGKVHFITEQSAGNSPFFCEQGIKRSGAELGLS

SEQ ID NO: 14500 - DNA, 520 bp, Zea mays subsp. mays
  misc_feature (1)..(520): Ceres Seq. ID no. 3624558
  misc_feature: MA Experiment ID: 108522 Result: Up-regulated in Transcription
  misc_feature: MA Experiment 108522 PARAMETER Experiment Name: Zm_42deg_Heat_P Parameter: Age (day) Value: 8
  misc_feature: MA Experiment 108522 PARAMETER Experiment Name: Zm_42deg_Heat_P Parameter: Organism Value: Zea mays
  misc_feature: MA Experiment 108522 PARAMETER Experiment Name: Zm_42deg_Heat_P Parameter: Plant Line Value: 35A19
  misc_feature: MA Experiment 108522 PARAMETER Experiment Name: Zm_42deg_Heat_P Parameter: Temperature (deg C) Value: 42 vs. 22
  misc_feature: MA Experiment 108522 PARAMETER Experiment Name: Zm_42deg_Heat_P Parameter: Timepoint (hr) Value: 1
  misc_feature: MA Experiment 108522 PARAMETER Experiment Name: Zm_42deg_Heat_P Parameter: Tissue Value: Aerial
  misc_feature: MA Experiment ID: 108544 Result: Down-regulated in Transcription
gaacttctcacgttcatttctacacatccctagctctgtcgttccgtcgttgacgatggcgtttcgggtgcgaagccctgacctccgctctctctttcttctctctctcttgtccatcgcttccgccaatgtcttcttcgaagagcgtttcgatgacgggtgggaaaatcgatgggttaaatcagattggaaaaaagatgagaacgtggctggggagtggaaccacacctctggtcaatggaatggagacgctaatgacaaaggtattcaaaccagtgaggattacagattctatgctatttcagctgagtaccctgaattcggcaacaagggtaagacactagtctttcaattttctgttaagcacgaacagaagcttgactgtggtggtggctacatgaagttgctcagtggggatgttgatcagaagaaatttggcggggatactccttacagtattatgtttggcccagatatctgcggttacagtaccaagaaagttcacgctattcttacctac

SEQ ID NO: 14501 - protein, 173 aa, Zea mays subsp. mays
  peptide (1)..(173): Ceres Seq. ID no. 3624559
  misc_feature (44)..(172): Pfam Name: Calreticulin family Pfam Description: Calreticulin family
  misc_feature (19)..(172): Homolog of NCBI NO: 11131904 NR Description: Calreticulin precursor
  misc_feature (25)..(172): Homolog of NCBI NO: 11131745 NR Description: Calreticulin precursor >gi|7441496|pir||T10172
  misc_feature (26)..(172): Homolog of NCBI NO: 2052381 NR Description: calreticulin
  misc_feature (26)..(172): Homolog of NCBI NO: 12643243 NR Description: CALRETICULIN 2 PRECURSOR
  misc_feature (26)..(172): Homolog of NCBI NO: 21555174 NR Description: putative calcium-binding protein, calreticulin
  misc_feature (26)..(172): Homolog of NCBI NO: 25295763 NR Description: hypothetical protein [imported] - Arabidopsis >gi|3249100|gb|AAC24083.1| Match to calreticulin (AtCRTL) mRNA
  misc_feature (26)..(172): Homolog of NCBI NO: 15217459 NR Description: putative calcium-binding protein, calreticulin; id: At1g09210.1, supported by cDNA: 27210., supported by cDNA: supported by cDNA: gi_16974340 [Arabidopsis thaliana] thaliana]
  misc_feature (19)..(172): Homolog of NCBI NO: 11131631 NR Description: Calreticulin precursor >gi|7441494|pir||T14554
  misc_feature (22)..(172): Homolog of NCBI NO: 11131769 NR Description: Calreticulin precursor >gi|7441495|pir||T16968
  misc_feature (29)..(172): Homolog of NCBI NO: 11131949 NR Description: Calreticulin precursor >gi|4335864|gb|AAD17490.1|
NFSRSFLHIPSSVVPSLTMAFRVRSPDLRSLFLLSLLSIASANVFFEERFDDGWENRWVKSDWKKDENVAGEWNHTSGQWNGDANDKGIQTSEDYRFYAISAEYPEFGNKGKTLVFQFSVKHEQKLDCGGGYMKLLSGDVDQKKFGGDTPYSIMFGPDICGYSTKKVHAILTY

SEQ ID NO: 14502 - protein, 155 aa, Zea mays subsp. mays
  peptide (1)..(155): Ceres Seq. ID no. 3624560
  misc_feature (26)..(154): Pfam Name: Calreticulin family Pfam Description: Calreticulin family
  misc_feature (1)..(154): Homolog of NCBI NO: 11131904 NR Description: Calreticulin precursor
  misc_feature (7)..(154): Homolog of NCBI NO: 11131745 NR Description: Calreticulin precursor >gi|7441496|pir||T10172
  misc_feature (8)..(154): Homolog of NCBI NO: 2052381 NR Description: calreticulin
  misc_feature (8)..(154): Homolog of NCBI NO: 25295763 NR Description: hypothetical protein [imported] - Arabidopsis >gi|3249100|gb|AAC24083.1| Match to calreticulin (AtCRTL) mRNA
  misc_feature (8)..(154): Homolog of NCBI NO: 21555174 NR Description: putative calcium-binding protein, calreticulin
  misc_feature (8)..(154): Homolog of NCBI NO: 15217459 NR Description: putative calcium-binding protein, calreticulin; id: At1g09210.1, supported by cDNA: 27210., supported by cDNA: supported by cDNA: gi_16974340 [Arabidopsis thaliana] thaliana]
  misc_feature (8)..(154): Homolog of NCBI NO: 12643243 NR Description: CALRETICULIN 2 PRECURSOR
  misc_feature (1)..(154): Homolog of NCBI NO: 11131631 NR Description: Calreticulin precursor >gi|7441494|pir||T14554
  misc_feature (4)..(154): Homolog of NCBI NO: 11131769 NR Description: Calreticulin precursor >gi|7441495|pir||T16968
  misc_feature (11)..(154): Homolog of NCBI NO: 11131949 NR Description: Calreticulin precursor >gi|4335864|gb|AAD17490.1|
MAFRVRSPDLRSLFLLSLLSIASANVFFEERFDDGWENRWVKSDWKKDENVAGEWNHTSGQWNGDANDKGIQTSEDYRFYAISAEYPEFGNKGKTLVFQFSVKHEQKLDCGGGYMKLLSGDVDQKKFGGDTPYSIMFGPDICGYSTKKVHAILTY

SEQ ID NO: 14503 - DNA, 618 bp, Zea mays subsp. mays
  misc_feature (1)..(618): Ceres Seq. ID no. 12468438
  misc_feature: MA Experiment ID: 108504 Result: Down-regulated in Transcription
  misc_feature: MA Experiment 108504 PARAMETER Experiment Name: Zm_Drought_P Parameter: Age (day) Value: 8
  misc_feature: MA Experiment 108504 PARAMETER Experiment Name: Zm_Drought_P Parameter: Organism Value: Zea mays
  misc_feature: MA Experiment 108504 PARAMETER Experiment Name: Zm_Drought_P Parameter: Plant Line Value: 35A19
  misc_feature: MA Experiment 108504 PARAMETER Experiment Name: Zm_Drought_P Parameter: Timepoint (hr) Value: 12
  misc_feature: MA Experiment 108504 PARAMETER Experiment Name: Zm_Drought_P Parameter: Tissue Value: Aerial
  misc_feature: MA Experiment 108504 PARAMETER Experiment Name: Zm_Drought_P Parameter: Treatment Value: Drought vs. No Drought
  misc_feature: MA Experiment ID: 108515 Result: Down-regulated in Transcription
  misc_feature: MA Experiment 108515 PARAMETER Experiment Name: Zm_2mM_SA_P Parameter: Age (day) Value: 8
  misc_feature: MA Experiment 108515 PARAMETER Experiment Name: Zm_2mM_SA_P Parameter: Organism Value: Zea mays
  misc_feature: MA Experiment 108515 PARAMETER Experiment Name: Zm_2mM_SA_P Parameter: Plant Line Value: 35A19
  misc_feature: MA Experiment 108515 PARAMETER Experiment Name: Zm_2mM_SA_P Parameter: Timepoint (hr) Value: 12
  misc_feature: MA Experiment 108515 PARAMETER Experiment Name: Zm_2mM_SA_P Parameter: Tissue Value: Aerial
  misc_feature: MA Experiment 108515 PARAMETER Experiment Name: Zm_2mM_SA_P Parameter: Treatment Value: 2mM SA vs. No Treatment
  misc_feature: MA Experiment ID: 108527 Result: Down-regulated in Transcription
  misc_feature: MA Experiment 108527 PARAMETER Experiment Name: Zm_5mM_NO_P Parameter: Age (day) Value: 8
  misc_feature: MA Experiment 108527 PARAMETER Experiment Name: Zm_5mM_NO_P Parameter: Organism Value: Zea mays
  misc_feature: MA Experiment 108527 PARAMETER Experiment Name: Zm_5mM_NO_P Parameter: Plant Line Value: 35A19
  misc_feature: MA Experiment 108527 PARAMETER Experiment Name: Zm_5mM_NO_P Parameter: Timepoint (hr) Value: 6
  misc_feature: MA Experiment 108527 PARAMETER Experiment Name: Zm_5mM_NO_P Parameter: Tissue Value: Aerial
  misc_feature: MA Experiment 108527 PARAMETER Experiment Name: Zm_5mM_NO_P Parameter: Treatment Value: 5mM NO vs. No Treatment
  misc_feature: MA Experiment ID: 108528 Result: Up-regulated in Transcription
  misc_feature: MA Experiment 108528 PARAMETER Experiment Name: Zm_Imbibed_Seeds_P Parameter: Age (day) Value: 5 vs. 2
  misc_feature: MA Experiment 108528 PARAMETER Experiment Name: Zm_Imbibed_Seeds_P Parameter: Organism Value: Zea mays
  misc_feature: MA Experiment 108528 PARAMETER Experiment Name: Zm_Imbibed_Seeds_P Parameter: Plant Line Value: 35A19
  misc_feature: MA Experiment 108528 PARAMETER Experiment Name: Zm_Imbibed_Seeds_P Parameter: Tissue Value: Aerial vs. Embryo
  misc_feature: MA Experiment ID: 108529 Result: Down-regulated in Transcription
  misc_feature: MA Experiment 108529 PARAMETER Experiment Name: Zm_Imbibed_Seeds_P Parameter: Age (day) Value: 5 vs. 2
  misc_feature: MA Experiment 108529 PARAMETER Experiment Name: Zm_Imbibed_Seeds_P Parameter: Organism Value: Zea mays
  misc_feature: MA Experiment 108529 PARAMETER Experiment Name: Zm_Imbibed_Seeds_P Parameter: Plant Line Value: 35A19
  misc_feature: MA Experiment 108529 PARAMETER Experiment Name: Zm_Imbibed_Seeds_P Parameter: Tissue Value: Roots vs. Embryo
  misc_feature: MA Experiment ID: 108530 Result: Up-regulated in Transcription
  misc_feature: MA Experiment 108530 PARAMETER Experiment Name: Zm_Imbibed_Seeds_P Parameter: Age (day) Value: 6 vs. 2
  misc_feature: MA Experiment 108530 PARAMETER Experiment Name: Zm_Imbibed_Seeds_P Parameter: Organism Value: Zea mays
  misc_feature: MA Experiment 108530 PARAMETER Experiment Name: Zm_Imbibed_Seeds_P Parameter: Plant Line Value: 35A19
  misc_feature: MA Experiment 108530 PARAMETER Experiment Name: Zm_Imbibed_Seeds_P Parameter: Tissue Value: Aerial vs. Embryo
  misc_feature: MA Experiment ID: 108536 Result: Down-regulated in Transcription
  misc_feature: MA Experiment 108536 PARAMETER Experiment Name: Zm_Meristem_P Parameter: Age (day) Value: 8
  misc_feature: MA Experiment 108536 PARAMETER Experiment Name: Zm_Meristem_P Parameter: Organism Value: Zea mays
  misc_feature: MA Experiment 108536 PARAMETER Experiment Name: Zm_Meristem_P Parameter: Plant Line Value: 35A19
  misc_feature: MA Experiment 108536 PARAMETER Experiment Name: Zm_Meristem_P Parameter: Tissue Value: Shoot Meristem vs. Above Shoot Meristem
  misc_feature: MA Experiment ID: 108540 Result: Down-regulated in Transcription
  misc_feature: MA Experiment 108540 PARAMETER Experiment Name: Zm_20percent_PEG_P Parameter: Age (day) Value: 8
  misc_feature: MA Experiment 108540 PARAMETER Experiment Name: Zm_20percent_PEG_P Parameter: Organism Value: Zea mays
  misc_feature: MA Experiment 108540 PARAMETER Experiment Name: Zm_20percent_PEG_P Parameter: Plant Line Value: 35A19
  misc_feature: MA Experiment 108540 PARAMETER Experiment Name: Zm_20percent_PEG_P Parameter: Timepoint (hr) Value: 6
  misc_feature: MA Experiment 108540 PARAMETER Experiment Name: Zm_20percent_PEG_P Parameter: Tissue Value: Aerial
  misc_feature: MA Experiment 108540 PARAMETER Experiment Name: Zm_20percent_PEG_P Parameter: Treatment Value: 20percent PEG vs. No Treatment
  misc_feature: MA Experiment ID: 108543 Result: Up-regulated in Transcription
  misc_feature: MA Experiment ID: 108544 Result: Down-regulated in Transcription
  misc_feature: MA Experiment ID: 108545 Result: Up-regulated in Transcription
  misc_feature: MA Experiment 108545 PARAMETER Experiment Name: Zm_Imbibed_Seeds_P Parameter: Age (day) Value: 3 vs. 2
  misc_feature: MA Experiment 108545 PARAMETER Experiment Name: Zm_Imbibed_Seeds_P Parameter: Organism Value: Zea mays
  misc_feature: MA Experiment 108545 PARAMETER Experiment Name: Zm_Imbibed_Seeds_P Parameter: Plant Line Value: 35A19
  misc_feature: MA Experiment 108545 PARAMETER Experiment Name: Zm_Imbibed_Seeds_P Parameter: Tissue Value: Aerial vs. Embryo
  misc_feature: MA Experiment ID: 108546 Result: Down-regulated in Transcription
  misc_feature: MA Experiment 108546 PARAMETER Experiment Name: Zm_Imbibed_Seeds_P Parameter: Age (day) Value: 3 vs. 2
  misc_feature: MA Experiment 108546 PARAMETER Experiment Name: Zm_Imbibed_Seeds_P Parameter: Organism Value: Zea mays
  misc_feature: MA Experiment 108546 PARAMETER Experiment Name: Zm_Imbibed_Seeds_P Parameter: Plant Line Value: 35A19
  misc_feature: MA Experiment 108546 PARAMETER Experiment Name: Zm_Imbibed_Seeds_P Parameter: Tissue Value: Roots vs. Embryo
  misc_feature: MA Experiment ID: 108547 Result: Up-regulated in Transcription
  misc_feature: MA Experiment 108547 PARAMETER Experiment Name: Zm_Imbibed_Seeds_P Parameter: Age (day) Value: 4 vs. 2
  misc_feature: MA Experiment 108547 PARAMETER Experiment Name: Zm_Imbibed_Seeds_P Parameter: Organism Value: Zea mays
  misc_feature: MA Experiment 108547 PARAMETER Experiment Name: Zm_Imbibed_Seeds_P Parameter: Plant Line Value: 35A19
  misc_feature: MA Experiment 108547 PARAMETER Experiment Name: Zm_Imbibed_Seeds_P Parameter: Tissue Value: Aerial vs. Embryo
  misc_feature: MA Experiment ID: 108556 Result: Down-regulated in Transcription
  misc_feature: MA Experiment 108556 PARAMETER Experiment Name: Zm_Drought_P Parameter: Age (day) Value: 9
  misc_feature: MA Experiment 108556 PARAMETER Experiment Name: Zm_Drought_P Parameter: Organism Value: Zea mays
  misc_feature: MA Experiment 108556 PARAMETER Experiment Name: Zm_Drought_P Parameter: Plant Line Value: 35A19
  misc_feature: MA Experiment 108556 PARAMETER Experiment Name: Zm_Drought_P Parameter: Timepoint (hr) Value: 24
  misc_feature: MA Experiment 108556 PARAMETER Experiment Name: Zm_Drought_P Parameter: Tissue Value: Aerial
  misc_feature: MA Experiment 108556 PARAMETER Experiment Name: Zm_Drought_P Parameter: Treatment Value: Drought vs. No Drought
  misc_feature: MA Experiment ID: 108597 Result: Down-regulated in Transcription
  misc_feature: MA Experiment 108597 PARAMETER Experiment Name: Zm_100uM_ABA_P Parameter: Age (day) Value: 9
  misc_feature: MA Experiment 108597 PARAMETER Experiment Name: Zm_100uM_ABA_P Parameter: Organism Value: Zea mays
  misc_feature: MA Experiment 108597 PARAMETER Experiment Name: Zm_100uM_ABA_P Parameter: Plant Line Value: 35A19
  misc_feature: MA Experiment 108597 PARAMETER Experiment Name: Zm_100uM_ABA_P Parameter: Timepoint (hr) Value: 24
  misc_feature: MA Experiment 108597 PARAMETER Experiment Name: Zm_100uM_ABA_P Parameter: Tissue Value: Aerial
  misc_feature: MA Experiment 108597 PARAMETER Experiment Name: Zm_100uM_ABA_P Parameter: Treatment Value: 100uM ABA vs. No Treatment
  misc_feature: MA Experiment ID: 108688 Result: Down-regulated in Transcription
  misc_feature: MA Experiment 108688 PARAMETER Experiment Name: Zm_Embryos-Flowers__P Parameter: Tissue Value: Immature Flowers vs. Aerial+
  misc_feature: MA Experiment ID: 108689 Result: Down-regulated in Transcription
  misc_feature: MA Experiment 108689 PARAMETER Experiment Name: Zm_Drought_Roots_P Parameter: Age (day) Value: 9
  misc_feature: MA Experiment 108689 PARAMETER Experiment Name: Zm_Drought_Roots_P Parameter: Organism Value: Zea mays
  misc_feature: MA Experiment 108689 PARAMETER Experiment Name: Zm_Drought_Roots_P Parameter: Plant Line Value: 35A19
  misc_feature: MA Experiment 108689 PARAMETER Experiment Name: Zm_Drought_Roots_P Parameter: Timepoint (hr) Value: 24
  misc_feature: MA Experiment 108689 PARAMETER Experiment Name: Zm_Drought_Roots_P Parameter: Tissue Value: Roots
  misc_feature: MA Experiment 108689 PARAMETER Experiment Name: Zm_Drought_Roots_P Parameter: Treatment Value: Drought vs. No Drought
  misc_feature: MA Experiment ID: 20000477 Result: Down-regulated in Transcription
  misc_feature: MA Experiment 20000477 PARAMETER Experiment Name: Zm_5mM_SA_P Parameter: Age (day) Value: 10
  misc_feature: MA Experiment 20000477 PARAMETER Experiment Name: Zm_5mM_SA_P Parameter: Organism Value: Zea mays
  misc_feature: MA Experiment 20000477 PARAMETER Experiment Name: Zm_5mM_SA_P Parameter: Plant Line Value: 35A19
  misc_feature: MA Experiment 20000477 PARAMETER Experiment Name: Zm_5mM_SA_P Parameter: Timepoint (hr) Value: 48
  misc_feature: MA Experiment 20000477 PARAMETER Experiment Name: Zm_5mM_SA_P Parameter: Tissue Value: Aerial
  misc_feature: MA Experiment 20000477 PARAMETER Experiment Name: Zm_5mM_SA_P Parameter: Treatment Value: 5mM SA vs. No Treatment
  misc_feature: MA Experiment ID: 20000478 Result: Down-regulated in Transcription
  misc_feature: MA Experiment 20000478 PARAMETER Experiment Name: Zm_5mM_SA_P Parameter: Age (day) Value: 11
  misc_feature: MA Experiment 20000478 PARAMETER Experiment Name: Zm_5mM_SA_P Parameter: Organism Value: Zea mays
  misc_feature: MA Experiment 20000478 PARAMETER Experiment Name: Zm_5mM_SA_P Parameter: Plant Line Value: 35A19
  misc_feature: MA Experiment 20000478 PARAMETER Experiment Name: Zm_5mM_SA_P Parameter: Timepoint (hr) Value: 72
  misc_feature: MA Experiment 20000478 PARAMETER Experiment Name: Zm_5mM_SA_P Parameter: Tissue Value: Aerial
  misc_feature: MA Experiment 20000478 PARAMETER Experiment Name: Zm_5mM_SA_P Parameter: Treatment Value: 5mM SA vs. No Treatment
  misc_feature: MA Experiment ID: 20000488 Result: Down-regulated in Transcription
  misc_feature: MA Experiment 20000488 PARAMETER Experiment Name: Zm_50mM_NH4NO3_L_to_H_P Parameter: Organism Value: Zea mays
  misc_feature: MA Experiment 20000488 PARAMETER Experiment Name: Zm_50mM_NH4NO3_L_to_H_P Parameter: Timepoint (hr) Value: 8
  misc_feature: MA Experiment 20000488 PARAMETER Experiment Name: Zm_50mM_NH4NO3_L_to_H_P Parameter: Tissue Value: Leaves
  misc_feature: MA Experiment 20000488 PARAMETER Experiment Name: Zm_50mM_NH4NO3_L_to_H_P Parameter: Treatment Value: 50mM NH4NO3 vs. 100mM Mannitol
  misc_feature: MA Experiment ID: 20000626 Result: Down-regulated in Transcription
  misc_feature: MA Experiment 20000626 PARAMETER Experiment Name: Zm_Herbicide-Treatments_P Parameter: Timepoint (hr) Value: 12
  misc_feature: MA Experiment 20000626 PARAMETER Experiment Name: Zm_Herbicide-Treatments_P Parameter: Tissue Value: Aerial
  misc_feature: MA Experiment 20000626 PARAMETER Experiment Name: Zm_Herbicide-Treatments_P Parameter: Treatment Value: Roundup vs. No Treatment
gcgcgccacggcggcggcgaccccgtgttcgtcggcgtcaacatgcagcgcatccacaacgacttcatcgacgaccccaaggcgtacggcttccagaccgccaccgacgcgtgctgcggccagggccgcttcaacggcatggggctctgcaccatggtgtccagcctctgcgccgaccgcgacacctacgtgttctgggacgccttccaccccacggagcgcgccaaccgcctcatcgtgcagcagttcatgtccggctccaccgactacatcatgcccatgaacctcagcaccgtcctcgccgtcgacctccagaagcagcagctgcgtacgtgacgtgatgtcgtcatccgcttcatcagctgcctgatcagcttcgtgcgtcgccattgccacatcgtcagatcagtttcgtatgcgtgtgtagtgagagtacctagctagtgcatcatgtgccatcagtttccggatgtggttttctgcagggtttcgttcgttcgttcgtgtgtgtgctgcagtgcaggtgtttaattgtgtgatagtgacgaccgtatcctgtcaattgtcatatagcaggacagcttcttgtaataatttatataaattttcaggcgattc

SEQ ID NO: 14504 - protein, 112 aa, Zea mays subsp. mays
  peptide (1)..(112): Ceres Seq. ID no. 12468439
APRRRRPRVRRRQHAAHPQRLHRRPQGVRLPDRHRRVLRPGPLQRHGALHHGVQPLRRPRHLRVLGRLPPHGARQPPHRAAVHVRLHRLHHAHEPQHRPRRRPPEAAAAYVT

SEQ ID NO: 14505 - protein, 111 aa, Zea mays subsp. mays
  peptide (1)..(111): Ceres Seq. ID no. 12468440
  misc_feature (6)..(83): Pfam Name: GDSL-like Lipase/Acylhydrolase Pfam Description: GDSL-like Lipase/Acylhydrolase
  misc_feature (1)..(103): Homolog of NCBI NO: 28071322 NR Description: P0705A05.30 [Oryza sativa (japonica
  misc_feature (6)..(107): Homolog of NCBI NO: 22758315 NR Description: putative early nodulin gene (Enod) related
  misc_feature (6)..(107): Homolog of NCBI NO: 37535146 NR Description: putative early nodulin gene (Enod) related
  misc_feature (6)..(103): Homolog of NCBI NO: 15242808 NR Description: putative protein; protein id: At5g33370.1,
  misc_feature (6)..(103): Homolog of NCBI NO: 15235421 NR Description: Proline-rich APG - like protein; protein id:
  misc_feature (6)..(106): Homolog of NCBI NO: 15229265 NR Description: putative GDSL-motif lipase/acylhydrolase; protein
  misc_feature (6)..(102): Homolog of NCBI NO: 15238814 NR Description: putative protein; protein id: At5g18430.1
  misc_feature (21)..(102): Homolog of NCBI NO: 13161399 NR Description: CPRD47 [Vigna unguiculata]
  misc_feature (7)..(96): Homolog of NCBI NO: 15229742 NR Description: putative protein; protein id: At3g50400.1 thaliana] >gi|7630026|emb|CAB88323.1| putative protein thaliana] >gi|26450386|dbj|BAC42308.1| unknown protein
  misc_feature (9)..(97): Homolog of NCBI NO: 15227849 NR Description: putative GDSL-motif lipase/hydrolase; protein id:
ARHGGGDPVFVGVNMQRIHNDFIDDPKAYGFQTATDACCGQGRFNGMGLCTMVSSLCADRDTYVFWDAFHPTERANRLIVQQFMSGSTDYIMPMNLSTVLAVDLQKQQLRT

SEQ ID NO: 14506 - protein, 97 aa, Zea mays subsp. mays
  peptide (1)..(97): Ceres Seq. ID no. 12468441
  misc_feature (1)..(69): Pfam Name: GDSL-like Lipase/Acylhydrolase Pfam Description: GDSL-like Lipase/Acylhydrolase
  misc_feature (1)..(89): Homolog of NCBI NO: 28071322 NR Description: P0705A05.30 [Oryza sativa (japonica
  misc_feature (1)..(93): Homolog of NCBI NO: 22758315 NR Description: putative early nodulin gene (Enod) related
  misc_feature (1)..(93): Homolog of NCBI NO: 37535146 NR Description: putative early nodulin gene (Enod) related
  misc_feature (1)..(89): Homolog of NCBI NO: 15242808 NR Description: putative protein; protein id: At5g33370.1,
  misc_feature (1)..(89): Homolog of NCBI NO: 15235421 NR Description: Proline-rich APG - like protein; protein id:
  misc_feature (1)..(92): Homolog of NCBI NO: 15229265 NR Description: putative GDSL-motif lipase/acylhydrolase; protein
  misc_feature (1)..(88): Homolog of NCBI NO: 15238814 NR Description: putative protein; protein id: At5g18430.1
  misc_feature (7)..(88): Homolog of NCBI NO: 13161399 NR Description: CPRD47 [Vigna unguiculata]
  misc_feature (1)..(82): Homolog of NCBI NO: 15229742 NR Description: putative protein; protein id: At3g50400.1 thaliana] >gi|7630026|emb|CAB88323.1| putative protein thaliana] >gi|26450386|dbj|BAC42308.1| unknown protein
  misc_feature (1)..(83): Homolog of NCBI NO: 15227849 NR Description: putative GDSL-motif lipase/hydrolase; protein id:
MQRIHNDFIDDPKAYGFQTATDACCGQGRFNGMGLCTMVSSLCADRDTYVFWDAFHPTERANRLIVQQFMSGSTDYIMPMNLSTVLAVDLQKQQLRT

SEQ ID NO: 14507 - DNA, 976 bp, Zea mays subsp. mays
  misc_feature (1)..(976): Ceres Seq. ID no. 12578960
  misc_feature: MA Experiment ID: 108543 Result: Up-regulated in Transcription
acatggacgtcgacaaggtcagcttcaccgggtccacggaggtcggccgcctcgtcatgagggccgcggccgagagcaacctcaagcccgtgtcgctcgagctgggcggcaagtctcccgtcatcgtcttcgacgacgccgacctcgacatggccgttaacctcgtcaacttcgccacctacaccaacaagggcgagatctgtgtggccggcacgcgcatctacgtgcaggaagggatctacgacgagttcgtgaagaaggccgccgagctcgccagcaagtccgtggtcggagacccgttcaacccgagtgtcagccaaggcccccaggttgacaaggaccagtacgagaaggtcctcaggtacattgacatcgggaagcgcgaaggcgccacgctggtcaccggagggaagccctgcggcgacaataagggctactacatcgagcccaccatcttcacggacgtcaaggacgacatgacgatcgcacaggatgaaatctttgggccggtgatggctctcatgaaattcaagaccgtggaggaggtgatccagaaagcgaacaacacccggtacggcctggccgccggcatcgtgaccaagaacatcgacgtcgccaacaccgtgtcgcggtccatccgcgccggcgccatttggatcaactgctacttcgcgttcgacccggacgcgccgttcggcgggtacaagatgagcgggttcggcaaggacatgggcatggacgcgctcgacaagtacctgcagaccaagaccgtcgtcactccgctgtacaacactccatggctctgaccgacctcatcctgtccgatgaacagttcaacatcacaaacaagaagaaacatgtcttgtaagatactcctccaaaggatcggttgcctgtacctgtactcttacacctgcatggattgatgatgcagtgcaatgtagcattcagaacaataaagacatgtttcggactg

SEQ ID NO: 14508 - protein, 267 aa, Zea mays subsp. mays
  peptide (1)..(267): Ceres Seq. ID no. 12578961
  misc_feature (1)..(267): Homolog of NCBI NO: 19850243 NR Description: cytosolic aldehyde dehydrogenase RF2C [Zea mays]
  misc_feature (1)..(267): Homolog of NCBI NO: 19850241 NR Description: cytosolic aldehyde dehydrogenase RF2C [Zea mays]
  misc_feature (1)..(267): Homolog of NCBI NO: 34912248 NR Description: cytosolic aldehyde dehydrogenase [Oryza sativa
  misc_feature (1)..(266): Homolog of NCBI NO: 19850245 NR Description: cytosolic aldehyde dehydrogenase RF2D [Zea mays]
  misc_feature (1)..(266): Homolog of NCBI NO: 19850247 NR Description: cytosolic aldehyde dehydrogenase RF2D [Zea mays]
  misc_feature (1)..(266): Homolog of NCBI NO: 34912252 NR Description: putative cytosolic aldehyde dehydrogenase [Oryza
  misc_feature (1)..(267): Homolog of NCBI NO: 18404212 NR Description: Expressed protein; protein id: At3g24503.1, by cDNA: gi_15912240, supported by cDNA: gi_20530142 [Arabidopsis >gi|9294041|dbj|BAB01998.1| aldehyde dehydrogenase [Arabidopsis
  misc_feature (1)..(267): Homolog of NCBI NO: 20530127 NR Description: mitochondrial aldehyde dehydrogenase [Secale
  misc_feature (1)..(267): Homolog of NCBI NO: 15128580 NR Description: mitochondrial aldehyde dehydrogenase ALDH2
  misc_feature (1)..(267): Homolog of NCBI NO: 7431451 NR Description: rf2 nuclear restorer protein - maize RF2 >gi|12004294|gb|AAG43988.1|AF215823_1 T cytoplasm male
MDVDKVSFTGSTEVGRLVMRAAAESNLKPVSLELGGKSPVIVFDDADLDMAVNLVNFATYTNKGEICVAGTRIYVQEGIYDEFVKKAAELASKSVVGDPFNPSVSQGPQVDKDQYEKVLRYIDIGKREGATLVTGGKPCGDNKGYYIEPTIFTDVKDDMTIAQDEIFGPVMALMKFKTVEEVIQKANNTRYGLAAGIVTKNIDVANTVSRSIRAGAIWINCYFAFDPDAPFGGYKMSGFGKDMGMDALDKYLQTKTVVTPLYNTPWL

SEQ ID NO: 14509 - protein, 249 aa, Zea mays subsp. mays
  peptide (1)..(249): Ceres Seq. ID no. 12578962
  misc_feature (1)..(249): Homolog of NCBI NO: 19850243 NR Description: cytosolic aldehyde dehydrogenase RF2C [Zea mays]
  misc_feature (1)..(249): Homolog of NCBI NO: 19850241 NR Description: cytosolic aldehyde dehydrogenase RF2C [Zea mays]
  misc_feature (1)..(249): Homolog of NCBI NO: 34912248 NR Description: cytosolic aldehyde dehydrogenase [Oryza sativa
  misc_feature (1)..(248): Homolog of NCBI NO: 19850245 NR Description: cytosolic aldehyde dehydrogenase RF2D [Zea mays]
  misc_feature (1)..(248): Homolog of NCBI NO: 19850247 NR Description: cytosolic aldehyde dehydrogenase RF2D [Zea mays]
  misc_feature (1)..(248): Homolog of NCBI NO: 34912252 NR Description: putative cytosolic aldehyde dehydrogenase [Oryza
  misc_feature (1)..(249): Homolog of NCBI NO: 18404212 NR Description: Expressed protein; protein id: At3g24503.1, by cDNA: gi_15912240, supported by cDNA: gi_20530142 [Arabidopsis >gi|9294041|dbj|BAB01998.1| aldehyde dehydrogenase [Arabidopsis
  misc_feature (1)..(249): Homolog of NCBI NO: 20530127 NR Description: mitochondrial aldehyde dehydrogenase [Secale
  misc_feature (1)..(249): Homolog of NCBI NO: 15128580 NR Description: mitochondrial aldehyde dehydrogenase ALDH2
  misc_feature (1)..(249): Homolog of NCBI NO: 7431451 NR Description: rf2 nuclear restorer protein - maize RF2 >gi|12004294|gb|AAG43988.1|AF215823_1 T cytoplasm male
MRAAAESNLKPVSLELGGKSPVIVFDDADLDMAVNLVNFATYTNKGEICVAGTRIYVQEGIYDEFVKKAAELASKSVVGDPFNPSVSQGPQVDKDQYEKVLRYIDIGKREGATLVTGGKPCGDNKGYYIEPTIFTDVKDDMTIAQDEIFGPVMALMKFKTVEEVIQKANNTRYGLAAGIVTKNIDVANTVSRSIRAGAIWINCYFAFDPDAPFGGYKMSGFGKDMGMDALDKYLQTKTVVTPLYNTPWL

SEQ ID NO: 14510 - protein, 218 aa, Zea mays subsp. mays
  peptide (1)..(218): Ceres Seq. ID no. 12578963
  misc_feature (1)..(218): Homolog of NCBI NO: 7431451 NR Description: rf2 nuclear restorer protein - maize RF2 >gi|12004294|gb|AAG43988.1|AF215823_1 T cytoplasm male
  misc_feature (1)..(218): Homolog of NCBI NO: 19850243 NR Description: cytosolic aldehyde dehydrogenase RF2C [Zea mays]
  misc_feature (1)..(218): Homolog of NCBI NO: 19850241 NR Description: cytosolic aldehyde dehydrogenase RF2C [Zea mays]
  misc_feature (1)..(218): Homolog of NCBI NO: 34912248 NR Description: cytosolic aldehyde dehydrogenase [Oryza sativa
  misc_feature (1)..(217): Homolog of NCBI NO: 19850245 NR Description: cytosolic aldehyde dehydrogenase RF2D [Zea mays]
  misc_feature (1)..(217): Homolog of NCBI NO: 19850247 NR Description: cytosolic aldehyde dehydrogenase RF2D [Zea mays]
  misc_feature (1)..(217): Homolog of NCBI NO: 34912252 NR Description: putative cytosolic aldehyde dehydrogenase [Oryza
  misc_feature (1)..(218): Homolog of NCBI NO: 18404212 NR Description: Expressed protein; protein id: At3g24503.1, by cDNA: gi_15912240, supported by cDNA: gi_20530142 [Arabidopsis >gi|9294041|dbj|BAB01998.1| aldehyde dehydrogenase [Arabidopsis
  misc_feature (1)..(218): Homolog of NCBI NO: 20530127 NR Description: mitochondrial aldehyde dehydrogenase [Secale
  misc_feature (1)..(218): Homolog of NCBI NO: 15128580 NR Description: mitochondrial aldehyde dehydrogenase ALDH2
MAVNLVNFATYTNKGEICVAGTRIYVQEGIYDEFVKKAAELASKSVVGDPFNPSVSQGPQVDKDQYEKVLRYIDIGKREGATLVTGGKPCGDNKGYYIEPTIFTDVKDDMTIAQDEIFGPVMALMKFKTVEEVIQKANNTRYGLAAGIVTKNIDVANTVSRSIRAGAIWINCYFAFDPDAPFGGYKMSGFGKDMGMDALDKYLQTKTVVTPLYNTPWL

SEQ ID NO: 14511 - DNA, 1571 bp, Zea mays subsp. mays
  misc_feature (1)..(1571): Ceres Seq. ID no. 13586780
  misc_feature: MA Experiment ID: 108535 Result: Up-regulated in Transcription
  misc_feature: MA Experiment 108535 PARAMETER Experiment Name: Zm_Meristem_P Parameter: Age (day) Value: 8
  misc_feature: MA Experiment 108535 PARAMETER Experiment Name: Zm_Meristem_P Parameter: Organism Value: Zea mays
  misc_feature: MA Experiment 108535 PARAMETER Experiment Name: Zm_Meristem_P Parameter: Plant Line Value: 35A19
  misc_feature: MA Experiment 108535 PARAMETER Experiment Name: Zm_Meristem_P Parameter: Tissue Value: Root Meristem vs. Above Root Meristem
  misc_feature: MA Experiment ID: 108543 Result: Up-regulated in Transcription
  misc_feature: MA Experiment ID: 20000480 Result: Down-regulated in Transcription
  misc_feature: MA Experiment 20000480 PARAMETER Experiment Name: Zm_Drought_P Parameter: Age (day) Value: 11
  misc_feature: MA Experiment 20000480 PARAMETER Experiment Name: Zm_Drought_P Parameter: Organism Value: Zea mays
  misc_feature: MA Experiment 20000480 PARAMETER Experiment Name: Zm_Drought_P Parameter: Plant Line Value: 35A19
  misc_feature: MA Experiment 20000480 PARAMETER Experiment Name: Zm_Drought_P Parameter: Timepoint (hr) Value: 72
  misc_feature: MA Experiment 20000480 PARAMETER Experiment Name: Zm_Drought_P Parameter: Tissue Value: Aerial
  misc_feature: MA Experiment 20000480 PARAMETER Experiment Name: Zm_Drought_P Parameter: Treatment Value: Drought vs. No Drought
tctgcaccccggactacatcacgccggagatgccgcaggtggccaacgagttcgacgacgacgataaggagaacatcccctgcccaaaatctccggagaagtcagcgaaccctcgtagcaagcggtacagaaccgattgttctcccaaagctcgggaggttacggacttctctttcgaccatcagattacgccggttctgtttgacagcttgactcgagatgattcggaagaagagcagccgaagcagcctgcgctggaaaagaggggtggttatgtctcccagtcagcagtggctctgcgttgccgggtgatgcctccgccatgcgtcaagaatccatacctcaataccgatccatgcatagatgctgctgtttacggtgggaggcagtgcaactcagcagtattctctccttcaattggtggtaatggtctttcacgctatcgaactgatttccatgaaatagagaaaattggttatggcaacttcagtgttgtgttcaaagttctgaataggatagacgggtgcttgtatgctgttaaacggagcatcaagcaattgcataatgatatggaaaggaggcaagcagtgaaagaagtccaagctatggcagccttaggttctcacgagaacatagttcgatatttcacctcttggtttgagaatgagcaactttatattcagatggaactctgcgaccgctgtctatctatgaatcggaaccagccagtgaagcgtggggaagccctggaactgttgtatcagatctgcaaaggcttggatttcatgcacgaacgtggcatagcacaccttgatgtgaagcctgataatatatatgtcagaaatggtatttataagctcggggattttggctgtgctacacttgttaaccggagtctagcaattgaagatggagattcacgctatatgcctccggaaatgctgaatgataagtatgagcatctcgacaaggttgatatcttttctcttggggcagccgtctatgagctaataagaggcaccccgcttcccgagtctggatctcactttacaagcattagagagggtaagatcgcattgcttccagggtgcccgatgcagtttcaaagcttaatcaagtctatgatggaccctgatccggtgaggcggccttcagcaaaggagatcctgagacacccttcctttgacaagctccacaaggcctcatcgaagtagaagtgctgccgcgcccccatcagatcagagcagccggcaaagggaattccgcagctgcgtcacattcaccgtcagctgctcccaatttttggtgtatctatctatctctatgcgtgtgccatgtgccctgttctgatactgtagaagatggctggaaacgaagcagggatctgattttaattccaggaactggagcacgagcagcgtctgtaaaggactaaaggctgtggctgctgttgtgttaaggttgtgcctctcttttggtttctgatgcacgcttggaaccatcaaccctgtgcctttttttggggtgcttgttatcagttgcatttgggcagcgaatgctaatttggatcc

SEQ ID NO: 14512 - protein, 403 aa, Zea mays subsp. mays
  peptide (1)..(403): Ceres Seq. ID no. 13586781
  misc_feature (151)..(394): Pfam Name: Protein kinase domain Pfam Description: Protein kinase domain
  misc_feature (1)..(403): Homolog of NCBI NO: 5821717 NR Description: Wee1-like protein [Zea mays]
  misc_feature (1)..(397): Homolog of NCBI NO: 15218666 NR Description: protein kinase, putative [Arabidopsis thaliana] protein kinase [Arabidopsis thaliana]
  misc_feature (1)..(397): Homolog of NCBI NO: 25518409 NR Description: hypothetical protein F22D16.3 - Arabidopsis >gi|6056405|gb|AAF02869.1|AC009525_3 Similar to Wee1 protein
  misc_feature (112)..(288): Homolog of NCBI NO: 21070391 NR Description: putative cell cycle regulatory protein kinase
  misc_feature (142)..(279): Homolog of NCBI NO: 15208193 NR Description: hypothetical protein [Macaca fascicularis]
  misc_feature (283)..(391): Homolog of NCBI NO: 15208193 NR Description: hypothetical protein [Macaca fascicularis]
  misc_feature (142)..(279): Homolog of NCBI NO: 228044 NR Description: Wee1-like gene
  misc_feature (283)..(391): Homolog of NCBI NO: 228044 NR Description: Wee1-like gene
  misc_feature (146)..(281): Homolog of NCBI NO: 4160308 NR Description: wee1-like kinase [Platynereis dumerilii]
  misc_feature (284)..(393): Homolog of NCBI NO: 4160308 NR Description: wee1-like kinase [Platynereis dumerilii]
CTPDYITPEMPQVANEFDDDDKENIPCPKSPEKSANPRSKRYRTDCSPKAREVTDFSFDHQITPVLFDSLTRDDSEEEQPKQPALEKRGGYVSQSAVALRCRVMPPPCVKNPYLNTDPCIDAAVYGGRQCNSAVFSPSIGGNGLSRYRTDFHEIEKIGYGNFSVVFKVLNRIDGCLYAVKRSIKQLHNDMERRQAVKEVQAMAALGSHENIVRYFTSWFENEQLYIQMELCDRCLSMNRNQPVKRGEALELLYQICKGLDFMHERGIAHLDVKPDNIYVRNGIYKLGDFGCATLVNRSLAIEDGDSRYMPPEMLNDKYEHLDKVDIFSLGAAVYELIRGTPLPESGSHFTSIREGKIALLPGCPMQFQSLIKSMMDPDPVRRPSAKEILRHPSFDKLHKASSK

SEQ ID NO: 14513 - protein, 394 aa, Zea mays subsp. mays
  peptide (1)..(394): Ceres Seq. ID no. 13586782
  misc_feature (142)..(385): Pfam Name: Protein kinase domain Pfam Description: Protein kinase domain
  misc_feature (1)..(394): Homolog of NCBI NO: 5821717 NR Description: Wee1-like protein [Zea mays]
  misc_feature (1)..(388): Homolog of NCBI NO: 15218666 NR Description: protein kinase, putative [Arabidopsis thaliana] protein kinase [Arabidopsis thaliana]
  misc_feature (1)..(388): Homolog of NCBI NO: 25518409 NR Description: hypothetical protein F22D16.3 - Arabidopsis >gi|6056405|gb|AAF02869.1|AC009525_3 Similar to Wee1 protein
  misc_feature (103)..(279): Homolog of NCBI NO: 21070391 NR Description: putative cell cycle regulatory protein kinase
  misc_feature (133)..(270): Homolog of NCBI NO: 15208193 NR Description: hypothetical protein [Macaca fascicularis]
  misc_feature (274)..(382): Homolog of NCBI NO: 15208193 NR Description: hypothetical protein [Macaca fascicularis]
  misc_feature (133)..(270): Homolog of NCBI NO: 228044 NR Description: Wee1-like gene
  misc_feature (274)..(382): Homolog of NCBI NO: 228044 NR Description: Wee1-like gene
  misc_feature (137)..(272): Homolog of NCBI NO: 4160308 NR Description: wee1-like kinase [Platynereis dumerilii]
  misc_feature (275)..(384): Homolog of NCBI NO: 4160308 NR Description: wee1-like kinase [Platynereis dumerilii]
MPQVANEFDDDDKENIPCPKSPEKSANPRSKRYRTDCSPKAREVTDFSFDHQITPVLFDSLTRDDSEEEQPKQPALEKRGGYVSQSAVALRCRVMPPPCVKNPYLNTDPCIDAAVYGGRQCNSAVFSPSIGGNGLSRYRTDFHEIEKIGYGNFSVVFKVLNRIDGCLYAVKRSIKQLHNDMERRQAVKEVQAMAALGSHENIVRYFTSWFENEQLYIQMELCDRCLSMNRNQPVKRGEALELLYQICKGLDFMHERGIAHLDVKPDNIYVRNGIYKLGDFGCATLVNRSLAIEDGDSRYMPPEMLNDKYEHLDKVDIFSLGAAVYELIRGTPLPESGSHFTSIREGKIALLPGCPMQFQSLIKSMMDPDPVRRPSAKEILRHPSFDKLHKASSK

SEQ ID NO: 14514 - protein, 300 aa, Zea mays subsp. mays
  peptide (1)..(300): Ceres Seq. ID no. 13586783
  misc_feature (48)..(291): Pfam Name: Protein kinase domain Pfam Description: Protein kinase domain
  misc_feature (1)..(300): Homolog of NCBI NO: 5821717 NR Description: Wee1-like protein [Zea mays]
  misc_feature (1)..(294): Homolog of NCBI NO: 15218666 NR Description: protein kinase, putative [Arabidopsis thaliana] protein kinase [Arabidopsis thaliana]
  misc_feature (1)..(294): Homolog of NCBI NO: 25518409 NR Description: hypothetical protein F22D16.3 - Arabidopsis >gi|6056405|gb|AAF02869.1|AC009525_3 Similar to Wee1 protein
  misc_feature (9)..(185): Homolog of NCBI NO: 21070391 NR Description: putative cell cycle regulatory protein kinase
  misc_feature (39)..(176): Homolog of NCBI NO: 15208193 NR Description: hypothetical protein [Macaca fascicularis]
  misc_feature (180)..(288): Homolog of NCBI NO: 15208193 NR Description: hypothetical protein [Macaca fascicularis]
  misc_feature (39)..(176): Homolog of NCBI NO: 228044 NR Description: Wee1-like gene
  misc_feature (180)..(288): Homolog of NCBI NO: 228044 NR Description: Wee1-like gene
  misc_feature (43)..(178): Homolog of NCBI NO: 4160308 NR Description: wee1-like kinase [Platynereis dumerilii]
  misc_feature (181)..(290): Homolog of NCBI NO: 4160308 NR Description: wee1-like kinase [Platynereis dumerilii]
MPPPCVKNPYLNTDPCIDAAVYGGRQCNSAVFSPSIGGNGLSRYRTDFHEIEKIGYGNFSVVFKVLNRIDGCLYAVKRSIKQLHNDMERRQAVKEVQAMAALGSHENIVRYFTSWFENEQLYIQMELCDRCLSMNRNQPVKRGEALELLYQICKGLDFMHERGIAHLDVKPDNIYVRNGIYKLGDFGCATLVNRSLAIEDGDSRYMPPEMLNDKYEHLDKVDIFSLGAAVYELIRGTPLPESGSHFTSIREGKIALLPGCPMQFQSLIKSMMDPDPVRRPSAKEILRHPSFDKLHKASSK

SEQ ID NO: 14515 - DNA, 530 bp, Zea mays subsp. mays
  misc_feature (1)..(530): Ceres Seq. ID no. 3629587
  misc_feature: MA Experiment ID: 108515 Result: Up-regulated in Transcription
  misc_feature: MA Experiment 108515 PARAMETER Experiment Name: Zm_2mM_SA_P Parameter: Age (day) Value: 8
  misc_feature: MA Experiment 108515 PARAMETER Experiment Name: Zm_2mM_SA_P Parameter: Organism Value: Zea mays
  misc_feature: MA Experiment 108515 PARAMETER Experiment Name: Zm_2mM_SA_P Parameter: Plant Line Value: 35A19
  misc_feature: MA Experiment 108515 PARAMETER Experiment Name: Zm_2mM_SA_P Parameter: Timepoint (hr) Value: 12
  misc_feature: MA Experiment 108515 PARAMETER Experiment Name: Zm_2mM_SA_P Parameter: Tissue Value: Aerial
  misc_feature: MA Experiment 108515 PARAMETER Experiment Name: Zm_2mM_SA_P Parameter: Treatment Value: 2mM SA vs. No Treatment
  misc_feature: MA Experiment ID: 108522 Result: Up-regulated in Transcription
  misc_feature: MA Experiment 108522 PARAMETER Experiment Name: Zm_42deg_Heat_P Parameter: Age (day) Value: 8
  misc_feature: MA Experiment 108522 PARAMETER Experiment Name: Zm_42deg_Heat_P Parameter: Organism Value: Zea mays
  misc_feature: MA Experiment 108522 PARAMETER Experiment Name: Zm_42deg_Heat_P Parameter: Plant Line Value: 35A19
  misc_feature: MA Experiment 108522 PARAMETER Experiment Name: Zm_42deg_Heat_P Parameter: Temperature (deg C) Value: 42 vs. 22
  misc_feature: MA Experiment 108522 PARAMETER Experiment Name: Zm_42deg_Heat_P Parameter: Timepoint (hr) Value: 1
  misc_feature: MA Experiment 108522 PARAMETER Experiment Name: Zm_42deg_Heat_P Parameter: Tissue Value: Aerial
  misc_feature: MA Experiment ID: 108523 Result: Up-regulated in Transcription
  misc_feature: MA Experiment 108523 PARAMETER Experiment Name: Zm_42deg_Heat_P Parameter: Age (day) Value: 8
  misc_feature: MA Experiment 108523 PARAMETER Experiment Name: Zm_42deg_Heat_P Parameter: Organism Value: Zea mays
  misc_feature: MA Experiment 108523 PARAMETER Experiment Name: Zm_42deg_Heat_P Parameter: Plant Line Value: 35A19
  misc_feature: MA Experiment 108523 PARAMETER Experiment Name: Zm_42deg_Heat_P Parameter: Temperature (deg C) Value: 42 vs. 22
  misc_feature: MA Experiment 108523 PARAMETER Experiment Name: Zm_42deg_Heat_P Parameter: Timepoint (hr) Value: 6
  misc_feature: MA Experiment 108523 PARAMETER Experiment Name: Zm_42deg_Heat_P Parameter: Tissue Value: Aerial
  misc_feature: MA Experiment ID: 108527 Result: Up-regulated in Transcription
  misc_feature: MA Experiment 108527 PARAMETER Experiment Name: Zm_5mM_NO_P Parameter: Age (day) Value: 8
  misc_feature: MA Experiment 108527 PARAMETER Experiment Name: Zm_5mM_NO_P Parameter: Organism Value: Zea mays
  misc_feature: MA Experiment 108527 PARAMETER Experiment Name: Zm_5mM_NO_P Parameter: Plant Line Value: 35A19
  misc_feature: MA Experiment 108527 PARAMETER Experiment Name: Zm_5mM_NO_P Parameter: Timepoint (hr) Value: 6
  misc_feature: MA Experiment 108527 PARAMETER Experiment Name: Zm_5mM_NO_P Parameter: Tissue Value: Aerial
  misc_feature: MA Experiment 108527 PARAMETER Experiment Name: Zm_5mM_NO_P Parameter: Treatment Value: 5mM NO vs. No Treatment
  misc_feature: MA Experiment ID: 108528 Result: Down-regulated in Transcription
  misc_feature: MA Experiment 108528 PARAMETER Experiment Name: Zm_Imbibed_Seeds_P Parameter: Age (day) Value: 5 vs. 2
  misc_feature: MA Experiment 108528 PARAMETER Experiment Name: Zm_Imbibed_Seeds_P Parameter: Organism Value: Zea mays
  misc_feature: MA Experiment 108528 PARAMETER Experiment Name: Zm_Imbibed_Seeds_P Parameter: Plant Line Value: 35A19
  misc_feature: MA Experiment 108528 PARAMETER Experiment Name: Zm_Imbibed_Seeds_P Parameter: Tissue Value: Aerial vs. Embryo
  misc_feature: MA Experiment ID: 108530 Result: Down-regulated in Transcription
  misc_feature: MA Experiment 108530 PARAMETER Experiment Name: Zm_Imbibed_Seeds_P Parameter: Age (day) Value: 6 vs. 2
  misc_feature: MA Experiment 108530 PARAMETER Experiment Name: Zm_Imbibed_Seeds_P Parameter: Organism Value: Zea mays
  misc_feature: MA Experiment 108530 PARAMETER Experiment Name: Zm_Imbibed_Seeds_P Parameter: Plant Line Value: 35A19
  misc_feature: MA Experiment 108530 PARAMETER Experiment Name: Zm_Imbibed_Seeds_P Parameter: Tissue Value: Aerial vs. Embryo
  misc_feature: MA Experiment ID: 108535 Result: Up-regulated in Transcription
  misc_feature: MA Experiment 108535 PARAMETER Experiment Name: Zm_Meristem_P Parameter: Age (day) Value: 8
  misc_feature: MA Experiment 108535 PARAMETER Experiment Name: Zm_Meristem_P Parameter: Organism Value: Zea mays
  misc_feature: MA Experiment 108535 PARAMETER Experiment Name: Zm_Meristem_P Parameter: Plant Line Value: 35A19
  misc_feature: MA Experiment 108535 PARAMETER Experiment Name: Zm_Meristem_P Parameter: Tissue Value: Root Meristem vs. Above Root Meristem
  misc_feature: MA Experiment ID: 108543 Result: Down-regulated in Transcription
  misc_feature: MA Experiment ID: 108544 Result: Down-regulated in Transcription
  misc_feature: MA Experiment ID: 108547 Result: Down-regulated in Transcription
  misc_feature: MA Experiment 108547 PARAMETER Experiment Name: Zm_Imbibed_Seeds_P Parameter: Age (day) Value: 4 vs. 2
  misc_feature: MA Experiment 108547 PARAMETER Experiment Name: Zm_Imbibed_Seeds_P Parameter: Organism Value: Zea mays
  misc_feature: MA Experiment 108547 PARAMETER Experiment Name: Zm_Imbibed_Seeds_P Parameter: Plant Line Value: 35A19
  misc_feature: MA Experiment 108547 PARAMETER Experiment Name: Zm_Imbibed_Seeds_P Parameter: Tissue Value: Aerial vs. Embryo
  misc_feature: MA Experiment ID: 108559 Result: Up-regulated in Transcription
  misc_feature: MA Experiment 108559 PARAMETER Experiment Name: Zm_5mM_NO_P Parameter: Age (day) Value: 8
  misc_feature: MA Experiment 108559 PARAMETER Experiment Name: Zm_5mM_NO_P Parameter: Organism Value: Zea mays
  misc_feature: MA Experiment 108559 PARAMETER Experiment Name: Zm_5mM_NO_P Parameter: Plant Line Value: 35A19
  misc_feature: MA Experiment 108559 PARAMETER Experiment Name: Zm_5mM_NO_P Parameter: Timepoint (hr) Value: 12
  misc_feature: MA Experiment 108559 PARAMETER Experiment Name: Zm_5mM_NO_P Parameter: Tissue Value: Aerial
  misc_feature: MA Experiment 108559 PARAMETER Experiment Name: Zm_5mM_NO_P Parameter: Treatment Value: 5mM NO vs. No Treatment
  misc_feature: MA Experiment ID: 20000477 Result: Up-regulated in Transcription
  misc_feature: MA Experiment 20000477 PARAMETER Experiment Name: Zm_5mM_SA_P Parameter: Age (day) Value: 10
  misc_feature: MA Experiment 20000477 PARAMETER Experiment Name: Zm_5mM_SA_P Parameter: Organism Value: Zea mays
  misc_feature: MA Experiment 20000477 PARAMETER Experiment Name: Zm_5mM_SA_P Parameter: Plant Line Value: 35A19
  misc_feature: MA Experiment 20000477 PARAMETER Experiment Name: Zm_5mM_SA_P Parameter: Timepoint (hr) Value: 48
  misc_feature: MA Experiment 20000477 PARAMETER Experiment Name: Zm_5mM_SA_P Parameter: Tissue Value: Aerial
  misc_feature: MA Experiment 20000477 PARAMETER Experiment Name: Zm_5mM_SA_P Parameter: Treatment Value: 5mM SA vs. No Treatment
  misc_feature: MA Experiment ID: 20000487 Result: Up-regulated in Transcription
  misc_feature: MA Experiment 20000487 PARAMETER Experiment Name: Zm_50mM_NH4NO3_L_to_H_P Parameter: Organism Value: Zea mays
  misc_feature: MA Experiment 20000487 PARAMETER Experiment Name: Zm_50mM_NH4NO3_L_to_H_P Parameter: Timepoint (hr) Value: 4
  misc_feature: MA Experiment 20000487 PARAMETER Experiment Name: Zm_50mM_NH4NO3_L_to_H_P Parameter: Tissue Value: Leaves
  misc_feature: MA Experiment 20000487 PARAMETER Experiment Name: Zm_50mM_NH4NO3_L_to_H_P Parameter: Treatment Value: 50mM NH4NO3 vs. 100mM Mannitol
  misc_feature: MA Experiment ID: 20000626 Result: Up-regulated in Transcription
  misc_feature: MA Experiment 20000626 PARAMETER Experiment Name: Zm_Herbicide-Treatments_P Parameter: Timepoint (hr) Value: 12
  misc_feature: MA Experiment 20000626 PARAMETER Experiment Name: Zm_Herbicide-Treatments_P Parameter: Tissue Value: Aerial
  misc_feature: MA Experiment 20000626 PARAMETER Experiment Name: Zm_Herbicide-Treatments_P Parameter: Treatment Value: Roundup vs. No Treatment
  misc_feature: MA Experiment ID: 20000630 Result: Up-regulated in Transcription
  misc_feature: MA Experiment 20000630 PARAMETER Experiment Name: Zm_Herbicide-Treatments_P Parameter: Timepoint (hr) Value: 4
  misc_feature: MA Experiment 20000630 PARAMETER Experiment Name: Zm_Herbicide-Treatments_P Parameter: Tissue Value: Aerial
  misc_feature: MA Experiment 20000630 PARAMETER Experiment Name: Zm_Herbicide-Treatments_P Parameter: Treatment Value: Roundup vs. No Treatment
  misc_feature: MA Experiment ID: 20001613 Result: Up-regulated in Transcription
  misc_feature: MA Experiment 20001613 PARAMETER Experiment Name: Zm_50ppm_KNO3_L-to-H_P Parameter: Age (day) Value: 20
  misc_feature: MA Experiment 20001613 PARAMETER Experiment Name: Zm_50ppm_KNO3_L-to-H_P Parameter: Organism Value: Zea mays
  misc_feature: MA Experiment 20001613 PARAMETER Experiment Name: Zm_50ppm_KNO3_L-to-H_P Parameter: Plant Line Value: 35A19
  misc_feature: MA Experiment 20001613 PARAMETER Experiment Name: Zm_50ppm_KNO3_L-to-H_P Parameter: Timepoint (hr) Value: 24
  misc_feature: MA Experiment 20001613 PARAMETER Experiment Name: Zm_50ppm_KNO3_L-to-H_P Parameter: Tissue Value: Roots
  misc_feature: MA Experiment 20001613 PARAMETER Experiment Name: Zm_50ppm_KNO3_L-to-H_P Parameter: Treatment Value: 50ppm KNO3 vs. 50ppm KCl
ttggcgaattccagcttgaaggcattccaccagccccaagaggcatgccccagatcgaggttacctttgacattgatgccaatggcattgtaaaggtgtcagctagggacaaagccacaggcaaagaacaagaaatcaccatcaagtcttytggtggtttgtcagaggtcgaaattgakaagatggtgaaggaggcaragctacattctcagaaggaccaggaaaggaagtctcttattgatctcaagaactctgcasataccacgatctacagcattgasaagagtgtcagcgagtacaaggacaaggtccctgctgaagtcaccaaggagatcgagtctgctgtctctgatctgagggcagctatggctgaggatgatctggacaagatcaagcagaagctggaagcagcaaacaaggctgtttcaaagatcggagarcacatgcmacaaggtggtggtggcggcsgcagcscttgtggcagcagcagtggaggaraccagactccagaagctgagtaccagggacgc

SEQ ID NO: 14516 - protein, 176 aa, Zea mays subsp. mays
  peptide (1)..(176): Ceres Seq. ID no. 3629588
  misc_feature (1)..(148): Pfam Name: Hsp70 protein Pfam Description: Hsp70 protein
  misc_feature (1)..(174): Homolog of NCBI NO: 27476086 NR Description: Putative heat shock 70 KD protein, mitochondrial
  misc_feature (1)..(174): Homolog of NCBI NO: 399940 NR Description: HEAT SHOCK 70 KD PROTEIN, MITOCHONDRIAL PRECURSOR
  misc_feature (1)..(174): Homolog of NCBI NO: 300265 NR Description: HSP68=68 kda heat-stress DnaK homolog
  misc_feature (1)..(174): Homolog of NCBI NO: 7441879 NR Description: dnaK-type molecular chaperone HSC70-11, - spinach >gi|2654212|gb|AAB91473.1| heat shock 70 protein oleracea] >gi|2773052|gb|AAB96660.1| heat shock 70 protein
  misc_feature (1)..(174): Homolog of NCBI NO: 585272 NR Description: HEAT SHOCK 70 KD PROTEIN, MITOCHONDRIAL PRECURSOR
  misc_feature (1)..(174): Homolog of NCBI NO: 7441844 NR Description: dnaK-type molecular chaperone PHSP1 precursor,
  misc_feature (1)..(174): Homolog of NCBI NO: 7441881 NR Description: dnaK-type molecular chaperone HSC70-10, - spinach >gi|2654210|gb|AAB91472.1| heat shock 70 protein
  misc_feature (1)..(174): Homolog of NCBI NO: 15242459 NR Description: heat shock protein 70 (Hsc70-5); protein id: supported by cDNA: gi_6746589 [Arabidopsis thaliana]
  misc_feature (1)..(174): Homolog of NCBI NO: 7441874 NR Description: dnaK-type molecular chaperone F20D10.30 - thaliana >gi|4467097|emb|CAB37531.1| heat shock protein 70 like [Arabidopsis thaliana] >gi|7270774|emb|CAB80456.1| heat shock
  misc_feature (1)..(174): Homolog of NCBI NO: 30691626 NR Description: heat shock protein mtHsc70-1 [Arabidopsis >gi|27311569|gb|AAO00750.1| heat shock protein 70 like protein thaliana] >gi|30725534|gb|AAP37789.1| At4g37910 [Arabidopsis
  misc_feature (50)..(50): Xaa is any aa, unknown or other
  misc_feature (59)..(59): Xaa is any aa, unknown or other
  misc_feature (66)..(66): Xaa is any aa, unknown or other
  misc_feature (86)..(86): Xaa is any aa, unknown or other
  misc_feature (93)..(93): Xaa is any aa, unknown or other
  misc_feature (146)..(146): Xaa is any aa, unknown or other
  misc_feature (149)..(149): Xaa is any aa, unknown or other
  misc_feature (156)..(156): Xaa is any aa, unknown or other
  misc_feature (158)..(158): Xaa is any aa, unknown or other
  misc_feature (166)..(166): Xaa is any aa, unknown or other
GEFQLEGIPPAPRGMPQIEVTFDIDANGIVKVSARDKATGKEQEITIKSXGGLSEVEIXKMVKEAXLHSQKDQERKSLIDLKNSAXTTIYSIXKSVSEYKDKVPAEVTKEIESAVSDLRAAMAEDDLDKIKQKLEAANKAVSKIGXHMXQGGGGGXSXCGSSSGGXQTPEAEYQGR

SEQ ID NO: 14517 - protein, 162 aa, Zea mays subsp. mays
  peptide (1)..(162): Ceres Seq. ID no. 3629589
  misc_feature (1)..(134): Pfam Name: Hsp70 protein Pfam Description: Hsp70 protein
  misc_feature (1)..(160): Homolog of NCBI NO: 27476086 NR Description: Putative heat shock 70 KD protein, mitochondrial
  misc_feature (1)..(160): Homolog of NCBI NO: 399940 NR Description: HEAT SHOCK 70 KD PROTEIN, MITOCHONDRIAL PRECURSOR
  misc_feature (1)..(160): Homolog of NCBI NO: 300265 NR Description: HSP68=68 kda heat-stress DnaK homolog
  misc_feature (1)..(160): Homolog of NCBI NO: 7441879 NR Description: dnaK-type molecular chaperone HSC70-11, - spinach >gi|2654212|gb|AAB91473.1| heat shock 70 protein oleracea] >gi|2773052|gb|AAB96660.1| heat shock 70 protein
  misc_feature (1)..(160): Homolog of NCBI NO: 585272 NR Description: HEAT SHOCK 70 KD PROTEIN, MITOCHONDRIAL PRECURSOR
  misc_feature (1)..(160): Homolog of NCBI NO: 7441844 NR Description: dnaK-type molecular chaperone PHSP1 precursor,
  misc_feature (1)..(160): Homolog of NCBI NO: 7441881 NR Description: dnaK-type molecular chaperone HSC70-10, - spinach >gi|2654210|gb|AAB91472.1| heat shock 70 protein
  misc_feature (1)..(160): Homolog of NCBI NO: 15242459 NR Description: heat shock protein 70 (Hsc70-5); protein id: supported by cDNA: gi_6746589 [Arabidopsis thaliana]
  misc_feature (1)..(160): Homolog of NCBI NO: 7441874 NR Description: dnaK-type molecular chaperone F20D10.30 - thaliana >gi|4467097|emb|CAB37531.1| heat shock protein 70 like [Arabidopsis thaliana] >gi|7270774|emb|CAB80456.1| heat shock
  misc_feature (1)..(160): Homolog of NCBI NO: 30691626 NR Description: heat shock protein mtHsc70-1 [Arabidopsis >gi|27311569|gb|AAO00750.1| heat shock protein 70 like protein thaliana] >gi|30725534|gb|AAP37789.1| At4g37910 [Arabidopsis
  misc_feature (36)..(36): Xaa is any aa, unknown or other
  misc_feature (45)..(45): Xaa is any aa, unknown or other
  misc_feature (52)..(52): Xaa is any aa, unknown or other
  misc_feature (72)..(72): Xaa is any aa, unknown or other
  misc_feature (79)..(79): Xaa is any aa, unknown or other
  misc_feature (132)..(132): Xaa is any aa, unknown or other
  misc_feature (135)..(135): Xaa is any aa, unknown or other
  misc_feature (142)..(142): Xaa is any aa, unknown or other
  misc_feature (144)..(144): Xaa is any aa, unknown or other
  misc_feature (152)..(152): Xaa is any aa, unknown or other
MPQIEVTFDIDANGIVKVSARDKATGKEQEITIKSXGGLSEVEIXKMVKEAXLHSQKDQERKSLIDLKNSAXTTIYSIXKSVSEYKDKVPAEVTKEIESAVSDLRAAMAEDDLDKIKQKLEAANKAVSKIGXHMXQGGGGGXSXCGSSSGGXQTPEAEYQGR

SEQ ID NO: 14518 - protein, 116 aa, Zea mays subsp. mays
  peptide (1)..(116): Ceres Seq. ID no. 3629590
  misc_feature (1)..(88): Pfam Name: Hsp70 protein Pfam Description: Hsp70 protein
  misc_feature (1)..(114): Homolog of NCBI NO: 27476086 NR Description: Putative heat shock 70 KD protein, mitochondrial
  misc_feature (1)..(114): Homolog of NCBI NO: 399940 NR Description: HEAT SHOCK 70 KD PROTEIN, MITOCHONDRIAL PRECURSOR
  misc_feature (1)..(114): Homolog of NCBI NO: 300265 NR Description: HSP68=68 kda heat-stress DnaK homolog
  misc_feature (1)..(114): Homolog of NCBI NO: 7441879 NR Description: dnaK-type molecular chaperone HSC70-11, - spinach >gi|2654212|gb|AAB91473.1| heat shock 70 protein oleracea] >gi|2773052|gb|AAB96660.1| heat shock 70 protein
  misc_feature (1)..(114): Homolog of NCBI NO: 585272 NR Description: HEAT SHOCK 70 KD PROTEIN, MITOCHONDRIAL PRECURSOR
  misc_feature (1)..(114): Homolog of NCBI NO: 7441844 NR Description: dnaK-type molecular chaperone PHSP1 precursor,
  misc_feature (1)..(114): Homolog of NCBI NO: 7441881 NR Description: dnaK-type molecular chaperone HSC70-10, - spinach >gi|2654210|gb|AAB91472.1| heat shock 70 protein
  misc_feature (1)..(114): Homolog of NCBI NO: 15242459 NR Description: heat shock protein 70 (Hsc70-5); protein id: supported by cDNA: gi_6746589 [Arabidopsis thaliana]
  misc_feature (1)..(114): Homolog of NCBI NO: 7441874 NR Description: dnaK-type molecular chaperone F20D10.30 - thaliana >gi|4467097|emb|CAB37531.1| heat shock protein 70 like [Arabidopsis thaliana] >gi|7270774|emb|CAB80456.1| heat shock
  misc_feature (1)..(114): Homolog of NCBI NO: 30691626 NR Description: heat shock protein mtHsc70-1 [Arabidopsis >gi|27311569|gb|AAO00750.1| heat shock protein 70 like protein thaliana] >gi|30725534|gb|AAP37789.1| At4g37910 [Arabidopsis
  misc_feature (6)..(6): Xaa is any aa, unknown or other
  misc_feature (26)..(26): Xaa is any aa, unknown or other
  misc_feature (33)..(33): Xaa is any aa, unknown or other
  misc_feature (86)..(86): Xaa is any aa, unknown or other
  misc_feature (89)..(89): Xaa is any aa, unknown or other
  misc_feature (96)..(96): Xaa is any aa, unknown or other
  misc_feature (98)..(98): Xaa is any aa, unknown or other
  misc_feature (106)..(106): Xaa is any aa, unknown or other
MVKEAXLHSQKDQERKSLIDLKNSAXTTIYSIXKSVSEYKDKVPAEVTKEIESAVSDLRAAMAEDDLDKIKQKLEAANKAVSKIGXHMXQGGGGGXSXCGSSSGGXQTPEAEYQGR

SEQ ID NO: 14519 - DNA, 661 bp, Zea mays subsp. mays
  misc_feature (1)..(661): Ceres Seq. ID no. 12468926
  misc_feature: MA Experiment ID: 108556 Result: Down-regulated in Transcription
  misc_feature: MA Experiment 108556 PARAMETER Experiment Name: Zm_Drought_P Parameter: Age (day) Value: 9
  misc_feature: MA Experiment 108556 PARAMETER Experiment Name: Zm_Drought_P Parameter: Organism Value: Zea mays
  misc_feature: MA Experiment 108556 PARAMETER Experiment Name: Zm_Drought_P Parameter: Plant Line Value: 35A19
  misc_feature: MA Experiment 108556 PARAMETER Experiment Name: Zm_Drought_P Parameter: Timepoint (hr) Value: 24
  misc_feature: MA Experiment 108556 PARAMETER Experiment Name: Zm_Drought_P Parameter: Tissue Value: Aerial
  misc_feature: MA Experiment 108556 PARAMETER Experiment Name: Zm_Drought_P Parameter: Treatment Value: Drought vs. No Drought
  misc_feature: MA Experiment ID: 108689 Result: Down-regulated in Transcription
  misc_feature: MA Experiment 108689 PARAMETER Experiment Name: Zm_Drought_Roots_P Parameter: Age (day) Value: 9
  misc_feature: MA Experiment 108689 PARAMETER Experiment Name: Zm_Drought_Roots_P Parameter: Organism Value: Zea mays
  misc_feature: MA Experiment 108689 PARAMETER Experiment Name: Zm_Drought_Roots_P Parameter: Plant Line Value: 35A19
  misc_feature: MA Experiment 108689 PARAMETER Experiment Name: Zm_Drought_Roots_P Parameter: Timepoint (hr) Value: 24
  misc_feature: MA Experiment 108689 PARAMETER Experiment Name: Zm_Drought_Roots_P Parameter: Tissue Value: Roots
  misc_feature: MA Experiment 108689 PARAMETER Experiment Name: Zm_Drought_Roots_P Parameter: Treatment Value: Drought vs. No Drought
  misc_feature: MA Experiment ID: 20000479 Result: Down-regulated in Transcription
  misc_feature: MA Experiment 20000479 PARAMETER Experiment Name: Zm_Drought_P Parameter: Age (day) Value: 10
  misc_feature: MA Experiment 20000479 PARAMETER Experiment Name: Zm_Drought_P Parameter: Organism Value: Zea mays
  misc_feature: MA Experiment 20000479 PARAMETER Experiment Name: Zm_Drought_P Parameter: Plant Line Value: 35A19
  misc_feature: MA Experiment 20000479 PARAMETER Experiment Name: Zm_Drought_P Parameter: Timepoint (hr) Value: 48
  misc_feature: MA Experiment 20000479 PARAMETER Experiment Name: Zm_Drought_P Parameter: Tissue Value: Aerial
  misc_feature: MA Experiment 20000479 PARAMETER Experiment Name: Zm_Drought_P Parameter: Treatment Value: Drought vs. No Drought
  misc_feature: MA Experiment ID: 20000480 Result: Down-regulated in Transcription
  misc_feature: MA Experiment 20000480 PARAMETER Experiment Name: Zm_Drought_P Parameter: Age (day) Value: 11
  misc_feature: MA Experiment 20000480 PARAMETER Experiment Name: Zm_Drought_P Parameter: Organism Value: Zea mays
  misc_feature: MA Experiment 20000480 PARAMETER Experiment Name: Zm_Drought_P Parameter: Plant Line Value: 35A19
  misc_feature: MA Experiment 20000480 PARAMETER Experiment Name: Zm_Drought_P Parameter: Timepoint (hr) Value: 72
  misc_feature: MA Experiment 20000480 PARAMETER Experiment Name: Zm_Drought_P Parameter: Tissue Value: Aerial
  misc_feature: MA Experiment 20000480 PARAMETER Experiment Name: Zm_Drought_P Parameter: Treatment Value: Drought vs. No Drought
  misc_feature: MA Experiment ID: 20000492 Result: Up-regulated in Transcription
  misc_feature: MA Experiment 20000492 PARAMETER Experiment Name: Zm_Hybrid_Seed_Dev_P Parameter: DAP Value: 12
  misc_feature: MA Experiment 20000492 PARAMETER Experiment Name: Zm_Hybrid_Seed_Dev_P Parameter: Organism Value: Zea mays
  misc_feature: MA Experiment 20000492 PARAMETER Experiment Name: Zm_Hybrid_Seed_Dev_P Parameter: Plant Line Value: 35A19
  misc_feature: MA Experiment 20000492 PARAMETER Experiment Name: Zm_Hybrid_Seed_Dev_P Parameter: Tissue Value: Fert Kernel vs. Unfert Floret
  misc_feature: MA Experiment ID: 20000534 Result: Down-regulated in Transcription
  misc_feature: MA Experiment 20000534 PARAMETER Experiment Name: Zm_Hybrid_Pollen_P Parameter: Age (day) Value: 8
  misc_feature: MA Experiment 20000534 PARAMETER Experiment Name: Zm_Hybrid_Pollen_P Parameter: Organism Value: Zea mays
  misc_feature: MA Experiment 20000534 PARAMETER Experiment Name: Zm_Hybrid_Pollen_P Parameter: Plant Line Value: 35A19
  misc_feature: MA Experiment 20000534 PARAMETER Experiment Name: Zm_Hybrid_Pollen_P Parameter: Tissue Value: Pollen vs. Aerial
tgacttattctgctgaggatgaagcaaaaatcgaaaggcctgtgatgatacacagggcaatcctaggttctgttgaaaggatgtttgccattcttttggagcattacaatggcaaatggcccttatggctaagccctcgccaggccattgtttgttcagtatcttctggttcagtggaatatgcgaaacaggttcttgccatgctacatgaagctgatttccatgttgatattgatgtgagtgacaggacaatacaaaagaaggtacgggaagcccaggtagctcaattcaactacattcttgtcgtaggcgcacaggaggccgagactggaaatgtctgcgttagggtaagagataatgccgacctggccacaatgagcgttgatggcctcatcacacgtttgagggaggaaatcgtagccttcaaatgattttgatgctgcataatttcctagcacttcgcaatcattgactgttcatttgtgattttgattgagttttcagggaacagtactgagttcctccaaggctccaagtgtattcttgttggtacggttggaagctactaagggcatttanaagcacctagtttttaataaactggtttataaaaattgagatggttccaaacatatcggtttatattatggatttntagttt

SEQ ID NO: 14520 - protein, 142 aa, Zea mays subsp. mays
  peptide (1)..(142): Ceres Seq. ID no. 12468927
  misc_feature (1)..(142): Homolog of NCBI NO: 38175524 NR Description: putative threonyl-tRNA synthetase [Oryza sativa
  misc_feature (1)..(142): Homolog of NCBI NO: 20429011 NR Description: threonyl-tRNA synthetase [Oryza sativa (japonica
  misc_feature (2)..(141): Homolog of NCBI NO: 15081626 NR Description: AT5g26830/F2P16_90 [Arabidopsis thaliana]
  misc_feature (2)..(141): Homolog of NCBI NO: 11271129 NR Description: threonine-tRNA ligase (EC 6.1.1.3) [imported] -
  misc_feature (2)..(141): Homolog of NCBI NO: 30690426 NR Description: threonyl-tRNA synthetase [Arabidopsis thaliana]
  misc_feature (2)..(141): Homolog of NCBI NO: 7437517 NR Description: threonine-tRNA ligase (EC 6.1.1.3) - Arabidopsis
  misc_feature (2)..(126): Homolog of NCBI NO: 8671766 NR Description: T10O22.10 [Arabidopsis thaliana]
  misc_feature (2)..(126): Homolog of NCBI NO: 15220974 NR Description: hypothetical protein; protein id: At1g18130.1
  misc_feature (6)..(141): Homolog of NCBI NO: 15220911 NR Description: threonyl-tRNA synthetase, putative; protein id: [Arabidopsis thaliana] >gi|25518755|pir||H86314 hypothetical
  misc_feature (10)..(126): Homolog of NCBI NO: 9719727 NR Description: Contains similarity to threonyl-tRNA synthetase
TYSAEDEAKIERPVMIHRAILGSVERMFAILLEHYNGKWPLWLSPRQAIVCSVSSGSVEYAKQVLAMLHEADFHVDIDVSDRTIQKKVREAQVAQFNYILVVGAQEAETGNVCVRVRDNADLATMSVDGLITRLREEIVAFK

SEQ ID NO: 14521 - protein, 128 aa, Zea mays subsp. mays
  peptide (1)..(128): Ceres Seq. ID no. 12468928
  misc_feature (1)..(128): Homolog of NCBI NO: 38175524 NR Description: putative threonyl-tRNA synthetase [Oryza sativa
  misc_feature (1)..(128): Homolog of NCBI NO: 20429011 NR Description: threonyl-tRNA synthetase [Oryza sativa (japonica
  misc_feature (1)..(127): Homolog of NCBI NO: 15081626 NR Description: AT5g26830/F2P16_90 [Arabidopsis thaliana]
  misc_feature (1)..(127): Homolog of NCBI NO: 11271129 NR Description: threonine-tRNA ligase (EC 6.1.1.3) [imported] -
  misc_feature (1)..(127): Homolog of NCBI NO: 30690426 NR Description: threonyl-tRNA synthetase [Arabidopsis thaliana]
  misc_feature (1)..(127): Homolog of NCBI NO: 7437517 NR Description: threonine-tRNA ligase (EC 6.1.1.3) - Arabidopsis
  misc_feature (1)..(112): Homolog of NCBI NO: 8671766 NR Description: T10O22.10 [Arabidopsis thaliana]
  misc_feature (1)..(112): Homolog of NCBI NO: 15220974 NR Description: hypothetical protein; protein id: At1g18130.1
  misc_feature (1)..(127): Homolog of NCBI NO: 15220911 NR Description: threonyl-tRNA synthetase, putative; protein id: [Arabidopsis thaliana] >gi|25518755|pir||H86314 hypothetical
  misc_feature (1)..(112): Homolog of NCBI NO: 9719727 NR Description: Contains similarity to threonyl-tRNA synthetase
MIHRAILGSVERMFAILLEHYNGKWPLWLSPRQAIVCSVSSGSVEYAKQVLAMLHEADFHVDIDVSDRTIQKKVREAQVAQFNYILVVGAQEAETGNVCVRVRDNADLATMSVDGLITRLREEIVAFK

SEQ ID NO: 14522 - protein, 116 aa, Zea mays subsp. mays
  peptide (1)..(116): Ceres Seq. ID no. 12468929
  misc_feature (1)..(116): Homolog of NCBI NO: 38175524 NR Description: putative threonyl-tRNA synthetase [Oryza sativa
  misc_feature (1)..(116): Homolog of NCBI NO: 20429011 NR Description: threonyl-tRNA synthetase [Oryza sativa (japonica
  misc_feature (1)..(115): Homolog of NCBI NO: 15081626 NR Description: AT5g26830/F2P16_90 [Arabidopsis thaliana]
  misc_feature (1)..(115): Homolog of NCBI NO: 11271129 NR Description: threonine-tRNA ligase (EC 6.1.1.3) [imported] -
  misc_feature (1)..(115): Homolog of NCBI NO: 30690426 NR Description: threonyl-tRNA synthetase [Arabidopsis thaliana]
  misc_feature (1)..(115): Homolog of NCBI NO: 7437517 NR Description: threonine-tRNA ligase (EC 6.1.1.3) - Arabidopsis
  misc_feature (1)..(100): Homolog of NCBI NO: 8671766 NR Description: T10O22.10 [Arabidopsis thaliana]
  misc_feature (1)..(100): Homolog of NCBI NO: 15220974 NR Description: hypothetical protein; protein id: At1g18130.1
  misc_feature (1)..(115): Homolog of NCBI NO: 15220911 NR Description: threonyl-tRNA synthetase, putative; protein id: [Arabidopsis thaliana] >gi|25518755|pir||H86314 hypothetical
  misc_feature (1)..(100): Homolog of NCBI NO: 9719727 NR Description: Contains similarity to threonyl-tRNA synthetase
MFAILLEHYNGKWPLWLSPRQAIVCSVSSGSVEYAKQVLAMLHEADFHVDIDVSDRTIQKKVREAQVAQFNYILVVGAQEAETGNVCVRVRDNADLATMSVDGLITRLREEIVAFK

SEQ ID NO: 14523 - DNA, 491 bp, Zea mays subsp. mays
  misc_feature (1)..(491): Ceres Seq. ID no. 12468404
  misc_feature: MA Experiment ID: 108522 Result: Down-regulated in Transcription
  misc_feature: MA Experiment 108522 PARAMETER Experiment Name: Zm_42deg_Heat_P Parameter: Age (day) Value: 8
  misc_feature: MA Experiment 108522 PARAMETER Experiment Name: Zm_42deg_Heat_P Parameter: Organism Value: Zea mays
  misc_feature: MA Experiment 108522 PARAMETER Experiment Name: Zm_42deg_Heat_P Parameter: Plant Line Value: 35A19
  misc_feature: MA Experiment 108522 PARAMETER Experiment Name: Zm_42deg_Heat_P Parameter: Temperature (deg C) Value: 42 vs. 22
  misc_feature: MA Experiment 108522 PARAMETER Experiment Name: Zm_42deg_Heat_P Parameter: Timepoint (hr) Value: 1
  misc_feature: MA Experiment 108522 PARAMETER Experiment Name: Zm_42deg_Heat_P Parameter: Tissue Value: Aerial
  misc_feature: MA Experiment ID: 108529 Result: Down-regulated in Transcription
  misc_feature: MA Experiment 108529 PARAMETER Experiment Name: Zm_Imbibed_Seeds_P Parameter: Age (day) Value: 5 vs. 2
  misc_feature: MA Experiment 108529 PARAMETER Experiment Name: Zm_Imbibed_Seeds_P Parameter: Organism Value: Zea mays
  misc_feature: MA Experiment 108529 PARAMETER Experiment Name: Zm_Imbibed_Seeds_P Parameter: Plant Line Value: 35A19
  misc_feature: MA Experiment 108529 PARAMETER Experiment Name: Zm_Imbibed_Seeds_P Parameter: Tissue Value: Roots vs. Embryo
  misc_feature: MA Experiment ID: 108533 Result: Down-regulated in Transcription
  misc_feature: MA Experiment 108533 PARAMETER Experiment Name: Zm_4deg_Cold_P Parameter: Age (hr) Value: 8
  misc_feature: MA Experiment 108533 PARAMETER Experiment Name: Zm_4deg_Cold_P Parameter: Organism Value: Zea mays
  misc_feature: MA Experiment 108533 PARAMETER Experiment Name: Zm_4deg_Cold_P Parameter: Plant Line Value: 35A19
  misc_feature: MA Experiment 108533 PARAMETER Experiment Name: Zm_4deg_Cold_P Parameter: Temperature (deg C) Value: 4 vs. 22
  misc_feature: MA Experiment 108533 PARAMETER Experiment Name: Zm_4deg_Cold_P Parameter: Timepoint (hr) Value: 1
  misc_feature: MA Experiment 108533 PARAMETER Experiment Name: Zm_4deg_Cold_P Parameter: Tissue Value: Aerial
  misc_feature: MA Experiment ID: 108543 Result: Down-regulated in Transcription
  misc_feature: MA Experiment ID: 108544 Result: Down-regulated in Transcription
  misc_feature: MA Experiment ID: 108556 Result: Down-regulated in Transcription
  misc_feature: MA Experiment 108556 PARAMETER Experiment Name: Zm_Drought_P Parameter: Age (day) Value: 9
  misc_feature: MA Experiment 108556 PARAMETER Experiment Name: Zm_Drought_P Parameter: Organism Value: Zea mays
  misc_feature: MA Experiment 108556 PARAMETER Experiment Name: Zm_Drought_P Parameter: Plant Line Value: 35A19
  misc_feature: MA Experiment 108556 PARAMETER Experiment Name: Zm_Drought_P Parameter: Timepoint (hr) Value: 24
  misc_feature: MA Experiment 108556 PARAMETER Experiment Name: Zm_Drought_P Parameter: Tissue Value: Aerial
  misc_feature: MA Experiment 108556 PARAMETER Experiment Name: Zm_Drought_P Parameter: Treatment Value: Drought vs. No Drought
  misc_feature: MA Experiment ID: 108689 Result: Down-regulated in Transcription
  misc_feature: MA Experiment 108689 PARAMETER Experiment Name: Zm_Drought_Roots_P Parameter: Age (day) Value: 9
  misc_feature: MA Experiment 108689 PARAMETER Experiment Name: Zm_Drought_Roots_P Parameter: Organism Value: Zea mays
  misc_feature: MA Experiment 108689 PARAMETER Experiment Name: Zm_Drought_Roots_P Parameter: Plant Line Value: 35A19
  misc_feature: MA Experiment 108689 PARAMETER Experiment Name: Zm_Drought_Roots_P Parameter: Timepoint (hr) Value: 24
  misc_feature: MA Experiment 108689 PARAMETER Experiment Name: Zm_Drought_Roots_P Parameter: Tissue Value: Roots
  misc_feature: MA Experiment 108689 PARAMETER Experiment Name: Zm_Drought_Roots_P Parameter: Treatment Value: Drought vs. No Drought
cgtcacgggcggctacaacggcaagtgggtgtgggccgagcaggaggtgctgccggccgactggcgccccggccaggtctacgacaccggcgtccgcatcgtcgacgtcgcccgggacgcatcccgcggctgcaccgccgccgccatggacgactggaagtgaagtgaggatatggctgggtagattaaaaatacgtatgaatacatactaacacgtcgccacatcggtgctgcgacactctggtaagaagaggacagcatgcaatggctccaagaacagcatcccccccaagcgcgtccggctgtccagaggagaggaggaagaagattggagtagctagcagctagggtgtaattgtgtatgcaggatcttctatcaaggtcgatccgattagatgcaggcaaaaaaaaaagagctgggatccagtcgacagttctaatgggtcatggcgtcatgccatcctggctgtaccacaaactcgactaaaagc

SEQ ID NO: 14524 - protein, 69 aa, Zea mays subsp. mays
  peptide (1)..(69): Ceres Seq. ID no. 12468405
SRAATTASGCGPSRRCCRPTGAPARSTTPASASSTSPGTHPAAAPPPPWTTGSEVRIWLGRLKIRMNTY

SEQ ID NO: 14525 - protein, 55 aa, Zea mays subsp. mays
  peptide (1)..(55): Ceres Seq. ID no. 12468406
RHGRLQRQVGVGRAGGAAGRLAPRPGLRHRRPHRRRRPGRIPRLHRRRHGRLEVK

SEQ ID NO: 14526 - protein, 53 aa, Zea mays subsp. mays
  peptide (1)..(53): Ceres Seq. ID no. 12468407
  misc_feature (1)..(53): Homolog of NCBI NO: 34901594 NR Description: P0571D04.11 [Oryza sativa (japonica
  misc_feature (1)..(53): Homolog of NCBI NO: 25136297 NR Description: expansin-like protein [Oryza sativa (japonica
  misc_feature (1)..(53): Homolog of NCBI NO: 21654743 NR Description: expansin-like protein 1 [Oryza sativa]
  misc_feature (1)..(53): Homolog of NCBI NO: 20502989 NR Description: Putative pollen allergen [Oryza sativa (japonica
  misc_feature (1)..(53): Homolog of NCBI NO: 37536544 NR Description: putative pollen allergen [Oryza sativa (japonica group)] >gi|10140765|gb|AAG13596.1| putative pollen allergen sativa] >gi|31433332|gb|AAP54861.1| putative pollen allergen
  misc_feature (1)..(53): Homolog of NCBI NO: 33111959 NR Description: expansin-like protein [Quercus robur]
  misc_feature (1)..(44): Homolog of NCBI NO: 30692657 NR Description: expansin protein family (EXPL3) [Arabidopsis >gi|26449323|dbj|BAC41789.1| unknown protein [Arabidopsis
  misc_feature (1)..(46): Homolog of NCBI NO: 15231303 NR Description: putative protein; protein id: At3g45970.1, by cDNA: 27534., supported by cDNA: gi_14190436, supported by
  misc_feature (1)..(46): Homolog of NCBI NO: 21555265 NR Description: Expansin-like 1 precursor (At-EXPL1)
  misc_feature (1)..(44): Homolog of NCBI NO: 20138389 NR Description: Expansin-like 3 precursor (At-EXPL3)
VTGGYNGKWVWAEQEVLPADWRPGQVYDTGVRIVDVARDASRGCTAAAMDDWK

SEQ ID NO: 14527 - DNA, 474 bp, Zea mays subsp. mays
  misc_feature (1)..(474): Ceres Seq. ID no. 15180595
  misc_feature: MA Experiment ID: 108535 Result: Up-regulated in Transcription
  misc_feature: MA Experiment 108535 PARAMETER Experiment Name: Zm_Meristem_P Parameter: Age (day) Value: 8
  misc_feature: MA Experiment 108535 PARAMETER Experiment Name: Zm_Meristem_P Parameter: Organism Value: Zea mays
  misc_feature: MA Experiment 108535 PARAMETER Experiment Name: Zm_Meristem_P Parameter: Plant Line Value: 35A19
  misc_feature: MA Experiment 108535 PARAMETER Experiment Name: Zm_Meristem_P Parameter: Tissue Value: Root Meristem vs. Above Root Meristem
gtgtggtctcgcccctgaggttcctgatcgcaccatctccctccggcgacagtccgccgccccgccccgcgcgctcgacgaggccgctccgggtggtgaagagggtgctgctgcagtgtctcccctctcgctatgagtagtgctgtgaaggaccagctacagcagatgtcgacgacgtgcgattctctcctgttggagctcaacgtgatttgggatgaggtcggtgagcccgacatggcgagggaccggatgctgctggagctcgagcaggagtgcctcgacgtctacaagagaaaggtcgaccaggccaatcgatgcagggcccagttgcggcaggccattgcggaggcagaggccgagctcgctggcatatgctcggccatgggcgagccaccgatacatgttagacagtcaaatcagaagttacaaggtttaagggaagtattgaatgcgattgtcccatacttggaggag

SEQ ID NO: 14528 - protein, 114 aa, Zea mays subsp. mays
  peptide (1)..(114): Ceres Seq. ID no. 15180596
  misc_feature (37)..(113): Pfam Name: Microtubule associated protein (MAP65/ASE1 family) Pfam Description: Microtubule associated protein (MAP65/ASE1
  misc_feature (1)..(113): Homolog of NCBI NO: 34911266 NR Description: cytokinesis regulating protein - like [Oryza
  misc_feature (1)..(113): Homolog of NCBI NO: 15242132 NR Description: microtubule associated protein (MAP65/ASE1) [Arabidopsis thaliana] >gi|9758202|dbj|BAB08676.1|
  misc_feature (14)..(113): Homolog of NCBI NO: 28200790 NR Description: 65kD microtubule associated protein [Daucus
  misc_feature (13)..(113): Homolog of NCBI NO: 15224935 NR Description: microtubule associated protein (MAP65/ASE1) [Arabidopsis thaliana] >gi|25408614|pir||E84808 hypothetical
  misc_feature (14)..(113): Homolog of NCBI NO: 11558252 NR Description: microtubule-associated protein MAP65-1a
  misc_feature (15)..(113): Homolog of NCBI NO: 15240485 NR Description: microtubule associated protein (MAP65/ASE1) [Arabidopsis thaliana] >gi|9758120|dbj|BAB08592.1| similarity to unknown protein [Arabidopsis thaliana]
  misc_feature (13)..(113): Homolog of NCBI NO: 21539547 NR Description: unknown protein [Arabidopsis thaliana]
  misc_feature (13)..(113): Homolog of NCBI NO: 8778239 NR Description: F10B6.9 [Arabidopsis thaliana]
  misc_feature (13)..(113): Homolog of NCBI NO: 25410943 NR Description: hypothetical protein At2g01910 [imported] - thaliana >gi|4522009|gb|AAD21782.1| unknown protein [Arabidopsis
  misc_feature (1)..(113): Homolog of NCBI NO: 18416818 NR Description: microtubule associated protein (MAP65/ASE1) family
MSSAVKDQLQQMSTTCDSLLLELNVIWDEVGEPDMARDRMLLELEQECLDVYKRKVDQANRCRAQLRQAIAEAEAELAGICSAMGEPPIHVRQSNQKLQGLREVLNAIVPYLEE

SEQ ID NO: 14529 - protein, 103 aa, Zea mays subsp. mays
  peptide (1)..(103): Ceres Seq. ID no. 15180597
  misc_feature (26)..(102): Pfam Name: Microtubule associated protein (MAP65/ASE1 family) Pfam Description: Microtubule associated protein (MAP65/ASE1
  misc_feature (1)..(102): Homolog of NCBI NO: 34911266 NR Description: cytokinesis regulating protein - like [Oryza
  misc_feature (1)..(102): Homolog of NCBI NO: 15242132 NR Description: microtubule associated protein (MAP65/ASE1) [Arabidopsis thaliana] >gi|9758202|dbj|BAB08676.1|
  misc_feature (3)..(102): Homolog of NCBI NO: 28200790 NR Description: 65kD microtubule associated protein [Daucus
  misc_feature (2)..(102): Homolog of NCBI NO: 15224935 NR Description: microtubule associated protein (MAP65/ASE1) [Arabidopsis thaliana] >gi|25408614|pir||E84808 hypothetical
  misc_feature (3)..(102): Homolog of NCBI NO: 11558252 NR Description: microtubule-associated protein MAP65-1a
  misc_feature (4)..(102): Homolog of NCBI NO: 15240485 NR Description: microtubule associated protein (MAP65/ASE1) [Arabidopsis thaliana] >gi|9758120|dbj|BAB08592.1| similarity to unknown protein [Arabidopsis thaliana]
  misc_feature (2)..(102): Homolog of NCBI NO: 21539547 NR Description: unknown protein [Arabidopsis thaliana]
  misc_feature (2)..(102): Homolog of NCBI NO: 8778239 NR Description: F10B6.9 [Arabidopsis thaliana]
  misc_feature (2)..(102): Homolog of NCBI NO: 25410943 NR Description: hypothetical protein At2g01910 [imported] - thaliana >gi|4522009|gb|AAD21782.1| unknown protein [Arabidopsis
  misc_feature (1)..(102): Homolog of NCBI NO: 18416818 NR Description: microtubule associated protein (MAP65/ASE1) family
MSTTCDSLLLELNVIWDEVGEPDMARDRMLLELEQECLDVYKRKVDQANRCRAQLRQAIAEAEAELAGICSAMGEPPIHVRQSNQKLQGLREVLNAIVPYLEE

SEQ ID NO: 14530 - protein, 80 aa, Zea mays subsp. mays
  peptide (1)..(80): Ceres Seq. ID no. 15180598
  misc_feature (3)..(79): Pfam Name: Microtubule associated protein (MAP65/ASE1 family) Pfam Description: Microtubule associated protein (MAP65/ASE1
  misc_feature (1)..(79): Homolog of NCBI NO: 34911266 NR Description: cytokinesis regulating protein - like [Oryza
  misc_feature (1)..(79): Homolog of NCBI NO: 15242132 NR Description: microtubule associated protein (MAP65/ASE1) [Arabidopsis thaliana] >gi|9758202|dbj|BAB08676.1|
  misc_feature (1)..(79): Homolog of NCBI NO: 28200790 NR Description: 65kD microtubule associated protein [Daucus
  misc_feature (1)..(79): Homolog of NCBI NO: 15224935 NR Description: microtubule associated protein (MAP65/ASE1) [Arabidopsis thaliana] >gi|25408614|pir||E84808 hypothetical
  misc_feature (1)..(79): Homolog of NCBI NO: 11558252 NR Description: microtubule-associated protein MAP65-1a
  misc_feature (1)..(79): Homolog of NCBI NO: 15240485 NR Description: microtubule associated protein (MAP65/ASE1) [Arabidopsis thaliana] >gi|9758120|dbj|BAB08592.1| similarity to unknown protein [Arabidopsis thaliana]
  misc_feature (1)..(79): Homolog of NCBI NO: 21539547 NR Description: unknown protein [Arabidopsis thaliana]
  misc_feature (1)..(79): Homolog of NCBI NO: 8778239 NR Description: F10B6.9 [Arabidopsis thaliana]
  misc_feature (1)..(79): Homolog of NCBI NO: 25410943 NR Description: hypothetical protein At2g01910 [imported] - thaliana >gi|4522009|gb|AAD21782.1| unknown protein [Arabidopsis
  misc_feature (1)..(79): Homolog of NCBI NO: 18416818 NR Description: microtubule associated protein (MAP65/ASE1) family
MARDRMLLELEQECLDVYKRKVDQANRCRAQLRQAIAEAEAELAGICSAMGEPPIHVRQSNQKLQGLREVLNAIVPYLEE

SEQ ID NO: 14531 - DNA, 362 bp, Zea mays subsp. mays
  misc_feature (1)..(362): Ceres Seq. ID no. 3624729
  misc_feature: MA Experiment ID: 20000492 Result: Down-regulated in Transcription
  misc_feature: MA Experiment 20000492 PARAMETER Experiment Name: Zm_Hybrid_Seed_Dev_P Parameter: DAP Value: 12
  misc_feature: MA Experiment 20000492 PARAMETER Experiment Name: Zm_Hybrid_Seed_Dev_P Parameter: Organism Value: Zea mays
  misc_feature: MA Experiment 20000492 PARAMETER Experiment Name: Zm_Hybrid_Seed_Dev_P Parameter: Plant Line Value: 35A19
  misc_feature: MA Experiment 20000492 PARAMETER Experiment Name: Zm_Hybrid_Seed_Dev_P Parameter: Tissue Value: Fert Kernel vs. Unfert Floret
ttttctcgtgatcgggargacgtctcctgtaacctaccaagtccttggccatctgaaaacatgcttggtcctcacctttggctatgtcctgcttcacgacccgtttagctggagaaacatacttgggatcctaatcgcggtaatcgggatggttctgtactcgtacttctgcactagagagactcagcaaaaaccagcagaagcctccccgcaagccgttcaggcaaaggagggtgaatcgaacccgctgatctcggactccctgagcgctgccgaaaatggaggcagtgccaccgacgatgaacctctgaaggtaccaatgtggagctcgaagtactcgaaggcgtgaagtggctgttctg

SEQ ID NO: 14532 - protein, 115 aa, Zea mays subsp. mays
  peptide (1)..(115): Ceres Seq. ID no. 3624730
  misc_feature (1)..(115): Homolog of NCBI NO: 34896140 NR Description: P0701D05.25 [Oryza sativa (japonica >gi|13486667|dbj|BAB39904.1| contains ESTs
  misc_feature (1)..(115): Homolog of NCBI NO: 13699188 NR Description: putative glucose-6-phosphate/phosphate-tranlocat
  misc_feature (1)..(110): Homolog of NCBI NO: 22329373 NR Description: unknown protein; protein id: At1g06890.1, by cDNA: gi_19423945 [Arabidopsis thaliana] unknown protein [Arabidopsis thaliana]
  misc_feature (1)..(110): Homolog of NCBI NO: 25406945 NR Description: hypothetical protein [imported] - Arabidopsis >gi|7523696|gb|AAF63135.1|AC011001_5 Hypothetical protein
  misc_feature (1)..(110): Homolog of NCBI NO: 15224511 NR Description: putative integral membrane protein; protein id: [Arabidopsis thaliana] >gi|25408076|pir||F84708 probable integral
  misc_feature (1)..(110): Homolog of NCBI NO: 27311731 NR Description: putative integral membrane protein [Arabidopsis
  misc_feature (1)..(84): Homolog of NCBI NO: 30683853 NR Description: transporter-related [Arabidopsis thaliana]
  misc_feature (1)..(97): Homolog of NCBI NO: 13384378 NR Description: putative phosphate translocator [Oryza sativa
  misc_feature (1)..(97): Homolog of NCBI NO: 37535412 NR Description: putative
  misc_feature (1)..(88): Homolog of NCBI NO: 18411172 NR Description: expressed protein; protein id: At1g76670.1, by cDNA: gi_14532697, supported by cDNA: gi_16604379, supported cDNA: gi_18491194 [Arabidopsis thaliana] >gi|25354481|pir||A96795
  misc_feature (6)..(6): Xaa is any aa, unknown or other
FLVIGXTSPVTYQVLGHLKTCLVLTFGYVLLHDPFSWRNILGILIAVIGMVLYSYFCTRETQQKPAEASPQAVQAKEGESNPLISDSLSAAENGGSATDDEPLKVPMWSSKYSKA

SEQ ID NO: 14533 - protein, 66 aa, Zea mays subsp. mays
  peptide (1)..(66): Ceres Seq. ID no. 3624731
  misc_feature (1)..(66): Homolog of NCBI NO: 34896140 NR Description: P0701D05.25 [Oryza sativa (japonica >gi|13486667|dbj|BAB39904.1| contains ESTs
  misc_feature (1)..(66): Homolog of NCBI NO: 13699188 NR Description: putative glucose-6-phosphate/phosphate-tranlocat
  misc_feature (1)..(61): Homolog of NCBI NO: 22329373 NR Description: unknown protein; protein id: At1g06890.1, by cDNA: gi_19423945 [Arabidopsis thaliana] unknown protein [Arabidopsis thaliana]
  misc_feature (1)..(61): Homolog of NCBI NO: 25406945 NR Description: hypothetical protein [imported] - Arabidopsis >gi|7523696|gb|AAF63135.1|AC011001_5 Hypothetical protein
  misc_feature (1)..(61): Homolog of NCBI NO: 15224511 NR Description: putative integral membrane protein; protein id: [Arabidopsis thaliana] >gi|25408076|pir||F84708 probable integral
  misc_feature (1)..(61): Homolog of NCBI NO: 27311731 NR Description: putative integral membrane protein [Arabidopsis
  misc_feature (1)..(35): Homolog of NCBI NO: 30683853 NR Description: transporter-related [Arabidopsis thaliana]
  misc_feature (1)..(48): Homolog of NCBI NO: 13384378 NR Description: putative phosphate translocator [Oryza sativa
  misc_feature (1)..(48): Homolog of NCBI NO: 37535412 NR Description: putative
  misc_feature (1)..(39): Homolog of NCBI NO: 18411172 NR Description: expressed protein; protein id: At1g76670.1, by cDNA: gi_14532697, supported by cDNA: gi_16604379, supported cDNA: gi_18491194 [Arabidopsis thaliana] >gi|25354481|pir||A96795
MVLYSYFCTRETQQKPAEASPQAVQAKEGESNPLISDSLSAAENGGSATDDEPLKVPMWSSKYSKA

SEQ ID NO: 14534 - DNA, 561 bp, Zea mays subsp. mays
  misc_feature (1)..(561): Ceres Seq. ID no. 4576519
  misc_feature: MA Experiment ID: 108559 Result: Up-regulated in Transcription
  misc_feature: MA Experiment 108559 PARAMETER Experiment Name: Zm_5mM_NO_P Parameter: Age (day) Value: 8
  misc_feature: MA Experiment 108559 PARAMETER Experiment Name: Zm_5mM_NO_P Parameter: Organism Value: Zea mays
  misc_feature: MA Experiment 108559 PARAMETER Experiment Name: Zm_5mM_NO_P Parameter: Plant Line Value: 35A19
  misc_feature: MA Experiment 108559 PARAMETER Experiment Name: Zm_5mM_NO_P Parameter: Timepoint (hr) Value: 12
  misc_feature: MA Experiment 108559 PARAMETER Experiment Name: Zm_5mM_NO_P Parameter: Tissue Value: Aerial
  misc_feature: MA Experiment 108559 PARAMETER Experiment Name: Zm_5mM_NO_P Parameter: Treatment Value: 5mM NO vs. No Treatment
ttcaagagcttgtagaggcaattgtactgcccatgacacataaagaccggttccagaagttgggtattcgtcctccaaaaggggttcttttgtacggaccaccaggaactggcaagacactcatggctcgtgcatgtgctgcacagacgaatgcaacgtttcttaaattagctggtccacaacttgtgcagatgtttattggtgatggagcaaagcttgtccgggatgcattccagcttgccaaagagaaagctccttgtattatatttattgatgagatagatgccattggcaccaaacgttttgatagtgaagttagcggtgatagagaagttcagcggacaatgttggaattattgaatcaactggatggattcagcagcgatgagagaataaaggtcatagctgcaactaaccgtgctgacatccttgaccctgctctgatgcgatctggacggttggaccgaaagattgagttccctcacccatccgaagaagcaagagctagaatcttgcaaatccattcaaggaaaatgaatgtaaatcctgatgtcaactttg

SEQ ID NO: 14535 - protein, 186 aa, Zea mays subsp. mays
  peptide (1)..(186): Ceres Seq. ID no. 4576520
  misc_feature (27)..(185): Pfam Name: ATPase family associated with various cellular Pfam Description: ATPase family associated with various cellular
  misc_feature (1)..(185): Homolog of NCBI NO: 1174613 NR Description: 26S PROTEASE REGULATORY SUBUNIT 6A HOMOLOG
  misc_feature (1)..(185): Homolog of NCBI NO: 17297989 NR Description: 26S proteasome regulatory particle triple-A
  misc_feature (1)..(185): Homolog of NCBI NO: 3024434 NR Description: 26S PROTEASE REGULATORY SUBUNIT 6A HOMOLOG
  misc_feature (1)..(185): Homolog of NCBI NO: 15230005 NR Description: 26S proteasome AAA-ATPase subunit RPT5a; protein At3g05530.1, supported by cDNA: gi_17065257, supported by cDNA:
  misc_feature (1)..(185): Homolog of NCBI NO: 12697589 NR Description: Tat binding protein like protein [Brassica rapa]
  misc_feature (1)..(185): Homolog of NCBI NO: 1729860 NR Description: 26S PROTEASE REGULATORY SUBUNIT 6A HOMOLOG
  misc_feature (1)..(185): Homolog of NCBI NO: 5669047 NR Description: 19S proteasome regulatory complex subunit S6A
  misc_feature (1)..(185): Homolog of NCBI NO: 23197864 NR Description: 26S proteasome AAA-ATPase subunit RPT5a
  misc_feature (3)..(185): Homolog of NCBI NO: 32400784 NR Description: tat binding protein [Triticum aestivum]
  misc_feature (1)..(185): Homolog of NCBI NO: 3024431 NR Description: 26S protease regulatory subunit 6A homolog
QELVEAIVLPMTHKDRFQKLGIRPPKGVLLYGPPGTGKTLMARACAAQTNATFLKLAGPQLVQMFIGDGAKLVRDAFQLAKEKAPCIIFIDEIDAIGTKRFDSEVSGDREVQRTMLELLNQLDGFSSDERIKVIAATNRADILDPALMRSGRLDRKIEFPHPSEEARARILQIHSRKMNVNPDVNF

SEQ ID NO: 14536 - protein, 176 aa, Zea mays subsp. mays
  peptide (1)..(176): Ceres Seq. ID no. 4576521
  misc_feature (17)..(175): Pfam Name: ATPase family associated with various cellular Pfam Description: ATPase family associated with various cellular
  misc_feature (1)..(175): Homolog of NCBI NO: 1174613 NR Description: 26S PROTEASE REGULATORY SUBUNIT 6A HOMOLOG
  misc_feature (1)..(175): Homolog of NCBI NO: 17297989 NR Description: 26S proteasome regulatory particle triple-A
  misc_feature (1)..(175): Homolog of NCBI NO: 3024434 NR Description: 26S PROTEASE REGULATORY SUBUNIT 6A HOMOLOG
  misc_feature (1)..(175): Homolog of NCBI NO: 15230005 NR Description: 26S proteasome AAA-ATPase subunit RPT5a; protein At3g05530.1, supported by cDNA: gi_17065257, supported by cDNA:
  misc_feature (1)..(175): Homolog of NCBI NO: 12697589 NR Description: Tat binding protein like protein [Brassica rapa]
  misc_feature (1)..(175): Homolog of NCBI NO: 1729860 NR Description: 26S PROTEASE REGULATORY SUBUNIT 6A HOMOLOG
  misc_feature (1)..(175): Homolog of NCBI NO: 5669047 NR Description: 19S proteasome regulatory complex subunit S6A
  misc_feature (1)..(175): Homolog of NCBI NO: 23197864 NR Description: 26S proteasome AAA-ATPase subunit RPT5a
  misc_feature (1)..(175): Homolog of NCBI NO: 32400784 NR Description: tat binding protein [Triticum aestivum]
  misc_feature (1)..(175): Homolog of NCBI NO: 3024431 NR Description: 26S protease regulatory subunit 6A homolog
MTHKDRFQKLGIRPPKGVLLYGPPGTGKTLMARACAAQTNATFLKLAGPQLVQMFIGDGAKLVRDAFQLAKEKAPCIIFIDEIDAIGTKRFDSEVSGDREVQRTMLELLNQLDGFSSDERIKVIAATNRADILDPALMRSGRLDRKIEFPHPSEEARARILQIHSRKMNVNPDVNF

SEQ ID NO: 14537 - protein, 146 aa, Zea mays subsp. mays
  peptide (1)..(146): Ceres Seq. ID no. 4576522
  misc_feature (1)..(145): Pfam Name: ATPase family associated with various cellular Pfam Description: ATPase family associated with various cellular
  misc_feature (1)..(145): Homolog of NCBI NO: 1174613 NR Description: 26S PROTEASE REGULATORY SUBUNIT 6A HOMOLOG
  misc_feature (1)..(145): Homolog of NCBI NO: 17297989 NR Description: 26S proteasome regulatory particle triple-A
  misc_feature (1)..(145): Homolog of NCBI NO: 3024434 NR Description: 26S PROTEASE REGULATORY SUBUNIT 6A HOMOLOG
  misc_feature (1)..(145): Homolog of NCBI NO: 15230005 NR Description: 26S proteasome AAA-ATPase subunit RPT5a; protein At3g05530.1, supported by cDNA: gi_17065257, supported by cDNA:
  misc_feature (1)..(145): Homolog of NCBI NO: 12697589 NR Description: Tat binding protein like protein [Brassica rapa]
  misc_feature (1)..(145): Homolog of NCBI NO: 1729860 NR Description: 26S PROTEASE REGULATORY SUBUNIT 6A HOMOLOG
  misc_feature (1)..(145): Homolog of NCBI NO: 5669047 NR Description: 19S proteasome regulatory complex subunit S6A
  misc_feature (1)..(145): Homolog of NCBI NO: 23197864 NR Description: 26S proteasome AAA-ATPase subunit RPT5a
  misc_feature (1)..(145): Homolog of NCBI NO: 32400784 NR Description: tat binding protein [Triticum aestivum]
  misc_feature (1)..(145): Homolog of NCBI NO: 3024431 NR Description: 26S protease regulatory subunit 6A homolog
MARACAAQTNATFLKLAGPQLVQMFIGDGAKLVRDAFQLAKEKAPCIIFIDEIDAIGTKRFDSEVSGDREVQRTMLELLNQLDGFSSDERIKVIAATNRADILDPALMRSGRLDRKIEFPHPSEEARARILQIHSRKMNVNPDVNF

SEQ ID NO: 14538 - DNA, 885 bp, Zea mays subsp. mays
  misc_feature (1)..(885): Ceres Seq. ID no. 12468373
  misc_feature: MA Experiment ID: 108523 Result: Up-regulated in Transcription
  misc_feature: MA Experiment 108523 PARAMETER Experiment Name: Zm_42deg_Heat_P Parameter: Age (day) Value: 8
  misc_feature: MA Experiment 108523 PARAMETER Experiment Name: Zm_42deg_Heat_P Parameter: Organism Value: Zea mays
  misc_feature: MA Experiment 108523 PARAMETER Experiment Name: Zm_42deg_Heat_P Parameter: Plant Line Value: 35A19
  misc_feature: MA Experiment 108523 PARAMETER Experiment Name: Zm_42deg_Heat_P Parameter: Temperature (deg C) Value: 42 vs. 22
  misc_feature: MA Experiment 108523 PARAMETER Experiment Name: Zm_42deg_Heat_P Parameter: Timepoint (hr) Value: 6
  misc_feature: MA Experiment 108523 PARAMETER Experiment Name: Zm_42deg_Heat_P Parameter: Tissue Value: Aerial
  misc_feature: MA Experiment ID: 108535 Result: Down-regulated in Transcription
  misc_feature: MA Experiment 108535 PARAMETER Experiment Name: Zm_Meristem_P Parameter: Age (day) Value: 8
  misc_feature: MA Experiment 108535 PARAMETER Experiment Name: Zm_Meristem_P Parameter: Organism Value: Zea mays
  misc_feature: MA Experiment 108535 PARAMETER Experiment Name: Zm_Meristem_P Parameter: Plant Line Value: 35A19
  misc_feature: MA Experiment 108535 PARAMETER Experiment Name: Zm_Meristem_P Parameter: Tissue Value: Root Meristem vs. Above Root Meristem
  misc_feature: MA Experiment ID: 108687 Result: Down-regulated in Transcription
  misc_feature: MA Experiment 108687 PARAMETER Experiment Name: Zm_Embryos-Flowers__P Parameter: Tissue Value: Embryo vs. Aerial+
  misc_feature: MA Experiment ID: 20000492 Result: Down-regulated in Transcription
  misc_feature: MA Experiment 20000492 PARAMETER Experiment Name: Zm_Hybrid_Seed_Dev_P Parameter: DAP Value: 12
  misc_feature: MA Experiment 20000492 PARAMETER Experiment Name: Zm_Hybrid_Seed_Dev_P Parameter: Organism Value: Zea mays
  misc_feature: MA Experiment 20000492 PARAMETER Experiment Name: Zm_Hybrid_Seed_Dev_P Parameter: Plant Line Value: 35A19
  misc_feature: MA Experiment 20000492 PARAMETER Experiment Name: Zm_Hybrid_Seed_Dev_P Parameter: Tissue Value: Fert Kernel vs. Unfert Floret
  misc_feature: MA Experiment ID: 20000534 Result: Down-regulated in Transcription
  misc_feature: MA Experiment 20000534 PARAMETER Experiment Name: Zm_Hybrid_Pollen_P Parameter: Age (day) Value: 8
  misc_feature: MA Experiment 20000534 PARAMETER Experiment Name: Zm_Hybrid_Pollen_P Parameter: Organism Value: Zea mays
  misc_feature: MA Experiment 20000534 PARAMETER Experiment Name: Zm_Hybrid_Pollen_P Parameter: Plant Line Value: 35A19
  misc_feature: MA Experiment 20000534 PARAMETER Experiment Name: Zm_Hybrid_Pollen_P Parameter: Tissue Value: Pollen vs. Aerial
gaatatattgaagatcctgatcaagttaagccagagggatatgattcaattcctaaagagatacctgatcccaaggacaaaaagcctgagtcatgggatgacgatgacgatggtacatggaagcctagaatgatacctaatccagaatacaagggaccatggaagcggaagaaaattaagaatcctaactacaaaggaaaatggaagaccccatggattgtcaatccagagtttgaggatgacccagacctatatgttctgaaacctttgcagtatgtggggattgaagtatggcaggtcaaagctggttcagtttttgacaacattttgatttgcgatgacccagactatgcaagacatgttgtagatgaaacttttgctgcaaataaggaggctgaaaaggaggcctttgaaggagctgaaagaaagaggaaggctagagaagaagaggaagcacggagggcacgggaggaaggggagagacgaaggcgggagagggatagggaccgcggcagggaccgatacaaggatagatataagcgtcataggcactacgactaccatgacgagctatagatcctgtattcttttgaaatctgcncgatattggatgtctgtctacggagagcgcacgtgcaaaacttgtatgttgtactcacggatgaagctgaacctgtgattttggcgatgggtanagattggccatcgcgtctgtaactaaatttccacgttgcgatgcaatatgagctgtagtactgtcctcgcactactatttaccgtttgtgctgcatatgtgatataaaccttcaagaaacacacacacgaagggtntgaatgagcacggcctttgttgtttgcttnttataaaaaagaactgttttatcg

SEQ ID NO: 14539 - protein, 191 aa, Zea mays subsp. mays
  peptide (1)..(191): Ceres Seq. ID no. 12468374
  misc_feature (1)..(111): Pfam Name: Calreticulin family Pfam Description: Calreticulin family
  misc_feature (1)..(191): Homolog of NCBI NO: 34907604 NR Description: putative calreticulin [Oryza sativa (japonica group)] >gi|21952848|dbj|BAC06263.1| putative calreticulin [Oryza
  misc_feature (1)..(191): Homolog of NCBI NO: 18390896 NR Description: calreticulin, putative; protein id: At1g08450.1, by cDNA: gi_15810562, supported by cDNA: gi_2052382 [Arabidopsis >gi|15810563|gb|AAL07169.1| putative calreticulin protein
  misc_feature (1)..(191): Homolog of NCBI NO: 12643531 NR Description: Calreticulin 3 precursor
  misc_feature (1)..(191): Homolog of NCBI NO: 27311777 NR Description: calreticulin, putative [Arabidopsis thaliana]
  misc_feature (1)..(150): Homolog of NCBI NO: 33517365 NR Description: calreticulin 3 [Brassica rapa subsp. pekinensis]
  misc_feature (1)..(191): Homolog of NCBI NO: 11131949 NR Description: Calreticulin precursor >gi|4335864|gb|AAD17490.1|
  misc_feature (1)..(191): Homolog of NCBI NO: 11131769 NR Description: Calreticulin precursor >gi|7441495|pir||T16968
  misc_feature (1)..(191): Homolog of NCBI NO: 7441497 NR Description: calreticulin - common tobacco (fragment)
  misc_feature (1)..(191): Homolog of NCBI NO: 11131745 NR Description: Calreticulin precursor >gi|7441496|pir||T10172
  misc_feature (1)..(180): Homolog of NCBI NO: 9858814 NR Description: calreticulin [Pinus taeda]
EYIEDPDQVKPEGYDSIPKEIPDPKDKKPESWDDDDDGTWKPRMIPNPEYKGPWKRKKIKNPNYKGKWKTPWIVNPEFEDDPDLYVLKPLQYVGIEVWQVKAGSVFDNILICDDPDYARHVVDETFAANKEAEKEAFEGAERKRKAREEEEARRAREEGERRRRERDRDRGRDRYKDRYKRHRHYDYHDEL

SEQ ID NO: 14540 - protein, 148 aa, Zea mays subsp. mays
  peptide (1)..(148): Ceres Seq. ID no. 12468375
  misc_feature (1)..(68): Pfam Name: Calreticulin family Pfam Description: Calreticulin family
  misc_feature (1)..(148): Homolog of NCBI NO: 34907604 NR Description: putative calreticulin [Oryza sativa (japonica group)] >gi|21952848|dbj|BAC06263.1| putative calreticulin [Oryza
  misc_feature (1)..(148): Homolog of NCBI NO: 18390896 NR Description: calreticulin, putative; protein id: At1g08450.1, by cDNA: gi_15810562, supported by cDNA: gi_2052382 [Arabidopsis >gi|15810563|gb|AAL07169.1| putative calreticulin protein
  misc_feature (1)..(148): Homolog of NCBI NO: 12643531 NR Description: Calreticulin 3 precursor
  misc_feature (1)..(148): Homolog of NCBI NO: 27311777 NR Description: calreticulin, putative [Arabidopsis thaliana]
  misc_feature (1)..(107): Homolog of NCBI NO: 33517365 NR Description: calreticulin 3 [Brassica rapa subsp. pekinensis]
  misc_feature (1)..(148): Homolog of NCBI NO: 11131949 NR Description: Calreticulin precursor >gi|4335864|gb|AAD17490.1|
  misc_feature (1)..(148): Homolog of NCBI NO: 11131769 NR Description: Calreticulin precursor >gi|7441495|pir||T16968
  misc_feature (1)..(148): Homolog of NCBI NO: 7441497 NR Description: calreticulin - common tobacco (fragment)
  misc_feature (1)..(148): Homolog of NCBI NO: 11131745 NR Description: Calreticulin precursor >gi|7441496|pir||T10172
  misc_feature (1)..(137): Homolog of NCBI NO: 9858814 NR Description: calreticulin [Pinus taeda]
MIPNPEYKGPWKRKKIKNPNYKGKWKTPWIVNPEFEDDPDLYVLKPLQYVGIEVWQVKAGSVFDNILICDDPDYARHVVDETFAANKEAEKEAFEGAERKRKAREEEEARRAREEGERRRRERDRDRGRDRYKDRYKRHRHYDYHDEL

SEQ ID NO: 14541 - protein, 103 aa, Zea mays subsp. mays
  peptide (1)..(103): Ceres Seq. ID no. 12468376
  misc_feature (78)..(78): Xaa is any aa, unknown or other
MKLLLQIRRLKRRPLKELKERGRLEKKRKHGGHGRKGRDEGGRGIGTAAGTDTRIDISVIGTTTTMTSYRSCILLKSXRYWMSVYGERTCKTCMLYSRMKLNL

SEQ ID NO: 14542 - DNA, 814 bp, Zea mays subsp. mays
  misc_feature (1)..(814): Ceres Seq. ID no. 12544477
  misc_feature: MA Experiment ID: 108535 Result: Up-regulated in Transcription
  misc_feature: MA Experiment 108535 PARAMETER Experiment Name: Zm_Meristem_P Parameter: Age (day) Value: 8
  misc_feature: MA Experiment 108535 PARAMETER Experiment Name: Zm_Meristem_P Parameter: Organism Value: Zea mays
  misc_feature: MA Experiment 108535 PARAMETER Experiment Name: Zm_Meristem_P Parameter: Plant Line Value: 35A19
  misc_feature: MA Experiment 108535 PARAMETER Experiment Name: Zm_Meristem_P Parameter: Tissue Value: Root Meristem vs. Above Root Meristem
  misc_feature: MA Experiment ID: 108556 Result: Down-regulated in Transcription
  misc_feature: MA Experiment 108556 PARAMETER Experiment Name: Zm_Drought_P Parameter: Age (day) Value: 9
  misc_feature: MA Experiment 108556 PARAMETER Experiment Name: Zm_Drought_P Parameter: Organism Value: Zea mays
  misc_feature: MA Experiment 108556 PARAMETER Experiment Name: Zm_Drought_P Parameter: Plant Line Value: 35A19
  misc_feature: MA Experiment 108556 PARAMETER Experiment Name: Zm_Drought_P Parameter: Timepoint (hr) Value: 24
  misc_feature: MA Experiment 108556 PARAMETER Experiment Name: Zm_Drought_P Parameter: Tissue Value: Aerial
  misc_feature: MA Experiment 108556 PARAMETER Experiment Name: Zm_Drought_P Parameter: Treatment Value: Drought vs. No Drought
  misc_feature: MA Experiment ID: 20000487 Result: Up-regulated in Transcription
  misc_feature: MA Experiment 20000487 PARAMETER Experiment Name: Zm_50mM_NH4NO3_L_to_H_P Parameter: Organism Value: Zea mays
  misc_feature: MA Experiment 20000487 PARAMETER Experiment Name: Zm_50mM_NH4NO3_L_to_H_P Parameter: Timepoint (hr) Value: 4
  misc_feature: MA Experiment 20000487 PARAMETER Experiment Name: Zm_50mM_NH4NO3_L_to_H_P Parameter: Tissue Value: Leaves
  misc_feature: MA Experiment 20000487 PARAMETER Experiment Name: Zm_50mM_NH4NO3_L_to_H_P Parameter: Treatment Value: 50mM NH4NO3 vs. 100mM Mannitol
  misc_feature: MA Experiment ID: 20000488 Result: Up-regulated in Transcription
  misc_feature: MA Experiment 20000488 PARAMETER Experiment Name: Zm_50mM_NH4NO3_L_to_H_P Parameter: Organism Value: Zea mays
  misc_feature: MA Experiment 20000488 PARAMETER Experiment Name: Zm_50mM_NH4NO3_L_to_H_P Parameter: Timepoint (hr) Value: 8
  misc_feature: MA Experiment 20000488 PARAMETER Experiment Name: Zm_50mM_NH4NO3_L_to_H_P Parameter: Tissue Value: Leaves
  misc_feature: MA Experiment 20000488 PARAMETER Experiment Name: Zm_50mM_NH4NO3_L_to_H_P Parameter: Treatment Value: 50mM NH4NO3 vs. 100mM Mannitol
  misc_feature: MA Experiment ID: 20001612 Result: Up-regulated in Transcription
  misc_feature: MA Experiment 20001612 PARAMETER Experiment Name: Zm_50ppm_KNO3_L-to-H_P Parameter: Age (day) Value: 19
  misc_feature: MA Experiment 20001612 PARAMETER Experiment Name: Zm_50ppm_KNO3_L-to-H_P Parameter: Organism Value: Zea mays
  misc_feature: MA Experiment 20001612 PARAMETER Experiment Name: Zm_50ppm_KNO3_L-to-H_P Parameter: Plant Line Value: 35A19
  misc_feature: MA Experiment 20001612 PARAMETER Experiment Name: Zm_50ppm_KNO3_L-to-H_P Parameter: Timepoint (hr) Value: 8
  misc_feature: MA Experiment 20001612 PARAMETER Experiment Name: Zm_50ppm_KNO3_L-to-H_P Parameter: Tissue Value: Roots
  misc_feature: MA Experiment 20001612 PARAMETER Experiment Name: Zm_50ppm_KNO3_L-to-H_P Parameter: Treatment Value: 50ppm KNO3 vs. 50ppm KCl
atagataagggcgactccaggcccttgcgaaccctagcgccgcaccctcccgcccaccgccgtcgccgcccaaccgcagtaaggaggaaggagcaggaagatgccggcggggcacgggctgcggtcgcggacccgcgacctgttcgcgcggcccttccgcaagaaggggtacatcccactcaccacgtacctgcgcacctacaagatcggcgactacgtcgacgtcaaggttaacggcgccgtgcacaagggcatgccgcacaagttctaccacggccgcaccgggagcgtctggaacgtcaccaagcgcgccatcggcgtcgagatcaacaagcaggttaatggccgcatcatcaggaagcggatccatgtccgcgtggagcatgtgcagccctcccgttgcacggaggagttccgcctgaggaaggcgaagaatgaccagctgaaggcggatgccaaaaagcgcggcgaggttatcagcaccaagaggcagccattgggtcccaagcccggcttcatggtcgagggcaccaccattgagaccgtaactcccatcccatatgatgtggtcaatgatctcaagggtggatactaggttgtttggtccatctacctgcagtacccagttctacatctgtgttactctagtgcgtgcaactttgctcactctgagcagtagtatgaacctgttgtctgttcctgttgaaagatttcccattttaggtgcaaacctgagtttctccgaacgcgttataccctgaccttgcttctgagaacgaagatgtgctatttttgcattttgttgtttcgaccg

SEQ ID NO: 14543 - protein, 164 aa, Zea mays subsp. mays
  peptide (1)..(164): Ceres Seq. ID no. 12544478
  misc_feature (2)..(100): Pfam Name: Ribosomal protein L21e Pfam Description: Ribosomal protein L21e
  misc_feature (1)..(164): Homolog of NCBI NO: 37535194 NR Description: 60S ribosomal protein L21 [Oryza sativa (japonica group)] >gi|13489167|gb|AAK27801.1| 60S ribosomal protein L21
  misc_feature (1)..(164): Homolog of NCBI NO: 11276828 NR Description: ribosomal protein L21 [imported] - rice
  misc_feature (1)..(164): Homolog of NCBI NO: 18406015 NR Description: 60S ribosomal protein L21, putative; protein id: supported by cDNA: 28545., supported by cDNA: gi_15292812, by cDNA: gi_20258868 [Arabidopsis thaliana]
  misc_feature (1)..(164): Homolog of NCBI NO: 18391042 NR Description: putative 60S ribosomal protein L21; protein id: supported by cDNA: gi_13877928, supported by cDNA: gi_16323461 thaliana] >gi|18391054|ref|NP_563849.1| putative 60S come from
  misc_feature (1)..(157): Homolog of NCBI NO: 15213768 NR Description: ribosomal protein L21 [Spodoptera frugiperda]
  misc_feature (1)..(155): Homolog of NCBI NO: 6094029 NR Description: 60S RIBOSOMAL PROTEIN L21
  misc_feature (1)..(155): Homolog of NCBI NO: 40741182 NR Description: hypothetical protein AN4802.2 [Aspergillus
  misc_feature (1)..(157): Homolog of NCBI NO: 38048363 NR Description: similar to Drosophila melanogaster CG12775
  misc_feature (1)..(157): Homolog of NCBI NO: 20129705 NR Description: CG12775-PA [Drosophila melanogaster]
  misc_feature (1)..(155): Homolog of NCBI NO: 6319668 NR Description: Homology to rat L21; Rpl21ap [Saccharomyces
MPAGHGLRSRTRDLFARPFRKKGYIPLTTYLRTYKIGDYVDVKVNGAVHKGMPHKFYHGRTGSVWNVTKRAIGVEINKQVNGRIIRKRIHVRVEHVQPSRCTEEFRLRKAKNDQLKADAKKRGEVISTKRQPLGPKPGFMVEGTTIETVTPIPYDVVNDLKGGY

SEQ ID NO: 14544 - protein, 113 aa, Zea mays subsp. mays
  peptide (1)..(113): Ceres Seq. ID no. 12544479
  misc_feature (1)..(106): Homolog of NCBI NO: 15213768 NR Description: ribosomal protein L21 [Spodoptera frugiperda]
  misc_feature (1)..(104): Homolog of NCBI NO: 6094029 NR Description: 60S RIBOSOMAL PROTEIN L21
  misc_feature (1)..(104): Homolog of NCBI NO: 40741182 NR Description: hypothetical protein AN4802.2 [Aspergillus
  misc_feature (1)..(106): Homolog of NCBI NO: 38048363 NR Description: similar to Drosophila melanogaster CG12775
  misc_feature (1)..(106): Homolog of NCBI NO: 20129705 NR Description: CG12775-PA [Drosophila melanogaster]
  misc_feature (1)..(104): Homolog of NCBI NO: 6319668 NR Description: Homology to rat L21; Rpl21ap [Saccharomyces
  misc_feature (1)..(113): Homolog of NCBI NO: 37535194 NR Description: 60S ribosomal protein L21 [Oryza sativa (japonica group)] >gi|13489167|gb|AAK27801.1| 60S ribosomal protein L21
  misc_feature (1)..(113): Homolog of NCBI NO: 11276828 NR Description: ribosomal protein L21 [imported] - rice
  misc_feature (1)..(113): Homolog of NCBI NO: 18406015 NR Description: 60S ribosomal protein L21, putative; protein id: supported by cDNA: 28545., supported by cDNA: gi_15292812, by cDNA: gi_20258868 [Arabidopsis thaliana]
  misc_feature (1)..(113): Homolog of NCBI NO: 18391042 NR Description: putative 60S ribosomal protein L21; protein id: supported by cDNA: gi_13877928, supported by cDNA: gi_16323461 thaliana] >gi|18391054|ref|NP_563849.1| putative 60S come from
MPHKFYHGRTGSVWNVTKRAIGVEINKQVNGRIIRKRIHVRVEHVQPSRCTEEFRLRKAKNDQLKADAKKRGEVISTKRQPLGPKPGFMVEGTTIETVTPIPYDVVNDLKGGY

SEQ ID NO: 14545 - DNA, 2064 bp, Zea mays subsp. mays; identical to SEQ ID NO: 9505
  misc_feature (1)..(2064): Ceres Seq. ID no. 13622175
  misc_feature: MA Experiment ID: 108527 Result: Down-regulated in Transcription
  misc_feature: MA Experiment 108527 PARAMETER Experiment Name: Zm_5mM_NO_P Parameter: Age (day) Value: 8
  misc_feature: MA Experiment 108527 PARAMETER Experiment Name: Zm_5mM_NO_P Parameter: Organism Value: Zea mays
  misc_feature: MA Experiment 108527 PARAMETER Experiment Name: Zm_5mM_NO_P Parameter: Plant Line Value: 35A19
  misc_feature: MA Experiment 108527 PARAMETER Experiment Name: Zm_5mM_NO_P Parameter: Timepoint (hr) Value: 6
  misc_feature: MA Experiment 108527 PARAMETER Experiment Name: Zm_5mM_NO_P Parameter: Tissue Value: Aerial
  misc_feature: MA Experiment 108527 PARAMETER Experiment Name: Zm_5mM_NO_P Parameter: Treatment Value: 5mM NO vs. No Treatment
  misc_feature: MA Experiment ID: 108528 Result: Up-regulated in Transcription
  misc_feature: MA Experiment 108528 PARAMETER Experiment Name: Zm_Imbibed_Seeds_P Parameter: Age (day) Value: 5 vs. 2
  misc_feature: MA Experiment 108528 PARAMETER Experiment Name: Zm_Imbibed_Seeds_P Parameter: Organism Value: Zea mays
  misc_feature: MA Experiment 108528 PARAMETER Experiment Name: Zm_Imbibed_Seeds_P Parameter: Plant Line Value: 35A19
  misc_feature: MA Experiment 108528 PARAMETER Experiment Name: Zm_Imbibed_Seeds_P Parameter: Tissue Value: Aerial vs. Embryo
  misc_feature: MA Experiment ID: 108530 Result: Up-regulated in Transcription
  misc_feature: MA Experiment 108530 PARAMETER Experiment Name: Zm_Imbibed_Seeds_P Parameter: Age (day) Value: 6 vs. 2
  misc_feature: MA Experiment 108530 PARAMETER Experiment Name: Zm_Imbibed_Seeds_P Parameter: Organism Value: Zea mays
  misc_feature: MA Experiment 108530 PARAMETER Experiment Name: Zm_Imbibed_Seeds_P Parameter: Plant Line Value: 35A19
  misc_feature: MA Experiment 108530 PARAMETER Experiment Name: Zm_Imbibed_Seeds_P Parameter: Tissue Value: Aerial vs. Embryo
  misc_feature: MA Experiment ID: 108547 Result: Up-regulated in Transcription
  misc_feature: MA Experiment 108547 PARAMETER Experiment Name: Zm_Imbibed_Seeds_P Parameter: Age (day) Value: 4 vs. 2
  misc_feature: MA Experiment 108547 PARAMETER Experiment Name: Zm_Imbibed_Seeds_P Parameter: Organism Value: Zea mays
  misc_feature: MA Experiment 108547 PARAMETER Experiment Name: Zm_Imbibed_Seeds_P Parameter: Plant Line Value: 35A19
  misc_feature: MA Experiment 108547 PARAMETER Experiment Name: Zm_Imbibed_Seeds_P Parameter: Tissue Value: Aerial vs. Embryo
  misc_feature: MA Experiment ID: 20000487 Result: Up-regulated in Transcription
  misc_feature: MA Experiment 20000487 PARAMETER Experiment Name: Zm_50mM_NH4NO3_L_to_H_P Parameter: Organism Value: Zea mays
  misc_feature: MA Experiment 20000487 PARAMETER Experiment Name: Zm_50mM_NH4NO3_L_to_H_P Parameter: Timepoint (hr) Value: 4
  misc_feature: MA Experiment 20000487 PARAMETER Experiment Name: Zm_50mM_NH4NO3_L_to_H_P Parameter: Tissue Value: Leaves
  misc_feature: MA Experiment 20000487 PARAMETER Experiment Name: Zm_50mM_NH4NO3_L_to_H_P Parameter: Treatment Value: 50mM NH4NO3 vs. 100mM Mannitol
  misc_feature: MA Experiment ID: 20000535 Result: Up-regulated in Transcription
  misc_feature: MA Experiment 20000535 PARAMETER Experiment Name: Zm_Hybrid_Seed_Dev_P Parameter: DAP Value: 30 vs. 12
  misc_feature: MA Experiment 20000535 PARAMETER Experiment Name: Zm_Hybrid_Seed_Dev_P Parameter: Organism Value: Zea mays
  misc_feature: MA Experiment 20000535 PARAMETER Experiment Name: Zm_Hybrid_Seed_Dev_P Parameter: Plant Line Value: 35A19
  misc_feature: MA Experiment 20000535 PARAMETER Experiment Name: Zm_Hybrid_Seed_Dev_P Parameter: Tissue Value: Embryo vs. Unfert Floret

SEQ ID NO: 14546 - protein, 562 aa, Zea mays subsp. mays; identical to SEQ ID NO: 9506
  peptide (1)..(562): Ceres Seq. ID no. 13622176
  misc_feature (133)..(408): Pfam Name: Nucleotidyl transferase Pfam Description: Nucleotidyl transferase
  misc_feature (133)..(408): Pfam Name: Nucleotidyl transferase Pfam Description: Nucleotidyl transferase
  misc_feature (133)..(408): Pfam Name: Nucleotidyl transferase Pfam Description: Nucleotidyl transferase
  misc_feature (53)..(562): Homolog of NCBI NO: 13892040 NR Description: ADP-glucose pyrophosphorylase small subunit [Zea
  misc_feature (56)..(562): Homolog of NCBI NO: 13508485 NR Description: ADP-glucose pyrophosphorylase small subunit
  misc_feature (53)..(562): Homolog of NCBI NO: 27464770 NR Description: ADP-glucose pyrophosphorylase small subunit
  misc_feature (56)..(562): Homolog of NCBI NO: 14582768 NR Description: ADP-glucose pyrophosphorylase small subunit [Zea
  misc_feature (53)..(562): Homolog of NCBI NO: 38423972 NR Description: putative glucose-1-phosphate adenylyltransferase
  misc_feature (56)..(562): Homolog of NCBI NO: 13508485 NR Description: ADP-glucose pyrophosphorylase small subunit
  misc_feature (56)..(562): Homolog of NCBI NO: 14582768 NR Description: ADP-glucose pyrophosphorylase small subunit [Zea
  misc_feature (53)..(562): Homolog of NCBI NO: 27464770 NR Description: ADP-glucose pyrophosphorylase small subunit
  misc_feature (56)..(562): Homolog of NCBI NO: 13508485 NR Description: ADP-glucose pyrophosphorylase small subunit
  misc_feature (53)..(562): Homolog of NCBI NO: 13892040 NR Description: ADP-glucose pyrophosphorylase small subunit [Zea
  misc_feature (104)..(562): Homolog of NCBI NO: 17865468 NR Description: Glucose-1-phosphate adenylyltransferase small
  misc_feature (51)..(562): Homolog of NCBI NO: 1237080 NR Description: ADP-glucose pyrophosphorylase [Pisum sativum]
  misc_feature (96)..(562): Homolog of NCBI NO: 15238933 NR Description: glucose-1-phosphate adenylyltransferase, small
  misc_feature (104)..(562): Homolog of NCBI NO: 21666502 NR Description: ADP-glucose pyrophosphorylase small subunit
  misc_feature (56)..(562): Homolog of NCBI NO: 1707940 NR Description: Glucose-1-phosphate adenylyltransferase small
  misc_feature (53)..(562): Homolog of NCBI NO: 38423972 NR Description: putative glucose-1-phosphate adenylyltransferase
  misc_feature (104)..(562): Homolog of NCBI NO: 17865468 NR Description: Glucose-1-phosphate adenylyltransferase small
  misc_feature (51)..(562): Homolog of NCBI NO: 1237080 NR Description: ADP-glucose pyrophosphorylase [Pisum sativum]
  misc_feature (96)..(562): Homolog of NCBI NO: 15238933 NR Description: glucose-1-phosphate adenylyltransferase, small
  misc_feature (104)..(562): Homolog of NCBI NO: 21666502 NR Description: ADP-glucose pyrophosphorylase small subunit
  misc_feature (56)..(562): Homolog of NCBI NO: 1707940 NR Description: Glucose-1-phosphate adenylyltransferase small
  misc_feature (53)..(562): Homolog of NCBI NO: 38423972 NR Description: putative glucose-1-phosphate adenylyltransferase
  misc_feature (56)..(562): Homolog of NCBI NO: 14582768 NR Description: ADP-glucose pyrophosphorylase small subunit [Zea
  misc_feature (53)..(562): Homolog of NCBI NO: 27464770 NR Description: ADP-glucose pyrophosphorylase small subunit
  misc_feature (53)..(562): Homolog of NCBI NO: 13892040 NR Description: ADP-glucose pyrophosphorylase small subunit [Zea
  misc_feature (56)..(562): Homolog of NCBI NO: 1707940 NR Description: Glucose-1-phosphate adenylyltransferase small
  misc_feature (104)..(562): Homolog of NCBI NO: 21666502 NR Description: ADP-glucose pyrophosphorylase small subunit
  misc_feature (96)..(562): Homolog of NCBI NO: 15238933 NR Description: glucose-1-phosphate adenylyltransferase, small
  misc_feature (51)..(562): Homolog of NCBI NO: 1237080 NR Description: ADP-glucose pyrophosphorylase [Pisum sativum]
  misc_feature (104)..(562): Homolog of NCBI NO: 17865468 NR Description: Glucose-1-phosphate adenylyltransferase small

SEQ ID NO: 14547 - protein, 510 aa, Zea mays subsp. mays; identical to SEQ ID NO: 9507
  peptide (1)..(510): Ceres Seq. ID no. 13622177
  misc_feature (81)..(356): Pfam Name: Nucleotidyl transferase Pfam Description: Nucleotidyl transferase
  misc_feature (81)..(356): Pfam Name: Nucleotidyl transferase Pfam Description: Nucleotidyl transferase
  misc_feature (81)..(356): Pfam Name: Nucleotidyl transferase Pfam Description: Nucleotidyl transferase
  misc_feature (1)..(510): Homolog of NCBI NO: 13892040 NR Description: ADP-glucose pyrophosphorylase small subunit [Zea
  misc_feature (4)..(510): Homolog of NCBI NO: 13508485 NR Description: ADP-glucose pyrophosphorylase small subunit
  misc_feature (1)..(510): Homolog of NCBI NO: 27464770 NR Description: ADP-glucose pyrophosphorylase small subunit
  misc_feature (4)..(510): Homolog of NCBI NO: 14582768 NR Description: ADP-glucose pyrophosphorylase small subunit [Zea
  misc_feature (1)..(510): Homolog of NCBI NO: 38423972 NR Description: putative glucose-1-phosphate adenylyltransferase
  misc_feature (4)..(510): Homolog of NCBI NO: 13508485 NR Description: ADP-glucose pyrophosphorylase small subunit
  misc_feature (4)..(510): Homolog of NCBI NO: 14582768 NR Description: ADP-glucose pyrophosphorylase small subunit [Zea
  misc_feature (1)..(510): Homolog of NCBI NO: 27464770 NR Description: ADP-glucose pyrophosphorylase small subunit
  misc_feature (4)..(510): Homolog of NCBI NO: 13508485 NR Description: ADP-glucose pyrophosphorylase small subunit
  misc_feature (1)..(510): Homolog of NCBI NO: 13892040 NR Description: ADP-glucose pyrophosphorylase small subunit [Zea
  misc_feature (52)..(510): Homolog of NCBI NO: 17865468 NR Description: Glucose-1-phosphate adenylyltransferase small
  misc_feature (1)..(510): Homolog of NCBI NO: 1237080 NR Description: ADP-glucose pyrophosphorylase [Pisum sativum]
  misc_feature (44)..(510): Homolog of NCBI NO: 15238933 NR Description: glucose-1-phosphate adenylyltransferase, small
  misc_feature (52)..(510): Homolog of NCBI NO: 21666502 NR Description: ADP-glucose pyrophosphorylase small subunit
  misc_feature (4)..(510): Homolog of NCBI NO: 1707940 NR Description: Glucose-1-phosphate adenylyltransferase small
  misc_feature (1)..(510): Homolog of NCBI NO: 38423972 NR Description: putative glucose-1-phosphate adenylyltransferase
  misc_feature (52)..(510): Homolog of NCBI NO: 17865468 NR Description: Glucose-1-phosphate adenylyltransferase small
  misc_feature (1)..(510): Homolog of NCBI NO: 1237080 NR Description: ADP-glucose pyrophosphorylase [Pisum sativum]
  misc_feature (44)..(510): Homolog of NCBI NO: 15238933 NR Description: glucose-1-phosphate adenylyltransferase, small
  misc_feature (52)..(510): Homolog of NCBI NO: 21666502 NR Description: ADP-glucose pyrophosphorylase small subunit
  misc_feature (4)..(510): Homolog of NCBI NO: 1707940 NR Description: Glucose-1-phosphate adenylyltransferase small
  misc_feature (1)..(510): Homolog of NCBI NO: 38423972 NR Description: putative glucose-1-phosphate adenylyltransferase
  misc_feature (4)..(510): Homolog of NCBI NO: 14582768 NR Description: ADP-glucose pyrophosphorylase small subunit [Zea
  misc_feature (1)..(510): Homolog of NCBI NO: 27464770 NR Description: ADP-glucose pyrophosphorylase small subunit
  misc_feature (1)..(510): Homolog of NCBI NO: 13892040 NR Description: ADP-glucose pyrophosphorylase small subunit [Zea
  misc_feature (4)..(510): Homolog of NCBI NO: 1707940 NR Description: Glucose-1-phosphate adenylyltransferase small
  misc_feature (52)..(510): Homolog of NCBI NO: 21666502 NR Description: ADP-glucose pyrophosphorylase small subunit
  misc_feature (44)..(510): Homolog of NCBI NO: 15238933 NR Description: glucose-1-phosphate adenylyltransferase, small
  misc_feature (1)..(510): Homolog of NCBI NO: 1237080 NR Description: ADP-glucose pyrophosphorylase [Pisum sativum]
  misc_feature (52)..(510): Homolog of NCBI NO: 17865468 NR Description: Glucose-1-phosphate adenylyltransferase small

SEQ ID NO: 14548 - protein, 506 aa, Zea mays subsp. mays; identical to SEQ ID NO: 9508
  peptide (1)..(506): Ceres Seq. ID no. 13622178
  misc_feature (77)..(352): Pfam Name: Nucleotidyl transferase Pfam Description: Nucleotidyl transferase
  misc_feature (77)..(352): Pfam Name: Nucleotidyl transferase Pfam Description: Nucleotidyl transferase
  misc_feature (77)..(352): Pfam Name: Nucleotidyl transferase Pfam Description: Nucleotidyl transferase
  misc_feature (1)..(506): Homolog of NCBI NO: 13892040 NR Description: ADP-glucose pyrophosphorylase small subunit [Zea
  misc_feature (1)..(506): Homolog of NCBI NO: 13508485 NR Description: ADP-glucose pyrophosphorylase small subunit
  misc_feature (1)..(506): Homolog of NCBI NO: 27464770 NR Description: ADP-glucose pyrophosphorylase small subunit
  misc_feature (1)..(506): Homolog of NCBI NO: 14582768 NR Description: ADP-glucose pyrophosphorylase small subunit [Zea
  misc_feature (1)..(506): Homolog of NCBI NO: 38423972 NR Description: putative glucose-1-phosphate adenylyltransferase
  misc_feature (1)..(506): Homolog of NCBI NO: 13508485 NR Description: ADP-glucose pyrophosphorylase small subunit
  misc_feature (1)..(506): Homolog of NCBI NO: 14582768 NR Description: ADP-glucose pyrophosphorylase small subunit [Zea
  misc_feature (1)..(506): Homolog of NCBI NO: 27464770 NR Description: ADP-glucose pyrophosphorylase small subunit
  misc_feature (1)..(506): Homolog of NCBI NO: 13508485 NR Description: ADP-glucose pyrophosphorylase small subunit
  misc_feature (1)..(506): Homolog of NCBI NO: 13892040 NR Description: ADP-glucose pyrophosphorylase small subunit [Zea
  misc_feature (48)..(506): Homolog of NCBI NO: 17865468 NR Description: Glucose-1-phosphate adenylyltransferase small
  misc_feature (1)..(506): Homolog of NCBI NO: 1237080 NR Description: ADP-glucose pyrophosphorylase [Pisum sativum]
  misc_feature (40)..(506): Homolog of NCBI NO: 15238933 NR Description: glucose-1-phosphate adenylyltransferase, small
  misc_feature (48)..(506): Homolog of NCBI NO: 21666502 NR Description: ADP-glucose pyrophosphorylase small subunit
  misc_feature (1)..(506): Homolog of NCBI NO: 1707940 NR Description: Glucose-1-phosphate adenylyltransferase small
  misc_feature (1)..(506): Homolog of NCBI NO: 38423972 NR Description: putative glucose-1-phosphate adenylyltransferase
  misc_feature (48)..(506): Homolog of NCBI NO: 17865468 NR Description: Glucose-1-phosphate adenylyltransferase small
  misc_feature (1)..(506): Homolog of NCBI NO: 1237080 NR Description: ADP-glucose pyrophosphorylase [Pisum sativum]
  misc_feature (40)..(506): Homolog of NCBI NO: 15238933 NR Description: glucose-1-phosphate adenylyltransferase, small
  misc_feature (48)..(506): Homolog of NCBI NO: 21666502 NR Description: ADP-glucose pyrophosphorylase small subunit
  misc_feature (1)..(506): Homolog of NCBI NO: 1707940 NR Description: Glucose-1-phosphate adenylyltransferase small
  misc_feature (1)..(506): Homolog of NCBI NO: 38423972 NR Description: putative glucose-1-phosphate adenylyltransferase
  misc_feature (1)..(506): Homolog of NCBI NO: 14582768 NR Description: ADP-glucose pyrophosphorylase small subunit [Zea
  misc_feature (1)..(506): Homolog of NCBI NO: 27464770 NR Description: ADP-glucose pyrophosphorylase small subunit
  misc_feature (1)..(506): Homolog of NCBI NO: 13892040 NR Description: ADP-glucose pyrophosphorylase small subunit [Zea
  misc_feature (1)..(506): Homolog of NCBI NO: 1707940 NR Description: Glucose-1-phosphate adenylyltransferase small
  misc_feature (48)..(506): Homolog of NCBI NO: 21666502 NR Description: ADP-glucose pyrophosphorylase small subunit
  misc_feature (40)..(506): Homolog of NCBI NO: 15238933 NR Description: glucose-1-phosphate adenylyltransferase, small
  misc_feature (1)..(506): Homolog of NCBI NO: 1237080 NR Description: ADP-glucose pyrophosphorylase [Pisum sativum]
  misc_feature (48)..(506): Homolog of NCBI NO: 17865468 NR Description: Glucose-1-phosphate adenylyltransferase small

SEQ ID NO: 14549 - DNA, 889 bp, Zea mays subsp. mays
  misc_feature (1)..(889): Ceres Seq. ID no. 12468317
  misc_feature: MA Experiment ID: 108528 Result: Down-regulated in Transcription
  misc_feature: MA Experiment 108528 PARAMETER Experiment Name: Zm_Imbibed_Seeds_P Parameter: Age (day) Value: 5 vs. 2
  misc_feature: MA Experiment 108528 PARAMETER Experiment Name: Zm_Imbibed_Seeds_P Parameter: Organism Value: Zea mays
  misc_feature: MA Experiment 108528 PARAMETER Experiment Name: Zm_Imbibed_Seeds_P Parameter: Plant Line Value: 35A19
  misc_feature: MA Experiment 108528 PARAMETER Experiment Name: Zm_Imbibed_Seeds_P Parameter: Tissue Value: Aerial vs. Embryo
  misc_feature: MA Experiment ID: 108529 Result: Up-regulated in Transcription
  misc_feature: MA Experiment 108529 PARAMETER Experiment Name: Zm_Imbibed_Seeds_P Parameter: Age (day) Value: 5 vs. 2
  misc_feature: MA Experiment 108529 PARAMETER Experiment Name: Zm_Imbibed_Seeds_P Parameter: Organism Value: Zea mays
  misc_feature: MA Experiment 108529 PARAMETER Experiment Name: Zm_Imbibed_Seeds_P Parameter: Plant Line Value: 35A19
  misc_feature: MA Experiment 108529 PARAMETER Experiment Name: Zm_Imbibed_Seeds_P Parameter: Tissue Value: Roots vs. Embryo
  misc_feature: MA Experiment ID: 108535 Result: Down-regulated in Transcription
  misc_feature: MA Experiment 108535 PARAMETER Experiment Name: Zm_Meristem_P Parameter: Age (day) Value: 8
  misc_feature: MA Experiment 108535 PARAMETER Experiment Name: Zm_Meristem_P Parameter: Organism Value: Zea mays
  misc_feature: MA Experiment 108535 PARAMETER Experiment Name: Zm_Meristem_P Parameter: Plant Line Value: 35A19
  misc_feature: MA Experiment 108535 PARAMETER Experiment Name: Zm_Meristem_P Parameter: Tissue Value: Root Meristem vs. Above Root Meristem
  misc_feature: MA Experiment ID: 108545 Result: Down-regulated in Transcription
  misc_feature: MA Experiment 108545 PARAMETER Experiment Name: Zm_Imbibed_Seeds_P Parameter: Age (day) Value: 3 vs. 2
  misc_feature: MA Experiment 108545 PARAMETER Experiment Name: Zm_Imbibed_Seeds_P Parameter: Organism Value: Zea mays
  misc_feature: MA Experiment 108545 PARAMETER Experiment Name: Zm_Imbibed_Seeds_P Parameter: Plant Line Value: 35A19
  misc_feature: MA Experiment 108545 PARAMETER Experiment Name: Zm_Imbibed_Seeds_P Parameter: Tissue Value: Aerial vs. Embryo
  misc_feature: MA Experiment ID: 108546 Result: Up-regulated in Transcription
  misc_feature: MA Experiment 108546 PARAMETER Experiment Name: Zm_Imbibed_Seeds_P Parameter: Age (day) Value: 3 vs. 2
  misc_feature: MA Experiment 108546 PARAMETER Experiment Name: Zm_Imbibed_Seeds_P Parameter: Organism Value: Zea mays
  misc_feature: MA Experiment 108546 PARAMETER Experiment Name: Zm_Imbibed_Seeds_P Parameter: Plant Line Value: 35A19
  misc_feature: MA Experiment 108546 PARAMETER Experiment Name: Zm_Imbibed_Seeds_P Parameter: Tissue Value: Roots vs. Embryo
  misc_feature: MA Experiment ID: 108547 Result: Down-regulated in Transcription
  misc_feature: MA Experiment 108547 PARAMETER Experiment Name: Zm_Imbibed_Seeds_P Parameter: Age (day) Value: 4 vs. 2
  misc_feature: MA Experiment 108547 PARAMETER Experiment Name: Zm_Imbibed_Seeds_P Parameter: Organism Value: Zea mays
  misc_feature: MA Experiment 108547 PARAMETER Experiment Name: Zm_Imbibed_Seeds_P Parameter: Plant Line Value: 35A19
  misc_feature: MA Experiment 108547 PARAMETER Experiment Name: Zm_Imbibed_Seeds_P Parameter: Tissue Value: Aerial vs. Embryo
  misc_feature: MA Experiment ID: 20000487 Result: Down-regulated in Transcription
  misc_feature: MA Experiment 20000487 PARAMETER Experiment Name: Zm_50mM_NH4NO3_L_to_H_P Parameter: Organism Value: Zea mays
  misc_feature: MA Experiment 20000487 PARAMETER Experiment Name: Zm_50mM_NH4NO3_L_to_H_P Parameter: Timepoint (hr) Value: 4
  misc_feature: MA Experiment 20000487 PARAMETER Experiment Name: Zm_50mM_NH4NO3_L_to_H_P Parameter: Tissue Value: Leaves
  misc_feature: MA Experiment 20000487 PARAMETER Experiment Name: Zm_50mM_NH4NO3_L_to_H_P Parameter: Treatment Value: 50mM NH4NO3 vs. 100mM Mannitol
  misc_feature: MA Experiment ID: 20000488 Result: Down-regulated in Transcription
  misc_feature: MA Experiment 20000488 PARAMETER Experiment Name: Zm_50mM_NH4NO3_L_to_H_P Parameter: Organism Value: Zea mays
  misc_feature: MA Experiment 20000488 PARAMETER Experiment Name: Zm_50mM_NH4NO3_L_to_H_P Parameter: Timepoint (hr) Value: 8
  misc_feature: MA Experiment 20000488 PARAMETER Experiment Name: Zm_50mM_NH4NO3_L_to_H_P Parameter: Tissue Value: Leaves
  misc_feature: MA Experiment 20000488 PARAMETER Experiment Name: Zm_50mM_NH4NO3_L_to_H_P Parameter: Treatment Value: 50mM NH4NO3 vs. 100mM Mannitol
acgacagcgccggcggccagggagccaacagtgccgccggtggcggcggcttcctcacgggaatcatcaccatcgtaatcgcctgcgtctgctggtccgccttcttcgtgctccaggccaacacgctcaagagctaccccgcggagctgtcgctgacggcgctcatctgcctcatggggtcgctcatgagcggctccgtcgcgctcgtcgccgagcgccgcaacacccaggcctgggtcatcggcttcgacacgcgcctcttcaccgccgtctacgccggcatagtgtgctccggcgtggcatactacgtgcaaggcatcgtgtccaggcaacgaggcccggtgttcgtcacggccttcaaccctctctgcatgatcatcaccgccgtcatgggctccatcatactcaaagaagagatcactctcggaagcgtgattggcgctgcgatcatcgtgttaggcctgtacgcgctcatctggggcaagagcaaggacagcgtggccgacgtctcagcatcaggcggctccaagggcgcatcagcggctgccgccgtcgagctgcccatcaccttggcgcagcccaacggcaacggcaactgcaagcacgaggtcggcagcggccgcggcgtcgtcttcgacgtcgagacgccggcggccaacaacggccattactagtagctacagctagtatatctatctatctactactcctaaacctaaatcaacctgcccggccgtcagttgtagctatagacactgacacacgcagatagaagcgtcctgccgcaggttatatatggctgatcgagtggacgttgacgcactgcacatacatatgccgtgcgattttttgtttgttttccgtttttgttaattattaatttcgcctt

SEQ ID NO: 14550 - protein, 256 aa, Zea mays subsp. mays
  peptide (1)..(256): Ceres Seq. ID no. 12468318
RQRRRPGSQQCRRWRRLPHGNHHHRNRLRLLVRLLRAPGQHAQELPRGAVADGAHLPHGVAHERLRRARRRAPQHPGLGHRLRHAPLHRRLRRHSVLRRGILRARHRVQATRPGVRHGLQPSLHDHHRRHGLHHTQRRDHSRKRDWRCDHRVRPVRAHLGQEQGQRGRRLSIRRLQGRISGCRRRAAHHLGAAQRQRQLQARGRQRPRRRLRRRDAGGQQRPLLVATASISIYLLLLNLNQPARPSVVAIDTDTRR

SEQ ID NO: 14551 - protein, 223 aa, Zea mays subsp. mays
  peptide (1)..(223): Ceres Seq. ID no. 12468319
  misc_feature (30)..(159): Pfam Name: Integral membrane protein DUF6 Pfam Description: Integral membrane protein DUF6
  misc_feature (9)..(164): Homolog of NCBI NO: 37532392 NR Description: putative nodulin-like protein [Oryza sativa
  misc_feature (1)..(164): Homolog of NCBI NO: 6552743 NR Description: T26F17.11 [Arabidopsis thaliana]
  misc_feature (1)..(164): Homolog of NCBI NO: 15219123 NR Description: nodulin-like protein; protein id: At1g21890.1,
  misc_feature (1)..(164): Homolog of NCBI NO: 17529004 NR Description: putative nodulin protein [Arabidopsis thaliana]
  misc_feature (20)..(164): Homolog of NCBI NO: 15225480 NR Description: nodulin-like protein; protein id: At2g39510.1
  misc_feature (5)..(203): Homolog of NCBI NO: 21553757 NR Description: nodulin-like protein [Arabidopsis thaliana]
  misc_feature (1)..(196): Homolog of NCBI NO: 21593603 NR Description: nodulin-like protein [Arabidopsis thaliana]
  misc_feature (5)..(203): Homolog of NCBI NO: 15224291 NR Description: nodulin-like protein; protein id: At2g37460.1, by cDNA: 16393., supported by cDNA: gi_14334857, supported by
  misc_feature (1)..(196): Homolog of NCBI NO: 15236455 NR Description: nodulin-like protein; protein id: At4g08290.1, by cDNA: 40485. [Arabidopsis thaliana] >gi|7486869|pir||T10556
  misc_feature (1)..(196): Homolog of NCBI NO: 26452235 NR Description: putative nodulin [Arabidopsis thaliana]
DSAGGQGANSAAGGGGFLTGIITIVIACVCWSAFFVLQANTLKSYPAELSLTALICLMGSLMSGSVALVAERRNTQAWVIGFDTRLFTAVYAGIVCSGVAYYVQGIVSRQRGPVFVTAFNPLCMIITAVMGSIILKEEITLGSVIGAAIIVLGLYALIWGKSKDSVADVSASGGSKGASAAAAVELPITLAQPNGNGNCKHEVGSGRGVVFDVETPAANNGHY

SEQ ID NO: 14552 - protein, 166 aa, Zea mays subsp. mays
  peptide (1)..(166): Ceres Seq. ID no. 12468320
  misc_feature (1)..(102): Pfam Name: Integral membrane protein DUF6 Pfam Description: Integral membrane protein DUF6
  misc_feature (1)..(107): Homolog of NCBI NO: 37532392 NR Description: putative nodulin-like protein [Oryza sativa
  misc_feature (1)..(107): Homolog of NCBI NO: 6552743 NR Description: T26F17.11 [Arabidopsis thaliana]
  misc_feature (1)..(107): Homolog of NCBI NO: 17529004 NR Description: putative nodulin protein [Arabidopsis thaliana]
  misc_feature (1)..(107): Homolog of NCBI NO: 15219123 NR Description: nodulin-like protein; protein id: At1g21890.1,
  misc_feature (1)..(107): Homolog of NCBI NO: 15225480 NR Description: nodulin-like protein; protein id: At2g39510.1
  misc_feature (1)..(146): Homolog of NCBI NO: 21553757 NR Description: nodulin-like protein [Arabidopsis thaliana]
  misc_feature (1)..(139): Homolog of NCBI NO: 21593603 NR Description: nodulin-like protein [Arabidopsis thaliana]
  misc_feature (1)..(146): Homolog of NCBI NO: 15224291 NR Description: nodulin-like protein; protein id: At2g37460.1, by cDNA: 16393., supported by cDNA: gi_14334857, supported by
  misc_feature (1)..(139): Homolog of NCBI NO: 15236455 NR Description: nodulin-like protein; protein id: At4g08290.1, by cDNA: 40485. [Arabidopsis thaliana] >gi|7486869|pir||T10556
  misc_feature (1)..(139): Homolog of NCBI NO: 26452235 NR Description: putative nodulin [Arabidopsis thaliana]
MGSLMSGSVALVAERRNTQAWVIGFDTRLFTAVYAGIVCSGVAYYVQGIVSRQRGPVFVTAFNPLCMIITAVMGSIILKEEITLGSVIGAAIIVLGLYALIWGKSKDSVADVSASGGSKGASAAAAVELPITLAQPNGNGNCKHEVGSGRGVVFDVETPAANNGHY

SEQ ID NO: 14553 - DNA, 513 bp, Zea mays subsp. mays
  misc_feature (1)..(513): Ceres Seq. ID no. 12468302
  misc_feature: MA Experiment ID: 108535 Result: Up-regulated in Transcription
  misc_feature: MA Experiment 108535 PARAMETER Experiment Name: Zm_Meristem_P Parameter: Age (day) Value: 8
  misc_feature: MA Experiment 108535 PARAMETER Experiment Name: Zm_Meristem_P Parameter: Organism Value: Zea mays
  misc_feature: MA Experiment 108535 PARAMETER Experiment Name: Zm_Meristem_P Parameter: Plant Line Value: 35A19
  misc_feature: MA Experiment 108535 PARAMETER Experiment Name: Zm_Meristem_P Parameter: Tissue Value: Root Meristem vs. Above Root Meristem
  misc_feature: MA Experiment ID: 108544 Result: Down-regulated in Transcription
  misc_feature: MA Experiment ID: 20000487 Result: Up-regulated in Transcription
  misc_feature: MA Experiment 20000487 PARAMETER Experiment Name: Zm_50mM_NH4NO3_L_to_H_P Parameter: Organism Value: Zea mays
  misc_feature: MA Experiment 20000487 PARAMETER Experiment Name: Zm_50mM_NH4NO3_L_to_H_P Parameter: Timepoint (hr) Value: 4
  misc_feature: MA Experiment 20000487 PARAMETER Experiment Name: Zm_50mM_NH4NO3_L_to_H_P Parameter: Tissue Value: Leaves
  misc_feature: MA Experiment 20000487 PARAMETER Experiment Name: Zm_50mM_NH4NO3_L_to_H_P Parameter: Treatment Value: 50mM NH4NO3 vs. 100mM Mannitol
  misc_feature: MA Experiment ID: 20000488 Result: Up-regulated in Transcription
  misc_feature: MA Experiment 20000488 PARAMETER Experiment Name: Zm_50mM_NH4NO3_L_to_H_P Parameter: Organism Value: Zea mays
  misc_feature: MA Experiment 20000488 PARAMETER Experiment Name: Zm_50mM_NH4NO3_L_to_H_P Parameter: Timepoint (hr) Value: 8
  misc_feature: MA Experiment 20000488 PARAMETER Experiment Name: Zm_50mM_NH4NO3_L_to_H_P Parameter: Tissue Value: Leaves
  misc_feature: MA Experiment 20000488 PARAMETER Experiment Name: Zm_50mM_NH4NO3_L_to_H_P Parameter: Treatment Value: 50mM NH4NO3 vs. 100mM Mannitol
  misc_feature: MA Experiment ID: 20000535 Result: Up-regulated in Transcription
  misc_feature: MA Experiment 20000535 PARAMETER Experiment Name: Zm_Hybrid_Seed_Dev_P Parameter: DAP Value: 30 vs. 12
  misc_feature: MA Experiment 20000535 PARAMETER Experiment Name: Zm_Hybrid_Seed_Dev_P Parameter: Organism Value: Zea mays
  misc_feature: MA Experiment 20000535 PARAMETER Experiment Name: Zm_Hybrid_Seed_Dev_P Parameter: Plant Line Value: 35A19
  misc_feature: MA Experiment 20000535 PARAMETER Experiment Name: Zm_Hybrid_Seed_Dev_P Parameter: Tissue Value: Embryo vs. Unfert Floret
  misc_feature: MA Experiment ID: 20001606 Result: Up-regulated in Transcription
  misc_feature: MA Experiment 20001606 PARAMETER Experiment Name: Zm_50ppm_KNO3_L-to-H_P Parameter: Age (day) Value: 19
  misc_feature: MA Experiment 20001606 PARAMETER Experiment Name: Zm_50ppm_KNO3_L-to-H_P Parameter: Organism Value: Zea mays
  misc_feature: MA Experiment 20001606 PARAMETER Experiment Name: Zm_50ppm_KNO3_L-to-H_P Parameter: Plant Line Value: 35A19
  misc_feature: MA Experiment 20001606 PARAMETER Experiment Name: Zm_50ppm_KNO3_L-to-H_P Parameter: Timepoint (hr) Value: 8
  misc_feature: MA Experiment 20001606 PARAMETER Experiment Name: Zm_50ppm_KNO3_L-to-H_P Parameter: Tissue Value: Shoots
  misc_feature: MA Experiment 20001606 PARAMETER Experiment Name: Zm_50ppm_KNO3_L-to-H_P Parameter: Treatment Value: 50ppm KNO3 vs. 50ppm KCl
aaagacaacgttctggatggcctcaccgataggatccacatgttgcacgatgcaatagcgtctgatgcggcccaaccgaagactgaagatacggaacatgcatttgaaaacttcttttccagccgtgtaatcagaagaatggtaatcgactgcccagcttttgcagtcactctctggagaaaggctcttcagggcaagtgcaagatatgggctgaaggacacagttcgaaggtagttgcgggtttcctggagtcgccaagtacggaggtcaaggatcttgcaaaacctgagttgcagccgctggttgatgctggcatccttaaagtgccagaccctaaggttgttcaaaaatgactggaggaccatcccttgttaaaaattgttaagtcacggataggtttttttgaagctcgttctgccgataaaaattgttaagtcactcgttcgtgtgtacgccagtccgttgtacacttaccctggatatatggtgaatcggatacgttattttgtttt

SEQ ID NO: 14554 - protein, 117 aa, Zea mays subsp. mays
  peptide (1)..(117): Ceres Seq. ID no. 12468303
  misc_feature (1)..(117): Homolog of NCBI NO: 34897258 NR Description: unknown protein [Oryza sativa (japonica
  misc_feature (2)..(113): Homolog of NCBI NO: 18401257 NR Description: expressed protein; protein id: At3g16810.1, by cDNA: gi_15010673 [Arabidopsis thaliana] gene_id:K20I9.3~similar to unknown protein~sp|Q15397 [Arabidopsis
KDNVLDGLTDRIHMLHDAIASDAAQPKTEDTEHAFENFFSSRVIRRMVIDCPAFAVTLWRKALQGKCKIWAEGHSSKVVAGFLESPSTEVKDLAKPELQPLVDAGILKVPDPKVVQK

SEQ ID NO: 14555 - protein, 104 aa, Zea mays subsp. mays
  peptide (1)..(104): Ceres Seq. ID no. 12468304
  misc_feature (1)..(104): Homolog of NCBI NO: 34897258 NR Description: unknown protein [Oryza sativa (japonica
  misc_feature (1)..(100): Homolog of NCBI NO: 18401257 NR Description: expressed protein; protein id: At3g16810.1, by cDNA: gi_15010673 [Arabidopsis thaliana] gene_id:K20I9.3~similar to unknown protein~sp|Q15397 [Arabidopsis
MLHDAIASDAAQPKTEDTEHAFENFFSSRVIRRMVIDCPAFAVTLWRKALQGKCKIWAEGHSSKVVAGFLESPSTEVKDLAKPELQPLVDAGILKVPDPKVVQK

SEQ ID NO: 14556 - protein, 71 aa, Zea mays subsp. mays
  peptide (1)..(71): Ceres Seq. ID no. 12468305
  misc_feature (1)..(71): Homolog of NCBI NO: 34897258 NR Description: unknown protein [Oryza sativa (japonica
  misc_feature (1)..(67): Homolog of NCBI NO: 18401257 NR Description: expressed protein; protein id: At3g16810.1, by cDNA: gi_15010673 [Arabidopsis thaliana] gene_id:K20I9.3~similar to unknown protein~sp|Q15397 [Arabidopsis
MVIDCPAFAVTLWRKALQGKCKIWAEGHSSKVVAGFLESPSTEVKDLAKPELQPLVDAGILKVPDPKVVQK

SEQ ID NO: 14557 - DNA, 913 bp, Zea mays subsp. mays
  misc_feature (1)..(913): Ceres Seq. ID no. 12468286
  misc_feature: MA Experiment ID: 108522 Result: Down-regulated in Transcription
  misc_feature: MA Experiment 108522 PARAMETER Experiment Name: Zm_42deg_Heat_P Parameter: Age (day) Value: 8
  misc_feature: MA Experiment 108522 PARAMETER Experiment Name: Zm_42deg_Heat_P Parameter: Organism Value: Zea mays
  misc_feature: MA Experiment 108522 PARAMETER Experiment Name: Zm_42deg_Heat_P Parameter: Plant Line Value: 35A19
  misc_feature: MA Experiment 108522 PARAMETER Experiment Name: Zm_42deg_Heat_P Parameter: Temperature (deg C) Value: 42 vs. 22
  misc_feature: MA Experiment 108522 PARAMETER Experiment Name: Zm_42deg_Heat_P Parameter: Timepoint (hr) Value: 1
  misc_feature: MA Experiment 108522 PARAMETER Experiment Name: Zm_42deg_Heat_P Parameter: Tissue Value: Aerial
  misc_feature: MA Experiment ID: 108544 Result: Up-regulated in Transcription
  misc_feature: MA Experiment ID: 20000492 Result: Down-regulated in Transcription
  misc_feature: MA Experiment 20000492 PARAMETER Experiment Name: Zm_Hybrid_Seed_Dev_P Parameter: DAP Value: 12
  misc_feature: MA Experiment 20000492 PARAMETER Experiment Name: Zm_Hybrid_Seed_Dev_P Parameter: Organism Value: Zea mays
  misc_feature: MA Experiment 20000492 PARAMETER Experiment Name: Zm_Hybrid_Seed_Dev_P Parameter: Plant Line Value: 35A19
  misc_feature: MA Experiment 20000492 PARAMETER Experiment Name: Zm_Hybrid_Seed_Dev_P Parameter: Tissue Value: Fert Kernel vs. Unfert Floret
  misc_feature: MA Experiment ID: 20000535 Result: Down-regulated in Transcription
  misc_feature: MA Experiment 20000535 PARAMETER Experiment Name: Zm_Hybrid_Seed_Dev_P Parameter: DAP Value: 30 vs. 12
  misc_feature: MA Experiment 20000535 PARAMETER Experiment Name: Zm_Hybrid_Seed_Dev_P Parameter: Organism Value: Zea mays
  misc_feature: MA Experiment 20000535 PARAMETER Experiment Name: Zm_Hybrid_Seed_Dev_P Parameter: Plant Line Value: 35A19
  misc_feature: MA Experiment 20000535 PARAMETER Experiment Name: Zm_Hybrid_Seed_Dev_P Parameter: Tissue Value: Embryo vs. Unfert Floret
attgatggtgatcgttagtgagctactaccagggatgtcactgaaaagttacctgcatagcatacggcctagccaattagatacacacactgcaataagctatgcactggacatagctcatgcaatggactgtttacatgccaatggcataatacatagagacctgaaacctgataatttattgcttacagcaaatcgcaagaagctaaaacttactgattttggacttgcacgtgaagaaactgtgactgaaatgatgactgctgaaactgggacttaccgatggatggccccagagctatacagcacagtcacacttcgacgtggtgagaaaaagcattacacaaataaagtggatgtgtacagctttggcattgttttgtgggaattattgaccaatagaatgccatttgaaggcatgtcgaatctacaagctgcatatgctgctgcttttcagcaaaagcgcccagctctccctgaggagaccccccaggagcttgtgttcatagtacaatcatgctgggttgaggatcctgccatgcgacccagtttcagccagatcatccgaatgcttgaaactttcattatgacaatacatccacctccgctttcagagccaaacgaaggcgaggaatcggaagaaacgaggtcgtcactgagcagtaggagctcctctggctcctcgctcgtttctcgcgcgacaagcaagctctcggtcgtccgccacctcttcgtctcaaagaagacaggcaatgggaaggcgtgatgcgccatgccctgagacgcttttcttcggtgctgtaaagatgctagcctaggtgatgcgcaatacaagagggaacttgttcagtgtagagtagctgttgtattgatgttacaaaaggggaaagttgaagtgcagcttttgcaagcc

SEQ ID NO: 14558 - protein, 254 aa, Zea mays subsp. mays
  peptide (1)..(254): Ceres Seq. ID no. 12468287
  misc_feature (1)..(253): Homolog of NCBI NO: 28876011 NR Description: putative protein kinase [Oryza sativa (japonica
  misc_feature (1)..(251): Homolog of NCBI NO: 30679428 NR Description: protein kinase, putative [Arabidopsis thaliana]
  misc_feature (1)..(251): Homolog of NCBI NO: 11259780 NR Description: protein kinase ATN1-like protein - Arabidopsis
  misc_feature (1)..(231): Homolog of NCBI NO: 15232197 NR Description: putative protein kinase, ATN1; protein id: supported by cDNA: gi_16604327, supported by cDNA: gi_19699189 thaliana] >gi|11994183|dbj|BAB01286.1| nearly identical to
  misc_feature (1)..(231): Homolog of NCBI NO: 2129698 NR Description: protein kinase ATN1 (EC 2.7.1.-) - Arabidopsis
  misc_feature (1)..(228): Homolog of NCBI NO: 32815816 NR Description: protein kinase [Cucumis sativus]
  misc_feature (1)..(232): Homolog of NCBI NO: 15240630 NR Description: protein kinase ATN1-like protein; protein id:
  misc_feature (1)..(206): Homolog of NCBI NO: 15237443 NR Description: protein kinase - like protein; protein id: [Arabidopsis thaliana] >gi|9758080|dbj|BAB08524.1| protein kinase
  misc_feature (2)..(221): Homolog of NCBI NO: 15240070 NR Description: protein kinase ATN1-like protein; protein id:
  misc_feature (2)..(219): Homolog of NCBI NO: 15230296 NR Description: protein kinase ATN1 - like protein; protein id:
LMVIVSELLPGMSLKSYLHSIRPSQLDTHTAISYALDIAHAMDCLHANGIIHRDLKPDNLLLTANRKKLKLTDFGLAREETVTEMMTAETGTYRWMAPELYSTVTLRRGEKKHYTNKVDVYSFGIVLWELLTNRMPFEGMSNLQAAYAAAFQQKRPALPEETPQELVFIVQSCWVEDPAMRPSFSQIIRMLETFIMTIHPPPLSEPNEGEESEETRSSLSSRSSSGSSLVSRATSKLSVVRHLFVSKKTGNGKA

SEQ ID NO: 14559 - protein, 253 aa, Zea mays subsp. mays
  peptide (1)..(253): Ceres Seq. ID no. 12468288
  misc_feature (1)..(252): Homolog of NCBI NO: 28876011 NR Description: putative protein kinase [Oryza sativa (japonica
  misc_feature (1)..(250): Homolog of NCBI NO: 30679428 NR Description: protein kinase, putative [Arabidopsis thaliana]
  misc_feature (1)..(250): Homolog of NCBI NO: 11259780 NR Description: protein kinase ATN1-like protein - Arabidopsis
  misc_feature (1)..(230): Homolog of NCBI NO: 15232197 NR Description: putative protein kinase, ATN1; protein id: supported by cDNA: gi_16604327, supported by cDNA: gi_19699189 thaliana] >gi|11994183|dbj|BAB01286.1| nearly identical to
  misc_feature (1)..(230): Homolog of NCBI NO: 2129698 NR Description: protein kinase ATN1 (EC 2.7.1.-) - Arabidopsis
  misc_feature (1)..(227): Homolog of NCBI NO: 32815816 NR Description: protein kinase [Cucumis sativus]
  misc_feature (1)..(231): Homolog of NCBI NO: 15240630 NR Description: protein kinase ATN1-like protein; protein id:
  misc_feature (1)..(205): Homolog of NCBI NO: 15237443 NR Description: protein kinase - like protein; protein id: [Arabidopsis thaliana] >gi|9758080|dbj|BAB08524.1| protein kinase
  misc_feature (1)..(220): Homolog of NCBI NO: 15240070 NR Description: protein kinase ATN1-like protein; protein id:
  misc_feature (1)..(218): Homolog of NCBI NO: 15230296 NR Description: protein kinase ATN1 - like protein; protein id:
MVIVSELLPGMSLKSYLHSIRPSQLDTHTAISYALDIAHAMDCLHANGIIHRDLKPDNLLLTANRKKLKLTDFGLAREETVTEMMTAETGTYRWMAPELYSTVTLRRGEKKHYTNKVDVYSFGIVLWELLTNRMPFEGMSNLQAAYAAAFQQKRPALPEETPQELVFIVQSCWVEDPAMRPSFSQIIRMLETFIMTIHPPPLSEPNEGEESEETRSSLSSRSSSGSSLVSRATSKLSVVRHLFVSKKTGNGKA

SEQ ID NO: 14560 - protein, 243 aa, Zea mays subsp. mays
  peptide (1)..(243): Ceres Seq. ID no. 12468289
  misc_feature (1)..(242): Homolog of NCBI NO: 28876011 NR Description: putative protein kinase [Oryza sativa (japonica
  misc_feature (1)..(240): Homolog of NCBI NO: 30679428 NR Description: protein kinase, putative [Arabidopsis thaliana]
  misc_feature (1)..(240): Homolog of NCBI NO: 11259780 NR Description: protein kinase ATN1-like protein - Arabidopsis
  misc_feature (1)..(220): Homolog of NCBI NO: 15232197 NR Description: putative protein kinase, ATN1; protein id: supported by cDNA: gi_16604327, supported by cDNA: gi_19699189 thaliana] >gi|11994183|dbj|BAB01286.1| nearly identical to
  misc_feature (1)..(220): Homolog of NCBI NO: 2129698 NR Description: protein kinase ATN1 (EC 2.7.1.-) - Arabidopsis
  misc_feature (1)..(217): Homolog of NCBI NO: 32815816 NR Description: protein kinase [Cucumis sativus]
  misc_feature (1)..(221): Homolog of NCBI NO: 15240630 NR Description: protein kinase ATN1-like protein; protein id:
  misc_feature (1)..(195): Homolog of NCBI NO: 15237443 NR Description: protein kinase - like protein; protein id: [Arabidopsis thaliana] >gi|9758080|dbj|BAB08524.1| protein kinase
  misc_feature (1)..(210): Homolog of NCBI NO: 15240070 NR Description: protein kinase ATN1-like protein; protein id:
  misc_feature (1)..(208): Homolog of NCBI NO: 15230296 NR Description: protein kinase ATN1 - like protein; protein id:
MSLKSYLHSIRPSQLDTHTAISYALDIAHAMDCLHANGIIHRDLKPDNLLLTANRKKLKLTDFGLAREETVTEMMTAETGTYRWMAPELYSTVTLRRGEKKHYTNKVDVYSFGIVLWELLTNRMPFEGMSNLQAAYAAAFQQKRPALPEETPQELVFIVQSCWVEDPAMRPSFSQIIRMLETFIMTIHPPPLSEPNEGEESEETRSSLSSRSSSGSSLVSRATSKLSVVRHLFVSKKTGNGKA

SEQ ID NO: 14561 - DNA, 532 bp, Zea mays subsp. mays
  misc_feature (1)..(532): Ceres Seq. ID no. 3625134
  misc_feature: MA Experiment ID: 20000626 Result: Up-regulated in Transcription
  misc_feature: MA Experiment 20000626 PARAMETER Experiment Name: Zm_Herbicide-Treatments_P Parameter: Timepoint (hr) Value: 12
  misc_feature: MA Experiment 20000626 PARAMETER Experiment Name: Zm_Herbicide-Treatments_P Parameter: Tissue Value: Aerial
  misc_feature: MA Experiment 20000626 PARAMETER Experiment Name: Zm_Herbicide-Treatments_P Parameter: Treatment Value: Roundup vs. No Treatment
gatcaaatcgactggaaacgcagatacggaaaatacaagcccattgttgakccagcaaaatgccagaagtgtaataagcgaaacgtccggcaagcataccataacgtatgcagagattgctccaaggacctcggcatatgtgctaagtgctgcacatgtgttaatgagcttgtcggaagggatgcgaatgaggaggaaagtgaacgcaagtcactagaagaggctgtcagaggtgctagggagagggaacgacgtacacttcttcgtattgttattgagatgcaagtggaatgtgactttggttccttattatgaacaaaggcaaaggtggggagagtgggccgtcagtcccaaagattgctgacagaagtcgagaaggtgatatctttcctgctggatcacttgatgaatacgccgaacaaactagagagcaagaggaagatgactcagatgtagaggctggagattttgtggaarattaaagtttggaatgctttatgctgtaaagacratactttctgtgatgcctatg

SEQ ID NO: 14562 - protein, 104 aa, Zea mays subsp. mays
  peptide (1)..(104): Ceres Seq. ID no. 3625135
  misc_feature (1)..(91): Homolog of NCBI NO: 34909774 NR Description: P0512C01.29 [Oryza sativa (japonica
  misc_feature (1)..(89): Homolog of NCBI NO: 15232864 NR Description: unknown protein; protein id: At3g02220.1 thaliana] >gi|6041796|gb|AAF02116.1|AC009755_9 unknown protein
  misc_feature (1)..(89): Homolog of NCBI NO: 26453098 NR Description: unknown protein [Arabidopsis thaliana]
  misc_feature (3)..(89): Homolog of NCBI NO: 31197373 NR Description: ENSANGP00000016345 [Anopheles gambiae]
  misc_feature (3)..(89): Homolog of NCBI NO: 31202629 NR Description: ENSANGP00000015213 [Anopheles gambiae]
  misc_feature (1)..(89): Homolog of NCBI NO: 24642765 NR Description: CG8675-PA [Drosophila melanogaster]
  misc_feature (3)..(82): Homolog of NCBI NO: 13384816 NR Description: RIKEN cDNA 1110059E24 [Mus musculus] unnamed protein product [Mus musculus] unnamed protein product [Mus musculus]
  misc_feature (3)..(50): Homolog of NCBI NO: 16552651 NR Description: unnamed protein product [Homo sapiens]
  misc_feature (3)..(85): Homolog of NCBI NO: 34862080 NR Description: similar to RIKEN cDNA 1110059E24 [Rattus
  misc_feature (17)..(17): Xaa is any aa, unknown or other
DQIDWKRRYGKYKPIVXPAKCQKCNKRNVRQAYHNVCRDCSKDLGICAKCCTCVNELVGRDANEEESERKSLEEAVRGARERERRTLLRIVIEMQVECDFGSLL

SEQ ID NO: 14563 - protein, 71 aa, Zea mays subsp. mays
  peptide (1)..(71): Ceres Seq. ID no. 3625136
  misc_feature (17)..(17): Xaa is any aa, unknown or other
IKSTGNADTENTSPLLXQQNARSVISETSGKHTITYAEIAPRTSAYVLSAAHVLMSLSEGMRMRRKVNASH

SEQ ID NO: 14564 - protein, 56 aa, Zea mays subsp. mays
  peptide (1)..(56): Ceres Seq. ID no. 3625137
  misc_feature (1)..(55): Homolog of NCBI NO: 34909774 NR Description: P0512C01.29 [Oryza sativa (japonica
  misc_feature (56)..(56): Xaa is any aa, unknown or other
MNKGKGGESGPSVPKIADRSREGDIFPAGSLDEYAEQTREQEEDDSDVEAGDFVEX

SEQ ID NO: 14565 - DNA, 1178 bp, Zea mays subsp. mays
  misc_feature (1)..(1178): Ceres Seq. ID no. 14305367
  misc_feature: MA Experiment ID: 20000480 Result: Up-regulated in Transcription
  misc_feature: MA Experiment 20000480 PARAMETER Experiment Name: Zm_Drought_P Parameter: Age (day) Value: 11
  misc_feature: MA Experiment 20000480 PARAMETER Experiment Name: Zm_Drought_P Parameter: Organism Value: Zea mays
  misc_feature: MA Experiment 20000480 PARAMETER Experiment Name: Zm_Drought_P Parameter: Plant Line Value: 35A19
  misc_feature: MA Experiment 20000480 PARAMETER Experiment Name: Zm_Drought_P Parameter: Timepoint (hr) Value: 72
  misc_feature: MA Experiment 20000480 PARAMETER Experiment Name: Zm_Drought_P Parameter: Tissue Value: Aerial
  misc_feature: MA Experiment 20000480 PARAMETER Experiment Name: Zm_Drought_P Parameter: Treatment Value: Drought vs. No Drought
agaggagtcagtatttgagctttctttgtttgctgagtcattcagtgaaatgcttcaacacagaatgggttgtgttatcctgtcttttcttgagaaattgcacaggcgatatgttgtgaagaggaatcagcgtaagcgccaaagagaggaagatctaaagaaagaagagaaatcttcagagaagcggtctaagactactcatgagactactaaaactgaaagtgttgataatccaggaggcagctttaaaatgacaaaagagggtgaagaaaagatgagcacagatcaatctgcaaatgtccatgctgaactgtcaaaagagggtcagataaaacttggcaccgatcatccaattgctaaccatggagaaccagcaaaagggggtgatgaaaatatggaggaagatcctgaatacgaggaagatcctgaagaagtagaagtatatgaagatgacgaggacatggatgatgctcacgctgaagaacagattgcagaacagaatgagaacacaaacgacagagagattaagccaaaagaagtagcgacaacagatggtggaaataacaaaagtacaagacagcctgaagtagaaaatgttactaatatccatgaaagagctgcttcaatggaagaaaagcagtccgtgccagagataggagatttggtgggaggtggagaaaaggtagttagtaaagagattaagccagcaaaagatgaggtgatcgacaaggacctattgcaggccttcaggtactttgacataaatggagcaggatatctcaaggttgatgatttaaaatgtattcttcacaacatggggaagtttttatcaagcagggacgtgaaggacttggttcaaattgctcttgttgagagcaattctgcaagggacaatcgcataatctatcctaagcttgtgaagattgttgacctgtaatctggcactgcttggcccgcgtcagtccccttgaagttaaccatgctatgatcgttgagaagtcagttatgagaaactattttgtttacttattaatgggttcactgccatttttgtggctacctgtttctacgattatgctacaagcagctgcttttcgtttcgatgaatgttttttgtggaattataagtcatgaacttaatcgatgttgcctcatttcgtaaaagaggtgtttgtgtc

SEQ ID NO: 14566 - protein, 311 aa, Zea mays subsp. mays
  peptide (1)..(311): Ceres Seq. ID no. 14305368
  misc_feature (23)..(174): Pfam Name: Chromadorea ALT protein Pfam Description: Chromadorea ALT protein
  misc_feature (1)..(308): Homolog of NCBI NO: 15227543 NR Description: calmodulin -related [Arabidopsis thaliana]
  misc_feature (69)..(307): Homolog of NCBI NO: 4731916 NR Description: development protein DG1124 [Dictyostelium
  misc_feature (164)..(306): Homolog of NCBI NO: 31218375 NR Description: ENSANGP00000010930 [Anopheles gambiae]
  misc_feature (69)..(307): Homolog of NCBI NO: 28829323 NR Description: similar to Dictyostelium discoideum (Slime mold).
  misc_feature (40)..(243): Homolog of NCBI NO: 9837385 NR Description: retinitis pigmentosa GTPase regulator-like
EESVFELSLFAESFSEMLQHRMGCVILSFLEKLHRRYVVKRNQRKRQREEDLKKEEKSSEKRSKTTHETTKTESVDNPGGSFKMTKEGEEKMSTDQSANVHAELSKEGQIKLGTDHPIANHGEPAKGGDENMEEDPEYEEDPEEVEVYEDDEDMDDAHAEEQIAEQNENTNDREIKPKEVATTDGGNNKSTRQPEVENVTNIHERAASMEEKQSVPEIGDLVGGGEKVVSKEIKPAKDEVIDKDLLQAFRYFDINGAGYLKVDDLKCILHNMGKFLSSRDVKDLVQIALVESNSARDNRIIYPKLVKIVDL

SEQ ID NO: 14567 - protein, 295 aa, Zea mays subsp. mays
  peptide (1)..(295): Ceres Seq. ID no. 14305369
  misc_feature (7)..(158): Pfam Name: Chromadorea ALT protein Pfam Description: Chromadorea ALT protein
  misc_feature (1)..(292): Homolog of NCBI NO: 15227543 NR Description: calmodulin -related [Arabidopsis thaliana]
  misc_feature (53)..(291): Homolog of NCBI NO: 4731916 NR Description: development protein DG1124 [Dictyostelium
  misc_feature (148)..(290): Homolog of NCBI NO: 31218375 NR Description: ENSANGP00000010930 [Anopheles gambiae]
  misc_feature (53)..(291): Homolog of NCBI NO: 28829323 NR Description: similar to Dictyostelium discoideum (Slime mold).
  misc_feature (24)..(227): Homolog of NCBI NO: 9837385 NR Description: retinitis pigmentosa GTPase regulator-like
MLQHRMGCVILSFLEKLHRRYVVKRNQRKRQREEDLKKEEKSSEKRSKTTHETTKTESVDNPGGSFKMTKEGEEKMSTDQSANVHAELSKEGQIKLGTDHPIANHGEPAKGGDENMEEDPEYEEDPEEVEVYEDDEDMDDAHAEEQIAEQNENTNDREIKPKEVATTDGGNNKSTRQPEVENVTNIHERAASMEEKQSVPEIGDLVGGGEKVVSKEIKPAKDEVIDKDLLQAFRYFDINGAGYLKVDDLKCILHNMGKFLSSRDVKDLVQIALVESNSARDNRIIYPKLVKIVDL

SEQ ID NO: 14568 - protein, 290 aa, Zea mays subsp. mays
  peptide (1)..(290): Ceres Seq. ID no. 14305370
  misc_feature (2)..(153): Pfam Name: Chromadorea ALT protein Pfam Description: Chromadorea ALT protein
  misc_feature (1)..(287): Homolog of NCBI NO: 15227543 NR Description: calmodulin -related [Arabidopsis thaliana]
  misc_feature (48)..(286): Homolog of NCBI NO: 4731916 NR Description: development protein DG1124 [Dictyostelium
  misc_feature (143)..(285): Homolog of NCBI NO: 31218375 NR Description: ENSANGP00000010930 [Anopheles gambiae]
  misc_feature (48)..(286): Homolog of NCBI NO: 28829323 NR Description: similar to Dictyostelium discoideum (Slime mold).
  misc_feature (19)..(222): Homolog of NCBI NO: 9837385 NR Description: retinitis pigmentosa GTPase regulator-like
MGCVILSFLEKLHRRYVVKRNQRKRQREEDLKKEEKSSEKRSKTTHETTKTESVDNPGGSFKMTKEGEEKMSTDQSANVHAELSKEGQIKLGTDHPIANHGEPAKGGDENMEEDPEYEEDPEEVEVYEDDEDMDDAHAEEQIAEQNENTNDREIKPKEVATTDGGNNKSTRQPEVENVTNIHERAASMEEKQSVPEIGDLVGGGEKVVSKEIKPAKDEVIDKDLLQAFRYFDINGAGYLKVDDLKCILHNMGKFLSSRDVKDLVQIALVESNSARDNRIIYPKLVKIVDL

SEQ ID NO: 14569 - DNA, 695 bp, Zea mays subsp. mays
  misc_feature (1)..(695): Ceres Seq. ID no. 12436617
  misc_feature: MA Experiment ID: 108687 Result: Down-regulated in Transcription
  misc_feature: MA Experiment 108687 PARAMETER Experiment Name: Zm_Embryos-Flowers__P Parameter: Tissue Value: Embryo vs. Aerial+
  misc_feature: MA Experiment ID: 108689 Result: Down-regulated in Transcription
  misc_feature: MA Experiment 108689 PARAMETER Experiment Name: Zm_Drought_Roots_P Parameter: Age (day) Value: 9
  misc_feature: MA Experiment 108689 PARAMETER Experiment Name: Zm_Drought_Roots_P Parameter: Organism Value: Zea mays
  misc_feature: MA Experiment 108689 PARAMETER Experiment Name: Zm_Drought_Roots_P Parameter: Plant Line Value: 35A19
  misc_feature: MA Experiment 108689 PARAMETER Experiment Name: Zm_Drought_Roots_P Parameter: Timepoint (hr) Value: 24
  misc_feature: MA Experiment 108689 PARAMETER Experiment Name: Zm_Drought_Roots_P Parameter: Tissue Value: Roots
  misc_feature: MA Experiment 108689 PARAMETER Experiment Name: Zm_Drought_Roots_P Parameter: Treatment Value: Drought vs. No Drought
tgatccatgtctgcgcagtgtttcttttcacagtttgcgcttgcgaacatccgaaccccgttttcatcttgaattcaacttatgatgtatatcggacagttccaccacattctggcgccgccttcgtctgatcctggaggcaattggagccgctgcaagtcggatcctggtggatgcagcgcaacacagatcgcaaccctccaaggactgagaagtggaatgttgacatctctgagacagtctgaaagcaaaccgaaggcaggggtgttcatcaactcctgcttcgcgcattgctagagtgagctacaggacacatggttcgcaccaaattctccatccatatataacaagaaaattgcagaggtggtaggtgattggtactttgaaagaggagctgacgtggagattgactgcgcctatccctgtgattcacagtcttgtcgcaaccttataccaattgataaggaactgaggatgtattaggagttcggcagacgattatactcaattatcatcataataaaaaacactcttctaattgttgatgatgttatgttacttgcatcagatagcaaaccaccctattgtacaatctgttggtggaaacatgtttgtgttgtgtgttccaggttgtctgtttcttggtagccttttttggctgaattggtgatatacacaaaatctatttacttgtt

SEQ ID NO: 14570 - protein, 71 aa, Zea mays subsp. mays
  peptide (1)..(71): Ceres Seq. ID no. 12436618
  misc_feature (6)..(71): Pfam Name: Pectinacetylesterase Pfam Description: Pectinacetylesterase
  misc_feature (1)..(71): Homolog of NCBI NO: 22327018 NR Description: pectinacetylesterase family; protein id: supported by cDNA: gi_17065259 [Arabidopsis thaliana] pectinacetylesterase [Arabidopsis thaliana]
  misc_feature (1)..(71): Homolog of NCBI NO: 21703105 NR Description: At1g57590/T8L23_6 [Arabidopsis thaliana]
  misc_feature (1)..(71): Homolog of NCBI NO: 30696158 NR Description: pectinacetylesterase, putative [Arabidopsis
  misc_feature (1)..(71): Homolog of NCBI NO: 25347293 NR Description: probable pectinacetylesterase precursor T8L23.6 - Arabidopsis thaliana >gi|12321351|gb|AAG50747.1|AC079733_15
  misc_feature (6)..(71): Homolog of NCBI NO: 37536674 NR Description: putative pectin acetylesterase [Oryza sativa
  misc_feature (1)..(71): Homolog of NCBI NO: 10176854 NR Description: pectinacetylesterase [Arabidopsis thaliana]
  misc_feature (1)..(71): Homolog of NCBI NO: 15228677 NR Description: pectinacetylesterase family; protein id:
  misc_feature (1)..(71): Homolog of NCBI NO: 28392968 NR Description: putative pectinacetylesterase [Arabidopsis >gi|28827554|gb|AAO50621.1| putative pectinacetylesterase
  misc_feature (1)..(71): Homolog of NCBI NO: 7487997 NR Description: pectin acetylesterase homolog F21E10.11 - thaliana >gi|3047082|gb|AAC13595.1| similar to Vigna radiata
  misc_feature (1)..(71): Homolog of NCBI NO: 30690308 NR Description: pectinacetylesterase, putative [Arabidopsis
MMYIGQFHHILAPPSSDPGGNWSRCKSDPGGCSATQIATLQGLRSGMLTSLRQSESKPKAGVFINSCFAHC

SEQ ID NO: 14571 - protein, 70 aa, Zea mays subsp. mays
  peptide (1)..(70): Ceres Seq. ID no. 12436619
  misc_feature (5)..(70): Pfam Name: Pectinacetylesterase Pfam Description: Pectinacetylesterase
  misc_feature (5)..(70): Homolog of NCBI NO: 37536674 NR Description: putative pectin acetylesterase [Oryza sativa
  misc_feature (1)..(70): Homolog of NCBI NO: 10176854 NR Description: pectinacetylesterase [Arabidopsis thaliana]
  misc_feature (1)..(70): Homolog of NCBI NO: 22327018 NR Description: pectinacetylesterase family; protein id: supported by cDNA: gi_17065259 [Arabidopsis thaliana] pectinacetylesterase [Arabidopsis thaliana]
  misc_feature (1)..(70): Homolog of NCBI NO: 21703105 NR Description: At1g57590/T8L23_6 [Arabidopsis thaliana]
  misc_feature (1)..(70): Homolog of NCBI NO: 30696158 NR Description: pectinacetylesterase, putative [Arabidopsis
  misc_feature (1)..(70): Homolog of NCBI NO: 25347293 NR Description: probable pectinacetylesterase precursor T8L23.6 - Arabidopsis thaliana >gi|12321351|gb|AAG50747.1|AC079733_15
  misc_feature (1)..(70): Homolog of NCBI NO: 15228677 NR Description: pectinacetylesterase family; protein id:
  misc_feature (1)..(70): Homolog of NCBI NO: 28392968 NR Description: putative pectinacetylesterase [Arabidopsis >gi|28827554|gb|AAO50621.1| putative pectinacetylesterase
  misc_feature (1)..(70): Homolog of NCBI NO: 7487997 NR Description: pectin acetylesterase homolog F21E10.11 - thaliana >gi|3047082|gb|AAC13595.1| similar to Vigna radiata
  misc_feature (1)..(70): Homolog of NCBI NO: 30690308 NR Description: pectinacetylesterase, putative [Arabidopsis
MYIGQFHHILAPPSSDPGGNWSRCKSDPGGCSATQIATLQGLRSGMLTSLRQSESKPKAGVFINSCFAHC

SEQ ID NO: 14572 - protein, 42 aa, Zea mays subsp. mays
  peptide (1)..(42): Ceres Seq. ID no. 12436620
IHVCAVFLFTVCACEHPNPVFILNSTYDVYRTVPPHSGAAFV

SEQ ID NO: 14573 - DNA, 1529 bp, Zea mays subsp. mays
  misc_feature (1)..(1529): Ceres Seq. ID no. 13496467
  misc_feature: MA Experiment ID: 20000627 Result: Up-regulated in Transcription
  misc_feature: MA Experiment 20000627 PARAMETER Experiment Name: Zm_Herbicide-Treatments_P Parameter: Timepoint (hr) Value: 12
  misc_feature: MA Experiment 20000627 PARAMETER Experiment Name: Zm_Herbicide-Treatments_P Parameter: Tissue Value: Aerial
  misc_feature: MA Experiment 20000627 PARAMETER Experiment Name: Zm_Herbicide-Treatments_P Parameter: Treatment Value: Finale vs. No Treatment
gttgtttgataaacatttttctgtggaggagcaagataaacttgtaggtcgtataattggttcaacaggtgctgaggttctccaatctatgttaccctgggttacatcagttctcactcaagaggagcagaacaaaatgcttgatatgtggaagcaagctacaaaaaatacaatgtttggtgaatggctaaacgagtggtggaagggagctggaacagcatctgattcttcagcagaggcgtcctctgctccagaagatagtcatttacaagataagcttgaacaaaatgaccagatgttcaagcctggctggaaggacatatttcgaatgaatcggagtgaacttgaggctgaggtgcgaaaggtttcacgagattctacacttgacccaaggcggaaggcgtatctaattcaaaatctcatgacaagccgctggatagctgcacagcagaagttaccagaaccacattctgaagaatgtaatcacgatgccagtatacctggatgtgcaccttcataccgagaccaggagaaacaaatttatggttgtgaacactacaaacggaactgcaaacttgttgctgcatgctgcaacaagctcttcacatgcaggttctgccatgataaagttagtgaccatacaatggaaaggaaagcaacacaggagatgatgtgcatggtatgcctaaagattcaacctgttggttcgttctgccaaaccccatcttgcaacagactatcgatggcaaagtactactgtaacatctgtaaattttttgatgatgaaaggactgtgtaccactgtccgttttgtaatttgtgtcgtcttgggaaaggtcttggtgttgatttcttccattgcatgaaatgcaactgctgccttggaatgaaattaactgagcacaaatgtcgggaaaaagggctagagacgaattgtccaatatgctgtgacttcctatttacatcaagtgccgcagtcagagccctcccttgtggccactccatgcattcagcttgctttcaggcatacacttgtagtcactacacttgccctatctgctgcaaatccttgggagatatggcggtttattttggcatgcttgatgccttgttggcggctgaagagcttccggaggaataccgtgatcggtgtcaggatatactttgcaatgactgtgagaggaaaggtagatgtcgatttcattggttataccacaaatgcggctcctgtgggtcgtacaacacccgagttatcaagactgccacagcagattgctctacaccaaactagttggagggaacatttgtgcttaattagtcactgtattctttgtttctctttgtacatatcttctagagagaaggaaaaagagaagttgtgtagcatagttataccataatttcattcgtagccatttcagttttgtaagtgtagcagtttacaatttactaggtctagtgcgttatactgacaaaattgacggttctgatggaagaagaacataacctgaggaaattggcttgttagc

SEQ ID NO: 14574 - protein, 429 aa, Zea mays subsp. mays
  peptide (1)..(429): Ceres Seq. ID no. 13496468
  misc_feature (183)..(260): Pfam Name: CHY zinc finger Pfam Description: CHY zinc finger
  misc_feature (1)..(429): Homolog of NCBI NO: 34911328 NR Description: putative zinc finger protein [Oryza sativa
  misc_feature (30)..(429): Homolog of NCBI NO: 22347790 NR Description: putative zinc finger protein [Zea mays]
  misc_feature (1)..(427): Homolog of NCBI NO: 9279663 NR Description: gb|AAD55299.1~gene_id:MIE15.8~similar to unknown
  misc_feature (1)..(427): Homolog of NCBI NO: 15229615 NR Description: zinc finger protein -related [Arabidopsis >gi|20453199|gb|AAM19839.1| AT3g18290/MIE15_8 [Arabidopsis >gi|29028750|gb|AAO64754.1| At3g18290/MIE15_8 [Arabidopsis
  misc_feature (85)..(369): Homolog of NCBI NO: 29367543 NR Description: putative zinc finger protein [Oryza sativa
  misc_feature (74)..(417): Homolog of NCBI NO: 25402866 NR Description: protein F14D16.3 [imported] - Arabidopsis >gi|8778297|gb|AAF79306.1|AC068602_29 F14D16.3 [Arabidopsis
  misc_feature (1)..(87): Homolog of NCBI NO: 25402866 NR Description: protein F14D16.3 [imported] - Arabidopsis >gi|8778297|gb|AAF79306.1|AC068602_29 F14D16.3 [Arabidopsis
  misc_feature (1)..(58): Homolog of NCBI NO: 25402866 NR Description: protein F14D16.3 [imported] - Arabidopsis >gi|8778297|gb|AAF79306.1|AC068602_29 F14D16.3 [Arabidopsis
  misc_feature (165)..(418): Homolog of NCBI NO: 15221379 NR Description: hypothetical protein [Arabidopsis thaliana]
  misc_feature (223)..(417): Homolog of NCBI NO: 15221895 NR Description: hypothetical protein [Arabidopsis thaliana]
LFDKHFSVEEQDKLVGRIIGSTGAEVLQSMLPWVTSVLTQEEQNKMLDMWKQATKNTMFGEWLNEWWKGAGTASDSSAEASSAPEDSHLQDKLEQNDQMFKPGWKDIFRMNRSELEAEVRKVSRDSTLDPRRKAYLIQNLMTSRWIAAQQKLPEPHSEECNHDASIPGCAPSYRDQEKQIYGCEHYKRNCKLVAACCNKLFTCRFCHDKVSDHTMERKATQEMMCMVCLKIQPVGSFCQTPSCNRLSMAKYYCNICKFFDDERTVYHCPFCNLCRLGKGLGVDFFHCMKCNCCLGMKLTEHKCREKGLETNCPICCDFLFTSSAAVRALPCGHSMHSACFQAYTCSHYTCPICCKSLGDMAVYFGMLDALLAAEELPEEYRDRCQDILCNDCERKGRCRFHWLYHKCGSCGSYNTRVIKTATADCSTPN

SEQ ID NO: 14575 - protein, 400 aa, Zea mays subsp. mays
  peptide (1)..(400): Ceres Seq. ID no. 13496469
  misc_feature (154)..(231): Pfam Name: CHY zinc finger Pfam Description: CHY zinc finger
  misc_feature (1)..(400): Homolog of NCBI NO: 34911328 NR Description: putative zinc finger protein [Oryza sativa
  misc_feature (1)..(400): Homolog of NCBI NO: 22347790 NR Description: putative zinc finger protein [Zea mays]
  misc_feature (1)..(398): Homolog of NCBI NO: 9279663 NR Description: gb|AAD55299.1~gene_id:MIE15.8~similar to unknown
  misc_feature (1)..(398): Homolog of NCBI NO: 15229615 NR Description: zinc finger protein -related [Arabidopsis >gi|20453199|gb|AAM19839.1| AT3g18290/MIE15_8 [Arabidopsis >gi|29028750|gb|AAO64754.1| At3g18290/MIE15_8 [Arabidopsis
  misc_feature (56)..(340): Homolog of NCBI NO: 29367543 NR Description: putative zinc finger protein [Oryza sativa
  misc_feature (45)..(388): Homolog of NCBI NO: 25402866 NR Description: protein F14D16.3 [imported] - Arabidopsis >gi|8778297|gb|AAF79306.1|AC068602_29 F14D16.3 [Arabidopsis
  misc_feature (1)..(58): Homolog of NCBI NO: 25402866 NR Description: protein F14D16.3 [imported] - Arabidopsis >gi|8778297|gb|AAF79306.1|AC068602_29 F14D16.3 [Arabidopsis
  misc_feature (1)..(29): Homolog of NCBI NO: 25402866 NR Description: protein F14D16.3 [imported] - Arabidopsis >gi|8778297|gb|AAF79306.1|AC068602_29 F14D16.3 [Arabidopsis
  misc_feature (136)..(389): Homolog of NCBI NO: 15221379 NR Description: hypothetical protein [Arabidopsis thaliana]
  misc_feature (194)..(388): Homolog of NCBI NO: 15221895 NR Description: hypothetical protein [Arabidopsis thaliana]
MLPWVTSVLTQEEQNKMLDMWKQATKNTMFGEWLNEWWKGAGTASDSSAEASSAPEDSHLQDKLEQNDQMFKPGWKDIFRMNRSELEAEVRKVSRDSTLDPRRKAYLIQNLMTSRWIAAQQKLPEPHSEECNHDASIPGCAPSYRDQEKQIYGCEHYKRNCKLVAACCNKLFTCRFCHDKVSDHTMERKATQEMMCMVCLKIQPVGSFCQTPSCNRLSMAKYYCNICKFFDDERTVYHCPFCNLCRLGKGLGVDFFHCMKCNCCLGMKLTEHKCREKGLETNCPICCDFLFTSSAAVRALPCGHSMHSACFQAYTCSHYTCPICCKSLGDMAVYFGMLDALLAAEELPEEYRDRCQDILCNDCERKGRCRFHWLYHKCGSCGSYNTRVIKTATADCSTPN

SEQ ID NO: 14576 - protein, 384 aa, Zea mays subsp. mays
  peptide (1)..(384): Ceres Seq. ID no. 13496470
  misc_feature (138)..(215): Pfam Name: CHY zinc finger Pfam Description: CHY zinc finger
  misc_feature (1)..(384): Homolog of NCBI NO: 34911328 NR Description: putative zinc finger protein [Oryza sativa
  misc_feature (1)..(384): Homolog of NCBI NO: 22347790 NR Description: putative zinc finger protein [Zea mays]
  misc_feature (1)..(382): Homolog of NCBI NO: 9279663 NR Description: gb|AAD55299.1~gene_id:MIE15.8~similar to unknown
  misc_feature (1)..(382): Homolog of NCBI NO: 15229615 NR Description: zinc finger protein -related [Arabidopsis >gi|20453199|gb|AAM19839.1| AT3g18290/MIE15_8 [Arabidopsis >gi|29028750|gb|AAO64754.1| At3g18290/MIE15_8 [Arabidopsis
  misc_feature (40)..(324): Homolog of NCBI NO: 29367543 NR Description: putative zinc finger protein [Oryza sativa
  misc_feature (29)..(372): Homolog of NCBI NO: 25402866 NR Description: protein F14D16.3 [imported] - Arabidopsis >gi|8778297|gb|AAF79306.1|AC068602_29 F14D16.3 [Arabidopsis
  misc_feature (1)..(42): Homolog of NCBI NO: 25402866 NR Description: protein F14D16.3 [imported] - Arabidopsis >gi|8778297|gb|AAF79306.1|AC068602_29 F14D16.3 [Arabidopsis
  misc_feature (1)..(13): Homolog of NCBI NO: 25402866 NR Description: protein F14D16.3 [imported] - Arabidopsis >gi|8778297|gb|AAF79306.1|AC068602_29 F14D16.3 [Arabidopsis
  misc_feature (120)..(373): Homolog of NCBI NO: 15221379 NR Description: hypothetical protein [Arabidopsis thaliana]
  misc_feature (178)..(372): Homolog of NCBI NO: 15221895 NR Description: hypothetical protein [Arabidopsis thaliana]
MLDMWKQATKNTMFGEWLNEWWKGAGTASDSSAEASSAPEDSHLQDKLEQNDQMFKPGWKDIFRMNRSELEAEVRKVSRDSTLDPRRKAYLIQNLMTSRWIAAQQKLPEPHSEECNHDASIPGCAPSYRDQEKQIYGCEHYKRNCKLVAACCNKLFTCRFCHDKVSDHTMERKATQEMMCMVCLKIQPVGSFCQTPSCNRLSMAKYYCNICKFFDDERTVYHCPFCNLCRLGKGLGVDFFHCMKCNCCLGMKLTEHKCREKGLETNCPICCDFLFTSSAAVRALPCGHSMHSACFQAYTCSHYTCPICCKSLGDMAVYFGMLDALLAAEELPEEYRDRCQDILCNDCERKGRCRFHWLYHKCGSCGSYNTRVIKTATADCSTPN

SEQ ID NO: 14577 - DNA, 727 bp, Zea mays subsp. mays
  misc_feature (1)..(727): Ceres Seq. ID no. 12468256
  misc_feature: MA Experiment ID: 108535 Result: Down-regulated in Transcription
  misc_feature: MA Experiment 108535 PARAMETER Experiment Name: Zm_Meristem_P Parameter: Age (day) Value: 8
  misc_feature: MA Experiment 108535 PARAMETER Experiment Name: Zm_Meristem_P Parameter: Organism Value: Zea mays
  misc_feature: MA Experiment 108535 PARAMETER Experiment Name: Zm_Meristem_P Parameter: Plant Line Value: 35A19
  misc_feature: MA Experiment 108535 PARAMETER Experiment Name: Zm_Meristem_P Parameter: Tissue Value: Root Meristem vs. Above Root Meristem
  misc_feature: MA Experiment ID: 20000108 Result: Down-regulated in Transcription
  misc_feature: MA Experiment 20000108 PARAMETER Experiment Name: Zm_Root-Tips_P Parameter: Age (day) Value: 12
  misc_feature: MA Experiment 20000108 PARAMETER Experiment Name: Zm_Root-Tips_P Parameter: Organism Value: Zea mays
  misc_feature: MA Experiment 20000108 PARAMETER Experiment Name: Zm_Root-Tips_P Parameter: Tissue Value: Root tips vs. Root mid region    35
  misc_feature: MA Experiment 20000108 PARAMETER Experiment Name: Zm_Root-Tips_P Parameter: Tissue Value: Root tips vs. Root mid region   Sequence Listing-Misc Features (4)
  misc_feature: MA Experiment ID: 20000488 Result: Down-regulated in Transcription
  misc_feature: MA Experiment 20000488 PARAMETER Experiment Name: Zm_50mM_NH4NO3_L_to_H_P Parameter: Organism Value: Zea mays
  misc_feature: MA Experiment 20000488 PARAMETER Experiment Name: Zm_50mM_NH4NO3_L_to_H_P Parameter: Timepoint (hr) Value: 8
  misc_feature: MA Experiment 20000488 PARAMETER Experiment Name: Zm_50mM_NH4NO3_L_to_H_P Parameter: Tissue Value: Leaves
  misc_feature: MA Experiment 20000488 PARAMETER Experiment Name: Zm_50mM_NH4NO3_L_to_H_P Parameter: Treatment Value: 50mM NH4NO3 vs. 100mM Mannitol
  misc_feature: MA Experiment ID: 20000535 Result: Down-regulated in Transcription
  misc_feature: MA Experiment 20000535 PARAMETER Experiment Name: Zm_Hybrid_Seed_Dev_P Parameter: DAP Value: 30 vs. 12
  misc_feature: MA Experiment 20000535 PARAMETER Experiment Name: Zm_Hybrid_Seed_Dev_P Parameter: Organism Value: Zea mays
  misc_feature: MA Experiment 20000535 PARAMETER Experiment Name: Zm_Hybrid_Seed_Dev_P Parameter: Plant Line Value: 35A19
  misc_feature: MA Experiment 20000535 PARAMETER Experiment Name: Zm_Hybrid_Seed_Dev_P Parameter: Tissue Value: Embryo vs. Unfert Floret
ttactttagcggtggcaaggatgaagaggaggaagatatacctgacatggatacttatgaagacacaggggataatttggctgctgctgaaccatcatactttatcgcagaagaaccagaagatgacaacattcttcataccagaacatatgatgttagcataacgtatgacaagtactaccaaactccacgtgtctggctaactggatatgacgagtcaagaatgccattaatgcctgaacttgtgtttgaagacatcagccaagaccacgcacgaaaaacggtgactattgaggaccatcctcacttattggctgggaagcatgcatcagtgcacccatgcaaacatgcagctgtgatgaaaaagatcatcgacgttccaatgtcggggggagtggaaccagaagttgacaagtaccttttcatatttttgaaattcatagcgacagtcataccgactattgagtacgattatacaatggacgtcgaccttggcagtacaagctgattattggttggcttgaagcttgtcacttgtctcgggaaaaggaagcaccctaccagaaggcgcaggaagaaggctgaattgcgtgtttgtggttgaacatttgtgcatatgtgcttgttccttggatcggtttgcatttgtgaacaaactntgaaaagctcaaaggcaagacccatcttgtacattctgtgacgctgtcagcttgtgaatccattcgtt

SEQ ID NO: 14578 - protein, 168 aa, Zea mays subsp. mays
  peptide (1)..(168): Ceres Seq. ID no. 12468257
  misc_feature (42)..(160): Pfam Name: Autophagocytosis associated protein, C-terminal domain Pfam Description: Autophagocytosis associated protein, C-terminal
  misc_feature (1)..(168): Homolog of NCBI NO: 34903638 NR Description: B1015E06.2 [Oryza sativa (japonica
  misc_feature (1)..(168): Homolog of NCBI NO: 18424474 NR Description: autophagocytosis protein - like; protein id: supported by cDNA: 8184., supported by cDNA: gi_19912140 thaliana] >gi|19912141|dbj|BAB88382.1| autophagy 3 [Arabidopsis
  misc_feature (1)..(168): Homolog of NCBI NO: 21595613 NR Description: autophagocytosis protein-like [Arabidopsis
  misc_feature (1)..(168): Homolog of NCBI NO: 9758466 NR Description: autophagocytosis protein AUT1-like [Arabidopsis
  misc_feature (9)..(163): Homolog of NCBI NO: 28828597 NR Description: hypothetical protein [Dictyostelium discoideum]
  misc_feature (3)..(159): Homolog of NCBI NO: 34785406 NR Description: Unknown (protein for MGC:64156) [Danio rerio]
  misc_feature (6)..(159): Homolog of NCBI NO: 13385890 NR Description: RIKEN cDNA 2610016C12 [Mus musculus] unnamed protein product [Mus musculus] unnamed protein product [Mus musculus]
  misc_feature (6)..(159): Homolog of NCBI NO: 19705511 NR Description: preconditioning-inducible gene 1 protein [Rattus
  misc_feature (6)..(159): Homolog of NCBI NO: 19526773 NR Description: Apg3p; PC3-96 protein [Homo sapiens]
  misc_feature (38)..(164): Homolog of NCBI NO: 21357935 NR Description: CG6877-PA [Drosophila melanogaster]
YFSGGKDEEEEDIPDMDTYEDTGDNLAAAEPSYFIAEEPEDDNILHTRTYDVSITYDKYYQTPRVWLTGYDESRMPLMPELVFEDISQDHARKTVTIEDHPHLLAGKHASVHPCKHAAVMKKIIDVPMSGGVEPEVDKYLFIFLKFIATVIPTIEYDYTMDVDLGSTS

SEQ ID NO: 14579 - protein, 153 aa, Zea mays subsp. mays
  peptide (1)..(153): Ceres Seq. ID no. 12468258
  misc_feature (27)..(145): Pfam Name: Autophagocytosis associated protein, C-terminal domain Pfam Description: Autophagocytosis associated protein, C-terminal
  misc_feature (1)..(153): Homolog of NCBI NO: 34903638 NR Description: B1015E06.2 [Oryza sativa (japonica
  misc_feature (1)..(153): Homolog of NCBI NO: 18424474 NR Description: autophagocytosis protein - like; protein id: supported by cDNA: 8184., supported by cDNA: gi_19912140 thaliana] >gi|19912141|dbj|BAB88382.1| autophagy 3 [Arabidopsis
  misc_feature (1)..(153): Homolog of NCBI NO: 21595613 NR Description: autophagocytosis protein-like [Arabidopsis
  misc_feature (1)..(153): Homolog of NCBI NO: 9758466 NR Description: autophagocytosis protein AUT1-like [Arabidopsis
  misc_feature (1)..(148): Homolog of NCBI NO: 28828597 NR Description: hypothetical protein [Dictyostelium discoideum]
  misc_feature (1)..(144): Homolog of NCBI NO: 34785406 NR Description: Unknown (protein for MGC:64156) [Danio rerio]
  misc_feature (1)..(144): Homolog of NCBI NO: 13385890 NR Description: RIKEN cDNA 2610016C12 [Mus musculus] unnamed protein product [Mus musculus] unnamed protein product [Mus musculus]
  misc_feature (1)..(144): Homolog of NCBI NO: 19705511 NR Description: preconditioning-inducible gene 1 protein [Rattus
  misc_feature (1)..(144): Homolog of NCBI NO: 19526773 NR Description: Apg3p; PC3-96 protein [Homo sapiens]
  misc_feature (23)..(149): Homolog of NCBI NO: 21357935 NR Description: CG6877-PA [Drosophila melanogaster]
MDTYEDTGDNLAAAEPSYFIAEEPEDDNILHTRTYDVSITYDKYYQTPRVWLTGYDESRMPLMPELVFEDISQDHARKTVTIEDHPHLLAGKHASVHPCKHAAVMKKIIDVPMSGGVEPEVDKYLFIFLKFIATVIPTIEYDYTMDVDLGSTS

SEQ ID NO: 14580 - protein, 94 aa, Zea mays subsp. mays
  peptide (1)..(94): Ceres Seq. ID no. 12468259
  misc_feature (1)..(86): Pfam Name: Autophagocytosis associated protein, C-terminal domain Pfam Description: Autophagocytosis associated protein, C-terminal
  misc_feature (1)..(94): Homolog of NCBI NO: 34903638 NR Description: B1015E06.2 [Oryza sativa (japonica
  misc_feature (1)..(94): Homolog of NCBI NO: 18424474 NR Description: autophagocytosis protein - like; protein id: supported by cDNA: 8184., supported by cDNA: gi_19912140 thaliana] >gi|19912141|dbj|BAB88382.1| autophagy 3 [Arabidopsis
  misc_feature (1)..(94): Homolog of NCBI NO: 21595613 NR Description: autophagocytosis protein-like [Arabidopsis
  misc_feature (1)..(94): Homolog of NCBI NO: 9758466 NR Description: autophagocytosis protein AUT1-like [Arabidopsis
  misc_feature (1)..(89): Homolog of NCBI NO: 28828597 NR Description: hypothetical protein [Dictyostelium discoideum]
  misc_feature (1)..(85): Homolog of NCBI NO: 34785406 NR Description: Unknown (protein for MGC:64156) [Danio rerio]
  misc_feature (1)..(85): Homolog of NCBI NO: 13385890 NR Description: RIKEN cDNA 2610016C12 [Mus musculus] unnamed protein product [Mus musculus] unnamed protein product [Mus musculus]
  misc_feature (1)..(85): Homolog of NCBI NO: 19705511 NR Description: preconditioning-inducible gene 1 protein [Rattus
  misc_feature (1)..(85): Homolog of NCBI NO: 19526773 NR Description: Apg3p; PC3-96 protein [Homo sapiens]
  misc_feature (1)..(90): Homolog of NCBI NO: 21357935 NR Description: CG6877-PA [Drosophila melanogaster]
MPLMPELVFEDISQDHARKTVTIEDHPHLLAGKHASVHPCKHAAVMKKIIDVPMSGGVEPEVDKYLFIFLKFIATVIPTIEYDYTMDVDLGSTS

SEQ ID NO: 14581 - DNA, 671 bp, Zea mays subsp. mays
  misc_feature (1)..(671): Ceres Seq. ID no. 12468244
  misc_feature: MA Experiment ID: 108528 Result: Up-regulated in Transcription
  misc_feature: MA Experiment 108528 PARAMETER Experiment Name: Zm_Imbibed_Seeds_P Parameter: Age (day) Value: 5 vs. 2
  misc_feature: MA Experiment 108528 PARAMETER Experiment Name: Zm_Imbibed_Seeds_P Parameter: Organism Value: Zea mays
  misc_feature: MA Experiment 108528 PARAMETER Experiment Name: Zm_Imbibed_Seeds_P Parameter: Plant Line Value: 35A19
  misc_feature: MA Experiment 108528 PARAMETER Experiment Name: Zm_Imbibed_Seeds_P Parameter: Tissue Value: Aerial vs. Embryo
  misc_feature: MA Experiment ID: 108530 Result: Up-regulated in Transcription
  misc_feature: MA Experiment 108530 PARAMETER Experiment Name: Zm_Imbibed_Seeds_P Parameter: Age (day) Value: 6 vs. 2
  misc_feature: MA Experiment 108530 PARAMETER Experiment Name: Zm_Imbibed_Seeds_P Parameter: Organism Value: Zea mays
  misc_feature: MA Experiment 108530 PARAMETER Experiment Name: Zm_Imbibed_Seeds_P Parameter: Plant Line Value: 35A19
  misc_feature: MA Experiment 108530 PARAMETER Experiment Name: Zm_Imbibed_Seeds_P Parameter: Tissue Value: Aerial vs. Embryo
  misc_feature: MA Experiment ID: 108543 Result: Up-regulated in Transcription
  misc_feature: MA Experiment ID: 108545 Result: Up-regulated in Transcription
  misc_feature: MA Experiment 108545 PARAMETER Experiment Name: Zm_Imbibed_Seeds_P Parameter: Age (day) Value: 3 vs. 2
  misc_feature: MA Experiment 108545 PARAMETER Experiment Name: Zm_Imbibed_Seeds_P Parameter: Organism Value: Zea mays
  misc_feature: MA Experiment 108545 PARAMETER Experiment Name: Zm_Imbibed_Seeds_P Parameter: Plant Line Value: 35A19
  misc_feature: MA Experiment 108545 PARAMETER Experiment Name: Zm_Imbibed_Seeds_P Parameter: Tissue Value: Aerial vs. Embryo
  misc_feature: MA Experiment ID: 108547 Result: Up-regulated in Transcription
  misc_feature: MA Experiment 108547 PARAMETER Experiment Name: Zm_Imbibed_Seeds_P Parameter: Age (day) Value: 4 vs. 2
  misc_feature: MA Experiment 108547 PARAMETER Experiment Name: Zm_Imbibed_Seeds_P Parameter: Organism Value: Zea mays
  misc_feature: MA Experiment 108547 PARAMETER Experiment Name: Zm_Imbibed_Seeds_P Parameter: Plant Line Value: 35A19
  misc_feature: MA Experiment 108547 PARAMETER Experiment Name: Zm_Imbibed_Seeds_P Parameter: Tissue Value: Aerial vs. Embryo
  misc_feature: MA Experiment ID: 108556 Result: Down-regulated in Transcription
  misc_feature: MA Experiment 108556 PARAMETER Experiment Name: Zm_Drought_P Parameter: Age (day) Value: 9
  misc_feature: MA Experiment 108556 PARAMETER Experiment Name: Zm_Drought_P Parameter: Organism Value: Zea mays
  misc_feature: MA Experiment 108556 PARAMETER Experiment Name: Zm_Drought_P Parameter: Plant Line Value: 35A19
  misc_feature: MA Experiment 108556 PARAMETER Experiment Name: Zm_Drought_P Parameter: Timepoint (hr) Value: 24
  misc_feature: MA Experiment 108556 PARAMETER Experiment Name: Zm_Drought_P Parameter: Tissue Value: Aerial
  misc_feature: MA Experiment 108556 PARAMETER Experiment Name: Zm_Drought_P Parameter: Treatment Value: Drought vs. No Drought
  misc_feature: MA Experiment ID: 108559 Result: Down-regulated in Transcription
  misc_feature: MA Experiment 108559 PARAMETER Experiment Name: Zm_5mM_NO_P Parameter: Age (day) Value: 8
  misc_feature: MA Experiment 108559 PARAMETER Experiment Name: Zm_5mM_NO_P Parameter: Organism Value: Zea mays
  misc_feature: MA Experiment 108559 PARAMETER Experiment Name: Zm_5mM_NO_P Parameter: Plant Line Value: 35A19
  misc_feature: MA Experiment 108559 PARAMETER Experiment Name: Zm_5mM_NO_P Parameter: Timepoint (hr) Value: 12
  misc_feature: MA Experiment 108559 PARAMETER Experiment Name: Zm_5mM_NO_P Parameter: Tissue Value: Aerial
  misc_feature: MA Experiment 108559 PARAMETER Experiment Name: Zm_5mM_NO_P Parameter: Treatment Value: 5mM NO vs. No Treatment
  misc_feature: MA Experiment ID: 108688 Result: Down-regulated in Transcription
  misc_feature: MA Experiment 108688 PARAMETER Experiment Name: Zm_Embryos-Flowers__P Parameter: Tissue Value: Immature Flowers vs. Aerial+
  misc_feature: MA Experiment ID: 20000477 Result: Down-regulated in Transcription
  misc_feature: MA Experiment 20000477 PARAMETER Experiment Name: Zm_5mM_SA_P Parameter: Age (day) Value: 10
  misc_feature: MA Experiment 20000477 PARAMETER Experiment Name: Zm_5mM_SA_P Parameter: Organism Value: Zea mays
  misc_feature: MA Experiment 20000477 PARAMETER Experiment Name: Zm_5mM_SA_P Parameter: Plant Line Value: 35A19
  misc_feature: MA Experiment 20000477 PARAMETER Experiment Name: Zm_5mM_SA_P Parameter: Timepoint (hr) Value: 48
  misc_feature: MA Experiment 20000477 PARAMETER Experiment Name: Zm_5mM_SA_P Parameter: Tissue Value: Aerial
  misc_feature: MA Experiment 20000477 PARAMETER Experiment Name: Zm_5mM_SA_P Parameter: Treatment Value: 5mM SA vs. No Treatment
  misc_feature: MA Experiment ID: 20000478 Result: Down-regulated in Transcription
  misc_feature: MA Experiment 20000478 PARAMETER Experiment Name: Zm_5mM_SA_P Parameter: Age (day) Value: 11
  misc_feature: MA Experiment 20000478 PARAMETER Experiment Name: Zm_5mM_SA_P Parameter: Organism Value: Zea mays
  misc_feature: MA Experiment 20000478 PARAMETER Experiment Name: Zm_5mM_SA_P Parameter: Plant Line Value: 35A19
  misc_feature: MA Experiment 20000478 PARAMETER Experiment Name: Zm_5mM_SA_P Parameter: Timepoint (hr) Value: 72
  misc_feature: MA Experiment 20000478 PARAMETER Experiment Name: Zm_5mM_SA_P Parameter: Tissue Value: Aerial
  misc_feature: MA Experiment 20000478 PARAMETER Experiment Name: Zm_5mM_SA_P Parameter: Treatment Value: 5mM SA vs. No Treatment
  misc_feature: MA Experiment ID: 20000479 Result: Down-regulated in Transcription
  misc_feature: MA Experiment 20000479 PARAMETER Experiment Name: Zm_Drought_P Parameter: Age (day) Value: 10
  misc_feature: MA Experiment 20000479 PARAMETER Experiment Name: Zm_Drought_P Parameter: Organism Value: Zea mays
  misc_feature: MA Experiment 20000479 PARAMETER Experiment Name: Zm_Drought_P Parameter: Plant Line Value: 35A19
  misc_feature: MA Experiment 20000479 PARAMETER Experiment Name: Zm_Drought_P Parameter: Timepoint (hr) Value: 48
  misc_feature: MA Experiment 20000479 PARAMETER Experiment Name: Zm_Drought_P Parameter: Tissue Value: Aerial
  misc_feature: MA Experiment 20000479 PARAMETER Experiment Name: Zm_Drought_P Parameter: Treatment Value: Drought vs. No Drought
  misc_feature: MA Experiment ID: 20000480 Result: Down-regulated in Transcription
  misc_feature: MA Experiment 20000480 PARAMETER Experiment Name: Zm_Drought_P Parameter: Age (day) Value: 11
  misc_feature: MA Experiment 20000480 PARAMETER Experiment Name: Zm_Drought_P Parameter: Organism Value: Zea mays
  misc_feature: MA Experiment 20000480 PARAMETER Experiment Name: Zm_Drought_P Parameter: Plant Line Value: 35A19
  misc_feature: MA Experiment 20000480 PARAMETER Experiment Name: Zm_Drought_P Parameter: Timepoint (hr) Value: 72
  misc_feature: MA Experiment 20000480 PARAMETER Experiment Name: Zm_Drought_P Parameter: Tissue Value: Aerial
  misc_feature: MA Experiment 20000480 PARAMETER Experiment Name: Zm_Drought_P Parameter: Treatment Value: Drought vs. No Drought
gataagtttgctcctgatgctaacagccagattgttccagcatctgcaattcctgatggttggatggggctggatattggcccagattccattgctgcattcaacgcagccctggaaacaacccagactgtcatctggaacgggcccatgggtgtttttgaatatgacaagttcgctataggaactgaggctgtggcaaagaagttggcagaacttagccgcaagggtgtgacaactatcatcggaggtggagactctgtcgccgccgttgagaaggtcggagttgctgacgttatgagccacatttccaccggaggtggtgccagcttggaattgttggaaggaaaggagcttccaggagttactgcattggatgaagcagccactgtgactgtatgaagcaagttttcattttgtttcatcttcttttttggaagttaccgggggagggactcccacctgaataaggtgcgcaaggccaggattgttggctcaaccacagggagcgcacgccaccgcatcatcttcatgtaccattgtatacttgctacattcttgcttgctcctcctcagccgctcgaaatgtaggagatcaatgatttatagagctctggaaatcgtttgaacaaggagtaagcgacccaagtaatatgcttactgagtcatntttc

SEQ ID NO: 14582 - protein, 132 aa, Zea mays subsp. mays
  peptide (1)..(132): Ceres Seq. ID no. 12468245
  misc_feature (1)..(126): Pfam Name: Phosphoglycerate kinase Pfam Description: Phosphoglycerate kinase
  misc_feature (1)..(132): Homolog of NCBI NO: 129915 NR Description: Phosphoglycerate kinase, chloroplast precursor
  misc_feature (1)..(132): Homolog of NCBI NO: 15223484 NR Description: phosphoglycerate kinase, putative; protein id: supported by cDNA: gi_15810504, supported by cDNA: gi_20466263 thaliana] >gi|25288114|pir||D96603 probable
  misc_feature (1)..(132): Homolog of NCBI NO: 2129668 NR Description: phosphoglycerate kinase (EC 2.7.2.3) OBP38 - thaliana (fragment) >gi|1022803|gb|AAA79705.1| phosphoglycerate
  misc_feature (1)..(132): Homolog of NCBI NO: 2499497 NR Description: Phosphoglycerate kinase, chloroplast precursor
  misc_feature (1)..(132): Homolog of NCBI NO: 7434544 NR Description: phosphoglycerate kinase (EC 2.7.2.3) precursor,
  misc_feature (1)..(132): Homolog of NCBI NO: 3738261 NR Description: chloroplast phosphoglycerate kinase [Populus
  misc_feature (1)..(132): Homolog of NCBI NO: 2129669 NR Description: phosphoglycerate kinase (EC 2.7.2.3) OBP44 - thaliana (fragment) >gi|1022805|gb|AAB60303.1| phosphoglycerate
  misc_feature (1)..(132): Homolog of NCBI NO: 15230595 NR Description: phosphoglycerate kinase, putative; protein id: supported by cDNA: 21955., supported by cDNA: gi_13430643, by cDNA: gi_15010643, supported by cDNA: gi_16226507,
  misc_feature (1)..(132): Homolog of NCBI NO: 12644295 NR Description: PHOSPHOGLYCERATE KINASE, CHLOROPLAST PRECURSOR
  misc_feature (1)..(127): Homolog of NCBI NO: 15219412 NR Description: phosphoglycerate kinase, putative; protein id: supported by cDNA: 113494., supported by cDNA: gi_13194781, by cDNA: gi_17065573, supported by cDNA: gi_7839392 [Arabidopsis
DKFAPDANSQIVPASAIPDGWMGLDIGPDSIAAFNAALETTQTVIWNGPMGVFEYDKFAIGTEAVAKKLAELSRKGVTTIIGGGDSVAAVEKVGVADVMSHISTGGGASLELLEGKELPGVTALDEAATVTV

SEQ ID NO: 14583 - protein, 111 aa, Zea mays subsp. mays
  peptide (1)..(111): Ceres Seq. ID no. 12468246
  misc_feature (1)..(105): Pfam Name: Phosphoglycerate kinase Pfam Description: Phosphoglycerate kinase
  misc_feature (1)..(111): Homolog of NCBI NO: 129915 NR Description: Phosphoglycerate kinase, chloroplast precursor
  misc_feature (1)..(111): Homolog of NCBI NO: 15223484 NR Description: phosphoglycerate kinase, putative; protein id: supported by cDNA: gi_15810504, supported by cDNA: gi_20466263 thaliana] >gi|25288114|pir||D96603 probable
  misc_feature (1)..(111): Homolog of NCBI NO: 2129668 NR Description: phosphoglycerate kinase (EC 2.7.2.3) OBP38 - thaliana (fragment) >gi|1022803|gb|AAA79705.1| phosphoglycerate
  misc_feature (1)..(111): Homolog of NCBI NO: 2499497 NR Description: Phosphoglycerate kinase, chloroplast precursor
  misc_feature (1)..(111): Homolog of NCBI NO: 7434544 NR Description: phosphoglycerate kinase (EC 2.7.2.3) precursor,
  misc_feature (1)..(111): Homolog of NCBI NO: 3738261 NR Description: chloroplast phosphoglycerate kinase [Populus
  misc_feature (1)..(111): Homolog of NCBI NO: 2129669 NR Description: phosphoglycerate kinase (EC 2.7.2.3) OBP44 - thaliana (fragment) >gi|1022805|gb|AAB60303.1| phosphoglycerate
  misc_feature (1)..(111): Homolog of NCBI NO: 12644295 NR Description: PHOSPHOGLYCERATE KINASE, CHLOROPLAST PRECURSOR
  misc_feature (1)..(111): Homolog of NCBI NO: 15230595 NR Description: phosphoglycerate kinase, putative; protein id: supported by cDNA: 21955., supported by cDNA: gi_13430643, by cDNA: gi_15010643, supported by cDNA: gi_16226507,
  misc_feature (1)..(106): Homolog of NCBI NO: 15219412 NR Description: phosphoglycerate kinase, putative; protein id: supported by cDNA: 113494., supported by cDNA: gi_13194781, by cDNA: gi_17065573, supported by cDNA: gi_7839392 [Arabidopsis
MGLDIGPDSIAAFNAALETTQTVIWNGPMGVFEYDKFAIGTEAVAKKLAELSRKGVTTIIGGGDSVAAVEKVGVADVMSHISTGGGASLELLEGKELPGVTALDEAATVTV

SEQ ID NO: 14584 - protein, 83 aa, Zea mays subsp. mays
  peptide (1)..(83): Ceres Seq. ID no. 12468247
  misc_feature (1)..(77): Pfam Name: Phosphoglycerate kinase Pfam Description: Phosphoglycerate kinase
  misc_feature (1)..(83): Homolog of NCBI NO: 15223484 NR Description: phosphoglycerate kinase, putative; protein id: supported by cDNA: gi_15810504, supported by cDNA: gi_20466263 thaliana] >gi|25288114|pir||D96603 probable
  misc_feature (1)..(83): Homolog of NCBI NO: 2129668 NR Description: phosphoglycerate kinase (EC 2.7.2.3) OBP38 - thaliana (fragment) >gi|1022803|gb|AAA79705.1| phosphoglycerate
  misc_feature (1)..(83): Homolog of NCBI NO: 2499497 NR Description: Phosphoglycerate kinase, chloroplast precursor
  misc_feature (1)..(83): Homolog of NCBI NO: 7434544 NR Description: phosphoglycerate kinase (EC 2.7.2.3) precursor,
  misc_feature (1)..(83): Homolog of NCBI NO: 3738261 NR Description: chloroplast phosphoglycerate kinase [Populus
  misc_feature (1)..(83): Homolog of NCBI NO: 129915 NR Description: Phosphoglycerate kinase, chloroplast precursor
  misc_feature (1)..(83): Homolog of NCBI NO: 2129669 NR Description: phosphoglycerate kinase (EC 2.7.2.3) OBP44 - thaliana (fragment) >gi|1022805|gb|AAB60303.1| phosphoglycerate
  misc_feature (1)..(83): Homolog of NCBI NO: 12644295 NR Description: PHOSPHOGLYCERATE KINASE, CHLOROPLAST PRECURSOR
  misc_feature (1)..(83): Homolog of NCBI NO: 15230595 NR Description: phosphoglycerate kinase, putative; protein id: supported by cDNA: 21955., supported by cDNA: gi_13430643, by cDNA: gi_15010643, supported by cDNA: gi_16226507,
  misc_feature (1)..(78): Homolog of NCBI NO: 15219412 NR Description: phosphoglycerate kinase, putative; protein id: supported by cDNA: 113494., supported by cDNA: gi_13194781, by cDNA: gi_17065573, supported by cDNA: gi_7839392 [Arabidopsis
MGVFEYDKFAIGTEAVAKKLAELSRKGVTTIIGGGDSVAAVEKVGVADVMSHISTGGGASLELLEGKELPGVTALDEAATVTV

SEQ ID NO: 14585 - DNA, 581 bp, Zea mays subsp. mays
  misc_feature (1)..(581): Ceres Seq. ID no. 13572718
  misc_feature: MA Experiment ID: 108528 Result: Down-regulated in Transcription
  misc_feature: MA Experiment 108528 PARAMETER Experiment Name: Zm_Imbibed_Seeds_P Parameter: Age (day) Value: 5 vs. 2
  misc_feature: MA Experiment 108528 PARAMETER Experiment Name: Zm_Imbibed_Seeds_P Parameter: Organism Value: Zea mays
  misc_feature: MA Experiment 108528 PARAMETER Experiment Name: Zm_Imbibed_Seeds_P Parameter: Plant Line Value: 35A19
  misc_feature: MA Experiment 108528 PARAMETER Experiment Name: Zm_Imbibed_Seeds_P Parameter: Tissue Value: Aerial vs. Embryo
  misc_feature: MA Experiment ID: 108530 Result: Down-regulated in Transcription
  misc_feature: MA Experiment 108530 PARAMETER Experiment Name: Zm_Imbibed_Seeds_P Parameter: Age (day) Value: 6 vs. 2
  misc_feature: MA Experiment 108530 PARAMETER Experiment Name: Zm_Imbibed_Seeds_P Parameter: Organism Value: Zea mays
  misc_feature: MA Experiment 108530 PARAMETER Experiment Name: Zm_Imbibed_Seeds_P Parameter: Plant Line Value: 35A19
  misc_feature: MA Experiment 108530 PARAMETER Experiment Name: Zm_Imbibed_Seeds_P Parameter: Tissue Value: Aerial vs. Embryo
  misc_feature: MA Experiment ID: 108535 Result: Up-regulated in Transcription
  misc_feature: MA Experiment 108535 PARAMETER Experiment Name: Zm_Meristem_P Parameter: Age (day) Value: 8
  misc_feature: MA Experiment 108535 PARAMETER Experiment Name: Zm_Meristem_P Parameter: Organism Value: Zea mays
  misc_feature: MA Experiment 108535 PARAMETER Experiment Name: Zm_Meristem_P Parameter: Plant Line Value: 35A19
  misc_feature: MA Experiment 108535 PARAMETER Experiment Name: Zm_Meristem_P Parameter: Tissue Value: Root Meristem vs. Above Root Meristem
gaatcaagaggctgggcttgtgccaagcttgaatcctcttgtgaaggagtttctcaatgctgctgatgacaagcggaaggaagtcctctctaaaatagaagaggatgttgctaagctcagcggttctgcagccaagcatggaaagatatatgtgacagctgcaaagaagatcatagacaagggctctgactacactaagaaggagactgagaggcttcaccgcatgctggagaagtcaatcagtccttccaaagctgatgaattcatcgttaagaagaacattctttcgatattctcttcgtgaaggtgatgatccacagccacggcctgccagtgacttgaactgatagcgaaccaccactttacggaaaacagaacaaatcggatgatgtgagagaaaggtggtagtgaagtccagtagtggcagagctacttcgtgcacgtagatctcttttgcattttctggttccagggattgacttcgtactcacagtttacttcacacagaaggtttatgtagccatcctgtgataacatctactttctttttgatccaataaattggttattcagcttccgtc

SEQ ID NO: 14586 - protein, 100 aa, Zea mays subsp. mays
  peptide (1)..(100): Ceres Seq. ID no. 13572719
  misc_feature (3)..(100): Homolog of NCBI NO: 34897646 NR Description: putative disulfide-isomerase precursor [Oryza
  misc_feature (3)..(100): Homolog of NCBI NO: 34894982 NR Description: putative protein disulfide isomerase [Oryza
  misc_feature (3)..(100): Homolog of NCBI NO: 10180029 NR Description: putative protein disulfide-isomerase [Prunus
  misc_feature (3)..(99): Homolog of NCBI NO: 729442 NR Description: PROBABLE PROTEIN DISULFIDE ISOMERASE P5 PRECURSOR
  misc_feature (4)..(99): Homolog of NCBI NO: 7489183 NR Description: probable protein disulfide-isomerase (EC 5.3.4.1)
  misc_feature (3)..(98): Homolog of NCBI NO: 15226610 NR Description: protein disulfide isomerase family [Arabidopsis >gi|11132051|sp|O22263|PDA6_ARATH Probable protein disulfide A6 precursor (P5) >gi|7488158|pir||T00437 probable thaliana
  misc_feature (4)..(100): Homolog of NCBI NO: 28829383 NR Description: similar to Dictyostelium discoideum (Slime mold).
  misc_feature (7)..(100): Homolog of NCBI NO: 27803657 NR Description: protein disulfide isomerase-like protein
  misc_feature (4)..(100): Homolog of NCBI NO: 2627440 NR Description: protein disulfide isomerase; PDI; P5-like
  misc_feature (58)..(99): Homolog of NCBI NO: 4650854 NR Description: disulfide-isomerase precursor [Lithospermum
NQEAGLVPSLNPLVKEFLNAADDKRKEVLSKIEEDVAKLSGSAAKHGKIYVTAAKKIIDKGSDYTKKETERLHRMLEKSISPSKADEFIVKKNILSIFSS

SEQ ID NO: 14587 - DNA, 1329 bp, Zea mays subsp. mays; identical to SEQ ID NO: 14287
  misc_feature (1)..(1329): Ceres Seq. ID no. 13503166
  misc_feature: MA Experiment ID: 108687 Result: Down-regulated in Transcription
  misc_feature: MA Experiment 108687 PARAMETER Experiment Name: Zm_Embryos-Flowers__P Parameter: Tissue Value: Embryo vs. Aerial+

SEQ ID NO: 14588 - protein, 245 aa, Zea mays subsp. mays; identical to SEQ ID NO: 14288
  peptide (1)..(245): Ceres Seq. ID no. 13503167
  misc_feature (75)..(174): Pfam Name: K-box region Pfam Description: K-box region
  misc_feature (75)..(174): Pfam Name: K-box region Pfam Description: K-box region
  misc_feature (1)..(245): Homolog of NCBI NO: 29372764 NR Description: m4 [Zea mays]
  misc_feature (1)..(244): Homolog of NCBI NO: 29372748 NR Description: putative MADS-domain transcription factor [Zea
  misc_feature (1)..(244): Homolog of NCBI NO: 21070923 NR Description: AP1-like MADS-box protein [Oryza sativa (japonica
  misc_feature (1)..(244): Homolog of NCBI NO: 6606070 NR Description: MADS14 protein [Oryza sativa]
  misc_feature (1)..(244): Homolog of NCBI NO: 12019658 NR Description: FDRMADS6 [Oryza sativa]
  misc_feature (1)..(244): Homolog of NCBI NO: 29372748 NR Description: putative MADS-domain transcription factor [Zea
  misc_feature (1)..(244): Homolog of NCBI NO: 6606070 NR Description: MADS14 protein [Oryza sativa]
  misc_feature (1)..(244): Homolog of NCBI NO: 28630953 NR Description: MADS1 [Lolium perenne]
  misc_feature (1)..(244): Homolog of NCBI NO: 30721847 NR Description: MADS-box protein TaVRT-1 [Triticum aestivum]
  misc_feature (1)..(244): Homolog of NCBI NO: 4204232 NR Description: MADS-box protein 1 [Lolium temulentum]
  misc_feature (1)..(244): Homolog of NCBI NO: 30090030 NR Description: MADS box transcription factor AP1 [Triticum
  misc_feature (1)..(244): Homolog of NCBI NO: 7592642 NR Description: AP1-like MADS box protein [Oryza sativa]
  misc_feature (1)..(244): Homolog of NCBI NO: 12019658 NR Description: FDRMADS6 [Oryza sativa]
  misc_feature (1)..(244): Homolog of NCBI NO: 21070923 NR Description: AP1-like MADS-box protein [Oryza sativa (japonica
  misc_feature (1)..(245): Homolog of NCBI NO: 29372764 NR Description: m4 [Zea mays]
  misc_feature (1)..(244): Homolog of NCBI NO: 7592642 NR Description: AP1-like MADS box protein [Oryza sativa]
  misc_feature (1)..(244): Homolog of NCBI NO: 30090030 NR Description: MADS box transcription factor AP1 [Triticum
  misc_feature (1)..(244): Homolog of NCBI NO: 4204232 NR Description: MADS-box protein 1 [Lolium temulentum]
  misc_feature (1)..(244): Homolog of NCBI NO: 30721847 NR Description: MADS-box protein TaVRT-1 [Triticum aestivum]
  misc_feature (1)..(244): Homolog of NCBI NO: 28630953 NR Description: MADS1 [Lolium perenne]

SEQ ID NO: 14589 - protein, 183 aa, Zea mays subsp. mays; identical to SEQ ID NO: 14289
  peptide (1)..(183): Ceres Seq. ID no. 13503168
  misc_feature (13)..(112): Pfam Name: K-box region Pfam Description: K-box region
  misc_feature (13)..(112): Pfam Name: K-box region Pfam Description: K-box region
  misc_feature (1)..(183): Homolog of NCBI NO: 29372764 NR Description: m4 [Zea mays]
  misc_feature (1)..(182): Homolog of NCBI NO: 29372748 NR Description: putative MADS-domain transcription factor [Zea
  misc_feature (1)..(182): Homolog of NCBI NO: 21070923 NR Description: AP1-like MADS-box protein [Oryza sativa (japonica
  misc_feature (1)..(182): Homolog of NCBI NO: 6606070 NR Description: MADS14 protein [Oryza sativa]
  misc_feature (1)..(182): Homolog of NCBI NO: 12019658 NR Description: FDRMADS6 [Oryza sativa]
  misc_feature (1)..(182): Homolog of NCBI NO: 29372748 NR Description: putative MADS-domain transcription factor [Zea
  misc_feature (1)..(182): Homolog of NCBI NO: 6606070 NR Description: MADS14 protein [Oryza sativa]
  misc_feature (1)..(182): Homolog of NCBI NO: 28630953 NR Description: MADS1 [Lolium perenne]
  misc_feature (1)..(182): Homolog of NCBI NO: 30721847 NR Description: MADS-box protein TaVRT-1 [Triticum aestivum]
  misc_feature (1)..(182): Homolog of NCBI NO: 4204232 NR Description: MADS-box protein 1 [Lolium temulentum]
  misc_feature (1)..(182): Homolog of NCBI NO: 30090030 NR Description: MADS box transcription factor AP1 [Triticum
  misc_feature (1)..(182): Homolog of NCBI NO: 7592642 NR Description: AP1-like MADS box protein [Oryza sativa]
  misc_feature (1)..(182): Homolog of NCBI NO: 12019658 NR Description: FDRMADS6 [Oryza sativa]
  misc_feature (1)..(182): Homolog of NCBI NO: 21070923 NR Description: AP1-like MADS-box protein [Oryza sativa (japonica
  misc_feature (1)..(183): Homolog of NCBI NO: 29372764 NR Description: m4 [Zea mays]
  misc_feature (1)..(182): Homolog of NCBI NO: 7592642 NR Description: AP1-like MADS box protein [Oryza sativa]
  misc_feature (1)..(182): Homolog of NCBI NO: 30090030 NR Description: MADS box transcription factor AP1 [Triticum
  misc_feature (1)..(182): Homolog of NCBI NO: 4204232 NR Description: MADS-box protein 1 [Lolium temulentum]
  misc_feature (1)..(182): Homolog of NCBI NO: 30721847 NR Description: MADS-box protein TaVRT-1 [Triticum aestivum]
  misc_feature (1)..(182): Homolog of NCBI NO: 28630953 NR Description: MADS1 [Lolium perenne]

SEQ ID NO: 14590 - protein, 133 aa, Zea mays subsp. mays; identical to SEQ ID NO: 14290
  peptide (1)..(133): Ceres Seq. ID no. 13503169
  misc_feature (1)..(62): Pfam Name: K-box region Pfam Description: K-box region
  misc_feature (1)..(62): Pfam Name: K-box region Pfam Description: K-box region
  misc_feature (1)..(133): Homolog of NCBI NO: 29372764 NR Description: m4 [Zea mays]
  misc_feature (1)..(132): Homolog of NCBI NO: 29372748 NR Description: putative MADS-domain transcription factor [Zea
  misc_feature (1)..(132): Homolog of NCBI NO: 21070923 NR Description: AP1-like MADS-box protein [Oryza sativa (japonica
  misc_feature (1)..(132): Homolog of NCBI NO: 6606070 NR Description: MADS14 protein [Oryza sativa]
  misc_feature (1)..(132): Homolog of NCBI NO: 12019658 NR Description: FDRMADS6 [Oryza sativa]
  misc_feature (1)..(132): Homolog of NCBI NO: 29372748 NR Description: putative MADS-domain transcription factor [Zea
  misc_feature (1)..(132): Homolog of NCBI NO: 6606070 NR Description: MADS14 protein [Oryza sativa]
  misc_feature (1)..(132): Homolog of NCBI NO: 28630953 NR Description: MADS1 [Lolium perenne]
  misc_feature (1)..(132): Homolog of NCBI NO: 30721847 NR Description: MADS-box protein TaVRT-1 [Triticum aestivum]
  misc_feature (1)..(132): Homolog of NCBI NO: 4204232 NR Description: MADS-box protein 1 [Lolium temulentum]
  misc_feature (1)..(132): Homolog of NCBI NO: 30090030 NR Description: MADS box transcription factor AP1 [Triticum
  misc_feature (1)..(132): Homolog of NCBI NO: 7592642 NR Description: AP1-like MADS box protein [Oryza sativa]
  misc_feature (1)..(132): Homolog of NCBI NO: 12019658 NR Description: FDRMADS6 [Oryza sativa]
  misc_feature (1)..(132): Homolog of NCBI NO: 21070923 NR Description: AP1-like MADS-box protein [Oryza sativa (japonica
  misc_feature (1)..(133): Homolog of NCBI NO: 29372764 NR Description: m4 [Zea mays]
  misc_feature (1)..(132): Homolog of NCBI NO: 7592642 NR Description: AP1-like MADS box protein [Oryza sativa]
  misc_feature (1)..(132): Homolog of NCBI NO: 30090030 NR Description: MADS box transcription factor AP1 [Triticum
  misc_feature (1)..(132): Homolog of NCBI NO: 4204232 NR Description: MADS-box protein 1 [Lolium temulentum]
  misc_feature (1)..(132): Homolog of NCBI NO: 30721847 NR Description: MADS-box protein TaVRT-1 [Triticum aestivum]
  misc_feature (1)..(132): Homolog of NCBI NO: 28630953 NR Description: MADS1 [Lolium perenne]

SEQ ID NO: 14591 - DNA, 531 bp, Zea mays subsp. mays
  misc_feature (1)..(531): Ceres Seq. ID no. 13572745
  misc_feature: MA Experiment ID: 20001610 Result: Down-regulated in Transcription
  misc_feature: MA Experiment 20001610 PARAMETER Experiment Name: Zm_50ppm_KNO3_L-to-H_P Parameter: Age (day) Value: 19
  misc_feature: MA Experiment 20001610 PARAMETER Experiment Name: Zm_50ppm_KNO3_L-to-H_P Parameter: Organism Value: Zea mays
  misc_feature: MA Experiment 20001610 PARAMETER Experiment Name: Zm_50ppm_KNO3_L-to-H_P Parameter: Plant Line Value: 35A19
  misc_feature: MA Experiment 20001610 PARAMETER Experiment Name: Zm_50ppm_KNO3_L-to-H_P Parameter: Timepoint (hr) Value: 2
  misc_feature: MA Experiment 20001610 PARAMETER Experiment Name: Zm_50ppm_KNO3_L-to-H_P Parameter: Tissue Value: Roots
  misc_feature: MA Experiment 20001610 PARAMETER Experiment Name: Zm_50ppm_KNO3_L-to-H_P Parameter: Treatment Value: 50ppm KNO3 vs. 50ppm KCl
aacaggctggcatgggaggatccaaacaacgtgctgcagagctgggatccaaccctcgccaatccctgcacgtggtttcatgttacctgcaacctgaacaactccgtcatccgcgtggatttgggaaaggcaggcatctccggccccctgcttccagatcttggagcacttgagagcctccagtacatggagctgttcggcaacagcctgaacggttcgattccgtcaacgctgggcaacctgactgatctcatcagcttggatctctgggacaacctgcttaccggcccaatcccaactacgcttggttccatcagcacgctgcgatatctgaggktgtacgagaacaacctgacagggcctataccaccatcgtttggcaatctgactagccttctggaactgaagctccacaggaattcgttgagcggttcgattccggcctcccttggcaacatcaaatcgctgcagttcttgaaattgaacgaaaatatgctgaccggcacggttccattggaagtcctctccctt

SEQ ID NO: 14592 - protein, 177 aa, Zea mays subsp. mays
  peptide (1)..(177): Ceres Seq. ID no. 13572746
  misc_feature (107)..(130): Pfam Name: Leucine Rich Repeat Pfam Description: Leucine Rich Repeat
  misc_feature (2)..(171): Homolog of NCBI NO: 7489646 NR Description: leucine-rich repeat protein LRP - sorghum
  misc_feature (2)..(170): Homolog of NCBI NO: 15217584 NR Description: protein kinase -related [Arabidopsis thaliana]
  misc_feature (7)..(170): Homolog of NCBI NO: 15218543 NR Description: somatic embryogenesis receptor-related kinase
  misc_feature (2)..(170): Homolog of NCBI NO: 15081616 NR Description: At1g71830/F14O23_24 [Arabidopsis thaliana]
  misc_feature (7)..(170): Homolog of NCBI NO: 14573457 NR Description: somatic embryogenesis receptor-like kinase 2
  misc_feature (6)..(170): Homolog of NCBI NO: 24935324 NR Description: somatic embryogenesis receptor kinase 1 [Medicago >gi|24935326|gb|AAN64294.1| somatic embryogenesis receptor kinase
  misc_feature (7)..(149): Homolog of NCBI NO: 40253600 NR Description: putative somatic embryogenesis receptor kinase 1
  misc_feature (7)..(151): Homolog of NCBI NO: 38679443 NR Description: benzothiadiazole-induced somatic embryogenesis
  misc_feature (2)..(149): Homolog of NCBI NO: 13897308 NR Description: SERK1 protein [Zea mays]
  misc_feature (2)..(149): Homolog of NCBI NO: 13897310 NR Description: SERK2 protein [Zea mays]
  misc_feature (113)..(113): Xaa is any aa, unknown or other
NRLAWEDPNNVLQSWDPTLANPCTWFHVTCNLNNSVIRVDLGKAGISGPLLPDLGALESLQYMELFGNSLNGSIPSTLGNLTDLISLDLWDNLLTGPIPTTLGSISTLRYLRXYENNLTGPIPPSFGNLTSLLELKLHRNSLSGSIPASLGNIKSLQFLKLNENMLTGTVPLEVLSL

SEQ ID NO: 14593 - protein, 115 aa, Zea mays subsp. mays
  peptide (1)..(115): Ceres Seq. ID no. 13572747
  misc_feature (45)..(68): Pfam Name: Leucine Rich Repeat Pfam Description: Leucine Rich Repeat
  misc_feature (1)..(109): Homolog of NCBI NO: 7489646 NR Description: leucine-rich repeat protein LRP - sorghum
  misc_feature (1)..(108): Homolog of NCBI NO: 15217584 NR Description: protein kinase -related [Arabidopsis thaliana]
  misc_feature (1)..(108): Homolog of NCBI NO: 15218543 NR Description: somatic embryogenesis receptor-related kinase
  misc_feature (1)..(108): Homolog of NCBI NO: 15081616 NR Description: At1g71830/F14O23_24 [Arabidopsis thaliana]
  misc_feature (1)..(108): Homolog of NCBI NO: 14573457 NR Description: somatic embryogenesis receptor-like kinase 2
  misc_feature (1)..(108): Homolog of NCBI NO: 24935324 NR Description: somatic embryogenesis receptor kinase 1 [Medicago >gi|24935326|gb|AAN64294.1| somatic embryogenesis receptor kinase
  misc_feature (1)..(87): Homolog of NCBI NO: 40253600 NR Description: putative somatic embryogenesis receptor kinase 1
  misc_feature (1)..(89): Homolog of NCBI NO: 38679443 NR Description: benzothiadiazole-induced somatic embryogenesis
  misc_feature (1)..(87): Homolog of NCBI NO: 13897308 NR Description: SERK1 protein [Zea mays]
  misc_feature (1)..(87): Homolog of NCBI NO: 13897310 NR Description: SERK2 protein [Zea mays]
  misc_feature (51)..(51): Xaa is any aa, unknown or other
MELFGNSLNGSIPSTLGNLTDLISLDLWDNLLTGPIPTTLGSISTLRYLRXYENNLTGPIPPSFGNLTSLLELKLHRNSLSGSIPASLGNIKSLQFLKLNENMLTGTVPLEVLSL

SEQ ID NO: 14594 - DNA, 540 bp, Zea mays subsp. mays
  misc_feature (1)..(540): Ceres Seq. ID no. 3625528
  misc_feature: MA Experiment ID: 108528 Result: Down-regulated in Transcription
  misc_feature: MA Experiment 108528 PARAMETER Experiment Name: Zm_Imbibed_Seeds_P Parameter: Age (day) Value: 5 vs. 2
  misc_feature: MA Experiment 108528 PARAMETER Experiment Name: Zm_Imbibed_Seeds_P Parameter: Organism Value: Zea mays
  misc_feature: MA Experiment 108528 PARAMETER Experiment Name: Zm_Imbibed_Seeds_P Parameter: Plant Line Value: 35A19
  misc_feature: MA Experiment 108528 PARAMETER Experiment Name: Zm_Imbibed_Seeds_P Parameter: Tissue Value: Aerial vs. Embryo
  misc_feature: MA Experiment ID: 108529 Result: Down-regulated in Transcription
  misc_feature: MA Experiment 108529 PARAMETER Experiment Name: Zm_Imbibed_Seeds_P Parameter: Age (day) Value: 5 vs. 2
  misc_feature: MA Experiment 108529 PARAMETER Experiment Name: Zm_Imbibed_Seeds_P Parameter: Organism Value: Zea mays
  misc_feature: MA Experiment 108529 PARAMETER Experiment Name: Zm_Imbibed_Seeds_P Parameter: Plant Line Value: 35A19
  misc_feature: MA Experiment 108529 PARAMETER Experiment Name: Zm_Imbibed_Seeds_P Parameter: Tissue Value: Roots vs. Embryo
  misc_feature: MA Experiment ID: 108530 Result: Down-regulated in Transcription
  misc_feature: MA Experiment 108530 PARAMETER Experiment Name: Zm_Imbibed_Seeds_P Parameter: Age (day) Value: 6 vs. 2
  misc_feature: MA Experiment 108530 PARAMETER Experiment Name: Zm_Imbibed_Seeds_P Parameter: Organism Value: Zea mays
  misc_feature: MA Experiment 108530 PARAMETER Experiment Name: Zm_Imbibed_Seeds_P Parameter: Plant Line Value: 35A19
  misc_feature: MA Experiment 108530 PARAMETER Experiment Name: Zm_Imbibed_Seeds_P Parameter: Tissue Value: Aerial vs. Embryo
  misc_feature: MA Experiment ID: 108535 Result: Up-regulated in Transcription
  misc_feature: MA Experiment 108535 PARAMETER Experiment Name: Zm_Meristem_P Parameter: Age (day) Value: 8
  misc_feature: MA Experiment 108535 PARAMETER Experiment Name: Zm_Meristem_P Parameter: Organism Value: Zea mays
  misc_feature: MA Experiment 108535 PARAMETER Experiment Name: Zm_Meristem_P Parameter: Plant Line Value: 35A19
  misc_feature: MA Experiment 108535 PARAMETER Experiment Name: Zm_Meristem_P Parameter: Tissue Value: Root Meristem vs. Above Root Meristem
  misc_feature: MA Experiment ID: 108544 Result: Down-regulated in Transcription
  misc_feature: MA Experiment ID: 20000480 Result: Up-regulated in Transcription
  misc_feature: MA Experiment 20000480 PARAMETER Experiment Name: Zm_Drought_P Parameter: Age (day) Value: 11
  misc_feature: MA Experiment 20000480 PARAMETER Experiment Name: Zm_Drought_P Parameter: Organism Value: Zea mays
  misc_feature: MA Experiment 20000480 PARAMETER Experiment Name: Zm_Drought_P Parameter: Plant Line Value: 35A19
  misc_feature: MA Experiment 20000480 PARAMETER Experiment Name: Zm_Drought_P Parameter: Timepoint (hr) Value: 72
  misc_feature: MA Experiment 20000480 PARAMETER Experiment Name: Zm_Drought_P Parameter: Tissue Value: Aerial
  misc_feature: MA Experiment 20000480 PARAMETER Experiment Name: Zm_Drought_P Parameter: Treatment Value: Drought vs. No Drought
  misc_feature: MA Experiment ID: 20000488 Result: Up-regulated in Transcription
  misc_feature: MA Experiment 20000488 PARAMETER Experiment Name: Zm_50mM_NH4NO3_L_to_H_P Parameter: Organism Value: Zea mays
  misc_feature: MA Experiment 20000488 PARAMETER Experiment Name: Zm_50mM_NH4NO3_L_to_H_P Parameter: Timepoint (hr) Value: 8
  misc_feature: MA Experiment 20000488 PARAMETER Experiment Name: Zm_50mM_NH4NO3_L_to_H_P Parameter: Tissue Value: Leaves
  misc_feature: MA Experiment 20000488 PARAMETER Experiment Name: Zm_50mM_NH4NO3_L_to_H_P Parameter: Treatment Value: 50mM NH4NO3 vs. 100mM Mannitol
  misc_feature: MA Experiment ID: 20000535 Result: Up-regulated in Transcription
  misc_feature: MA Experiment 20000535 PARAMETER Experiment Name: Zm_Hybrid_Seed_Dev_P Parameter: DAP Value: 30 vs. 12
  misc_feature: MA Experiment 20000535 PARAMETER Experiment Name: Zm_Hybrid_Seed_Dev_P Parameter: Organism Value: Zea mays
  misc_feature: MA Experiment 20000535 PARAMETER Experiment Name: Zm_Hybrid_Seed_Dev_P Parameter: Plant Line Value: 35A19
  misc_feature: MA Experiment 20000535 PARAMETER Experiment Name: Zm_Hybrid_Seed_Dev_P Parameter: Tissue Value: Embryo vs. Unfert Floret
  misc_feature: MA Experiment ID: 20000626 Result: Up-regulated in Transcription
  misc_feature: MA Experiment 20000626 PARAMETER Experiment Name: Zm_Herbicide-Treatments_P Parameter: Timepoint (hr) Value: 12
  misc_feature: MA Experiment 20000626 PARAMETER Experiment Name: Zm_Herbicide-Treatments_P Parameter: Tissue Value: Aerial
  misc_feature: MA Experiment 20000626 PARAMETER Experiment Name: Zm_Herbicide-Treatments_P Parameter: Treatment Value: Roundup vs. No Treatment
attgagtttgagaaccctgctgtggcaaaggtcgtagcagatgagatgaataactatctcttgtttgagcgcaccttgcaagttgcacttgttgagccagagaaagttcatcctaaattatggaaaggggtgcgaaggggatttatacctgttgatcgagtagcaattgaacggaagagacacaacaaggataagactgtagcagagcacaaaaagatggttgaaggaattgtaaagcgggatggaaagcgtcgcaaaagaatcaaggcagctggtattgactatgagtgtccagctcttatagggagcattcaaccatcagcgaaaaagatcaagttcgatgaggcatagtattttattctaatgggctgttggatccttagtagacgaggcggtggaatggttgagcaatatattcaccttttgaggagacggcagacaactatgtatttcacttttgaatttctctatgttttatgaatgacaccgacacangatgttacaacttaagtatgaaaatgcaatgggcgatgtgttctc

SEQ ID NO: 14595 - protein, 116 aa, Zea mays subsp. mays
  peptide (1)..(116): Ceres Seq. ID no. 3625529
  misc_feature (1)..(115): Homolog of NCBI NO: 18652180 NR Description: RNA binding protein [Elaeis oleifera]
  misc_feature (1)..(115): Homolog of NCBI NO: 15238220 NR Description: RRM-containing protein; protein id: At5g04600.1, by cDNA: 3774., supported by cDNA: gi_14190442, supported by gi_15810056, supported by cDNA: gi_17380695 [Arabidopsis
  misc_feature (1)..(98): Homolog of NCBI NO: 32450283 NR Description: Unknown (protein for IMAGE:6878823) [Xenopus
  misc_feature (1)..(109): Homolog of NCBI NO: 27545352 NR Description: mki67 (FHA domain) interacting nucleolar
  misc_feature (1)..(101): Homolog of NCBI NO: 21314753 NR Description: MKI67 (FHA domain) interacting nucleolar nucleolar phosphoprotein Nopp34; nucleolar protein interacting
  misc_feature (1)..(101): Homolog of NCBI NO: 15214657 NR Description: Similar to nucleolar protein interacting with the
  misc_feature (1)..(101): Homolog of NCBI NO: 13699902 NR Description: nucleolar phosphoprotein Nopp34 [Homo sapiens]
  misc_feature (1)..(116): Homolog of NCBI NO: 20302745 NR Description: unknown [Branchiostoma floridae]
  misc_feature (1)..(100): Homolog of NCBI NO: 40741317 NR Description: hypothetical protein AN4346.2 [Aspergillus
  misc_feature (1)..(101): Homolog of NCBI NO: 13774097 NR Description: RNA binding protein [Mus musculus]
IEFENPAVAKVVADEMNNYLLFERTLQVALVEPEKVHPKLWKGVRRGFIPVDRVAIERKRHNKDKTVAEHKKMVEGIVKRDGKRRKRIKAAGIDYECPALIGSIQPSAKKIKFDEA

SEQ ID NO: 14596 - protein, 101 aa, Zea mays subsp. mays
  peptide (1)..(101): Ceres Seq. ID no. 3625530
  misc_feature (1)..(100): Homolog of NCBI NO: 18652180 NR Description: RNA binding protein [Elaeis oleifera]
  misc_feature (1)..(100): Homolog of NCBI NO: 15238220 NR Description: RRM-containing protein; protein id: At5g04600.1, by cDNA: 3774., supported by cDNA: gi_14190442, supported by gi_15810056, supported by cDNA: gi_17380695 [Arabidopsis
  misc_feature (1)..(83): Homolog of NCBI NO: 32450283 NR Description: Unknown (protein for IMAGE:6878823) [Xenopus
  misc_feature (1)..(94): Homolog of NCBI NO: 27545352 NR Description: mki67 (FHA domain) interacting nucleolar
  misc_feature (1)..(86): Homolog of NCBI NO: 21314753 NR Description: MKI67 (FHA domain) interacting nucleolar nucleolar phosphoprotein Nopp34; nucleolar protein interacting
  misc_feature (1)..(86): Homolog of NCBI NO: 15214657 NR Description: Similar to nucleolar protein interacting with the
  misc_feature (1)..(86): Homolog of NCBI NO: 13699902 NR Description: nucleolar phosphoprotein Nopp34 [Homo sapiens]
  misc_feature (1)..(101): Homolog of NCBI NO: 20302745 NR Description: unknown [Branchiostoma floridae]
  misc_feature (1)..(85): Homolog of NCBI NO: 40741317 NR Description: hypothetical protein AN4346.2 [Aspergillus
  misc_feature (1)..(86): Homolog of NCBI NO: 13774097 NR Description: RNA binding protein [Mus musculus]
MNNYLLFERTLQVALVEPEKVHPKLWKGVRRGFIPVDRVAIERKRHNKDKTVAEHKKMVEGIVKRDGKRRKRIKAAGIDYECPALIGSIQPSAKKIKFDEA

SEQ ID NO: 14597 - DNA, 418 bp, Zea mays subsp. mays
  misc_feature (1)..(418): Ceres Seq. ID no. 3625581
  misc_feature: MA Experiment ID: 108543 Result: Up-regulated in Transcription
  misc_feature: MA Experiment ID: 108597 Result: Up-regulated in Transcription
  misc_feature: MA Experiment 108597 PARAMETER Experiment Name: Zm_100uM_ABA_P Parameter: Age (day) Value: 9
  misc_feature: MA Experiment 108597 PARAMETER Experiment Name: Zm_100uM_ABA_P Parameter: Organism Value: Zea mays
  misc_feature: MA Experiment 108597 PARAMETER Experiment Name: Zm_100uM_ABA_P Parameter: Plant Line Value: 35A19
  misc_feature: MA Experiment 108597 PARAMETER Experiment Name: Zm_100uM_ABA_P Parameter: Timepoint (hr) Value: 24
  misc_feature: MA Experiment 108597 PARAMETER Experiment Name: Zm_100uM_ABA_P Parameter: Tissue Value: Aerial
  misc_feature: MA Experiment 108597 PARAMETER Experiment Name: Zm_100uM_ABA_P Parameter: Treatment Value: 100uM ABA vs. No Treatment
  misc_feature: MA Experiment ID: 108689 Result: Up-regulated in Transcription
  misc_feature: MA Experiment 108689 PARAMETER Experiment Name: Zm_Drought_Roots_P Parameter: Age (day) Value: 9
  misc_feature: MA Experiment 108689 PARAMETER Experiment Name: Zm_Drought_Roots_P Parameter: Organism Value: Zea mays
  misc_feature: MA Experiment 108689 PARAMETER Experiment Name: Zm_Drought_Roots_P Parameter: Plant Line Value: 35A19
  misc_feature: MA Experiment 108689 PARAMETER Experiment Name: Zm_Drought_Roots_P Parameter: Timepoint (hr) Value: 24
  misc_feature: MA Experiment 108689 PARAMETER Experiment Name: Zm_Drought_Roots_P Parameter: Tissue Value: Roots
  misc_feature: MA Experiment 108689 PARAMETER Experiment Name: Zm_Drought_Roots_P Parameter: Treatment Value: Drought vs. No Drought
  misc_feature: MA Experiment ID: 20000535 Result: Up-regulated in Transcription
  misc_feature: MA Experiment 20000535 PARAMETER Experiment Name: Zm_Hybrid_Seed_Dev_P Parameter: DAP Value: 30 vs. 12
  misc_feature: MA Experiment 20000535 PARAMETER Experiment Name: Zm_Hybrid_Seed_Dev_P Parameter: Organism Value: Zea mays
  misc_feature: MA Experiment 20000535 PARAMETER Experiment Name: Zm_Hybrid_Seed_Dev_P Parameter: Plant Line Value: 35A19
  misc_feature: MA Experiment 20000535 PARAMETER Experiment Name: Zm_Hybrid_Seed_Dev_P Parameter: Tissue Value: Embryo vs. Unfert Floret
gtgtywkctgyagactttggattagtgaattatttattgcamggctattackaggkcwagagggcttctgaagctgaattgttgtcaaagtttacatatggaggagtgatactgargcctggttttattcatggaactcgtcgagtgggcagtgtaaagatacctcttggtcttgtcggttctcctatgcagatggtgctccaaaatataaaacctttgactaggttaccacttatcgggccgctattgactcctcccgtcagtgctgcctccgtggggaaggtcgctgtgagagcagcgacggatccggtgtttcctcctggcatcgwtgatgtctacgggatcatgcgttacagcgagcaaaactaagctgcctcattcaccgggcagtatatacatgccgstgkacttttgttac

SEQ ID NO: 14598 - protein, 122 aa, Zea mays subsp. mays
  peptide (1)..(122): Ceres Seq. ID no. 3625582
  misc_feature (1)..(121): Homolog of NCBI NO: 10129651 NR Description: putative protein [Arabidopsis thaliana]
  misc_feature (1)..(121): Homolog of NCBI NO: 18416362 NR Description: putative protein; protein id: At5g10730.1, by cDNA: 10217., supported by cDNA: gi_13926272, supported by gi_16323237, supported by cDNA: gi_19698948 [Arabidopsis
  misc_feature (1)..(118): Homolog of NCBI NO: 11346175 NR Description: hypothetical protein F1N13_50 - Arabidopsis >gi|9755637|emb|CAC01790.1| putative protein [Arabidopsis
  misc_feature (1)..(118): Homolog of NCBI NO: 21592373 NR Description: unknown [Arabidopsis thaliana]
  misc_feature (1)..(118): Homolog of NCBI NO: 18417824 NR Description: putative protein; protein id: At5g15910.1, by cDNA: 22994., supported by cDNA: gi_15292960, supported by gi_21280840 [Arabidopsis thaliana] >gi|15292961|gb|AAK93591.1|
  misc_feature (1)..(105): Homolog of NCBI NO: 38346147 NR Description: OSJNBb0118P14.7 [Oryza sativa (japonica
  misc_feature (1)..(105): Homolog of NCBI NO: 18398333 NR Description: expressed protein; protein id: At1g32220.1, by cDNA: 3464. [Arabidopsis thaliana] >gi|25403150|pir||G86446
  misc_feature (2)..(2): Xaa is any aa, unknown or other
  misc_feature (3)..(3): Xaa is any aa, unknown or other
  misc_feature (4)..(4): Xaa is any aa, unknown or other
  misc_feature (14)..(14): Xaa is any aa, unknown or other
  misc_feature (18)..(18): Xaa is any aa, unknown or other
  misc_feature (19)..(19): Xaa is any aa, unknown or other
  misc_feature (20)..(20): Xaa is any aa, unknown or other
  misc_feature (39)..(39): Xaa is any aa, unknown or other
  misc_feature (110)..(110): Xaa is any aa, unknown or other
VXXXDFGLVNYLLXGYYXXXRASEAELLSKFTYGGVILXPGFIHGTRRVGSVKIPLGLVGSPMQMVLQNIKPLTRLPLIGPLLTPPVSAASVGKVAVRAATDPVFPPGIXDVYGIMRYSEQN

SEQ ID NO: 14599 - protein, 60 aa, Zea mays subsp. mays
  peptide (1)..(60): Ceres Seq. ID no. 3625583
  misc_feature (1)..(59): Homolog of NCBI NO: 10129651 NR Description: putative protein [Arabidopsis thaliana]
  misc_feature (1)..(59): Homolog of NCBI NO: 18416362 NR Description: putative protein; protein id: At5g10730.1, by cDNA: 10217., supported by cDNA: gi_13926272, supported by gi_16323237, supported by cDNA: gi_19698948 [Arabidopsis
  misc_feature (1)..(56): Homolog of NCBI NO: 11346175 NR Description: hypothetical protein F1N13_50 - Arabidopsis >gi|9755637|emb|CAC01790.1| putative protein [Arabidopsis
  misc_feature (1)..(56): Homolog of NCBI NO: 18417824 NR Description: putative protein; protein id: At5g15910.1, by cDNA: 22994., supported by cDNA: gi_15292960, supported by gi_21280840 [Arabidopsis thaliana] >gi|15292961|gb|AAK93591.1|
  misc_feature (1)..(56): Homolog of NCBI NO: 21592373 NR Description: unknown [Arabidopsis thaliana]
  misc_feature (1)..(43): Homolog of NCBI NO: 38346147 NR Description: OSJNBb0118P14.7 [Oryza sativa (japonica
  misc_feature (1)..(43): Homolog of NCBI NO: 18398333 NR Description: expressed protein; protein id: At1g32220.1, by cDNA: 3464. [Arabidopsis thaliana] >gi|25403150|pir||G86446
  misc_feature (48)..(48): Xaa is any aa, unknown or other
MQMVLQNIKPLTRLPLIGPLLTPPVSAASVGKVAVRAATDPVFPPGIXDVYGIMRYSEQN

SEQ ID NO: 14600 - DNA, 3723 bp, Zea mays subsp. mays
  misc_feature (1)..(3723): Ceres Seq. ID no. 13666073
  misc_feature: MA Experiment ID: 108543 Result: Up-regulated in Transcription
  misc_feature: MA Experiment ID: 20000478 Result: Down-regulated in Transcription
  misc_feature: MA Experiment 20000478 PARAMETER Experiment Name: Zm_5mM_SA_P Parameter: Age (day) Value: 11
  misc_feature: MA Experiment 20000478 PARAMETER Experiment Name: Zm_5mM_SA_P Parameter: Organism Value: Zea mays
  misc_feature: MA Experiment 20000478 PARAMETER Experiment Name: Zm_5mM_SA_P Parameter: Plant Line Value: 35A19
  misc_feature: MA Experiment 20000478 PARAMETER Experiment Name: Zm_5mM_SA_P Parameter: Timepoint (hr) Value: 72
  misc_feature: MA Experiment 20000478 PARAMETER Experiment Name: Zm_5mM_SA_P Parameter: Tissue Value: Aerial
  misc_feature: MA Experiment 20000478 PARAMETER Experiment Name: Zm_5mM_SA_P Parameter: Treatment Value: 5mM SA vs. No Treatment
  misc_feature: MA Experiment ID: 20000480 Result: Down-regulated in Transcription
  misc_feature: MA Experiment 20000480 PARAMETER Experiment Name: Zm_Drought_P Parameter: Age (day) Value: 11
  misc_feature: MA Experiment 20000480 PARAMETER Experiment Name: Zm_Drought_P Parameter: Organism Value: Zea mays
  misc_feature: MA Experiment 20000480 PARAMETER Experiment Name: Zm_Drought_P Parameter: Plant Line Value: 35A19
  misc_feature: MA Experiment 20000480 PARAMETER Experiment Name: Zm_Drought_P Parameter: Timepoint (hr) Value: 72
  misc_feature: MA Experiment 20000480 PARAMETER Experiment Name: Zm_Drought_P Parameter: Tissue Value: Aerial
  misc_feature: MA Experiment 20000480 PARAMETER Experiment Name: Zm_Drought_P Parameter: Treatment Value: Drought vs. No Drought
  misc_feature: MA Experiment ID: 20000488 Result: Down-regulated in Transcription
  misc_feature: MA Experiment 20000488 PARAMETER Experiment Name: Zm_50mM_NH4NO3_L_to_H_P Parameter: Organism Value: Zea mays
  misc_feature: MA Experiment 20000488 PARAMETER Experiment Name: Zm_50mM_NH4NO3_L_to_H_P Parameter: Timepoint (hr) Value: 8
  misc_feature: MA Experiment 20000488 PARAMETER Experiment Name: Zm_50mM_NH4NO3_L_to_H_P Parameter: Tissue Value: Leaves
  misc_feature: MA Experiment 20000488 PARAMETER Experiment Name: Zm_50mM_NH4NO3_L_to_H_P Parameter: Treatment Value: 50mM NH4NO3 vs. 100mM Mannitol
  misc_feature: MA Experiment ID: 20000492 Result: Down-regulated in Transcription
  misc_feature: MA Experiment 20000492 PARAMETER Experiment Name: Zm_Hybrid_Seed_Dev_P Parameter: DAP Value: 12
  misc_feature: MA Experiment 20000492 PARAMETER Experiment Name: Zm_Hybrid_Seed_Dev_P Parameter: Organism Value: Zea mays
  misc_feature: MA Experiment 20000492 PARAMETER Experiment Name: Zm_Hybrid_Seed_Dev_P Parameter: Plant Line Value: 35A19
  misc_feature: MA Experiment 20000492 PARAMETER Experiment Name: Zm_Hybrid_Seed_Dev_P Parameter: Tissue Value: Fert Kernel vs. Unfert Floret
  misc_feature: MA Experiment ID: 20000534 Result: Down-regulated in Transcription
  misc_feature: MA Experiment 20000534 PARAMETER Experiment Name: Zm_Hybrid_Pollen_P Parameter: Age (day) Value: 8
  misc_feature: MA Experiment 20000534 PARAMETER Experiment Name: Zm_Hybrid_Pollen_P Parameter: Organism Value: Zea mays
  misc_feature: MA Experiment 20000534 PARAMETER Experiment Name: Zm_Hybrid_Pollen_P Parameter: Plant Line Value: 35A19
  misc_feature: MA Experiment 20000534 PARAMETER Experiment Name: Zm_Hybrid_Pollen_P Parameter: Tissue Value: Pollen vs. Aerial
  misc_feature: MA Experiment ID: 20000535 Result: Down-regulated in Transcription
  misc_feature: MA Experiment 20000535 PARAMETER Experiment Name: Zm_Hybrid_Seed_Dev_P Parameter: DAP Value: 30 vs. 12
  misc_feature: MA Experiment 20000535 PARAMETER Experiment Name: Zm_Hybrid_Seed_Dev_P Parameter: Organism Value: Zea mays
  misc_feature: MA Experiment 20000535 PARAMETER Experiment Name: Zm_Hybrid_Seed_Dev_P Parameter: Plant Line Value: 35A19
  misc_feature: MA Experiment 20000535 PARAMETER Experiment Name: Zm_Hybrid_Seed_Dev_P Parameter: Tissue Value: Embryo vs. Unfert Floret
taggatcaaaaccgtctcgccgctgcaataatcttttgtcaattcttaatccctcgcgtcgacagcgacagcggaaccaactcacgttgccgcggcttcctccatcggtgcggtgccctgtccttttctctcgtccctcctccccccgtatagttaagccccgccccgctactactactactagcagcagcagcgctctcgcagcgggagatgcggtgttgatccgtgccccgctcggatctcgggactggtgccggctctgcccaggccccaggctccaggccagctccctcgacgtttctcggcgagctcgcttgccatggagggcgacgcggacggcgtgaagtcggggaggcgcggtggcggacaggtgtgccagatctgcggcgacggcgtgggcaccacggcggagggggacgtcttcgccgcctgcgacgtctgcgggtttccggtgtgccgcccctgctacgagtacgagcgcaaggacggcacgcaggcgtgcccccagtgcaagaccaagtacaagcgccacaaggggagcccggcgatccgtggggaggaaggagacgacactgatgccgatagcgacttcaattaccttgcatctggcaatgaggaccagaagcagaagattgccgacagaatgcgcagctggcgcatgaacgttgggggcagcggggatgttggtcgccccaagtatgacagtggcgagatcgggcttaccaagtatgacagtggcgagattcctcggggatacatcccatcagtcactaacagccagatctcaggagaaatccctggtgcttcccctgaccatcatatgatgtccccaactgggaacattggcaagcgtgctccatttccctatgtgaaccattcgccaaatccgtcaagggagttctctggtagcattgggaatgttgcctggaaagagagggttgatggctggaaaatgaagcaggacaaggggacgattcccatgacgaatggcacaagcattgctccctctgagggtcggggtgttggtgatattgatgcatcaactgattacaacatggaagatgccttattgaacgacgaaactcgacagcctctatctaggaaagttccacttccttcctccaggataaatccatacaggatggtcattgtgctgcgattgattgttctaagcatcttcttgcactaccgtatcacaaatcctgtgcgcaatgcatacccattatggcttctatctgttatatgtgagatctggtttgctctttcgtggatattggatcagttccctaagtggtttccaatcaaccgggagacgtaccttgataggctggcattaaggtatgaccgggaaggtgagccatctcagttggctgctgttgacattttcgtcagtacagtcgacccaatgaaggagcctcctcttgtcactgccaataccgtgctatccattcttgctgtggattaccctgtggataaggtctcttgctatgtatctgatgatggagctgcgatgctgacatttgatgcactagctgagacttcagagtttgctagaaaatgggtaccatttgttaagaagtacaacattgaacctagagctcctgaatggtacttctcccagaaaattgattacttgaaggacaaagtgcacccttcatttgttaaagaccgccgggccatgaagagagaatatgaagaattcaaagttagggtaaatggccttgttgctaaggcacagaaagttcctgaggaaggatggatcatgcaagatggcacaccatggccaggaaacaataccngggaccatcctggaatgattcaggttttccttggtcacagtggtggccttgatactgagggcaatgagctaccccgtttggtctatgtttctcgtgaaaagcgtcctggattccagcatcacaagaaagctggtgccatgaatgctcttgttcgtgtctcagctgtgcttaccaatggacaatacatgttgaatcttgattgtgatcactacattaacaacagtaaggctctcagggaagctatgtgcttccttatggaccctaacctaggaaggagtgtctgctacgtccagtttccccagagattcgatggcattgacaggaatgatcgatatgccaacaggaacaccgtgtttttcgatattaacttgagaggtcttgatggcatccaaggaccagtttatgtcggaactggctgtgttttcaaccgaacagctctatatggttatgagcccccaattaagcagaagaagggtggtttcttgtcatcactatgtggcggtaggaagaaggcaagcaaatcaaagaagggctcggacaagaagaagtcgcagaagcatgtggacagttctgtgccagtattcaaccttgaagatatagaggagggagttgaaggcgctggatttgacgacgagaaatcacttcttatgtctcaaatgagcctggagaagagatttggccagtccgcagcgtttgttgcctccactctgatggagtatggtggtgttcctcagtccgcaactccggagtctcttctgaaagaagctatccatgttataagctgtggctatgaggacaagactgaatggggaactgagatcgggtggatctacggttctgtgacagaagacattctcaccggattcaagatgcacgcgcgaggctggcggtcgatctactgcatgcccaagcggccagctttcaaggggtctgcccccatcaatctttcggaccgtctgaaccaggtgctccggtgggctcttgggtccgtggagatcctcttcagccggcactgccccctgtggtacggctacggagggcggctcaagttcctggagagattcgcgtacatcaacaccaccatctacccgctcacgtccatcccgcttctcatctactgcatcctgcccgccatctgtctgctcaccggaaagttcatcattccagagatcagcaacttcgccagcatctggttcatctccctcttcatctcgatcttcgccacgggcatcctggagatgaggtggagcggggtgggcatcgacgagtggtggaggaacgagcagttctgggtgatcgggggcatctccgcgcacctcttcgccgtgttccagggcctgctcaaggtgctggccggcatcgacaccaacttcaccgtcacctccaaggcctcggacgaggacggcgacttcgcggagctgtacatgttcaagtggacgacgctcctgatcccgcccaccaccatcctgatcatcaacctggtcggcgtcgtcgccggcatctcctacgccatcaacagcggataccagtcgtggggcccgctcttcggcaagctcttcttcgccttctgggtcatcgtccacctgtacccgttcctcaagggcctcatgggcaggcagaaccgcaccccgaccatcgtcgtcgtctgggccatcctgctggcgtccatcttctccttgctgtgggttcgcatcgaccccttcaccacccgcgtcactggcccggatacccagacgtgtggcatcaactgctagggaagtggaaggtttgtactttgtagaaacggaggaataccacgtgccatctgttgtctgttaagttatatatatataagcagcaagtggcgttatttacagctacgtacagaccagtggatattgtttaccacaaagttttacttgtgttaatatgcattcttttgttg

SEQ ID NO: 14601 - protein, 1077 aa, Zea mays subsp. mays
  peptide (1)..(1077): Ceres Seq. ID no. 13666074
  misc_feature (534)..(640): Pfam Name: Glycosyl transferase Pfam Description: Glycosyl transferase
  misc_feature (517)..(1060): Homolog of NCBI NO: 15217853 NR Description: cellulose synthase family [Arabidopsis thaliana]
  misc_feature (210)..(468): Homolog of NCBI NO: 15217853 NR Description: cellulose synthase family [Arabidopsis thaliana]
  misc_feature (16)..(146): Homolog of NCBI NO: 15217853 NR Description: cellulose synthase family [Arabidopsis thaliana]
  misc_feature (474)..(1060): Homolog of NCBI NO: 15237873 NR Description: cellulose synthase family [Arabidopsis thaliana]
  misc_feature (236)..(468): Homolog of NCBI NO: 15237873 NR Description: cellulose synthase family [Arabidopsis thaliana]
  misc_feature (16)..(69): Homolog of NCBI NO: 15237873 NR Description: cellulose synthase family [Arabidopsis thaliana]
  misc_feature (469)..(1070): Homolog of NCBI NO: 15228448 NR Description: cellulose synthase family [Arabidopsis thaliana] putative cellulose synthase catalytic subunit [Arabidopsis
  misc_feature (224)..(468): Homolog of NCBI NO: 15228448 NR Description: cellulose synthase family [Arabidopsis thaliana] putative cellulose synthase catalytic subunit [Arabidopsis
  misc_feature (487)..(1067): Homolog of NCBI NO: 27372782 NR Description: cellulose synthase-like protein D4 [Populus
  misc_feature (224)..(468): Homolog of NCBI NO: 27372782 NR Description: cellulose synthase-like protein D4 [Populus
  misc_feature (494)..(494): Xaa is any aa, unknown or other
MEGDADGVKSGRRGGGQVCQICGDGVGTTAEGDVFAACDVCGFPVCRPCYEYERKDGTQACPQCKTKYKRHKGSPAIRGEEGDDTDADSDFNYLASGNEDQKQKIADRMRSWRMNVGGSGDVGRPKYDSGEIGLTKYDSGEIPRGYIPSVTNSQISGEIPGASPDHHMMSPTGNIGKRAPFPYVNHSPNPSREFSGSIGNVAWKERVDGWKMKQDKGTIPMTNGTSIAPSEGRGVGDIDASTDYNMEDALLNDETRQPLSRKVPLPSSRINPYRMVIVLRLIVLSIFLHYRITNPVRNAYPLWLLSVICEIWFALSWILDQFPKWFPINRETYLDRLALRYDREGEPSQLAAVDIFVSTVDPMKEPPLVTANTVLSILAVDYPVDKVSCYVSDDGAAMLTFDALAETSEFARKWVPFVKKYNIEPRAPEWYFSQKIDYLKDKVHPSFVKDRRAMKREYEEFKVRVNGLVAKAQKVPEEGWIMQDGTPWPGNNTXDHPGMIQVFLGHSGGLDTEGNELPRLVYVSREKRPGFQHHKKAGAMNALVRVSAVLTNGQYMLNLDCDHYINNSKALREAMCFLMDPNLGRSVCYVQFPQRFDGIDRNDRYANRNTVFFDINLRGLDGIQGPVYVGTGCVFNRTALYGYEPPIKQKKGGFLSSLCGGRKKASKSKKGSDKKKSQKHVDSSVPVFNLEDIEEGVEGAGFDDEKSLLMSQMSLEKRFGQSAAFVASTLMEYGGVPQSATPESLLKEAIHVISCGYEDKTEWGTEIGWIYGSVTEDILTGFKMHARGWRSIYCMPKRPAFKGSAPINLSDRLNQVLRWALGSVEILFSRHCPLWYGYGGRLKFLERFAYINTTIYPLTSIPLLIYCILPAICLLTGKFIIPEISNFASIWFISLFISIFATGILEMRWSGVGIDEWWRNEQFWVIGGISAHLFAVFQGLLKVLAGIDTNFTVTSKASDEDGDFAELYMFKWTTLLIPPTTILIINLVGVVAGISYAINSGYQSWGPLFGKLFFAFWVIVHLYPFLKGLMGRQNRTPTIVVVWAILLASIFSLLWVRIDPFTTRVTGPDTQTCGINC

SEQ ID NO: 14602 - protein, 969 aa, Zea mays subsp. mays
  peptide (1)..(969): Ceres Seq. ID no. 13666075
  misc_feature (426)..(532): Pfam Name: Glycosyl transferase Pfam Description: Glycosyl transferase
  misc_feature (116)..(360): Homolog of NCBI NO: 27372782 NR Description: cellulose synthase-like protein D4 [Populus
  misc_feature (409)..(952): Homolog of NCBI NO: 15217853 NR Description: cellulose synthase family [Arabidopsis thaliana]
  misc_feature (1)..(38): Homolog of NCBI NO: 15217853 NR Description: cellulose synthase family [Arabidopsis thaliana]
  misc_feature (128)..(360): Homolog of NCBI NO: 15237873 NR Description: cellulose synthase family [Arabidopsis thaliana]
  misc_feature (116)..(360): Homolog of NCBI NO: 15228448 NR Description: cellulose synthase family [Arabidopsis thaliana] putative cellulose synthase catalytic subunit [Arabidopsis
  misc_feature (379)..(959): Homolog of NCBI NO: 27372782 NR Description: cellulose synthase-like protein D4 [Populus
  misc_feature (361)..(962): Homolog of NCBI NO: 15228448 NR Description: cellulose synthase family [Arabidopsis thaliana] putative cellulose synthase catalytic subunit [Arabidopsis
  misc_feature (366)..(952): Homolog of NCBI NO: 15237873 NR Description: cellulose synthase family [Arabidopsis thaliana]
  misc_feature (102)..(360): Homolog of NCBI NO: 15217853 NR Description: cellulose synthase family [Arabidopsis thaliana]
  misc_feature (628)..(969): Homolog of NCBI NO: 15233733 NR Description: cellulose synthase family [Arabidopsis thaliana]
  misc_feature (386)..(386): Xaa is any aa, unknown or other
MRSWRMNVGGSGDVGRPKYDSGEIGLTKYDSGEIPRGYIPSVTNSQISGEIPGASPDHHMMSPTGNIGKRAPFPYVNHSPNPSREFSGSIGNVAWKERVDGWKMKQDKGTIPMTNGTSIAPSEGRGVGDIDASTDYNMEDALLNDETRQPLSRKVPLPSSRINPYRMVIVLRLIVLSIFLHYRITNPVRNAYPLWLLSVICEIWFALSWILDQFPKWFPINRETYLDRLALRYDREGEPSQLAAVDIFVSTVDPMKEPPLVTANTVLSILAVDYPVDKVSCYVSDDGAAMLTFDALAETSEFARKWVPFVKKYNIEPRAPEWYFSQKIDYLKDKVHPSFVKDRRAMKREYEEFKVRVNGLVAKAQKVPEEGWIMQDGTPWPGNNTXDHPGMIQVFLGHSGGLDTEGNELPRLVYVSREKRPGFQHHKKAGAMNALVRVSAVLTNGQYMLNLDCDHYINNSKALREAMCFLMDPNLGRSVCYVQFPQRFDGIDRNDRYANRNTVFFDINLRGLDGIQGPVYVGTGCVFNRTALYGYEPPIKQKKGGFLSSLCGGRKKASKSKKGSDKKKSQKHVDSSVPVFNLEDIEEGVEGAGFDDEKSLLMSQMSLEKRFGQSAAFVASTLMEYGGVPQSATPESLLKEAIHVISCGYEDKTEWGTEIGWIYGSVTEDILTGFKMHARGWRSIYCMPKRPAFKGSAPINLSDRLNQVLRWALGSVEILFSRHCPLWYGYGGRLKFLERFAYINTTIYPLTSIPLLIYCILPAICLLTGKFIIPEISNFASIWFISLFISIFATGILEMRWSGVGIDEWWRNEQFWVIGGISAHLFAVFQGLLKVLAGIDTNFTVTSKASDEDGDFAELYMFKWTTLLIPPTTILIINLVGVVAGISYAINSGYQSWGPLFGKLFFAFWVIVHLYPFLKGLMGRQNRTPTIVVVWAILLASIFSLLWVRIDPFTTRVTGPDTQTCGINC

SEQ ID NO: 14603 - protein, 964 aa, Zea mays subsp. mays
  peptide (1)..(964): Ceres Seq. ID no. 13666076
  misc_feature (421)..(527): Pfam Name: Glycosyl transferase Pfam Description: Glycosyl transferase
  misc_feature (404)..(947): Homolog of NCBI NO: 15217853 NR Description: cellulose synthase family [Arabidopsis thaliana]
  misc_feature (97)..(355): Homolog of NCBI NO: 15217853 NR Description: cellulose synthase family [Arabidopsis thaliana]
  misc_feature (1)..(33): Homolog of NCBI NO: 15217853 NR Description: cellulose synthase family [Arabidopsis thaliana]
  misc_feature (361)..(947): Homolog of NCBI NO: 15237873 NR Description: cellulose synthase family [Arabidopsis thaliana]
  misc_feature (123)..(355): Homolog of NCBI NO: 15237873 NR Description: cellulose synthase family [Arabidopsis thaliana]
  misc_feature (356)..(957): Homolog of NCBI NO: 15228448 NR Description: cellulose synthase family [Arabidopsis thaliana] putative cellulose synthase catalytic subunit [Arabidopsis
  misc_feature (111)..(355): Homolog of NCBI NO: 15228448 NR Description: cellulose synthase family [Arabidopsis thaliana] putative cellulose synthase catalytic subunit [Arabidopsis
  misc_feature (374)..(954): Homolog of NCBI NO: 27372782 NR Description: cellulose synthase-like protein D4 [Populus
  misc_feature (111)..(355): Homolog of NCBI NO: 27372782 NR Description: cellulose synthase-like protein D4 [Populus
  misc_feature (623)..(964): Homolog of NCBI NO: 15233733 NR Description: cellulose synthase family [Arabidopsis thaliana]
  misc_feature (381)..(381): Xaa is any aa, unknown or other
MNVGGSGDVGRPKYDSGEIGLTKYDSGEIPRGYIPSVTNSQISGEIPGASPDHHMMSPTGNIGKRAPFPYVNHSPNPSREFSGSIGNVAWKERVDGWKMKQDKGTIPMTNGTSIAPSEGRGVGDIDASTDYNMEDALLNDETRQPLSRKVPLPSSRINPYRMVIVLRLIVLSIFLHYRITNPVRNAYPLWLLSVICEIWFALSWILDQFPKWFPINRETYLDRLALRYDREGEPSQLAAVDIFVSTVDPMKEPPLVTANTVLSILAVDYPVDKVSCYVSDDGAAMLTFDALAETSEFARKWVPFVKKYNIEPRAPEWYFSQKIDYLKDKVHPSFVKDRRAMKREYEEFKVRVNGLVAKAQKVPEEGWIMQDGTPWPGNNTXDHPGMIQVFLGHSGGLDTEGNELPRLVYVSREKRPGFQHHKKAGAMNALVRVSAVLTNGQYMLNLDCDHYINNSKALREAMCFLMDPNLGRSVCYVQFPQRFDGIDRNDRYANRNTVFFDINLRGLDGIQGPVYVGTGCVFNRTALYGYEPPIKQKKGGFLSSLCGGRKKASKSKKGSDKKKSQKHVDSSVPVFNLEDIEEGVEGAGFDDEKSLLMSQMSLEKRFGQSAAFVASTLMEYGGVPQSATPESLLKEAIHVISCGYEDKTEWGTEIGWIYGSVTEDILTGFKMHARGWRSIYCMPKRPAFKGSAPINLSDRLNQVLRWALGSVEILFSRHCPLWYGYGGRLKFLERFAYINTTIYPLTSIPLLIYCILPAICLLTGKFIIPEISNFASIWFISLFISIFATGILEMRWSGVGIDEWWRNEQFWVIGGISAHLFAVFQGLLKVLAGIDTNFTVTSKASDEDGDFAELYMFKWTTLLIPPTTILIINLVGVVAGISYAINSGYQSWGPLFGKLFFAFWVIVHLYPFLKGLMGRQNRTPTIVVVWAILLASIFSLLWVRIDPFTTRVTGPDTQTCGINC

SEQ ID NO: 14604 - DNA, 1485 bp, Zea mays subsp. mays
  misc_feature (1)..(1485): Ceres Seq. ID no. 13496475
  misc_feature: MA Experiment ID: 108504 Result: Down-regulated in Transcription
  misc_feature: MA Experiment 108504 PARAMETER Experiment Name: Zm_Drought_P Parameter: Age (day) Value: 8
  misc_feature: MA Experiment 108504 PARAMETER Experiment Name: Zm_Drought_P Parameter: Organism Value: Zea mays
  misc_feature: MA Experiment 108504 PARAMETER Experiment Name: Zm_Drought_P Parameter: Plant Line Value: 35A19
  misc_feature: MA Experiment 108504 PARAMETER Experiment Name: Zm_Drought_P Parameter: Timepoint (hr) Value: 12
  misc_feature: MA Experiment 108504 PARAMETER Experiment Name: Zm_Drought_P Parameter: Tissue Value: Aerial
  misc_feature: MA Experiment 108504 PARAMETER Experiment Name: Zm_Drought_P Parameter: Treatment Value: Drought vs. No Drought
  misc_feature: MA Experiment ID: 108528 Result: Up-regulated in Transcription
  misc_feature: MA Experiment 108528 PARAMETER Experiment Name: Zm_Imbibed_Seeds_P Parameter: Age (day) Value: 5 vs. 2
  misc_feature: MA Experiment 108528 PARAMETER Experiment Name: Zm_Imbibed_Seeds_P Parameter: Organism Value: Zea mays
  misc_feature: MA Experiment 108528 PARAMETER Experiment Name: Zm_Imbibed_Seeds_P Parameter: Plant Line Value: 35A19
  misc_feature: MA Experiment 108528 PARAMETER Experiment Name: Zm_Imbibed_Seeds_P Parameter: Tissue Value: Aerial vs. Embryo
  misc_feature: MA Experiment ID: 108530 Result: Up-regulated in Transcription
  misc_feature: MA Experiment 108530 PARAMETER Experiment Name: Zm_Imbibed_Seeds_P Parameter: Age (day) Value: 6 vs. 2
  misc_feature: MA Experiment 108530 PARAMETER Experiment Name: Zm_Imbibed_Seeds_P Parameter: Organism Value: Zea mays
  misc_feature: MA Experiment 108530 PARAMETER Experiment Name: Zm_Imbibed_Seeds_P Parameter: Plant Line Value: 35A19
  misc_feature: MA Experiment 108530 PARAMETER Experiment Name: Zm_Imbibed_Seeds_P Parameter: Tissue Value: Aerial vs. Embryo
  misc_feature: MA Experiment ID: 108534 Result: Up-regulated in Transcription
  misc_feature: MA Experiment 108534 PARAMETER Experiment Name: Zm_4deg_Cold_P Parameter: Age (hr) Value: 8
  misc_feature: MA Experiment 108534 PARAMETER Experiment Name: Zm_4deg_Cold_P Parameter: Organism Value: Zea mays
  misc_feature: MA Experiment 108534 PARAMETER Experiment Name: Zm_4deg_Cold_P Parameter: Plant Line Value: 35A19
  misc_feature: MA Experiment 108534 PARAMETER Experiment Name: Zm_4deg_Cold_P Parameter: Temperature (deg C) Value: 4 vs. 22
  misc_feature: MA Experiment 108534 PARAMETER Experiment Name: Zm_4deg_Cold_P Parameter: Timepoint (hr) Value: 6
  misc_feature: MA Experiment 108534 PARAMETER Experiment Name: Zm_4deg_Cold_P Parameter: Tissue Value: Aerial
  misc_feature: MA Experiment ID: 108535 Result: Down-regulated in Transcription
  misc_feature: MA Experiment 108535 PARAMETER Experiment Name: Zm_Meristem_P Parameter: Age (day) Value: 8
  misc_feature: MA Experiment 108535 PARAMETER Experiment Name: Zm_Meristem_P Parameter: Organism Value: Zea mays
  misc_feature: MA Experiment 108535 PARAMETER Experiment Name: Zm_Meristem_P Parameter: Plant Line Value: 35A19
  misc_feature: MA Experiment 108535 PARAMETER Experiment Name: Zm_Meristem_P Parameter: Tissue Value: Root Meristem vs. Above Root Meristem
  misc_feature: MA Experiment ID: 108540 Result: Down-regulated in Transcription
  misc_feature: MA Experiment 108540 PARAMETER Experiment Name: Zm_20percent_PEG_P Parameter: Age (day) Value: 8
  misc_feature: MA Experiment 108540 PARAMETER Experiment Name: Zm_20percent_PEG_P Parameter: Organism Value: Zea mays
  misc_feature: MA Experiment 108540 PARAMETER Experiment Name: Zm_20percent_PEG_P Parameter: Plant Line Value: 35A19
  misc_feature: MA Experiment 108540 PARAMETER Experiment Name: Zm_20percent_PEG_P Parameter: Timepoint (hr) Value: 6
  misc_feature: MA Experiment 108540 PARAMETER Experiment Name: Zm_20percent_PEG_P Parameter: Tissue Value: Aerial
  misc_feature: MA Experiment 108540 PARAMETER Experiment Name: Zm_20percent_PEG_P Parameter: Treatment Value: 20percent PEG vs. No Treatment
  misc_feature: MA Experiment ID: 108545 Result: Up-regulated in Transcription
  misc_feature: MA Experiment 108545 PARAMETER Experiment Name: Zm_Imbibed_Seeds_P Parameter: Age (day) Value: 3 vs. 2
  misc_feature: MA Experiment 108545 PARAMETER Experiment Name: Zm_Imbibed_Seeds_P Parameter: Organism Value: Zea mays
  misc_feature: MA Experiment 108545 PARAMETER Experiment Name: Zm_Imbibed_Seeds_P Parameter: Plant Line Value: 35A19
  misc_feature: MA Experiment 108545 PARAMETER Experiment Name: Zm_Imbibed_Seeds_P Parameter: Tissue Value: Aerial vs. Embryo
  misc_feature: MA Experiment ID: 108547 Result: Up-regulated in Transcription
  misc_feature: MA Experiment 108547 PARAMETER Experiment Name: Zm_Imbibed_Seeds_P Parameter: Age (day) Value: 4 vs. 2
  misc_feature: MA Experiment 108547 PARAMETER Experiment Name: Zm_Imbibed_Seeds_P Parameter: Organism Value: Zea mays
  misc_feature: MA Experiment 108547 PARAMETER Experiment Name: Zm_Imbibed_Seeds_P Parameter: Plant Line Value: 35A19
  misc_feature: MA Experiment 108547 PARAMETER Experiment Name: Zm_Imbibed_Seeds_P Parameter: Tissue Value: Aerial vs. Embryo
  misc_feature: MA Experiment ID: 108556 Result: Down-regulated in Transcription
  misc_feature: MA Experiment 108556 PARAMETER Experiment Name: Zm_Drought_P Parameter: Age (day) Value: 9
  misc_feature: MA Experiment 108556 PARAMETER Experiment Name: Zm_Drought_P Parameter: Organism Value: Zea mays
  misc_feature: MA Experiment 108556 PARAMETER Experiment Name: Zm_Drought_P Parameter: Plant Line Value: 35A19
  misc_feature: MA Experiment 108556 PARAMETER Experiment Name: Zm_Drought_P Parameter: Timepoint (hr) Value: 24
  misc_feature: MA Experiment 108556 PARAMETER Experiment Name: Zm_Drought_P Parameter: Tissue Value: Aerial
  misc_feature: MA Experiment 108556 PARAMETER Experiment Name: Zm_Drought_P Parameter: Treatment Value: Drought vs. No Drought
  misc_feature: MA Experiment ID: 108559 Result: Down-regulated in Transcription
  misc_feature: MA Experiment 108559 PARAMETER Experiment Name: Zm_5mM_NO_P Parameter: Age (day) Value: 8
  misc_feature: MA Experiment 108559 PARAMETER Experiment Name: Zm_5mM_NO_P Parameter: Organism Value: Zea mays
  misc_feature: MA Experiment 108559 PARAMETER Experiment Name: Zm_5mM_NO_P Parameter: Plant Line Value: 35A19
  misc_feature: MA Experiment 108559 PARAMETER Experiment Name: Zm_5mM_NO_P Parameter: Timepoint (hr) Value: 12
  misc_feature: MA Experiment 108559 PARAMETER Experiment Name: Zm_5mM_NO_P Parameter: Tissue Value: Aerial
  misc_feature: MA Experiment 108559 PARAMETER Experiment Name: Zm_5mM_NO_P Parameter: Treatment Value: 5mM NO vs. No Treatment
  misc_feature: MA Experiment ID: 108597 Result: Down-regulated in Transcription
  misc_feature: MA Experiment 108597 PARAMETER Experiment Name: Zm_100uM_ABA_P Parameter: Age (day) Value: 9
  misc_feature: MA Experiment 108597 PARAMETER Experiment Name: Zm_100uM_ABA_P Parameter: Organism Value: Zea mays
  misc_feature: MA Experiment 108597 PARAMETER Experiment Name: Zm_100uM_ABA_P Parameter: Plant Line Value: 35A19
  misc_feature: MA Experiment 108597 PARAMETER Experiment Name: Zm_100uM_ABA_P Parameter: Timepoint (hr) Value: 24
  misc_feature: MA Experiment 108597 PARAMETER Experiment Name: Zm_100uM_ABA_P Parameter: Tissue Value: Aerial
  misc_feature: MA Experiment 108597 PARAMETER Experiment Name: Zm_100uM_ABA_P Parameter: Treatment Value: 100uM ABA vs. No Treatment
  misc_feature: MA Experiment ID: 108688 Result: Down-regulated in Transcription
  misc_feature: MA Experiment 108688 PARAMETER Experiment Name: Zm_Embryos-Flowers__P Parameter: Tissue Value: Immature Flowers vs. Aerial+
  misc_feature: MA Experiment ID: 108689 Result: Down-regulated in Transcription
  misc_feature: MA Experiment 108689 PARAMETER Experiment Name: Zm_Drought_Roots_P Parameter: Age (day) Value: 9
  misc_feature: MA Experiment 108689 PARAMETER Experiment Name: Zm_Drought_Roots_P Parameter: Organism Value: Zea mays
  misc_feature: MA Experiment 108689 PARAMETER Experiment Name: Zm_Drought_Roots_P Parameter: Plant Line Value: 35A19
  misc_feature: MA Experiment 108689 PARAMETER Experiment Name: Zm_Drought_Roots_P Parameter: Timepoint (hr) Value: 24
  misc_feature: MA Experiment 108689 PARAMETER Experiment Name: Zm_Drought_Roots_P Parameter: Tissue Value: Roots
  misc_feature: MA Experiment 108689 PARAMETER Experiment Name: Zm_Drought_Roots_P Parameter: Treatment Value: Drought vs. No Drought
  misc_feature: MA Experiment ID: 20000108 Result: Down-regulated in Transcription
  misc_feature: MA Experiment 20000108 PARAMETER Experiment Name: Zm_Root-Tips_P Parameter: Age (day) Value: 12
  misc_feature: MA Experiment 20000108 PARAMETER Experiment Name: Zm_Root-Tips_P Parameter: Organism Value: Zea mays
  misc_feature: MA Experiment 20000108 PARAMETER Experiment Name: Zm_Root-Tips_P Parameter: Tissue Value: Root tips vs. Root mid region    35
  misc_feature: MA Experiment 20000108 PARAMETER Experiment Name: Zm_Root-Tips_P Parameter: Tissue Value: Root tips vs. Root mid region   Sequence Listing-Misc Features (4)
  misc_feature: MA Experiment ID: 20000479 Result: Down-regulated in Transcription
  misc_feature: MA Experiment 20000479 PARAMETER Experiment Name: Zm_Drought_P Parameter: Age (day) Value: 10
  misc_feature: MA Experiment 20000479 PARAMETER Experiment Name: Zm_Drought_P Parameter: Organism Value: Zea mays
  misc_feature: MA Experiment 20000479 PARAMETER Experiment Name: Zm_Drought_P Parameter: Plant Line Value: 35A19
  misc_feature: MA Experiment 20000479 PARAMETER Experiment Name: Zm_Drought_P Parameter: Timepoint (hr) Value: 48
  misc_feature: MA Experiment 20000479 PARAMETER Experiment Name: Zm_Drought_P Parameter: Tissue Value: Aerial
  misc_feature: MA Experiment 20000479 PARAMETER Experiment Name: Zm_Drought_P Parameter: Treatment Value: Drought vs. No Drought
  misc_feature: MA Experiment ID: 20000480 Result: Down-regulated in Transcription
  misc_feature: MA Experiment 20000480 PARAMETER Experiment Name: Zm_Drought_P Parameter: Age (day) Value: 11
  misc_feature: MA Experiment 20000480 PARAMETER Experiment Name: Zm_Drought_P Parameter: Organism Value: Zea mays
  misc_feature: MA Experiment 20000480 PARAMETER Experiment Name: Zm_Drought_P Parameter: Plant Line Value: 35A19
  misc_feature: MA Experiment 20000480 PARAMETER Experiment Name: Zm_Drought_P Parameter: Timepoint (hr) Value: 72
  misc_feature: MA Experiment 20000480 PARAMETER Experiment Name: Zm_Drought_P Parameter: Tissue Value: Aerial
  misc_feature: MA Experiment 20000480 PARAMETER Experiment Name: Zm_Drought_P Parameter: Treatment Value: Drought vs. No Drought
ctgggcgctccgcgtctccgcgcccacccgcctcacctccgccgtcgaggaggacaagaggagctccccccttggggagggggacgagcacgtggcggccagcggcgccgcgggcggggagttcgacccgggggcgccgccgccgttcgggctggcggagatccgcgcggccatccccaagcactgctgggtcaaggacccctggcgctccatggcctacgtgctgcgcgacgtcgtcgtcgtcctggggctcgccgcggccgccgcgcgcctcgacagctggctcgtctggccgctctactgggccgcgcagggcaccatgttctgggcgctcttcgtcctcggccacgactgtggacacgggagcttctcgaacaaccccaagctgaacagcgtggtcggacacatactccattcctccattcttgtcccgtaccacggatggaggattagccacaggacgcaccatcaaaaccacggccacgttgagaaggacgagtcctggcacccgctaccagagaggctgtacaaaagcctggactttatgactaggaaattgcggttcaccatgccgttccccttgctcgcattcccattatacttgttcgcaaggagtccagggaagtcaggatcacacttcaacccaagcagtgatttgttccaacctaatgaaaagaaggacatcataacatcaacggcatcctggctggccatggttggtgttctggctggtctcacctttctgatgggtcctgttgcgatgctaaagctctacggagtcccatactttgtatttgttgcttggctggatatggttacatacttgcaccatcatggccatgaagacaagcttccctggtaccgtggacaggaatggagttatctgcgtggaggactgacgacgctcgaccgggactatggactgattaacaatatccaccatgacattggaactcatgtcatccatcaccttttccctcaaatcccgcattaccatctcattgaggcgaccgaggcagcaaaaccggttcttggcaagtactacaaagaaccaaagaagtcgggtcctctcccgtggcacctgtttggggtgctagcacaaagcttaaagcaagaccactatgttagcgacaccggagacgtagtgtactaccaaactgactcgaaaacgaacacctctgcacaaaaatctgattgacacagagtatagaacgtagcgtattcttcatttttcgcaggcggactgtgcctgaagacctggccagcctcctgagacctctcgattagtgtgtgtgtgtgtgtgtgtgtgtgtgtgaccgggttcgtcaattcaagaatgtaaggtggcgaagtattatcatgtatgcgagtgagggtataattctttcgaatgatcgaagtcggatgctgcttccgatgtaacgaactgtgattctttgcacaagaggtgtactattacagtaaagagtaaaaaaagagttagct

SEQ ID NO: 14605 - protein, 398 aa, Zea mays subsp. mays
  peptide (1)..(398): Ceres Seq. ID no. 13496476
  misc_feature (100)..(344): Pfam Name: Fatty acid desaturase Pfam Description: Fatty acid desaturase
  misc_feature (1)..(398): Homolog of NCBI NO: 7433278 NR Description: omega-3 fatty acid desaturase (EC 1.14.99.-) FAD8 maize (fragment) >gi|2446996|dbj|BAA22440.1| fatty acid [Zea mays] >gi|2447000|dbj|BAA22442.1| fatty acid desaturase [Zea
  misc_feature (1)..(398): Homolog of NCBI NO: 7433277 NR Description: omega-3 fatty acid desaturase (EC 1.14.99.-) FAD7 maize >gi|2446998|dbj|BAA22441.1| fatty acid desaturase [Zea
  misc_feature (1)..(395): Homolog of NCBI NO: 1345971 NR Description: Omega-3 fatty acid desaturase, chloroplast
  misc_feature (21)..(398): Homolog of NCBI NO: 21668465 NR Description: plastid omega-3 fatty acid desaturase [Triticum
  misc_feature (1)..(391): Homolog of NCBI NO: 1754795 NR Description: omega-3 fatty acid desaturase
  misc_feature (1)..(397): Homolog of NCBI NO: 1345970 NR Description: Omega-3 fatty acid desaturase, chloroplast
  misc_feature (1)..(387): Homolog of NCBI NO: 7433276 NR Description: omega-3 fatty acid desaturase (EC 1.14.99.-) FAD7
  misc_feature (1)..(395): Homolog of NCBI NO: 23345021 NR Description: omega-3 fatty acid desaturase [Betula pendula]
  misc_feature (1)..(390): Homolog of NCBI NO: 23345023 NR Description: omega-3 fatty acid desaturase [Betula pendula]
  misc_feature (1)..(398): Homolog of NCBI NO: 1345969 NR Description: Omega-3 fatty acid desaturase, chloroplast
WALRVSAPTRLTSAVEEDKRSSPLGEGDEHVAASGAAGGEFDPGAPPPFGLAEIRAAIPKHCWVKDPWRSMAYVLRDVVVVLGLAAAAARLDSWLVWPLYWAAQGTMFWALFVLGHDCGHGSFSNNPKLNSVVGHILHSSILVPYHGWRISHRTHHQNHGHVEKDESWHPLPERLYKSLDFMTRKLRFTMPFPLLAFPLYLFARSPGKSGSHFNPSSDLFQPNEKKDIITSTASWLAMVGVLAGLTFLMGPVAMLKLYGVPYFVFVAWLDMVTYLHHHGHEDKLPWYRGQEWSYLRGGLTTLDRDYGLINNIHHDIGTHVIHHLFPQIPHYHLIEATEAAKPVLGKYYKEPKKSGPLPWHLFGVLAQSLKQDHYVSDTGDVVYYQTDSKTNTSAQKSD

SEQ ID NO: 14606 - protein, 328 aa, Zea mays subsp. mays
  peptide (1)..(328): Ceres Seq. ID no. 13496477
  misc_feature (30)..(274): Pfam Name: Fatty acid desaturase Pfam Description: Fatty acid desaturase
  misc_feature (1)..(328): Homolog of NCBI NO: 7433278 NR Description: omega-3 fatty acid desaturase (EC 1.14.99.-) FAD8 maize (fragment) >gi|2446996|dbj|BAA22440.1| fatty acid [Zea mays] >gi|2447000|dbj|BAA22442.1| fatty acid desaturase [Zea
  misc_feature (1)..(328): Homolog of NCBI NO: 7433277 NR Description: omega-3 fatty acid desaturase (EC 1.14.99.-) FAD7 maize >gi|2446998|dbj|BAA22441.1| fatty acid desaturase [Zea
  misc_feature (1)..(325): Homolog of NCBI NO: 1345971 NR Description: Omega-3 fatty acid desaturase, chloroplast
  misc_feature (1)..(328): Homolog of NCBI NO: 21668465 NR Description: plastid omega-3 fatty acid desaturase [Triticum
  misc_feature (1)..(321): Homolog of NCBI NO: 1754795 NR Description: omega-3 fatty acid desaturase
  misc_feature (1)..(327): Homolog of NCBI NO: 1345970 NR Description: Omega-3 fatty acid desaturase, chloroplast
  misc_feature (1)..(317): Homolog of NCBI NO: 7433276 NR Description: omega-3 fatty acid desaturase (EC 1.14.99.-) FAD7
  misc_feature (1)..(325): Homolog of NCBI NO: 23345021 NR Description: omega-3 fatty acid desaturase [Betula pendula]
  misc_feature (1)..(320): Homolog of NCBI NO: 23345023 NR Description: omega-3 fatty acid desaturase [Betula pendula]
  misc_feature (1)..(328): Homolog of NCBI NO: 1345969 NR Description: Omega-3 fatty acid desaturase, chloroplast
MAYVLRDVVVVLGLAAAAARLDSWLVWPLYWAAQGTMFWALFVLGHDCGHGSFSNNPKLNSVVGHILHSSILVPYHGWRISHRTHHQNHGHVEKDESWHPLPERLYKSLDFMTRKLRFTMPFPLLAFPLYLFARSPGKSGSHFNPSSDLFQPNEKKDIITSTASWLAMVGVLAGLTFLMGPVAMLKLYGVPYFVFVAWLDMVTYLHHHGHEDKLPWYRGQEWSYLRGGLTTLDRDYGLINNIHHDIGTHVIHHLFPQIPHYHLIEATEAAKPVLGKYYKEPKKSGPLPWHLFGVLAQSLKQDHYVSDTGDVVYYQTDSKTNTSAQKSD

SEQ ID NO: 14607 - protein, 292 aa, Zea mays subsp. mays
  peptide (1)..(292): Ceres Seq. ID no. 13496478
  misc_feature (1)..(238): Pfam Name: Fatty acid desaturase Pfam Description: Fatty acid desaturase
  misc_feature (1)..(292): Homolog of NCBI NO: 7433278 NR Description: omega-3 fatty acid desaturase (EC 1.14.99.-) FAD8 maize (fragment) >gi|2446996|dbj|BAA22440.1| fatty acid [Zea mays] >gi|2447000|dbj|BAA22442.1| fatty acid desaturase [Zea
  misc_feature (1)..(292): Homolog of NCBI NO: 7433277 NR Description: omega-3 fatty acid desaturase (EC 1.14.99.-) FAD7 maize >gi|2446998|dbj|BAA22441.1| fatty acid desaturase [Zea
  misc_feature (1)..(289): Homolog of NCBI NO: 1345971 NR Description: Omega-3 fatty acid desaturase, chloroplast
  misc_feature (1)..(292): Homolog of NCBI NO: 21668465 NR Description: plastid omega-3 fatty acid desaturase [Triticum
  misc_feature (1)..(285): Homolog of NCBI NO: 1754795 NR Description: omega-3 fatty acid desaturase
  misc_feature (1)..(291): Homolog of NCBI NO: 1345970 NR Description: Omega-3 fatty acid desaturase, chloroplast
  misc_feature (1)..(281): Homolog of NCBI NO: 7433276 NR Description: omega-3 fatty acid desaturase (EC 1.14.99.-) FAD7
  misc_feature (1)..(289): Homolog of NCBI NO: 23345021 NR Description: omega-3 fatty acid desaturase [Betula pendula]
  misc_feature (1)..(284): Homolog of NCBI NO: 23345023 NR Description: omega-3 fatty acid desaturase [Betula pendula]
  misc_feature (1)..(292): Homolog of NCBI NO: 1345969 NR Description: Omega-3 fatty acid desaturase, chloroplast
MFWALFVLGHDCGHGSFSNNPKLNSVVGHILHSSILVPYHGWRISHRTHHQNHGHVEKDESWHPLPERLYKSLDFMTRKLRFTMPFPLLAFPLYLFARSPGKSGSHFNPSSDLFQPNEKKDIITSTASWLAMVGVLAGLTFLMGPVAMLKLYGVPYFVFVAWLDMVTYLHHHGHEDKLPWYRGQEWSYLRGGLTTLDRDYGLINNIHHDIGTHVIHHLFPQIPHYHLIEATEAAKPVLGKYYKEPKKSGPLPWHLFGVLAQSLKQDHYVSDTGDVVYYQTDSKTNTSAQKSD

SEQ ID NO: 14608 - DNA, 583 bp, Zea mays subsp. mays
  misc_feature (1)..(583): Ceres Seq. ID no. 3625683
  misc_feature: MA Experiment ID: 108522 Result: Down-regulated in Transcription
  misc_feature: MA Experiment 108522 PARAMETER Experiment Name: Zm_42deg_Heat_P Parameter: Age (day) Value: 8
  misc_feature: MA Experiment 108522 PARAMETER Experiment Name: Zm_42deg_Heat_P Parameter: Organism Value: Zea mays
  misc_feature: MA Experiment 108522 PARAMETER Experiment Name: Zm_42deg_Heat_P Parameter: Plant Line Value: 35A19
  misc_feature: MA Experiment 108522 PARAMETER Experiment Name: Zm_42deg_Heat_P Parameter: Temperature (deg C) Value: 42 vs. 22
  misc_feature: MA Experiment 108522 PARAMETER Experiment Name: Zm_42deg_Heat_P Parameter: Timepoint (hr) Value: 1
  misc_feature: MA Experiment 108522 PARAMETER Experiment Name: Zm_42deg_Heat_P Parameter: Tissue Value: Aerial
tctaaggactttgctgatgtccatggacttgtcatgcatgcttacaacccaccaaatgcagattcacttgttgatcatcttggtttgcacaaggcattgtgtgttcttatgggatgggattatacaaaagtccctgagaactttaagggctaccaatcattaccttctgaccttgtccaagcaagtagggaggacctcattgtctggccgcctactgttatcattcacaatacttcgactgggaggaagaaagatggtcgcttggagggtttagggaacaaagaaatggataaaaaaatgacagaactagggttttctggtgggaagtcgaagtccttgtatggaaaggaaggacatatgggtttgacacttatcaagtttgcaaacaactcatctggcttgaaggaggctgagcgtcttgctgagtatcttgagaggcaagatcgtggacgtataggttggtcacgcgctcatgccagtcgttctgtagattcagatcagaaccctttgttggtcgagacggataccaggacagctgagaaaaagaggatactttatgggtacctarcaattgcatccgatc

SEQ ID NO: 14609 - protein, 194 aa, Zea mays subsp. mays
  peptide (1)..(194): Ceres Seq. ID no. 3625684
  misc_feature (63)..(191): Pfam Name: XS domain Pfam Description: XS domain
  misc_feature (1)..(193): Homolog of NCBI NO: 22773240 NR Description: Hypothetical protein [Oryza sativa (japonica
  misc_feature (12)..(193): Homolog of NCBI NO: 9293880 NR Description: gene_id:MCB17.19~unknown protein [Arabidopsis
  misc_feature (37)..(193): Homolog of NCBI NO: 30686649 NR Description: expressed protein [Arabidopsis thaliana]
  misc_feature (88)..(193): Homolog of NCBI NO: 15081713 NR Description: AT3g22430/MCB17_17 [Arabidopsis thaliana]
  misc_feature (3)..(156): Homolog of NCBI NO: 15237789 NR Description: putative protein; protein id: At5g23570.1 thaliana] >gi|8164030|gb|AAF73960.1| SGS3 [Arabidopsis thaliana] emb|CAB62356.1~gene_id:MQM1.17~similar to unknown protein
  misc_feature (190)..(190): Xaa is any aa, unknown or other
SKDFADVHGLVMHAYNPPNADSLVDHLGLHKALCVLMGWDYTKVPENFKGYQSLPSDLVQASREDLIVWPPTVIIHNTSTGRKKDGRLEGLGNKEMDKKMTELGFSGGKSKSLYGKEGHMGLTLIKFANNSSGLKEAERLAEYLERQDRGRIGWSRAHASRSVDSDQNPLLVETDTRTAEKKRILYGYLXIASD

SEQ ID NO: 14610 - protein, 183 aa, Zea mays subsp. mays
  peptide (1)..(183): Ceres Seq. ID no. 3625685
  misc_feature (52)..(180): Pfam Name: XS domain Pfam Description: XS domain
  misc_feature (1)..(182): Homolog of NCBI NO: 22773240 NR Description: Hypothetical protein [Oryza sativa (japonica
  misc_feature (1)..(182): Homolog of NCBI NO: 9293880 NR Description: gene_id:MCB17.19~unknown protein [Arabidopsis
  misc_feature (26)..(182): Homolog of NCBI NO: 30686649 NR Description: expressed protein [Arabidopsis thaliana]
  misc_feature (77)..(182): Homolog of NCBI NO: 15081713 NR Description: AT3g22430/MCB17_17 [Arabidopsis thaliana]
  misc_feature (1)..(145): Homolog of NCBI NO: 15237789 NR Description: putative protein; protein id: At5g23570.1 thaliana] >gi|8164030|gb|AAF73960.1| SGS3 [Arabidopsis thaliana] emb|CAB62356.1~gene_id:MQM1.17~similar to unknown protein
  misc_feature (179)..(179): Xaa is any aa, unknown or other
MHAYNPPNADSLVDHLGLHKALCVLMGWDYTKVPENFKGYQSLPSDLVQASREDLIVWPPTVIIHNTSTGRKKDGRLEGLGNKEMDKKMTELGFSGGKSKSLYGKEGHMGLTLIKFANNSSGLKEAERLAEYLERQDRGRIGWSRAHASRSVDSDQNPLLVETDTRTAEKKRILYGYLXIASD

SEQ ID NO: 14611 - protein, 158 aa, Zea mays subsp. mays
  peptide (1)..(158): Ceres Seq. ID no. 3625686
  misc_feature (27)..(155): Pfam Name: XS domain Pfam Description: XS domain
  misc_feature (1)..(157): Homolog of NCBI NO: 22773240 NR Description: Hypothetical protein [Oryza sativa (japonica
  misc_feature (1)..(157): Homolog of NCBI NO: 9293880 NR Description: gene_id:MCB17.19~unknown protein [Arabidopsis
  misc_feature (1)..(157): Homolog of NCBI NO: 30686649 NR Description: expressed protein [Arabidopsis thaliana]
  misc_feature (52)..(157): Homolog of NCBI NO: 15081713 NR Description: AT3g22430/MCB17_17 [Arabidopsis thaliana]
  misc_feature (1)..(120): Homolog of NCBI NO: 15237789 NR Description: putative protein; protein id: At5g23570.1 thaliana] >gi|8164030|gb|AAF73960.1| SGS3 [Arabidopsis thaliana] emb|CAB62356.1~gene_id:MQM1.17~similar to unknown protein
  misc_feature (154)..(154): Xaa is any aa, unknown or other
MGWDYTKVPENFKGYQSLPSDLVQASREDLIVWPPTVIIHNTSTGRKKDGRLEGLGNKEMDKKMTELGFSGGKSKSLYGKEGHMGLTLIKFANNSSGLKEAERLAEYLERQDRGRIGWSRAHASRSVDSDQNPLLVETDTRTAEKKRILYGYLXIASD

SEQ ID NO: 14612 - DNA, 548 bp, Zea mays subsp. mays
  misc_feature (1)..(548): Ceres Seq. ID no. 3625697
  misc_feature: MA Experiment ID: 108556 Result: Down-regulated in Transcription
  misc_feature: MA Experiment 108556 PARAMETER Experiment Name: Zm_Drought_P Parameter: Age (day) Value: 9
  misc_feature: MA Experiment 108556 PARAMETER Experiment Name: Zm_Drought_P Parameter: Organism Value: Zea mays
  misc_feature: MA Experiment 108556 PARAMETER Experiment Name: Zm_Drought_P Parameter: Plant Line Value: 35A19
  misc_feature: MA Experiment 108556 PARAMETER Experiment Name: Zm_Drought_P Parameter: Timepoint (hr) Value: 24
  misc_feature: MA Experiment 108556 PARAMETER Experiment Name: Zm_Drought_P Parameter: Tissue Value: Aerial
  misc_feature: MA Experiment 108556 PARAMETER Experiment Name: Zm_Drought_P Parameter: Treatment Value: Drought vs. No Drought
tcaacatctacgacatctcccccctcaaccactacctctactggttcggactcggcatcttccactccgggatccaagtccatggcatggagtatggctttggagctcatgaataccccaccagcggagtcttccaagtagaacccaaaagctgccccgggtttatcttcaggcgctctgtgtgtgtgggtgtaactcacatgtcccgttcccaagtccgcacttccatagaggatctcgccgaggattatcatggggacacttatcatttgattctcaagaactgcaatcatttcacagcagatgtctgcgagcgtttgaccgggaagccagtacctggatgggtgaatcgactcgccagattaggttccttcttcaattgtgtattgcctgacagcatcaaggtttcagcagtcagagatgtaaatgcacatccagatttttctggtactctacctacacccagtttaactacttgtaccttcacattcacatcacatggttggaatttgaccttacagaatcatgtaccactttattaaagattg

SEQ ID NO: 14613 - protein, 179 aa, Zea mays subsp. mays
  peptide (1)..(179): Ceres Seq. ID no. 3625698
  misc_feature (1)..(119): Pfam Name: Eukaryotic protein of unknown function (DUF862) Pfam Description: Eukaryotic protein of unknown function (DUF862)
  misc_feature (1)..(148): Homolog of NCBI NO: 38346173 NR Description: OSJNBa0079A21.20 [Oryza sativa (japonica
  misc_feature (1)..(146): Homolog of NCBI NO: 15238059 NR Description: putative protein; protein id: At5g47310.1
  misc_feature (1)..(148): Homolog of NCBI NO: 30684058 NR Description: expressed protein [Arabidopsis thaliana] AT4g17486/AT4g17486 [Arabidopsis thaliana]
  misc_feature (19)..(148): Homolog of NCBI NO: 7488100 NR Description: probable EREBP-4 - Arabidopsis thaliana
  misc_feature (1)..(25): Homolog of NCBI NO: 7488100 NR Description: probable EREBP-4 - Arabidopsis thaliana
  misc_feature (1)..(138): Homolog of NCBI NO: 18401869 NR Description: expressed protein; protein id: At1g47740.1, by cDNA: 40816. [Arabidopsis thaliana] unknown protein [Arabidopsis thaliana]
  misc_feature (1)..(138): Homolog of NCBI NO: 21593644 NR Description: unknown [Arabidopsis thaliana]
  misc_feature (1)..(143): Homolog of NCBI NO: 18420889 NR Description: putative protein; protein id: At5g25170.1,
  misc_feature (1)..(138): Homolog of NCBI NO: 9802596 NR Description: T2E6.19 [Arabidopsis thaliana]
  misc_feature (1)..(148): Homolog of NCBI NO: 18412886 NR Description: expressed protein; protein id: At1g80690.1, by cDNA: 40037. [Arabidopsis thaliana]
NIYDISPLNHYLYWFGLGIFHSGIQVHGMEYGFGAHEYPTSGVFQVEPKSCPGFIFRRSVCVGVTHMSRSQVRTSIEDLAEDYHGDTYHLILKNCNHFTADVCERLTGKPVPGWVNRLARLGSFFNCVLPDSIKVSAVRDVNAHPDFSGTLPTPSLTTCTFTFTSHGWNLTLQNHVPLY

SEQ ID NO: 14614 - protein, 151 aa, Zea mays subsp. mays
  peptide (1)..(151): Ceres Seq. ID no. 3625699
  misc_feature (1)..(91): Pfam Name: Eukaryotic protein of unknown function (DUF862) Pfam Description: Eukaryotic protein of unknown function (DUF862)
  misc_feature (1)..(120): Homolog of NCBI NO: 38346173 NR Description: OSJNBa0079A21.20 [Oryza sativa (japonica
  misc_feature (1)..(118): Homolog of NCBI NO: 15238059 NR Description: putative protein; protein id: At5g47310.1
  misc_feature (1)..(120): Homolog of NCBI NO: 30684058 NR Description: expressed protein [Arabidopsis thaliana] AT4g17486/AT4g17486 [Arabidopsis thaliana]
  misc_feature (1)..(120): Homolog of NCBI NO: 7488100 NR Description: probable EREBP-4 - Arabidopsis thaliana
  misc_feature (1)..(110): Homolog of NCBI NO: 18401869 NR Description: expressed protein; protein id: At1g47740.1, by cDNA: 40816. [Arabidopsis thaliana] unknown protein [Arabidopsis thaliana]
  misc_feature (1)..(110): Homolog of NCBI NO: 21593644 NR Description: unknown [Arabidopsis thaliana]
  misc_feature (1)..(115): Homolog of NCBI NO: 18420889 NR Description: putative protein; protein id: At5g25170.1,
  misc_feature (1)..(110): Homolog of NCBI NO: 9802596 NR Description: T2E6.19 [Arabidopsis thaliana]
  misc_feature (1)..(120): Homolog of NCBI NO: 18412886 NR Description: expressed protein; protein id: At1g80690.1, by cDNA: 40037. [Arabidopsis thaliana]
  misc_feature (1)..(113): Homolog of NCBI NO: 18400749 NR Description: expressed protein; protein id: At2g25190.1, by cDNA: 14105., supported by cDNA: gi_13877550, supported by gi_20148724 [Arabidopsis thaliana] >gi|25354456|pir||D84645
MEYGFGAHEYPTSGVFQVEPKSCPGFIFRRSVCVGVTHMSRSQVRTSIEDLAEDYHGDTYHLILKNCNHFTADVCERLTGKPVPGWVNRLARLGSFFNCVLPDSIKVSAVRDVNAHPDFSGTLPTPSLTTCTFTFTSHGWNLTLQNHVPLY

SEQ ID NO: 14615 - protein, 113 aa, Zea mays subsp. mays
  peptide (1)..(113): Ceres Seq. ID no. 3625700
  misc_feature (1)..(53): Pfam Name: Eukaryotic protein of unknown function (DUF862) Pfam Description: Eukaryotic protein of unknown function (DUF862)
  misc_feature (1)..(82): Homolog of NCBI NO: 38346173 NR Description: OSJNBa0079A21.20 [Oryza sativa (japonica
  misc_feature (1)..(80): Homolog of NCBI NO: 15238059 NR Description: putative protein; protein id: At5g47310.1
  misc_feature (1)..(82): Homolog of NCBI NO: 30684058 NR Description: expressed protein [Arabidopsis thaliana] AT4g17486/AT4g17486 [Arabidopsis thaliana]
  misc_feature (1)..(82): Homolog of NCBI NO: 7488100 NR Description: probable EREBP-4 - Arabidopsis thaliana
  misc_feature (1)..(72): Homolog of NCBI NO: 18401869 NR Description: expressed protein; protein id: At1g47740.1, by cDNA: 40816. [Arabidopsis thaliana] unknown protein [Arabidopsis thaliana]
  misc_feature (1)..(72): Homolog of NCBI NO: 21593644 NR Description: unknown [Arabidopsis thaliana]
  misc_feature (1)..(77): Homolog of NCBI NO: 18420889 NR Description: putative protein; protein id: At5g25170.1,
  misc_feature (1)..(72): Homolog of NCBI NO: 9802596 NR Description: T2E6.19 [Arabidopsis thaliana]
  misc_feature (1)..(82): Homolog of NCBI NO: 18412886 NR Description: expressed protein; protein id: At1g80690.1, by cDNA: 40037. [Arabidopsis thaliana]
  misc_feature (1)..(75): Homolog of NCBI NO: 18400749 NR Description: expressed protein; protein id: At2g25190.1, by cDNA: 14105., supported by cDNA: gi_13877550, supported by gi_20148724 [Arabidopsis thaliana] >gi|25354456|pir||D84645
MSRSQVRTSIEDLAEDYHGDTYHLILKNCNHFTADVCERLTGKPVPGWVNRLARLGSFFNCVLPDSIKVSAVRDVNAHPDFSGTLPTPSLTTCTFTFTSHGWNLTLQNHVPLY

SEQ ID NO: 14616 - DNA, 456 bp, Zea mays subsp. mays
  misc_feature (1)..(456): Ceres Seq. ID no. 5761952
  misc_feature: MA Experiment ID: 108543 Result: Up-regulated in Transcription
gatcaagaagccgcagtccaaggccaaggcacagagacagagatcatagaagccaaagtcgcagcaggagcagagaaaggcatgtccgtgatagagacaggggctatcgtcgtcggagcagaagtagaagccgaagtcttagttcaagccctgacaacagaagtcatcatagagcaagagatgatgataagcgcaagagtatgagtaagagcaggagcaggagcacaagtagaagccgctcatactatagtgcttcacctgcccggcacagtgctagccctcgcaagagcccaccgccacagaggagccccactcctgcaaagcatgccaatggaaaagtagcacctctgtcacgctgtgtttctccattaccgaagcgtgcaacctcccsgcagcccaggcagtgatggcagggcaattcacgtcaggagtaaagcttgctgatttggtgatgcc

SEQ ID NO: 14617 - protein, 134 aa, Zea mays subsp. mays
  peptide (1)..(134): Ceres Seq. ID no. 5761953
  misc_feature (39)..(108): Pfam Name: Nuclear transition protein 2 Pfam Description: Nuclear transition protein 2
  misc_feature (1)..(122): Homolog of NCBI NO: 7446336 NR Description: probable arginine/serine-rich splicing factor -
  misc_feature (4)..(134): Homolog of NCBI NO: 7446336 NR Description: probable arginine/serine-rich splicing factor -
  misc_feature (1)..(131): Homolog of NCBI NO: 33146621 NR Description: putative splicing factor, arginine/serine-rich 2
  misc_feature (2)..(132): Homolog of NCBI NO: 9843653 NR Description: splicing factor SC35 [Arabidopsis thaliana]
  misc_feature (2)..(132): Homolog of NCBI NO: 15237641 NR Description: arginine/serine-rich splicing factor SC35; id: At5g64200.1, supported by cDNA: gi_17380867 [Arabidopsis >gi|17380868|gb|AAL36246.1| unknown protein [Arabidopsis
  misc_feature (2)..(103): Homolog of NCBI NO: 21751099 NR Description: unnamed protein product [Homo sapiens]
  misc_feature (1)..(131): Homolog of NCBI NO: 7446336 NR Description: probable arginine/serine-rich splicing factor -
  misc_feature (2)..(114): Homolog of NCBI NO: 39794351 NR Description: Unknown (protein for MGC:75633) [Silurana
  misc_feature (1)..(114): Homolog of NCBI NO: 26351271 NR Description: unnamed protein product [Mus musculus]
  misc_feature (1)..(114): Homolog of NCBI NO: 26377499 NR Description: unnamed protein product [Mus musculus]
  misc_feature (130)..(130): Xaa is any aa, unknown or other
SRSRSPRPRHRDRDHRSQSRSRSRERHVRDRDRGYRRRSRSRSRSLSSSPDNRSHHRARDDDKRKSMSKSRSRSTSRSRSYYSASPARHSASPRKSPPPQRSPTPAKHANGKVAPLSRCVSPLPKRATSXQPRQ

SEQ ID NO: 14618 - protein, 68 aa, Zea mays subsp. mays
  peptide (1)..(68): Ceres Seq. ID no. 5761954
  misc_feature (1)..(56): Homolog of NCBI NO: 7446336 NR Description: probable arginine/serine-rich splicing factor -
  misc_feature (1)..(68): Homolog of NCBI NO: 7446336 NR Description: probable arginine/serine-rich splicing factor -
  misc_feature (1)..(65): Homolog of NCBI NO: 33146621 NR Description: putative splicing factor, arginine/serine-rich 2
  misc_feature (1)..(66): Homolog of NCBI NO: 9843653 NR Description: splicing factor SC35 [Arabidopsis thaliana]
  misc_feature (1)..(66): Homolog of NCBI NO: 15237641 NR Description: arginine/serine-rich splicing factor SC35; id: At5g64200.1, supported by cDNA: gi_17380867 [Arabidopsis >gi|17380868|gb|AAL36246.1| unknown protein [Arabidopsis
  misc_feature (1)..(37): Homolog of NCBI NO: 21751099 NR Description: unnamed protein product [Homo sapiens]
  misc_feature (1)..(65): Homolog of NCBI NO: 7446336 NR Description: probable arginine/serine-rich splicing factor -
  misc_feature (1)..(48): Homolog of NCBI NO: 39794351 NR Description: Unknown (protein for MGC:75633) [Silurana
  misc_feature (1)..(48): Homolog of NCBI NO: 26351271 NR Description: unnamed protein product [Mus musculus]
  misc_feature (1)..(48): Homolog of NCBI NO: 26377499 NR Description: unnamed protein product [Mus musculus]
  misc_feature (64)..(64): Xaa is any aa, unknown or other
MSKSRSRSTSRSRSYYSASPARHSASPRKSPPPQRSPTPAKHANGKVAPLSRCVSPLPKRATSXQPRQ

SEQ ID NO: 14619 - protein, 67 aa, Zea mays subsp. mays
  peptide (1)..(67): Ceres Seq. ID no. 5761955
DQEAAVQGQGTETEIIEAKVAAGAEKGMSVIETGAIVVGAEVEAEVLVQALTTEVIIEQEMMISARV

SEQ ID NO: 14620 - DNA, 643 bp, Zea mays subsp. mays
  misc_feature (1)..(643): Ceres Seq. ID no. 12468172
  misc_feature: MA Experiment ID: 108543 Result: Up-regulated in Transcription
  misc_feature: MA Experiment ID: 20000534 Result: Up-regulated in Transcription
  misc_feature: MA Experiment 20000534 PARAMETER Experiment Name: Zm_Hybrid_Pollen_P Parameter: Age (day) Value: 8
  misc_feature: MA Experiment 20000534 PARAMETER Experiment Name: Zm_Hybrid_Pollen_P Parameter: Organism Value: Zea mays
  misc_feature: MA Experiment 20000534 PARAMETER Experiment Name: Zm_Hybrid_Pollen_P Parameter: Plant Line Value: 35A19
  misc_feature: MA Experiment 20000534 PARAMETER Experiment Name: Zm_Hybrid_Pollen_P Parameter: Tissue Value: Pollen vs. Aerial
  misc_feature: MA Experiment ID: 20000535 Result: Down-regulated in Transcription
  misc_feature: MA Experiment 20000535 PARAMETER Experiment Name: Zm_Hybrid_Seed_Dev_P Parameter: DAP Value: 30 vs. 12
  misc_feature: MA Experiment 20000535 PARAMETER Experiment Name: Zm_Hybrid_Seed_Dev_P Parameter: Organism Value: Zea mays
  misc_feature: MA Experiment 20000535 PARAMETER Experiment Name: Zm_Hybrid_Seed_Dev_P Parameter: Plant Line Value: 35A19
  misc_feature: MA Experiment 20000535 PARAMETER Experiment Name: Zm_Hybrid_Seed_Dev_P Parameter: Tissue Value: Embryo vs. Unfert Floret
gctatcatgagccatcccatcccaaatactgctgaatctcactcagtacagatcatattaccacagaagcaacttggccgcagatcagacatgtatgttttctgctgttcctactctcataatgtcgcatcaaaaggcaaattcatcgcattcgtgtcagcacaagcggagactgataatccagagaaggaactaaagccagggatcgatcttcttgggaaggtggacgagttatttatcgacatatatgacagatatgaacctaccaatgactcatcagcagacaattgtttcatctcaacaagttatgatgccacaacacactttgagtccactgttatggatgtactttccctttacacaaagatcaccggaaagactgttgatctcagcgtggatctaagcgctgctagtgctgctgaagatgatatgtgatacttatcgtagtgctatgtggcgtagtgtggaaaatatttaattaagctttgctttggcaacgattattaggttcacctttatttttccaattgttgttattagctgtgttgtgaccatgattaaagattgcatgctgtaaatttgaaggcattttttttatcaaaagttgttaacgcggtgatccgtgtttagatttttgaagggt

SEQ ID NO: 14621 - protein, 144 aa, Zea mays subsp. mays
  peptide (1)..(144): Ceres Seq. ID no. 12468173
  misc_feature (32)..(136): Pfam Name: GDP dissociation inhibitor Pfam Description: GDP dissociation inhibitor
  misc_feature (1)..(143): Homolog of NCBI NO: 15224814 NR Description: GDP dissociation inhibitor; protein id: supported by cDNA: 29536., supported by cDNA: gi_13605640, by cDNA: gi_15215777, supported by cDNA: gi_1655423, supported by
  misc_feature (1)..(143): Homolog of NCBI NO: 17473582 NR Description: GDP dissociation inhibitor [Arabidopsis thaliana]
  misc_feature (1)..(142): Homolog of NCBI NO: 7489133 NR Description: GDP dissociation inhibitor - common tobacco
  misc_feature (1)..(142): Homolog of NCBI NO: 7489479 NR Description: GDP dissociation inhibitor protein - rice
  misc_feature (1)..(142): Homolog of NCBI NO: 3175990 NR Description: GDP dissociation inhibitor [Cicer arietinum]
  misc_feature (1)..(142): Homolog of NCBI NO: 15232210 NR Description: Rab GDP dissociation inhibitor; protein id: supported by cDNA: gi_19698844, supported by cDNA: gi_2446980
  misc_feature (1)..(141): Homolog of NCBI NO: 7489478 NR Description: GDP dissociation inhibitor protein - rice
  misc_feature (1)..(144): Homolog of NCBI NO: 33146460 NR Description: putative GDP dissociation inhibitor [Oryza sativa
  misc_feature (1)..(143): Homolog of NCBI NO: 1550740 NR Description: GDP-associated inhibitor [Arabidopsis thaliana]
  misc_feature (1)..(143): Homolog of NCBI NO: 21592535 NR Description: GDP dissociation inhibitor [Arabidopsis thaliana]
AIMSHPIPNTAESHSVQIILPQKQLGRRSDMYVFCCSYSHNVASKGKFIAFVSAQAETDNPEKELKPGIDLLGKVDELFIDIYDRYEPTNDSSADNCFISTSYDATTHFESTVMDVLSLYTKITGKTVDLSVDLSAASAAEDDM

SEQ ID NO: 14622 - protein, 142 aa, Zea mays subsp. mays
  peptide (1)..(142): Ceres Seq. ID no. 12468174
  misc_feature (30)..(134): Pfam Name: GDP dissociation inhibitor Pfam Description: GDP dissociation inhibitor
  misc_feature (1)..(142): Homolog of NCBI NO: 33146460 NR Description: putative GDP dissociation inhibitor [Oryza sativa
  misc_feature (1)..(140): Homolog of NCBI NO: 7489479 NR Description: GDP dissociation inhibitor protein - rice
  misc_feature (1)..(139): Homolog of NCBI NO: 7489478 NR Description: GDP dissociation inhibitor protein - rice
  misc_feature (1)..(140): Homolog of NCBI NO: 3175990 NR Description: GDP dissociation inhibitor [Cicer arietinum]
  misc_feature (1)..(140): Homolog of NCBI NO: 15232210 NR Description: Rab GDP dissociation inhibitor; protein id: supported by cDNA: gi_19698844, supported by cDNA: gi_2446980
  misc_feature (1)..(141): Homolog of NCBI NO: 15224814 NR Description: GDP dissociation inhibitor; protein id: supported by cDNA: 29536., supported by cDNA: gi_13605640, by cDNA: gi_15215777, supported by cDNA: gi_1655423, supported by
  misc_feature (1)..(141): Homolog of NCBI NO: 17473582 NR Description: GDP dissociation inhibitor [Arabidopsis thaliana]
  misc_feature (1)..(140): Homolog of NCBI NO: 7489133 NR Description: GDP dissociation inhibitor - common tobacco
  misc_feature (1)..(141): Homolog of NCBI NO: 1550740 NR Description: GDP-associated inhibitor [Arabidopsis thaliana]
  misc_feature (1)..(141): Homolog of NCBI NO: 21592535 NR Description: GDP dissociation inhibitor [Arabidopsis thaliana]
MSHPIPNTAESHSVQIILPQKQLGRRSDMYVFCCSYSHNVASKGKFIAFVSAQAETDNPEKELKPGIDLLGKVDELFIDIYDRYEPTNDSSADNCFISTSYDATTHFESTVMDVLSLYTKITGKTVDLSVDLSAASAAEDDM

SEQ ID NO: 14623 - protein, 114 aa, Zea mays subsp. mays
  peptide (1)..(114): Ceres Seq. ID no. 12468175
  misc_feature (2)..(106): Pfam Name: GDP dissociation inhibitor Pfam Description: GDP dissociation inhibitor
  misc_feature (1)..(114): Homolog of NCBI NO: 33146460 NR Description: putative GDP dissociation inhibitor [Oryza sativa
  misc_feature (1)..(112): Homolog of NCBI NO: 7489479 NR Description: GDP dissociation inhibitor protein - rice
  misc_feature (1)..(111): Homolog of NCBI NO: 7489478 NR Description: GDP dissociation inhibitor protein - rice
  misc_feature (1)..(112): Homolog of NCBI NO: 3175990 NR Description: GDP dissociation inhibitor [Cicer arietinum]
  misc_feature (1)..(112): Homolog of NCBI NO: 15232210 NR Description: Rab GDP dissociation inhibitor; protein id: supported by cDNA: gi_19698844, supported by cDNA: gi_2446980
  misc_feature (1)..(113): Homolog of NCBI NO: 15224814 NR Description: GDP dissociation inhibitor; protein id: supported by cDNA: 29536., supported by cDNA: gi_13605640, by cDNA: gi_15215777, supported by cDNA: gi_1655423, supported by
  misc_feature (1)..(113): Homolog of NCBI NO: 17473582 NR Description: GDP dissociation inhibitor [Arabidopsis thaliana]
  misc_feature (1)..(112): Homolog of NCBI NO: 7489133 NR Description: GDP dissociation inhibitor - common tobacco
  misc_feature (1)..(113): Homolog of NCBI NO: 1550740 NR Description: GDP-associated inhibitor [Arabidopsis thaliana]
  misc_feature (1)..(113): Homolog of NCBI NO: 21592535 NR Description: GDP dissociation inhibitor [Arabidopsis thaliana]
MYVFCCSYSHNVASKGKFIAFVSAQAETDNPEKELKPGIDLLGKVDELFIDIYDRYEPTNDSSADNCFISTSYDATTHFESTVMDVLSLYTKITGKTVDLSVDLSAASAAEDDM

SEQ ID NO: 14624 - DNA, 2053 bp, Zea mays subsp. mays; identical to SEQ ID NO: 5535
  misc_feature (1)..(2053): Ceres Seq. ID no. 13577863
  misc_feature: MA Experiment ID: 108522 Result: Up-regulated in Transcription
  misc_feature: MA Experiment 108522 PARAMETER Experiment Name: Zm_42deg_Heat_P Parameter: Age (day) Value: 8
  misc_feature: MA Experiment 108522 PARAMETER Experiment Name: Zm_42deg_Heat_P Parameter: Organism Value: Zea mays
  misc_feature: MA Experiment 108522 PARAMETER Experiment Name: Zm_42deg_Heat_P Parameter: Plant Line Value: 35A19
  misc_feature: MA Experiment 108522 PARAMETER Experiment Name: Zm_42deg_Heat_P Parameter: Temperature (deg C) Value: 42 vs. 22
  misc_feature: MA Experiment 108522 PARAMETER Experiment Name: Zm_42deg_Heat_P Parameter: Timepoint (hr) Value: 1
  misc_feature: MA Experiment 108522 PARAMETER Experiment Name: Zm_42deg_Heat_P Parameter: Tissue Value: Aerial
  misc_feature: MA Experiment ID: 20000632 Result: Down-regulated in Transcription
  misc_feature: MA Experiment 20000632 PARAMETER Experiment Name: Zm_Herbicide-Treatments_P Parameter: Timepoint (hr) Value: 4
  misc_feature: MA Experiment 20000632 PARAMETER Experiment Name: Zm_Herbicide-Treatments_P Parameter: Tissue Value: Aerial
  misc_feature: MA Experiment 20000632 PARAMETER Experiment Name: Zm_Herbicide-Treatments_P Parameter: Treatment Value: Glean vs. No Treatment

SEQ ID NO: 14625 - protein, 362 aa, Zea mays subsp. mays; identical to SEQ ID NO: 5536
  peptide (1)..(362): Ceres Seq. ID no. 13577864
  misc_feature (100)..(362): Pfam Name: TCP-1/cpn60 chaperonin family Pfam Description: TCP-1/cpn60 chaperonin family
  misc_feature (100)..(362): Pfam Name: TCP-1/cpn60 chaperonin family Pfam Description: TCP-1/cpn60 chaperonin family
  misc_feature (61)..(362): Homolog of NCBI NO: 18396719 NR Description: chaperonin, putative [Arabidopsis thaliana]
  misc_feature (61)..(362): Homolog of NCBI NO: 6223641 NR Description: putative T-complex protein 1, theta subunit
  misc_feature (71)..(361): Homolog of NCBI NO: 27924345 NR Description: Similar to chaperonin containing TCP1, subunit 8
  misc_feature (72)..(362): Homolog of NCBI NO: 17066726 NR Description: CCT chaperonin theta subunit [Physarum
  misc_feature (71)..(361): Homolog of NCBI NO: 29791676 NR Description: Similar to chaperonin containing TCP1, subunit 8
  misc_feature (61)..(362): Homolog of NCBI NO: 6223641 NR Description: putative T-complex protein 1, theta subunit
  misc_feature (72)..(362): Homolog of NCBI NO: 17066726 NR Description: CCT chaperonin theta subunit [Physarum
  misc_feature (71)..(361): Homolog of NCBI NO: 23478707 NR Description: T-complex protein 1 [Plasmodium yoelii yoelii]
  misc_feature (71)..(361): Homolog of NCBI NO: 1136741 NR Description: KIAA0002 [Homo sapiens]
  misc_feature (71)..(361): Homolog of NCBI NO: 6005727 NR Description: chaperonin containing TCP1, subunit 8 (theta); protein 1, theta subunit [Homo sapiens]
  misc_feature (71)..(361): Homolog of NCBI NO: 9988062 NR Description: T-complex protein 1, theta subunit (TCP-1-theta)
  misc_feature (71)..(361): Homolog of NCBI NO: 37362194 NR Description: chaperonin containing TCP1, subunit 8 (theta)
  misc_feature (71)..(361): Homolog of NCBI NO: 29791676 NR Description: Similar to chaperonin containing TCP1, subunit 8
  misc_feature (71)..(361): Homolog of NCBI NO: 27924345 NR Description: Similar to chaperonin containing TCP1, subunit 8
  misc_feature (61)..(362): Homolog of NCBI NO: 18396719 NR Description: chaperonin, putative [Arabidopsis thaliana]
  misc_feature (71)..(361): Homolog of NCBI NO: 37362194 NR Description: chaperonin containing TCP1, subunit 8 (theta)
  misc_feature (71)..(361): Homolog of NCBI NO: 9988062 NR Description: T-complex protein 1, theta subunit (TCP-1-theta)
  misc_feature (71)..(361): Homolog of NCBI NO: 6005727 NR Description: chaperonin containing TCP1, subunit 8 (theta); protein 1, theta subunit [Homo sapiens]
  misc_feature (71)..(361): Homolog of NCBI NO: 1136741 NR Description: KIAA0002 [Homo sapiens]
  misc_feature (71)..(361): Homolog of NCBI NO: 23478707 NR Description: T-complex protein 1 [Plasmodium yoelii yoelii]
  misc_feature (44)..(44): Xaa is any aa, unknown or other
  misc_feature (173)..(173): Xaa is any aa, unknown or other
  misc_feature (213)..(213): Xaa is any aa, unknown or other

SEQ ID NO: 14626 - protein, 302 aa, Zea mays subsp. mays; identical to SEQ ID NO: 5537
  peptide (1)..(302): Ceres Seq. ID no. 13577865
  misc_feature (40)..(302): Pfam Name: TCP-1/cpn60 chaperonin family Pfam Description: TCP-1/cpn60 chaperonin family
  misc_feature (40)..(302): Pfam Name: TCP-1/cpn60 chaperonin family Pfam Description: TCP-1/cpn60 chaperonin family
  misc_feature (1)..(302): Homolog of NCBI NO: 18396719 NR Description: chaperonin, putative [Arabidopsis thaliana]
  misc_feature (1)..(302): Homolog of NCBI NO: 6223641 NR Description: putative T-complex protein 1, theta subunit
  misc_feature (11)..(301): Homolog of NCBI NO: 27924345 NR Description: Similar to chaperonin containing TCP1, subunit 8
  misc_feature (12)..(302): Homolog of NCBI NO: 17066726 NR Description: CCT chaperonin theta subunit [Physarum
  misc_feature (11)..(301): Homolog of NCBI NO: 29791676 NR Description: Similar to chaperonin containing TCP1, subunit 8
  misc_feature (1)..(302): Homolog of NCBI NO: 6223641 NR Description: putative T-complex protein 1, theta subunit
  misc_feature (12)..(302): Homolog of NCBI NO: 17066726 NR Description: CCT chaperonin theta subunit [Physarum
  misc_feature (11)..(301): Homolog of NCBI NO: 23478707 NR Description: T-complex protein 1 [Plasmodium yoelii yoelii]
  misc_feature (11)..(301): Homolog of NCBI NO: 1136741 NR Description: KIAA0002 [Homo sapiens]
  misc_feature (11)..(301): Homolog of NCBI NO: 6005727 NR Description: chaperonin containing TCP1, subunit 8 (theta); protein 1, theta subunit [Homo sapiens]
  misc_feature (11)..(301): Homolog of NCBI NO: 9988062 NR Description: T-complex protein 1, theta subunit (TCP-1-theta)
  misc_feature (11)..(301): Homolog of NCBI NO: 37362194 NR Description: chaperonin containing TCP1, subunit 8 (theta)
  misc_feature (11)..(301): Homolog of NCBI NO: 29791676 NR Description: Similar to chaperonin containing TCP1, subunit 8
  misc_feature (11)..(301): Homolog of NCBI NO: 27924345 NR Description: Similar to chaperonin containing TCP1, subunit 8
  misc_feature (1)..(302): Homolog of NCBI NO: 18396719 NR Description: chaperonin, putative [Arabidopsis thaliana]
  misc_feature (11)..(301): Homolog of NCBI NO: 37362194 NR Description: chaperonin containing TCP1, subunit 8 (theta)
  misc_feature (11)..(301): Homolog of NCBI NO: 9988062 NR Description: T-complex protein 1, theta subunit (TCP-1-theta)
  misc_feature (11)..(301): Homolog of NCBI NO: 6005727 NR Description: chaperonin containing TCP1, subunit 8 (theta); protein 1, theta subunit [Homo sapiens]
  misc_feature (11)..(301): Homolog of NCBI NO: 1136741 NR Description: KIAA0002 [Homo sapiens]
  misc_feature (11)..(301): Homolog of NCBI NO: 23478707 NR Description: T-complex protein 1 [Plasmodium yoelii yoelii]
  misc_feature (113)..(113): Xaa is any aa, unknown or other
  misc_feature (153)..(153): Xaa is any aa, unknown or other

SEQ ID NO: 14627 - protein, 296 aa, Zea mays subsp. mays; identical to SEQ ID NO: 5538
  peptide (1)..(296): Ceres Seq. ID no. 13577866
  misc_feature (34)..(296): Pfam Name: TCP-1/cpn60 chaperonin family Pfam Description: TCP-1/cpn60 chaperonin family
  misc_feature (34)..(296): Pfam Name: TCP-1/cpn60 chaperonin family Pfam Description: TCP-1/cpn60 chaperonin family
  misc_feature (1)..(296): Homolog of NCBI NO: 18396719 NR Description: chaperonin, putative [Arabidopsis thaliana]
  misc_feature (1)..(296): Homolog of NCBI NO: 6223641 NR Description: putative T-complex protein 1, theta subunit
  misc_feature (5)..(295): Homolog of NCBI NO: 27924345 NR Description: Similar to chaperonin containing TCP1, subunit 8
  misc_feature (6)..(296): Homolog of NCBI NO: 17066726 NR Description: CCT chaperonin theta subunit [Physarum
  misc_feature (5)..(295): Homolog of NCBI NO: 29791676 NR Description: Similar to chaperonin containing TCP1, subunit 8
  misc_feature (1)..(296): Homolog of NCBI NO: 6223641 NR Description: putative T-complex protein 1, theta subunit
  misc_feature (6)..(296): Homolog of NCBI NO: 17066726 NR Description: CCT chaperonin theta subunit [Physarum
  misc_feature (5)..(295): Homolog of NCBI NO: 23478707 NR Description: T-complex protein 1 [Plasmodium yoelii yoelii]
  misc_feature (5)..(295): Homolog of NCBI NO: 1136741 NR Description: KIAA0002 [Homo sapiens]
  misc_feature (5)..(295): Homolog of NCBI NO: 6005727 NR Description: chaperonin containing TCP1, subunit 8 (theta); protein 1, theta subunit [Homo sapiens]
  misc_feature (5)..(295): Homolog of NCBI NO: 9988062 NR Description: T-complex protein 1, theta subunit (TCP-1-theta)
  misc_feature (5)..(295): Homolog of NCBI NO: 37362194 NR Description: chaperonin containing TCP1, subunit 8 (theta)
  misc_feature (5)..(295): Homolog of NCBI NO: 29791676 NR Description: Similar to chaperonin containing TCP1, subunit 8
  misc_feature (5)..(295): Homolog of NCBI NO: 27924345 NR Description: Similar to chaperonin containing TCP1, subunit 8
  misc_feature (1)..(296): Homolog of NCBI NO: 18396719 NR Description: chaperonin, putative [Arabidopsis thaliana]
  misc_feature (5)..(295): Homolog of NCBI NO: 37362194 NR Description: chaperonin containing TCP1, subunit 8 (theta)
  misc_feature (5)..(295): Homolog of NCBI NO: 9988062 NR Description: T-complex protein 1, theta subunit (TCP-1-theta)
  misc_feature (5)..(295): Homolog of NCBI NO: 6005727 NR Description: chaperonin containing TCP1, subunit 8 (theta); protein 1, theta subunit [Homo sapiens]
  misc_feature (5)..(295): Homolog of NCBI NO: 1136741 NR Description: KIAA0002 [Homo sapiens]
  misc_feature (5)..(295): Homolog of NCBI NO: 23478707 NR Description: T-complex protein 1 [Plasmodium yoelii yoelii]
  misc_feature (107)..(107): Xaa is any aa, unknown or other
  misc_feature (147)..(147): Xaa is any aa, unknown or other

SEQ ID NO: 14628 - DNA, 1012 bp, Zea mays subsp. mays
  misc_feature (1)..(1012): Ceres Seq. ID no. 12450646
  misc_feature: MA Experiment ID: 108523 Result: Up-regulated in Transcription
  misc_feature: MA Experiment 108523 PARAMETER Experiment Name: Zm_42deg_Heat_P Parameter: Age (day) Value: 8
  misc_feature: MA Experiment 108523 PARAMETER Experiment Name: Zm_42deg_Heat_P Parameter: Organism Value: Zea mays
  misc_feature: MA Experiment 108523 PARAMETER Experiment Name: Zm_42deg_Heat_P Parameter: Plant Line Value: 35A19
  misc_feature: MA Experiment 108523 PARAMETER Experiment Name: Zm_42deg_Heat_P Parameter: Temperature (deg C) Value: 42 vs. 22
  misc_feature: MA Experiment 108523 PARAMETER Experiment Name: Zm_42deg_Heat_P Parameter: Timepoint (hr) Value: 6
  misc_feature: MA Experiment 108523 PARAMETER Experiment Name: Zm_42deg_Heat_P Parameter: Tissue Value: Aerial
  misc_feature: MA Experiment ID: 108528 Result: Down-regulated in Transcription
  misc_feature: MA Experiment 108528 PARAMETER Experiment Name: Zm_Imbibed_Seeds_P Parameter: Age (day) Value: 5 vs. 2
  misc_feature: MA Experiment 108528 PARAMETER Experiment Name: Zm_Imbibed_Seeds_P Parameter: Organism Value: Zea mays
  misc_feature: MA Experiment 108528 PARAMETER Experiment Name: Zm_Imbibed_Seeds_P Parameter: Plant Line Value: 35A19
  misc_feature: MA Experiment 108528 PARAMETER Experiment Name: Zm_Imbibed_Seeds_P Parameter: Tissue Value: Aerial vs. Embryo
  misc_feature: MA Experiment ID: 108530 Result: Down-regulated in Transcription
  misc_feature: MA Experiment 108530 PARAMETER Experiment Name: Zm_Imbibed_Seeds_P Parameter: Age (day) Value: 6 vs. 2
  misc_feature: MA Experiment 108530 PARAMETER Experiment Name: Zm_Imbibed_Seeds_P Parameter: Organism Value: Zea mays
  misc_feature: MA Experiment 108530 PARAMETER Experiment Name: Zm_Imbibed_Seeds_P Parameter: Plant Line Value: 35A19
  misc_feature: MA Experiment 108530 PARAMETER Experiment Name: Zm_Imbibed_Seeds_P Parameter: Tissue Value: Aerial vs. Embryo
  misc_feature: MA Experiment ID: 108544 Result: Up-regulated in Transcription
  misc_feature: MA Experiment ID: 108688 Result: Down-regulated in Transcription
  misc_feature: MA Experiment 108688 PARAMETER Experiment Name: Zm_Embryos-Flowers__P Parameter: Tissue Value: Immature Flowers vs. Aerial+
  misc_feature: MA Experiment ID: 20000535 Result: Down-regulated in Transcription
  misc_feature: MA Experiment 20000535 PARAMETER Experiment Name: Zm_Hybrid_Seed_Dev_P Parameter: DAP Value: 30 vs. 12
  misc_feature: MA Experiment 20000535 PARAMETER Experiment Name: Zm_Hybrid_Seed_Dev_P Parameter: Organism Value: Zea mays
  misc_feature: MA Experiment 20000535 PARAMETER Experiment Name: Zm_Hybrid_Seed_Dev_P Parameter: Plant Line Value: 35A19
  misc_feature: MA Experiment 20000535 PARAMETER Experiment Name: Zm_Hybrid_Seed_Dev_P Parameter: Tissue Value: Embryo vs. Unfert Floret
aggagtaggtgtagccgcgtaagcggcgtaggcctcagctcggctcagcagccgcctcgctcgaaccagaggagccaagcagaggaagcgaggcggcgggggcggagatgtcggcgggactggtgaccgacgaggccaccgtggggcggctgtaccggatccggcgcacggtgatgcagatgctccgtgaccgtggctacctggtggtggaccacgagctcgccaccagccgccgcgacttcctccgcaagttcggcgagtccttccaccgcgaggacctcctcatcaacaagtacaagaagaacgacccatccgaccagatatatgtcttcttccccaacgatgacaaggtagggatgaagcacatcaagaagtacgtcgaaatgatgacgcacgagaacgtctccagagctgtgctggttctccagcagaacctaactccgtttgcgaagtcgtttctcatagagctggagccgaagatccatctggaaattttccaggaggccgagatgcttataaacatcaaggaacatgtccttgttcctgagcatcaggtgctcacaaacgaggagaagaagacgcttctggagcggtacaccttgaaggaaactcagcttccaagaatacagatcacggatcctattgctaggtactacggcctgaggcgaggccaggtcgtgaagatcatcaggcccagcgagacggcgggcagatacgttacataccgctacgttgtatgacagaacgtcagaacactgaagaagaagaagagaaccacagatatgtcaaaaaaaattcaagctacacataccccacgtgcttgcagacatcagtatcgcttttgtagcagcagccactggtaacgatctgtggctgatgtgtaagtggattgaataagctgagtcagagcatacgagaattctcatgttgtacacttgtgttttatgaaccgcataaacactcacgacgataaaagaagcctgttttcggagcgacagaagctcctgcgatc

SEQ ID NO: 14629 - protein, 210 aa, Zea mays subsp. mays
  peptide (1)..(210): Ceres Seq. ID no. 12450647
  misc_feature (137)..(210): Pfam Name: RNA polymerase Rpb5, C-terminal domain Pfam Description: RNA polymerase Rpb5, C-terminal domain
  misc_feature (5)..(210): Homolog of NCBI NO: 15228724 NR Description: RNA polymerase I, II and III 24.3 kDa subunit; id: At3g22320.1, supported by cDNA: 21828., supported by cDNA: supported by cDNA: gi_15724321, supported by cDNA: gi_3372232
  misc_feature (5)..(210): Homolog of NCBI NO: 38344231 NR Description: OJ991113_30.8 [Oryza sativa (japonica
  misc_feature (8)..(209): Homolog of NCBI NO: 2135016 NR Description: DNA-directed RNA polymerase (EC 2.7.7.6) II 23K
  misc_feature (5)..(210): Homolog of NCBI NO: 39595790 NR Description: Hypothetical protein CBG12745 [Caenorhabditis
  misc_feature (8)..(209): Homolog of NCBI NO: 1173134 NR Description: DNA-directed RNA polymerase II 23 kDa polypeptide
  misc_feature (8)..(209): Homolog of NCBI NO: 28497750 NR Description: polymerase (RNA) II (DNA directed) polypeptide E musculus] >gi|28374319|gb|AAH45521.1| similar to DNA directed RNA
  misc_feature (5)..(210): Homolog of NCBI NO: 17507947 NR Description: RNA polymerase Rpb5, N-terminal domain and RNA
  misc_feature (8)..(209): Homolog of NCBI NO: 14589951 NR Description: DNA directed RNA polymerase II polypeptide E; (RNA) II (DNA directed) polypeptide E (25kD); DNA directed RNA II 23 kda polypeptide [Homo sapiens] >gi|678549|gb|AAA62401.1|
  misc_feature (8)..(209): Homolog of NCBI NO: 2896797 NR Description: RPB5_Human [Homo sapiens]
  misc_feature (8)..(209): Homolog of NCBI NO: 19922004 NR Description: CG11979-PA [Drosophila melanogaster]
MSAGLVTDEATVGRLYRIRRTVMQMLRDRGYLVVDHELATSRRDFLRKFGESFHREDLLINKYKKNDPSDQIYVFFPNDDKVGMKHIKKYVEMMTHENVSRAVLVLQQNLTPFAKSFLIELEPKIHLEIFQEAEMLINIKEHVLVPEHQVLTNEEKKTLLERYTLKETQLPRIQITDPIARYYGLRRGQVVKIIRPSETAGRYVTYRYVV

SEQ ID NO: 14630 - protein, 188 aa, Zea mays subsp. mays
  peptide (1)..(188): Ceres Seq. ID no. 12450648
  misc_feature (115)..(188): Pfam Name: RNA polymerase Rpb5, C-terminal domain Pfam Description: RNA polymerase Rpb5, C-terminal domain
  misc_feature (1)..(188): Homolog of NCBI NO: 15228724 NR Description: RNA polymerase I, II and III 24.3 kDa subunit; id: At3g22320.1, supported by cDNA: 21828., supported by cDNA: supported by cDNA: gi_15724321, supported by cDNA: gi_3372232
  misc_feature (1)..(188): Homolog of NCBI NO: 38344231 NR Description: OJ991113_30.8 [Oryza sativa (japonica
  misc_feature (1)..(187): Homolog of NCBI NO: 2135016 NR Description: DNA-directed RNA polymerase (EC 2.7.7.6) II 23K
  misc_feature (1)..(188): Homolog of NCBI NO: 39595790 NR Description: Hypothetical protein CBG12745 [Caenorhabditis
  misc_feature (1)..(187): Homolog of NCBI NO: 1173134 NR Description: DNA-directed RNA polymerase II 23 kDa polypeptide
  misc_feature (1)..(187): Homolog of NCBI NO: 28497750 NR Description: polymerase (RNA) II (DNA directed) polypeptide E musculus] >gi|28374319|gb|AAH45521.1| similar to DNA directed RNA
  misc_feature (1)..(188): Homolog of NCBI NO: 17507947 NR Description: RNA polymerase Rpb5, N-terminal domain and RNA
  misc_feature (1)..(187): Homolog of NCBI NO: 14589951 NR Description: DNA directed RNA polymerase II polypeptide E; (RNA) II (DNA directed) polypeptide E (25kD); DNA directed RNA II 23 kda polypeptide [Homo sapiens] >gi|678549|gb|AAA62401.1|
  misc_feature (1)..(187): Homolog of NCBI NO: 2896797 NR Description: RPB5_Human [Homo sapiens]
  misc_feature (1)..(187): Homolog of NCBI NO: 19922004 NR Description: CG11979-PA [Drosophila melanogaster]
MQMLRDRGYLVVDHELATSRRDFLRKFGESFHREDLLINKYKKNDPSDQIYVFFPNDDKVGMKHIKKYVEMMTHENVSRAVLVLQQNLTPFAKSFLIELEPKIHLEIFQEAEMLINIKEHVLVPEHQVLTNEEKKTLLERYTLKETQLPRIQITDPIARYYGLRRGQVVKIIRPSETAGRYVTYRYVV

SEQ ID NO: 14631 - protein, 186 aa, Zea mays subsp. mays
  peptide (1)..(186): Ceres Seq. ID no. 12450649
  misc_feature (113)..(186): Pfam Name: RNA polymerase Rpb5, C-terminal domain Pfam Description: RNA polymerase Rpb5, C-terminal domain
  misc_feature (1)..(186): Homolog of NCBI NO: 15228724 NR Description: RNA polymerase I, II and III 24.3 kDa subunit; id: At3g22320.1, supported by cDNA: 21828., supported by cDNA: supported by cDNA: gi_15724321, supported by cDNA: gi_3372232
  misc_feature (1)..(186): Homolog of NCBI NO: 38344231 NR Description: OJ991113_30.8 [Oryza sativa (japonica
  misc_feature (1)..(185): Homolog of NCBI NO: 2135016 NR Description: DNA-directed RNA polymerase (EC 2.7.7.6) II 23K
  misc_feature (1)..(186): Homolog of NCBI NO: 39595790 NR Description: Hypothetical protein CBG12745 [Caenorhabditis
  misc_feature (1)..(185): Homolog of NCBI NO: 1173134 NR Description: DNA-directed RNA polymerase II 23 kDa polypeptide
  misc_feature (1)..(185): Homolog of NCBI NO: 28497750 NR Description: polymerase (RNA) II (DNA directed) polypeptide E musculus] >gi|28374319|gb|AAH45521.1| similar to DNA directed RNA
  misc_feature (1)..(186): Homolog of NCBI NO: 17507947 NR Description: RNA polymerase Rpb5, N-terminal domain and RNA
  misc_feature (1)..(185): Homolog of NCBI NO: 14589951 NR Description: DNA directed RNA polymerase II polypeptide E; (RNA) II (DNA directed) polypeptide E (25kD); DNA directed RNA II 23 kda polypeptide [Homo sapiens] >gi|678549|gb|AAA62401.1|
  misc_feature (1)..(185): Homolog of NCBI NO: 2896797 NR Description: RPB5_Human [Homo sapiens]
  misc_feature (1)..(185): Homolog of NCBI NO: 19922004 NR Description: CG11979-PA [Drosophila melanogaster]
MLRDRGYLVVDHELATSRRDFLRKFGESFHREDLLINKYKKNDPSDQIYVFFPNDDKVGMKHIKKYVEMMTHENVSRAVLVLQQNLTPFAKSFLIELEPKIHLEIFQEAEMLINIKEHVLVPEHQVLTNEEKKTLLERYTLKETQLPRIQITDPIARYYGLRRGQVVKIIRPSETAGRYVTYRYVV

SEQ ID NO: 14632 - DNA, 916 bp, Zea mays subsp. mays
  misc_feature (1)..(916): Ceres Seq. ID no. 12468118
  misc_feature: MA Experiment ID: 108527 Result: Down-regulated in Transcription
  misc_feature: MA Experiment 108527 PARAMETER Experiment Name: Zm_5mM_NO_P Parameter: Age (day) Value: 8
  misc_feature: MA Experiment 108527 PARAMETER Experiment Name: Zm_5mM_NO_P Parameter: Organism Value: Zea mays
  misc_feature: MA Experiment 108527 PARAMETER Experiment Name: Zm_5mM_NO_P Parameter: Plant Line Value: 35A19
  misc_feature: MA Experiment 108527 PARAMETER Experiment Name: Zm_5mM_NO_P Parameter: Timepoint (hr) Value: 6
  misc_feature: MA Experiment 108527 PARAMETER Experiment Name: Zm_5mM_NO_P Parameter: Tissue Value: Aerial
  misc_feature: MA Experiment 108527 PARAMETER Experiment Name: Zm_5mM_NO_P Parameter: Treatment Value: 5mM NO vs. No Treatment
  misc_feature: MA Experiment ID: 108528 Result: Up-regulated in Transcription
  misc_feature: MA Experiment 108528 PARAMETER Experiment Name: Zm_Imbibed_Seeds_P Parameter: Age (day) Value: 5 vs. 2
  misc_feature: MA Experiment 108528 PARAMETER Experiment Name: Zm_Imbibed_Seeds_P Parameter: Organism Value: Zea mays
  misc_feature: MA Experiment 108528 PARAMETER Experiment Name: Zm_Imbibed_Seeds_P Parameter: Plant Line Value: 35A19
  misc_feature: MA Experiment 108528 PARAMETER Experiment Name: Zm_Imbibed_Seeds_P Parameter: Tissue Value: Aerial vs. Embryo
  misc_feature: MA Experiment ID: 108530 Result: Up-regulated in Transcription
  misc_feature: MA Experiment 108530 PARAMETER Experiment Name: Zm_Imbibed_Seeds_P Parameter: Age (day) Value: 6 vs. 2
  misc_feature: MA Experiment 108530 PARAMETER Experiment Name: Zm_Imbibed_Seeds_P Parameter: Organism Value: Zea mays
  misc_feature: MA Experiment 108530 PARAMETER Experiment Name: Zm_Imbibed_Seeds_P Parameter: Plant Line Value: 35A19
  misc_feature: MA Experiment 108530 PARAMETER Experiment Name: Zm_Imbibed_Seeds_P Parameter: Tissue Value: Aerial vs. Embryo
  misc_feature: MA Experiment ID: 108545 Result: Up-regulated in Transcription
  misc_feature: MA Experiment 108545 PARAMETER Experiment Name: Zm_Imbibed_Seeds_P Parameter: Age (day) Value: 3 vs. 2
  misc_feature: MA Experiment 108545 PARAMETER Experiment Name: Zm_Imbibed_Seeds_P Parameter: Organism Value: Zea mays
  misc_feature: MA Experiment 108545 PARAMETER Experiment Name: Zm_Imbibed_Seeds_P Parameter: Plant Line Value: 35A19
  misc_feature: MA Experiment 108545 PARAMETER Experiment Name: Zm_Imbibed_Seeds_P Parameter: Tissue Value: Aerial vs. Embryo
  misc_feature: MA Experiment ID: 20000479 Result: Down-regulated in Transcription
  misc_feature: MA Experiment 20000479 PARAMETER Experiment Name: Zm_Drought_P Parameter: Age (day) Value: 10
  misc_feature: MA Experiment 20000479 PARAMETER Experiment Name: Zm_Drought_P Parameter: Organism Value: Zea mays
  misc_feature: MA Experiment 20000479 PARAMETER Experiment Name: Zm_Drought_P Parameter: Plant Line Value: 35A19
  misc_feature: MA Experiment 20000479 PARAMETER Experiment Name: Zm_Drought_P Parameter: Timepoint (hr) Value: 48
  misc_feature: MA Experiment 20000479 PARAMETER Experiment Name: Zm_Drought_P Parameter: Tissue Value: Aerial
  misc_feature: MA Experiment 20000479 PARAMETER Experiment Name: Zm_Drought_P Parameter: Treatment Value: Drought vs. No Drought
  misc_feature: MA Experiment ID: 20000480 Result: Down-regulated in Transcription
  misc_feature: MA Experiment 20000480 PARAMETER Experiment Name: Zm_Drought_P Parameter: Age (day) Value: 11
  misc_feature: MA Experiment 20000480 PARAMETER Experiment Name: Zm_Drought_P Parameter: Organism Value: Zea mays
  misc_feature: MA Experiment 20000480 PARAMETER Experiment Name: Zm_Drought_P Parameter: Plant Line Value: 35A19
  misc_feature: MA Experiment 20000480 PARAMETER Experiment Name: Zm_Drought_P Parameter: Timepoint (hr) Value: 72
  misc_feature: MA Experiment 20000480 PARAMETER Experiment Name: Zm_Drought_P Parameter: Tissue Value: Aerial
  misc_feature: MA Experiment 20000480 PARAMETER Experiment Name: Zm_Drought_P Parameter: Treatment Value: Drought vs. No Drought
  misc_feature: MA Experiment ID: 20000626 Result: Down-regulated in Transcription
  misc_feature: MA Experiment 20000626 PARAMETER Experiment Name: Zm_Herbicide-Treatments_P Parameter: Timepoint (hr) Value: 12
  misc_feature: MA Experiment 20000626 PARAMETER Experiment Name: Zm_Herbicide-Treatments_P Parameter: Tissue Value: Aerial
  misc_feature: MA Experiment 20000626 PARAMETER Experiment Name: Zm_Herbicide-Treatments_P Parameter: Treatment Value: Roundup vs. No Treatment
agcaacccaacccacatccaccggaagatgagagctccagctccagctgctcctattcccgcgctgctctcccgctgctcctcgcctccctcctcggccccgcgccgcctcctctcctcctcccgcacgccagccgcctgctgcccgcctccggcagtcgtccgctctgtctccgtcgatttgctggcggtcgccggggagccggctgtcgcaggcgccccctccgcaacgccgtgccgtcgcctcatcctcctccgtcacggggacagcgccaccgggggccgcttcaccagagatcatgacagacctctaagcaaggctgggagagctgacgcaatcagcgtctctaataaactccaacagatgggatgggtacccgagcttattctctgcagtgatgcaatgcgcacaaaggagactcttaagattctgcaagagcatgtccatggattgtctgaagcagtagtgcactttatcccaagtttctactcaattgcggcaatggatggccaaactgcagagcatttgcaaaaggcgatttgngaatattcgagtgatgagatcttaactgngatgtgcatgggtcataataaaggatgggaagaanccgcctntatgttttntggcgattcagttttgcttganacatgtaacgctgcgttgttagaagctgcaggcaaatcatgggttgaggccttttttgtggctggtntgggaggatggaagctccatggaattgtaaagccatgaattattgtaactaaaagctagatgtaattttttagctgtttnttaattattattattaacctttgtgtagtggtttttacatgccactgaagctttcggtntgaaggtatcaacatggttagatagatgagatgagatgaatgaattnttccncggtccatgagtt

SEQ ID NO: 14633 - protein, 249 aa, Zea mays subsp. mays
  peptide (1)..(249): Ceres Seq. ID no. 12468119
  misc_feature (81)..(204): Pfam Name: Phosphoglycerate mutase family Pfam Description: Phosphoglycerate mutase family
  misc_feature (47)..(249): Homolog of NCBI NO: 18409499 NR Description: Expressed protein; protein id: At3g52155.1, by cDNA: gi_14517465 [Arabidopsis thaliana] AT3g52150/F4F15_260 [Arabidopsis thaliana]
  misc_feature (97)..(249): Homolog of NCBI NO: 11357772 NR Description: hypothetical protein F4F15.260 - Arabidopsis >gi|4678944|emb|CAB41335.1| putative protein [Arabidopsis
  misc_feature (80)..(220): Homolog of NCBI NO: 22961147 NR Description: hypothetical protein [Rhodopseudomonas palustris]
  misc_feature (71)..(212): Homolog of NCBI NO: 29833593 NR Description: hypothetical protein [Streptomyces avermitilis
  misc_feature (80)..(229): Homolog of NCBI NO: 23136095 NR Description: hypothetical protein [Cytophaga hutchinsonii]
  misc_feature (81)..(210): Homolog of NCBI NO: 13470938 NR Description: hypothetical protein [Mesorhizobium loti]
  misc_feature (80)..(243): Homolog of NCBI NO: 23017923 NR Description: hypothetical protein [Thermobifida fusca]
  misc_feature (80)..(201): Homolog of NCBI NO: 22999200 NR Description: hypothetical protein [Magnetococcus sp. MC-1]
  misc_feature (76)..(211): Homolog of NCBI NO: 29833011 NR Description: hypothetical protein [Streptomyces avermitilis
  misc_feature (81)..(204): Homolog of NCBI NO: 16124781 NR Description: conserved hypothetical protein [Caulobacter
  misc_feature (181)..(181): Xaa is any aa, unknown or other
  misc_feature (191)..(191): Xaa is any aa, unknown or other
  misc_feature (203)..(203): Xaa is any aa, unknown or other
  misc_feature (205)..(205): Xaa is any aa, unknown or other
  misc_feature (208)..(208): Xaa is any aa, unknown or other
  misc_feature (215)..(215): Xaa is any aa, unknown or other
  misc_feature (238)..(238): Xaa is any aa, unknown or other
SNPTHIHRKMRAPAPAAPIPALLSRCSSPPSSAPRRLLSSSRTPAACCPPPAVVRSVSVDLLAVAGEPAVAGAPSATPCRRLILLRHGDSATGGRFTRDHDRPLSKAGRADAISVSNKLQQMGWVPELILCSDAMRTKETLKILQEHVHGLSEAVVHFIPSFYSIAAMDGQTAEHLQKAIXEYSSDEILTXMCMGHNKGWEEXAXMFXGDSVLLXTCNAALLEAAGKSWVEAFFVAGXGGWKLHGIVKP

SEQ ID NO: 14634 - protein, 240 aa, Zea mays subsp. mays
  peptide (1)..(240): Ceres Seq. ID no. 12468120
  misc_feature (72)..(195): Pfam Name: Phosphoglycerate mutase family Pfam Description: Phosphoglycerate mutase family
  misc_feature (38)..(240): Homolog of NCBI NO: 18409499 NR Description: Expressed protein; protein id: At3g52155.1, by cDNA: gi_14517465 [Arabidopsis thaliana] AT3g52150/F4F15_260 [Arabidopsis thaliana]
  misc_feature (88)..(240): Homolog of NCBI NO: 11357772 NR Description: hypothetical protein F4F15.260 - Arabidopsis >gi|4678944|emb|CAB41335.1| putative protein [Arabidopsis
  misc_feature (71)..(211): Homolog of NCBI NO: 22961147 NR Description: hypothetical protein [Rhodopseudomonas palustris]
  misc_feature (62)..(203): Homolog of NCBI NO: 29833593 NR Description: hypothetical protein [Streptomyces avermitilis
  misc_feature (71)..(220): Homolog of NCBI NO: 23136095 NR Description: hypothetical protein [Cytophaga hutchinsonii]
  misc_feature (72)..(201): Homolog of NCBI NO: 13470938 NR Description: hypothetical protein [Mesorhizobium loti]
  misc_feature (71)..(234): Homolog of NCBI NO: 23017923 NR Description: hypothetical protein [Thermobifida fusca]
  misc_feature (71)..(192): Homolog of NCBI NO: 22999200 NR Description: hypothetical protein [Magnetococcus sp. MC-1]
  misc_feature (67)..(202): Homolog of NCBI NO: 29833011 NR Description: hypothetical protein [Streptomyces avermitilis
  misc_feature (72)..(195): Homolog of NCBI NO: 16124781 NR Description: conserved hypothetical protein [Caulobacter
  misc_feature (172)..(172): Xaa is any aa, unknown or other
  misc_feature (182)..(182): Xaa is any aa, unknown or other
  misc_feature (194)..(194): Xaa is any aa, unknown or other
  misc_feature (196)..(196): Xaa is any aa, unknown or other
  misc_feature (199)..(199): Xaa is any aa, unknown or other
  misc_feature (206)..(206): Xaa is any aa, unknown or other
  misc_feature (229)..(229): Xaa is any aa, unknown or other
MRAPAPAAPIPALLSRCSSPPSSAPRRLLSSSRTPAACCPPPAVVRSVSVDLLAVAGEPAVAGAPSATPCRRLILLRHGDSATGGRFTRDHDRPLSKAGRADAISVSNKLQQMGWVPELILCSDAMRTKETLKILQEHVHGLSEAVVHFIPSFYSIAAMDGQTAEHLQKAIXEYSSDEILTXMCMGHNKGWEEXAXMFXGDSVLLXTCNAALLEAAGKSWVEAFFVAGXGGWKLHGIVKP

SEQ ID NO: 14635 - protein, 128 aa, Zea mays subsp. mays
  peptide (1)..(128): Ceres Seq. ID no. 12468121
  misc_feature (1)..(83): Pfam Name: Phosphoglycerate mutase family Pfam Description: Phosphoglycerate mutase family
  misc_feature (1)..(91): Homolog of NCBI NO: 29833593 NR Description: hypothetical protein [Streptomyces avermitilis
  misc_feature (1)..(108): Homolog of NCBI NO: 23136095 NR Description: hypothetical protein [Cytophaga hutchinsonii]
  misc_feature (1)..(89): Homolog of NCBI NO: 13470938 NR Description: hypothetical protein [Mesorhizobium loti]
  misc_feature (1)..(122): Homolog of NCBI NO: 23017923 NR Description: hypothetical protein [Thermobifida fusca]
  misc_feature (1)..(128): Homolog of NCBI NO: 11357772 NR Description: hypothetical protein F4F15.260 - Arabidopsis >gi|4678944|emb|CAB41335.1| putative protein [Arabidopsis
  misc_feature (1)..(99): Homolog of NCBI NO: 22961147 NR Description: hypothetical protein [Rhodopseudomonas palustris]
  misc_feature (1)..(128): Homolog of NCBI NO: 18409499 NR Description: Expressed protein; protein id: At3g52155.1, by cDNA: gi_14517465 [Arabidopsis thaliana] AT3g52150/F4F15_260 [Arabidopsis thaliana]
  misc_feature (1)..(80): Homolog of NCBI NO: 22999200 NR Description: hypothetical protein [Magnetococcus sp. MC-1]
  misc_feature (1)..(90): Homolog of NCBI NO: 29833011 NR Description: hypothetical protein [Streptomyces avermitilis
  misc_feature (1)..(83): Homolog of NCBI NO: 16124781 NR Description: conserved hypothetical protein [Caulobacter
  misc_feature (60)..(60): Xaa is any aa, unknown or other
  misc_feature (70)..(70): Xaa is any aa, unknown or other
  misc_feature (82)..(82): Xaa is any aa, unknown or other
  misc_feature (84)..(84): Xaa is any aa, unknown or other
  misc_feature (87)..(87): Xaa is any aa, unknown or other
  misc_feature (94)..(94): Xaa is any aa, unknown or other
  misc_feature (117)..(117): Xaa is any aa, unknown or other
MGWVPELILCSDAMRTKETLKILQEHVHGLSEAVVHFIPSFYSIAAMDGQTAEHLQKAIXEYSSDEILTXMCMGHNKGWEEXAXMFXGDSVLLXTCNAALLEAAGKSWVEAFFVAGXGGWKLHGIVKP

SEQ ID NO: 14636 - DNA, 1530 bp, Zea mays subsp. mays
  misc_feature (1)..(1530): Ceres Seq. ID no. 13496483
  misc_feature: MA Experiment ID: 108535 Result: Up-regulated in Transcription
  misc_feature: MA Experiment 108535 PARAMETER Experiment Name: Zm_Meristem_P Parameter: Age (day) Value: 8
  misc_feature: MA Experiment 108535 PARAMETER Experiment Name: Zm_Meristem_P Parameter: Organism Value: Zea mays
  misc_feature: MA Experiment 108535 PARAMETER Experiment Name: Zm_Meristem_P Parameter: Plant Line Value: 35A19
  misc_feature: MA Experiment 108535 PARAMETER Experiment Name: Zm_Meristem_P Parameter: Tissue Value: Root Meristem vs. Above Root Meristem
  misc_feature: MA Experiment ID: 108556 Result: Down-regulated in Transcription
  misc_feature: MA Experiment 108556 PARAMETER Experiment Name: Zm_Drought_P Parameter: Age (day) Value: 9
  misc_feature: MA Experiment 108556 PARAMETER Experiment Name: Zm_Drought_P Parameter: Organism Value: Zea mays
  misc_feature: MA Experiment 108556 PARAMETER Experiment Name: Zm_Drought_P Parameter: Plant Line Value: 35A19
  misc_feature: MA Experiment 108556 PARAMETER Experiment Name: Zm_Drought_P Parameter: Timepoint (hr) Value: 24
  misc_feature: MA Experiment 108556 PARAMETER Experiment Name: Zm_Drought_P Parameter: Tissue Value: Aerial
  misc_feature: MA Experiment 108556 PARAMETER Experiment Name: Zm_Drought_P Parameter: Treatment Value: Drought vs. No Drought
gtcgaggccgccgcccagaccgcctccccttccccgcctccggtgcccaaggccaggccaacagttttgaggtggtaatggcggaccaggctaaccaacccactgtccttcataagctaggtggccagttccacctgagctccagcttctctgaaggtgtacgggcccgtaacatctgcccttctttctcaccttatgaaaggagatttgccacgaggaactacatgacccagagcctttggggcccttcaatgtctgttagcggtggcatcaatgttccagtgatgccgactccgctttttgccaatgctccagccgagaaaggtggcaaaaacttcatgattgatttcatgatgggcggtgtttcagctgctgtttcgaagactgcagctgctcccattgaacgagtgaagctgcttattcagaatcaggatgagatgatcaagtctggtaggctatcagagccgtacaagggtattgctgattgcttcaaacgtaccatcaaggatgagggtttctcttccttgtggaggggtaacactgctaatgttattcgttacttccctactcaggctttgaactttgcgtttaaggactacttcaagaggctgttcaacttcaagaaggacagggatggttactggaagtggtttgctggcaacctggcctctggtggtgctgctggtgcttcctctttgttttttgtgtactccctggattatgcgaggacaaggttggccaatgatgccaaggctgccaagggaggaggcgatagacaattcaatggtcttgtggatgtctaccgcaagacactcaaatctgatggtattgctgggctttaccgtggatttaacatatcttgtgttggaattattgtttatcgtggcctgtatttcggactttacgattctatcaagccagttgtcctcactggcagcctccaggacaacttctttgccagttttgctctgggttggctgatcaccaacggtgctggtcttgcatcttaccccattgatactgtccgcagaaggatgatgatgacttctggtgaggctgtcaagtacaagagctcattggacgcattccagcagatccttaagaaggaaggccccaagtccctgttcaagggtgctggtgctaacattcttcgtgccattgctggcgctggtgtgctttctggctacgaccagctccagatcctcttcttcggaaagaagtacggctccggcggtgcttaaatggagaaaaatgatgacgaacaagagcagttcgctcccggtccagcccagtcaggatctggtcaagtttttgcctttcatatcgaagaaattaataatttatgtaggagaatttttccaacattcgttttgggcggagacattgatctcaaaacactcgtaactgtcctactaggtggtggcatgggtccccaaaacatggtcatagggtgtgtctagtctgcccttcgttgcagccgggcaattttccttacatatattgcctttaatcaagtatcagatgagtgtc

SEQ ID NO: 14637 - protein, 412 aa, Zea mays subsp. mays
  peptide (1)..(412): Ceres Seq. ID no. 13496484
  misc_feature (26)..(412): Homolog of NCBI NO: 113460 NR Description: ADP,ATP carrier protein 2, mitochondrial (ADP/ATP translocase 2) (Adenine nucleotide translocator 2) (ANT
  misc_feature (26)..(412): Homolog of NCBI NO: 22168 NR Description: adenine nucleotide translocator [Zea mays]
  misc_feature (26)..(412): Homolog of NCBI NO: 113456 NR Description: ADP,ATP carrier protein 1, mitochondrial (ADP/ATP translocase 1) (Adenine nucleotide translocator 1) (ANT
  misc_feature (26)..(412): Homolog of NCBI NO: 22166 NR Description: adenine nucleotide translocator [Zea mays]
  misc_feature (26)..(412): Homolog of NCBI NO: 399015 NR Description: ADP,ATP carrier protein, mitochondrial precursor translocase) (Adenine nucleotide translocator) (ANT)
  misc_feature (26)..(412): Homolog of NCBI NO: 485517 NR Description: ADP,ATP carrier protein - rice
  misc_feature (95)..(412): Homolog of NCBI NO: 22160 NR Description: put. ATP/ADP translocator [Zea mays]
  misc_feature (84)..(412): Homolog of NCBI NO: 944842 NR Description: ATP/ADP carrier protein [Triticum turgidum]
  misc_feature (84)..(412): Homolog of NCBI NO: 3334116 NR Description: ADP,ATP carrier protein 1, mitochondrial (ADP/ATP translocase 1) (Adenine nucleotide translocator 1) (ANT >gi|1297066|emb|CAA65119.1| adenine nucleotide translocator
  misc_feature (28)..(412): Homolog of NCBI NO: 3334115 NR Description: ADP,ATP carrier protein 1, mitochondrial (ADP/ATP translocase 1) (Adenine nucleotide translocator 1) (ANT
RGRRPDRLPFPASGAQGQANSFEVVMADQANQPTVLHKLGGQFHLSSSFSEGVRARNICPSFSPYERRFATRNYMTQSLWGPSMSVSGGINVPVMPTPLFANAPAEKGGKNFMIDFMMGGVSAAVSKTAAAPIERVKLLIQNQDEMIKSGRLSEPYKGIADCFKRTIKDEGFSSLWRGNTANVIRYFPTQALNFAFKDYFKRLFNFKKDRDGYWKWFAGNLASGGAAGASSLFFVYSLDYARTRLANDAKAAKGGGDRQFNGLVDVYRKTLKSDGIAGLYRGFNISCVGIIVYRGLYFGLYDSIKPVVLTGSLQDNFFASFALGWLITNGAGLASYPIDTVRRRMMMTSGEAVKYKSSLDAFQQILKKEGPKSLFKGAGANILRAIAGAGVLSGYDQLQILFFGKKYGSGGA

SEQ ID NO: 14638 - protein, 387 aa, Zea mays subsp. mays
  peptide (1)..(387): Ceres Seq. ID no. 13496485
  misc_feature (1)..(387): Homolog of NCBI NO: 113460 NR Description: ADP,ATP carrier protein 2, mitochondrial (ADP/ATP translocase 2) (Adenine nucleotide translocator 2) (ANT
  misc_feature (1)..(387): Homolog of NCBI NO: 22168 NR Description: adenine nucleotide translocator [Zea mays]
  misc_feature (1)..(387): Homolog of NCBI NO: 113456 NR Description: ADP,ATP carrier protein 1, mitochondrial (ADP/ATP translocase 1) (Adenine nucleotide translocator 1) (ANT
  misc_feature (1)..(387): Homolog of NCBI NO: 22166 NR Description: adenine nucleotide translocator [Zea mays]
  misc_feature (1)..(387): Homolog of NCBI NO: 399015 NR Description: ADP,ATP carrier protein, mitochondrial precursor translocase) (Adenine nucleotide translocator) (ANT)
  misc_feature (1)..(387): Homolog of NCBI NO: 485517 NR Description: ADP,ATP carrier protein - rice
  misc_feature (70)..(387): Homolog of NCBI NO: 22160 NR Description: put. ATP/ADP translocator [Zea mays]
  misc_feature (59)..(387): Homolog of NCBI NO: 944842 NR Description: ATP/ADP carrier protein [Triticum turgidum]
  misc_feature (59)..(387): Homolog of NCBI NO: 3334116 NR Description: ADP,ATP carrier protein 1, mitochondrial (ADP/ATP translocase 1) (Adenine nucleotide translocator 1) (ANT >gi|1297066|emb|CAA65119.1| adenine nucleotide translocator
  misc_feature (3)..(387): Homolog of NCBI NO: 3334115 NR Description: ADP,ATP carrier protein 1, mitochondrial (ADP/ATP translocase 1) (Adenine nucleotide translocator 1) (ANT
MADQANQPTVLHKLGGQFHLSSSFSEGVRARNICPSFSPYERRFATRNYMTQSLWGPSMSVSGGINVPVMPTPLFANAPAEKGGKNFMIDFMMGGVSAAVSKTAAAPIERVKLLIQNQDEMIKSGRLSEPYKGIADCFKRTIKDEGFSSLWRGNTANVIRYFPTQALNFAFKDYFKRLFNFKKDRDGYWKWFAGNLASGGAAGASSLFFVYSLDYARTRLANDAKAAKGGGDRQFNGLVDVYRKTLKSDGIAGLYRGFNISCVGIIVYRGLYFGLYDSIKPVVLTGSLQDNFFASFALGWLITNGAGLASYPIDTVRRRMMMTSGEAVKYKSSLDAFQQILKKEGPKSLFKGAGANILRAIAGAGVLSGYDQLQILFFGKKYGSGGA

SEQ ID NO: 14639 - protein, 338 aa, Zea mays subsp. mays
  peptide (1)..(338): Ceres Seq. ID no. 13496486
  misc_feature (1)..(338): Homolog of NCBI NO: 113460 NR Description: ADP,ATP carrier protein 2, mitochondrial (ADP/ATP translocase 2) (Adenine nucleotide translocator 2) (ANT
  misc_feature (1)..(338): Homolog of NCBI NO: 22168 NR Description: adenine nucleotide translocator [Zea mays]
  misc_feature (1)..(338): Homolog of NCBI NO: 113456 NR Description: ADP,ATP carrier protein 1, mitochondrial (ADP/ATP translocase 1) (Adenine nucleotide translocator 1) (ANT
  misc_feature (1)..(338): Homolog of NCBI NO: 22166 NR Description: adenine nucleotide translocator [Zea mays]
  misc_feature (1)..(338): Homolog of NCBI NO: 399015 NR Description: ADP,ATP carrier protein, mitochondrial precursor translocase) (Adenine nucleotide translocator) (ANT)
  misc_feature (1)..(338): Homolog of NCBI NO: 485517 NR Description: ADP,ATP carrier protein - rice
  misc_feature (21)..(338): Homolog of NCBI NO: 22160 NR Description: put. ATP/ADP translocator [Zea mays]
  misc_feature (10)..(338): Homolog of NCBI NO: 944842 NR Description: ATP/ADP carrier protein [Triticum turgidum]
  misc_feature (10)..(338): Homolog of NCBI NO: 3334116 NR Description: ADP,ATP carrier protein 1, mitochondrial (ADP/ATP translocase 1) (Adenine nucleotide translocator 1) (ANT >gi|1297066|emb|CAA65119.1| adenine nucleotide translocator
  misc_feature (1)..(338): Homolog of NCBI NO: 3334115 NR Description: ADP,ATP carrier protein 1, mitochondrial (ADP/ATP translocase 1) (Adenine nucleotide translocator 1) (ANT
MTQSLWGPSMSVSGGINVPVMPTPLFANAPAEKGGKNFMIDFMMGGVSAAVSKTAAAPIERVKLLIQNQDEMIKSGRLSEPYKGIADCFKRTIKDEGFSSLWRGNTANVIRYFPTQALNFAFKDYFKRLFNFKKDRDGYWKWFAGNLASGGAAGASSLFFVYSLDYARTRLANDAKAAKGGGDRQFNGLVDVYRKTLKSDGIAGLYRGFNISCVGIIVYRGLYFGLYDSIKPVVLTGSLQDNFFASFALGWLITNGAGLASYPIDTVRRRMMMTSGEAVKYKSSLDAFQQILKKEGPKSLFKGAGANILRAIAGAGVLSGYDQLQILFFGKKYGSGGA

SEQ ID NO: 14640 - DNA, 709 bp, Zea mays subsp. mays
  misc_feature (1)..(709): Ceres Seq. ID no. 12468116
  misc_feature: MA Experiment ID: 108535 Result: Up-regulated in Transcription
  misc_feature: MA Experiment 108535 PARAMETER Experiment Name: Zm_Meristem_P Parameter: Age (day) Value: 8
  misc_feature: MA Experiment 108535 PARAMETER Experiment Name: Zm_Meristem_P Parameter: Organism Value: Zea mays
  misc_feature: MA Experiment 108535 PARAMETER Experiment Name: Zm_Meristem_P Parameter: Plant Line Value: 35A19
  misc_feature: MA Experiment 108535 PARAMETER Experiment Name: Zm_Meristem_P Parameter: Tissue Value: Root Meristem vs. Above Root Meristem
  misc_feature: MA Experiment ID: 108544 Result: Down-regulated in Transcription
  misc_feature: MA Experiment ID: 20000477 Result: Down-regulated in Transcription
  misc_feature: MA Experiment 20000477 PARAMETER Experiment Name: Zm_5mM_SA_P Parameter: Age (day) Value: 10
  misc_feature: MA Experiment 20000477 PARAMETER Experiment Name: Zm_5mM_SA_P Parameter: Organism Value: Zea mays
  misc_feature: MA Experiment 20000477 PARAMETER Experiment Name: Zm_5mM_SA_P Parameter: Plant Line Value: 35A19
  misc_feature: MA Experiment 20000477 PARAMETER Experiment Name: Zm_5mM_SA_P Parameter: Timepoint (hr) Value: 48
  misc_feature: MA Experiment 20000477 PARAMETER Experiment Name: Zm_5mM_SA_P Parameter: Tissue Value: Aerial
  misc_feature: MA Experiment 20000477 PARAMETER Experiment Name: Zm_5mM_SA_P Parameter: Treatment Value: 5mM SA vs. No Treatment
  misc_feature: MA Experiment ID: 20000478 Result: Down-regulated in Transcription
  misc_feature: MA Experiment 20000478 PARAMETER Experiment Name: Zm_5mM_SA_P Parameter: Age (day) Value: 11
  misc_feature: MA Experiment 20000478 PARAMETER Experiment Name: Zm_5mM_SA_P Parameter: Organism Value: Zea mays
  misc_feature: MA Experiment 20000478 PARAMETER Experiment Name: Zm_5mM_SA_P Parameter: Plant Line Value: 35A19
  misc_feature: MA Experiment 20000478 PARAMETER Experiment Name: Zm_5mM_SA_P Parameter: Timepoint (hr) Value: 72
  misc_feature: MA Experiment 20000478 PARAMETER Experiment Name: Zm_5mM_SA_P Parameter: Tissue Value: Aerial
  misc_feature: MA Experiment 20000478 PARAMETER Experiment Name: Zm_5mM_SA_P Parameter: Treatment Value: 5mM SA vs. No Treatment
  misc_feature: MA Experiment ID: 20000492 Result: Down-regulated in Transcription
  misc_feature: MA Experiment 20000492 PARAMETER Experiment Name: Zm_Hybrid_Seed_Dev_P Parameter: DAP Value: 12
  misc_feature: MA Experiment 20000492 PARAMETER Experiment Name: Zm_Hybrid_Seed_Dev_P Parameter: Organism Value: Zea mays
  misc_feature: MA Experiment 20000492 PARAMETER Experiment Name: Zm_Hybrid_Seed_Dev_P Parameter: Plant Line Value: 35A19
  misc_feature: MA Experiment 20000492 PARAMETER Experiment Name: Zm_Hybrid_Seed_Dev_P Parameter: Tissue Value: Fert Kernel vs. Unfert Floret
tccatggtagttcagttgattggtggactcttggaatcttcctttacgaattactctatggcaagacaccattcaagggacctggcaatgaggaaacactctcaaatgtgatctcacagggcttgaagttccctgataatccagctgtaagcttccacgctcgagatctgatcagaggtctgcttgtgaaagagcctgagtaccggcttggctcgtcgagaggagccactgagattaagcggcatcccttctttgaaggcctgaactgggccttgatccggtggaccgcaccaccagagaccctgaagaacattgacactgcaccaacacctgcaacgacacgcaagaagaaggaaggcaaatgtctggaattccggctgaatggtgacgacatcgagttcgagctattttagttgtagttgtagtggcatcgctgttgtagtctcaaggatatatcaaatatcatgataagctagcaagagtagtcttagtccctcttccctgcagttttctgttgaaagttagtcatcgttgggaagtaaggtaagattggctgttaggcctgtaactttatgccttgttaataccatcaaatattagaagacacggttgggaaattcctgggcatgtgcgagatgntgagatgcagctggcagaaagtgtacattgtgttgctggatggaacaatttgtgcctcgcttacttgatg

SEQ ID NO: 14641 - protein, 136 aa, Zea mays subsp. mays
  peptide (1)..(136): Ceres Seq. ID no. 12468117
  misc_feature (1)..(84): Pfam Name: Protein kinase domain Pfam Description: Protein kinase domain
  misc_feature (1)..(136): Homolog of NCBI NO: 15227639 NR Description: putative protein kinase; protein id: At2g36350.1
  misc_feature (1)..(136): Homolog of NCBI NO: 7716430 NR Description: protein kinase KIPK [Arabidopsis thaliana]
  misc_feature (1)..(136): Homolog of NCBI NO: 30693719 NR Description: protein kinase (KIPK) [Arabidopsis thaliana]
  misc_feature (1)..(136): Homolog of NCBI NO: 15242814 NR Description: protein kinase -like protein; protein id:
  misc_feature (1)..(124): Homolog of NCBI NO: 15236802 NR Description: putative protein kinase; protein id: At4g26610.1, by cDNA: gi_17380933, supported by cDNA: gi_20258942 [Arabidopsis >gi|7488161|pir||T08927 probable protein kinase T15N24.60
  misc_feature (1)..(136): Homolog of NCBI NO: 15238798 NR Description: protein kinase (EC 2.7.1.37) 5 (pir||JN0505); id: At5g47750.1, supported by cDNA: gi_15809918, supported by gi_17064849, supported by cDNA: gi_20259909 [Arabidopsis
  misc_feature (1)..(136): Homolog of NCBI NO: 17064850 NR Description: protein kinase 5 [Arabidopsis thaliana]
  misc_feature (1)..(136): Homolog of NCBI NO: 320622 NR Description: probable protein kinase - maize (fragment)
  misc_feature (1)..(110): Homolog of NCBI NO: 1346057 NR Description: Protein kinase G11A >gi|100705|pir||B30311
  misc_feature (1)..(110): Homolog of NCBI NO: 15241076 NR Description: serine threonine-specific protein kinase ATPK64
HGSSVDWWTLGIFLYELLYGKTPFKGPGNEETLSNVISQGLKFPDNPAVSFHARDLIRGLLVKEPEYRLGSSRGATEIKRHPFFEGLNWALIRWTAPPETLKNIDTAPTPATTRKKKEGKCLEFRLNGDDIEFELF

SEQ ID NO: 14642 - DNA, 838 bp, Zea mays subsp. mays
  misc_feature (1)..(838): Ceres Seq. ID no. 12468112
  misc_feature: MA Experiment ID: 108527 Result: Up-regulated in Transcription
  misc_feature: MA Experiment 108527 PARAMETER Experiment Name: Zm_5mM_NO_P Parameter: Age (day) Value: 8
  misc_feature: MA Experiment 108527 PARAMETER Experiment Name: Zm_5mM_NO_P Parameter: Organism Value: Zea mays
  misc_feature: MA Experiment 108527 PARAMETER Experiment Name: Zm_5mM_NO_P Parameter: Plant Line Value: 35A19
  misc_feature: MA Experiment 108527 PARAMETER Experiment Name: Zm_5mM_NO_P Parameter: Timepoint (hr) Value: 6
  misc_feature: MA Experiment 108527 PARAMETER Experiment Name: Zm_5mM_NO_P Parameter: Tissue Value: Aerial
  misc_feature: MA Experiment 108527 PARAMETER Experiment Name: Zm_5mM_NO_P Parameter: Treatment Value: 5mM NO vs. No Treatment
  misc_feature: MA Experiment ID: 108528 Result: Down-regulated in Transcription
  misc_feature: MA Experiment 108528 PARAMETER Experiment Name: Zm_Imbibed_Seeds_P Parameter: Age (day) Value: 5 vs. 2
  misc_feature: MA Experiment 108528 PARAMETER Experiment Name: Zm_Imbibed_Seeds_P Parameter: Organism Value: Zea mays
  misc_feature: MA Experiment 108528 PARAMETER Experiment Name: Zm_Imbibed_Seeds_P Parameter: Plant Line Value: 35A19
  misc_feature: MA Experiment 108528 PARAMETER Experiment Name: Zm_Imbibed_Seeds_P Parameter: Tissue Value: Aerial vs. Embryo
  misc_feature: MA Experiment ID: 108529 Result: Up-regulated in Transcription
  misc_feature: MA Experiment 108529 PARAMETER Experiment Name: Zm_Imbibed_Seeds_P Parameter: Age (day) Value: 5 vs. 2
  misc_feature: MA Experiment 108529 PARAMETER Experiment Name: Zm_Imbibed_Seeds_P Parameter: Organism Value: Zea mays
  misc_feature: MA Experiment 108529 PARAMETER Experiment Name: Zm_Imbibed_Seeds_P Parameter: Plant Line Value: 35A19
  misc_feature: MA Experiment 108529 PARAMETER Experiment Name: Zm_Imbibed_Seeds_P Parameter: Tissue Value: Roots vs. Embryo
  misc_feature: MA Experiment ID: 108534 Result: Up-regulated in Transcription
  misc_feature: MA Experiment 108534 PARAMETER Experiment Name: Zm_4deg_Cold_P Parameter: Age (hr) Value: 8
  misc_feature: MA Experiment 108534 PARAMETER Experiment Name: Zm_4deg_Cold_P Parameter: Organism Value: Zea mays
  misc_feature: MA Experiment 108534 PARAMETER Experiment Name: Zm_4deg_Cold_P Parameter: Plant Line Value: 35A19
  misc_feature: MA Experiment 108534 PARAMETER Experiment Name: Zm_4deg_Cold_P Parameter: Temperature (deg C) Value: 4 vs. 22
  misc_feature: MA Experiment 108534 PARAMETER Experiment Name: Zm_4deg_Cold_P Parameter: Timepoint (hr) Value: 6
  misc_feature: MA Experiment 108534 PARAMETER Experiment Name: Zm_4deg_Cold_P Parameter: Tissue Value: Aerial
  misc_feature: MA Experiment ID: 108535 Result: Down-regulated in Transcription
  misc_feature: MA Experiment 108535 PARAMETER Experiment Name: Zm_Meristem_P Parameter: Age (day) Value: 8
  misc_feature: MA Experiment 108535 PARAMETER Experiment Name: Zm_Meristem_P Parameter: Organism Value: Zea mays
  misc_feature: MA Experiment 108535 PARAMETER Experiment Name: Zm_Meristem_P Parameter: Plant Line Value: 35A19
  misc_feature: MA Experiment 108535 PARAMETER Experiment Name: Zm_Meristem_P Parameter: Tissue Value: Root Meristem vs. Above Root Meristem
  misc_feature: MA Experiment ID: 108543 Result: Up-regulated in Transcription
  misc_feature: MA Experiment ID: 108545 Result: Down-regulated in Transcription
  misc_feature: MA Experiment 108545 PARAMETER Experiment Name: Zm_Imbibed_Seeds_P Parameter: Age (day) Value: 3 vs. 2
  misc_feature: MA Experiment 108545 PARAMETER Experiment Name: Zm_Imbibed_Seeds_P Parameter: Organism Value: Zea mays
  misc_feature: MA Experiment 108545 PARAMETER Experiment Name: Zm_Imbibed_Seeds_P Parameter: Plant Line Value: 35A19
  misc_feature: MA Experiment 108545 PARAMETER Experiment Name: Zm_Imbibed_Seeds_P Parameter: Tissue Value: Aerial vs. Embryo
  misc_feature: MA Experiment ID: 108546 Result: Up-regulated in Transcription
  misc_feature: MA Experiment 108546 PARAMETER Experiment Name: Zm_Imbibed_Seeds_P Parameter: Age (day) Value: 3 vs. 2
  misc_feature: MA Experiment 108546 PARAMETER Experiment Name: Zm_Imbibed_Seeds_P Parameter: Organism Value: Zea mays
  misc_feature: MA Experiment 108546 PARAMETER Experiment Name: Zm_Imbibed_Seeds_P Parameter: Plant Line Value: 35A19
  misc_feature: MA Experiment 108546 PARAMETER Experiment Name: Zm_Imbibed_Seeds_P Parameter: Tissue Value: Roots vs. Embryo
  misc_feature: MA Experiment ID: 108547 Result: Down-regulated in Transcription
  misc_feature: MA Experiment 108547 PARAMETER Experiment Name: Zm_Imbibed_Seeds_P Parameter: Age (day) Value: 4 vs. 2
  misc_feature: MA Experiment 108547 PARAMETER Experiment Name: Zm_Imbibed_Seeds_P Parameter: Organism Value: Zea mays
  misc_feature: MA Experiment 108547 PARAMETER Experiment Name: Zm_Imbibed_Seeds_P Parameter: Plant Line Value: 35A19
  misc_feature: MA Experiment 108547 PARAMETER Experiment Name: Zm_Imbibed_Seeds_P Parameter: Tissue Value: Aerial vs. Embryo
  misc_feature: MA Experiment ID: 108689 Result: Down-regulated in Transcription
  misc_feature: MA Experiment 108689 PARAMETER Experiment Name: Zm_Drought_Roots_P Parameter: Age (day) Value: 9
  misc_feature: MA Experiment 108689 PARAMETER Experiment Name: Zm_Drought_Roots_P Parameter: Organism Value: Zea mays
  misc_feature: MA Experiment 108689 PARAMETER Experiment Name: Zm_Drought_Roots_P Parameter: Plant Line Value: 35A19
  misc_feature: MA Experiment 108689 PARAMETER Experiment Name: Zm_Drought_Roots_P Parameter: Timepoint (hr) Value: 24
  misc_feature: MA Experiment 108689 PARAMETER Experiment Name: Zm_Drought_Roots_P Parameter: Tissue Value: Roots
  misc_feature: MA Experiment 108689 PARAMETER Experiment Name: Zm_Drought_Roots_P Parameter: Treatment Value: Drought vs. No Drought
  misc_feature: MA Experiment ID: 20000480 Result: Down-regulated in Transcription
  misc_feature: MA Experiment 20000480 PARAMETER Experiment Name: Zm_Drought_P Parameter: Age (day) Value: 11
  misc_feature: MA Experiment 20000480 PARAMETER Experiment Name: Zm_Drought_P Parameter: Organism Value: Zea mays
  misc_feature: MA Experiment 20000480 PARAMETER Experiment Name: Zm_Drought_P Parameter: Plant Line Value: 35A19
  misc_feature: MA Experiment 20000480 PARAMETER Experiment Name: Zm_Drought_P Parameter: Timepoint (hr) Value: 72
  misc_feature: MA Experiment 20000480 PARAMETER Experiment Name: Zm_Drought_P Parameter: Tissue Value: Aerial
  misc_feature: MA Experiment 20000480 PARAMETER Experiment Name: Zm_Drought_P Parameter: Treatment Value: Drought vs. No Drought
  misc_feature: MA Experiment ID: 20000492 Result: Down-regulated in Transcription
  misc_feature: MA Experiment 20000492 PARAMETER Experiment Name: Zm_Hybrid_Seed_Dev_P Parameter: DAP Value: 12
  misc_feature: MA Experiment 20000492 PARAMETER Experiment Name: Zm_Hybrid_Seed_Dev_P Parameter: Organism Value: Zea mays
  misc_feature: MA Experiment 20000492 PARAMETER Experiment Name: Zm_Hybrid_Seed_Dev_P Parameter: Plant Line Value: 35A19
  misc_feature: MA Experiment 20000492 PARAMETER Experiment Name: Zm_Hybrid_Seed_Dev_P Parameter: Tissue Value: Fert Kernel vs. Unfert Floret
  misc_feature: MA Experiment ID: 20000535 Result: Down-regulated in Transcription
  misc_feature: MA Experiment 20000535 PARAMETER Experiment Name: Zm_Hybrid_Seed_Dev_P Parameter: DAP Value: 30 vs. 12
  misc_feature: MA Experiment 20000535 PARAMETER Experiment Name: Zm_Hybrid_Seed_Dev_P Parameter: Organism Value: Zea mays
  misc_feature: MA Experiment 20000535 PARAMETER Experiment Name: Zm_Hybrid_Seed_Dev_P Parameter: Plant Line Value: 35A19
  misc_feature: MA Experiment 20000535 PARAMETER Experiment Name: Zm_Hybrid_Seed_Dev_P Parameter: Tissue Value: Embryo vs. Unfert Floret
atcggcgtccgcctggagcagcagtttggattctggaaggtgggcctggtgtacctcgtctctggcttcggagggagcgtgctctccgtcttcttcatcaggaagggcgtctccgtgggcgcctccggcgcgctcttcggcctcctgggagcgatgctgtcggagctcatcaccaactggtccatctacaccaacagatttgcagccatgctgaacctgatcatcatcgccgccatcaacctggcgctcgggatactcccgcacgttgacaacttcgcgcacatcggcgggttcgccacaggcttcctcctcggcttcgtgctgctgatccagccccagttcgggtggctggagcagcccttcggtgccaagaccaagtccaagtacaaggcatatcagatcatcctcctgcttgctgccctcgtcttgctggctgcagggttcgctgttggattggtaatggtgttcagaggagagaacggcaacgatcactgtagctggtgccactacctgacctgcgtgccgacgtcaagctggaagtgtgacaattgaactgatcagagattagtgacgggttagcatgcttgcgtcgtacagaagagaacatgcgtccccaccacgagagacaatgtcaagatagatacgtgcccctcaccttntatgacattgtcaatgtattgctttcaagtttgatttttaaagtctgcattgtacagaattctcctgcctccattggatccaaatgaggagtttattggtattttttcttgtatatgttaaaaaaaactctgtaaatcactctgcctgtgttctggtttatggttttattcattgattc

SEQ ID NO: 14643 - protein, 183 aa, Zea mays subsp. mays
  peptide (1)..(183): Ceres Seq. ID no. 12468113
  misc_feature (1)..(182): Homolog of NCBI NO: 38344377 NR Description: OSJNBb0032E06.11 [Oryza sativa (japonica
  misc_feature (1)..(183): Homolog of NCBI NO: 15240744 NR Description: membrane protein; protein id: At5g07250.1, by cDNA: gi_16648761, supported by cDNA: gi_20466142 [Arabidopsis
  misc_feature (1)..(182): Homolog of NCBI NO: 294845 NR Description: membrane protein [Saccharum hybrid cultivar
  misc_feature (1)..(183): Homolog of NCBI NO: 37536172 NR Description: putative membrane protein [Oryza sativa (japonica group)] >gi|22122915|gb|AAM92298.1| putative membrane protein
  misc_feature (1)..(181): Homolog of NCBI NO: 15221690 NR Description: membrane protein, putative; protein id: [Arabidopsis thaliana] >gi|25404407|pir||F96656 probable membrane
  misc_feature (1)..(182): Homolog of NCBI NO: 18409916 NR Description: putative protein; protein id: At3g53780.1
  misc_feature (1)..(182): Homolog of NCBI NO: 30693911 NR Description: membrane protein, Rhomboid family [Arabidopsis
  misc_feature (2)..(181): Homolog of NCBI NO: 15222058 NR Description: membrane protein, putative; protein id: supported by cDNA: gi_17529033 [Arabidopsis thaliana] putative membrane protein [Arabidopsis thaliana]
  misc_feature (2)..(181): Homolog of NCBI NO: 25402744 NR Description: protein T12C24.28 [imported] - Arabidopsis >gi|9502383|gb|AAF88090.1|AC025417_18 T12C24.28 [Arabidopsis
  misc_feature (1)..(182): Homolog of NCBI NO: 11357824 NR Description: hypothetical protein F5K20.80 - Arabidopsis >gi|7629998|emb|CAB88340.1| putative protein [Arabidopsis
IGVRLEQQFGFWKVGLVYLVSGFGGSVLSVFFIRKGVSVGASGALFGLLGAMLSELITNWSIYTNRFAAMLNLIIIAAINLALGILPHVDNFAHIGGFATGFLLGFVLLIQPQFGWLEQPFGAKTKSKYKAYQIILLLAALVLLAAGFAVGLVMVFRGENGNDHCSWCHYLTCVPTSSWKCDN

SEQ ID NO: 14644 - protein, 132 aa, Zea mays subsp. mays
  peptide (1)..(132): Ceres Seq. ID no. 12468114
  misc_feature (1)..(131): Homolog of NCBI NO: 38344377 NR Description: OSJNBb0032E06.11 [Oryza sativa (japonica
  misc_feature (1)..(132): Homolog of NCBI NO: 15240744 NR Description: membrane protein; protein id: At5g07250.1, by cDNA: gi_16648761, supported by cDNA: gi_20466142 [Arabidopsis
  misc_feature (1)..(131): Homolog of NCBI NO: 294845 NR Description: membrane protein [Saccharum hybrid cultivar
  misc_feature (1)..(132): Homolog of NCBI NO: 37536172 NR Description: putative membrane protein [Oryza sativa (japonica group)] >gi|22122915|gb|AAM92298.1| putative membrane protein
  misc_feature (1)..(130): Homolog of NCBI NO: 15221690 NR Description: membrane protein, putative; protein id: [Arabidopsis thaliana] >gi|25404407|pir||F96656 probable membrane
  misc_feature (1)..(131): Homolog of NCBI NO: 18409916 NR Description: putative protein; protein id: At3g53780.1
  misc_feature (1)..(131): Homolog of NCBI NO: 30693911 NR Description: membrane protein, Rhomboid family [Arabidopsis
  misc_feature (1)..(130): Homolog of NCBI NO: 15222058 NR Description: membrane protein, putative; protein id: supported by cDNA: gi_17529033 [Arabidopsis thaliana] putative membrane protein [Arabidopsis thaliana]
  misc_feature (1)..(130): Homolog of NCBI NO: 25402744 NR Description: protein T12C24.28 [imported] - Arabidopsis >gi|9502383|gb|AAF88090.1|AC025417_18 T12C24.28 [Arabidopsis
  misc_feature (1)..(131): Homolog of NCBI NO: 11357824 NR Description: hypothetical protein F5K20.80 - Arabidopsis >gi|7629998|emb|CAB88340.1| putative protein [Arabidopsis
MLSELITNWSIYTNRFAAMLNLIIIAAINLALGILPHVDNFAHIGGFATGFLLGFVLLIQPQFGWLEQPFGAKTKSKYKAYQIILLLAALVLLAAGFAVGLVMVFRGENGNDHCSWCHYLTCVPTSSWKCDN

SEQ ID NO: 14645 - protein, 114 aa, Zea mays subsp. mays
  peptide (1)..(114): Ceres Seq. ID no. 12468115
  misc_feature (1)..(113): Homolog of NCBI NO: 38344377 NR Description: OSJNBb0032E06.11 [Oryza sativa (japonica
  misc_feature (1)..(114): Homolog of NCBI NO: 15240744 NR Description: membrane protein; protein id: At5g07250.1, by cDNA: gi_16648761, supported by cDNA: gi_20466142 [Arabidopsis
  misc_feature (1)..(113): Homolog of NCBI NO: 294845 NR Description: membrane protein [Saccharum hybrid cultivar
  misc_feature (1)..(114): Homolog of NCBI NO: 37536172 NR Description: putative membrane protein [Oryza sativa (japonica group)] >gi|22122915|gb|AAM92298.1| putative membrane protein
  misc_feature (1)..(112): Homolog of NCBI NO: 15221690 NR Description: membrane protein, putative; protein id: [Arabidopsis thaliana] >gi|25404407|pir||F96656 probable membrane
  misc_feature (1)..(113): Homolog of NCBI NO: 18409916 NR Description: putative protein; protein id: At3g53780.1
  misc_feature (1)..(113): Homolog of NCBI NO: 30693911 NR Description: membrane protein, Rhomboid family [Arabidopsis
  misc_feature (1)..(112): Homolog of NCBI NO: 15222058 NR Description: membrane protein, putative; protein id: supported by cDNA: gi_17529033 [Arabidopsis thaliana] putative membrane protein [Arabidopsis thaliana]
  misc_feature (1)..(112): Homolog of NCBI NO: 25402744 NR Description: protein T12C24.28 [imported] - Arabidopsis >gi|9502383|gb|AAF88090.1|AC025417_18 T12C24.28 [Arabidopsis
  misc_feature (1)..(113): Homolog of NCBI NO: 11357824 NR Description: hypothetical protein F5K20.80 - Arabidopsis >gi|7629998|emb|CAB88340.1| putative protein [Arabidopsis
MLNLIIIAAINLALGILPHVDNFAHIGGFATGFLLGFVLLIQPQFGWLEQPFGAKTKSKYKAYQIILLLAALVLLAAGFAVGLVMVFRGENGNDHCSWCHYLTCVPTSSWKCDN

SEQ ID NO: 14646 - DNA, 1842 bp, Zea mays subsp. mays
  misc_feature (1)..(1842): Ceres Seq. ID no. 13574386
  misc_feature: MA Experiment ID: 108535 Result: Up-regulated in Transcription
  misc_feature: MA Experiment 108535 PARAMETER Experiment Name: Zm_Meristem_P Parameter: Age (day) Value: 8
  misc_feature: MA Experiment 108535 PARAMETER Experiment Name: Zm_Meristem_P Parameter: Organism Value: Zea mays
  misc_feature: MA Experiment 108535 PARAMETER Experiment Name: Zm_Meristem_P Parameter: Plant Line Value: 35A19
  misc_feature: MA Experiment 108535 PARAMETER Experiment Name: Zm_Meristem_P Parameter: Tissue Value: Root Meristem vs. Above Root Meristem
  misc_feature: MA Experiment ID: 20000492 Result: Up-regulated in Transcription
  misc_feature: MA Experiment 20000492 PARAMETER Experiment Name: Zm_Hybrid_Seed_Dev_P Parameter: DAP Value: 12
  misc_feature: MA Experiment 20000492 PARAMETER Experiment Name: Zm_Hybrid_Seed_Dev_P Parameter: Organism Value: Zea mays
  misc_feature: MA Experiment 20000492 PARAMETER Experiment Name: Zm_Hybrid_Seed_Dev_P Parameter: Plant Line Value: 35A19
  misc_feature: MA Experiment 20000492 PARAMETER Experiment Name: Zm_Hybrid_Seed_Dev_P Parameter: Tissue Value: Fert Kernel vs. Unfert Floret
  misc_feature: MA Experiment ID: 20000535 Result: Up-regulated in Transcription
  misc_feature: MA Experiment 20000535 PARAMETER Experiment Name: Zm_Hybrid_Seed_Dev_P Parameter: DAP Value: 30 vs. 12
  misc_feature: MA Experiment 20000535 PARAMETER Experiment Name: Zm_Hybrid_Seed_Dev_P Parameter: Organism Value: Zea mays
  misc_feature: MA Experiment 20000535 PARAMETER Experiment Name: Zm_Hybrid_Seed_Dev_P Parameter: Plant Line Value: 35A19
  misc_feature: MA Experiment 20000535 PARAMETER Experiment Name: Zm_Hybrid_Seed_Dev_P Parameter: Tissue Value: Embryo vs. Unfert Floret
ggtgtctcacccttccggacgaaatctgacccgggccacactccgctgctccgccatggcgatccgctccaaggcctggatctcgctgttgctcgcgctggccgtcgcgctctccgcccgggcggaggaggagcccgccgccgccgcggagggcgaggccgtgctcaccctcgacgtcgacagcttcgacgaggccgtcgccaagcaccccttcatggtcgtcgagttctacgccccctggtgtgggcactgcaagaaacttgctccagagtatgagaatgcggccaaggcacttagcaagcatgacccaccgattgttctcgctaaggttgatgctaacgaggagaagaacaggccgcttgctaccaagtacgagatccaagggttcccaaccatcaagatattcagggaccgggggaagaacattcaggaatacaagggccctagggaggctgatggcattgtggattacttgaagaagcaggttggccctgcgtccaaggagatcaagtcaccagaagatgcgacggcccttatcgatgacaagaagatctacattgttggtatcttcgctgaattcagcggcaccgaatttacaaacttcatggaggtcgcagagaagctgaggtctgactacgactttggccacactttgcatgccaaccacctcccacgtggtgatgcagcagtggaacggccattggtcaggctgctgaagccatttgatgagcttgttgttgacagcaaggattttgatgtcgctgcactgatgaagtttattgatgctagcaccatccctagagttgtcacttttgacaagaaccctgacaaccacccatacctcatgaaattcttccaaagctcagcccccaaggctatgctgtttttgaacttctccaccggaccttttgattctttcaagtctgcctactctgctgccgcggaggaattcaaggacaaggaaatcaagttccttattggtgacatcgaagccagccagggtgccttccagtactttggcctgaaagaggaccagacaccccttatcctcatccaggatggtgactccaagaagttcttgaaggttcacgttgaggctgaccagatcgtcgcttggttgaaggagtactttgacggcaaattgacgccgttcaggaattctgagcctattcctgaggtcaacaatgagcctgttaaggtggttgtcgctgacaacgtccacgacttcgtcttcaaatctggcaaaaatgtccttattgaattctatgccccctggtgcggacactgcaagaagctggcgcccatcttggacgaggcagccaccactctccagagcgacgaggaagtcgtgattgctaagatggacgcgactgccaatgacgttcccagtgagtttgacgtccaaggctacccgaccttgtacttcgtgaccccgagcgggaaggtgacatcctacgacagcggcaggacggcggacgacatcgtcgacttcatcaagaagagcaaggagaccgcagcgccgcaccaccaccaccacccaggcgccaccggcatccgagaaggcagccgcgccgagcccgtcaaggacgagctgtgagcatccaaggtgtggacggctgtggctgcgtaagcatgggaggaaaacctggcgctaacgtgcctccaacgcctagtttttgcgggaccagagggagagagagagagggacggagttagagagagaggggatctgcgacgtgttttgctctgcggcggcatgttgtgtatcccattgaggttatgtacacaattacaccgcggtcggtgggtgtctttttagttaattatcacaagtgacagtag

SEQ ID NO: 14647 - protein, 531 aa, Zea mays subsp. mays
  peptide (1)..(531): Ceres Seq. ID no. 13574387
  misc_feature (19)..(531): Homolog of NCBI NO: 1709619 NR Description: Protein disulfide isomerase precursor (PDI)
  misc_feature (19)..(531): Homolog of NCBI NO: 13925728 NR Description: protein disulfide isomerase 3 precursor [Triticum
  misc_feature (19)..(531): Homolog of NCBI NO: 13925726 NR Description: protein disulfide isomerase 2 precursor [Triticum
  misc_feature (19)..(531): Homolog of NCBI NO: 12056115 NR Description: protein disulfide isomerase [Triticum turgidum durum] >gi|12056119|emb|CAC21230.1| protein disulfide isomerase
  misc_feature (19)..(531): Homolog of NCBI NO: 1709620 NR Description: Protein disulfide isomerase precursor (PDI)
  misc_feature (19)..(531): Homolog of NCBI NO: 1709617 NR Description: Protein disulfide isomerase precursor (PDI)
  misc_feature (22)..(531): Homolog of NCBI NO: 266743 NR Description: Protein disulfide isomerase precursor (PDI)
  misc_feature (22)..(531): Homolog of NCBI NO: 99992 NR Description: protein disulfide-isomerase (EC 5.3.4.1) - alfalfa (clone B2) >gi|166418|gb|AAA32662.1| putative
  misc_feature (20)..(506): Homolog of NCBI NO: 11133775 NR Description: Protein disulfide isomerase precursor (PDI)
  misc_feature (29)..(506): Homolog of NCBI NO: 11133818 NR Description: Protein disulfide isomerase precursor (PDI)
  misc_feature (19)..(531): Homolog of NCBI NO: 1709619 NR Description: Protein disulfide isomerase precursor (PDI)
  misc_feature (19)..(531): Homolog of NCBI NO: 13925728 NR Description: protein disulfide isomerase 3 precursor [Triticum
  misc_feature (19)..(531): Homolog of NCBI NO: 13925726 NR Description: protein disulfide isomerase 2 precursor [Triticum
  misc_feature (19)..(531): Homolog of NCBI NO: 12056115 NR Description: protein disulfide isomerase [Triticum turgidum durum] >gi|12056119|emb|CAC21230.1| protein disulfide isomerase
  misc_feature (19)..(531): Homolog of NCBI NO: 1709620 NR Description: Protein disulfide isomerase precursor (PDI)
  misc_feature (19)..(531): Homolog of NCBI NO: 1709617 NR Description: Protein disulfide isomerase precursor (PDI)
  misc_feature (22)..(531): Homolog of NCBI NO: 266743 NR Description: Protein disulfide isomerase precursor (PDI)
  misc_feature (22)..(531): Homolog of NCBI NO: 99992 NR Description: protein disulfide-isomerase (EC 5.3.4.1) - alfalfa (clone B2) >gi|166418|gb|AAA32662.1| putative
  misc_feature (20)..(506): Homolog of NCBI NO: 11133775 NR Description: Protein disulfide isomerase precursor (PDI)
  misc_feature (29)..(506): Homolog of NCBI NO: 11133818 NR Description: Protein disulfide isomerase precursor (PDI)
VSHPSGRNLTRATLRCSAMAIRSKAWISLLLALAVALSARAEEEPAAAAEGEAVLTLDVDSFDEAVAKHPFMVVEFYAPWCGHCKKLAPEYENAAKALSKHDPPIVLAKVDANEEKNRPLATKYEIQGFPTIKIFRDRGKNIQEYKGPREADGIVDYLKKQVGPASKEIKSPEDATALIDDKKIYIVGIFAEFSGTEFTNFMEVAEKLRSDYDFGHTLHANHLPRGDAAVERPLVRLLKPFDELVVDSKDFDVAALMKFIDASTIPRVVTFDKNPDNHPYLMKFFQSSAPKAMLFLNFSTGPFDSFKSAYSAAAEEFKDKEIKFLIGDIEASQGAFQYFGLKEDQTPLILIQDGDSKKFLKVHVEADQIVAWLKEYFDGKLTPFRNSEPIPEVNNEPVKVVVADNVHDFVFKSGKNVLIEFYAPWCGHCKKLAPILDEAATTLQSDEEVVIAKMDATANDVPSEFDVQGYPTLYFVTPSGKVTSYDSGRTADDIVDFIKKSKETAAPHHHHHPGATGIREGSRAEPVKDEL

SEQ ID NO: 14648 - protein, 513 aa, Zea mays subsp. mays
  peptide (1)..(513): Ceres Seq. ID no. 13574388
  misc_feature (1)..(513): Homolog of NCBI NO: 1709619 NR Description: Protein disulfide isomerase precursor (PDI)
  misc_feature (1)..(513): Homolog of NCBI NO: 13925728 NR Description: protein disulfide isomerase 3 precursor [Triticum
  misc_feature (1)..(513): Homolog of NCBI NO: 13925726 NR Description: protein disulfide isomerase 2 precursor [Triticum
  misc_feature (1)..(513): Homolog of NCBI NO: 12056115 NR Description: protein disulfide isomerase [Triticum turgidum durum] >gi|12056119|emb|CAC21230.1| protein disulfide isomerase
  misc_feature (1)..(513): Homolog of NCBI NO: 1709620 NR Description: Protein disulfide isomerase precursor (PDI)
  misc_feature (1)..(513): Homolog of NCBI NO: 1709617 NR Description: Protein disulfide isomerase precursor (PDI)
  misc_feature (4)..(513): Homolog of NCBI NO: 266743 NR Description: Protein disulfide isomerase precursor (PDI)
  misc_feature (4)..(513): Homolog of NCBI NO: 99992 NR Description: protein disulfide-isomerase (EC 5.3.4.1) - alfalfa (clone B2) >gi|166418|gb|AAA32662.1| putative
  misc_feature (2)..(488): Homolog of NCBI NO: 11133775 NR Description: Protein disulfide isomerase precursor (PDI)
  misc_feature (11)..(488): Homolog of NCBI NO: 11133818 NR Description: Protein disulfide isomerase precursor (PDI)
  misc_feature (1)..(513): Homolog of NCBI NO: 1709619 NR Description: Protein disulfide isomerase precursor (PDI)
  misc_feature (1)..(513): Homolog of NCBI NO: 13925728 NR Description: protein disulfide isomerase 3 precursor [Triticum
  misc_feature (1)..(513): Homolog of NCBI NO: 13925726 NR Description: protein disulfide isomerase 2 precursor [Triticum
  misc_feature (1)..(513): Homolog of NCBI NO: 12056115 NR Description: protein disulfide isomerase [Triticum turgidum durum] >gi|12056119|emb|CAC21230.1| protein disulfide isomerase
  misc_feature (1)..(513): Homolog of NCBI NO: 1709620 NR Description: Protein disulfide isomerase precursor (PDI)
  misc_feature (1)..(513): Homolog of NCBI NO: 1709617 NR Description: Protein disulfide isomerase precursor (PDI)
  misc_feature (4)..(513): Homolog of NCBI NO: 266743 NR Description: Protein disulfide isomerase precursor (PDI)
  misc_feature (4)..(513): Homolog of NCBI NO: 99992 NR Description: protein disulfide-isomerase (EC 5.3.4.1) - alfalfa (clone B2) >gi|166418|gb|AAA32662.1| putative
  misc_feature (2)..(488): Homolog of NCBI NO: 11133775 NR Description: Protein disulfide isomerase precursor (PDI)
  misc_feature (11)..(488): Homolog of NCBI NO: 11133818 NR Description: Protein disulfide isomerase precursor (PDI)
MAIRSKAWISLLLALAVALSARAEEEPAAAAEGEAVLTLDVDSFDEAVAKHPFMVVEFYAPWCGHCKKLAPEYENAAKALSKHDPPIVLAKVDANEEKNRPLATKYEIQGFPTIKIFRDRGKNIQEYKGPREADGIVDYLKKQVGPASKEIKSPEDATALIDDKKIYIVGIFAEFSGTEFTNFMEVAEKLRSDYDFGHTLHANHLPRGDAAVERPLVRLLKPFDELVVDSKDFDVAALMKFIDASTIPRVVTFDKNPDNHPYLMKFFQSSAPKAMLFLNFSTGPFDSFKSAYSAAAEEFKDKEIKFLIGDIEASQGAFQYFGLKEDQTPLILIQDGDSKKFLKVHVEADQIVAWLKEYFDGKLTPFRNSEPIPEVNNEPVKVVVADNVHDFVFKSGKNVLIEFYAPWCGHCKKLAPILDEAATTLQSDEEVVIAKMDATANDVPSEFDVQGYPTLYFVTPSGKVTSYDSGRTADDIVDFIKKSKETAAPHHHHHPGATGIREGSRAEPVKDEL

SEQ ID NO: 14649 - protein, 460 aa, Zea mays subsp. mays
  peptide (1)..(460): Ceres Seq. ID no. 13574389
  misc_feature (1)..(460): Homolog of NCBI NO: 1709619 NR Description: Protein disulfide isomerase precursor (PDI)
  misc_feature (1)..(460): Homolog of NCBI NO: 13925728 NR Description: protein disulfide isomerase 3 precursor [Triticum
  misc_feature (1)..(460): Homolog of NCBI NO: 13925726 NR Description: protein disulfide isomerase 2 precursor [Triticum
  misc_feature (1)..(460): Homolog of NCBI NO: 12056115 NR Description: protein disulfide isomerase [Triticum turgidum durum] >gi|12056119|emb|CAC21230.1| protein disulfide isomerase
  misc_feature (1)..(460): Homolog of NCBI NO: 1709620 NR Description: Protein disulfide isomerase precursor (PDI)
  misc_feature (1)..(460): Homolog of NCBI NO: 1709617 NR Description: Protein disulfide isomerase precursor (PDI)
  misc_feature (1)..(460): Homolog of NCBI NO: 266743 NR Description: Protein disulfide isomerase precursor (PDI)
  misc_feature (1)..(460): Homolog of NCBI NO: 99992 NR Description: protein disulfide-isomerase (EC 5.3.4.1) - alfalfa (clone B2) >gi|166418|gb|AAA32662.1| putative
  misc_feature (1)..(435): Homolog of NCBI NO: 11133775 NR Description: Protein disulfide isomerase precursor (PDI)
  misc_feature (1)..(435): Homolog of NCBI NO: 11133818 NR Description: Protein disulfide isomerase precursor (PDI)
  misc_feature (1)..(460): Homolog of NCBI NO: 1709619 NR Description: Protein disulfide isomerase precursor (PDI)
  misc_feature (1)..(460): Homolog of NCBI NO: 13925728 NR Description: protein disulfide isomerase 3 precursor [Triticum
  misc_feature (1)..(460): Homolog of NCBI NO: 13925726 NR Description: protein disulfide isomerase 2 precursor [Triticum
  misc_feature (1)..(460): Homolog of NCBI NO: 12056115 NR Description: protein disulfide isomerase [Triticum turgidum durum] >gi|12056119|emb|CAC21230.1| protein disulfide isomerase
  misc_feature (1)..(460): Homolog of NCBI NO: 1709620 NR Description: Protein disulfide isomerase precursor (PDI)
  misc_feature (1)..(460): Homolog of NCBI NO: 1709617 NR Description: Protein disulfide isomerase precursor (PDI)
  misc_feature (1)..(460): Homolog of NCBI NO: 266743 NR Description: Protein disulfide isomerase precursor (PDI)
  misc_feature (1)..(460): Homolog of NCBI NO: 99992 NR Description: protein disulfide-isomerase (EC 5.3.4.1) - alfalfa (clone B2) >gi|166418|gb|AAA32662.1| putative
  misc_feature (1)..(435): Homolog of NCBI NO: 11133775 NR Description: Protein disulfide isomerase precursor (PDI)
  misc_feature (1)..(435): Homolog of NCBI NO: 11133818 NR Description: Protein disulfide isomerase precursor (PDI)
MVVEFYAPWCGHCKKLAPEYENAAKALSKHDPPIVLAKVDANEEKNRPLATKYEIQGFPTIKIFRDRGKNIQEYKGPREADGIVDYLKKQVGPASKEIKSPEDATALIDDKKIYIVGIFAEFSGTEFTNFMEVAEKLRSDYDFGHTLHANHLPRGDAAVERPLVRLLKPFDELVVDSKDFDVAALMKFIDASTIPRVVTFDKNPDNHPYLMKFFQSSAPKAMLFLNFSTGPFDSFKSAYSAAAEEFKDKEIKFLIGDIEASQGAFQYFGLKEDQTPLILIQDGDSKKFLKVHVEADQIVAWLKEYFDGKLTPFRNSEPIPEVNNEPVKVVVADNVHDFVFKSGKNVLIEFYAPWCGHCKKLAPILDEAATTLQSDEEVVIAKMDATANDVPSEFDVQGYPTLYFVTPSGKVTSYDSGRTADDIVDFIKKSKETAAPHHHHHPGATGIREGSRAEPVKDEL

SEQ ID NO: 14650 - DNA, 1932 bp, Zea mays subsp. mays; identical to SEQ ID NO: 5189
  misc_feature (1)..(1932): Ceres Seq. ID no. 13637288
  misc_feature: MA Experiment ID: 108522 Result: Up-regulated in Transcription
  misc_feature: MA Experiment 108522 PARAMETER Experiment Name: Zm_42deg_Heat_P Parameter: Age (day) Value: 8
  misc_feature: MA Experiment 108522 PARAMETER Experiment Name: Zm_42deg_Heat_P Parameter: Organism Value: Zea mays
  misc_feature: MA Experiment 108522 PARAMETER Experiment Name: Zm_42deg_Heat_P Parameter: Plant Line Value: 35A19
  misc_feature: MA Experiment 108522 PARAMETER Experiment Name: Zm_42deg_Heat_P Parameter: Temperature (deg C) Value: 42 vs. 22
  misc_feature: MA Experiment 108522 PARAMETER Experiment Name: Zm_42deg_Heat_P Parameter: Timepoint (hr) Value: 1
  misc_feature: MA Experiment 108522 PARAMETER Experiment Name: Zm_42deg_Heat_P Parameter: Tissue Value: Aerial

SEQ ID NO: 14651 - protein, 538 aa, Zea mays subsp. mays; identical to SEQ ID NO: 5190
  peptide (1)..(538): Ceres Seq. ID no. 13637289
  misc_feature (22)..(538): Homolog of NCBI NO: 14550104 NR Description: histone deacetylase HDA101 [Zea mays]
  misc_feature (22)..(538): Homolog of NCBI NO: 3023947 NR Description: Probable histone deacetylase (RPD3 homolog)
  misc_feature (22)..(537): Homolog of NCBI NO: 31324093 NR Description: histone deacetylase HDAC1 [Oryza sativa (japonica
  misc_feature (22)..(527): Homolog of NCBI NO: 31324097 NR Description: histone deacetylase HDAC3 [Oryza sativa (japonica
  misc_feature (22)..(503): Homolog of NCBI NO: 12698880 NR Description: histone deacetylase HD1 [Oryza sativa]
  misc_feature (29)..(527): Homolog of NCBI NO: 15233694 NR Description: Histone deacetylase [Arabidopsis thaliana]
  misc_feature (29)..(527): Homolog of NCBI NO: 2318131 NR Description: histone deacetylase [Arabidopsis thaliana]
  misc_feature (29)..(527): Homolog of NCBI NO: 9022439 NR Description: histone deacetylase [Mesembryanthemum
  misc_feature (41)..(505): Homolog of NCBI NO: 13128860 NR Description: histone deacetylase 1; reduced potassium
  misc_feature (41)..(505): Homolog of NCBI NO: 30583783 NR Description: Homo sapiens histone deacetylase 1 [synthetic
  misc_feature (29)..(527): Homolog of NCBI NO: 15233694 NR Description: Histone deacetylase [Arabidopsis thaliana]
  misc_feature (29)..(527): Homolog of NCBI NO: 2318131 NR Description: histone deacetylase [Arabidopsis thaliana]
  misc_feature (29)..(527): Homolog of NCBI NO: 9022439 NR Description: histone deacetylase [Mesembryanthemum
  misc_feature (41)..(505): Homolog of NCBI NO: 13128860 NR Description: histone deacetylase 1; reduced potassium
  misc_feature (41)..(505): Homolog of NCBI NO: 30583783 NR Description: Homo sapiens histone deacetylase 1 [synthetic
  misc_feature (22)..(538): Homolog of NCBI NO: 14550104 NR Description: histone deacetylase HDA101 [Zea mays]
  misc_feature (22)..(538): Homolog of NCBI NO: 3023947 NR Description: Probable histone deacetylase (RPD3 homolog)
  misc_feature (22)..(537): Homolog of NCBI NO: 31324093 NR Description: histone deacetylase HDAC1 [Oryza sativa (japonica
  misc_feature (22)..(527): Homolog of NCBI NO: 31324097 NR Description: histone deacetylase HDAC3 [Oryza sativa (japonica
  misc_feature (22)..(503): Homolog of NCBI NO: 12698880 NR Description: histone deacetylase HD1 [Oryza sativa]
  misc_feature (22)..(538): Homolog of NCBI NO: 14550104 NR Description: histone deacetylase HDA101 [Zea mays]
  misc_feature (22)..(538): Homolog of NCBI NO: 3023947 NR Description: Probable histone deacetylase (RPD3 homolog)
  misc_feature (22)..(537): Homolog of NCBI NO: 31324093 NR Description: histone deacetylase HDAC1 [Oryza sativa (japonica
  misc_feature (22)..(527): Homolog of NCBI NO: 31324097 NR Description: histone deacetylase HDAC3 [Oryza sativa (japonica
  misc_feature (22)..(503): Homolog of NCBI NO: 12698880 NR Description: histone deacetylase HD1 [Oryza sativa]
  misc_feature (29)..(527): Homolog of NCBI NO: 15233694 NR Description: Histone deacetylase [Arabidopsis thaliana]
  misc_feature (29)..(527): Homolog of NCBI NO: 2318131 NR Description: histone deacetylase [Arabidopsis thaliana]
  misc_feature (29)..(527): Homolog of NCBI NO: 9022439 NR Description: histone deacetylase [Mesembryanthemum
  misc_feature (41)..(505): Homolog of NCBI NO: 13128860 NR Description: histone deacetylase 1; reduced potassium
  misc_feature (41)..(505): Homolog of NCBI NO: 30583783 NR Description: Homo sapiens histone deacetylase 1 [synthetic

SEQ ID NO: 14652 - protein, 517 aa, Zea mays subsp. mays; identical to SEQ ID NO: 5191
  peptide (1)..(517): Ceres Seq. ID no. 13637290
  misc_feature (1)..(517): Homolog of NCBI NO: 14550104 NR Description: histone deacetylase HDA101 [Zea mays]
  misc_feature (1)..(517): Homolog of NCBI NO: 3023947 NR Description: Probable histone deacetylase (RPD3 homolog)
  misc_feature (1)..(516): Homolog of NCBI NO: 31324093 NR Description: histone deacetylase HDAC1 [Oryza sativa (japonica
  misc_feature (1)..(506): Homolog of NCBI NO: 31324097 NR Description: histone deacetylase HDAC3 [Oryza sativa (japonica
  misc_feature (1)..(482): Homolog of NCBI NO: 12698880 NR Description: histone deacetylase HD1 [Oryza sativa]
  misc_feature (8)..(506): Homolog of NCBI NO: 15233694 NR Description: Histone deacetylase [Arabidopsis thaliana]
  misc_feature (8)..(506): Homolog of NCBI NO: 2318131 NR Description: histone deacetylase [Arabidopsis thaliana]
  misc_feature (8)..(506): Homolog of NCBI NO: 9022439 NR Description: histone deacetylase [Mesembryanthemum
  misc_feature (20)..(484): Homolog of NCBI NO: 13128860 NR Description: histone deacetylase 1; reduced potassium
  misc_feature (20)..(484): Homolog of NCBI NO: 30583783 NR Description: Homo sapiens histone deacetylase 1 [synthetic
  misc_feature (1)..(517): Homolog of NCBI NO: 14550104 NR Description: histone deacetylase HDA101 [Zea mays]
  misc_feature (1)..(517): Homolog of NCBI NO: 3023947 NR Description: Probable histone deacetylase (RPD3 homolog)
  misc_feature (1)..(516): Homolog of NCBI NO: 31324093 NR Description: histone deacetylase HDAC1 [Oryza sativa (japonica
  misc_feature (1)..(506): Homolog of NCBI NO: 31324097 NR Description: histone deacetylase HDAC3 [Oryza sativa (japonica
  misc_feature (1)..(482): Homolog of NCBI NO: 12698880 NR Description: histone deacetylase HD1 [Oryza sativa]
  misc_feature (8)..(506): Homolog of NCBI NO: 15233694 NR Description: Histone deacetylase [Arabidopsis thaliana]
  misc_feature (8)..(506): Homolog of NCBI NO: 2318131 NR Description: histone deacetylase [Arabidopsis thaliana]
  misc_feature (8)..(506): Homolog of NCBI NO: 9022439 NR Description: histone deacetylase [Mesembryanthemum
  misc_feature (20)..(484): Homolog of NCBI NO: 13128860 NR Description: histone deacetylase 1; reduced potassium
  misc_feature (20)..(484): Homolog of NCBI NO: 30583783 NR Description: Homo sapiens histone deacetylase 1 [synthetic
  misc_feature (1)..(517): Homolog of NCBI NO: 14550104 NR Description: histone deacetylase HDA101 [Zea mays]
  misc_feature (1)..(517): Homolog of NCBI NO: 3023947 NR Description: Probable histone deacetylase (RPD3 homolog)
  misc_feature (1)..(516): Homolog of NCBI NO: 31324093 NR Description: histone deacetylase HDAC1 [Oryza sativa (japonica
  misc_feature (1)..(506): Homolog of NCBI NO: 31324097 NR Description: histone deacetylase HDAC3 [Oryza sativa (japonica
  misc_feature (1)..(482): Homolog of NCBI NO: 12698880 NR Description: histone deacetylase HD1 [Oryza sativa]
  misc_feature (8)..(506): Homolog of NCBI NO: 15233694 NR Description: Histone deacetylase [Arabidopsis thaliana]
  misc_feature (8)..(506): Homolog of NCBI NO: 2318131 NR Description: histone deacetylase [Arabidopsis thaliana]
  misc_feature (8)..(506): Homolog of NCBI NO: 9022439 NR Description: histone deacetylase [Mesembryanthemum
  misc_feature (20)..(484): Homolog of NCBI NO: 13128860 NR Description: histone deacetylase 1; reduced potassium
  misc_feature (20)..(484): Homolog of NCBI NO: 30583783 NR Description: Homo sapiens histone deacetylase 1 [synthetic

SEQ ID NO: 14653 - protein, 474 aa, Zea mays subsp. mays; identical to SEQ ID NO: 5192
  peptide (1)..(474): Ceres Seq. ID no. 13637291
  misc_feature (1)..(474): Homolog of NCBI NO: 14550104 NR Description: histone deacetylase HDA101 [Zea mays]
  misc_feature (1)..(474): Homolog of NCBI NO: 3023947 NR Description: Probable histone deacetylase (RPD3 homolog)
  misc_feature (1)..(473): Homolog of NCBI NO: 31324093 NR Description: histone deacetylase HDAC1 [Oryza sativa (japonica
  misc_feature (1)..(463): Homolog of NCBI NO: 31324097 NR Description: histone deacetylase HDAC3 [Oryza sativa (japonica
  misc_feature (1)..(439): Homolog of NCBI NO: 12698880 NR Description: histone deacetylase HD1 [Oryza sativa]
  misc_feature (1)..(463): Homolog of NCBI NO: 15233694 NR Description: Histone deacetylase [Arabidopsis thaliana]
  misc_feature (1)..(463): Homolog of NCBI NO: 2318131 NR Description: histone deacetylase [Arabidopsis thaliana]
  misc_feature (1)..(463): Homolog of NCBI NO: 9022439 NR Description: histone deacetylase [Mesembryanthemum
  misc_feature (1)..(441): Homolog of NCBI NO: 13128860 NR Description: histone deacetylase 1; reduced potassium
  misc_feature (1)..(441): Homolog of NCBI NO: 30583783 NR Description: Homo sapiens histone deacetylase 1 [synthetic
  misc_feature (1)..(474): Homolog of NCBI NO: 14550104 NR Description: histone deacetylase HDA101 [Zea mays]
  misc_feature (1)..(474): Homolog of NCBI NO: 3023947 NR Description: Probable histone deacetylase (RPD3 homolog)
  misc_feature (1)..(473): Homolog of NCBI NO: 31324093 NR Description: histone deacetylase HDAC1 [Oryza sativa (japonica
  misc_feature (1)..(463): Homolog of NCBI NO: 31324097 NR Description: histone deacetylase HDAC3 [Oryza sativa (japonica
  misc_feature (1)..(439): Homolog of NCBI NO: 12698880 NR Description: histone deacetylase HD1 [Oryza sativa]
  misc_feature (1)..(463): Homolog of NCBI NO: 15233694 NR Description: Histone deacetylase [Arabidopsis thaliana]
  misc_feature (1)..(463): Homolog of NCBI NO: 2318131 NR Description: histone deacetylase [Arabidopsis thaliana]
  misc_feature (1)..(463): Homolog of NCBI NO: 9022439 NR Description: histone deacetylase [Mesembryanthemum
  misc_feature (1)..(441): Homolog of NCBI NO: 13128860 NR Description: histone deacetylase 1; reduced potassium
  misc_feature (1)..(441): Homolog of NCBI NO: 30583783 NR Description: Homo sapiens histone deacetylase 1 [synthetic
  misc_feature (1)..(474): Homolog of NCBI NO: 14550104 NR Description: histone deacetylase HDA101 [Zea mays]
  misc_feature (1)..(474): Homolog of NCBI NO: 3023947 NR Description: Probable histone deacetylase (RPD3 homolog)
  misc_feature (1)..(473): Homolog of NCBI NO: 31324093 NR Description: histone deacetylase HDAC1 [Oryza sativa (japonica
  misc_feature (1)..(463): Homolog of NCBI NO: 31324097 NR Description: histone deacetylase HDAC3 [Oryza sativa (japonica
  misc_feature (1)..(439): Homolog of NCBI NO: 12698880 NR Description: histone deacetylase HD1 [Oryza sativa]
  misc_feature (1)..(463): Homolog of NCBI NO: 15233694 NR Description: Histone deacetylase [Arabidopsis thaliana]
  misc_feature (1)..(463): Homolog of NCBI NO: 2318131 NR Description: histone deacetylase [Arabidopsis thaliana]
  misc_feature (1)..(463): Homolog of NCBI NO: 9022439 NR Description: histone deacetylase [Mesembryanthemum
  misc_feature (1)..(441): Homolog of NCBI NO: 13128860 NR Description: histone deacetylase 1; reduced potassium
  misc_feature (1)..(441): Homolog of NCBI NO: 30583783 NR Description: Homo sapiens histone deacetylase 1 [synthetic

SEQ ID NO: 14654 - DNA, 661 bp, Zea mays subsp. mays
  misc_feature (1)..(661): Ceres Seq. ID no. 12468098
  misc_feature: MA Experiment ID: 20000477 Result: Down-regulated in Transcription
  misc_feature: MA Experiment 20000477 PARAMETER Experiment Name: Zm_5mM_SA_P Parameter: Age (day) Value: 10
  misc_feature: MA Experiment 20000477 PARAMETER Experiment Name: Zm_5mM_SA_P Parameter: Organism Value: Zea mays
  misc_feature: MA Experiment 20000477 PARAMETER Experiment Name: Zm_5mM_SA_P Parameter: Plant Line Value: 35A19
  misc_feature: MA Experiment 20000477 PARAMETER Experiment Name: Zm_5mM_SA_P Parameter: Timepoint (hr) Value: 48
  misc_feature: MA Experiment 20000477 PARAMETER Experiment Name: Zm_5mM_SA_P Parameter: Tissue Value: Aerial
  misc_feature: MA Experiment 20000477 PARAMETER Experiment Name: Zm_5mM_SA_P Parameter: Treatment Value: 5mM SA vs. No Treatment
  misc_feature: MA Experiment ID: 20000492 Result: Down-regulated in Transcription
  misc_feature: MA Experiment 20000492 PARAMETER Experiment Name: Zm_Hybrid_Seed_Dev_P Parameter: DAP Value: 12
  misc_feature: MA Experiment 20000492 PARAMETER Experiment Name: Zm_Hybrid_Seed_Dev_P Parameter: Organism Value: Zea mays
  misc_feature: MA Experiment 20000492 PARAMETER Experiment Name: Zm_Hybrid_Seed_Dev_P Parameter: Plant Line Value: 35A19
  misc_feature: MA Experiment 20000492 PARAMETER Experiment Name: Zm_Hybrid_Seed_Dev_P Parameter: Tissue Value: Fert Kernel vs. Unfert Floret
tcgaggccgtgaagctcaaggcgagcaagctagccaagaagcacccgcgctgcctcgccgacggcaacgagctgctgcgcttccacggcgccacgctctcgtgcgcgctcggcggcggctccggctcttccagcctctgcgcctccgacaagtgcgccgtgtgccgcatcatccggcacggcttctccgccaggaaggagggcaagggcggcgtgggcgtgttcaccacgtccaccagcggccgcgcgttcgagtccatcgttgaggcgccccccgccatcggcgtcggcgacgacgacggagcgggccagctgggcctgggcaccgcgcgcagggcgctgctggtgtgcagggtcatcgccggccgcgtgcacaagccgctggacaacctcaaggagttcgtggggcagacgggcttcgattcgctcgccggcaaggtcggaccctactccaacatcgaggagctgtacctgctgaacccgagggcgctgctcccgtgcttcgtcgtcatctgtagaccgtagcctactactagctaaacaccccgtctcattcttctctcttcccacttttctctttcgattgctactctagtgtacgtagttaacacggacacggcatagctatcgcctatcggttggaaggtcggatggatttgtcc

SEQ ID NO: 14655 - protein, 173 aa, Zea mays subsp. mays
  peptide (1)..(173): Ceres Seq. ID no. 12468099
  misc_feature (1)..(172): Homolog of NCBI NO: 34910152 NR Description: B1070A12.19 [Oryza sativa (japonica
  misc_feature (1)..(173): Homolog of NCBI NO: 15239695 NR Description: putative protein; protein id: At5g54630.1, by cDNA: gi_15010657 [Arabidopsis thaliana] gene_id:MRB17.13~pir||T05748~strong similarity to unknown protein
  misc_feature (1)..(173): Homolog of NCBI NO: 18416951 NR Description: expressed protein; protein id: At4g27240.1, by cDNA: 2944. [Arabidopsis thaliana] >gi|7486806|pir||T05748
  misc_feature (1)..(173): Homolog of NCBI NO: 15220394 NR Description: hypothetical protein; protein id: At1g11490.1
  misc_feature (1)..(146): Homolog of NCBI NO: 6554199 NR Description: T23J18.16 [Arabidopsis thaliana]
  misc_feature (1)..(170): Homolog of NCBI NO: 15222333 NR Description: unknown protein; protein id: At1g75710.1 thaliana] >gi|9369383|gb|AAF87132.1|AC006434_28 F10A5.10
  misc_feature (1)..(170): Homolog of NCBI NO: 9802582 NR Description: T2E6.3 [Arabidopsis thaliana]
  misc_feature (1)..(170): Homolog of NCBI NO: 15220992 NR Description: hypothetical protein; protein id: At1g47860.1
  misc_feature (16)..(173): Homolog of NCBI NO: 38346001 NR Description: OSJNBa0073L13.11 [Oryza sativa (japonica
  misc_feature (2)..(172): Homolog of NCBI NO: 5777616 NR Description: CAA30374.1 protein [Oryza sativa]
EAVKLKASKLAKKHPRCLADGNELLRFHGATLSCALGGGSGSSSLCASDKCAVCRIIRHGFSARKEGKGGVGVFTTSTSGRAFESIVEAPPAIGVGDDDGAGQLGLGTARRALLVCRVIAGRVHKPLDNLKEFVGQTGFDSLAGKVGPYSNIEELYLLNPRALLPCFVVICRP

SEQ ID NO: 14656 - protein, 87 aa, Zea mays subsp. mays
  peptide (1)..(87): Ceres Seq. ID no. 12468100
RGREAQGEQASQEAPALPRRRQRAAALPRRHALVRARRRLRLFQPLRLRQVRRVPHHPARLLRQEGGQGRRGRVHHVHQRPRVRVHR

SEQ ID NO: 14657 - DNA, 481 bp, Zea mays subsp. mays
  misc_feature (1)..(481): Ceres Seq. ID no. 3626194
  misc_feature: MA Experiment ID: 108523 Result: Down-regulated in Transcription
  misc_feature: MA Experiment 108523 PARAMETER Experiment Name: Zm_42deg_Heat_P Parameter: Age (day) Value: 8
  misc_feature: MA Experiment 108523 PARAMETER Experiment Name: Zm_42deg_Heat_P Parameter: Organism Value: Zea mays
  misc_feature: MA Experiment 108523 PARAMETER Experiment Name: Zm_42deg_Heat_P Parameter: Plant Line Value: 35A19
  misc_feature: MA Experiment 108523 PARAMETER Experiment Name: Zm_42deg_Heat_P Parameter: Temperature (deg C) Value: 42 vs. 22
  misc_feature: MA Experiment 108523 PARAMETER Experiment Name: Zm_42deg_Heat_P Parameter: Timepoint (hr) Value: 6
  misc_feature: MA Experiment 108523 PARAMETER Experiment Name: Zm_42deg_Heat_P Parameter: Tissue Value: Aerial
  misc_feature: MA Experiment ID: 108528 Result: Up-regulated in Transcription
  misc_feature: MA Experiment 108528 PARAMETER Experiment Name: Zm_Imbibed_Seeds_P Parameter: Age (day) Value: 5 vs. 2
  misc_feature: MA Experiment 108528 PARAMETER Experiment Name: Zm_Imbibed_Seeds_P Parameter: Organism Value: Zea mays
  misc_feature: MA Experiment 108528 PARAMETER Experiment Name: Zm_Imbibed_Seeds_P Parameter: Plant Line Value: 35A19
  misc_feature: MA Experiment 108528 PARAMETER Experiment Name: Zm_Imbibed_Seeds_P Parameter: Tissue Value: Aerial vs. Embryo
  misc_feature: MA Experiment ID: 108530 Result: Up-regulated in Transcription
  misc_feature: MA Experiment 108530 PARAMETER Experiment Name: Zm_Imbibed_Seeds_P Parameter: Age (day) Value: 6 vs. 2
  misc_feature: MA Experiment 108530 PARAMETER Experiment Name: Zm_Imbibed_Seeds_P Parameter: Organism Value: Zea mays
  misc_feature: MA Experiment 108530 PARAMETER Experiment Name: Zm_Imbibed_Seeds_P Parameter: Plant Line Value: 35A19
  misc_feature: MA Experiment 108530 PARAMETER Experiment Name: Zm_Imbibed_Seeds_P Parameter: Tissue Value: Aerial vs. Embryo
  misc_feature: MA Experiment ID: 108534 Result: Down-regulated in Transcription
  misc_feature: MA Experiment 108534 PARAMETER Experiment Name: Zm_4deg_Cold_P Parameter: Age (hr) Value: 8
  misc_feature: MA Experiment 108534 PARAMETER Experiment Name: Zm_4deg_Cold_P Parameter: Organism Value: Zea mays
  misc_feature: MA Experiment 108534 PARAMETER Experiment Name: Zm_4deg_Cold_P Parameter: Plant Line Value: 35A19
  misc_feature: MA Experiment 108534 PARAMETER Experiment Name: Zm_4deg_Cold_P Parameter: Temperature (deg C) Value: 4 vs. 22
  misc_feature: MA Experiment 108534 PARAMETER Experiment Name: Zm_4deg_Cold_P Parameter: Timepoint (hr) Value: 6
  misc_feature: MA Experiment 108534 PARAMETER Experiment Name: Zm_4deg_Cold_P Parameter: Tissue Value: Aerial
  misc_feature: MA Experiment ID: 108547 Result: Up-regulated in Transcription
  misc_feature: MA Experiment 108547 PARAMETER Experiment Name: Zm_Imbibed_Seeds_P Parameter: Age (day) Value: 4 vs. 2
  misc_feature: MA Experiment 108547 PARAMETER Experiment Name: Zm_Imbibed_Seeds_P Parameter: Organism Value: Zea mays
  misc_feature: MA Experiment 108547 PARAMETER Experiment Name: Zm_Imbibed_Seeds_P Parameter: Plant Line Value: 35A19
  misc_feature: MA Experiment 108547 PARAMETER Experiment Name: Zm_Imbibed_Seeds_P Parameter: Tissue Value: Aerial vs. Embryo
  misc_feature: MA Experiment ID: 20000626 Result: Up-regulated in Transcription
  misc_feature: MA Experiment 20000626 PARAMETER Experiment Name: Zm_Herbicide-Treatments_P Parameter: Timepoint (hr) Value: 12
  misc_feature: MA Experiment 20000626 PARAMETER Experiment Name: Zm_Herbicide-Treatments_P Parameter: Tissue Value: Aerial
  misc_feature: MA Experiment 20000626 PARAMETER Experiment Name: Zm_Herbicide-Treatments_P Parameter: Treatment Value: Roundup vs. No Treatment
  misc_feature: Pfam Name: CTP_transf_1 Pfam Description: Cytidylyltransferase family
gataacgactttgcttcttkrcagggaattgctgagaggtccactctattatgtcctggtgctgctgttcagcgttttagtcttctggcgtgagtcccccatcgggatcgtctccttgtcgatgatgagcggtggcgatggttttgctgacattgttgggaggaggtatggctcagcgaagctgccattcaatcggaagaagagctgggccgggagcatctcgatgttcatttctggtttcctgctgtccgctatgatgatgctctacttctcaagcctgggttacattgatgttatctgggaagaggcacttggtaagctggcgcttgttgcactagcagcaacagtagtggagtgcgttcctgtgaccgaagttgtagatgacaacatatctgttcctttggccaccatgctggtagcttttctcttgtttagctccaaccgcacaatagttaattaaaatactactagtgcattattt

SEQ ID NO: 14658 - protein, 152 aa, Zea mays subsp. mays
  peptide (1)..(152): Ceres Seq. ID no. 3626195
  misc_feature: Pfam Name: CTP_transf_1 Pfam Description: Cytidylyltransferase family
  misc_feature (9)..(144): Homolog of NCBI NO: 32488404 NR Description: OSJNBa0043A12.34 [Oryza sativa (japonica
  misc_feature (9)..(144): Homolog of NCBI NO: 21537252 NR Description: unknown [Arabidopsis thaliana]
  misc_feature (9)..(144): Homolog of NCBI NO: 15238184 NR Description: putative protein; protein id: At5g04490.1, by cDNA: 125255. [Arabidopsis thaliana] >gi|11290068|pir||T48445
  misc_feature (9)..(144): Homolog of NCBI NO: 28393229 NR Description: unknown protein [Arabidopsis thaliana]
  misc_feature (8)..(144): Homolog of NCBI NO: 34907982 NR Description: P0446G04.23 [Oryza sativa (japonica
  misc_feature (8)..(144): Homolog of NCBI NO: 15237702 NR Description: putative protein; protein id: At5g58560.1,
  misc_feature (8)..(144): Homolog of NCBI NO: 21593148 NR Description: unknown [Arabidopsis thaliana]
  misc_feature (8)..(97): Homolog of NCBI NO: 8843778 NR Description: emb|CAB85555.1~gene_id:MZN1.2~similar to unknown
  misc_feature (8)..(143): Homolog of NCBI NO: 28850457 NR Description: similar to Oryza sativa (japonica
  misc_feature (8)..(143): Homolog of NCBI NO: 21674801 NR Description: conserved hypothetical protein [Chlorobium TLS] >gi|21648018|gb|AAM73208.1| conserved hypothetical protein
  misc_feature (7)..(7): Xaa is any aa, unknown or other
ITTLLLXRELLRGPLYYVLVLLFSVLVFWRESPIGIVSLSMMSGGDGFADIVGRRYGSAKLPFNRKKSWAGSISMFISGFLLSAMMMLYFSSLGYIDVIWEEALGKLALVALAATVVECVPVTEVVDDNISVPLATMLVAFLLFSSNRTIVN

SEQ ID NO: 14659 - protein, 112 aa, Zea mays subsp. mays
  peptide (1)..(112): Ceres Seq. ID no. 3626196
  misc_feature: Pfam Name: CTP_transf_1 Pfam Description: Cytidylyltransferase family
  misc_feature (1)..(104): Homolog of NCBI NO: 32488404 NR Description: OSJNBa0043A12.34 [Oryza sativa (japonica
  misc_feature (1)..(104): Homolog of NCBI NO: 21537252 NR Description: unknown [Arabidopsis thaliana]
  misc_feature (1)..(104): Homolog of NCBI NO: 15238184 NR Description: putative protein; protein id: At5g04490.1, by cDNA: 125255. [Arabidopsis thaliana] >gi|11290068|pir||T48445
  misc_feature (1)..(104): Homolog of NCBI NO: 28393229 NR Description: unknown protein [Arabidopsis thaliana]
  misc_feature (1)..(104): Homolog of NCBI NO: 34907982 NR Description: P0446G04.23 [Oryza sativa (japonica
  misc_feature (1)..(104): Homolog of NCBI NO: 15237702 NR Description: putative protein; protein id: At5g58560.1,
  misc_feature (1)..(104): Homolog of NCBI NO: 21593148 NR Description: unknown [Arabidopsis thaliana]
  misc_feature (1)..(57): Homolog of NCBI NO: 8843778 NR Description: emb|CAB85555.1~gene_id:MZN1.2~similar to unknown
  misc_feature (1)..(103): Homolog of NCBI NO: 28850457 NR Description: similar to Oryza sativa (japonica
  misc_feature (1)..(103): Homolog of NCBI NO: 21674801 NR Description: conserved hypothetical protein [Chlorobium TLS] >gi|21648018|gb|AAM73208.1| conserved hypothetical protein
MMSGGDGFADIVGRRYGSAKLPFNRKKSWAGSISMFISGFLLSAMMMLYFSSLGYIDVIWEEALGKLALVALAATVVECVPVTEVVDDNISVPLATMLVAFLLFSSNRTIVN

SEQ ID NO: 14660 - protein, 111 aa, Zea mays subsp. mays
  peptide (1)..(111): Ceres Seq. ID no. 3626197
  misc_feature: Pfam Name: CTP_transf_1 Pfam Description: Cytidylyltransferase family
  misc_feature (1)..(103): Homolog of NCBI NO: 32488404 NR Description: OSJNBa0043A12.34 [Oryza sativa (japonica
  misc_feature (1)..(103): Homolog of NCBI NO: 21537252 NR Description: unknown [Arabidopsis thaliana]
  misc_feature (1)..(103): Homolog of NCBI NO: 15238184 NR Description: putative protein; protein id: At5g04490.1, by cDNA: 125255. [Arabidopsis thaliana] >gi|11290068|pir||T48445
  misc_feature (1)..(103): Homolog of NCBI NO: 28393229 NR Description: unknown protein [Arabidopsis thaliana]
  misc_feature (1)..(103): Homolog of NCBI NO: 34907982 NR Description: P0446G04.23 [Oryza sativa (japonica
  misc_feature (1)..(103): Homolog of NCBI NO: 15237702 NR Description: putative protein; protein id: At5g58560.1,
  misc_feature (1)..(103): Homolog of NCBI NO: 21593148 NR Description: unknown [Arabidopsis thaliana]
  misc_feature (1)..(56): Homolog of NCBI NO: 8843778 NR Description: emb|CAB85555.1~gene_id:MZN1.2~similar to unknown
  misc_feature (1)..(102): Homolog of NCBI NO: 28850457 NR Description: similar to Oryza sativa (japonica
  misc_feature (1)..(102): Homolog of NCBI NO: 21674801 NR Description: conserved hypothetical protein [Chlorobium TLS] >gi|21648018|gb|AAM73208.1| conserved hypothetical protein
MSGGDGFADIVGRRYGSAKLPFNRKKSWAGSISMFISGFLLSAMMMLYFSSLGYIDVIWEEALGKLALVALAATVVECVPVTEVVDDNISVPLATMLVAFLLFSSNRTIVN

SEQ ID NO: 14661 - DNA, 1623 bp, Zea mays subsp. mays; identical to SEQ ID NO: 13556
  misc_feature (1)..(1623): Ceres Seq. ID no. 12462280
  misc_feature: MA Experiment ID: 20000487 Result: Up-regulated in Transcription
  misc_feature: MA Experiment 20000487 PARAMETER Experiment Name: Zm_50mM_NH4NO3_L_to_H_P Parameter: Organism Value: Zea mays
  misc_feature: MA Experiment 20000487 PARAMETER Experiment Name: Zm_50mM_NH4NO3_L_to_H_P Parameter: Timepoint (hr) Value: 4
  misc_feature: MA Experiment 20000487 PARAMETER Experiment Name: Zm_50mM_NH4NO3_L_to_H_P Parameter: Tissue Value: Leaves
  misc_feature: MA Experiment 20000487 PARAMETER Experiment Name: Zm_50mM_NH4NO3_L_to_H_P Parameter: Treatment Value: 50mM NH4NO3 vs. 100mM Mannitol
  misc_feature: MA Experiment ID: 20000488 Result: Up-regulated in Transcription
  misc_feature: MA Experiment 20000488 PARAMETER Experiment Name: Zm_50mM_NH4NO3_L_to_H_P Parameter: Organism Value: Zea mays
  misc_feature: MA Experiment 20000488 PARAMETER Experiment Name: Zm_50mM_NH4NO3_L_to_H_P Parameter: Timepoint (hr) Value: 8
  misc_feature: MA Experiment 20000488 PARAMETER Experiment Name: Zm_50mM_NH4NO3_L_to_H_P Parameter: Tissue Value: Leaves
  misc_feature: MA Experiment 20000488 PARAMETER Experiment Name: Zm_50mM_NH4NO3_L_to_H_P Parameter: Treatment Value: 50mM NH4NO3 vs. 100mM Mannitol
  misc_feature: MA Experiment ID: 20001612 Result: Up-regulated in Transcription
  misc_feature: MA Experiment 20001612 PARAMETER Experiment Name: Zm_50ppm_KNO3_L-to-H_P Parameter: Age (day) Value: 19
  misc_feature: MA Experiment 20001612 PARAMETER Experiment Name: Zm_50ppm_KNO3_L-to-H_P Parameter: Organism Value: Zea mays
  misc_feature: MA Experiment 20001612 PARAMETER Experiment Name: Zm_50ppm_KNO3_L-to-H_P Parameter: Plant Line Value: 35A19
  misc_feature: MA Experiment 20001612 PARAMETER Experiment Name: Zm_50ppm_KNO3_L-to-H_P Parameter: Timepoint (hr) Value: 8
  misc_feature: MA Experiment 20001612 PARAMETER Experiment Name: Zm_50ppm_KNO3_L-to-H_P Parameter: Tissue Value: Roots
  misc_feature: MA Experiment 20001612 PARAMETER Experiment Name: Zm_50ppm_KNO3_L-to-H_P Parameter: Treatment Value: 50ppm KNO3 vs. 50ppm KCl

SEQ ID NO: 14662 - protein, 467 aa, Zea mays subsp. mays; identical to SEQ ID NO: 13557
  peptide (1)..(467): Ceres Seq. ID no. 12462281
  misc_feature (25)..(247): Pfam Name: Elongation factor Tu GTP binding domain Pfam Description: Elongation factor Tu GTP binding domain
  misc_feature (25)..(247): Pfam Name: Elongation factor Tu GTP binding domain Pfam Description: Elongation factor Tu GTP binding domain
  misc_feature (21)..(467): Homolog of NCBI NO: 7230387 NR Description: elongation factor 1 alpha [Zea mays]
  misc_feature (21)..(467): Homolog of NCBI NO: 7230385 NR Description: elongation factor 1 alpha [Zea mays]
  misc_feature (21)..(467): Homolog of NCBI NO: 7230397 NR Description: elongation factor 1 alpha [Zea mays]
  misc_feature (21)..(467): Homolog of NCBI NO: 2282584 NR Description: elongation factor 1-alpha [Zea mays]
  misc_feature (21)..(467): Homolog of NCBI NO: 2662341 NR Description: EF-1 alpha [Oryza sativa]
  misc_feature (21)..(467): Homolog of NCBI NO: 7230385 NR Description: elongation factor 1 alpha [Zea mays]
  misc_feature (21)..(467): Homolog of NCBI NO: 2282584 NR Description: elongation factor 1-alpha [Zea mays]
  misc_feature (21)..(467): Homolog of NCBI NO: 9802384 NR Description: elongation factor [Saccharum officinarum]
  misc_feature (21)..(467): Homolog of NCBI NO: 3122071 NR Description: ELONGATION FACTOR 1-ALPHA (EF-1-ALPHA)
  misc_feature (21)..(467): Homolog of NCBI NO: 6015059 NR Description: ELONGATION FACTOR 1-ALPHA (EF-1-ALPHA)
  misc_feature (21)..(467): Homolog of NCBI NO: 2662343 NR Description: EF-1 alpha [Oryza sativa]
  misc_feature (21)..(467): Homolog of NCBI NO: 7230391 NR Description: elongation factor 1 alpha [Zea mays]
  misc_feature (21)..(467): Homolog of NCBI NO: 2662341 NR Description: EF-1 alpha [Oryza sativa]
  misc_feature (21)..(467): Homolog of NCBI NO: 7230397 NR Description: elongation factor 1 alpha [Zea mays]
  misc_feature (21)..(467): Homolog of NCBI NO: 7230387 NR Description: elongation factor 1 alpha [Zea mays]
  misc_feature (21)..(467): Homolog of NCBI NO: 7230391 NR Description: elongation factor 1 alpha [Zea mays]
  misc_feature (21)..(467): Homolog of NCBI NO: 2662343 NR Description: EF-1 alpha [Oryza sativa]
  misc_feature (21)..(467): Homolog of NCBI NO: 6015059 NR Description: ELONGATION FACTOR 1-ALPHA (EF-1-ALPHA)
  misc_feature (21)..(467): Homolog of NCBI NO: 3122071 NR Description: ELONGATION FACTOR 1-ALPHA (EF-1-ALPHA)
  misc_feature (21)..(467): Homolog of NCBI NO: 9802384 NR Description: elongation factor [Saccharum officinarum]

SEQ ID NO: 14663 - protein, 447 aa, Zea mays subsp. mays; identical to SEQ ID NO: 13558
  peptide (1)..(447): Ceres Seq. ID no. 12462282
  misc_feature (5)..(227): Pfam Name: Elongation factor Tu GTP binding domain Pfam Description: Elongation factor Tu GTP binding domain
  misc_feature (5)..(227): Pfam Name: Elongation factor Tu GTP binding domain Pfam Description: Elongation factor Tu GTP binding domain
  misc_feature (1)..(447): Homolog of NCBI NO: 7230387 NR Description: elongation factor 1 alpha [Zea mays]
  misc_feature (1)..(447): Homolog of NCBI NO: 7230385 NR Description: elongation factor 1 alpha [Zea mays]
  misc_feature (1)..(447): Homolog of NCBI NO: 7230397 NR Description: elongation factor 1 alpha [Zea mays]
  misc_feature (1)..(447): Homolog of NCBI NO: 2282584 NR Description: elongation factor 1-alpha [Zea mays]
  misc_feature (1)..(447): Homolog of NCBI NO: 2662341 NR Description: EF-1 alpha [Oryza sativa]
  misc_feature (1)..(447): Homolog of NCBI NO: 7230385 NR Description: elongation factor 1 alpha [Zea mays]
  misc_feature (1)..(447): Homolog of NCBI NO: 2282584 NR Description: elongation factor 1-alpha [Zea mays]
  misc_feature (1)..(447): Homolog of NCBI NO: 9802384 NR Description: elongation factor [Saccharum officinarum]
  misc_feature (1)..(447): Homolog of NCBI NO: 3122071 NR Description: ELONGATION FACTOR 1-ALPHA (EF-1-ALPHA)
  misc_feature (1)..(447): Homolog of NCBI NO: 6015059 NR Description: ELONGATION FACTOR 1-ALPHA (EF-1-ALPHA)
  misc_feature (1)..(447): Homolog of NCBI NO: 2662343 NR Description: EF-1 alpha [Oryza sativa]
  misc_feature (1)..(447): Homolog of NCBI NO: 7230391 NR Description: elongation factor 1 alpha [Zea mays]
  misc_feature (1)..(447): Homolog of NCBI NO: 2662341 NR Description: EF-1 alpha [Oryza sativa]
  misc_feature (1)..(447): Homolog of NCBI NO: 7230397 NR Description: elongation factor 1 alpha [Zea mays]
  misc_feature (1)..(447): Homolog of NCBI NO: 7230387 NR Description: elongation factor 1 alpha [Zea mays]
  misc_feature (1)..(447): Homolog of NCBI NO: 7230391 NR Description: elongation factor 1 alpha [Zea mays]
  misc_feature (1)..(447): Homolog of NCBI NO: 2662343 NR Description: EF-1 alpha [Oryza sativa]
  misc_feature (1)..(447): Homolog of NCBI NO: 6015059 NR Description: ELONGATION FACTOR 1-ALPHA (EF-1-ALPHA)
  misc_feature (1)..(447): Homolog of NCBI NO: 3122071 NR Description: ELONGATION FACTOR 1-ALPHA (EF-1-ALPHA)
  misc_feature (1)..(447): Homolog of NCBI NO: 9802384 NR Description: elongation factor [Saccharum officinarum]

SEQ ID NO: 14664 - protein, 399 aa, Zea mays subsp. mays; identical to SEQ ID NO: 13559
  peptide (1)..(399): Ceres Seq. ID no. 12462283
  misc_feature (1)..(179): Pfam Name: Elongation factor Tu GTP binding domain Pfam Description: Elongation factor Tu GTP binding domain
  misc_feature (1)..(179): Pfam Name: Elongation factor Tu GTP binding domain Pfam Description: Elongation factor Tu GTP binding domain
  misc_feature (1)..(399): Homolog of NCBI NO: 7230387 NR Description: elongation factor 1 alpha [Zea mays]
  misc_feature (1)..(399): Homolog of NCBI NO: 7230385 NR Description: elongation factor 1 alpha [Zea mays]
  misc_feature (1)..(399): Homolog of NCBI NO: 7230397 NR Description: elongation factor 1 alpha [Zea mays]
  misc_feature (1)..(399): Homolog of NCBI NO: 2282584 NR Description: elongation factor 1-alpha [Zea mays]
  misc_feature (1)..(399): Homolog of NCBI NO: 2662341 NR Description: EF-1 alpha [Oryza sativa]
  misc_feature (1)..(399): Homolog of NCBI NO: 7230385 NR Description: elongation factor 1 alpha [Zea mays]
  misc_feature (1)..(399): Homolog of NCBI NO: 2282584 NR Description: elongation factor 1-alpha [Zea mays]
  misc_feature (1)..(399): Homolog of NCBI NO: 9802384 NR Description: elongation factor [Saccharum officinarum]
  misc_feature (1)..(399): Homolog of NCBI NO: 3122071 NR Description: ELONGATION FACTOR 1-ALPHA (EF-1-ALPHA)
  misc_feature (1)..(399): Homolog of NCBI NO: 6015059 NR Description: ELONGATION FACTOR 1-ALPHA (EF-1-ALPHA)
  misc_feature (1)..(399): Homolog of NCBI NO: 2662343 NR Description: EF-1 alpha [Oryza sativa]
  misc_feature (1)..(399): Homolog of NCBI NO: 7230391 NR Description: elongation factor 1 alpha [Zea mays]
  misc_feature (1)..(399): Homolog of NCBI NO: 2662341 NR Description: EF-1 alpha [Oryza sativa]
  misc_feature (1)..(399): Homolog of NCBI NO: 7230397 NR Description: elongation factor 1 alpha [Zea mays]
  misc_feature (1)..(399): Homolog of NCBI NO: 7230387 NR Description: elongation factor 1 alpha [Zea mays]
  misc_feature (1)..(399): Homolog of NCBI NO: 7230391 NR Description: elongation factor 1 alpha [Zea mays]
  misc_feature (1)..(399): Homolog of NCBI NO: 2662343 NR Description: EF-1 alpha [Oryza sativa]
  misc_feature (1)..(399): Homolog of NCBI NO: 6015059 NR Description: ELONGATION FACTOR 1-ALPHA (EF-1-ALPHA)
  misc_feature (1)..(399): Homolog of NCBI NO: 3122071 NR Description: ELONGATION FACTOR 1-ALPHA (EF-1-ALPHA)
  misc_feature (1)..(399): Homolog of NCBI NO: 9802384 NR Description: elongation factor [Saccharum officinarum]

SEQ ID NO: 14665 - DNA, 492 bp, Zea mays subsp. mays
  misc_feature (1)..(492): Ceres Seq. ID no. 3626206
  misc_feature: MA Experiment ID: 108535 Result: Up-regulated in Transcription
  misc_feature: MA Experiment 108535 PARAMETER Experiment Name: Zm_Meristem_P Parameter: Age (day) Value: 8
  misc_feature: MA Experiment 108535 PARAMETER Experiment Name: Zm_Meristem_P Parameter: Organism Value: Zea mays
  misc_feature: MA Experiment 108535 PARAMETER Experiment Name: Zm_Meristem_P Parameter: Plant Line Value: 35A19
  misc_feature: MA Experiment 108535 PARAMETER Experiment Name: Zm_Meristem_P Parameter: Tissue Value: Root Meristem vs. Above Root Meristem
  misc_feature: MA Experiment ID: 20000108 Result: Up-regulated in Transcription
  misc_feature: MA Experiment 20000108 PARAMETER Experiment Name: Zm_Root-Tips_P Parameter: Age (day) Value: 12
  misc_feature: MA Experiment 20000108 PARAMETER Experiment Name: Zm_Root-Tips_P Parameter: Organism Value: Zea mays
  misc_feature: MA Experiment 20000108 PARAMETER Experiment Name: Zm_Root-Tips_P Parameter: Tissue Value: Root tips vs. Root mid region    35
  misc_feature: MA Experiment 20000108 PARAMETER Experiment Name: Zm_Root-Tips_P Parameter: Tissue Value: Root tips vs. Root mid region   Sequence Listing-Misc Features (4)
  misc_feature: MA Experiment ID: 20000487 Result: Up-regulated in Transcription
  misc_feature: MA Experiment 20000487 PARAMETER Experiment Name: Zm_50mM_NH4NO3_L_to_H_P Parameter: Organism Value: Zea mays
  misc_feature: MA Experiment 20000487 PARAMETER Experiment Name: Zm_50mM_NH4NO3_L_to_H_P Parameter: Timepoint (hr) Value: 4
  misc_feature: MA Experiment 20000487 PARAMETER Experiment Name: Zm_50mM_NH4NO3_L_to_H_P Parameter: Tissue Value: Leaves
  misc_feature: MA Experiment 20000487 PARAMETER Experiment Name: Zm_50mM_NH4NO3_L_to_H_P Parameter: Treatment Value: 50mM NH4NO3 vs. 100mM Mannitol
  misc_feature: MA Experiment ID: 20000488 Result: Up-regulated in Transcription
  misc_feature: MA Experiment 20000488 PARAMETER Experiment Name: Zm_50mM_NH4NO3_L_to_H_P Parameter: Organism Value: Zea mays
  misc_feature: MA Experiment 20000488 PARAMETER Experiment Name: Zm_50mM_NH4NO3_L_to_H_P Parameter: Timepoint (hr) Value: 8
  misc_feature: MA Experiment 20000488 PARAMETER Experiment Name: Zm_50mM_NH4NO3_L_to_H_P Parameter: Tissue Value: Leaves
  misc_feature: MA Experiment 20000488 PARAMETER Experiment Name: Zm_50mM_NH4NO3_L_to_H_P Parameter: Treatment Value: 50mM NH4NO3 vs. 100mM Mannitol
  misc_feature: MA Experiment ID: 20000492 Result: Up-regulated in Transcription
  misc_feature: MA Experiment 20000492 PARAMETER Experiment Name: Zm_Hybrid_Seed_Dev_P Parameter: DAP Value: 12
  misc_feature: MA Experiment 20000492 PARAMETER Experiment Name: Zm_Hybrid_Seed_Dev_P Parameter: Organism Value: Zea mays
  misc_feature: MA Experiment 20000492 PARAMETER Experiment Name: Zm_Hybrid_Seed_Dev_P Parameter: Plant Line Value: 35A19
  misc_feature: MA Experiment 20000492 PARAMETER Experiment Name: Zm_Hybrid_Seed_Dev_P Parameter: Tissue Value: Fert Kernel vs. Unfert Floret
tttttgcaggttcctggksctcaaggtagctttgttttcsttaaggattctatatataagaaacctgacacggctttgctcccatttcctacatacttcacgcgtgaaggtgagcctgaagacttggagcccctgattgctgatcttggtgatgttgacccattcatggcagccgattaagacaatgcacaaagttggttaattcctttttgtgttctaagcactccttgagctcgtccattccacgagattgtcaaactctcgatggatgtgagcaattcctgaatcacaagctatatccggttactggccagcctgatcaatgttgttccatgtacattacctggcaagtataccagtgctataatggkttttatatgattgktttgattgaccgaatataaccttttcctcaataagttgtacgcggagccacaagtagtatataaaatcagaatatttcactcatgaragtgtgttctggktttacsc

SEQ ID NO: 14666 - protein, 59 aa, Zea mays subsp. mays
  peptide (1)..(59): Ceres Seq. ID no. 3626207
  misc_feature (3)..(59): Homolog of NCBI NO: 34902796 NR Description: unnamed protein product [Oryza sativa (japonica group)] >gi|7106521|dbj|BAA92206.1| unnamed protein product
  misc_feature (3)..(59): Homolog of NCBI NO: 21450877 NR Description: putative ribosomal protein L3 [Arabidopsis
  misc_feature (3)..(59): Homolog of NCBI NO: 18401521 NR Description: ribosomal protein L3; protein id: At3g17465.1
  misc_feature (6)..(6): Xaa is any aa, unknown or other
  misc_feature (7)..(7): Xaa is any aa, unknown or other
  misc_feature (14)..(14): Xaa is any aa, unknown or other
FLQVPXXQGSFVFXKDSIYKKPDTALLPFPTYFTREGEPEDLEPLIADLGDVDPFMAAD

SEQ ID NO: 14667 - protein, 44 aa, Zea mays subsp. mays
  peptide (1)..(44): Ceres Seq. ID no. 3626208
  misc_feature (6)..(6): Xaa is any aa, unknown or other
  misc_feature (13)..(13): Xaa is any aa, unknown or other
FCRFLXLKVALFXLRILYIRNLTRLCSHFLHTSRVKVSLKTWSP

SEQ ID NO: 14668 - DNA, 577 bp, Zea mays subsp. mays
  misc_feature (1)..(577): Ceres Seq. ID no. 3626253
  misc_feature: MA Experiment ID: 108504 Result: Up-regulated in Transcription
  misc_feature: MA Experiment 108504 PARAMETER Experiment Name: Zm_Drought_P Parameter: Age (day) Value: 8
  misc_feature: MA Experiment 108504 PARAMETER Experiment Name: Zm_Drought_P Parameter: Organism Value: Zea mays
  misc_feature: MA Experiment 108504 PARAMETER Experiment Name: Zm_Drought_P Parameter: Plant Line Value: 35A19
  misc_feature: MA Experiment 108504 PARAMETER Experiment Name: Zm_Drought_P Parameter: Timepoint (hr) Value: 12
  misc_feature: MA Experiment 108504 PARAMETER Experiment Name: Zm_Drought_P Parameter: Tissue Value: Aerial
  misc_feature: MA Experiment 108504 PARAMETER Experiment Name: Zm_Drought_P Parameter: Treatment Value: Drought vs. No Drought
  misc_feature: MA Experiment ID: 108522 Result: Up-regulated in Transcription
  misc_feature: MA Experiment 108522 PARAMETER Experiment Name: Zm_42deg_Heat_P Parameter: Age (day) Value: 8
  misc_feature: MA Experiment 108522 PARAMETER Experiment Name: Zm_42deg_Heat_P Parameter: Organism Value: Zea mays
  misc_feature: MA Experiment 108522 PARAMETER Experiment Name: Zm_42deg_Heat_P Parameter: Plant Line Value: 35A19
  misc_feature: MA Experiment 108522 PARAMETER Experiment Name: Zm_42deg_Heat_P Parameter: Temperature (deg C) Value: 42 vs. 22
  misc_feature: MA Experiment 108522 PARAMETER Experiment Name: Zm_42deg_Heat_P Parameter: Timepoint (hr) Value: 1
  misc_feature: MA Experiment 108522 PARAMETER Experiment Name: Zm_42deg_Heat_P Parameter: Tissue Value: Aerial
  misc_feature: MA Experiment ID: 108523 Result: Up-regulated in Transcription
  misc_feature: MA Experiment 108523 PARAMETER Experiment Name: Zm_42deg_Heat_P Parameter: Age (day) Value: 8
  misc_feature: MA Experiment 108523 PARAMETER Experiment Name: Zm_42deg_Heat_P Parameter: Organism Value: Zea mays
  misc_feature: MA Experiment 108523 PARAMETER Experiment Name: Zm_42deg_Heat_P Parameter: Plant Line Value: 35A19
  misc_feature: MA Experiment 108523 PARAMETER Experiment Name: Zm_42deg_Heat_P Parameter: Temperature (deg C) Value: 42 vs. 22
  misc_feature: MA Experiment 108523 PARAMETER Experiment Name: Zm_42deg_Heat_P Parameter: Timepoint (hr) Value: 6
  misc_feature: MA Experiment 108523 PARAMETER Experiment Name: Zm_42deg_Heat_P Parameter: Tissue Value: Aerial
  misc_feature: MA Experiment ID: 108527 Result: Up-regulated in Transcription
  misc_feature: MA Experiment 108527 PARAMETER Experiment Name: Zm_5mM_NO_P Parameter: Age (day) Value: 8
  misc_feature: MA Experiment 108527 PARAMETER Experiment Name: Zm_5mM_NO_P Parameter: Organism Value: Zea mays
  misc_feature: MA Experiment 108527 PARAMETER Experiment Name: Zm_5mM_NO_P Parameter: Plant Line Value: 35A19
  misc_feature: MA Experiment 108527 PARAMETER Experiment Name: Zm_5mM_NO_P Parameter: Timepoint (hr) Value: 6
  misc_feature: MA Experiment 108527 PARAMETER Experiment Name: Zm_5mM_NO_P Parameter: Tissue Value: Aerial
  misc_feature: MA Experiment 108527 PARAMETER Experiment Name: Zm_5mM_NO_P Parameter: Treatment Value: 5mM NO vs. No Treatment
  misc_feature: MA Experiment ID: 108528 Result: Down-regulated in Transcription
  misc_feature: MA Experiment 108528 PARAMETER Experiment Name: Zm_Imbibed_Seeds_P Parameter: Age (day) Value: 5 vs. 2
  misc_feature: MA Experiment 108528 PARAMETER Experiment Name: Zm_Imbibed_Seeds_P Parameter: Organism Value: Zea mays
  misc_feature: MA Experiment 108528 PARAMETER Experiment Name: Zm_Imbibed_Seeds_P Parameter: Plant Line Value: 35A19
  misc_feature: MA Experiment 108528 PARAMETER Experiment Name: Zm_Imbibed_Seeds_P Parameter: Tissue Value: Aerial vs. Embryo
  misc_feature: MA Experiment ID: 108533 Result: Up-regulated in Transcription
  misc_feature: MA Experiment 108533 PARAMETER Experiment Name: Zm_4deg_Cold_P Parameter: Age (hr) Value: 8
  misc_feature: MA Experiment 108533 PARAMETER Experiment Name: Zm_4deg_Cold_P Parameter: Organism Value: Zea mays
  misc_feature: MA Experiment 108533 PARAMETER Experiment Name: Zm_4deg_Cold_P Parameter: Plant Line Value: 35A19
  misc_feature: MA Experiment 108533 PARAMETER Experiment Name: Zm_4deg_Cold_P Parameter: Temperature (deg C) Value: 4 vs. 22
  misc_feature: MA Experiment 108533 PARAMETER Experiment Name: Zm_4deg_Cold_P Parameter: Timepoint (hr) Value: 1
  misc_feature: MA Experiment 108533 PARAMETER Experiment Name: Zm_4deg_Cold_P Parameter: Tissue Value: Aerial
  misc_feature: MA Experiment ID: 108534 Result: Up-regulated in Transcription
  misc_feature: MA Experiment 108534 PARAMETER Experiment Name: Zm_4deg_Cold_P Parameter: Age (hr) Value: 8
  misc_feature: MA Experiment 108534 PARAMETER Experiment Name: Zm_4deg_Cold_P Parameter: Organism Value: Zea mays
  misc_feature: MA Experiment 108534 PARAMETER Experiment Name: Zm_4deg_Cold_P Parameter: Plant Line Value: 35A19
  misc_feature: MA Experiment 108534 PARAMETER Experiment Name: Zm_4deg_Cold_P Parameter: Temperature (deg C) Value: 4 vs. 22
  misc_feature: MA Experiment 108534 PARAMETER Experiment Name: Zm_4deg_Cold_P Parameter: Timepoint (hr) Value: 6
  misc_feature: MA Experiment 108534 PARAMETER Experiment Name: Zm_4deg_Cold_P Parameter: Tissue Value: Aerial
  misc_feature: MA Experiment ID: 108535 Result: Down-regulated in Transcription
  misc_feature: MA Experiment 108535 PARAMETER Experiment Name: Zm_Meristem_P Parameter: Age (day) Value: 8
  misc_feature: MA Experiment 108535 PARAMETER Experiment Name: Zm_Meristem_P Parameter: Organism Value: Zea mays
  misc_feature: MA Experiment 108535 PARAMETER Experiment Name: Zm_Meristem_P Parameter: Plant Line Value: 35A19
  misc_feature: MA Experiment 108535 PARAMETER Experiment Name: Zm_Meristem_P Parameter: Tissue Value: Root Meristem vs. Above Root Meristem
  misc_feature: MA Experiment ID: 108536 Result: Up-regulated in Transcription
  misc_feature: MA Experiment 108536 PARAMETER Experiment Name: Zm_Meristem_P Parameter: Age (day) Value: 8
  misc_feature: MA Experiment 108536 PARAMETER Experiment Name: Zm_Meristem_P Parameter: Organism Value: Zea mays
  misc_feature: MA Experiment 108536 PARAMETER Experiment Name: Zm_Meristem_P Parameter: Plant Line Value: 35A19
  misc_feature: MA Experiment 108536 PARAMETER Experiment Name: Zm_Meristem_P Parameter: Tissue Value: Shoot Meristem vs. Above Shoot Meristem
  misc_feature: MA Experiment ID: 108539 Result: Up-regulated in Transcription
  misc_feature: MA Experiment 108539 PARAMETER Experiment Name: Zm_20percent_PEG_P Parameter: Age (day) Value: 8
  misc_feature: MA Experiment 108539 PARAMETER Experiment Name: Zm_20percent_PEG_P Parameter: Organism Value: Zea mays
  misc_feature: MA Experiment 108539 PARAMETER Experiment Name: Zm_20percent_PEG_P Parameter: Plant Line Value: 35A19
  misc_feature: MA Experiment 108539 PARAMETER Experiment Name: Zm_20percent_PEG_P Parameter: Timepoint (hr) Value: 1
  misc_feature: MA Experiment 108539 PARAMETER Experiment Name: Zm_20percent_PEG_P Parameter: Tissue Value: Aerial
  misc_feature: MA Experiment 108539 PARAMETER Experiment Name: Zm_20percent_PEG_P Parameter: Treatment Value: 20percent PEG vs. No Treatment
  misc_feature: MA Experiment ID: 108540 Result: Up-regulated in Transcription
  misc_feature: MA Experiment 108540 PARAMETER Experiment Name: Zm_20percent_PEG_P Parameter: Age (day) Value: 8
  misc_feature: MA Experiment 108540 PARAMETER Experiment Name: Zm_20percent_PEG_P Parameter: Organism Value: Zea mays
  misc_feature: MA Experiment 108540 PARAMETER Experiment Name: Zm_20percent_PEG_P Parameter: Plant Line Value: 35A19
  misc_feature: MA Experiment 108540 PARAMETER Experiment Name: Zm_20percent_PEG_P Parameter: Timepoint (hr) Value: 6
  misc_feature: MA Experiment 108540 PARAMETER Experiment Name: Zm_20percent_PEG_P Parameter: Tissue Value: Aerial
  misc_feature: MA Experiment 108540 PARAMETER Experiment Name: Zm_20percent_PEG_P Parameter: Treatment Value: 20percent PEG vs. No Treatment
  misc_feature: MA Experiment ID: 108542 Result: Up-regulated in Transcription
  misc_feature: MA Experiment 108542 PARAMETER Experiment Name: Zm_150mM_NaCl_P Parameter: Age (day) Value: 8
  misc_feature: MA Experiment 108542 PARAMETER Experiment Name: Zm_150mM_NaCl_P Parameter: Organism Value: Zea mays
  misc_feature: MA Experiment 108542 PARAMETER Experiment Name: Zm_150mM_NaCl_P Parameter: Plant Line Value: 35A19
  misc_feature: MA Experiment 108542 PARAMETER Experiment Name: Zm_150mM_NaCl_P Parameter: Timepoint (hr) Value: 6
  misc_feature: MA Experiment 108542 PARAMETER Experiment Name: Zm_150mM_NaCl_P Parameter: Tissue Value: Aerial
  misc_feature: MA Experiment 108542 PARAMETER Experiment Name: Zm_150mM_NaCl_P Parameter: Treatment Value: 150mM NaCl vs. No Treatment
  misc_feature: MA Experiment ID: 108543 Result: Up-regulated in Transcription
  misc_feature: MA Experiment ID: 108544 Result: Down-regulated in Transcription
  misc_feature: MA Experiment ID: 108545 Result: Down-regulated in Transcription
  misc_feature: MA Experiment 108545 PARAMETER Experiment Name: Zm_Imbibed_Seeds_P Parameter: Age (day) Value: 3 vs. 2
  misc_feature: MA Experiment 108545 PARAMETER Experiment Name: Zm_Imbibed_Seeds_P Parameter: Organism Value: Zea mays
  misc_feature: MA Experiment 108545 PARAMETER Experiment Name: Zm_Imbibed_Seeds_P Parameter: Plant Line Value: 35A19
  misc_feature: MA Experiment 108545 PARAMETER Experiment Name: Zm_Imbibed_Seeds_P Parameter: Tissue Value: Aerial vs. Embryo
  misc_feature: MA Experiment ID: 108559 Result: Up-regulated in Transcription
  misc_feature: MA Experiment 108559 PARAMETER Experiment Name: Zm_5mM_NO_P Parameter: Age (day) Value: 8
  misc_feature: MA Experiment 108559 PARAMETER Experiment Name: Zm_5mM_NO_P Parameter: Organism Value: Zea mays
  misc_feature: MA Experiment 108559 PARAMETER Experiment Name: Zm_5mM_NO_P Parameter: Plant Line Value: 35A19
  misc_feature: MA Experiment 108559 PARAMETER Experiment Name: Zm_5mM_NO_P Parameter: Timepoint (hr) Value: 12
  misc_feature: MA Experiment 108559 PARAMETER Experiment Name: Zm_5mM_NO_P Parameter: Tissue Value: Aerial
  misc_feature: MA Experiment 108559 PARAMETER Experiment Name: Zm_5mM_NO_P Parameter: Treatment Value: 5mM NO vs. No Treatment
  misc_feature: MA Experiment ID: 108687 Result: Up-regulated in Transcription
  misc_feature: MA Experiment 108687 PARAMETER Experiment Name: Zm_Embryos-Flowers__P Parameter: Tissue Value: Embryo vs. Aerial+
  misc_feature: MA Experiment ID: 108688 Result: Down-regulated in Transcription
  misc_feature: MA Experiment 108688 PARAMETER Experiment Name: Zm_Embryos-Flowers__P Parameter: Tissue Value: Immature Flowers vs. Aerial+
  misc_feature: MA Experiment ID: 108689 Result: Down-regulated in Transcription
  misc_feature: MA Experiment 108689 PARAMETER Experiment Name: Zm_Drought_Roots_P Parameter: Age (day) Value: 9
  misc_feature: MA Experiment 108689 PARAMETER Experiment Name: Zm_Drought_Roots_P Parameter: Organism Value: Zea mays
  misc_feature: MA Experiment 108689 PARAMETER Experiment Name: Zm_Drought_Roots_P Parameter: Plant Line Value: 35A19
  misc_feature: MA Experiment 108689 PARAMETER Experiment Name: Zm_Drought_Roots_P Parameter: Timepoint (hr) Value: 24
  misc_feature: MA Experiment 108689 PARAMETER Experiment Name: Zm_Drought_Roots_P Parameter: Tissue Value: Roots
  misc_feature: MA Experiment 108689 PARAMETER Experiment Name: Zm_Drought_Roots_P Parameter: Treatment Value: Drought vs. No Drought
  misc_feature: MA Experiment ID: 20000532 Result: Up-regulated in Transcription
  misc_feature: MA Experiment 20000532 PARAMETER Experiment Name: Zm_0.001percent_MeJA_P Parameter: Age (day) Value: 10
  misc_feature: MA Experiment 20000532 PARAMETER Experiment Name: Zm_0.001percent_MeJA_P Parameter: Organism Value: Zea mays
  misc_feature: MA Experiment 20000532 PARAMETER Experiment Name: Zm_0.001percent_MeJA_P Parameter: Plant Line Value: 35A19
  misc_feature: MA Experiment 20000532 PARAMETER Experiment Name: Zm_0.001percent_MeJA_P Parameter: Timepoint (hr) Value: 48
  misc_feature: MA Experiment 20000532 PARAMETER Experiment Name: Zm_0.001percent_MeJA_P Parameter: Tissue Value: Aerial
  misc_feature: MA Experiment 20000532 PARAMETER Experiment Name: Zm_0.001percent_MeJA_P Parameter: Treatment Value: 0.001percent MeJA vs. No Treatment
  misc_feature: MA Experiment ID: 20000633 Result: Up-regulated in Transcription
  misc_feature: MA Experiment 20000633 PARAMETER Experiment Name: Zm_Herbicide-Treatments_P Parameter: Timepoint (hr) Value: 4
  misc_feature: MA Experiment 20000633 PARAMETER Experiment Name: Zm_Herbicide-Treatments_P Parameter: Tissue Value: Aerial
  misc_feature: MA Experiment 20000633 PARAMETER Experiment Name: Zm_Herbicide-Treatments_P Parameter: Treatment Value: Trimec vs. No Treatment
ggttcgaccccaccgccgactkccacacctactccatccagtggacgcagcagcacatcctcgtgctggtggacgggacgccgatccgggagttcaagaaccacgcggaccggggcgtgccgtacccgtcgtcgcagcggatgcgcctctacggctcgctgtgggacgccgaggactgggccacgcagggcggccgcgtgaagacggactggtcgcgggcccccttcgtggcgcagtaccgcaacttcacggccgcgccgccggccacggcggcggacggccggtacgggcaacagatggacgccgcggcgcagcaggccatgaagtgggcgcgggacaactacatggtctacgactactgcgccgacaccaagcgcttcccgcagggcgcgccgcctgagtgctccatggcgtagaggtgctgggctgaaccacggtgcacttcgattgcgatgtcgatcagctagtgcacactatatacgacgcacgggtcaattcattgtttataccgatcgatcgattctctggtgtgaaagaaatactctagtataatttaattcatttggttggttgcaag

SEQ ID NO: 14669 - protein, 137 aa, Zea mays subsp. mays
  peptide (1)..(137): Ceres Seq. ID no. 3626254
  misc_feature (1)..(72): Pfam Name: Glycosyl hydrolases family 16 Pfam Description: Glycosyl hydrolases family 16
  misc_feature (1)..(136): Homolog of NCBI NO: 38344159 NR Description: OSJNBa0041A02.26 [Oryza sativa (japonica
  misc_feature (1)..(136): Homolog of NCBI NO: 17149114 NR Description: xyloglucan endotransglycosylase [Oryza sativa]
  misc_feature (1)..(136): Homolog of NCBI NO: 29500891 NR Description: putative xyloglucan endotransglycosylase [Cucumis >gi|29500899|emb|CAD87533.1| putative xyloglucan
  misc_feature (1)..(94): Homolog of NCBI NO: 7447412 NR Description: xyloglucan endo-1,4-beta-D-glucanase (EC 3.2.1.-) barley >gi|1890575|emb|CAA63662.1| xyloglucan
  misc_feature (83)..(136): Homolog of NCBI NO: 7447412 NR Description: xyloglucan endo-1,4-beta-D-glucanase (EC 3.2.1.-) barley >gi|1890575|emb|CAA63662.1| xyloglucan
  misc_feature (1)..(137): Homolog of NCBI NO: 8886867 NR Description: xyloglucan endotransglycosylase XET2 [Asparagus
  misc_feature (1)..(135): Homolog of NCBI NO: 25044833 NR Description: xyloglucan endotransglycosylase [Ananas comosus]
  misc_feature (1)..(136): Homolog of NCBI NO: 9857712 NR Description: xyloglucan endotransglycosylase LeXET2
  misc_feature (1)..(137): Homolog of NCBI NO: 22947852 NR Description: xyloglucan endotransglycosylase [Malus x
  misc_feature (1)..(135): Homolog of NCBI NO: 7447403 NR Description: xyloglucan endo-1,4-beta-D-glucanase (EC 3.2.1.-)
  misc_feature (7)..(7): Xaa is any aa, unknown or other
FDPTADXHTYSIQWTQQHILVLVDGTPIREFKNHADRGVPYPSSQRMRLYGSLWDAEDWATQGGRVKTDWSRAPFVAQYRNFTAAPPATAADGRYGQQMDAAAQQAMKWARDNYMVYDYCADTKRFPQGAPPECSMA

SEQ ID NO: 14670 - protein, 132 aa, Zea mays subsp. mays
  peptide (1)..(132): Ceres Seq. ID no. 3626255
  misc_feature (7)..(7): Xaa is any aa, unknown or other
VRPHRRXPHLLHPVDAAAHPRAGGRDADPGVQEPRGPGRAVPVVAADAPLRLAVGRRGLGHAGRPREDGLVAGPLRGAVPQLHGRAAGHGGGRPVRATDGRRGAAGHEVGAGQLHGLRLLRRHQALPAGRAA

SEQ ID NO: 14671 - protein, 91 aa, Zea mays subsp. mays
  peptide (1)..(91): Ceres Seq. ID no. 3626256
  misc_feature (1)..(90): Homolog of NCBI NO: 38344159 NR Description: OSJNBa0041A02.26 [Oryza sativa (japonica
  misc_feature (1)..(90): Homolog of NCBI NO: 17149114 NR Description: xyloglucan endotransglycosylase [Oryza sativa]
  misc_feature (1)..(90): Homolog of NCBI NO: 29500891 NR Description: putative xyloglucan endotransglycosylase [Cucumis >gi|29500899|emb|CAD87533.1| putative xyloglucan
  misc_feature (1)..(48): Homolog of NCBI NO: 7447412 NR Description: xyloglucan endo-1,4-beta-D-glucanase (EC 3.2.1.-) barley >gi|1890575|emb|CAA63662.1| xyloglucan
  misc_feature (37)..(90): Homolog of NCBI NO: 7447412 NR Description: xyloglucan endo-1,4-beta-D-glucanase (EC 3.2.1.-) barley >gi|1890575|emb|CAA63662.1| xyloglucan
  misc_feature (1)..(91): Homolog of NCBI NO: 8886867 NR Description: xyloglucan endotransglycosylase XET2 [Asparagus
  misc_feature (1)..(89): Homolog of NCBI NO: 25044833 NR Description: xyloglucan endotransglycosylase [Ananas comosus]
  misc_feature (1)..(90): Homolog of NCBI NO: 9857712 NR Description: xyloglucan endotransglycosylase LeXET2
  misc_feature (1)..(91): Homolog of NCBI NO: 22947852 NR Description: xyloglucan endotransglycosylase [Malus x
  misc_feature (1)..(89): Homolog of NCBI NO: 7447403 NR Description: xyloglucan endo-1,4-beta-D-glucanase (EC 3.2.1.-)
MRLYGSLWDAEDWATQGGRVKTDWSRAPFVAQYRNFTAAPPATAADGRYGQQMDAAAQQAMKWARDNYMVYDYCADTKRFPQGAPPECSMA

SEQ ID NO: 14672 - DNA, 841 bp, Zea mays subsp. mays
  misc_feature (1)..(841): Ceres Seq. ID no. 12450665
  misc_feature: MA Experiment ID: 108523 Result: Up-regulated in Transcription
  misc_feature: MA Experiment 108523 PARAMETER Experiment Name: Zm_42deg_Heat_P Parameter: Age (day) Value: 8
  misc_feature: MA Experiment 108523 PARAMETER Experiment Name: Zm_42deg_Heat_P Parameter: Organism Value: Zea mays
  misc_feature: MA Experiment 108523 PARAMETER Experiment Name: Zm_42deg_Heat_P Parameter: Plant Line Value: 35A19
  misc_feature: MA Experiment 108523 PARAMETER Experiment Name: Zm_42deg_Heat_P Parameter: Temperature (deg C) Value: 42 vs. 22
  misc_feature: MA Experiment 108523 PARAMETER Experiment Name: Zm_42deg_Heat_P Parameter: Timepoint (hr) Value: 6
  misc_feature: MA Experiment 108523 PARAMETER Experiment Name: Zm_42deg_Heat_P Parameter: Tissue Value: Aerial
  misc_feature: MA Experiment ID: 108543 Result: Down-regulated in Transcription
atgctacatcagcccctcgatggttcttctagtgttcctactcaatctcttgtgacctcagtaggcttaacctcacaagttcagctaccattggtgccacagcaccctggaccatctgtcatgcctacaagtgtacaacagctacctttgacccaccctcatcttgctcaggtagctgttgcacctgagaccctaccaaatgaaataagtactttggcagagtttacccatccctcaaagttgagaaaattggaggatggaacctcggtgcctggaatggtgaacagcagccatgctgtttatacagttccactgcaagcagtgggccctagcggaccatcagggagctatagtgctggttctgttagcttacagcaaccagggaatgaagagcagcttacgcctgatgtggagtcagctcttntgcagcaagtcttgcagctgacacccgagcagctgagttcgttgccaccagagcaacagcagcaggtgattgagctccagaagatgctttcagttagtaaatagaagcaactgagagctaacgcagcaaaaatgctggttgagaatctggcacatcacataatggcgagttggtaactagtggaaactggaaatgatcctcagatttgtttatgaagtcaccacgccgcctgtaacctgtaagcattgtcggcatcctgatgccatcaggatccatatggttttctttcttcagctcggagataaaagaaatgtgataggagaagagtagtgtggaaaaagggatacgcattatccatcactgttgtatcattatagggagaaaaaaataatatgtattcaaaggaactttttttcg

SEQ ID NO: 14673 - protein, 175 aa, Zea mays subsp. mays
  peptide (1)..(175): Ceres Seq. ID no. 12450666
  misc_feature (142)..(142): Xaa is any aa, unknown or other
MLHQPLDGSSSVPTQSLVTSVGLTSQVQLPLVPQHPGPSVMPTSVQQLPLTHPHLAQVAVAPETLPNEISTLAEFTHPSKLRKLEDGTSVPGMVNSSHAVYTVPLQAVGPSGPSGSYSAGSVSLQQPGNEEQLTPDVESALXQQVLQLTPEQLSSLPPEQQQQVIELQKMLSVSK

SEQ ID NO: 14674 - protein, 135 aa, Zea mays subsp. mays
  peptide (1)..(135): Ceres Seq. ID no. 12450667
  misc_feature (102)..(102): Xaa is any aa, unknown or other
MPTSVQQLPLTHPHLAQVAVAPETLPNEISTLAEFTHPSKLRKLEDGTSVPGMVNSSHAVYTVPLQAVGPSGPSGSYSAGSVSLQQPGNEEQLTPDVESALXQQVLQLTPEQLSSLPPEQQQQVIELQKMLSVSK

SEQ ID NO: 14675 - DNA, 532 bp, Zea mays subsp. mays
  misc_feature (1)..(532): Ceres Seq. ID no. 3626306
  misc_feature: MA Experiment ID: 108544 Result: Down-regulated in Transcription
  misc_feature: MA Experiment ID: 108687 Result: Down-regulated in Transcription
  misc_feature: MA Experiment 108687 PARAMETER Experiment Name: Zm_Embryos-Flowers__P Parameter: Tissue Value: Embryo vs. Aerial+
  misc_feature: MA Experiment ID: 20000478 Result: Down-regulated in Transcription
  misc_feature: MA Experiment 20000478 PARAMETER Experiment Name: Zm_5mM_SA_P Parameter: Age (day) Value: 11
  misc_feature: MA Experiment 20000478 PARAMETER Experiment Name: Zm_5mM_SA_P Parameter: Organism Value: Zea mays
  misc_feature: MA Experiment 20000478 PARAMETER Experiment Name: Zm_5mM_SA_P Parameter: Plant Line Value: 35A19
  misc_feature: MA Experiment 20000478 PARAMETER Experiment Name: Zm_5mM_SA_P Parameter: Timepoint (hr) Value: 72
  misc_feature: MA Experiment 20000478 PARAMETER Experiment Name: Zm_5mM_SA_P Parameter: Tissue Value: Aerial
  misc_feature: MA Experiment 20000478 PARAMETER Experiment Name: Zm_5mM_SA_P Parameter: Treatment Value: 5mM SA vs. No Treatment
  misc_feature: MA Experiment ID: 20000479 Result: Down-regulated in Transcription
  misc_feature: MA Experiment 20000479 PARAMETER Experiment Name: Zm_Drought_P Parameter: Age (day) Value: 10
  misc_feature: MA Experiment 20000479 PARAMETER Experiment Name: Zm_Drought_P Parameter: Organism Value: Zea mays
  misc_feature: MA Experiment 20000479 PARAMETER Experiment Name: Zm_Drought_P Parameter: Plant Line Value: 35A19
  misc_feature: MA Experiment 20000479 PARAMETER Experiment Name: Zm_Drought_P Parameter: Timepoint (hr) Value: 48
  misc_feature: MA Experiment 20000479 PARAMETER Experiment Name: Zm_Drought_P Parameter: Tissue Value: Aerial
  misc_feature: MA Experiment 20000479 PARAMETER Experiment Name: Zm_Drought_P Parameter: Treatment Value: Drought vs. No Drought
  misc_feature: MA Experiment ID: 20000480 Result: Down-regulated in Transcription
  misc_feature: MA Experiment 20000480 PARAMETER Experiment Name: Zm_Drought_P Parameter: Age (day) Value: 11
  misc_feature: MA Experiment 20000480 PARAMETER Experiment Name: Zm_Drought_P Parameter: Organism Value: Zea mays
  misc_feature: MA Experiment 20000480 PARAMETER Experiment Name: Zm_Drought_P Parameter: Plant Line Value: 35A19
  misc_feature: MA Experiment 20000480 PARAMETER Experiment Name: Zm_Drought_P Parameter: Timepoint (hr) Value: 72
  misc_feature: MA Experiment 20000480 PARAMETER Experiment Name: Zm_Drought_P Parameter: Tissue Value: Aerial
  misc_feature: MA Experiment 20000480 PARAMETER Experiment Name: Zm_Drought_P Parameter: Treatment Value: Drought vs. No Drought
  misc_feature: MA Experiment ID: 20000629 Result: Up-regulated in Transcription
  misc_feature: MA Experiment 20000629 PARAMETER Experiment Name: Zm_Herbicide-Treatments_P Parameter: Timepoint (hr) Value: 12
  misc_feature: MA Experiment 20000629 PARAMETER Experiment Name: Zm_Herbicide-Treatments_P Parameter: Tissue Value: Aerial
  misc_feature: MA Experiment 20000629 PARAMETER Experiment Name: Zm_Herbicide-Treatments_P Parameter: Treatment Value: Trimec vs. No Treatment
  misc_feature: MA Experiment ID: 20000633 Result: Up-regulated in Transcription
  misc_feature: MA Experiment 20000633 PARAMETER Experiment Name: Zm_Herbicide-Treatments_P Parameter: Timepoint (hr) Value: 4
  misc_feature: MA Experiment 20000633 PARAMETER Experiment Name: Zm_Herbicide-Treatments_P Parameter: Tissue Value: Aerial
  misc_feature: MA Experiment 20000633 PARAMETER Experiment Name: Zm_Herbicide-Treatments_P Parameter: Treatment Value: Trimec vs. No Treatment
aagtacaccgagaagcagatggcgtcgctgagcgccgactacgggctggatttgggcaccgtcagaggaaccgtcaacaacgcctgccggattcttgaggtgcggagggacttttgctcgctggacaagtacgtgtgggcgttcgtgaacaacaagccgctgtcgccgagctacaagtacagccggaagatcccggtgaagacgtccaagtcggagtccatcagcaaggacatggtcaggcgcggcttccgcttcgtcggccccactgtcatccactccttcatggaggcggtcgggctcaccaacgaccacctcgtctcgtgcccgcgccaccgcgtytgctcctccgccgscgscgscgsccgcgttaataataactgattctgctgacgaccaccaagcaaaacacaagaggggattatctaaggacaaccaaaacgagagagagagaggtagcagtagtaatatacaaaggagagtgctggtttgaaagtgtgtatgatgacccartgtgcttgkgtagattaattac

SEQ ID NO: 14676 - protein, 126 aa, Zea mays subsp. mays
  peptide (1)..(126): Ceres Seq. ID no. 3626307
  misc_feature (1)..(113): Pfam Name: Methyladenine glycosylase Pfam Description: Methyladenine glycosylase
  misc_feature (1)..(117): Homolog of NCBI NO: 34908920 NR Description: P0691E06.10 [Oryza sativa (japonica
  misc_feature (1)..(115): Homolog of NCBI NO: 18399721 NR Description: expressed protein; protein id: At3g12710.1,
  misc_feature (1)..(115): Homolog of NCBI NO: 21536975 NR Description: unknown [Arabidopsis thaliana]
  misc_feature (2)..(116): Homolog of NCBI NO: 15241554 NR Description: putative protein; protein id: At5g44680.1, by cDNA: 29551. [Arabidopsis thaliana]
  misc_feature (2)..(116): Homolog of NCBI NO: 21592537 NR Description: unknown [Arabidopsis thaliana]
  misc_feature (21)..(117): Homolog of NCBI NO: 38345034 NR Description: OSJNBa0029H02.18 [Oryza sativa (japonica
  misc_feature (1)..(115): Homolog of NCBI NO: 18410766 NR Description: putative DNA-3-methyladenine glycosylase I; id: At1g75090.1, supported by cDNA: gi_14334651, supported by gi_17104586 [Arabidopsis thaliana] >gi|14334652|gb|AAK59504.1|
  misc_feature (1)..(115): Homolog of NCBI NO: 25406407 NR Description: hypothetical protein F9E10.6 [imported] -
  misc_feature (21)..(114): Homolog of NCBI NO: 15242914 NR Description: putative protein; protein id: At5g57970.1
  misc_feature (3)..(114): Homolog of NCBI NO: 15220860 NR Description: DNA-3-methyladenine glycosidase, putative; id: At1g80850.1 [Arabidopsis thaliana] >gi|25406698|pir||B96841
  misc_feature (113)..(113): Xaa is any aa, unknown or other
  misc_feature (118)..(118): Xaa is any aa, unknown or other
  misc_feature (119)..(119): Xaa is any aa, unknown or other
  misc_feature (120)..(120): Xaa is any aa, unknown or other
  misc_feature (121)..(121): Xaa is any aa, unknown or other
KYTEKQMASLSADYGLDLGTVRGTVNNACRILEVRRDFCSLDKYVWAFVNNKPLSPSYKYSRKIPVKTSKSESISKDMVRRGFRFVGPTVIHSFMEAVGLTNDHLVSCPRHRXCSSAXXXXRVNNN

SEQ ID NO: 14677 - protein, 120 aa, Zea mays subsp. mays
  peptide (1)..(120): Ceres Seq. ID no. 3626308
  misc_feature (1)..(107): Pfam Name: Methyladenine glycosylase Pfam Description: Methyladenine glycosylase
  misc_feature (1)..(109): Homolog of NCBI NO: 18410766 NR Description: putative DNA-3-methyladenine glycosylase I; id: At1g75090.1, supported by cDNA: gi_14334651, supported by gi_17104586 [Arabidopsis thaliana] >gi|14334652|gb|AAK59504.1|
  misc_feature (1)..(109): Homolog of NCBI NO: 25406407 NR Description: hypothetical protein F9E10.6 [imported] -
  misc_feature (1)..(111): Homolog of NCBI NO: 34908920 NR Description: P0691E06.10 [Oryza sativa (japonica
  misc_feature (1)..(109): Homolog of NCBI NO: 21536975 NR Description: unknown [Arabidopsis thaliana]
  misc_feature (1)..(110): Homolog of NCBI NO: 21592537 NR Description: unknown [Arabidopsis thaliana]
  misc_feature (15)..(111): Homolog of NCBI NO: 38345034 NR Description: OSJNBa0029H02.18 [Oryza sativa (japonica
  misc_feature (1)..(110): Homolog of NCBI NO: 15241554 NR Description: putative protein; protein id: At5g44680.1, by cDNA: 29551. [Arabidopsis thaliana]
  misc_feature (1)..(109): Homolog of NCBI NO: 18399721 NR Description: expressed protein; protein id: At3g12710.1,
  misc_feature (15)..(108): Homolog of NCBI NO: 15242914 NR Description: putative protein; protein id: At5g57970.1
  misc_feature (1)..(108): Homolog of NCBI NO: 15220860 NR Description: DNA-3-methyladenine glycosidase, putative; id: At1g80850.1 [Arabidopsis thaliana] >gi|25406698|pir||B96841
  misc_feature (107)..(107): Xaa is any aa, unknown or other
  misc_feature (112)..(112): Xaa is any aa, unknown or other
  misc_feature (113)..(113): Xaa is any aa, unknown or other
  misc_feature (114)..(114): Xaa is any aa, unknown or other
  misc_feature (115)..(115): Xaa is any aa, unknown or other
MASLSADYGLDLGTVRGTVNNACRILEVRRDFCSLDKYVWAFVNNKPLSPSYKYSRKIPVKTSKSESISKDMVRRGFRFVGPTVIHSFMEAVGLTNDHLVSCPRHRXCSSAXXXXRVNNN

SEQ ID NO: 14678 - DNA, 1486 bp, Zea mays subsp. mays
  misc_feature (1)..(1486): Ceres Seq. ID no. 14307928
  misc_feature: MA Experiment ID: 108535 Result: Down-regulated in Transcription
  misc_feature: MA Experiment 108535 PARAMETER Experiment Name: Zm_Meristem_P Parameter: Age (day) Value: 8
  misc_feature: MA Experiment 108535 PARAMETER Experiment Name: Zm_Meristem_P Parameter: Organism Value: Zea mays
  misc_feature: MA Experiment 108535 PARAMETER Experiment Name: Zm_Meristem_P Parameter: Plant Line Value: 35A19
  misc_feature: MA Experiment 108535 PARAMETER Experiment Name: Zm_Meristem_P Parameter: Tissue Value: Root Meristem vs. Above Root Meristem
  misc_feature: MA Experiment ID: 108536 Result: Up-regulated in Transcription
  misc_feature: MA Experiment 108536 PARAMETER Experiment Name: Zm_Meristem_P Parameter: Age (day) Value: 8
  misc_feature: MA Experiment 108536 PARAMETER Experiment Name: Zm_Meristem_P Parameter: Organism Value: Zea mays
  misc_feature: MA Experiment 108536 PARAMETER Experiment Name: Zm_Meristem_P Parameter: Plant Line Value: 35A19
  misc_feature: MA Experiment 108536 PARAMETER Experiment Name: Zm_Meristem_P Parameter: Tissue Value: Shoot Meristem vs. Above Shoot Meristem
  misc_feature: MA Experiment ID: 108546 Result: Down-regulated in Transcription
  misc_feature: MA Experiment 108546 PARAMETER Experiment Name: Zm_Imbibed_Seeds_P Parameter: Age (day) Value: 3 vs. 2
  misc_feature: MA Experiment 108546 PARAMETER Experiment Name: Zm_Imbibed_Seeds_P Parameter: Organism Value: Zea mays
  misc_feature: MA Experiment 108546 PARAMETER Experiment Name: Zm_Imbibed_Seeds_P Parameter: Plant Line Value: 35A19
  misc_feature: MA Experiment 108546 PARAMETER Experiment Name: Zm_Imbibed_Seeds_P Parameter: Tissue Value: Roots vs. Embryo
  misc_feature: MA Experiment ID: 108556 Result: Up-regulated in Transcription
  misc_feature: MA Experiment 108556 PARAMETER Experiment Name: Zm_Drought_P Parameter: Age (day) Value: 9
  misc_feature: MA Experiment 108556 PARAMETER Experiment Name: Zm_Drought_P Parameter: Organism Value: Zea mays
  misc_feature: MA Experiment 108556 PARAMETER Experiment Name: Zm_Drought_P Parameter: Plant Line Value: 35A19
  misc_feature: MA Experiment 108556 PARAMETER Experiment Name: Zm_Drought_P Parameter: Timepoint (hr) Value: 24
  misc_feature: MA Experiment 108556 PARAMETER Experiment Name: Zm_Drought_P Parameter: Tissue Value: Aerial
  misc_feature: MA Experiment 108556 PARAMETER Experiment Name: Zm_Drought_P Parameter: Treatment Value: Drought vs. No Drought
  misc_feature: MA Experiment ID: 108597 Result: Up-regulated in Transcription
  misc_feature: MA Experiment 108597 PARAMETER Experiment Name: Zm_100uM_ABA_P Parameter: Age (day) Value: 9
  misc_feature: MA Experiment 108597 PARAMETER Experiment Name: Zm_100uM_ABA_P Parameter: Organism Value: Zea mays
  misc_feature: MA Experiment 108597 PARAMETER Experiment Name: Zm_100uM_ABA_P Parameter: Plant Line Value: 35A19
  misc_feature: MA Experiment 108597 PARAMETER Experiment Name: Zm_100uM_ABA_P Parameter: Timepoint (hr) Value: 24
  misc_feature: MA Experiment 108597 PARAMETER Experiment Name: Zm_100uM_ABA_P Parameter: Tissue Value: Aerial
  misc_feature: MA Experiment 108597 PARAMETER Experiment Name: Zm_100uM_ABA_P Parameter: Treatment Value: 100uM ABA vs. No Treatment
  misc_feature: MA Experiment ID: 108689 Result: Up-regulated in Transcription
  misc_feature: MA Experiment 108689 PARAMETER Experiment Name: Zm_Drought_Roots_P Parameter: Age (day) Value: 9
  misc_feature: MA Experiment 108689 PARAMETER Experiment Name: Zm_Drought_Roots_P Parameter: Organism Value: Zea mays
  misc_feature: MA Experiment 108689 PARAMETER Experiment Name: Zm_Drought_Roots_P Parameter: Plant Line Value: 35A19
  misc_feature: MA Experiment 108689 PARAMETER Experiment Name: Zm_Drought_Roots_P Parameter: Timepoint (hr) Value: 24
  misc_feature: MA Experiment 108689 PARAMETER Experiment Name: Zm_Drought_Roots_P Parameter: Tissue Value: Roots
  misc_feature: MA Experiment 108689 PARAMETER Experiment Name: Zm_Drought_Roots_P Parameter: Treatment Value: Drought vs. No Drought
gctgctgcctgctcttctttttctgctgagtacaagaaacagtctttgctcgcgtcgtgggttcttcccctgttcgattcaccgcgaggtctgcgacggaggtttgcgtgcctccgattgctgcatccgttgctgatcgaggagactgggaccttcaaagagcaataggactcatggaggttggagacgcaagaaacggttctgcagcagcggcactgacaaagggaagtgcggatgatgccgcccgcaaaccgctccctccttgctgcgtcaaggccaaggcgcgtgtgcctgaaaccgaggccaactgccatgatactgtggtttcagggtggttcacggaacccagatcgcgttttggtaaaacaagcaaagtgcagtacttcaataacccgatgtggcctggagaggctcattcattgaaagtggagaagatcttgtttcaagggaaatcgccttaccaagaaattttagtttttgagtcttcaacctatggaaatgttcttgtgcttgatggtatagttcagttgactgacaaggatgaatgcgcataccaggaaatggttactcaccttccactgtgctcaattcctgcaccgaagaatgttttggttgttggaggtggtgatggtggtgtactgcgcgaaatagccagacatgattcagtggaaactattgatatatgtgagattgatcaactagttattgatgtttgcaaagaattctttccaaacttatccattggattcaaagatcctcgtgtccgacttcatgttggtgatgctgttgatttcctgaggaattctcccgaaggaaaatatgatgctattattgtagattcatcagatccaattgggccagcacaggcactcgtggagaaactgtttattcagacaattgctagagctttgaagcctggtggtgttctttgtaatcttgctgagagcatgtggctgcacacacatctaatccaggatatgcttgctatctgtcgacagacattcaaaggtgctgtgcactatgcctggacaagtgttccaacatatcccagtggtgtcattggatttttgctatgtgcaaaagaaggtcgtgcagtgaacttcttaactcctgtgaatccaattgagaaaatagaaggaacaacaaaagctggaagggaactcagattttacaattccgagatccatagggctgcttttgttctgccaacatttgtaagaagagaactggaagcatataccactcctagtacctctgctgaaaacgagaaaccgaaagaatcggtgtcagaaccgcagaagataaagatattgtcaaacaacgccattcttacagcttcctagccctgagccgtactcaatcttgctcggtatagttgtattctcacagaataaatcagtcactggcttttgctgacaccgcacgagcagctttagtatagtgagttgaatgatgatcgattgaataagagggtagatattgaact

SEQ ID NO: 14679 - protein, 389 aa, Zea mays subsp. mays
  peptide (1)..(389): Ceres Seq. ID no. 14307929
  misc_feature (53)..(310): Pfam Name: Spermine/spermidine synthase Pfam Description: Spermine/spermidine synthase
  misc_feature (1)..(389): Homolog of NCBI NO: 33354149 NR Description: aminopropyl transferase [Oryza sativa (japonica
  misc_feature (17)..(352): Homolog of NCBI NO: 18423473 NR Description: spermidine synthase [Arabidopsis thaliana] spermidine synthase [Arabidopsis thaliana] spermidine synthase [Arabidopsis thaliana]
  misc_feature (17)..(352): Homolog of NCBI NO: 15983394 NR Description: AT5g53120/MFH8_5 [Arabidopsis thaliana]
  misc_feature (17)..(352): Homolog of NCBI NO: 21592832 NR Description: spermidine synthase [Arabidopsis thaliana]
  misc_feature (28)..(362): Homolog of NCBI NO: 33150481 NR Description: putative spermine synthase [Lycopersicon
  misc_feature (17)..(352): Homolog of NCBI NO: 9757993 NR Description: spermidine synthase [Arabidopsis thaliana]
  misc_feature (73)..(354): Homolog of NCBI NO: 6094330 NR Description: Spermidine synthase 2 (Putrescine
  misc_feature (73)..(354): Homolog of NCBI NO: 6094327 NR Description: Spermidine synthase 1 (Putrescine
  misc_feature (73)..(354): Homolog of NCBI NO: 6094335 NR Description: Spermidine synthase (Putrescine (SPDSY) >gi|3242659|dbj|BAA29033.1| spermidine synthase [Coffea
  misc_feature (73)..(350): Homolog of NCBI NO: 12229998 NR Description: Spermidine synthase 1 (Putrescine
MEVGDARNGSAAAALTKGSADDAARKPLPPCCVKAKARVPETEANCHDTVVSGWFTEPRSRFGKTSKVQYFNNPMWPGEAHSLKVEKILFQGKSPYQEILVFESSTYGNVLVLDGIVQLTDKDECAYQEMVTHLPLCSIPAPKNVLVVGGGDGGVLREIARHDSVETIDICEIDQLVIDVCKEFFPNLSIGFKDPRVRLHVGDAVDFLRNSPEGKYDAIIVDSSDPIGPAQALVEKLFIQTIARALKPGGVLCNLAESMWLHTHLIQDMLAICRQTFKGAVHYAWTSVPTYPSGVIGFLLCAKEGRAVNFLTPVNPIEKIEGTTKAGRELRFYNSEIHRAAFVLPTFVRRELEAYTTPSTSAENEKPKESVSEPQKIKILSNNAILTAS

SEQ ID NO: 14680 - protein, 315 aa, Zea mays subsp. mays
  peptide (1)..(315): Ceres Seq. ID no. 14307930
  misc_feature (1)..(236): Pfam Name: Spermine/spermidine synthase Pfam Description: Spermine/spermidine synthase
  misc_feature (1)..(315): Homolog of NCBI NO: 33354149 NR Description: aminopropyl transferase [Oryza sativa (japonica
  misc_feature (1)..(278): Homolog of NCBI NO: 18423473 NR Description: spermidine synthase [Arabidopsis thaliana] spermidine synthase [Arabidopsis thaliana] spermidine synthase [Arabidopsis thaliana]
  misc_feature (1)..(278): Homolog of NCBI NO: 15983394 NR Description: AT5g53120/MFH8_5 [Arabidopsis thaliana]
  misc_feature (1)..(278): Homolog of NCBI NO: 21592832 NR Description: spermidine synthase [Arabidopsis thaliana]
  misc_feature (1)..(288): Homolog of NCBI NO: 33150481 NR Description: putative spermine synthase [Lycopersicon
  misc_feature (1)..(278): Homolog of NCBI NO: 9757993 NR Description: spermidine synthase [Arabidopsis thaliana]
  misc_feature (1)..(280): Homolog of NCBI NO: 6094330 NR Description: Spermidine synthase 2 (Putrescine
  misc_feature (1)..(280): Homolog of NCBI NO: 6094327 NR Description: Spermidine synthase 1 (Putrescine
  misc_feature (1)..(280): Homolog of NCBI NO: 6094335 NR Description: Spermidine synthase (Putrescine (SPDSY) >gi|3242659|dbj|BAA29033.1| spermidine synthase [Coffea
  misc_feature (1)..(276): Homolog of NCBI NO: 12229998 NR Description: Spermidine synthase 1 (Putrescine
MWPGEAHSLKVEKILFQGKSPYQEILVFESSTYGNVLVLDGIVQLTDKDECAYQEMVTHLPLCSIPAPKNVLVVGGGDGGVLREIARHDSVETIDICEIDQLVIDVCKEFFPNLSIGFKDPRVRLHVGDAVDFLRNSPEGKYDAIIVDSSDPIGPAQALVEKLFIQTIARALKPGGVLCNLAESMWLHTHLIQDMLAICRQTFKGAVHYAWTSVPTYPSGVIGFLLCAKEGRAVNFLTPVNPIEKIEGTTKAGRELRFYNSEIHRAAFVLPTFVRRELEAYTTPSTSAENEKPKESVSEPQKIKILSNNAILTAS

SEQ ID NO: 14681 - protein, 260 aa, Zea mays subsp. mays
  peptide (1)..(260): Ceres Seq. ID no. 14307931
  misc_feature (1)..(181): Pfam Name: Spermine/spermidine synthase Pfam Description: Spermine/spermidine synthase
  misc_feature (1)..(260): Homolog of NCBI NO: 33354149 NR Description: aminopropyl transferase [Oryza sativa (japonica
  misc_feature (1)..(223): Homolog of NCBI NO: 18423473 NR Description: spermidine synthase [Arabidopsis thaliana] spermidine synthase [Arabidopsis thaliana] spermidine synthase [Arabidopsis thaliana]
  misc_feature (1)..(223): Homolog of NCBI NO: 15983394 NR Description: AT5g53120/MFH8_5 [Arabidopsis thaliana]
  misc_feature (1)..(223): Homolog of NCBI NO: 21592832 NR Description: spermidine synthase [Arabidopsis thaliana]
  misc_feature (1)..(233): Homolog of NCBI NO: 33150481 NR Description: putative spermine synthase [Lycopersicon
  misc_feature (1)..(223): Homolog of NCBI NO: 9757993 NR Description: spermidine synthase [Arabidopsis thaliana]
  misc_feature (1)..(225): Homolog of NCBI NO: 6094330 NR Description: Spermidine synthase 2 (Putrescine
  misc_feature (1)..(225): Homolog of NCBI NO: 6094327 NR Description: Spermidine synthase 1 (Putrescine
  misc_feature (1)..(225): Homolog of NCBI NO: 6094335 NR Description: Spermidine synthase (Putrescine (SPDSY) >gi|3242659|dbj|BAA29033.1| spermidine synthase [Coffea
  misc_feature (1)..(221): Homolog of NCBI NO: 12229998 NR Description: Spermidine synthase 1 (Putrescine
MVTHLPLCSIPAPKNVLVVGGGDGGVLREIARHDSVETIDICEIDQLVIDVCKEFFPNLSIGFKDPRVRLHVGDAVDFLRNSPEGKYDAIIVDSSDPIGPAQALVEKLFIQTIARALKPGGVLCNLAESMWLHTHLIQDMLAICRQTFKGAVHYAWTSVPTYPSGVIGFLLCAKEGRAVNFLTPVNPIEKIEGTTKAGRELRFYNSEIHRAAFVLPTFVRRELEAYTTPSTSAENEKPKESVSEPQKIKILSNNAILTAS

SEQ ID NO: 14682 - DNA, 1191 bp, Zea mays subsp. mays
  misc_feature (1)..(1191): Ceres Seq. ID no. 13599050
  misc_feature: MA Experiment ID: 108543 Result: Up-regulated in Transcription
ggtatttaagacagcttcaaaaggttggggagtcaggacttgggacactatcctccctggggctcccatctgtgagtacacgggggtgttgaggaggactgaagatctggatggttcacagaacaactattgttttgacattgattgtcttcaaaccatgaaaggtttggatggaagggagaaaagagctggatctgaaatgcacctgcctaatctttatccagagaatgactcagatgcaccacctgcacctgagtactgcatagacggcagttccattggcaattttgcaagatttataaatcatagttgccaacctaaccttttcgtccagtgcgtcatgagctcacacaacgatgttaaactagcaaaagtgatgctttttgctgctgacacaatacttcctcttcaggagctatcctatgactacggttatcgcttggacagtgttgttgggcctgatggtaaaattgtgaagctgccatgccactgtggtgctccagattgccggaagcgcctctactagacctgcagtgtgtttccattttgattttgcaggaaacaacctatattgtaggaaagcattcatgttatttatgtagttggcatgctctgatatatagcgaaagaggagcaacttaatctccttttagagcattcttattttgtgataattggaggacatgctggtcatggtagcatattttgcaggaaatcaattaactgannanaaaaaaaaaaaaaaaaaaaaaaaaaaaaaaaaaaaaaaaaaaaaaaaaaaaaaaaaggagaaaaaaaaaaaaaaaaaggaattcctgcaccccggggaatccacaatttcaaaaggggccccccccgcgggggagccccagcttttgttcccttggggaggctgccaatttactgatttagggaatgagggggtttttgaggggctccaggggtttctgtttcaatcagttgcccctcctgttcagttactgaggggggggggggaaagggaaaaagaaccgccggacataagggttatttctgttctcattgccgaaaaacatggaaattgaagttcatttacaccgtttctcaacccggtacgcaccaaaaaatcattgatatggccataaagggcgttgaatgccggcaaacagcccgaattatgggggttggcctcaacacgattttacgtcactt

SEQ ID NO: 14683 - protein, 174 aa, Zea mays subsp. mays
  peptide (1)..(174): Ceres Seq. ID no. 13599051
  misc_feature (1)..(151): Pfam Name: SET domain Pfam Description: SET domain
  misc_feature (1)..(174): Homolog of NCBI NO: 22121716 NR Description: SET domain-containing protein SET118 [Zea mays]
  misc_feature (1)..(174): Homolog of NCBI NO: 34907056 NR Description: putative SUVH4 [Oryza sativa (japonica
  misc_feature (1)..(174): Homolog of NCBI NO: 15240758 NR Description: SET-domain transcriptional regulator family
  misc_feature (1)..(174): Homolog of NCBI NO: 27502110 NR Description: SET domain histone methyltransferase SUVH4
  misc_feature (1)..(174): Homolog of NCBI NO: 13517749 NR Description: SUVH4 [Arabidopsis thaliana]
  misc_feature (1)..(174): Homolog of NCBI NO: 17529178 NR Description: putative mammalian MHC III region protein G9a
  misc_feature (1)..(174): Homolog of NCBI NO: 25412134 NR Description: similar to mammalian MHC III region protein G9a - Arabidopsis thaliana >gi|4314371|gb|AAD15582.1| similar to
  misc_feature (1)..(174): Homolog of NCBI NO: 30681803 NR Description: SET-domain transcriptional regulator family
  misc_feature (1)..(174): Homolog of NCBI NO: 37572974 NR Description: putative histone-lysine N-methyltransferase
  misc_feature (1)..(174): Homolog of NCBI NO: 22121718 NR Description: SET domain-containing protein SET104 [Zea mays]
VFKTASKGWGVRTWDTILPGAPICEYTGVLRRTEDLDGSQNNYCFDIDCLQTMKGLDGREKRAGSEMHLPNLYPENDSDAPPAPEYCIDGSSIGNFARFINHSCQPNLFVQCVMSSHNDVKLAKVMLFAADTILPLQELSYDYGYRLDSVVGPDGKIVKLPCHCGAPDCRKRLY

SEQ ID NO: 14684 - protein, 126 aa, Zea mays subsp. mays
  peptide (1)..(126): Ceres Seq. ID no. 13599052
  misc_feature (15)..(15): Xaa is any aa, unknown or other
  misc_feature (16)..(16): Xaa is any aa, unknown or other
MLVMVAYFAGNQLTXXKKKKKKKKKKKKKKKKKKKEKKKKKKEFLHPGESTISKGAPPAGEPQLLFPWGGCQFTDLGNEGVFEGLQGFLFQSVAPPVQLLRGGGEREKEPPDIRVISVLIAEKHGN

SEQ ID NO: 14685 - protein, 123 aa, Zea mays subsp. mays
  peptide (1)..(123): Ceres Seq. ID no. 13599053
  misc_feature (12)..(12): Xaa is any aa, unknown or other
  misc_feature (13)..(13): Xaa is any aa, unknown or other
MVAYFAGNQLTXXKKKKKKKKKKKKKKKKKKKEKKKKKKEFLHPGESTISKGAPPAGEPQLLFPWGGCQFTDLGNEGVFEGLQGFLFQSVAPPVQLLRGGGEREKEPPDIRVISVLIAEKHGN

SEQ ID NO: 14686 - protein, 122 aa, Zea mays subsp. mays
  peptide (1)..(122): Ceres Seq. ID no. 13599054
  misc_feature (1)..(99): Pfam Name: SET domain Pfam Description: SET domain
  misc_feature (1)..(122): Homolog of NCBI NO: 22121716 NR Description: SET domain-containing protein SET118 [Zea mays]
  misc_feature (1)..(122): Homolog of NCBI NO: 34907056 NR Description: putative SUVH4 [Oryza sativa (japonica
  misc_feature (1)..(122): Homolog of NCBI NO: 15240758 NR Description: SET-domain transcriptional regulator family
  misc_feature (1)..(122): Homolog of NCBI NO: 27502110 NR Description: SET domain histone methyltransferase SUVH4
  misc_feature (1)..(122): Homolog of NCBI NO: 13517749 NR Description: SUVH4 [Arabidopsis thaliana]
  misc_feature (1)..(122): Homolog of NCBI NO: 17529178 NR Description: putative mammalian MHC III region protein G9a
  misc_feature (1)..(122): Homolog of NCBI NO: 25412134 NR Description: similar to mammalian MHC III region protein G9a - Arabidopsis thaliana >gi|4314371|gb|AAD15582.1| similar to
  misc_feature (1)..(122): Homolog of NCBI NO: 30681803 NR Description: SET-domain transcriptional regulator family
  misc_feature (1)..(122): Homolog of NCBI NO: 37572974 NR Description: putative histone-lysine N-methyltransferase
  misc_feature (1)..(122): Homolog of NCBI NO: 22121718 NR Description: SET domain-containing protein SET104 [Zea mays]
MKGLDGREKRAGSEMHLPNLYPENDSDAPPAPEYCIDGSSIGNFARFINHSCQPNLFVQCVMSSHNDVKLAKVMLFAADTILPLQELSYDYGYRLDSVVGPDGKIVKLPCHCGAPDCRKRLY

SEQ ID NO: 14687 - DNA, 599 bp, Zea mays subsp. mays
  misc_feature (1)..(599): Ceres Seq. ID no. 3626363
  misc_feature: MA Experiment ID: 108534 Result: Up-regulated in Transcription
  misc_feature: MA Experiment 108534 PARAMETER Experiment Name: Zm_4deg_Cold_P Parameter: Age (hr) Value: 8
  misc_feature: MA Experiment 108534 PARAMETER Experiment Name: Zm_4deg_Cold_P Parameter: Organism Value: Zea mays
  misc_feature: MA Experiment 108534 PARAMETER Experiment Name: Zm_4deg_Cold_P Parameter: Plant Line Value: 35A19
  misc_feature: MA Experiment 108534 PARAMETER Experiment Name: Zm_4deg_Cold_P Parameter: Temperature (deg C) Value: 4 vs. 22
  misc_feature: MA Experiment 108534 PARAMETER Experiment Name: Zm_4deg_Cold_P Parameter: Timepoint (hr) Value: 6
  misc_feature: MA Experiment 108534 PARAMETER Experiment Name: Zm_4deg_Cold_P Parameter: Tissue Value: Aerial
atatgtgccagtgtggattttatatctatagcatcggtgctcttgttgcttgggaaacccgcagaaaagattttgctgtaatgatgtctcatcatgtaataacatctactctaattggagtttcatatctgactggatttttccgaattgggaccatcattctcgctcttcatgatgcaagtgatgtgtttcttgagactgccaaattgtgcaaatacacagaaaaagagctgggtgctagcttgttttttggtctcttcgctatctcctggcttctattgcgtctgatttacttcccattttggataatcaaagcctctaggtttgttttttacttctctttgtgataactttctgtttctgtagtcttgtagttttggacttattgctgttgccgttgcaatggcagctatcattccatcacattcttgaggaagctggatgaattcccaacaactttgtactacatcttgaacacaatgcttctcacattgcttgtattccatatgtactggtggaaactcatatgtttgatgataatgagacagctgaataataaaggacaagttacagacgatgtccgawctgattctgaggat

SEQ ID NO: 14688 - protein, 114 aa, Zea mays subsp. mays
  peptide (1)..(114): Ceres Seq. ID no. 3626364
  misc_feature (1)..(106): Pfam Name: Longevity-assurance protein (LAG1) Pfam Description: Longevity-assurance protein (LAG1)
  misc_feature (1)..(114): Homolog of NCBI NO: 34901974 NR Description: unknown protein [Oryza sativa (japonica
  misc_feature (1)..(106): Homolog of NCBI NO: 15230323 NR Description: longevity factor-like protein; protein id: supported by cDNA: 123372., supported by cDNA: gi_7658240 thaliana] >gi|9294628|dbj|BAB02967.1| contains similarity to
  misc_feature (1)..(106): Homolog of NCBI NO: 7658241 NR Description: LAG1 homolog 2 [Arabidopsis thaliana]
  misc_feature (1)..(108): Homolog of NCBI NO: 25518747 NR Description: hypothetical protein F13B4.7 - Arabidopsis >gi|9802756|gb|AAF99825.1|AC027134_7 Highly similar to fungal
  misc_feature (1)..(108): Homolog of NCBI NO: 18404559 NR Description: expressed protein; protein id: At3g25540.1, by cDNA: gi_13430479, supported by cDNA: gi_7658238 [Arabidopsis >gi|7658239|gb|AAF66102.1|AF198179_1 LAG1 homolog 1 [Arabidopsis
  misc_feature (5)..(108): Homolog of NCBI NO: 16974114 NR Description: putative resistance protein [Lycopersicon
  misc_feature (5)..(114): Homolog of NCBI NO: 7688742 NR Description: ASC1 [Lycopersicon esculentum] alternaria stem canker resistance protein [Lycopersicon
  misc_feature (1)..(109): Homolog of NCBI NO: 30683361 NR Description: longevity assurance protein -related [Arabidopsis
  misc_feature (1)..(106): Homolog of NCBI NO: 31241781 NR Description: ENSANGP00000012836 [Anopheles gambiae]
  misc_feature (1)..(106): Homolog of NCBI NO: 21358551 NR Description: Longevity assurance gene 1 CG3576-PB
MCQCGFYIYSIGALVAWETRRKDFAVMMSHHVITSTLIGVSYLTGFFRIGTIILALHDASDVFLETAKLCKYTEKELGASLFFGLFAISWLLLRLIYFPFWIIKASRFVFYFSL

SEQ ID NO: 14689 - protein, 88 aa, Zea mays subsp. mays
  peptide (1)..(88): Ceres Seq. ID no. 3626365
  misc_feature (1)..(80): Pfam Name: Longevity-assurance protein (LAG1) Pfam Description: Longevity-assurance protein (LAG1)
  misc_feature (1)..(88): Homolog of NCBI NO: 34901974 NR Description: unknown protein [Oryza sativa (japonica
  misc_feature (1)..(80): Homolog of NCBI NO: 15230323 NR Description: longevity factor-like protein; protein id: supported by cDNA: 123372., supported by cDNA: gi_7658240 thaliana] >gi|9294628|dbj|BAB02967.1| contains similarity to
  misc_feature (1)..(80): Homolog of NCBI NO: 7658241 NR Description: LAG1 homolog 2 [Arabidopsis thaliana]
  misc_feature (1)..(82): Homolog of NCBI NO: 25518747 NR Description: hypothetical protein F13B4.7 - Arabidopsis >gi|9802756|gb|AAF99825.1|AC027134_7 Highly similar to fungal
  misc_feature (1)..(82): Homolog of NCBI NO: 18404559 NR Description: expressed protein; protein id: At3g25540.1, by cDNA: gi_13430479, supported by cDNA: gi_7658238 [Arabidopsis >gi|7658239|gb|AAF66102.1|AF198179_1 LAG1 homolog 1 [Arabidopsis
  misc_feature (1)..(82): Homolog of NCBI NO: 16974114 NR Description: putative resistance protein [Lycopersicon
  misc_feature (1)..(88): Homolog of NCBI NO: 7688742 NR Description: ASC1 [Lycopersicon esculentum] alternaria stem canker resistance protein [Lycopersicon
  misc_feature (1)..(83): Homolog of NCBI NO: 30683361 NR Description: longevity assurance protein -related [Arabidopsis
  misc_feature (1)..(80): Homolog of NCBI NO: 31241781 NR Description: ENSANGP00000012836 [Anopheles gambiae]
  misc_feature (1)..(80): Homolog of NCBI NO: 21358551 NR Description: Longevity assurance gene 1 CG3576-PB
MMSHHVITSTLIGVSYLTGFFRIGTIILALHDASDVFLETAKLCKYTEKELGASLFFGLFAISWLLLRLIYFPFWIIKASRFVFYFSL

SEQ ID NO: 14690 - protein, 87 aa, Zea mays subsp. mays
  peptide (1)..(87): Ceres Seq. ID no. 3626366
  misc_feature (1)..(79): Pfam Name: Longevity-assurance protein (LAG1) Pfam Description: Longevity-assurance protein (LAG1)
  misc_feature (1)..(87): Homolog of NCBI NO: 34901974 NR Description: unknown protein [Oryza sativa (japonica
  misc_feature (1)..(79): Homolog of NCBI NO: 15230323 NR Description: longevity factor-like protein; protein id: supported by cDNA: 123372., supported by cDNA: gi_7658240 thaliana] >gi|9294628|dbj|BAB02967.1| contains similarity to
  misc_feature (1)..(79): Homolog of NCBI NO: 7658241 NR Description: LAG1 homolog 2 [Arabidopsis thaliana]
  misc_feature (1)..(81): Homolog of NCBI NO: 25518747 NR Description: hypothetical protein F13B4.7 - Arabidopsis >gi|9802756|gb|AAF99825.1|AC027134_7 Highly similar to fungal
  misc_feature (1)..(81): Homolog of NCBI NO: 18404559 NR Description: expressed protein; protein id: At3g25540.1, by cDNA: gi_13430479, supported by cDNA: gi_7658238 [Arabidopsis >gi|7658239|gb|AAF66102.1|AF198179_1 LAG1 homolog 1 [Arabidopsis
  misc_feature (1)..(81): Homolog of NCBI NO: 16974114 NR Description: putative resistance protein [Lycopersicon
  misc_feature (1)..(87): Homolog of NCBI NO: 7688742 NR Description: ASC1 [Lycopersicon esculentum] alternaria stem canker resistance protein [Lycopersicon
  misc_feature (1)..(82): Homolog of NCBI NO: 30683361 NR Description: longevity assurance protein -related [Arabidopsis
  misc_feature (1)..(79): Homolog of NCBI NO: 31241781 NR Description: ENSANGP00000012836 [Anopheles gambiae]
  misc_feature (1)..(79): Homolog of NCBI NO: 21358551 NR Description: Longevity assurance gene 1 CG3576-PB
MSHHVITSTLIGVSYLTGFFRIGTIILALHDASDVFLETAKLCKYTEKELGASLFFGLFAISWLLLRLIYFPFWIIKASRFVFYFSL

SEQ ID NO: 14691 - DNA, 589 bp, Zea mays subsp. mays
  misc_feature (1)..(589): Ceres Seq. ID no. 12468060
  misc_feature: MA Experiment ID: 108522 Result: Down-regulated in Transcription
  misc_feature: MA Experiment 108522 PARAMETER Experiment Name: Zm_42deg_Heat_P Parameter: Age (day) Value: 8
  misc_feature: MA Experiment 108522 PARAMETER Experiment Name: Zm_42deg_Heat_P Parameter: Organism Value: Zea mays
  misc_feature: MA Experiment 108522 PARAMETER Experiment Name: Zm_42deg_Heat_P Parameter: Plant Line Value: 35A19
  misc_feature: MA Experiment 108522 PARAMETER Experiment Name: Zm_42deg_Heat_P Parameter: Temperature (deg C) Value: 42 vs. 22
  misc_feature: MA Experiment 108522 PARAMETER Experiment Name: Zm_42deg_Heat_P Parameter: Timepoint (hr) Value: 1
  misc_feature: MA Experiment 108522 PARAMETER Experiment Name: Zm_42deg_Heat_P Parameter: Tissue Value: Aerial
acactatgcaggtgtgaaacatgcatcaacttgtatgcacaacgaggtattgcatatcttattgacaaggaggattctattgaggaatacgagaagattgccaagcagaagagggagatgaaactggagcagcagcaaggagctgagacaaattttctgaattcacttaatcatgttcagaagatagagatgataagtggcatcaatgacatgaagaatgagtttcagtcctttctggagtccttcgatgcatcaaaaccggtaacatctgatgatatacattcattcttcgagaatcttgctaagaagaagaaacagaggttatcttagcttttgtgaccgcatcggaccccacctgaggcaatcgttntgctggacagaggtcctagtttgttgggctagtaaatgtaatgttatcttaggtggtacttactaatcgggccagtaatgttgaattctagctggaacgcggtaatgtttgatgcaccgaagtcgcttgcagtaggttccgatggcccaagccaccaaaaacttgtttgctccatgaacctcgcaatcctgttaggtgataatataatatacattgtgt

SEQ ID NO: 14692 - protein, 109 aa, Zea mays subsp. mays
  peptide (1)..(109): Ceres Seq. ID no. 12468061
  misc_feature (2)..(106): Homolog of NCBI NO: 17064724 NR Description: putative protein [Arabidopsis thaliana]
  misc_feature (2)..(106): Homolog of NCBI NO: 22328893 NR Description: putative protein; protein id: At4g23860.1, by cDNA: gi_17064723, supported by cDNA: gi_20148674 [Arabidopsis
  misc_feature (2)..(79): Homolog of NCBI NO: 7487590 NR Description: hypothetical protein T32A16.30 - Arabidopsis >gi|4972090|emb|CAB43886.1| putative protein [Arabidopsis >gi|7269235|emb|CAB81304.1| putative protein [Arabidopsis
  misc_feature (2)..(108): Homolog of NCBI NO: 28175400 NR Description: Similar to RIKEN cDNA 5730410I19 gene [Xenopus
  misc_feature (2)..(107): Homolog of NCBI NO: 27882071 NR Description: Unknown (protein for MGC:55404) [Danio rerio]
  misc_feature (1)..(108): Homolog of NCBI NO: 19921458 NR Description: CG15141-PA [Drosophila melanogaster]
  misc_feature (2)..(108): Homolog of NCBI NO: 30388577 NR Description: Similar to chromosome 14 open reading frame 130
  misc_feature (2)..(108): Homolog of NCBI NO: 37590093 NR Description: Unknown (protein for IMAGE:6812098) [Mus musculus]
  misc_feature (2)..(108): Homolog of NCBI NO: 29789154 NR Description: RIKEN cDNA 5730410I19 [Mus musculus] Protein C14orf130 homolog >gi|26353164|dbj|BAC40212.1| unnamed
  misc_feature (2)..(108): Homolog of NCBI NO: 7022546 NR Description: unnamed protein product [Homo sapiens]
TLCRCETCINLYAQRGIAYLIDKEDSIEEYEKIAKQKREMKLEQQQGAETNFLNSLNHVQKIEMISGINDMKNEFQSFLESFDASKPVTSDDIHSFFENLAKKKKQRLS

SEQ ID NO: 14693 - protein, 70 aa, Zea mays subsp. mays
  peptide (1)..(70): Ceres Seq. ID no. 12468062
  misc_feature (1)..(67): Homolog of NCBI NO: 17064724 NR Description: putative protein [Arabidopsis thaliana]
  misc_feature (1)..(67): Homolog of NCBI NO: 22328893 NR Description: putative protein; protein id: At4g23860.1, by cDNA: gi_17064723, supported by cDNA: gi_20148674 [Arabidopsis
  misc_feature (1)..(40): Homolog of NCBI NO: 7487590 NR Description: hypothetical protein T32A16.30 - Arabidopsis >gi|4972090|emb|CAB43886.1| putative protein [Arabidopsis >gi|7269235|emb|CAB81304.1| putative protein [Arabidopsis
  misc_feature (1)..(69): Homolog of NCBI NO: 28175400 NR Description: Similar to RIKEN cDNA 5730410I19 gene [Xenopus
  misc_feature (1)..(68): Homolog of NCBI NO: 27882071 NR Description: Unknown (protein for MGC:55404) [Danio rerio]
  misc_feature (1)..(69): Homolog of NCBI NO: 19921458 NR Description: CG15141-PA [Drosophila melanogaster]
  misc_feature (1)..(69): Homolog of NCBI NO: 30388577 NR Description: Similar to chromosome 14 open reading frame 130
  misc_feature (1)..(69): Homolog of NCBI NO: 37590093 NR Description: Unknown (protein for IMAGE:6812098) [Mus musculus]
  misc_feature (1)..(69): Homolog of NCBI NO: 29789154 NR Description: RIKEN cDNA 5730410I19 [Mus musculus] Protein C14orf130 homolog >gi|26353164|dbj|BAC40212.1| unnamed
  misc_feature (1)..(69): Homolog of NCBI NO: 7022546 NR Description: unnamed protein product [Homo sapiens]
MKLEQQQGAETNFLNSLNHVQKIEMISGINDMKNEFQSFLESFDASKPVTSDDIHSFFENLAKKKKQRLS

SEQ ID NO: 14694 - protein, 54 aa, Zea mays subsp. mays
  peptide (1)..(54): Ceres Seq. ID no. 12468063
  misc_feature (33)..(33): Xaa is any aa, unknown or other
MIYIHSSRILLRRRNRGYLSFCDRIGPHLRQSXCWTEVLVCWASKCNVILGGTY

SEQ ID NO: 14695 - DNA, 565 bp, Zea mays subsp. mays
  misc_feature (1)..(565): Ceres Seq. ID no. 3628344
  misc_feature: MA Experiment ID: 20000487 Result: Up-regulated in Transcription
  misc_feature: MA Experiment 20000487 PARAMETER Experiment Name: Zm_50mM_NH4NO3_L_to_H_P Parameter: Organism Value: Zea mays
  misc_feature: MA Experiment 20000487 PARAMETER Experiment Name: Zm_50mM_NH4NO3_L_to_H_P Parameter: Timepoint (hr) Value: 4
  misc_feature: MA Experiment 20000487 PARAMETER Experiment Name: Zm_50mM_NH4NO3_L_to_H_P Parameter: Tissue Value: Leaves
  misc_feature: MA Experiment 20000487 PARAMETER Experiment Name: Zm_50mM_NH4NO3_L_to_H_P Parameter: Treatment Value: 50mM NH4NO3 vs. 100mM Mannitol
aaagttgctgattttggtgtcgcacgtgttaaagctcaatctggagtcatgactgcagaaactggtacttaccgttggatggccccagaggtcatagagcataaaccctatgatcagaaggctgatgtttttagttttggaattttgatgtgggagctactcacagggaagattccttatgagtatctgactccactacaagcagctgttggcgtggtgcagaagggattacggcctacaattccgaaacatacttatgcaatgctttctgagcttcttcagaaatgttggcagcaagaccccgctcaaagaccagacttttccgaaatattagaaactcttcagagaatagcagaggaagtcggagacgagcacgaggggaagcacaaggacagaacactgggtggtttcttttcagctctgagggggcggagccattgagacacggttgaagacttgaaatgtacatggcctcggtccatcctggaaggatctgaactacaaccagctcctgttccccgcacatagcgacagtacacagaaatactgtacagacatgctgcag

SEQ ID NO: 14696 - protein, 146 aa, Zea mays subsp. mays
  peptide (1)..(146): Ceres Seq. ID no. 3628345
  misc_feature (1)..(114): Pfam Name: Protein kinase domain Pfam Description: Protein kinase domain
  misc_feature (1)..(142): Homolog of NCBI NO: 18420244 NR Description: protein kinase like protein; protein id:
  misc_feature (2)..(146): Homolog of NCBI NO: 33772207 NR Description: protein kinase [Malus x domestica]
  misc_feature (1)..(146): Homolog of NCBI NO: 22329194 NR Description: putative protein; protein id: At4g35780.1, by cDNA: gi_20260235 [Arabidopsis thaliana] putative protein [Arabidopsis thaliana]
  misc_feature (1)..(146): Homolog of NCBI NO: 7486654 NR Description: hypothetical protein F8D20.290 - Arabidopsis >gi|3367596|emb|CAA20048.1| putative protein [Arabidopsis >gi|7270530|emb|CAB81487.1| putative protein [Arabidopsis
  misc_feature (1)..(133): Homolog of NCBI NO: 34393850 NR Description: putative serine/threonine protein kinase [Oryza
  misc_feature (1)..(146): Homolog of NCBI NO: 32490474 NR Description: putative serine/threonine-protein kinase ctr1
  misc_feature (1)..(119): Homolog of NCBI NO: 34901608 NR Description: P0571D04.18 [Oryza sativa (japonica
  misc_feature (1)..(121): Homolog of NCBI NO: 15227883 NR Description: putative protein kinase; protein id: At2g17700.1, by cDNA: gi_17979170, supported by cDNA: gi_20465914 [Arabidopsis >gi|25411811|pir||D84555 probable protein kinase putative protein
  misc_feature (1)..(127): Homolog of NCBI NO: 38637045 NR Description: serine/threonine protein kinase-like [Oryza
  misc_feature (1)..(121): Homolog of NCBI NO: 27085278 NR Description: serine/threonine protein kinase [Oryza sativa
KVADFGVARVKAQSGVMTAETGTYRWMAPEVIEHKPYDQKADVFSFGILMWELLTGKIPYEYLTPLQAAVGVVQKGLRPTIPKHTYAMLSELLQKCWQQDPAQRPDFSEILETLQRIAEEVGDEHEGKHKDRTLGGFFSALRGRSH

SEQ ID NO: 14697 - protein, 130 aa, Zea mays subsp. mays
  peptide (1)..(130): Ceres Seq. ID no. 3628346
  misc_feature (1)..(98): Pfam Name: Protein kinase domain Pfam Description: Protein kinase domain
  misc_feature (1)..(130): Homolog of NCBI NO: 32490474 NR Description: putative serine/threonine-protein kinase ctr1
  misc_feature (1)..(126): Homolog of NCBI NO: 18420244 NR Description: protein kinase like protein; protein id:
  misc_feature (1)..(130): Homolog of NCBI NO: 33772207 NR Description: protein kinase [Malus x domestica]
  misc_feature (1)..(130): Homolog of NCBI NO: 22329194 NR Description: putative protein; protein id: At4g35780.1, by cDNA: gi_20260235 [Arabidopsis thaliana] putative protein [Arabidopsis thaliana]
  misc_feature (1)..(130): Homolog of NCBI NO: 7486654 NR Description: hypothetical protein F8D20.290 - Arabidopsis >gi|3367596|emb|CAA20048.1| putative protein [Arabidopsis >gi|7270530|emb|CAB81487.1| putative protein [Arabidopsis
  misc_feature (1)..(117): Homolog of NCBI NO: 34393850 NR Description: putative serine/threonine protein kinase [Oryza
  misc_feature (1)..(103): Homolog of NCBI NO: 34901608 NR Description: P0571D04.18 [Oryza sativa (japonica
  misc_feature (1)..(105): Homolog of NCBI NO: 15227883 NR Description: putative protein kinase; protein id: At2g17700.1, by cDNA: gi_17979170, supported by cDNA: gi_20465914 [Arabidopsis >gi|25411811|pir||D84555 probable protein kinase putative protein
  misc_feature (1)..(111): Homolog of NCBI NO: 38637045 NR Description: serine/threonine protein kinase-like [Oryza
  misc_feature (1)..(105): Homolog of NCBI NO: 27085278 NR Description: serine/threonine protein kinase [Oryza sativa
MTAETGTYRWMAPEVIEHKPYDQKADVFSFGILMWELLTGKIPYEYLTPLQAAVGVVQKGLRPTIPKHTYAMLSELLQKCWQQDPAQRPDFSEILETLQRIAEEVGDEHEGKHKDRTLGGFFSALRGRSH

SEQ ID NO: 14698 - protein, 120 aa, Zea mays subsp. mays
  peptide (1)..(120): Ceres Seq. ID no. 3628347
  misc_feature (1)..(88): Pfam Name: Protein kinase domain Pfam Description: Protein kinase domain
  misc_feature (1)..(120): Homolog of NCBI NO: 32490474 NR Description: putative serine/threonine-protein kinase ctr1
  misc_feature (1)..(116): Homolog of NCBI NO: 18420244 NR Description: protein kinase like protein; protein id:
  misc_feature (1)..(120): Homolog of NCBI NO: 33772207 NR Description: protein kinase [Malus x domestica]
  misc_feature (1)..(120): Homolog of NCBI NO: 22329194 NR Description: putative protein; protein id: At4g35780.1, by cDNA: gi_20260235 [Arabidopsis thaliana] putative protein [Arabidopsis thaliana]
  misc_feature (1)..(120): Homolog of NCBI NO: 7486654 NR Description: hypothetical protein F8D20.290 - Arabidopsis >gi|3367596|emb|CAA20048.1| putative protein [Arabidopsis >gi|7270530|emb|CAB81487.1| putative protein [Arabidopsis
  misc_feature (1)..(107): Homolog of NCBI NO: 34393850 NR Description: putative serine/threonine protein kinase [Oryza
  misc_feature (1)..(93): Homolog of NCBI NO: 34901608 NR Description: P0571D04.18 [Oryza sativa (japonica
  misc_feature (1)..(95): Homolog of NCBI NO: 15227883 NR Description: putative protein kinase; protein id: At2g17700.1, by cDNA: gi_17979170, supported by cDNA: gi_20465914 [Arabidopsis >gi|25411811|pir||D84555 probable protein kinase putative protein
  misc_feature (1)..(101): Homolog of NCBI NO: 38637045 NR Description: serine/threonine protein kinase-like [Oryza
  misc_feature (1)..(95): Homolog of NCBI NO: 27085278 NR Description: serine/threonine protein kinase [Oryza sativa
MAPEVIEHKPYDQKADVFSFGILMWELLTGKIPYEYLTPLQAAVGVVQKGLRPTIPKHTYAMLSELLQKCWQQDPAQRPDFSEILETLQRIAEEVGDEHEGKHKDRTLGGFFSALRGRSH

SEQ ID NO: 14699 - DNA, 645 bp, Zea mays subsp. mays
  misc_feature (1)..(645): Ceres Seq. ID no. 11415217
  misc_feature: MA Experiment ID: 108523 Result: Down-regulated in Transcription
  misc_feature: MA Experiment 108523 PARAMETER Experiment Name: Zm_42deg_Heat_P Parameter: Age (day) Value: 8
  misc_feature: MA Experiment 108523 PARAMETER Experiment Name: Zm_42deg_Heat_P Parameter: Organism Value: Zea mays
  misc_feature: MA Experiment 108523 PARAMETER Experiment Name: Zm_42deg_Heat_P Parameter: Plant Line Value: 35A19
  misc_feature: MA Experiment 108523 PARAMETER Experiment Name: Zm_42deg_Heat_P Parameter: Temperature (deg C) Value: 42 vs. 22
  misc_feature: MA Experiment 108523 PARAMETER Experiment Name: Zm_42deg_Heat_P Parameter: Timepoint (hr) Value: 6
  misc_feature: MA Experiment 108523 PARAMETER Experiment Name: Zm_42deg_Heat_P Parameter: Tissue Value: Aerial
  misc_feature: MA Experiment ID: 108527 Result: Down-regulated in Transcription
  misc_feature: MA Experiment 108527 PARAMETER Experiment Name: Zm_5mM_NO_P Parameter: Age (day) Value: 8
  misc_feature: MA Experiment 108527 PARAMETER Experiment Name: Zm_5mM_NO_P Parameter: Organism Value: Zea mays
  misc_feature: MA Experiment 108527 PARAMETER Experiment Name: Zm_5mM_NO_P Parameter: Plant Line Value: 35A19
  misc_feature: MA Experiment 108527 PARAMETER Experiment Name: Zm_5mM_NO_P Parameter: Timepoint (hr) Value: 6
  misc_feature: MA Experiment 108527 PARAMETER Experiment Name: Zm_5mM_NO_P Parameter: Tissue Value: Aerial
  misc_feature: MA Experiment 108527 PARAMETER Experiment Name: Zm_5mM_NO_P Parameter: Treatment Value: 5mM NO vs. No Treatment
  misc_feature: MA Experiment ID: 108528 Result: Up-regulated in Transcription
  misc_feature: MA Experiment 108528 PARAMETER Experiment Name: Zm_Imbibed_Seeds_P Parameter: Age (day) Value: 5 vs. 2
  misc_feature: MA Experiment 108528 PARAMETER Experiment Name: Zm_Imbibed_Seeds_P Parameter: Organism Value: Zea mays
  misc_feature: MA Experiment 108528 PARAMETER Experiment Name: Zm_Imbibed_Seeds_P Parameter: Plant Line Value: 35A19
  misc_feature: MA Experiment 108528 PARAMETER Experiment Name: Zm_Imbibed_Seeds_P Parameter: Tissue Value: Aerial vs. Embryo
  misc_feature: MA Experiment ID: 108530 Result: Up-regulated in Transcription
  misc_feature: MA Experiment 108530 PARAMETER Experiment Name: Zm_Imbibed_Seeds_P Parameter: Age (day) Value: 6 vs. 2
  misc_feature: MA Experiment 108530 PARAMETER Experiment Name: Zm_Imbibed_Seeds_P Parameter: Organism Value: Zea mays
  misc_feature: MA Experiment 108530 PARAMETER Experiment Name: Zm_Imbibed_Seeds_P Parameter: Plant Line Value: 35A19
  misc_feature: MA Experiment 108530 PARAMETER Experiment Name: Zm_Imbibed_Seeds_P Parameter: Tissue Value: Aerial vs. Embryo
  misc_feature: MA Experiment ID: 108535 Result: Up-regulated in Transcription
  misc_feature: MA Experiment 108535 PARAMETER Experiment Name: Zm_Meristem_P Parameter: Age (day) Value: 8
  misc_feature: MA Experiment 108535 PARAMETER Experiment Name: Zm_Meristem_P Parameter: Organism Value: Zea mays
  misc_feature: MA Experiment 108535 PARAMETER Experiment Name: Zm_Meristem_P Parameter: Plant Line Value: 35A19
  misc_feature: MA Experiment 108535 PARAMETER Experiment Name: Zm_Meristem_P Parameter: Tissue Value: Root Meristem vs. Above Root Meristem
  misc_feature: MA Experiment ID: 108545 Result: Up-regulated in Transcription
  misc_feature: MA Experiment 108545 PARAMETER Experiment Name: Zm_Imbibed_Seeds_P Parameter: Age (day) Value: 3 vs. 2
  misc_feature: MA Experiment 108545 PARAMETER Experiment Name: Zm_Imbibed_Seeds_P Parameter: Organism Value: Zea mays
  misc_feature: MA Experiment 108545 PARAMETER Experiment Name: Zm_Imbibed_Seeds_P Parameter: Plant Line Value: 35A19
  misc_feature: MA Experiment 108545 PARAMETER Experiment Name: Zm_Imbibed_Seeds_P Parameter: Tissue Value: Aerial vs. Embryo
  misc_feature: MA Experiment ID: 108547 Result: Up-regulated in Transcription
  misc_feature: MA Experiment 108547 PARAMETER Experiment Name: Zm_Imbibed_Seeds_P Parameter: Age (day) Value: 4 vs. 2
  misc_feature: MA Experiment 108547 PARAMETER Experiment Name: Zm_Imbibed_Seeds_P Parameter: Organism Value: Zea mays
  misc_feature: MA Experiment 108547 PARAMETER Experiment Name: Zm_Imbibed_Seeds_P Parameter: Plant Line Value: 35A19
  misc_feature: MA Experiment 108547 PARAMETER Experiment Name: Zm_Imbibed_Seeds_P Parameter: Tissue Value: Aerial vs. Embryo
  misc_feature: MA Experiment ID: 108559 Result: Down-regulated in Transcription
  misc_feature: MA Experiment 108559 PARAMETER Experiment Name: Zm_5mM_NO_P Parameter: Age (day) Value: 8
  misc_feature: MA Experiment 108559 PARAMETER Experiment Name: Zm_5mM_NO_P Parameter: Organism Value: Zea mays
  misc_feature: MA Experiment 108559 PARAMETER Experiment Name: Zm_5mM_NO_P Parameter: Plant Line Value: 35A19
  misc_feature: MA Experiment 108559 PARAMETER Experiment Name: Zm_5mM_NO_P Parameter: Timepoint (hr) Value: 12
  misc_feature: MA Experiment 108559 PARAMETER Experiment Name: Zm_5mM_NO_P Parameter: Tissue Value: Aerial
  misc_feature: MA Experiment 108559 PARAMETER Experiment Name: Zm_5mM_NO_P Parameter: Treatment Value: 5mM NO vs. No Treatment
agcgccaacggccaacctcacgcagtcccgccgcatcgaatggcatccctccggcttgtggcaacgctagcgccctccggtcctccgccgccacctcgacgtaagcagcggagaccgtcctccgcagtccgtctgacaggtgggatgggcctggcggcagctgctgccgtggcggcggccgcggccgcctcaccaccggcgctcgccgcgctgtccgagccggcgaacgcgctctcgctgcccacctgggccgtccacgtctccagcgtcgccgagtgggtgacggcgatgtggctggtttgggactacggcgagaagacggggctcaagggttggaaaggcctctcgtgggggatggttccacttctaggtggagcaatgtgtgcttgcacgtggcatttcttctacaattcagagtctcttgaagttcttgtagcccttcaaggtgctctgacagtgattggtaacataacaatgtgcatagctgcataccgcatcttcaaagcatcccaggaaggctcaaaaacttcgtaggctgcaagattggatcttacagccggtttggcaagggatgctcagccgcatttgaagattgacgttgctgagagcctgagacgatgataggagaagatacagatagccggt

SEQ ID NO: 14700 - protein, 177 aa, Zea mays subsp. mays
  peptide (1)..(177): Ceres Seq. ID no. 11415218
  misc_feature (18)..(172): Homolog of NCBI NO: 30685952 NR Description: expressed protein [Arabidopsis thaliana] unknown protein [Arabidopsis thaliana]
  misc_feature (76)..(171): Homolog of NCBI NO: 17232000 NR Description: hypothetical protein [Nostoc sp. PCC 7120]
  misc_feature (76)..(174): Homolog of NCBI NO: 16331563 NR Description: hypothetical protein [Synechocystis sp. PCC 6803]
  misc_feature (76)..(172): Homolog of NCBI NO: 23041345 NR Description: hypothetical protein [Trichodesmium erythraeum
  misc_feature (77)..(173): Homolog of NCBI NO: 37521445 NR Description: hypothetical protein glr1876 [Gloeobacter
  misc_feature (76)..(171): Homolog of NCBI NO: 22298980 NR Description: ORF_ID:tlr1437~hypothetical protein
  misc_feature (78)..(171): Homolog of NCBI NO: 33861461 NR Description: conserved hypothetical protein [Prochlorococcus subsp. pastoris str. CCMP1378] >gi|33634038|emb|CAE19363.1| hypothetical protein [Prochlorococcus marinus subsp. pastoris
  misc_feature (76)..(168): Homolog of NCBI NO: 33865822 NR Description: conserved hypothetical protein [Synechococcus sp.
  misc_feature (76)..(174): Homolog of NCBI NO: 33862961 NR Description: conserved hypothetical protein [Prochlorococcus str. MIT 9313] >gi|33634878|emb|CAE20864.1| conserved
  misc_feature (76)..(174): Homolog of NCBI NO: 33240381 NR Description: Uncharacterized conserved membrane protein marinus subsp. marinus str. CCMP1375] >gi|33237908|gb|AAP99975.1| conserved membrane protein [Prochlorococcus marinus subsp.
SANGQPHAVPPHRMASLRLVATLAPSGPPPPPRRKQRRPSSAVRLTGGMGLAAAAAVAAAAAASPPALAALSEPANALSLPTWAVHVSSVAEWVTAMWLVWDYGEKTGLKGWKGLSWGMVPLLGGAMCACTWHFFYNSESLEVLVALQGALTVIGNITMCIAAYRIFKASQEGSKTS

SEQ ID NO: 14701 - protein, 164 aa, Zea mays subsp. mays
  peptide (1)..(164): Ceres Seq. ID no. 11415219
  misc_feature (5)..(159): Homolog of NCBI NO: 30685952 NR Description: expressed protein [Arabidopsis thaliana] unknown protein [Arabidopsis thaliana]
  misc_feature (63)..(158): Homolog of NCBI NO: 17232000 NR Description: hypothetical protein [Nostoc sp. PCC 7120]
  misc_feature (63)..(161): Homolog of NCBI NO: 16331563 NR Description: hypothetical protein [Synechocystis sp. PCC 6803]
  misc_feature (63)..(159): Homolog of NCBI NO: 23041345 NR Description: hypothetical protein [Trichodesmium erythraeum
  misc_feature (64)..(160): Homolog of NCBI NO: 37521445 NR Description: hypothetical protein glr1876 [Gloeobacter
  misc_feature (63)..(158): Homolog of NCBI NO: 22298980 NR Description: ORF_ID:tlr1437~hypothetical protein
  misc_feature (65)..(158): Homolog of NCBI NO: 33861461 NR Description: conserved hypothetical protein [Prochlorococcus subsp. pastoris str. CCMP1378] >gi|33634038|emb|CAE19363.1| hypothetical protein [Prochlorococcus marinus subsp. pastoris
  misc_feature (63)..(155): Homolog of NCBI NO: 33865822 NR Description: conserved hypothetical protein [Synechococcus sp.
  misc_feature (63)..(161): Homolog of NCBI NO: 33862961 NR Description: conserved hypothetical protein [Prochlorococcus str. MIT 9313] >gi|33634878|emb|CAE20864.1| conserved
  misc_feature (63)..(161): Homolog of NCBI NO: 33240381 NR Description: Uncharacterized conserved membrane protein marinus subsp. marinus str. CCMP1375] >gi|33237908|gb|AAP99975.1| conserved membrane protein [Prochlorococcus marinus subsp.
MASLRLVATLAPSGPPPPPRRKQRRPSSAVRLTGGMGLAAAAAVAAAAAASPPALAALSEPANALSLPTWAVHVSSVAEWVTAMWLVWDYGEKTGLKGWKGLSWGMVPLLGGAMCACTWHFFYNSESLEVLVALQGALTVIGNITMCIAAYRIFKASQEGSKTS

SEQ ID NO: 14702 - protein, 129 aa, Zea mays subsp. mays
  peptide (1)..(129): Ceres Seq. ID no. 11415220
  misc_feature (1)..(124): Homolog of NCBI NO: 30685952 NR Description: expressed protein [Arabidopsis thaliana] unknown protein [Arabidopsis thaliana]
  misc_feature (28)..(123): Homolog of NCBI NO: 17232000 NR Description: hypothetical protein [Nostoc sp. PCC 7120]
  misc_feature (28)..(126): Homolog of NCBI NO: 16331563 NR Description: hypothetical protein [Synechocystis sp. PCC 6803]
  misc_feature (28)..(124): Homolog of NCBI NO: 23041345 NR Description: hypothetical protein [Trichodesmium erythraeum
  misc_feature (29)..(125): Homolog of NCBI NO: 37521445 NR Description: hypothetical protein glr1876 [Gloeobacter
  misc_feature (28)..(123): Homolog of NCBI NO: 22298980 NR Description: ORF_ID:tlr1437~hypothetical protein
  misc_feature (30)..(123): Homolog of NCBI NO: 33861461 NR Description: conserved hypothetical protein [Prochlorococcus subsp. pastoris str. CCMP1378] >gi|33634038|emb|CAE19363.1| hypothetical protein [Prochlorococcus marinus subsp. pastoris
  misc_feature (28)..(120): Homolog of NCBI NO: 33865822 NR Description: conserved hypothetical protein [Synechococcus sp.
  misc_feature (28)..(126): Homolog of NCBI NO: 33862961 NR Description: conserved hypothetical protein [Prochlorococcus str. MIT 9313] >gi|33634878|emb|CAE20864.1| conserved
  misc_feature (28)..(126): Homolog of NCBI NO: 33240381 NR Description: Uncharacterized conserved membrane protein marinus subsp. marinus str. CCMP1375] >gi|33237908|gb|AAP99975.1| conserved membrane protein [Prochlorococcus marinus subsp.
MGLAAAAAVAAAAAASPPALAALSEPANALSLPTWAVHVSSVAEWVTAMWLVWDYGEKTGLKGWKGLSWGMVPLLGGAMCACTWHFFYNSESLEVLVALQGALTVIGNITMCIAAYRIFKASQEGSKTS

SEQ ID NO: 14703 - DNA, 423 bp, Zea mays subsp. mays
  misc_feature (1)..(423): Ceres Seq. ID no. 12468033
  misc_feature: MA Experiment ID: 108523 Result: Down-regulated in Transcription
  misc_feature: MA Experiment 108523 PARAMETER Experiment Name: Zm_42deg_Heat_P Parameter: Age (day) Value: 8
  misc_feature: MA Experiment 108523 PARAMETER Experiment Name: Zm_42deg_Heat_P Parameter: Organism Value: Zea mays
  misc_feature: MA Experiment 108523 PARAMETER Experiment Name: Zm_42deg_Heat_P Parameter: Plant Line Value: 35A19
  misc_feature: MA Experiment 108523 PARAMETER Experiment Name: Zm_42deg_Heat_P Parameter: Temperature (deg C) Value: 42 vs. 22
  misc_feature: MA Experiment 108523 PARAMETER Experiment Name: Zm_42deg_Heat_P Parameter: Timepoint (hr) Value: 6
  misc_feature: MA Experiment 108523 PARAMETER Experiment Name: Zm_42deg_Heat_P Parameter: Tissue Value: Aerial
  misc_feature: MA Experiment ID: 108543 Result: Up-regulated in Transcription
  misc_feature: MA Experiment ID: 108544 Result: Up-regulated in Transcription
  misc_feature: MA Experiment ID: 20000492 Result: Down-regulated in Transcription
  misc_feature: MA Experiment 20000492 PARAMETER Experiment Name: Zm_Hybrid_Seed_Dev_P Parameter: DAP Value: 12
  misc_feature: MA Experiment 20000492 PARAMETER Experiment Name: Zm_Hybrid_Seed_Dev_P Parameter: Organism Value: Zea mays
  misc_feature: MA Experiment 20000492 PARAMETER Experiment Name: Zm_Hybrid_Seed_Dev_P Parameter: Plant Line Value: 35A19
  misc_feature: MA Experiment 20000492 PARAMETER Experiment Name: Zm_Hybrid_Seed_Dev_P Parameter: Tissue Value: Fert Kernel vs. Unfert Floret
ttctttcaggtgcccggcatgtttcagatggcatgcttcaagcagcagctgagtgcctggcatcatacatcacagacgacgaaattcgaaaaggaatcctcttcccttcggtctccagtattaggcacatcaccgcacgtgtcggcgcagcagtcgtccgtgccgctgttgctgaagacctggctgaggggtgctgtgatgtgggtcctagggagcttgggagtatgtcagagtcggaagcagtggactacgtcgctcggaagatgtggtaccctatttacagccctcttgtgagcgacaaataataaatccgaagatctcgatgcctgcgcagaagcagatgttccattgaaggaatgtatcggatttgatatttttcttaaccatctctaaattagctgctcatctagaaagcatttcggc

SEQ ID NO: 14704 - protein, 100 aa, Zea mays subsp. mays
  peptide (1)..(100): Ceres Seq. ID no. 12468034
  misc_feature (1)..(56): Pfam Name: Malic enzyme, NAD binding domain Pfam Description: Malic enzyme, NAD binding domain
  misc_feature (1)..(100): Homolog of NCBI NO: 22758336 NR Description: putative malate oxidoreductase, 5'-partial [Oryza
  misc_feature (1)..(100): Homolog of NCBI NO: 6382043 NR Description: F6N23.16 gene product [Arabidopsis thaliana]
  misc_feature (1)..(100): Homolog of NCBI NO: 7431221 NR Description: malate dehydrogenase (decarboxylating) (EC
  misc_feature (1)..(100): Homolog of NCBI NO: 30678679 NR Description: malate oxidoreductase -related [Arabidopsis >gi|22136034|gb|AAM91599.1| putative malate oxidoreductase thaliana] >gi|23197734|gb|AAN15394.1| putative malate putative
  misc_feature (1)..(100): Homolog of NCBI NO: 8894554 NR Description: NAD-dependent malic enzyme (malate
  misc_feature (1)..(99): Homolog of NCBI NO: 585452 NR Description: NAD-DEPENDENT MALIC ENZYME 59 KDA ISOFORM,
  misc_feature (1)..(100): Homolog of NCBI NO: 34393731 NR Description: putative malate dehydrogenase [Oryza sativa
  misc_feature (1)..(100): Homolog of NCBI NO: 585451 NR Description: NAD-DEPENDENT MALIC ENZYME 62 KDA ISOFORM,
  misc_feature (1)..(100): Homolog of NCBI NO: 34901810 NR Description: putative NAD-dependent malic enzyme 62 KDA
  misc_feature (1)..(100): Homolog of NCBI NO: 585450 NR Description: NAD-DEPENDENT MALIC ENZYME 65 KDA ISOFORM,
LSGARHVSDGMLQAAAECLASYITDDEIRKGILFPSVSSIRHITARVGAAVVRAAVAEDLAEGCCDVGPRELGSMSESEAVDYVARKMWYPIYSPLVSDK

SEQ ID NO: 14705 - protein, 97 aa, Zea mays subsp. mays
  peptide (1)..(97): Ceres Seq. ID no. 12468035
FFQVPGMFQMACFKQQLSAWHHTSQTTKFEKESSSLRSPVLGTSPHVSAQQSSVPLLLKTWLRGAVMWVLGSLGVCQSRKQWTTSLGRCGTLFTALL

SEQ ID NO: 14706 - protein, 91 aa, Zea mays subsp. mays
  peptide (1)..(91): Ceres Seq. ID no. 12468036
MFQMACFKQQLSAWHHTSQTTKFEKESSSLRSPVLGTSPHVSAQQSSVPLLLKTWLRGAVMWVLGSLGVCQSRKQWTTSLGRCGTLFTALL

SEQ ID NO: 14707 - DNA, 621 bp, Zea mays subsp. mays
  misc_feature (1)..(621): Ceres Seq. ID no. 13567830
  misc_feature: MA Experiment ID: 108528 Result: Down-regulated in Transcription
  misc_feature: MA Experiment 108528 PARAMETER Experiment Name: Zm_Imbibed_Seeds_P Parameter: Age (day) Value: 5 vs. 2
  misc_feature: MA Experiment 108528 PARAMETER Experiment Name: Zm_Imbibed_Seeds_P Parameter: Organism Value: Zea mays
  misc_feature: MA Experiment 108528 PARAMETER Experiment Name: Zm_Imbibed_Seeds_P Parameter: Plant Line Value: 35A19
  misc_feature: MA Experiment 108528 PARAMETER Experiment Name: Zm_Imbibed_Seeds_P Parameter: Tissue Value: Aerial vs. Embryo
  misc_feature: MA Experiment ID: 108543 Result: Up-regulated in Transcription
  misc_feature: MA Experiment ID: 20000108 Result: Up-regulated in Transcription
  misc_feature: MA Experiment 20000108 PARAMETER Experiment Name: Zm_Root-Tips_P Parameter: Age (day) Value: 12
  misc_feature: MA Experiment 20000108 PARAMETER Experiment Name: Zm_Root-Tips_P Parameter: Organism Value: Zea mays
  misc_feature: MA Experiment 20000108 PARAMETER Experiment Name: Zm_Root-Tips_P Parameter: Tissue Value: Root tips vs. Root mid region    35
  misc_feature: MA Experiment 20000108 PARAMETER Experiment Name: Zm_Root-Tips_P Parameter: Tissue Value: Root tips vs. Root mid region   Sequence Listing-Misc Features (4)
  misc_feature: MA Experiment ID: 20000534 Result: Down-regulated in Transcription
  misc_feature: MA Experiment 20000534 PARAMETER Experiment Name: Zm_Hybrid_Pollen_P Parameter: Age (day) Value: 8
  misc_feature: MA Experiment 20000534 PARAMETER Experiment Name: Zm_Hybrid_Pollen_P Parameter: Organism Value: Zea mays
  misc_feature: MA Experiment 20000534 PARAMETER Experiment Name: Zm_Hybrid_Pollen_P Parameter: Plant Line Value: 35A19
  misc_feature: MA Experiment 20000534 PARAMETER Experiment Name: Zm_Hybrid_Pollen_P Parameter: Tissue Value: Pollen vs. Aerial
attcccggcactgcagcgaggcaggagggcgaccggaatttcccatctctccttctcatcattcctttcgggatttcccctcctggttcccatcgatcagagggcccggcgctgttgcctttcgcattcgattcctttcgggtcggatttgtggcggagctcttgatttgctccgtccctgccagcggaggagggcttgctggatcagggatcgagcaaggaagcagccatgagcggcggcggaagcgtgagtttcctcgagatccagccgtcggagctcgcattcccctttgagataatgaggcagagctcgtgttccatgcaactgaccaataagactgaccattatgtagcattcaaggtcaaaacaaccaacccaaagcagtactgtgtgcgtcctaatattggtgttgtattacctggctcaacttgcgatgttacagtgacaatgcaagcacagaaggcttcaccacctgacatgcagtgcaaggacaagttcctagttcaaagcgttgtggccgagaatggtgtgacagctcaagatattaatgcagcaatgttcaataaggagccagggaaagttgkcgatgaattcaagctgcgtgtgggttatgtgccaac

SEQ ID NO: 14708 - protein, 130 aa, Zea mays subsp. mays
  peptide (1)..(130): Ceres Seq. ID no. 13567831
  misc_feature (1)..(129): Homolog of NCBI NO: 11288307 NR Description: 27k vesicle-associated membrane
  misc_feature (10)..(129): Homolog of NCBI NO: 18411240 NR Description: VAMP (vesicle-associated membrane protein family [Arabidopsis thaliana] >gi|25054852|gb|AAN71916.1|
  misc_feature (10)..(129): Homolog of NCBI NO: 21592874 NR Description: putative proline-rich protein [Arabidopsis
  misc_feature (3)..(129): Homolog of NCBI NO: 18411661 NR Description: VAMP (vesicle-associated membrane protein, putative [Arabidopsis thaliana] putative protein [Arabidopsis thaliana]
  misc_feature (10)..(129): Homolog of NCBI NO: 21554053 NR Description: putative VAMP-associated protein [Arabidopsis
  misc_feature (10)..(129): Homolog of NCBI NO: 7486542 NR Description: hypothetical protein F6N15.21 - Arabidopsis >gi|3193330|gb|AAC19312.1| contains similarity to Medicago sativa
  misc_feature (6)..(129): Homolog of NCBI NO: 15225415 NR Description: VAMP (vesicle-associated membrane
  misc_feature (3)..(129): Homolog of NCBI NO: 11288305 NR Description: hypothetical protein T4C21.10 - Arabidopsis >gi|7329670|emb|CAB82664.1| putative protein [Arabidopsis
  misc_feature (10)..(129): Homolog of NCBI NO: 15224067 NR Description: VAMP (vesicle-associated membrane protein, putative [Arabidopsis thaliana] >gi|25412162|pir||E84629
  misc_feature (11)..(126): Homolog of NCBI NO: 34907216 NR Description: P0504E02.2 [Oryza sativa (japonica
  misc_feature (119)..(119): Xaa is any aa, unknown or other
MSGGGSVSFLEIQPSELAFPFEIMRQSSCSMQLTNKTDHYVAFKVKTTNPKQYCVRPNIGVVLPGSTCDVTVTMQAQKASPPDMQCKDKFLVQSVVAENGVTAQDINAAMFNKEPGKVXDEFKLRVGYVP

SEQ ID NO: 14709 - protein, 107 aa, Zea mays subsp. mays
  peptide (1)..(107): Ceres Seq. ID no. 13567832
  misc_feature (1)..(106): Homolog of NCBI NO: 11288307 NR Description: 27k vesicle-associated membrane
  misc_feature (1)..(106): Homolog of NCBI NO: 18411240 NR Description: VAMP (vesicle-associated membrane protein family [Arabidopsis thaliana] >gi|25054852|gb|AAN71916.1|
  misc_feature (1)..(106): Homolog of NCBI NO: 21592874 NR Description: putative proline-rich protein [Arabidopsis
  misc_feature (1)..(106): Homolog of NCBI NO: 18411661 NR Description: VAMP (vesicle-associated membrane protein, putative [Arabidopsis thaliana] putative protein [Arabidopsis thaliana]
  misc_feature (1)..(106): Homolog of NCBI NO: 21554053 NR Description: putative VAMP-associated protein [Arabidopsis
  misc_feature (1)..(106): Homolog of NCBI NO: 7486542 NR Description: hypothetical protein F6N15.21 - Arabidopsis >gi|3193330|gb|AAC19312.1| contains similarity to Medicago sativa
  misc_feature (1)..(106): Homolog of NCBI NO: 15225415 NR Description: VAMP (vesicle-associated membrane
  misc_feature (1)..(106): Homolog of NCBI NO: 11288305 NR Description: hypothetical protein T4C21.10 - Arabidopsis >gi|7329670|emb|CAB82664.1| putative protein [Arabidopsis
  misc_feature (1)..(106): Homolog of NCBI NO: 15224067 NR Description: VAMP (vesicle-associated membrane protein, putative [Arabidopsis thaliana] >gi|25412162|pir||E84629
  misc_feature (1)..(103): Homolog of NCBI NO: 34907216 NR Description: P0504E02.2 [Oryza sativa (japonica
  misc_feature (96)..(96): Xaa is any aa, unknown or other
MRQSSCSMQLTNKTDHYVAFKVKTTNPKQYCVRPNIGVVLPGSTCDVTVTMQAQKASPPDMQCKDKFLVQSVVAENGVTAQDINAAMFNKEPGKVXDEFKLRVGYVP

SEQ ID NO: 14710 - protein, 100 aa, Zea mays subsp. mays
  peptide (1)..(100): Ceres Seq. ID no. 13567833
  misc_feature (1)..(99): Homolog of NCBI NO: 11288307 NR Description: 27k vesicle-associated membrane
  misc_feature (1)..(99): Homolog of NCBI NO: 18411240 NR Description: VAMP (vesicle-associated membrane protein family [Arabidopsis thaliana] >gi|25054852|gb|AAN71916.1|
  misc_feature (1)..(99): Homolog of NCBI NO: 21592874 NR Description: putative proline-rich protein [Arabidopsis
  misc_feature (1)..(99): Homolog of NCBI NO: 18411661 NR Description: VAMP (vesicle-associated membrane protein, putative [Arabidopsis thaliana] putative protein [Arabidopsis thaliana]
  misc_feature (1)..(99): Homolog of NCBI NO: 21554053 NR Description: putative VAMP-associated protein [Arabidopsis
  misc_feature (1)..(99): Homolog of NCBI NO: 7486542 NR Description: hypothetical protein F6N15.21 - Arabidopsis >gi|3193330|gb|AAC19312.1| contains similarity to Medicago sativa
  misc_feature (1)..(99): Homolog of NCBI NO: 15225415 NR Description: VAMP (vesicle-associated membrane
  misc_feature (1)..(99): Homolog of NCBI NO: 11288305 NR Description: hypothetical protein T4C21.10 - Arabidopsis >gi|7329670|emb|CAB82664.1| putative protein [Arabidopsis
  misc_feature (1)..(99): Homolog of NCBI NO: 15224067 NR Description: VAMP (vesicle-associated membrane protein, putative [Arabidopsis thaliana] >gi|25412162|pir||E84629
  misc_feature (1)..(96): Homolog of NCBI NO: 34907216 NR Description: P0504E02.2 [Oryza sativa (japonica
  misc_feature (89)..(89): Xaa is any aa, unknown or other
MQLTNKTDHYVAFKVKTTNPKQYCVRPNIGVVLPGSTCDVTVTMQAQKASPPDMQCKDKFLVQSVVAENGVTAQDINAAMFNKEPGKVXDEFKLRVGYVP

SEQ ID NO: 14711 - DNA, 551 bp, Zea mays subsp. mays
  misc_feature (1)..(551): Ceres Seq. ID no. 3623404
  misc_feature: MA Experiment ID: 108689 Result: Down-regulated in Transcription
  misc_feature: MA Experiment 108689 PARAMETER Experiment Name: Zm_Drought_Roots_P Parameter: Age (day) Value: 9
  misc_feature: MA Experiment 108689 PARAMETER Experiment Name: Zm_Drought_Roots_P Parameter: Organism Value: Zea mays
  misc_feature: MA Experiment 108689 PARAMETER Experiment Name: Zm_Drought_Roots_P Parameter: Plant Line Value: 35A19
  misc_feature: MA Experiment 108689 PARAMETER Experiment Name: Zm_Drought_Roots_P Parameter: Timepoint (hr) Value: 24
  misc_feature: MA Experiment 108689 PARAMETER Experiment Name: Zm_Drought_Roots_P Parameter: Tissue Value: Roots
  misc_feature: MA Experiment 108689 PARAMETER Experiment Name: Zm_Drought_Roots_P Parameter: Treatment Value: Drought vs. No Drought
  misc_feature: MA Experiment ID: 20000492 Result: Up-regulated in Transcription
  misc_feature: MA Experiment 20000492 PARAMETER Experiment Name: Zm_Hybrid_Seed_Dev_P Parameter: DAP Value: 12
  misc_feature: MA Experiment 20000492 PARAMETER Experiment Name: Zm_Hybrid_Seed_Dev_P Parameter: Organism Value: Zea mays
  misc_feature: MA Experiment 20000492 PARAMETER Experiment Name: Zm_Hybrid_Seed_Dev_P Parameter: Plant Line Value: 35A19
  misc_feature: MA Experiment 20000492 PARAMETER Experiment Name: Zm_Hybrid_Seed_Dev_P Parameter: Tissue Value: Fert Kernel vs. Unfert Floret
attttaagcctggagaagccatcctggattggctttcaaggaaacgggtggctataggtacagctcgtggactggagtatctgcatgaacactgcaaccccaagatcatacaccgtgatgttaaagctgcaaatgtattgcttgacgaggatttcgagcctgttgtcggcgattttggcctagcaaagctagtagatgtgcagaagacgtctgtgacaacacaagtccgcggaaccatgggtcacatagcacccgagtacctgtccacagggaagtcttccgagaggacagatgtttttggatatgggatcatgcttcttgaacttgtgactggtcaacgggctattgacttctcacggctggaagacgaagatgatgtgctattgcttgatcatgtaaagaagctacagagagaaggggagctggactccatcgtggacagcaaccttaaccagaattatgacggcgaggatatcgagatgataatacagatagcgctgctctgcactcaggcatcacctgaggaccgtccatcgatgtctgaagtggtt

SEQ ID NO: 14712 - protein, 183 aa, Zea mays subsp. mays
  peptide (1)..(183): Ceres Seq. ID no. 3623405
  misc_feature (2)..(182): Homolog of NCBI NO: 22326703 NR Description: protein serine/threonine kinase-like protein; id: At5g10290.1, supported by cDNA: gi_20260259 [Arabidopsis
  misc_feature (2)..(182): Homolog of NCBI NO: 15238386 NR Description: receptor-like protein kinase; protein id:
  misc_feature (2)..(182): Homolog of NCBI NO: 16648949 NR Description: receptor-like protein kinase [Arabidopsis
  misc_feature (2)..(182): Homolog of NCBI NO: 20260260 NR Description: protein serine/threonine kinase-like protein
  misc_feature (2)..(182): Homolog of NCBI NO: 10177052 NR Description: receptor-like protein kinase [Arabidopsis
  misc_feature (2)..(182): Homolog of NCBI NO: 18424740 NR Description: leucine-rich repeat transmembrane protein kinase, protein id: At5g63710.1, supported by cDNA: gi_16974576 thaliana] >gi|16974577|gb|AAL31184.1| AT5g63710/MBK5_19
  misc_feature (3)..(182): Homolog of NCBI NO: 15081616 NR Description: At1g71830/F14O23_24 [Arabidopsis thaliana]
  misc_feature (3)..(182): Homolog of NCBI NO: 25406123 NR Description: hypothetical protein F14O23.21 [imported] - thaliana >gi|7239510|gb|AAF43236.1|AC012654_20 Contains
  misc_feature (3)..(182): Homolog of NCBI NO: 15217584 NR Description: protein kinase, putative; protein id:
  misc_feature (2)..(182): Homolog of NCBI NO: 11358729 NR Description: protein serine/threonine kinase-like protein -
FKPGEAILDWLSRKRVAIGTARGLEYLHEHCNPKIIHRDVKAANVLLDEDFEPVVGDFGLAKLVDVQKTSVTTQVRGTMGHIAPEYLSTGKSSERTDVFGYGIMLLELVTGQRAIDFSRLEDEDDVLLLDHVKKLQREGELDSIVDSNLNQNYDGEDIEMIIQIALLCTQASPEDRPSMSEVV

SEQ ID NO: 14713 - protein, 105 aa, Zea mays subsp. mays
  peptide (1)..(105): Ceres Seq. ID no. 3623406
  misc_feature (1)..(104): Homolog of NCBI NO: 11358729 NR Description: protein serine/threonine kinase-like protein -
  misc_feature (1)..(104): Homolog of NCBI NO: 22326703 NR Description: protein serine/threonine kinase-like protein; id: At5g10290.1, supported by cDNA: gi_20260259 [Arabidopsis
  misc_feature (1)..(104): Homolog of NCBI NO: 15238386 NR Description: receptor-like protein kinase; protein id:
  misc_feature (1)..(104): Homolog of NCBI NO: 16648949 NR Description: receptor-like protein kinase [Arabidopsis
  misc_feature (1)..(104): Homolog of NCBI NO: 20260260 NR Description: protein serine/threonine kinase-like protein
  misc_feature (1)..(104): Homolog of NCBI NO: 10177052 NR Description: receptor-like protein kinase [Arabidopsis
  misc_feature (1)..(104): Homolog of NCBI NO: 18424740 NR Description: leucine-rich repeat transmembrane protein kinase, protein id: At5g63710.1, supported by cDNA: gi_16974576 thaliana] >gi|16974577|gb|AAL31184.1| AT5g63710/MBK5_19
  misc_feature (1)..(104): Homolog of NCBI NO: 15081616 NR Description: At1g71830/F14O23_24 [Arabidopsis thaliana]
  misc_feature (1)..(104): Homolog of NCBI NO: 25406123 NR Description: hypothetical protein F14O23.21 [imported] - thaliana >gi|7239510|gb|AAF43236.1|AC012654_20 Contains
  misc_feature (1)..(104): Homolog of NCBI NO: 15217584 NR Description: protein kinase, putative; protein id:
MGHIAPEYLSTGKSSERTDVFGYGIMLLELVTGQRAIDFSRLEDEDDVLLLDHVKKLQREGELDSIVDSNLNQNYDGEDIEMIIQIALLCTQASPEDRPSMSEVV

SEQ ID NO: 14714 - DNA, 600 bp, Zea mays subsp. mays
  misc_feature (1)..(600): Ceres Seq. ID no. 3623648
  misc_feature: MA Experiment ID: 108527 Result: Up-regulated in Transcription
  misc_feature: MA Experiment 108527 PARAMETER Experiment Name: Zm_5mM_NO_P Parameter: Age (day) Value: 8
  misc_feature: MA Experiment 108527 PARAMETER Experiment Name: Zm_5mM_NO_P Parameter: Organism Value: Zea mays
  misc_feature: MA Experiment 108527 PARAMETER Experiment Name: Zm_5mM_NO_P Parameter: Plant Line Value: 35A19
  misc_feature: MA Experiment 108527 PARAMETER Experiment Name: Zm_5mM_NO_P Parameter: Timepoint (hr) Value: 6
  misc_feature: MA Experiment 108527 PARAMETER Experiment Name: Zm_5mM_NO_P Parameter: Tissue Value: Aerial
  misc_feature: MA Experiment 108527 PARAMETER Experiment Name: Zm_5mM_NO_P Parameter: Treatment Value: 5mM NO vs. No Treatment
  misc_feature: MA Experiment ID: 108534 Result: Up-regulated in Transcription
  misc_feature: MA Experiment 108534 PARAMETER Experiment Name: Zm_4deg_Cold_P Parameter: Age (hr) Value: 8
  misc_feature: MA Experiment 108534 PARAMETER Experiment Name: Zm_4deg_Cold_P Parameter: Organism Value: Zea mays
  misc_feature: MA Experiment 108534 PARAMETER Experiment Name: Zm_4deg_Cold_P Parameter: Plant Line Value: 35A19
  misc_feature: MA Experiment 108534 PARAMETER Experiment Name: Zm_4deg_Cold_P Parameter: Temperature (deg C) Value: 4 vs. 22
  misc_feature: MA Experiment 108534 PARAMETER Experiment Name: Zm_4deg_Cold_P Parameter: Timepoint (hr) Value: 6
  misc_feature: MA Experiment 108534 PARAMETER Experiment Name: Zm_4deg_Cold_P Parameter: Tissue Value: Aerial
  misc_feature: MA Experiment ID: 108535 Result: Down-regulated in Transcription
  misc_feature: MA Experiment 108535 PARAMETER Experiment Name: Zm_Meristem_P Parameter: Age (day) Value: 8
  misc_feature: MA Experiment 108535 PARAMETER Experiment Name: Zm_Meristem_P Parameter: Organism Value: Zea mays
  misc_feature: MA Experiment 108535 PARAMETER Experiment Name: Zm_Meristem_P Parameter: Plant Line Value: 35A19
  misc_feature: MA Experiment 108535 PARAMETER Experiment Name: Zm_Meristem_P Parameter: Tissue Value: Root Meristem vs. Above Root Meristem
  misc_feature: MA Experiment ID: 108536 Result: Up-regulated in Transcription
  misc_feature: MA Experiment 108536 PARAMETER Experiment Name: Zm_Meristem_P Parameter: Age (day) Value: 8
  misc_feature: MA Experiment 108536 PARAMETER Experiment Name: Zm_Meristem_P Parameter: Organism Value: Zea mays
  misc_feature: MA Experiment 108536 PARAMETER Experiment Name: Zm_Meristem_P Parameter: Plant Line Value: 35A19
  misc_feature: MA Experiment 108536 PARAMETER Experiment Name: Zm_Meristem_P Parameter: Tissue Value: Shoot Meristem vs. Above Shoot Meristem
  misc_feature: MA Experiment ID: 20000626 Result: Down-regulated in Transcription
  misc_feature: MA Experiment 20000626 PARAMETER Experiment Name: Zm_Herbicide-Treatments_P Parameter: Timepoint (hr) Value: 12
  misc_feature: MA Experiment 20000626 PARAMETER Experiment Name: Zm_Herbicide-Treatments_P Parameter: Tissue Value: Aerial
  misc_feature: MA Experiment 20000626 PARAMETER Experiment Name: Zm_Herbicide-Treatments_P Parameter: Treatment Value: Roundup vs. No Treatment
  misc_feature: MA Experiment ID: 20000629 Result: Down-regulated in Transcription
  misc_feature: MA Experiment 20000629 PARAMETER Experiment Name: Zm_Herbicide-Treatments_P Parameter: Timepoint (hr) Value: 12
  misc_feature: MA Experiment 20000629 PARAMETER Experiment Name: Zm_Herbicide-Treatments_P Parameter: Tissue Value: Aerial
  misc_feature: MA Experiment 20000629 PARAMETER Experiment Name: Zm_Herbicide-Treatments_P Parameter: Treatment Value: Trimec vs. No Treatment
  misc_feature: Pfam Name: Pkinase Pfam Description: Protein kinase domain
ttggttccgtttacaagggacagctcaggaatggtacagttattgctgtcaaggtcctttcgtcggagtcaagacaaggagtaagggagtttctgaatgaactcgtggcaatttccgacatctcacatgataatcttgtgaaactttatgggtattgtgcggaaggagaccaaagaatccttgtttacaatcatcttgaaaataatagccttgcacaaacacttctaggctccagccacagcaatatccagtttgattggaaaacacgagtaaatatttgccttggcattgcacggggattagcatacctccatcatggtgtcagtccccacattgttcatcgagacattaaagcaagcaatatacttcttgatagggaccttaccccaaaaatctctgattttggtctagcaaagcttcttccaccaaacgcaacacatgttagcacaagagttgcaggaacactgggttatttggctcctgagtatgctattcgaggacaggtgacacgcaaatcagatgtgtacagctttggcgtgctgcttctggaaattggttgcgggagatcaaacagcgatacaagattagcatacggagatc

SEQ ID NO: 14715 - protein, 199 aa, Zea mays subsp. mays
  peptide (1)..(199): Ceres Seq. ID no. 3623649
  misc_feature: Pfam Name: Pkinase Pfam Description: Protein kinase domain
  misc_feature (1)..(198): Homolog of NCBI NO: 38344329 NR Description: OSJNBa0058K23.11 [Oryza sativa (japonica
  misc_feature (6)..(198): Homolog of NCBI NO: 5679843 NR Description: Putitive Ser/Thr protein kinase [Oryza sativa
  misc_feature (1)..(195): Homolog of NCBI NO: 18394385 NR Description: receptor-like serine/threonine kinase, putative; id: At1g16670.1, supported by cDNA: gi_16649102 [Arabidopsis >gi|16649103|gb|AAL24403.1| Unknown protein [Arabidopsis
  misc_feature (1)..(195): Homolog of NCBI NO: 25287648 NR Description: hypothetical protein F19K19.4 [imported] - thaliana >gi|9989053|gb|AAG10816.1|AC011808_4 Unknown protein
  misc_feature (1)..(92): Homolog of NCBI NO: 5852099 NR Description: zwh22.1 [Oryza sativa (indica cultivar-group)]
  misc_feature (116)..(198): Homolog of NCBI NO: 5852099 NR Description: zwh22.1 [Oryza sativa (indica cultivar-group)]
  misc_feature (1)..(198): Homolog of NCBI NO: 5923666 NR Description: putative receptor ser/thr protein kinase
  misc_feature (1)..(198): Homolog of NCBI NO: 6403501 NR Description: putative protein kinase [Arabidopsis thaliana]
  misc_feature (1)..(198): Homolog of NCBI NO: 18398327 NR Description: putative receptor ser/thr protein kinase; protein At3g09010.1, supported by cDNA: 124301. [Arabidopsis thaliana]
  misc_feature (1)..(196): Homolog of NCBI NO: 38344039 NR Description: OSJNBb0017I01.6 [Oryza sativa (japonica
GSVYKGQLRNGTVIAVKVLSSESRQGVREFLNELVAISDISHDNLVKLYGYCAEGDQRILVYNHLENNSLAQTLLGSSHSNIQFDWKTRVNICLGIARGLAYLHHGVSPHIVHRDIKASNILLDRDLTPKISDFGLAKLLPPNATHVSTRVAGTLGYLAPEYAIRGQVTRKSDVYSFGVLLLEIGCGRSNSDTRLAYGD

SEQ ID NO: 14716 - DNA, 1243 bp, Zea mays subsp. mays
  misc_feature (1)..(1243): Ceres Seq. ID no. 13577632
  misc_feature: MA Experiment ID: 108530 Result: Down-regulated in Transcription
  misc_feature: MA Experiment 108530 PARAMETER Experiment Name: Zm_Imbibed_Seeds_P Parameter: Age (day) Value: 6 vs. 2
  misc_feature: MA Experiment 108530 PARAMETER Experiment Name: Zm_Imbibed_Seeds_P Parameter: Organism Value: Zea mays
  misc_feature: MA Experiment 108530 PARAMETER Experiment Name: Zm_Imbibed_Seeds_P Parameter: Plant Line Value: 35A19
  misc_feature: MA Experiment 108530 PARAMETER Experiment Name: Zm_Imbibed_Seeds_P Parameter: Tissue Value: Aerial vs. Embryo
  misc_feature: MA Experiment ID: 108544 Result: Up-regulated in Transcription
ggcacgaggcttgctgctgcagtgctgcctccccctcgcccagcagcagggagcagccatgccaggggaccacggctccaagggcgacatctccttcgccggacgcttcacggccagcgccatcgcagcatgcttcgcagagatatgtaccatcccgctcgacacggccaaggtcaggctccagctgcagaagaacgtcgtcgccgccgccgcctccggggacgccgcgccagcgcttcccaagtaccgcggcctgctcggaactgccgccaccatcgctagggaggaaggggccgcagcgctctggaagggcatcgtcccgggcctccaccgacagtgcatctacggggggctccgcattggcctctacgagcctgtcaaatccttctacgtcggcaaagaccacgttggggatgtccctttgtccaagaagatagccgccggcttcacaactggtgccatcgctatcagcatcgccaaccctactgaccttgtcaaggtcaggctccaggccgagggcaagcttgcgcctggtgtgccacgccgctacactggcgcaatggatgcttattccaagattgctagacaggaaggggttgccgctctgtggactggccttggaccaaatgtagcgcggaatgctatcatcaatgctgctgagttggccagttatgatcaagtcaagcagtcaattttgaaactccctgggttcaaagatgatgtggtcacccacctttttgctggtcttggtgctggcttctttgctgtttgtgttggttccccagttgatgtggttaagtcgagaatgatgggtgactcagcctacaaaagcactctcgattgttttgtgaagacgctaaagaatgatggccctttggcattttacaaaggcttcctgccaaactttgcaagactgggatcttggaatgtgattatgttcttgacattggagcaggttcaaaagctgtttgtgaggaaagcgacaagctgaagatagagtttttgcagtcaggtggcgtacaattgacgcacagggtttttcttctatagacaaaaggggagaaatgacacctcccccctcgagaattggggaacaaggacagatctgacacctcaattgcgagaaataaaaataacagccgacagttgcatgatccctgaacgaataaattcagaactagaaaacagatgtcagtaaacaacatgtggtgaatgttggaacttgaactggtcagttaggggc

SEQ ID NO: 14717 - protein, 329 aa, Zea mays subsp. mays
  peptide (1)..(329): Ceres Seq. ID no. 13577633
  misc_feature (20)..(329): Homolog of NCBI NO: 19401698 NR Description: uncoupling protein [Zea mays]
  misc_feature (20)..(329): Homolog of NCBI NO: 13537347 NR Description: uncoupling protein [Oryza sativa (japonica
  misc_feature (22)..(329): Homolog of NCBI NO: 7489287 NR Description: uncoupling protein (clone StUCP7), mitochonrial - >gi|2398829|emb|CAA72107.1| mitochondrial uncoupling protein
  misc_feature (22)..(327): Homolog of NCBI NO: 22002462 NR Description: mitochondrial uncoupling protein [Helicodiceros
  misc_feature (22)..(329): Homolog of NCBI NO: 18921040 NR Description: putative uncoupling protein [Lycopersicon
  misc_feature (22)..(326): Homolog of NCBI NO: 7106157 NR Description: SfUCPa [Symplocarpus foetidus]
  misc_feature (27)..(326): Homolog of NCBI NO: 15232420 NR Description: uncoupling protein (ucp/PUMP) [Arabidopsis
  misc_feature (27)..(326): Homolog of NCBI NO: 25295878 NR Description: uncoupling protein [imported] - Arabidopsis >gi|3115108|emb|CAA11757.1| plant uncoupling mitochondrial
  misc_feature (29)..(326): Homolog of NCBI NO: 18424178 NR Description: uncoupling protein (AtUCP2) [Arabidopsis >gi|4063007|dbj|BAA36222.1| uncoupling protein [Arabidopsis >gi|9759228|dbj|BAB09640.1| uncoupling protein [Arabidopsis
  misc_feature (22)..(236): Homolog of NCBI NO: 7106159 NR Description: SfUCPb [Symplocarpus foetidus]
ARGLLLQCCLPLAQQQGAAMPGDHGSKGDISFAGRFTASAIAACFAEICTIPLDTAKVRLQLQKNVVAAAASGDAAPALPKYRGLLGTAATIAREEGAAALWKGIVPGLHRQCIYGGLRIGLYEPVKSFYVGKDHVGDVPLSKKIAAGFTTGAIAISIANPTDLVKVRLQAEGKLAPGVPRRYTGAMDAYSKIARQEGVAALWTGLGPNVARNAIINAAELASYDQVKQSILKLPGFKDDVVTHLFAGLGAGFFAVCVGSPVDVVKSRMMGDSAYKSTLDCFVKTLKNDGPLAFYKGFLPNFARLGSWNVIMFLTLEQVQKLFVRKATS

SEQ ID NO: 14718 - protein, 310 aa, Zea mays subsp. mays
  peptide (1)..(310): Ceres Seq. ID no. 13577634
  misc_feature (1)..(310): Homolog of NCBI NO: 19401698 NR Description: uncoupling protein [Zea mays]
  misc_feature (1)..(310): Homolog of NCBI NO: 13537347 NR Description: uncoupling protein [Oryza sativa (japonica
  misc_feature (3)..(310): Homolog of NCBI NO: 7489287 NR Description: uncoupling protein (clone StUCP7), mitochonrial - >gi|2398829|emb|CAA72107.1| mitochondrial uncoupling protein
  misc_feature (3)..(308): Homolog of NCBI NO: 22002462 NR Description: mitochondrial uncoupling protein [Helicodiceros
  misc_feature (3)..(310): Homolog of NCBI NO: 18921040 NR Description: putative uncoupling protein [Lycopersicon
  misc_feature (3)..(307): Homolog of NCBI NO: 7106157 NR Description: SfUCPa [Symplocarpus foetidus]
  misc_feature (8)..(307): Homolog of NCBI NO: 15232420 NR Description: uncoupling protein (ucp/PUMP) [Arabidopsis
  misc_feature (8)..(307): Homolog of NCBI NO: 25295878 NR Description: uncoupling protein [imported] - Arabidopsis >gi|3115108|emb|CAA11757.1| plant uncoupling mitochondrial
  misc_feature (10)..(307): Homolog of NCBI NO: 18424178 NR Description: uncoupling protein (AtUCP2) [Arabidopsis >gi|4063007|dbj|BAA36222.1| uncoupling protein [Arabidopsis >gi|9759228|dbj|BAB09640.1| uncoupling protein [Arabidopsis
  misc_feature (3)..(217): Homolog of NCBI NO: 7106159 NR Description: SfUCPb [Symplocarpus foetidus]
MPGDHGSKGDISFAGRFTASAIAACFAEICTIPLDTAKVRLQLQKNVVAAAASGDAAPALPKYRGLLGTAATIAREEGAAALWKGIVPGLHRQCIYGGLRIGLYEPVKSFYVGKDHVGDVPLSKKIAAGFTTGAIAISIANPTDLVKVRLQAEGKLAPGVPRRYTGAMDAYSKIARQEGVAALWTGLGPNVARNAIINAAELASYDQVKQSILKLPGFKDDVVTHLFAGLGAGFFAVCVGSPVDVVKSRMMGDSAYKSTLDCFVKTLKNDGPLAFYKGFLPNFARLGSWNVIMFLTLEQVQKLFVRKATS

SEQ ID NO: 14719 - DNA, 337 bp, Zea mays subsp. mays
  misc_feature (1)..(337): Ceres Seq. ID no. 15178947
  misc_feature: MA Experiment ID: 108527 Result: Up-regulated in Transcription
  misc_feature: MA Experiment 108527 PARAMETER Experiment Name: Zm_5mM_NO_P Parameter: Age (day) Value: 8
  misc_feature: MA Experiment 108527 PARAMETER Experiment Name: Zm_5mM_NO_P Parameter: Organism Value: Zea mays
  misc_feature: MA Experiment 108527 PARAMETER Experiment Name: Zm_5mM_NO_P Parameter: Plant Line Value: 35A19
  misc_feature: MA Experiment 108527 PARAMETER Experiment Name: Zm_5mM_NO_P Parameter: Timepoint (hr) Value: 6
  misc_feature: MA Experiment 108527 PARAMETER Experiment Name: Zm_5mM_NO_P Parameter: Tissue Value: Aerial
  misc_feature: MA Experiment 108527 PARAMETER Experiment Name: Zm_5mM_NO_P Parameter: Treatment Value: 5mM NO vs. No Treatment
  misc_feature: MA Experiment ID: 20000534 Result: Down-regulated in Transcription
  misc_feature: MA Experiment 20000534 PARAMETER Experiment Name: Zm_Hybrid_Pollen_P Parameter: Age (day) Value: 8
  misc_feature: MA Experiment 20000534 PARAMETER Experiment Name: Zm_Hybrid_Pollen_P Parameter: Organism Value: Zea mays
  misc_feature: MA Experiment 20000534 PARAMETER Experiment Name: Zm_Hybrid_Pollen_P Parameter: Plant Line Value: 35A19
  misc_feature: MA Experiment 20000534 PARAMETER Experiment Name: Zm_Hybrid_Pollen_P Parameter: Tissue Value: Pollen vs. Aerial
gcatactatgcagggaaactgtgaatagggactctgagattgaggtcatcattcaggaagcagaggatgctgttctcccatggtccagtgaaaacatgttcttagaaactttatctgaaatcatggaccgtcacctccacaaggaatgagtttagaaattcagaataacttatctagttgctccagctgtatccggtttgttgtaagtattgtagacaaggggtgtcaagggactaatgatttcatttgtttgtatcctctcaaatgatttcacttggttgtaattgctcgagtactttgcttatgcacattttgtgaataatatatttgtttggtt

SEQ ID NO: 14720 - protein, 48 aa, Zea mays subsp. mays
  peptide (1)..(48): Ceres Seq. ID no. 15178948
  misc_feature (1)..(45): Homolog of NCBI NO: 15217655 NR Description: phosphatidylinositol 3- and 4-kinase family
  misc_feature (1)..(45): Homolog of NCBI NO: 6633833 NR Description: F1N19.4 [Arabidopsis thaliana]
  misc_feature (1)..(48): Homolog of NCBI NO: 18407090 NR Description: ubiquitin family [Arabidopsis thaliana]
ILCRETVNRDSEIEVIIQEAEDAVLPWSSENMFLETLSEIMDRHLHKE

SEQ ID NO: 14721 - protein, 40 aa, Zea mays subsp. mays
  peptide (1)..(40): Ceres Seq. ID no. 15178949
MSLEIQNNLSSCSSCIRFVVSIVDKGCQGTNDFICLYPLK

SEQ ID NO: 14722 - DNA, 658 bp, Zea mays subsp. mays
  misc_feature (1)..(658): Ceres Seq. ID no. 12467996
  misc_feature: MA Experiment ID: 108543 Result: Up-regulated in Transcription
  misc_feature: MA Experiment ID: 108546 Result: Down-regulated in Transcription
  misc_feature: MA Experiment 108546 PARAMETER Experiment Name: Zm_Imbibed_Seeds_P Parameter: Age (day) Value: 3 vs. 2
  misc_feature: MA Experiment 108546 PARAMETER Experiment Name: Zm_Imbibed_Seeds_P Parameter: Organism Value: Zea mays
  misc_feature: MA Experiment 108546 PARAMETER Experiment Name: Zm_Imbibed_Seeds_P Parameter: Plant Line Value: 35A19
  misc_feature: MA Experiment 108546 PARAMETER Experiment Name: Zm_Imbibed_Seeds_P Parameter: Tissue Value: Roots vs. Embryo
  misc_feature: MA Experiment ID: 108687 Result: Down-regulated in Transcription
  misc_feature: MA Experiment 108687 PARAMETER Experiment Name: Zm_Embryos-Flowers__P Parameter: Tissue Value: Embryo vs. Aerial+
  misc_feature: MA Experiment ID: 20000477 Result: Down-regulated in Transcription
  misc_feature: MA Experiment 20000477 PARAMETER Experiment Name: Zm_5mM_SA_P Parameter: Age (day) Value: 10
  misc_feature: MA Experiment 20000477 PARAMETER Experiment Name: Zm_5mM_SA_P Parameter: Organism Value: Zea mays
  misc_feature: MA Experiment 20000477 PARAMETER Experiment Name: Zm_5mM_SA_P Parameter: Plant Line Value: 35A19
  misc_feature: MA Experiment 20000477 PARAMETER Experiment Name: Zm_5mM_SA_P Parameter: Timepoint (hr) Value: 48
  misc_feature: MA Experiment 20000477 PARAMETER Experiment Name: Zm_5mM_SA_P Parameter: Tissue Value: Aerial
  misc_feature: MA Experiment 20000477 PARAMETER Experiment Name: Zm_5mM_SA_P Parameter: Treatment Value: 5mM SA vs. No Treatment
  misc_feature: MA Experiment ID: 20000478 Result: Down-regulated in Transcription
  misc_feature: MA Experiment 20000478 PARAMETER Experiment Name: Zm_5mM_SA_P Parameter: Age (day) Value: 11
  misc_feature: MA Experiment 20000478 PARAMETER Experiment Name: Zm_5mM_SA_P Parameter: Organism Value: Zea mays
  misc_feature: MA Experiment 20000478 PARAMETER Experiment Name: Zm_5mM_SA_P Parameter: Plant Line Value: 35A19
  misc_feature: MA Experiment 20000478 PARAMETER Experiment Name: Zm_5mM_SA_P Parameter: Timepoint (hr) Value: 72
  misc_feature: MA Experiment 20000478 PARAMETER Experiment Name: Zm_5mM_SA_P Parameter: Tissue Value: Aerial
  misc_feature: MA Experiment 20000478 PARAMETER Experiment Name: Zm_5mM_SA_P Parameter: Treatment Value: 5mM SA vs. No Treatment
ttttatgattatatggagagtggcagcttatgggatgttttacatgaaggctcatccaagaagaacaaacttgactgggtgactcgcctacggatcgctcttggtgcagctcaaggcctcgcttaccttcaccatgactgcagcccacgaataattcaccgggacgtaaaatcaaagaatatactcctcgacaaagattatgaggcgcatcttacagacttcggcatcgctaagagcttatgtgtctcgaagactcacacgtcaacctacgtcatgggcactattggttacattgatcctgagtacgcccgcacctcccgcctcaacgagaagtctgatgtctacagctacggcatcgttctgctggagctgctgaccggcaagaagccagtggacaacgagtgcaatctccatcacttggtaactattcttcagtctcctgcatttgtcgagttagaagtcggaagtcgcttccttctctttacatcgctttggattccagcagtgcccaataattgctgaacaacgaaccattaggcttgtgttcctacaaggggaccagcgacactaaacctagcatgtgagtagatctatctgcactgcagaccagctgtggactgatgcgctgatccattggattggnggctgaaagctccat

SEQ ID NO: 14723 - protein, 173 aa, Zea mays subsp. mays
  peptide (1)..(173): Ceres Seq. ID no. 12467997
  misc_feature (1)..(115): Homolog of NCBI NO: 18390097 NR Description: putative receptor protein kinase [Sorghum bicolor]
  misc_feature (1)..(141): Homolog of NCBI NO: 15225286 NR Description: putative receptor-like protein kinase, ERECTA; id: At2g26330.1, supported by cDNA: gi_1345131, supported by
  misc_feature (1)..(141): Homolog of NCBI NO: 26451159 NR Description: unknown protein [Arabidopsis thaliana]
  misc_feature (1)..(141): Homolog of NCBI NO: 15241760 NR Description: putative protein; protein id: At5g62230.1
  misc_feature (1)..(140): Homolog of NCBI NO: 8809636 NR Description: receptor-like protein kinase [Arabidopsis
  misc_feature (1)..(141): Homolog of NCBI NO: 28140043 NR Description: receptor-like protein kinase [Elaeis guineensis]
  misc_feature (1)..(141): Homolog of NCBI NO: 34898088 NR Description: ESTs C22657(S0014),C22656(S0014) correspond to a of the predicted gene.~Similar to receptor protein kinase, ERECTA
  misc_feature (1)..(141): Homolog of NCBI NO: 15240720 NR Description: receptor-like protein kinase; protein id:
  misc_feature (2)..(132): Homolog of NCBI NO: 37530386 NR Description: putative protein kinase [Oryza sativa (japonica group)] >gi|18542934|gb|AAK00425.2| Putative protein kinase sativa] >gi|31429780|gb|AAP51782.1| putative protein kinase
  misc_feature (2)..(132): Homolog of NCBI NO: 10177448 NR Description: receptor-like protein kinase [Arabidopsis
FYDYMESGSLWDVLHEGSSKKNKLDWVTRLRIALGAAQGLAYLHHDCSPRIIHRDVKSKNILLDKDYEAHLTDFGIAKSLCVSKTHTSTYVMGTIGYIDPEYARTSRLNEKSDVYSYGIVLLELLTGKKPVDNECNLHHLVTILQSPAFVELEVGSRFLLFTSLWIPAVPNNC

SEQ ID NO: 14724 - protein, 169 aa, Zea mays subsp. mays
  peptide (1)..(169): Ceres Seq. ID no. 12467998
  misc_feature (1)..(111): Homolog of NCBI NO: 18390097 NR Description: putative receptor protein kinase [Sorghum bicolor]
  misc_feature (1)..(137): Homolog of NCBI NO: 15225286 NR Description: putative receptor-like protein kinase, ERECTA; id: At2g26330.1, supported by cDNA: gi_1345131, supported by
  misc_feature (1)..(137): Homolog of NCBI NO: 26451159 NR Description: unknown protein [Arabidopsis thaliana]
  misc_feature (1)..(137): Homolog of NCBI NO: 15241760 NR Description: putative protein; protein id: At5g62230.1
  misc_feature (1)..(136): Homolog of NCBI NO: 8809636 NR Description: receptor-like protein kinase [Arabidopsis
  misc_feature (1)..(137): Homolog of NCBI NO: 28140043 NR Description: receptor-like protein kinase [Elaeis guineensis]
  misc_feature (1)..(137): Homolog of NCBI NO: 34898088 NR Description: ESTs C22657(S0014),C22656(S0014) correspond to a of the predicted gene.~Similar to receptor protein kinase, ERECTA
  misc_feature (1)..(137): Homolog of NCBI NO: 15240720 NR Description: receptor-like protein kinase; protein id:
  misc_feature (1)..(128): Homolog of NCBI NO: 37530386 NR Description: putative protein kinase [Oryza sativa (japonica group)] >gi|18542934|gb|AAK00425.2| Putative protein kinase sativa] >gi|31429780|gb|AAP51782.1| putative protein kinase
  misc_feature (1)..(128): Homolog of NCBI NO: 10177448 NR Description: receptor-like protein kinase [Arabidopsis
MESGSLWDVLHEGSSKKNKLDWVTRLRIALGAAQGLAYLHHDCSPRIIHRDVKSKNILLDKDYEAHLTDFGIAKSLCVSKTHTSTYVMGTIGYIDPEYARTSRLNEKSDVYSYGIVLLELLTGKKPVDNECNLHHLVTILQSPAFVELEVGSRFLLFTSLWIPAVPNNC

SEQ ID NO: 14725 - DNA, 657 bp, Zea mays subsp. mays
  misc_feature (1)..(657): Ceres Seq. ID no. 3632567
  misc_feature: MA Experiment ID: 20000534 Result: Down-regulated in Transcription
  misc_feature: MA Experiment 20000534 PARAMETER Experiment Name: Zm_Hybrid_Pollen_P Parameter: Age (day) Value: 8
  misc_feature: MA Experiment 20000534 PARAMETER Experiment Name: Zm_Hybrid_Pollen_P Parameter: Organism Value: Zea mays
  misc_feature: MA Experiment 20000534 PARAMETER Experiment Name: Zm_Hybrid_Pollen_P Parameter: Plant Line Value: 35A19
  misc_feature: MA Experiment 20000534 PARAMETER Experiment Name: Zm_Hybrid_Pollen_P Parameter: Tissue Value: Pollen vs. Aerial
aacattcacagtccgcaggccgcagcagctgaatttcgaaggagactgtttcataaacaggagccaggcaccggactttccaggaggataccacctcccgaacatggtgcgtcgacgacccgccaccggggcagccccgagaccccacctcgccgccgtcggtcgcgggctgctcctcgcgtccgtcctcgcggccgctgcctcctccctcccagtagccgagtcgtcctgcccgcgagacaactcactggtgagagacataagccgaatgcagcagcgcaactacgggagggaaggattctcgcatataactgtcacaggtgctcttgctcacgggacgaaggaggtggaagtgtggctacaaacatttggtccaggtcaaaggaccccaatccacaggcattcttgtgaagaggttttcattgtcctcaaggggaaaggcacgctcttactcgggtcgagctcgctgaagtacccaggacagccgcaggaagttcctgtctttcagaataccacattttcgatccctgtaaatgatccacatcaggtctggaattctaatgagcacgaagatttgcaagttcttgtgatcatatcgcgcccaccggtcaagattggcatctcctgttacagatttatatacgatgattggagtat

SEQ ID NO: 14726 - protein, 218 aa, Zea mays subsp. mays
  peptide (1)..(218): Ceres Seq. ID no. 3632568
  misc_feature (73)..(217): Pfam Name: Auxin binding protein Pfam Description: Auxin binding protein
  misc_feature (35)..(217): Homolog of NCBI NO: 461451 NR Description: AUXIN-BINDING PROTEIN 4 PRECURSOR (ABP)
  misc_feature (35)..(184): Homolog of NCBI NO: 461452 NR Description: Auxin-binding protein 5 precursor (ABP) (ERABP5)
  misc_feature (51)..(217): Homolog of NCBI NO: 113003 NR Description: Auxin-binding protein 1 precursor (ABP) (ERABP1)
  misc_feature (51)..(217): Homolog of NCBI NO: 168397 NR Description: auxin-binding protein >gi|264278|gb|AAB25115.1|
  misc_feature (51)..(217): Homolog of NCBI NO: 168422 NR Description: auxin-binding protein precursor
  misc_feature (39)..(217): Homolog of NCBI NO: 7442016 NR Description: auxin-binding protein - oat
  misc_feature (76)..(217): Homolog of NCBI NO: 21730833 NR Description: Chain A, Crystal Structure Of Auxin Binding >gi|21730834|pdb|1LR5|B Chain B, Crystal Structure Of Auxin Protein >gi|21730835|pdb|1LR5|C Chain C, Crystal Structure Of
  misc_feature (48)..(217): Homolog of NCBI NO: 33317307 NR Description: auxin binding protein-1 [Helianthus annuus]
  misc_feature (62)..(217): Homolog of NCBI NO: 461449 NR Description: AUXIN-BINDING PROTEIN T85 PRECURSOR (ABP)
  misc_feature (70)..(217): Homolog of NCBI NO: 1050443 NR Description: auxin binding protein 1 [Capsicum annuum]
TFTVRRPQQLNFEGDCFINRSQAPDFPGGYHLPNMVRRRPATGAAPRPHLAAVGRGLLLASVLAAAASSLPVAESSCPRDNSLVRDISRMQQRNYGREGFSHITVTGALAHGTKEVEVWLQTFGPGQRTPIHRHSCEEVFIVLKGKGTLLLGSSSLKYPGQPQEVPVFQNTTFSIPVNDPHQVWNSNEHEDLQVLVIISRPPVKIGISCYRFIYDDWS

SEQ ID NO: 14727 - protein, 184 aa, Zea mays subsp. mays
  peptide (1)..(184): Ceres Seq. ID no. 3632569
  misc_feature (39)..(183): Pfam Name: Auxin binding protein Pfam Description: Auxin binding protein
  misc_feature (1)..(183): Homolog of NCBI NO: 461451 NR Description: AUXIN-BINDING PROTEIN 4 PRECURSOR (ABP)
  misc_feature (1)..(150): Homolog of NCBI NO: 461452 NR Description: Auxin-binding protein 5 precursor (ABP) (ERABP5)
  misc_feature (17)..(183): Homolog of NCBI NO: 113003 NR Description: Auxin-binding protein 1 precursor (ABP) (ERABP1)
  misc_feature (17)..(183): Homolog of NCBI NO: 168397 NR Description: auxin-binding protein >gi|264278|gb|AAB25115.1|
  misc_feature (17)..(183): Homolog of NCBI NO: 168422 NR Description: auxin-binding protein precursor
  misc_feature (5)..(183): Homolog of NCBI NO: 7442016 NR Description: auxin-binding protein - oat
  misc_feature (42)..(183): Homolog of NCBI NO: 21730833 NR Description: Chain A, Crystal Structure Of Auxin Binding >gi|21730834|pdb|1LR5|B Chain B, Crystal Structure Of Auxin Protein >gi|21730835|pdb|1LR5|C Chain C, Crystal Structure Of
  misc_feature (14)..(183): Homolog of NCBI NO: 33317307 NR Description: auxin binding protein-1 [Helianthus annuus]
  misc_feature (28)..(183): Homolog of NCBI NO: 461449 NR Description: AUXIN-BINDING PROTEIN T85 PRECURSOR (ABP)
  misc_feature (36)..(183): Homolog of NCBI NO: 1050443 NR Description: auxin binding protein 1 [Capsicum annuum]
MVRRRPATGAAPRPHLAAVGRGLLLASVLAAAASSLPVAESSCPRDNSLVRDISRMQQRNYGREGFSHITVTGALAHGTKEVEVWLQTFGPGQRTPIHRHSCEEVFIVLKGKGTLLLGSSSLKYPGQPQEVPVFQNTTFSIPVNDPHQVWNSNEHEDLQVLVIISRPPVKIGISCYRFIYDDWS

SEQ ID NO: 14728 - protein, 136 aa, Zea mays subsp. mays
  peptide (1)..(136): Ceres Seq. ID no. 3632570
NIHSPQAAAAEFRRRLFHKQEPGTGLSRRIPPPEHGASTTRHRGSPETPPRRRRSRAAPRVRPRGRCLLPPSSRVVLPARQLTGERHKPNAAAQLREGRILAYNCHRCSCSRDEGGGSVATNIWSRSKDPNPQAFL

SEQ ID NO: 14729 - DNA, 483 bp, Zea mays subsp. mays
  misc_feature (1)..(483): Ceres Seq. ID no. 5761972
  misc_feature: MA Experiment ID: 108523 Result: Down-regulated in Transcription
  misc_feature: MA Experiment 108523 PARAMETER Experiment Name: Zm_42deg_Heat_P Parameter: Age (day) Value: 8
  misc_feature: MA Experiment 108523 PARAMETER Experiment Name: Zm_42deg_Heat_P Parameter: Organism Value: Zea mays
  misc_feature: MA Experiment 108523 PARAMETER Experiment Name: Zm_42deg_Heat_P Parameter: Plant Line Value: 35A19
  misc_feature: MA Experiment 108523 PARAMETER Experiment Name: Zm_42deg_Heat_P Parameter: Temperature (deg C) Value: 42 vs. 22
  misc_feature: MA Experiment 108523 PARAMETER Experiment Name: Zm_42deg_Heat_P Parameter: Timepoint (hr) Value: 6
  misc_feature: MA Experiment 108523 PARAMETER Experiment Name: Zm_42deg_Heat_P Parameter: Tissue Value: Aerial
  misc_feature: MA Experiment ID: 108543 Result: Up-regulated in Transcription
aatgaagatcctcacggaaaggggttattccttcaccacgacggcagaacgggaaatcgtgagagacataaaggagaagctggcctttgtcgccctagactacgagcaggagctggagaccgctaagagcagctcctccgtcgagaagagctacgagctgcccgatgggcaggtcatcacgatcggcgcggagaggttcagatgcccagaggtgcttttccagccgtcgctgatcgggatggaagctcccggcatccacgagaccacctacaactcgatcatgaaatgtgacgttgatatcargaaggacctgtacgggaacatcgtcctcagtggagggacgaccatgttccctggcatcgctgacaggatgagcaaggagattactgccctcgcaccgagcagcatgaagatcaaggtcgtggcgcctcctgagagaaaatacagtgtctggattggtggctcgatccttgcgtcgctcag

SEQ ID NO: 14730 - protein, 160 aa, Zea mays subsp. mays
  peptide (1)..(160): Ceres Seq. ID no. 5761973
  misc_feature (1)..(159): Pfam Name: Actin Pfam Description: Actin
  misc_feature (1)..(159): Homolog of NCBI NO: 40714662 NR Description: actin [Oryza sativa (japonica cultivar-group)]
  misc_feature (1)..(159): Homolog of NCBI NO: 1498382 NR Description: actin [Zea mays]
  misc_feature (1)..(159): Homolog of NCBI NO: 37535954 NR Description: actin [Oryza sativa (japonica cultivar-group)]
  misc_feature (1)..(159): Homolog of NCBI NO: 1498388 NR Description: actin [Zea mays]
  misc_feature (1)..(159): Homolog of NCBI NO: 15242516 NR Description: ACTIN 2/7 (sp|P53492); protein id: At5g09810.1, by cDNA: gi_1049306, supported by cDNA: gi_17065251, supported by gi_17381047, supported by cDNA: gi_20465864 [Arabidopsis
  misc_feature (1)..(159): Homolog of NCBI NO: 11276972 NR Description: actin [imported] - rape
  misc_feature (1)..(159): Homolog of NCBI NO: 15076949 NR Description: actin [Musa x paradisiaca]
  misc_feature (1)..(159): Homolog of NCBI NO: 9965319 NR Description: actin [Setaria italica]
  misc_feature (1)..(159): Homolog of NCBI NO: 3219761 NR Description: ACTIN 66 >gi|1498351|gb|AAB40087.1| actin
  misc_feature (1)..(159): Homolog of NCBI NO: 11276968 NR Description: actin [imported] - Picea rubens
  misc_feature (101)..(101): Xaa is any aa, unknown or other
MKILTERGYSFTTTAEREIVRDIKEKLAFVALDYEQELETAKSSSSVEKSYELPDGQVITIGAERFRCPEVLFQPSLIGMEAPGIHETTYNSIMKCDVDIXKDLYGNIVLSGGTTMFPGIADRMSKEITALAPSSMKIKVVAPPERKYSVWIGGSILASL

SEQ ID NO: 14731 - protein, 81 aa, Zea mays subsp. mays
  peptide (1)..(81): Ceres Seq. ID no. 5761974
  misc_feature (1)..(80): Pfam Name: Actin Pfam Description: Actin
  misc_feature (1)..(80): Homolog of NCBI NO: 40714662 NR Description: actin [Oryza sativa (japonica cultivar-group)]
  misc_feature (1)..(80): Homolog of NCBI NO: 1498382 NR Description: actin [Zea mays]
  misc_feature (1)..(80): Homolog of NCBI NO: 37535954 NR Description: actin [Oryza sativa (japonica cultivar-group)]
  misc_feature (1)..(80): Homolog of NCBI NO: 1498388 NR Description: actin [Zea mays]
  misc_feature (1)..(80): Homolog of NCBI NO: 15242516 NR Description: ACTIN 2/7 (sp|P53492); protein id: At5g09810.1, by cDNA: gi_1049306, supported by cDNA: gi_17065251, supported by gi_17381047, supported by cDNA: gi_20465864 [Arabidopsis
  misc_feature (1)..(80): Homolog of NCBI NO: 11276972 NR Description: actin [imported] - rape
  misc_feature (1)..(80): Homolog of NCBI NO: 15076949 NR Description: actin [Musa x paradisiaca]
  misc_feature (1)..(80): Homolog of NCBI NO: 9965319 NR Description: actin [Setaria italica]
  misc_feature (1)..(80): Homolog of NCBI NO: 3219761 NR Description: ACTIN 66 >gi|1498351|gb|AAB40087.1| actin
  misc_feature (1)..(80): Homolog of NCBI NO: 11276968 NR Description: actin [imported] - Picea rubens
  misc_feature (22)..(22): Xaa is any aa, unknown or other
MEAPGIHETTYNSIMKCDVDIXKDLYGNIVLSGGTTMFPGIADRMSKEITALAPSSMKIKVVAPPERKYSVWIGGSILASL

SEQ ID NO: 14732 - DNA, 505 bp, Zea mays subsp. mays
  misc_feature (1)..(505): Ceres Seq. ID no. 3632665
  misc_feature: MA Experiment ID: 108522 Result: Up-regulated in Transcription
  misc_feature: MA Experiment 108522 PARAMETER Experiment Name: Zm_42deg_Heat_P Parameter: Age (day) Value: 8
  misc_feature: MA Experiment 108522 PARAMETER Experiment Name: Zm_42deg_Heat_P Parameter: Organism Value: Zea mays
  misc_feature: MA Experiment 108522 PARAMETER Experiment Name: Zm_42deg_Heat_P Parameter: Plant Line Value: 35A19
  misc_feature: MA Experiment 108522 PARAMETER Experiment Name: Zm_42deg_Heat_P Parameter: Temperature (deg C) Value: 42 vs. 22
  misc_feature: MA Experiment 108522 PARAMETER Experiment Name: Zm_42deg_Heat_P Parameter: Timepoint (hr) Value: 1
  misc_feature: MA Experiment 108522 PARAMETER Experiment Name: Zm_42deg_Heat_P Parameter: Tissue Value: Aerial
  misc_feature: MA Experiment ID: 108556 Result: Up-regulated in Transcription
  misc_feature: MA Experiment 108556 PARAMETER Experiment Name: Zm_Drought_P Parameter: Age (day) Value: 9
  misc_feature: MA Experiment 108556 PARAMETER Experiment Name: Zm_Drought_P Parameter: Organism Value: Zea mays
  misc_feature: MA Experiment 108556 PARAMETER Experiment Name: Zm_Drought_P Parameter: Plant Line Value: 35A19
  misc_feature: MA Experiment 108556 PARAMETER Experiment Name: Zm_Drought_P Parameter: Timepoint (hr) Value: 24
  misc_feature: MA Experiment 108556 PARAMETER Experiment Name: Zm_Drought_P Parameter: Tissue Value: Aerial
  misc_feature: MA Experiment 108556 PARAMETER Experiment Name: Zm_Drought_P Parameter: Treatment Value: Drought vs. No Drought
  misc_feature: MA Experiment ID: 108689 Result: Up-regulated in Transcription
  misc_feature: MA Experiment 108689 PARAMETER Experiment Name: Zm_Drought_Roots_P Parameter: Age (day) Value: 9
  misc_feature: MA Experiment 108689 PARAMETER Experiment Name: Zm_Drought_Roots_P Parameter: Organism Value: Zea mays
  misc_feature: MA Experiment 108689 PARAMETER Experiment Name: Zm_Drought_Roots_P Parameter: Plant Line Value: 35A19
  misc_feature: MA Experiment 108689 PARAMETER Experiment Name: Zm_Drought_Roots_P Parameter: Timepoint (hr) Value: 24
  misc_feature: MA Experiment 108689 PARAMETER Experiment Name: Zm_Drought_Roots_P Parameter: Tissue Value: Roots
  misc_feature: MA Experiment 108689 PARAMETER Experiment Name: Zm_Drought_Roots_P Parameter: Treatment Value: Drought vs. No Drought
  misc_feature: MA Experiment ID: 20000480 Result: Up-regulated in Transcription
  misc_feature: MA Experiment 20000480 PARAMETER Experiment Name: Zm_Drought_P Parameter: Age (day) Value: 11
  misc_feature: MA Experiment 20000480 PARAMETER Experiment Name: Zm_Drought_P Parameter: Organism Value: Zea mays
  misc_feature: MA Experiment 20000480 PARAMETER Experiment Name: Zm_Drought_P Parameter: Plant Line Value: 35A19
  misc_feature: MA Experiment 20000480 PARAMETER Experiment Name: Zm_Drought_P Parameter: Timepoint (hr) Value: 72
  misc_feature: MA Experiment 20000480 PARAMETER Experiment Name: Zm_Drought_P Parameter: Tissue Value: Aerial
  misc_feature: MA Experiment 20000480 PARAMETER Experiment Name: Zm_Drought_P Parameter: Treatment Value: Drought vs. No Drought
tgcgcatcgcacagttccaccagcatctggcagagaagctggacctggacatgtcggccctgcaatacatgatgaaggaataccctgggaacgaagaagagcggatgagagccgcagttggtaagtttgggctgtcagggaaggctcaggtgatgccgatgaggaatctgtctgacgggcagaggagccgtgtcatctttgcgtggctggcatacaggcagccgcagctattgctgctggacgagccgacgaaccatcttgatatcgagaccatcgactccctagcggaggcgctgaacgagtgggacggcggtctggtcctggtgagccatgacttcaggctgatcaaccaggttgctcatgagatctgggtttgtgagaatcaggcagtgacaaggtgggaaggcgatatcmtggatttcaaggagcacttgrraagcaaggcttgkctatcggattaaagggaavgccttggctttccttaccttctctttggagatgkatt

SEQ ID NO: 14733 - protein, 152 aa, Zea mays subsp. mays
  peptide (1)..(152): Ceres Seq. ID no. 3632666
  misc_feature (1)..(128): Pfam Name: ABC transporter Pfam Description: ABC transporter
  misc_feature (1)..(152): Homolog of NCBI NO: 28071305 NR Description: putative ABC transporter [Oryza sativa (japonica
  misc_feature (1)..(152): Homolog of NCBI NO: 15239436 NR Description: ABC transporter family protein; protein id: [Arabidopsis thaliana] >gi|10176907|dbj|BAB10100.1| ABC
  misc_feature (1)..(147): Homolog of NCBI NO: 17861928 NR Description: GM14873p [Drosophila melanogaster]
  misc_feature (1)..(147): Homolog of NCBI NO: 18859989 NR Description: CG9281-PB [Drosophila melanogaster]
  misc_feature (1)..(147): Homolog of NCBI NO: 3005931 NR Description: ABC transporter [Homo sapiens]
  misc_feature (1)..(147): Homolog of NCBI NO: 10179834 NR Description: iron inhibited ABC transporter 2 [Homo sapiens]
  misc_feature (1)..(147): Homolog of NCBI NO: 27707592 NR Description: similar to ATP-binding cassette, sub-family F,
  misc_feature (1)..(147): Homolog of NCBI NO: 27881506 NR Description: ATP-binding cassette, sub-family F, member 2 a; ABC- type transport protein; Iron inhibited ABC transporter 2
  misc_feature (1)..(147): Homolog of NCBI NO: 23956078 NR Description: ATP-binding cassette, sub-family F (GCN20),
  misc_feature (1)..(147): Homolog of NCBI NO: 10947137 NR Description: ATP-binding cassette, sub-family F, member 2 b; ABC- type transport protein; Iron inhibited ABC transporter 2
  misc_feature (138)..(138): Xaa is any aa, unknown or other
  misc_feature (145)..(145): Xaa is any aa, unknown or other
  misc_feature (149)..(149): Xaa is any aa, unknown or other
RIAQFHQHLAEKLDLDMSALQYMMKEYPGNEEERMRAAVGKFGLSGKAQVMPMRNLSDGQRSRVIFAWLAYRQPQLLLLDEPTNHLDIETIDSLAEALNEWDGGLVLVSHDFRLINQVAHEIWVCENQAVTRWEGDIXDFKEHLXSKAXLSD

SEQ ID NO: 14734 - protein, 136 aa, Zea mays subsp. mays
  peptide (1)..(136): Ceres Seq. ID no. 3632667
  misc_feature (1)..(112): Pfam Name: ABC transporter Pfam Description: ABC transporter
  misc_feature (1)..(136): Homolog of NCBI NO: 28071305 NR Description: putative ABC transporter [Oryza sativa (japonica
  misc_feature (1)..(136): Homolog of NCBI NO: 15239436 NR Description: ABC transporter family protein; protein id: [Arabidopsis thaliana] >gi|10176907|dbj|BAB10100.1| ABC
  misc_feature (1)..(131): Homolog of NCBI NO: 17861928 NR Description: GM14873p [Drosophila melanogaster]
  misc_feature (1)..(131): Homolog of NCBI NO: 18859989 NR Description: CG9281-PB [Drosophila melanogaster]
  misc_feature (1)..(131): Homolog of NCBI NO: 3005931 NR Description: ABC transporter [Homo sapiens]
  misc_feature (1)..(131): Homolog of NCBI NO: 10947137 NR Description: ATP-binding cassette, sub-family F, member 2 b; ABC- type transport protein; Iron inhibited ABC transporter 2
  misc_feature (1)..(131): Homolog of NCBI NO: 10179834 NR Description: iron inhibited ABC transporter 2 [Homo sapiens]
  misc_feature (1)..(131): Homolog of NCBI NO: 27881506 NR Description: ATP-binding cassette, sub-family F, member 2 a; ABC- type transport protein; Iron inhibited ABC transporter 2
  misc_feature (1)..(131): Homolog of NCBI NO: 27707592 NR Description: similar to ATP-binding cassette, sub-family F,
  misc_feature (1)..(131): Homolog of NCBI NO: 23956078 NR Description: ATP-binding cassette, sub-family F (GCN20),
  misc_feature (122)..(122): Xaa is any aa, unknown or other
  misc_feature (129)..(129): Xaa is any aa, unknown or other
  misc_feature (133)..(133): Xaa is any aa, unknown or other
MSALQYMMKEYPGNEEERMRAAVGKFGLSGKAQVMPMRNLSDGQRSRVIFAWLAYRQPQLLLLDEPTNHLDIETIDSLAEALNEWDGGLVLVSHDFRLINQVAHEIWVCENQAVTRWEGDIXDFKEHLXSKAXLSD

SEQ ID NO: 14735 - protein, 130 aa, Zea mays subsp. mays
  peptide (1)..(130): Ceres Seq. ID no. 3632668
  misc_feature (1)..(106): Pfam Name: ABC transporter Pfam Description: ABC transporter
  misc_feature (1)..(130): Homolog of NCBI NO: 28071305 NR Description: putative ABC transporter [Oryza sativa (japonica
  misc_feature (1)..(130): Homolog of NCBI NO: 15239436 NR Description: ABC transporter family protein; protein id: [Arabidopsis thaliana] >gi|10176907|dbj|BAB10100.1| ABC
  misc_feature (1)..(125): Homolog of NCBI NO: 17861928 NR Description: GM14873p [Drosophila melanogaster]
  misc_feature (1)..(125): Homolog of NCBI NO: 18859989 NR Description: CG9281-PB [Drosophila melanogaster]
  misc_feature (1)..(125): Homolog of NCBI NO: 3005931 NR Description: ABC transporter [Homo sapiens]
  misc_feature (1)..(125): Homolog of NCBI NO: 27881506 NR Description: ATP-binding cassette, sub-family F, member 2 a; ABC- type transport protein; Iron inhibited ABC transporter 2
  misc_feature (1)..(125): Homolog of NCBI NO: 27707592 NR Description: similar to ATP-binding cassette, sub-family F,
  misc_feature (1)..(125): Homolog of NCBI NO: 23956078 NR Description: ATP-binding cassette, sub-family F (GCN20),
  misc_feature (1)..(125): Homolog of NCBI NO: 10179834 NR Description: iron inhibited ABC transporter 2 [Homo sapiens]
  misc_feature (1)..(125): Homolog of NCBI NO: 10947137 NR Description: ATP-binding cassette, sub-family F, member 2 b; ABC- type transport protein; Iron inhibited ABC transporter 2
  misc_feature (116)..(116): Xaa is any aa, unknown or other
  misc_feature (123)..(123): Xaa is any aa, unknown or other
  misc_feature (127)..(127): Xaa is any aa, unknown or other
MMKEYPGNEEERMRAAVGKFGLSGKAQVMPMRNLSDGQRSRVIFAWLAYRQPQLLLLDEPTNHLDIETIDSLAEALNEWDGGLVLVSHDFRLINQVAHEIWVCENQAVTRWEGDIXDFKEHLXSKAXLSD

SEQ ID NO: 14736 - DNA, 966 bp, Zea mays subsp. mays
  misc_feature (1)..(966): Ceres Seq. ID no. 12467954
  misc_feature: MA Experiment ID: 108535 Result: Up-regulated in Transcription
  misc_feature: MA Experiment 108535 PARAMETER Experiment Name: Zm_Meristem_P Parameter: Age (day) Value: 8
  misc_feature: MA Experiment 108535 PARAMETER Experiment Name: Zm_Meristem_P Parameter: Organism Value: Zea mays
  misc_feature: MA Experiment 108535 PARAMETER Experiment Name: Zm_Meristem_P Parameter: Plant Line Value: 35A19
  misc_feature: MA Experiment 108535 PARAMETER Experiment Name: Zm_Meristem_P Parameter: Tissue Value: Root Meristem vs. Above Root Meristem
  misc_feature: MA Experiment ID: 108544 Result: Down-regulated in Transcription
  misc_feature: MA Experiment ID: 20000108 Result: Up-regulated in Transcription
  misc_feature: MA Experiment 20000108 PARAMETER Experiment Name: Zm_Root-Tips_P Parameter: Age (day) Value: 12
  misc_feature: MA Experiment 20000108 PARAMETER Experiment Name: Zm_Root-Tips_P Parameter: Organism Value: Zea mays
  misc_feature: MA Experiment 20000108 PARAMETER Experiment Name: Zm_Root-Tips_P Parameter: Tissue Value: Root tips vs. Root mid region    35
  misc_feature: MA Experiment 20000108 PARAMETER Experiment Name: Zm_Root-Tips_P Parameter: Tissue Value: Root tips vs. Root mid region   Sequence Listing-Misc Features (4)
  misc_feature: MA Experiment ID: 20000478 Result: Down-regulated in Transcription
  misc_feature: MA Experiment 20000478 PARAMETER Experiment Name: Zm_5mM_SA_P Parameter: Age (day) Value: 11
  misc_feature: MA Experiment 20000478 PARAMETER Experiment Name: Zm_5mM_SA_P Parameter: Organism Value: Zea mays
  misc_feature: MA Experiment 20000478 PARAMETER Experiment Name: Zm_5mM_SA_P Parameter: Plant Line Value: 35A19
  misc_feature: MA Experiment 20000478 PARAMETER Experiment Name: Zm_5mM_SA_P Parameter: Timepoint (hr) Value: 72
  misc_feature: MA Experiment 20000478 PARAMETER Experiment Name: Zm_5mM_SA_P Parameter: Tissue Value: Aerial
  misc_feature: MA Experiment 20000478 PARAMETER Experiment Name: Zm_5mM_SA_P Parameter: Treatment Value: 5mM SA vs. No Treatment
tctactttgattttgagcatttgaagcaatctgcgtccgtgattgaccagagccagttctggcaagattggggacagtggcacaagaaagataggctcaagaacttctacactgaagacatcaggatgaccccaatgaaacttcgtgacatcaaggacacattgatcatgaggaagtttgggaatgttgagcctgataactattggtcacgtgtgtgcgagggtgagactgagggaataatcaagcgcccatggcatttcctgtggaaatctcgtcgcttgatggagattgtatctgccattgcctcacggatgaactgggactttgactcggtccatgttgtcagaggggagaaagcgcagaacacacaactttggccaaaccttgacagagatacctcaccagacagtctccttatggcacttaatgataaggttggtgctggccggtatttgtacattgctaccaatgaacctgacaaatcgttctttaacccactcaaggaaaagtataaaacacacttccttgatgatttcaagtacctgtgggatgagaatagtgagtggttcactgaaactaaggagctgagcaatggtcagccagtagaatttgatggctatatgaggattgcagttgacactgaggtattcttgagggggaagaggcatgtggagacattcaacgagcttacacgtgattgcaaggatggcgtgaatacatgctcagcttcttcctgaacatttggtgggctaaggtgagctgatactatgaaatattatgcttcagaggatattttcgactgtgttattggtgtctcttatgccacgcctagtcttgttgtagctaagtagctggtatcactttttgttataccactgttttgtgtttccagattacattagtacattcagttcatgcattgggcttgtgctgtttagttgaacatgcattattgcagttgtcttc

SEQ ID NO: 14737 - protein, 244 aa, Zea mays subsp. mays
  peptide (1)..(244): Ceres Seq. ID no. 12467955
  misc_feature (1)..(244): Homolog of NCBI NO: 37534994 NR Description: unknown protein [Oryza sativa (japonica
  misc_feature (1)..(244): Homolog of NCBI NO: 15235454 NR Description: putative protein; protein id: At4g12700.1
  misc_feature (1)..(244): Homolog of NCBI NO: 18395698 NR Description: expressed protein; protein id: At2g04280.1, by cDNA: gi_15810336 [Arabidopsis thaliana]
  misc_feature (1)..(240): Homolog of NCBI NO: 15236611 NR Description: putative protein; protein id: At4g08810.1, by cDNA: gi_15912228 [Arabidopsis thaliana]
  misc_feature (1)..(241): Homolog of NCBI NO: 34913308 NR Description: P0519E12.32 [Oryza sativa (japonica
  misc_feature (1)..(224): Homolog of NCBI NO: 34909040 NR Description: P0034E02.33 [Oryza sativa (japonica
  misc_feature (68)..(198): Homolog of NCBI NO: 33146641 NR Description: unknown protein [Oryza sativa (japonica
  misc_feature (68)..(183): Homolog of NCBI NO: 15229000 NR Description: putative protein; protein id: At3g56750.1, by cDNA: gi_16648896, supported by cDNA: gi_20453218 [Arabidopsis
  misc_feature (68)..(183): Homolog of NCBI NO: 15226842 NR Description: hypothetical protein; protein id: At2g41150.1
  misc_feature (68)..(183): Homolog of NCBI NO: 21805729 NR Description: hypothetical protein [Arabidopsis thaliana]
YFDFEHLKQSASVIDQSQFWQDWGQWHKKDRLKNFYTEDIRMTPMKLRDIKDTLIMRKFGNVEPDNYWSRVCEGETEGIIKRPWHFLWKSRRLMEIVSAIASRMNWDFDSVHVVRGEKAQNTQLWPNLDRDTSPDSLLMALNDKVGAGRYLYIATNEPDKSFFNPLKEKYKTHFLDDFKYLWDENSEWFTETKELSNGQPVEFDGYMRIAVDTEVFLRGKRHVETFNELTRDCKDGVNTCSASS

SEQ ID NO: 14738 - protein, 203 aa, Zea mays subsp. mays
  peptide (1)..(203): Ceres Seq. ID no. 12467956
  misc_feature (1)..(203): Homolog of NCBI NO: 37534994 NR Description: unknown protein [Oryza sativa (japonica
  misc_feature (1)..(203): Homolog of NCBI NO: 15235454 NR Description: putative protein; protein id: At4g12700.1
  misc_feature (1)..(203): Homolog of NCBI NO: 18395698 NR Description: expressed protein; protein id: At2g04280.1, by cDNA: gi_15810336 [Arabidopsis thaliana]
  misc_feature (1)..(199): Homolog of NCBI NO: 15236611 NR Description: putative protein; protein id: At4g08810.1, by cDNA: gi_15912228 [Arabidopsis thaliana]
  misc_feature (1)..(200): Homolog of NCBI NO: 34913308 NR Description: P0519E12.32 [Oryza sativa (japonica
  misc_feature (1)..(183): Homolog of NCBI NO: 34909040 NR Description: P0034E02.33 [Oryza sativa (japonica
  misc_feature (27)..(157): Homolog of NCBI NO: 33146641 NR Description: unknown protein [Oryza sativa (japonica
  misc_feature (27)..(142): Homolog of NCBI NO: 15229000 NR Description: putative protein; protein id: At3g56750.1, by cDNA: gi_16648896, supported by cDNA: gi_20453218 [Arabidopsis
  misc_feature (27)..(142): Homolog of NCBI NO: 15226842 NR Description: hypothetical protein; protein id: At2g41150.1
  misc_feature (27)..(142): Homolog of NCBI NO: 21805729 NR Description: hypothetical protein [Arabidopsis thaliana]
MTPMKLRDIKDTLIMRKFGNVEPDNYWSRVCEGETEGIIKRPWHFLWKSRRLMEIVSAIASRMNWDFDSVHVVRGEKAQNTQLWPNLDRDTSPDSLLMALNDKVGAGRYLYIATNEPDKSFFNPLKEKYKTHFLDDFKYLWDENSEWFTETKELSNGQPVEFDGYMRIAVDTEVFLRGKRHVETFNELTRDCKDGVNTCSASS

SEQ ID NO: 14739 - protein, 200 aa, Zea mays subsp. mays
  peptide (1)..(200): Ceres Seq. ID no. 12467957
  misc_feature (1)..(200): Homolog of NCBI NO: 37534994 NR Description: unknown protein [Oryza sativa (japonica
  misc_feature (1)..(200): Homolog of NCBI NO: 15235454 NR Description: putative protein; protein id: At4g12700.1
  misc_feature (1)..(200): Homolog of NCBI NO: 18395698 NR Description: expressed protein; protein id: At2g04280.1, by cDNA: gi_15810336 [Arabidopsis thaliana]
  misc_feature (1)..(196): Homolog of NCBI NO: 15236611 NR Description: putative protein; protein id: At4g08810.1, by cDNA: gi_15912228 [Arabidopsis thaliana]
  misc_feature (1)..(197): Homolog of NCBI NO: 34913308 NR Description: P0519E12.32 [Oryza sativa (japonica
  misc_feature (1)..(180): Homolog of NCBI NO: 34909040 NR Description: P0034E02.33 [Oryza sativa (japonica
  misc_feature (24)..(154): Homolog of NCBI NO: 33146641 NR Description: unknown protein [Oryza sativa (japonica
  misc_feature (24)..(139): Homolog of NCBI NO: 15229000 NR Description: putative protein; protein id: At3g56750.1, by cDNA: gi_16648896, supported by cDNA: gi_20453218 [Arabidopsis
  misc_feature (24)..(139): Homolog of NCBI NO: 15226842 NR Description: hypothetical protein; protein id: At2g41150.1
  misc_feature (24)..(139): Homolog of NCBI NO: 21805729 NR Description: hypothetical protein [Arabidopsis thaliana]
MKLRDIKDTLIMRKFGNVEPDNYWSRVCEGETEGIIKRPWHFLWKSRRLMEIVSAIASRMNWDFDSVHVVRGEKAQNTQLWPNLDRDTSPDSLLMALNDKVGAGRYLYIATNEPDKSFFNPLKEKYKTHFLDDFKYLWDENSEWFTETKELSNGQPVEFDGYMRIAVDTEVFLRGKRHVETFNELTRDCKDGVNTCSASS

SEQ ID NO: 14740 - DNA, 638 bp, Zea mays subsp. mays
  misc_feature (1)..(638): Ceres Seq. ID no. 12468946
  misc_feature: MA Experiment ID: 108535 Result: Down-regulated in Transcription
  misc_feature: MA Experiment 108535 PARAMETER Experiment Name: Zm_Meristem_P Parameter: Age (day) Value: 8
  misc_feature: MA Experiment 108535 PARAMETER Experiment Name: Zm_Meristem_P Parameter: Organism Value: Zea mays
  misc_feature: MA Experiment 108535 PARAMETER Experiment Name: Zm_Meristem_P Parameter: Plant Line Value: 35A19
  misc_feature: MA Experiment 108535 PARAMETER Experiment Name: Zm_Meristem_P Parameter: Tissue Value: Root Meristem vs. Above Root Meristem
aaaccgcagaagccagatctgcctctcctttttcgacgagaaacacagacaccctggttggtttgtcaacaaaacagagcgcatctattgggagcaatggttcatcaatttgcaagtcatgttccccaaaagatacagcaagtcaaacagctccaaagggctgacaaacatccaagcaaatgccgtggaggagaccagcacaaggcgtgctgcattggaggcgtcgattaacgaagtgctgttccagatcataaagttcgccaacgagaaaaaggaccacattcctgctatccctgacaggattttcaatcacgagatcatgatcccaagctcggattctgtatttggatggaacacggacgtcattcgcagagttctgaatagcgggcacccatactcgctttaactgaagacgacatctcagtgggcgcccgtattcagtttattagcgtgctgccgccctgtttggaagacggctctgttaaccatcgtggtgaaccatataatatgcctaaggaaaaacctagttctgtgtacatcaccctgctcatctggcatgtacatactgtgttgggatcttgctcatcggtcaaacattnttaagttcgattaagtttataaataacaatattatgatt

SEQ ID NO: 14741 - protein, 134 aa, Zea mays subsp. mays
  peptide (1)..(134): Ceres Seq. ID no. 12468947
  misc_feature (1)..(134): Homolog of NCBI NO: 30698268 NR Description: expressed protein [Arabidopsis thaliana]
  misc_feature (1)..(109): Homolog of NCBI NO: 9758143 NR Description: gene_id:MUD21.19~pir||T38383~similar to unknown
  misc_feature (1)..(52): Homolog of NCBI NO: 30698266 NR Description: expressed protein [Arabidopsis thaliana]
  misc_feature (1)..(52): Homolog of NCBI NO: 15810345 NR Description: unknown protein [Arabidopsis thaliana]
NRRSQICLSFFDEKHRHPGWFVNKTERIYWEQWFINLQVMFPKRYSKSNSSKGLTNIQANAVEETSTRRAALEASINEVLFQIIKFANEKKDHIPAIPDRIFNHEIMIPSSDSVFGWNTDVIRRVLNSGHPYSL

SEQ ID NO: 14742 - protein, 95 aa, Zea mays subsp. mays
  peptide (1)..(95): Ceres Seq. ID no. 12468948
  misc_feature (1)..(95): Homolog of NCBI NO: 30698268 NR Description: expressed protein [Arabidopsis thaliana]
  misc_feature (1)..(70): Homolog of NCBI NO: 9758143 NR Description: gene_id:MUD21.19~pir||T38383~similar to unknown
  misc_feature (1)..(13): Homolog of NCBI NO: 30698266 NR Description: expressed protein [Arabidopsis thaliana]
  misc_feature (1)..(13): Homolog of NCBI NO: 15810345 NR Description: unknown protein [Arabidopsis thaliana]
MFPKRYSKSNSSKGLTNIQANAVEETSTRRAALEASINEVLFQIIKFANEKKDHIPAIPDRIFNHEIMIPSSDSVFGWNTDVIRRVLNSGHPYSL

SEQ ID NO: 14743 - protein, 76 aa, Zea mays subsp. mays
  peptide (1)..(76): Ceres Seq. ID no. 12468949
KPQKPDLPLLFRRETQTPWLVCQQNRAHLLGAMVHQFASHVPQKIQQVKQLQRADKHPSKCRGGDQHKACCIGGVD

SEQ ID NO: 14744 - DNA, 693 bp, Zea mays subsp. mays
  misc_feature (1)..(693): Ceres Seq. ID no. 12462542
  misc_feature: MA Experiment ID: 108522 Result: Up-regulated in Transcription
  misc_feature: MA Experiment 108522 PARAMETER Experiment Name: Zm_42deg_Heat_P Parameter: Age (day) Value: 8
  misc_feature: MA Experiment 108522 PARAMETER Experiment Name: Zm_42deg_Heat_P Parameter: Organism Value: Zea mays
  misc_feature: MA Experiment 108522 PARAMETER Experiment Name: Zm_42deg_Heat_P Parameter: Plant Line Value: 35A19
  misc_feature: MA Experiment 108522 PARAMETER Experiment Name: Zm_42deg_Heat_P Parameter: Temperature (deg C) Value: 42 vs. 22
  misc_feature: MA Experiment 108522 PARAMETER Experiment Name: Zm_42deg_Heat_P Parameter: Timepoint (hr) Value: 1
  misc_feature: MA Experiment 108522 PARAMETER Experiment Name: Zm_42deg_Heat_P Parameter: Tissue Value: Aerial
  misc_feature: MA Experiment ID: 108523 Result: Up-regulated in Transcription
  misc_feature: MA Experiment 108523 PARAMETER Experiment Name: Zm_42deg_Heat_P Parameter: Age (day) Value: 8
  misc_feature: MA Experiment 108523 PARAMETER Experiment Name: Zm_42deg_Heat_P Parameter: Organism Value: Zea mays
  misc_feature: MA Experiment 108523 PARAMETER Experiment Name: Zm_42deg_Heat_P Parameter: Plant Line Value: 35A19
  misc_feature: MA Experiment 108523 PARAMETER Experiment Name: Zm_42deg_Heat_P Parameter: Temperature (deg C) Value: 42 vs. 22
  misc_feature: MA Experiment 108523 PARAMETER Experiment Name: Zm_42deg_Heat_P Parameter: Timepoint (hr) Value: 6
  misc_feature: MA Experiment 108523 PARAMETER Experiment Name: Zm_42deg_Heat_P Parameter: Tissue Value: Aerial
  misc_feature: MA Experiment ID: 20000534 Result: Up-regulated in Transcription
  misc_feature: MA Experiment 20000534 PARAMETER Experiment Name: Zm_Hybrid_Pollen_P Parameter: Age (day) Value: 8
  misc_feature: MA Experiment 20000534 PARAMETER Experiment Name: Zm_Hybrid_Pollen_P Parameter: Organism Value: Zea mays
  misc_feature: MA Experiment 20000534 PARAMETER Experiment Name: Zm_Hybrid_Pollen_P Parameter: Plant Line Value: 35A19
  misc_feature: MA Experiment 20000534 PARAMETER Experiment Name: Zm_Hybrid_Pollen_P Parameter: Tissue Value: Pollen vs. Aerial
gctcgcctctgatctctgcgtcatcgaggagatcaggatacgcccgttcgaagctacttttcagcatggccatccgatttactcttcgaaggcggtgagaatccggctgggtcattccaagcttgaccctggaagagagacttttgtttcggatgaggatgagaacctgactgcgatcgctgatgagaactacatgtggacatacacgtcgccagagtttcctatgcttcaggaaaatgtgttgcaaaccttcaagcttccacgcccggctctttgcattggtggtatagtgaagattgaactactggggaggatacagaaacaatttacagatgataagtattacatatgtgtctgccatgtccaagtgacggggcgctcgctctcaccagatttaatgatagacctctccgatcctgctggttactcgaacctcaagtatctgccgggtgccggtaacttgcgcccagaagacctaatcagcattgacgccaaggactcaccggactggcgctcgcttgtttccaggtacaggcagatgaggcaactggctatggtgtacatgctgcttggacccgtgcagttgcagtttatggatgaagacgaagctgacttgcagatgtaggctttgttttccctgaatccgatnttgtgtatcctaattgaacagagcttgctntgataaatatagcg

SEQ ID NO: 14745 - protein, 207 aa, Zea mays subsp. mays
  peptide (1)..(207): Ceres Seq. ID no. 12462543
  misc_feature (1)..(204): Homolog of NCBI NO: 18411435 NR Description: F-box protein family; protein id: At4g00755.1, by cDNA: 111069. [Arabidopsis thaliana]
  misc_feature (1)..(204): Homolog of NCBI NO: 28393062 NR Description: putative F-box protein [Arabidopsis thaliana]
  misc_feature (69)..(135): Homolog of NCBI NO: 18308222 NR Description: unknown protein [Oryza sativa]
  misc_feature (68)..(148): Homolog of NCBI NO: 28850404 NR Description: hypothetical protein [Dictyostelium discoideum]
  misc_feature (1)..(39): Homolog of NCBI NO: 28850404 NR Description: hypothetical protein [Dictyostelium discoideum]
LASDLCVIEEIRIRPFEATFQHGHPIYSSKAVRIRLGHSKLDPGRETFVSDEDENLTAIADENYMWTYTSPEFPMLQENVLQTFKLPRPALCIGGIVKIELLGRIQKQFTDDKYYICVCHVQVTGRSLSPDLMIDLSDPAGYSNLKYLPGAGNLRPEDLISIDAKDSPDWRSLVSRYRQMRQLAMVYMLLGPVQLQFMDEDEADLQM

SEQ ID NO: 14746 - protein, 143 aa, Zea mays subsp. mays
  peptide (1)..(143): Ceres Seq. ID no. 12462544
  misc_feature (1)..(140): Homolog of NCBI NO: 18411435 NR Description: F-box protein family; protein id: At4g00755.1, by cDNA: 111069. [Arabidopsis thaliana]
  misc_feature (1)..(140): Homolog of NCBI NO: 28393062 NR Description: putative F-box protein [Arabidopsis thaliana]
  misc_feature (5)..(71): Homolog of NCBI NO: 18308222 NR Description: unknown protein [Oryza sativa]
  misc_feature (4)..(84): Homolog of NCBI NO: 28850404 NR Description: hypothetical protein [Dictyostelium discoideum]
MWTYTSPEFPMLQENVLQTFKLPRPALCIGGIVKIELLGRIQKQFTDDKYYICVCHVQVTGRSLSPDLMIDLSDPAGYSNLKYLPGAGNLRPEDLISIDAKDSPDWRSLVSRYRQMRQLAMVYMLLGPVQLQFMDEDEADLQM

SEQ ID NO: 14747 - protein, 133 aa, Zea mays subsp. mays
  peptide (1)..(133): Ceres Seq. ID no. 12462545
  misc_feature (1)..(130): Homolog of NCBI NO: 18411435 NR Description: F-box protein family; protein id: At4g00755.1, by cDNA: 111069. [Arabidopsis thaliana]
  misc_feature (1)..(130): Homolog of NCBI NO: 28393062 NR Description: putative F-box protein [Arabidopsis thaliana]
  misc_feature (1)..(61): Homolog of NCBI NO: 18308222 NR Description: unknown protein [Oryza sativa]
  misc_feature (1)..(74): Homolog of NCBI NO: 28850404 NR Description: hypothetical protein [Dictyostelium discoideum]
MLQENVLQTFKLPRPALCIGGIVKIELLGRIQKQFTDDKYYICVCHVQVTGRSLSPDLMIDLSDPAGYSNLKYLPGAGNLRPEDLISIDAKDSPDWRSLVSRYRQMRQLAMVYMLLGPVQLQFMDEDEADLQM

SEQ ID NO: 14748 - DNA, 552 bp, Zea mays subsp. mays
  misc_feature (1)..(552): Ceres Seq. ID no. 12469663
  misc_feature: MA Experiment ID: 20000487 Result: Up-regulated in Transcription
  misc_feature: MA Experiment 20000487 PARAMETER Experiment Name: Zm_50mM_NH4NO3_L_to_H_P Parameter: Organism Value: Zea mays
  misc_feature: MA Experiment 20000487 PARAMETER Experiment Name: Zm_50mM_NH4NO3_L_to_H_P Parameter: Timepoint (hr) Value: 4
  misc_feature: MA Experiment 20000487 PARAMETER Experiment Name: Zm_50mM_NH4NO3_L_to_H_P Parameter: Tissue Value: Leaves
  misc_feature: MA Experiment 20000487 PARAMETER Experiment Name: Zm_50mM_NH4NO3_L_to_H_P Parameter: Treatment Value: 50mM NH4NO3 vs. 100mM Mannitol
cagaggttgaagcactctctatggcacaacatgagaatcttgtgccactatggggttattgtatccagggaaactcgaggctcctcatatattctttcatggagaatgggagtcttgatgattggcttcacaacacggacaatgccaactcatttctagattggccaacaagactcaagattgcacaaggagcaggacggggcctttcttatatccacaacacctgcaaccctaacattgttcaccgtgacgtcaagtccagcaacatcttacttgatagagaattcaatgcttatgtcgctgattttggccttgcaagattgatccttccttacaacacacatgtcacgacagagctagtaggcactcttggttacattcctcccgagtatggacaagcctgggtggccaccctgagaggtgatatatatagttttggagtggtcttgcttgagctgctcacagggaagaggcctgtccaggttttgaccaagacgaaagaacttgtccaatgggtaagagagatgaggtcccaangggaaggatattgag

SEQ ID NO: 14749 - protein, 182 aa, Zea mays subsp. mays
  peptide (1)..(182): Ceres Seq. ID no. 12469664
  misc_feature (1)..(176): Pfam Name: Protein kinase domain Pfam Description: Protein kinase domain
  misc_feature (1)..(176): Homolog of NCBI NO: 15218425 NR Description: leucine-rich repeat transmembrane protein kinase, protein id: At1g72300.1, supported by cDNA: gi_19423987
  misc_feature (1)..(178): Homolog of NCBI NO: 15238872 NR Description: leucine-rich repeat transmembrane protein kinase, protein id: At5g53890.1, supported by cDNA: gi_17381125, by cDNA: gi_20259552 [Arabidopsis thaliana]
  misc_feature (1)..(178): Homolog of NCBI NO: 34899380 NR Description: contains ESTs
  misc_feature (1)..(178): Homolog of NCBI NO: 20197485 NR Description: putative receptor-like protein kinase
  misc_feature (1)..(178): Homolog of NCBI NO: 29427830 NR Description: Phytosulfokine receptor precursor (Phytosulfokine receptor kinase) >gi|21623969|dbj|BAC00995.1| phytosulfokine
  misc_feature (1)..(178): Homolog of NCBI NO: 15227264 NR Description: leucine-rich repeat transmembrane protein kinase, protein id: At2g02220.1 [Arabidopsis thaliana] Putative phytosulfokine receptor precursor (Phytosulfokine LRR
  misc_feature (1)..(175): Homolog of NCBI NO: 38423989 NR Description: putative brassinosteroid receptor [Oryza sativa
  misc_feature (1)..(175): Homolog of NCBI NO: 34906992 NR Description: putative receptor-like protein [Oryza sativa
  misc_feature (1)..(182): Homolog of NCBI NO: 13620226 NR Description: hypothetical protein [Lycopersicon esculentum]
  misc_feature (1)..(133): Homolog of NCBI NO: 20197335 NR Description: putative protein kinase [Arabidopsis thaliana]
  misc_feature (179)..(179): Xaa is any aa, unknown or other
EVEALSMAQHENLVPLWGYCIQGNSRLLIYSFMENGSLDDWLHNTDNANSFLDWPTRLKIAQGAGRGLSYIHNTCNPNIVHRDVKSSNILLDREFNAYVADFGLARLILPYNTHVTTELVGTLGYIPPEYGQAWVATLRGDIYSFGVVLLELLTGKRPVQVLTKTKELVQWVREMRSQXEGY

SEQ ID NO: 14750 - protein, 176 aa, Zea mays subsp. mays
  peptide (1)..(176): Ceres Seq. ID no. 12469665
  misc_feature (1)..(170): Pfam Name: Protein kinase domain Pfam Description: Protein kinase domain
  misc_feature (1)..(170): Homolog of NCBI NO: 15218425 NR Description: leucine-rich repeat transmembrane protein kinase, protein id: At1g72300.1, supported by cDNA: gi_19423987
  misc_feature (1)..(172): Homolog of NCBI NO: 15238872 NR Description: leucine-rich repeat transmembrane protein kinase, protein id: At5g53890.1, supported by cDNA: gi_17381125, by cDNA: gi_20259552 [Arabidopsis thaliana]
  misc_feature (1)..(172): Homolog of NCBI NO: 34899380 NR Description: contains ESTs
  misc_feature (1)..(172): Homolog of NCBI NO: 20197485 NR Description: putative receptor-like protein kinase
  misc_feature (1)..(172): Homolog of NCBI NO: 29427830 NR Description: Phytosulfokine receptor precursor (Phytosulfokine receptor kinase) >gi|21623969|dbj|BAC00995.1| phytosulfokine
  misc_feature (1)..(172): Homolog of NCBI NO: 15227264 NR Description: leucine-rich repeat transmembrane protein kinase, protein id: At2g02220.1 [Arabidopsis thaliana] Putative phytosulfokine receptor precursor (Phytosulfokine LRR
  misc_feature (1)..(169): Homolog of NCBI NO: 38423989 NR Description: putative brassinosteroid receptor [Oryza sativa
  misc_feature (1)..(169): Homolog of NCBI NO: 34906992 NR Description: putative receptor-like protein [Oryza sativa
  misc_feature (1)..(176): Homolog of NCBI NO: 13620226 NR Description: hypothetical protein [Lycopersicon esculentum]
  misc_feature (1)..(127): Homolog of NCBI NO: 20197335 NR Description: putative protein kinase [Arabidopsis thaliana]
  misc_feature (173)..(173): Xaa is any aa, unknown or other
MAQHENLVPLWGYCIQGNSRLLIYSFMENGSLDDWLHNTDNANSFLDWPTRLKIAQGAGRGLSYIHNTCNPNIVHRDVKSSNILLDREFNAYVADFGLARLILPYNTHVTTELVGTLGYIPPEYGQAWVATLRGDIYSFGVVLLELLTGKRPVQVLTKTKELVQWVREMRSQXEGY

SEQ ID NO: 14751 - protein, 150 aa, Zea mays subsp. mays
  peptide (1)..(150): Ceres Seq. ID no. 12469666
  misc_feature (1)..(144): Pfam Name: Protein kinase domain Pfam Description: Protein kinase domain
  misc_feature (1)..(144): Homolog of NCBI NO: 15218425 NR Description: leucine-rich repeat transmembrane protein kinase, protein id: At1g72300.1, supported by cDNA: gi_19423987
  misc_feature (1)..(146): Homolog of NCBI NO: 15238872 NR Description: leucine-rich repeat transmembrane protein kinase, protein id: At5g53890.1, supported by cDNA: gi_17381125, by cDNA: gi_20259552 [Arabidopsis thaliana]
  misc_feature (1)..(146): Homolog of NCBI NO: 34899380 NR Description: contains ESTs
  misc_feature (1)..(146): Homolog of NCBI NO: 20197485 NR Description: putative receptor-like protein kinase
  misc_feature (1)..(146): Homolog of NCBI NO: 29427830 NR Description: Phytosulfokine receptor precursor (Phytosulfokine receptor kinase) >gi|21623969|dbj|BAC00995.1| phytosulfokine
  misc_feature (1)..(146): Homolog of NCBI NO: 15227264 NR Description: leucine-rich repeat transmembrane protein kinase, protein id: At2g02220.1 [Arabidopsis thaliana] Putative phytosulfokine receptor precursor (Phytosulfokine LRR
  misc_feature (1)..(143): Homolog of NCBI NO: 38423989 NR Description: putative brassinosteroid receptor [Oryza sativa
  misc_feature (1)..(143): Homolog of NCBI NO: 34906992 NR Description: putative receptor-like protein [Oryza sativa
  misc_feature (1)..(150): Homolog of NCBI NO: 13620226 NR Description: hypothetical protein [Lycopersicon esculentum]
  misc_feature (1)..(101): Homolog of NCBI NO: 20197335 NR Description: putative protein kinase [Arabidopsis thaliana]
  misc_feature (147)..(147): Xaa is any aa, unknown or other
MENGSLDDWLHNTDNANSFLDWPTRLKIAQGAGRGLSYIHNTCNPNIVHRDVKSSNILLDREFNAYVADFGLARLILPYNTHVTTELVGTLGYIPPEYGQAWVATLRGDIYSFGVVLLELLTGKRPVQVLTKTKELVQWVREMRSQXEGY

SEQ ID NO: 14752 - DNA, 383 bp, Zea mays subsp. mays
  misc_feature (1)..(383): Ceres Seq. ID no. 4356909
  misc_feature: MA Experiment ID: 108689 Result: Down-regulated in Transcription
  misc_feature: MA Experiment 108689 PARAMETER Experiment Name: Zm_Drought_Roots_P Parameter: Age (day) Value: 9
  misc_feature: MA Experiment 108689 PARAMETER Experiment Name: Zm_Drought_Roots_P Parameter: Organism Value: Zea mays
  misc_feature: MA Experiment 108689 PARAMETER Experiment Name: Zm_Drought_Roots_P Parameter: Plant Line Value: 35A19
  misc_feature: MA Experiment 108689 PARAMETER Experiment Name: Zm_Drought_Roots_P Parameter: Timepoint (hr) Value: 24
  misc_feature: MA Experiment 108689 PARAMETER Experiment Name: Zm_Drought_Roots_P Parameter: Tissue Value: Roots
  misc_feature: MA Experiment 108689 PARAMETER Experiment Name: Zm_Drought_Roots_P Parameter: Treatment Value: Drought vs. No Drought
  misc_feature: MA Experiment ID: 20000492 Result: Up-regulated in Transcription
  misc_feature: MA Experiment 20000492 PARAMETER Experiment Name: Zm_Hybrid_Seed_Dev_P Parameter: DAP Value: 12
  misc_feature: MA Experiment 20000492 PARAMETER Experiment Name: Zm_Hybrid_Seed_Dev_P Parameter: Organism Value: Zea mays
  misc_feature: MA Experiment 20000492 PARAMETER Experiment Name: Zm_Hybrid_Seed_Dev_P Parameter: Plant Line Value: 35A19
  misc_feature: MA Experiment 20000492 PARAMETER Experiment Name: Zm_Hybrid_Seed_Dev_P Parameter: Tissue Value: Fert Kernel vs. Unfert Floret
  misc_feature: MA Experiment ID: 20000626 Result: Up-regulated in Transcription
  misc_feature: MA Experiment 20000626 PARAMETER Experiment Name: Zm_Herbicide-Treatments_P Parameter: Timepoint (hr) Value: 12
  misc_feature: MA Experiment 20000626 PARAMETER Experiment Name: Zm_Herbicide-Treatments_P Parameter: Tissue Value: Aerial
  misc_feature: MA Experiment 20000626 PARAMETER Experiment Name: Zm_Herbicide-Treatments_P Parameter: Treatment Value: Roundup vs. No Treatment
tttgaaatgggtgatcatcggccacctcctgtacattcgatggaatatatgggtgctgatagaatgccatacttgtatggtgttgaacaaggaggtcctcgcccttttctagaacagccttcgccaagaacctgccctcctgaggcaccaaggacaaacagtgaagttcccagaaacatgtctgatgcagtgccagctacagatttcagaaagggaccagtggcaattgaaaaccaagtggctacaccaacaggcacaactgaagttatcattccttgcaattatataggctttgtctgtggaaacaatggcagtgaaattgaagaaatagagaagatgtcaggtgcttcaattacagttcatgatcctaaagctggcgacgc

SEQ ID NO: 14753 - protein, 127 aa, Zea mays subsp. mays
  peptide (1)..(127): Ceres Seq. ID no. 4356910
  misc_feature (88)..(126): Pfam Name: KH domain Pfam Description: KH domain
  misc_feature (33)..(126): Homolog of NCBI NO: 15217969 NR Description: KH domain protein; protein id: At1g51580.1
FEMGDHRPPPVHSMEYMGADRMPYLYGVEQGGPRPFLEQPSPRTCPPEAPRTNSEVPRNMSDAVPATDFRKGPVAIENQVATPTGTTEVIIPCNYIGFVCGNNGSEIEEIEKMSGASITVHDPKAGD

SEQ ID NO: 14754 - protein, 125 aa, Zea mays subsp. mays
  peptide (1)..(125): Ceres Seq. ID no. 4356911
  misc_feature (86)..(124): Pfam Name: KH domain Pfam Description: KH domain
  misc_feature (31)..(124): Homolog of NCBI NO: 15217969 NR Description: KH domain protein; protein id: At1g51580.1
MGDHRPPPVHSMEYMGADRMPYLYGVEQGGPRPFLEQPSPRTCPPEAPRTNSEVPRNMSDAVPATDFRKGPVAIENQVATPTGTTEVIIPCNYIGFVCGNNGSEIEEIEKMSGASITVHDPKAGD

SEQ ID NO: 14755 - protein, 114 aa, Zea mays subsp. mays
  peptide (1)..(114): Ceres Seq. ID no. 4356912
  misc_feature (75)..(113): Pfam Name: KH domain Pfam Description: KH domain
  misc_feature (20)..(113): Homolog of NCBI NO: 15217969 NR Description: KH domain protein; protein id: At1g51580.1
MEYMGADRMPYLYGVEQGGPRPFLEQPSPRTCPPEAPRTNSEVPRNMSDAVPATDFRKGPVAIENQVATPTGTTEVIIPCNYIGFVCGNNGSEIEEIEKMSGASITVHDPKAGD

SEQ ID NO: 14756 - DNA, 739 bp, Zea mays subsp. mays
  misc_feature (1)..(739): Ceres Seq. ID no. 13504114
  misc_feature: MA Experiment ID: 20000492 Result: Up-regulated in Transcription
  misc_feature: MA Experiment 20000492 PARAMETER Experiment Name: Zm_Hybrid_Seed_Dev_P Parameter: DAP Value: 12
  misc_feature: MA Experiment 20000492 PARAMETER Experiment Name: Zm_Hybrid_Seed_Dev_P Parameter: Organism Value: Zea mays
  misc_feature: MA Experiment 20000492 PARAMETER Experiment Name: Zm_Hybrid_Seed_Dev_P Parameter: Plant Line Value: 35A19
  misc_feature: MA Experiment 20000492 PARAMETER Experiment Name: Zm_Hybrid_Seed_Dev_P Parameter: Tissue Value: Fert Kernel vs. Unfert Floret
  misc_feature: MA Experiment ID: 20000535 Result: Up-regulated in Transcription
  misc_feature: MA Experiment 20000535 PARAMETER Experiment Name: Zm_Hybrid_Seed_Dev_P Parameter: DAP Value: 30 vs. 12
  misc_feature: MA Experiment 20000535 PARAMETER Experiment Name: Zm_Hybrid_Seed_Dev_P Parameter: Organism Value: Zea mays
  misc_feature: MA Experiment 20000535 PARAMETER Experiment Name: Zm_Hybrid_Seed_Dev_P Parameter: Plant Line Value: 35A19
  misc_feature: MA Experiment 20000535 PARAMETER Experiment Name: Zm_Hybrid_Seed_Dev_P Parameter: Tissue Value: Embryo vs. Unfert Floret
actttcttcgagcgtcgacaggctttccggctgccgaccccacccgggcggctcgccggggtcctctacagacgcagcgggtcgacttctgtcagggtgctacgatgatgcggcgtgcgtccctgtcctgctcgagcacaagctccggcggggaggggaggctaacgtacaaggatggtggcgtggacatagacgccgacgccgagcttgtccgccgcatagctaggatggcacccgggattggcggcttcggcggtctctttccctacaatgacgattaccttgttgttagcaccgacggggtcgggacgaagctgaagcttgctttcgaaagtggtattcatgacacaatcggcattgacctggtggcaatgaacgtcaatgacattgttactttaggtgcaaaaccactgttcttcctagattactatgcaacaagcaagcttgatgttgatcttgcagagaaggttatcaatgggattagggatgggtgtgaacaatcagtcggaggagatgtaagatttctgaaatcgaattaccatgacttagcaattcaaccatgcggtattgcgccattatccttgagaaggatgcccggtccttgtaccctgtgcattgatcgggtagagagccnaggccagggtcggaggctngaatgcgtacccgagcctgtcctatagatgagatgtttgagttgtagcagttgaaacaacgctcaacatggtaaaaagttcttggt

SEQ ID NO: 14757 - protein, 225 aa, Zea mays subsp. mays
  peptide (1)..(225): Ceres Seq. ID no. 13504115
  misc_feature (54)..(179): Pfam Name: AIR synthase related protein, N-terminal domain Pfam Description: AIR synthase related protein, N-terminal domain
  misc_feature (53)..(181): Homolog of NCBI NO: 16273334 NR Description: phosphoribosylaminoimidazole synthetase
  misc_feature (2)..(183): Homolog of NCBI NO: 34897250 NR Description: putative 5'-phosphoribosyl-5-aminoimidazole
  misc_feature (54)..(179): Homolog of NCBI NO: 541885 NR Description: phosphoribosylformylglycinamidine cyclo-ligase
  misc_feature (54)..(179): Homolog of NCBI NO: 15233161 NR Description: phosphoribosylformylglycinamidine cyclo-ligase
  misc_feature (37)..(181): Homolog of NCBI NO: 1709925 NR Description: Phosphoribosylformylglycinamidine cyclo-ligase,
  misc_feature (45)..(183): Homolog of NCBI NO: 23029993 NR Description: hypothetical protein [Microbulbifer degradans
  misc_feature (54)..(180): Homolog of NCBI NO: 16123025 NR Description: putative phosphoribosylaminoimidazole synthetase pestis] >gi|22125305|ref|NP_668728.1| synthetase [Yersinia pestis KIM] >gi|25293691|pir||AF0344
  misc_feature (54)..(193): Homolog of NCBI NO: 33383759 NR Description: phosphoribosylaminoimidazole sythetase
  misc_feature (48)..(179): Homolog of NCBI NO: 27365246 NR Description: Phosphoribosylaminoimidazole synthetase [Vibrio CMCP6] >gi|27361393|gb|AAO10301.1|AE016803_88
  misc_feature (48)..(179): Homolog of NCBI NO: 28899059 NR Description: phosphoribosylformylglycinamidine cyclo-ligase
  misc_feature (211)..(211): Xaa is any aa, unknown or other
  misc_feature (217)..(217): Xaa is any aa, unknown or other
FLRASTGFPAADPTRAARRGPLQTQRVDFCQGATMMRRASLSCSSTSSGGEGRLTYKDGGVDIDADAELVRRIARMAPGIGGFGGLFPYNDDYLVVSTDGVGTKLKLAFESGIHDTIGIDLVAMNVNDIVTLGAKPLFFLDYYATSKLDVDLAEKVINGIRDGCEQSVGGDVRFLKSNYHDLAIQPCGIAPLSLRRMPGPCTLCIDRVESXGQGRRXECVPEPVL

SEQ ID NO: 14758 - protein, 191 aa, Zea mays subsp. mays
  peptide (1)..(191): Ceres Seq. ID no. 13504116
  misc_feature (20)..(145): Pfam Name: AIR synthase related protein, N-terminal domain Pfam Description: AIR synthase related protein, N-terminal domain
  misc_feature (1)..(149): Homolog of NCBI NO: 34897250 NR Description: putative 5'-phosphoribosyl-5-aminoimidazole
  misc_feature (20)..(145): Homolog of NCBI NO: 541885 NR Description: phosphoribosylformylglycinamidine cyclo-ligase
  misc_feature (20)..(145): Homolog of NCBI NO: 15233161 NR Description: phosphoribosylformylglycinamidine cyclo-ligase
  misc_feature (3)..(147): Homolog of NCBI NO: 1709925 NR Description: Phosphoribosylformylglycinamidine cyclo-ligase,
  misc_feature (11)..(149): Homolog of NCBI NO: 23029993 NR Description: hypothetical protein [Microbulbifer degradans
  misc_feature (20)..(146): Homolog of NCBI NO: 16123025 NR Description: putative phosphoribosylaminoimidazole synthetase pestis] >gi|22125305|ref|NP_668728.1| synthetase [Yersinia pestis KIM] >gi|25293691|pir||AF0344
  misc_feature (20)..(159): Homolog of NCBI NO: 33383759 NR Description: phosphoribosylaminoimidazole sythetase
  misc_feature (14)..(145): Homolog of NCBI NO: 27365246 NR Description: Phosphoribosylaminoimidazole synthetase [Vibrio CMCP6] >gi|27361393|gb|AAO10301.1|AE016803_88
  misc_feature (14)..(145): Homolog of NCBI NO: 28899059 NR Description: phosphoribosylformylglycinamidine cyclo-ligase
  misc_feature (19)..(147): Homolog of NCBI NO: 16273334 NR Description: phosphoribosylaminoimidazole synthetase
  misc_feature (177)..(177): Xaa is any aa, unknown or other
  misc_feature (183)..(183): Xaa is any aa, unknown or other
MMRRASLSCSSTSSGGEGRLTYKDGGVDIDADAELVRRIARMAPGIGGFGGLFPYNDDYLVVSTDGVGTKLKLAFESGIHDTIGIDLVAMNVNDIVTLGAKPLFFLDYYATSKLDVDLAEKVINGIRDGCEQSVGGDVRFLKSNYHDLAIQPCGIAPLSLRRMPGPCTLCIDRVESXGQGRRXECVPEPVL

SEQ ID NO: 14759 - protein, 190 aa, Zea mays subsp. mays
  peptide (1)..(190): Ceres Seq. ID no. 13504117
  misc_feature (19)..(144): Pfam Name: AIR synthase related protein, N-terminal domain Pfam Description: AIR synthase related protein, N-terminal domain
  misc_feature (1)..(148): Homolog of NCBI NO: 34897250 NR Description: putative 5'-phosphoribosyl-5-aminoimidazole
  misc_feature (19)..(144): Homolog of NCBI NO: 541885 NR Description: phosphoribosylformylglycinamidine cyclo-ligase
  misc_feature (19)..(144): Homolog of NCBI NO: 15233161 NR Description: phosphoribosylformylglycinamidine cyclo-ligase
  misc_feature (2)..(146): Homolog of NCBI NO: 1709925 NR Description: Phosphoribosylformylglycinamidine cyclo-ligase,
  misc_feature (10)..(148): Homolog of NCBI NO: 23029993 NR Description: hypothetical protein [Microbulbifer degradans
  misc_feature (19)..(145): Homolog of NCBI NO: 16123025 NR Description: putative phosphoribosylaminoimidazole synthetase pestis] >gi|22125305|ref|NP_668728.1| synthetase [Yersinia pestis KIM] >gi|25293691|pir||AF0344
  misc_feature (19)..(158): Homolog of NCBI NO: 33383759 NR Description: phosphoribosylaminoimidazole sythetase
  misc_feature (13)..(144): Homolog of NCBI NO: 27365246 NR Description: Phosphoribosylaminoimidazole synthetase [Vibrio CMCP6] >gi|27361393|gb|AAO10301.1|AE016803_88
  misc_feature (13)..(144): Homolog of NCBI NO: 28899059 NR Description: phosphoribosylformylglycinamidine cyclo-ligase
  misc_feature (18)..(146): Homolog of NCBI NO: 16273334 NR Description: phosphoribosylaminoimidazole synthetase
  misc_feature (176)..(176): Xaa is any aa, unknown or other
  misc_feature (182)..(182): Xaa is any aa, unknown or other
MRRASLSCSSTSSGGEGRLTYKDGGVDIDADAELVRRIARMAPGIGGFGGLFPYNDDYLVVSTDGVGTKLKLAFESGIHDTIGIDLVAMNVNDIVTLGAKPLFFLDYYATSKLDVDLAEKVINGIRDGCEQSVGGDVRFLKSNYHDLAIQPCGIAPLSLRRMPGPCTLCIDRVESXGQGRRXECVPEPVL

SEQ ID NO: 14760 - DNA, 901 bp, Zea mays subsp. mays
  misc_feature (1)..(901): Ceres Seq. ID no. 12455262
  misc_feature: MA Experiment ID: 108530 Result: Down-regulated in Transcription
  misc_feature: MA Experiment 108530 PARAMETER Experiment Name: Zm_Imbibed_Seeds_P Parameter: Age (day) Value: 6 vs. 2
  misc_feature: MA Experiment 108530 PARAMETER Experiment Name: Zm_Imbibed_Seeds_P Parameter: Organism Value: Zea mays
  misc_feature: MA Experiment 108530 PARAMETER Experiment Name: Zm_Imbibed_Seeds_P Parameter: Plant Line Value: 35A19
  misc_feature: MA Experiment 108530 PARAMETER Experiment Name: Zm_Imbibed_Seeds_P Parameter: Tissue Value: Aerial vs. Embryo
ctcccctcctccgcacaaacgcgtcgcatccgctccacaggatcctcggcgccgagtccaagatcttctacctcaagatgaagggtgactaccacaggtaccttgctgagttcaagtcaggtgcagagaggaaggatgctgcggagagcaccatgaatgcctacaaagctgctcaggatattgctcttgctgatctggccccaacccaccccatcaggctcgggcttgctctcaacttctcagtgttctactacgagatcctcaactcccctgaccgtgcttgcaaccttgcaaagcaggcctttgatgaggcaatctccgaactagacagcctgggagaggagtcctacaaggacagcactctgatcatgcagctcctgcgtgacaacttgaccctatggacttccgacaccaacgaggacgccggagatgagatcaaggaagcagctgctgcccccaaagaatccgcccccgagggccagtaagacggatccgatctcccgacctgatgcgtgtctgctgatgtcggggagtttaccaggactgtgccgttcttgatttctgatagcttatcttctagtacacctcgtgttgttctcttcgtcacggcgccggtgcgtgtgcgctgaagctgcctgccattgccattgccgctgtttttaattaagcacacactctagatgttatgcccgcatgctatgtttcgattctcaaagttgataaatgatggctggatgctggttttcgtgctccaagcctgctgcttcttccagggaaaaaaagacctgcccttgttgcagcgttgttgtttagaatgacctatatttgactggtattctgttacggtggctttgcaaagctgtttgtttggtttaatgtctcggaataatatgaattggct

SEQ ID NO: 14761 - protein, 160 aa, Zea mays subsp. mays
  peptide (1)..(160): Ceres Seq. ID no. 12455263
  misc_feature (8)..(140): Pfam Name: 14-3-3 protein Pfam Description: 14-3-3 protein
  misc_feature (8)..(160): Homolog of NCBI NO: 9798603 NR Description: TaWIN1 [Triticum aestivum]
  misc_feature (8)..(154): Homolog of NCBI NO: 7435023 NR Description: GF14-d protein - rice >gi|1519253|gb|AAB07458.1|
  misc_feature (2)..(160): Homolog of NCBI NO: 7435022 NR Description: GF14-c protein - rice >gi|1519251|gb|AAB07457.1|
  misc_feature (2)..(151): Homolog of NCBI NO: 2921512 NR Description: GF14 protein [Fritillaria agrestis]
  misc_feature (2)..(151): Homolog of NCBI NO: 12229593 NR Description: 14-3-3-like protein
  misc_feature (2)..(158): Homolog of NCBI NO: 3023187 NR Description: 14-3-3-LIKE PROTEIN (G-BOX BINDING FACTOR)
  misc_feature (2)..(153): Homolog of NCBI NO: 100554 NR Description: 14-3-3 protein homolog - barley
  misc_feature (2)..(153): Homolog of NCBI NO: 112684 NR Description: 14-3-3-LIKE PROTEIN A (14-3-3A)
  misc_feature (2)..(160): Homolog of NCBI NO: 37903393 NR Description: 14-3-3-like protein [Saccharum hybrid cultivar
  misc_feature (17)..(157): Homolog of NCBI NO: 18396217 NR Description: 14-3-3 protein GF14 nu (grf7); protein id: supported by cDNA: 37944., supported by cDNA: gi_17529079, by cDNA: gi_1872468, supported by cDNA: gi_20465432 protein GF14
PLLRTNASHPLHRILGAESKIFYLKMKGDYHRYLAEFKSGAERKDAAESTMNAYKAAQDIALADLAPTHPIRLGLALNFSVFYYEILNSPDRACNLAKQAFDEAISELDSLGEESYKDSTLIMQLLRDNLTLWTSDTNEDAGDEIKEAAAAPKESAPEGQ

SEQ ID NO: 14762 - protein, 135 aa, Zea mays subsp. mays
  peptide (1)..(135): Ceres Seq. ID no. 12455264
  misc_feature (1)..(115): Pfam Name: 14-3-3 protein Pfam Description: 14-3-3 protein
  misc_feature (1)..(135): Homolog of NCBI NO: 9798603 NR Description: TaWIN1 [Triticum aestivum]
  misc_feature (1)..(129): Homolog of NCBI NO: 7435023 NR Description: GF14-d protein - rice >gi|1519253|gb|AAB07458.1|
  misc_feature (1)..(135): Homolog of NCBI NO: 7435022 NR Description: GF14-c protein - rice >gi|1519251|gb|AAB07457.1|
  misc_feature (1)..(126): Homolog of NCBI NO: 2921512 NR Description: GF14 protein [Fritillaria agrestis]
  misc_feature (1)..(126): Homolog of NCBI NO: 12229593 NR Description: 14-3-3-like protein
  misc_feature (1)..(133): Homolog of NCBI NO: 3023187 NR Description: 14-3-3-LIKE PROTEIN (G-BOX BINDING FACTOR)
  misc_feature (1)..(128): Homolog of NCBI NO: 100554 NR Description: 14-3-3 protein homolog - barley
  misc_feature (1)..(128): Homolog of NCBI NO: 112684 NR Description: 14-3-3-LIKE PROTEIN A (14-3-3A)
  misc_feature (1)..(135): Homolog of NCBI NO: 37903393 NR Description: 14-3-3-like protein [Saccharum hybrid cultivar
  misc_feature (1)..(132): Homolog of NCBI NO: 18396217 NR Description: 14-3-3 protein GF14 nu (grf7); protein id: supported by cDNA: 37944., supported by cDNA: gi_17529079, by cDNA: gi_1872468, supported by cDNA: gi_20465432 protein GF14
MKGDYHRYLAEFKSGAERKDAAESTMNAYKAAQDIALADLAPTHPIRLGLALNFSVFYYEILNSPDRACNLAKQAFDEAISELDSLGEESYKDSTLIMQLLRDNLTLWTSDTNEDAGDEIKEAAAAPKESAPEGQ

SEQ ID NO: 14763 - protein, 110 aa, Zea mays subsp. mays
  peptide (1)..(110): Ceres Seq. ID no. 12455265
  misc_feature (1)..(90): Pfam Name: 14-3-3 protein Pfam Description: 14-3-3 protein
  misc_feature (1)..(110): Homolog of NCBI NO: 9798603 NR Description: TaWIN1 [Triticum aestivum]
  misc_feature (1)..(104): Homolog of NCBI NO: 7435023 NR Description: GF14-d protein - rice >gi|1519253|gb|AAB07458.1|
  misc_feature (1)..(110): Homolog of NCBI NO: 7435022 NR Description: GF14-c protein - rice >gi|1519251|gb|AAB07457.1|
  misc_feature (1)..(101): Homolog of NCBI NO: 2921512 NR Description: GF14 protein [Fritillaria agrestis]
  misc_feature (1)..(101): Homolog of NCBI NO: 12229593 NR Description: 14-3-3-like protein
  misc_feature (1)..(108): Homolog of NCBI NO: 3023187 NR Description: 14-3-3-LIKE PROTEIN (G-BOX BINDING FACTOR)
  misc_feature (1)..(103): Homolog of NCBI NO: 100554 NR Description: 14-3-3 protein homolog - barley
  misc_feature (1)..(103): Homolog of NCBI NO: 112684 NR Description: 14-3-3-LIKE PROTEIN A (14-3-3A)
  misc_feature (1)..(110): Homolog of NCBI NO: 37903393 NR Description: 14-3-3-like protein [Saccharum hybrid cultivar
  misc_feature (1)..(107): Homolog of NCBI NO: 18396217 NR Description: 14-3-3 protein GF14 nu (grf7); protein id: supported by cDNA: 37944., supported by cDNA: gi_17529079, by cDNA: gi_1872468, supported by cDNA: gi_20465432 protein GF14
MNAYKAAQDIALADLAPTHPIRLGLALNFSVFYYEILNSPDRACNLAKQAFDEAISELDSLGEESYKDSTLIMQLLRDNLTLWTSDTNEDAGDEIKEAAAAPKESAPEGQ

SEQ ID NO: 14764 - DNA, 1144 bp, Zea mays subsp. mays; identical to SEQ ID NO: 12883
  misc_feature (1)..(1144): Ceres Seq. ID no. 12340675
  misc_feature: MA Experiment ID: 108522 Result: Up-regulated in Transcription
  misc_feature: MA Experiment 108522 PARAMETER Experiment Name: Zm_42deg_Heat_P Parameter: Age (day) Value: 8
  misc_feature: MA Experiment 108522 PARAMETER Experiment Name: Zm_42deg_Heat_P Parameter: Organism Value: Zea mays
  misc_feature: MA Experiment 108522 PARAMETER Experiment Name: Zm_42deg_Heat_P Parameter: Plant Line Value: 35A19
  misc_feature: MA Experiment 108522 PARAMETER Experiment Name: Zm_42deg_Heat_P Parameter: Temperature (deg C) Value: 42 vs. 22
  misc_feature: MA Experiment 108522 PARAMETER Experiment Name: Zm_42deg_Heat_P Parameter: Timepoint (hr) Value: 1
  misc_feature: MA Experiment 108522 PARAMETER Experiment Name: Zm_42deg_Heat_P Parameter: Tissue Value: Aerial
  misc_feature: MA Experiment ID: 108523 Result: Up-regulated in Transcription
  misc_feature: MA Experiment 108523 PARAMETER Experiment Name: Zm_42deg_Heat_P Parameter: Age (day) Value: 8
  misc_feature: MA Experiment 108523 PARAMETER Experiment Name: Zm_42deg_Heat_P Parameter: Organism Value: Zea mays
  misc_feature: MA Experiment 108523 PARAMETER Experiment Name: Zm_42deg_Heat_P Parameter: Plant Line Value: 35A19
  misc_feature: MA Experiment 108523 PARAMETER Experiment Name: Zm_42deg_Heat_P Parameter: Temperature (deg C) Value: 42 vs. 22
  misc_feature: MA Experiment 108523 PARAMETER Experiment Name: Zm_42deg_Heat_P Parameter: Timepoint (hr) Value: 6
  misc_feature: MA Experiment 108523 PARAMETER Experiment Name: Zm_42deg_Heat_P Parameter: Tissue Value: Aerial
  misc_feature: MA Experiment ID: 108528 Result: Up-regulated in Transcription
  misc_feature: MA Experiment 108528 PARAMETER Experiment Name: Zm_Imbibed_Seeds_P Parameter: Age (day) Value: 5 vs. 2
  misc_feature: MA Experiment 108528 PARAMETER Experiment Name: Zm_Imbibed_Seeds_P Parameter: Organism Value: Zea mays
  misc_feature: MA Experiment 108528 PARAMETER Experiment Name: Zm_Imbibed_Seeds_P Parameter: Plant Line Value: 35A19
  misc_feature: MA Experiment 108528 PARAMETER Experiment Name: Zm_Imbibed_Seeds_P Parameter: Tissue Value: Aerial vs. Embryo
  misc_feature: MA Experiment ID: 108536 Result: Down-regulated in Transcription
  misc_feature: MA Experiment 108536 PARAMETER Experiment Name: Zm_Meristem_P Parameter: Age (day) Value: 8
  misc_feature: MA Experiment 108536 PARAMETER Experiment Name: Zm_Meristem_P Parameter: Organism Value: Zea mays
  misc_feature: MA Experiment 108536 PARAMETER Experiment Name: Zm_Meristem_P Parameter: Plant Line Value: 35A19
  misc_feature: MA Experiment 108536 PARAMETER Experiment Name: Zm_Meristem_P Parameter: Tissue Value: Shoot Meristem vs. Above Shoot Meristem
  misc_feature: MA Experiment ID: 108544 Result: Down-regulated in Transcription
  misc_feature: MA Experiment ID: 108545 Result: Up-regulated in Transcription
  misc_feature: MA Experiment 108545 PARAMETER Experiment Name: Zm_Imbibed_Seeds_P Parameter: Age (day) Value: 3 vs. 2
  misc_feature: MA Experiment 108545 PARAMETER Experiment Name: Zm_Imbibed_Seeds_P Parameter: Organism Value: Zea mays
  misc_feature: MA Experiment 108545 PARAMETER Experiment Name: Zm_Imbibed_Seeds_P Parameter: Plant Line Value: 35A19
  misc_feature: MA Experiment 108545 PARAMETER Experiment Name: Zm_Imbibed_Seeds_P Parameter: Tissue Value: Aerial vs. Embryo
  misc_feature: MA Experiment ID: 108547 Result: Up-regulated in Transcription
  misc_feature: MA Experiment 108547 PARAMETER Experiment Name: Zm_Imbibed_Seeds_P Parameter: Age (day) Value: 4 vs. 2
  misc_feature: MA Experiment 108547 PARAMETER Experiment Name: Zm_Imbibed_Seeds_P Parameter: Organism Value: Zea mays
  misc_feature: MA Experiment 108547 PARAMETER Experiment Name: Zm_Imbibed_Seeds_P Parameter: Plant Line Value: 35A19
  misc_feature: MA Experiment 108547 PARAMETER Experiment Name: Zm_Imbibed_Seeds_P Parameter: Tissue Value: Aerial vs. Embryo
  misc_feature: MA Experiment ID: 108688 Result: Down-regulated in Transcription
  misc_feature: MA Experiment 108688 PARAMETER Experiment Name: Zm_Embryos-Flowers__P Parameter: Tissue Value: Immature Flowers vs. Aerial+
  misc_feature: MA Experiment ID: 20000492 Result: Up-regulated in Transcription
  misc_feature: MA Experiment 20000492 PARAMETER Experiment Name: Zm_Hybrid_Seed_Dev_P Parameter: DAP Value: 12
  misc_feature: MA Experiment 20000492 PARAMETER Experiment Name: Zm_Hybrid_Seed_Dev_P Parameter: Organism Value: Zea mays
  misc_feature: MA Experiment 20000492 PARAMETER Experiment Name: Zm_Hybrid_Seed_Dev_P Parameter: Plant Line Value: 35A19
  misc_feature: MA Experiment 20000492 PARAMETER Experiment Name: Zm_Hybrid_Seed_Dev_P Parameter: Tissue Value: Fert Kernel vs. Unfert Floret

SEQ ID NO: 14765 - protein, 257 aa, Zea mays subsp. mays; identical to SEQ ID NO: 12884
  peptide (1)..(257): Ceres Seq. ID no. 12340676
  misc_feature (1)..(257): Homolog of NCBI NO: 34897418 NR Description: unknown protein [Oryza sativa (japonica
  misc_feature (4)..(257): Homolog of NCBI NO: 18404496 NR Description: expressed protein; protein id: At2g37660.1, by cDNA: 13797., supported by cDNA: gi_14596078, supported by gi_20148254 [Arabidopsis thaliana]
  misc_feature (1)..(257): Homolog of NCBI NO: 14719331 NR Description: putative 3-beta hydroxysteroid
  misc_feature (9)..(257): Homolog of NCBI NO: 18413869 NR Description: putative protein; protein id: At5g02240.1, by cDNA: gi_15294289 [Arabidopsis thaliana] AT5g02240/T7H20_290 [Arabidopsis thaliana]
  misc_feature (4)..(257): Homolog of NCBI NO: 7485430 NR Description: hypothetical protein At2g37660 [imported] -
  misc_feature (9)..(252): Homolog of NCBI NO: 11358410 NR Description: hypothetical protein T7H20.290 - Arabidopsis >gi|7340698|emb|CAB82997.1| putative protein [Arabidopsis
  misc_feature (96)..(253): Homolog of NCBI NO: 16330694 NR Description: hypothetical protein [Synechocystis sp. PCC 6803]
  misc_feature (96)..(253): Homolog of NCBI NO: 23130188 NR Description: hypothetical protein [Nostoc punctiforme]
  misc_feature (1)..(250): Homolog of NCBI NO: 30689062 NR Description: expressed protein [Arabidopsis thaliana] unknown protein [Arabidopsis thaliana]
  misc_feature (96)..(252): Homolog of NCBI NO: 17230243 NR Description: hypothetical protein [Nostoc sp. PCC 7120]
  misc_feature (1)..(257): Homolog of NCBI NO: 34897418 NR Description: unknown protein [Oryza sativa (japonica
  misc_feature (4)..(257): Homolog of NCBI NO: 18404496 NR Description: expressed protein; protein id: At2g37660.1, by cDNA: 13797., supported by cDNA: gi_14596078, supported by gi_20148254 [Arabidopsis thaliana]
  misc_feature (1)..(257): Homolog of NCBI NO: 14719331 NR Description: putative 3-beta hydroxysteroid
  misc_feature (9)..(257): Homolog of NCBI NO: 18413869 NR Description: putative protein; protein id: At5g02240.1, by cDNA: gi_15294289 [Arabidopsis thaliana] AT5g02240/T7H20_290 [Arabidopsis thaliana]
  misc_feature (4)..(257): Homolog of NCBI NO: 7485430 NR Description: hypothetical protein At2g37660 [imported] -
  misc_feature (9)..(252): Homolog of NCBI NO: 11358410 NR Description: hypothetical protein T7H20.290 - Arabidopsis >gi|7340698|emb|CAB82997.1| putative protein [Arabidopsis
  misc_feature (96)..(253): Homolog of NCBI NO: 16330694 NR Description: hypothetical protein [Synechocystis sp. PCC 6803]
  misc_feature (96)..(253): Homolog of NCBI NO: 23130188 NR Description: hypothetical protein [Nostoc punctiforme]
  misc_feature (1)..(250): Homolog of NCBI NO: 30689062 NR Description: expressed protein [Arabidopsis thaliana] unknown protein [Arabidopsis thaliana]
  misc_feature (96)..(252): Homolog of NCBI NO: 17230243 NR Description: hypothetical protein [Nostoc sp. PCC 7120]

SEQ ID NO: 14766 - protein, 171 aa, Zea mays subsp. mays; identical to SEQ ID NO: 12885
  peptide (1)..(171): Ceres Seq. ID no. 12340677
  misc_feature (1)..(171): Homolog of NCBI NO: 34897418 NR Description: unknown protein [Oryza sativa (japonica
  misc_feature (1)..(171): Homolog of NCBI NO: 18404496 NR Description: expressed protein; protein id: At2g37660.1, by cDNA: 13797., supported by cDNA: gi_14596078, supported by gi_20148254 [Arabidopsis thaliana]
  misc_feature (1)..(171): Homolog of NCBI NO: 14719331 NR Description: putative 3-beta hydroxysteroid
  misc_feature (1)..(171): Homolog of NCBI NO: 18413869 NR Description: putative protein; protein id: At5g02240.1, by cDNA: gi_15294289 [Arabidopsis thaliana] AT5g02240/T7H20_290 [Arabidopsis thaliana]
  misc_feature (1)..(171): Homolog of NCBI NO: 7485430 NR Description: hypothetical protein At2g37660 [imported] -
  misc_feature (1)..(166): Homolog of NCBI NO: 11358410 NR Description: hypothetical protein T7H20.290 - Arabidopsis >gi|7340698|emb|CAB82997.1| putative protein [Arabidopsis
  misc_feature (10)..(167): Homolog of NCBI NO: 16330694 NR Description: hypothetical protein [Synechocystis sp. PCC 6803]
  misc_feature (10)..(167): Homolog of NCBI NO: 23130188 NR Description: hypothetical protein [Nostoc punctiforme]
  misc_feature (1)..(164): Homolog of NCBI NO: 30689062 NR Description: expressed protein [Arabidopsis thaliana] unknown protein [Arabidopsis thaliana]
  misc_feature (10)..(166): Homolog of NCBI NO: 17230243 NR Description: hypothetical protein [Nostoc sp. PCC 7120]
  misc_feature (1)..(171): Homolog of NCBI NO: 34897418 NR Description: unknown protein [Oryza sativa (japonica
  misc_feature (1)..(171): Homolog of NCBI NO: 18404496 NR Description: expressed protein; protein id: At2g37660.1, by cDNA: 13797., supported by cDNA: gi_14596078, supported by gi_20148254 [Arabidopsis thaliana]
  misc_feature (1)..(171): Homolog of NCBI NO: 14719331 NR Description: putative 3-beta hydroxysteroid
  misc_feature (1)..(171): Homolog of NCBI NO: 18413869 NR Description: putative protein; protein id: At5g02240.1, by cDNA: gi_15294289 [Arabidopsis thaliana] AT5g02240/T7H20_290 [Arabidopsis thaliana]
  misc_feature (1)..(171): Homolog of NCBI NO: 7485430 NR Description: hypothetical protein At2g37660 [imported] -
  misc_feature (1)..(166): Homolog of NCBI NO: 11358410 NR Description: hypothetical protein T7H20.290 - Arabidopsis >gi|7340698|emb|CAB82997.1| putative protein [Arabidopsis
  misc_feature (10)..(167): Homolog of NCBI NO: 16330694 NR Description: hypothetical protein [Synechocystis sp. PCC 6803]
  misc_feature (10)..(167): Homolog of NCBI NO: 23130188 NR Description: hypothetical protein [Nostoc punctiforme]
  misc_feature (1)..(164): Homolog of NCBI NO: 30689062 NR Description: expressed protein [Arabidopsis thaliana] unknown protein [Arabidopsis thaliana]
  misc_feature (10)..(166): Homolog of NCBI NO: 17230243 NR Description: hypothetical protein [Nostoc sp. PCC 7120]

SEQ ID NO: 14767 - protein, 151 aa, Zea mays subsp. mays; identical to SEQ ID NO: 12886
  peptide (1)..(151): Ceres Seq. ID no. 12340678
  misc_feature (1)..(151): Homolog of NCBI NO: 34897418 NR Description: unknown protein [Oryza sativa (japonica
  misc_feature (1)..(151): Homolog of NCBI NO: 18404496 NR Description: expressed protein; protein id: At2g37660.1, by cDNA: 13797., supported by cDNA: gi_14596078, supported by gi_20148254 [Arabidopsis thaliana]
  misc_feature (1)..(151): Homolog of NCBI NO: 14719331 NR Description: putative 3-beta hydroxysteroid
  misc_feature (1)..(151): Homolog of NCBI NO: 18413869 NR Description: putative protein; protein id: At5g02240.1, by cDNA: gi_15294289 [Arabidopsis thaliana] AT5g02240/T7H20_290 [Arabidopsis thaliana]
  misc_feature (1)..(151): Homolog of NCBI NO: 7485430 NR Description: hypothetical protein At2g37660 [imported] -
  misc_feature (1)..(146): Homolog of NCBI NO: 11358410 NR Description: hypothetical protein T7H20.290 - Arabidopsis >gi|7340698|emb|CAB82997.1| putative protein [Arabidopsis
  misc_feature (1)..(147): Homolog of NCBI NO: 16330694 NR Description: hypothetical protein [Synechocystis sp. PCC 6803]
  misc_feature (1)..(147): Homolog of NCBI NO: 23130188 NR Description: hypothetical protein [Nostoc punctiforme]
  misc_feature (1)..(144): Homolog of NCBI NO: 30689062 NR Description: expressed protein [Arabidopsis thaliana] unknown protein [Arabidopsis thaliana]
  misc_feature (1)..(146): Homolog of NCBI NO: 17230243 NR Description: hypothetical protein [Nostoc sp. PCC 7120]
  misc_feature (1)..(151): Homolog of NCBI NO: 34897418 NR Description: unknown protein [Oryza sativa (japonica
  misc_feature (1)..(151): Homolog of NCBI NO: 18404496 NR Description: expressed protein; protein id: At2g37660.1, by cDNA: 13797., supported by cDNA: gi_14596078, supported by gi_20148254 [Arabidopsis thaliana]
  misc_feature (1)..(151): Homolog of NCBI NO: 14719331 NR Description: putative 3-beta hydroxysteroid
  misc_feature (1)..(151): Homolog of NCBI NO: 18413869 NR Description: putative protein; protein id: At5g02240.1, by cDNA: gi_15294289 [Arabidopsis thaliana] AT5g02240/T7H20_290 [Arabidopsis thaliana]
  misc_feature (1)..(151): Homolog of NCBI NO: 7485430 NR Description: hypothetical protein At2g37660 [imported] -
  misc_feature (1)..(146): Homolog of NCBI NO: 11358410 NR Description: hypothetical protein T7H20.290 - Arabidopsis >gi|7340698|emb|CAB82997.1| putative protein [Arabidopsis
  misc_feature (1)..(147): Homolog of NCBI NO: 16330694 NR Description: hypothetical protein [Synechocystis sp. PCC 6803]
  misc_feature (1)..(147): Homolog of NCBI NO: 23130188 NR Description: hypothetical protein [Nostoc punctiforme]
  misc_feature (1)..(144): Homolog of NCBI NO: 30689062 NR Description: expressed protein [Arabidopsis thaliana] unknown protein [Arabidopsis thaliana]
  misc_feature (1)..(146): Homolog of NCBI NO: 17230243 NR Description: hypothetical protein [Nostoc sp. PCC 7120]

SEQ ID NO: 14768 - DNA, 978 bp, Zea mays subsp. mays
  misc_feature (1)..(978): Ceres Seq. ID no. 12469570
  misc_feature: MA Experiment ID: 108522 Result: Up-regulated in Transcription
  misc_feature: MA Experiment 108522 PARAMETER Experiment Name: Zm_42deg_Heat_P Parameter: Age (day) Value: 8
  misc_feature: MA Experiment 108522 PARAMETER Experiment Name: Zm_42deg_Heat_P Parameter: Organism Value: Zea mays
  misc_feature: MA Experiment 108522 PARAMETER Experiment Name: Zm_42deg_Heat_P Parameter: Plant Line Value: 35A19
  misc_feature: MA Experiment 108522 PARAMETER Experiment Name: Zm_42deg_Heat_P Parameter: Temperature (deg C) Value: 42 vs. 22
  misc_feature: MA Experiment 108522 PARAMETER Experiment Name: Zm_42deg_Heat_P Parameter: Timepoint (hr) Value: 1
  misc_feature: MA Experiment 108522 PARAMETER Experiment Name: Zm_42deg_Heat_P Parameter: Tissue Value: Aerial
  misc_feature: MA Experiment ID: 108523 Result: Up-regulated in Transcription
  misc_feature: MA Experiment 108523 PARAMETER Experiment Name: Zm_42deg_Heat_P Parameter: Age (day) Value: 8
  misc_feature: MA Experiment 108523 PARAMETER Experiment Name: Zm_42deg_Heat_P Parameter: Organism Value: Zea mays
  misc_feature: MA Experiment 108523 PARAMETER Experiment Name: Zm_42deg_Heat_P Parameter: Plant Line Value: 35A19
  misc_feature: MA Experiment 108523 PARAMETER Experiment Name: Zm_42deg_Heat_P Parameter: Temperature (deg C) Value: 42 vs. 22
  misc_feature: MA Experiment 108523 PARAMETER Experiment Name: Zm_42deg_Heat_P Parameter: Timepoint (hr) Value: 6
  misc_feature: MA Experiment 108523 PARAMETER Experiment Name: Zm_42deg_Heat_P Parameter: Tissue Value: Aerial
  misc_feature: MA Experiment ID: 108534 Result: Up-regulated in Transcription
  misc_feature: MA Experiment 108534 PARAMETER Experiment Name: Zm_4deg_Cold_P Parameter: Age (hr) Value: 8
  misc_feature: MA Experiment 108534 PARAMETER Experiment Name: Zm_4deg_Cold_P Parameter: Organism Value: Zea mays
  misc_feature: MA Experiment 108534 PARAMETER Experiment Name: Zm_4deg_Cold_P Parameter: Plant Line Value: 35A19
  misc_feature: MA Experiment 108534 PARAMETER Experiment Name: Zm_4deg_Cold_P Parameter: Temperature (deg C) Value: 4 vs. 22
  misc_feature: MA Experiment 108534 PARAMETER Experiment Name: Zm_4deg_Cold_P Parameter: Timepoint (hr) Value: 6
  misc_feature: MA Experiment 108534 PARAMETER Experiment Name: Zm_4deg_Cold_P Parameter: Tissue Value: Aerial
  misc_feature: MA Experiment ID: 108547 Result: Up-regulated in Transcription
  misc_feature: MA Experiment 108547 PARAMETER Experiment Name: Zm_Imbibed_Seeds_P Parameter: Age (day) Value: 4 vs. 2
  misc_feature: MA Experiment 108547 PARAMETER Experiment Name: Zm_Imbibed_Seeds_P Parameter: Organism Value: Zea mays
  misc_feature: MA Experiment 108547 PARAMETER Experiment Name: Zm_Imbibed_Seeds_P Parameter: Plant Line Value: 35A19
  misc_feature: MA Experiment 108547 PARAMETER Experiment Name: Zm_Imbibed_Seeds_P Parameter: Tissue Value: Aerial vs. Embryo
  misc_feature: MA Experiment ID: 108688 Result: Down-regulated in Transcription
  misc_feature: MA Experiment 108688 PARAMETER Experiment Name: Zm_Embryos-Flowers__P Parameter: Tissue Value: Immature Flowers vs. Aerial+
  misc_feature: MA Experiment ID: 20000478 Result: Down-regulated in Transcription
  misc_feature: MA Experiment 20000478 PARAMETER Experiment Name: Zm_5mM_SA_P Parameter: Age (day) Value: 11
  misc_feature: MA Experiment 20000478 PARAMETER Experiment Name: Zm_5mM_SA_P Parameter: Organism Value: Zea mays
  misc_feature: MA Experiment 20000478 PARAMETER Experiment Name: Zm_5mM_SA_P Parameter: Plant Line Value: 35A19
  misc_feature: MA Experiment 20000478 PARAMETER Experiment Name: Zm_5mM_SA_P Parameter: Timepoint (hr) Value: 72
  misc_feature: MA Experiment 20000478 PARAMETER Experiment Name: Zm_5mM_SA_P Parameter: Tissue Value: Aerial
  misc_feature: MA Experiment 20000478 PARAMETER Experiment Name: Zm_5mM_SA_P Parameter: Treatment Value: 5mM SA vs. No Treatment
  misc_feature: MA Experiment ID: 20000492 Result: Up-regulated in Transcription
  misc_feature: MA Experiment 20000492 PARAMETER Experiment Name: Zm_Hybrid_Seed_Dev_P Parameter: DAP Value: 12
  misc_feature: MA Experiment 20000492 PARAMETER Experiment Name: Zm_Hybrid_Seed_Dev_P Parameter: Organism Value: Zea mays
  misc_feature: MA Experiment 20000492 PARAMETER Experiment Name: Zm_Hybrid_Seed_Dev_P Parameter: Plant Line Value: 35A19
  misc_feature: MA Experiment 20000492 PARAMETER Experiment Name: Zm_Hybrid_Seed_Dev_P Parameter: Tissue Value: Fert Kernel vs. Unfert Floret
  misc_feature: MA Experiment ID: 20000535 Result: Up-regulated in Transcription
  misc_feature: MA Experiment 20000535 PARAMETER Experiment Name: Zm_Hybrid_Seed_Dev_P Parameter: DAP Value: 30 vs. 12
  misc_feature: MA Experiment 20000535 PARAMETER Experiment Name: Zm_Hybrid_Seed_Dev_P Parameter: Organism Value: Zea mays
  misc_feature: MA Experiment 20000535 PARAMETER Experiment Name: Zm_Hybrid_Seed_Dev_P Parameter: Plant Line Value: 35A19
  misc_feature: MA Experiment 20000535 PARAMETER Experiment Name: Zm_Hybrid_Seed_Dev_P Parameter: Tissue Value: Embryo vs. Unfert Floret
  misc_feature: MA Experiment ID: 20001610 Result: Down-regulated in Transcription
  misc_feature: MA Experiment 20001610 PARAMETER Experiment Name: Zm_50ppm_KNO3_L-to-H_P Parameter: Age (day) Value: 19
  misc_feature: MA Experiment 20001610 PARAMETER Experiment Name: Zm_50ppm_KNO3_L-to-H_P Parameter: Organism Value: Zea mays
  misc_feature: MA Experiment 20001610 PARAMETER Experiment Name: Zm_50ppm_KNO3_L-to-H_P Parameter: Plant Line Value: 35A19
  misc_feature: MA Experiment 20001610 PARAMETER Experiment Name: Zm_50ppm_KNO3_L-to-H_P Parameter: Timepoint (hr) Value: 2
  misc_feature: MA Experiment 20001610 PARAMETER Experiment Name: Zm_50ppm_KNO3_L-to-H_P Parameter: Tissue Value: Roots
  misc_feature: MA Experiment 20001610 PARAMETER Experiment Name: Zm_50ppm_KNO3_L-to-H_P Parameter: Treatment Value: 50ppm KNO3 vs. 50ppm KCl
cccgttgctcgtcgtcgtcctctgcatccgtcccctatttatccgtcccctcctctcccgcactagctcccaagttccatcccatcccgccacgaaattctccacgctccgatccaatcgcaacaatgaagttcggcaagagcctcaacaaccagatcgtggagacgctcccggactggcgcgacaagttcctgtcctacaaggacctcaagaagcggctgaagcagatcggcgccggctctggcgagcggcggagcaagcgccagcgggtgggggacgggcgcggcggatcctcgccgcctgcgatgaccccggaggaggccggattcgtcgcgctcctcgacgccgagctcgacaagttcaacgccttcttcctcgagaaggaggaggactacgtcatccggctgaagggctggtcaagatcctcaagaagtacgacaagaggaccggcgcgctgatccgcctgcccttcatccggaacgtgatgcagganccgttctgcgccaccgacgtgctgtacaagctcgtcaaggggtgcgaggagatgctggaccagntcctcctgccccggaaccagcagcggcccgtgccgagcgacaacggcggggaaggagacagcgacggcgacgacgacaagcaacgaccggcggagccaggcgcctcatcgctgcccancggcggcggcggtggcgctggcgacatggagctggaggagatcgaggacatggagagcatgtacatgaagagtacggtggccgcgctcagggcgctcagggagatcaggagcgggagctccacggtgagcgcgttctccctgccgccactacggtgattgacacgttgtgttcggttcagtagcgaagcgagacagaacggggccgactgcgctgttgctgtaggtagtgtttggttcaaagaagacacgaacaaaatgaaagaaaatctgtaaaatgatagtaatattcatctagtattctc

SEQ ID NO: 14769 - protein, 276 aa, Zea mays subsp. mays
  peptide (1)..(276): Ceres Seq. ID no. 12469571
  misc_feature (137)..(192): Homolog of NCBI NO: 15241275 NR Description: ids4-like protein; protein id: At5g20150.1, by cDNA: 32843., supported by cDNA: gi_19715594 [Arabidopsis >gi|19715595|gb|AAL91621.1| AT5g20150/F5O24_40 [Arabidopsis
  misc_feature (235)..(276): Homolog of NCBI NO: 15241275 NR Description: ids4-like protein; protein id: At5g20150.1, by cDNA: 32843., supported by cDNA: gi_19715594 [Arabidopsis >gi|19715595|gb|AAL91621.1| AT5g20150/F5O24_40 [Arabidopsis
  misc_feature (137)..(192): Homolog of NCBI NO: 21592813 NR Description: ids4-like protein [Arabidopsis thaliana]
  misc_feature (235)..(276): Homolog of NCBI NO: 21592813 NR Description: ids4-like protein [Arabidopsis thaliana]
  misc_feature (137)..(275): Homolog of NCBI NO: 15225770 NR Description: unknown protein; protein id: At2g26660.1
  misc_feature (137)..(276): Homolog of NCBI NO: 16506648 NR Description: IDS-4-like protein [Castanea sativa]
  misc_feature (137)..(275): Homolog of NCBI NO: 26452101 NR Description: unknown protein [Arabidopsis thaliana]
  misc_feature (229)..(275): Homolog of NCBI NO: 37533962 NR Description: hypothetical protein [Oryza sativa (japonica group)] >gi|15451632|gb|AAK98756.1| Hypothetical protein [Oryza >gi|31431851|gb|AAP53570.1| hypothetical protein [Oryza sativa
  misc_feature (137)..(206): Homolog of NCBI NO: 18417630 NR Description: ids-4 protein - like; protein id: At5g15330.1, by cDNA: gi_15215821 [Arabidopsis thaliana]
  misc_feature (137)..(206): Homolog of NCBI NO: 11358467 NR Description: ids-4 protein-like - Arabidopsis thaliana
  misc_feature (164)..(164): Xaa is any aa, unknown or other
  misc_feature (186)..(186): Xaa is any aa, unknown or other
  misc_feature (225)..(225): Xaa is any aa, unknown or other
PLLVVVLCIRPLFIRPLLSRTSSQVPSHPATKFSTLRSNRNNEVRQEPQQPDRGDAPGLARQVPVLQGPQEAAEADRRRLWRAAEQAPAGGGRARRILAACDDPGGGRIRRAPRRRARQVQRLLPREGGGLRHPAEGLVKILKKYDKRTGALIRLPFIRNVMQXPFCATDVLYKLVKGCEEMLDQXLLPRNQQRPVPSDNGGEGDSDGDDDKQRPAEPGASSLPXGGGGGAGDMELEEIEDMESMYMKSTVAALRALREIRSGSSTVSAFSLPPLR

SEQ ID NO: 14770 - protein, 151 aa, Zea mays subsp. mays
  peptide (1)..(151): Ceres Seq. ID no. 12469572
  misc_feature (42)..(136): Pfam Name: SPX domain Pfam Description: SPX domain
  misc_feature (42)..(136): Homolog of NCBI NO: 15241275 NR Description: ids4-like protein; protein id: At5g20150.1, by cDNA: 32843., supported by cDNA: gi_19715594 [Arabidopsis >gi|19715595|gb|AAL91621.1| AT5g20150/F5O24_40 [Arabidopsis
  misc_feature (42)..(136): Homolog of NCBI NO: 21592813 NR Description: ids4-like protein [Arabidopsis thaliana]
  misc_feature (42)..(136): Homolog of NCBI NO: 15225770 NR Description: unknown protein; protein id: At2g26660.1
  misc_feature (105)..(136): Homolog of NCBI NO: 16506648 NR Description: IDS-4-like protein [Castanea sativa]
  misc_feature (42)..(134): Homolog of NCBI NO: 37533962 NR Description: hypothetical protein [Oryza sativa (japonica group)] >gi|15451632|gb|AAK98756.1| Hypothetical protein [Oryza >gi|31431851|gb|AAP53570.1| hypothetical protein [Oryza sativa
  misc_feature (96)..(136): Homolog of NCBI NO: 18417630 NR Description: ids-4 protein - like; protein id: At5g15330.1, by cDNA: gi_15215821 [Arabidopsis thaliana]
  misc_feature (42)..(74): Homolog of NCBI NO: 18417630 NR Description: ids-4 protein - like; protein id: At5g15330.1, by cDNA: gi_15215821 [Arabidopsis thaliana]
  misc_feature (96)..(136): Homolog of NCBI NO: 11358467 NR Description: ids-4 protein-like - Arabidopsis thaliana
  misc_feature (42)..(74): Homolog of NCBI NO: 11358467 NR Description: ids-4 protein-like - Arabidopsis thaliana
  misc_feature (71)..(136): Homolog of NCBI NO: 15225414 NR Description: hypothetical protein; protein id: At2g45130.1
RCSSSSSASVPYLSVPSSPALAPKFHPIPPRNSPRSDPIATMKFGKSLNNQIVETLPDWRDKFLSYKDLKKRLKQIGAGSGERRSKRQRVGDGRGGSSPPAMTPEEAGFVALLDAELDKFNAFFLEKEEDYVIRLKGWSRSSRSTTRGPAR

SEQ ID NO: 14771 - DNA, 1315 bp, Zea mays subsp. mays; identical to SEQ ID NO: 14233
  misc_feature (1)..(1315): Ceres Seq. ID no. 13635214
  misc_feature: MA Experiment ID: 108530 Result: Down-regulated in Transcription
  misc_feature: MA Experiment 108530 PARAMETER Experiment Name: Zm_Imbibed_Seeds_P Parameter: Age (day) Value: 6 vs. 2
  misc_feature: MA Experiment 108530 PARAMETER Experiment Name: Zm_Imbibed_Seeds_P Parameter: Organism Value: Zea mays
  misc_feature: MA Experiment 108530 PARAMETER Experiment Name: Zm_Imbibed_Seeds_P Parameter: Plant Line Value: 35A19
  misc_feature: MA Experiment 108530 PARAMETER Experiment Name: Zm_Imbibed_Seeds_P Parameter: Tissue Value: Aerial vs. Embryo
  misc_feature: MA Experiment ID: 108544 Result: Up-regulated in Transcription

SEQ ID NO: 14772 - protein, 153 aa, Zea mays subsp. mays; identical to SEQ ID NO: 14234
  peptide (1)..(153): Ceres Seq. ID no. 15220341
  misc_feature (38)..(152): Pfam Name: lactate/malate dehydrogenase, NAD binding domain Pfam Description: lactate/malate dehydrogenase, NAD binding domain
  misc_feature (38)..(152): Pfam Name: lactate/malate dehydrogenase, NAD binding domain Pfam Description: lactate/malate dehydrogenase, NAD binding domain
  misc_feature (36)..(152): Homolog of NCBI NO: 15219721 NR Description: malate dehydrogenase, cytosolic, putative thaliana] >gi|11133509|sp|P93819|MDHC_ARATH Malate dehydrogenase,
  misc_feature (36)..(152): Homolog of NCBI NO: 15239843 NR Description: malate dehydrogenase, cytosolic, putative thaliana] >gi|11133446|sp|P57106|MDHD_ARATH Malate dehydrogenase,
  misc_feature (36)..(152): Homolog of NCBI NO: 37535388 NR Description: cytoplasmic malate dehydrogenase [Oryza sativa
  misc_feature (36)..(152): Homolog of NCBI NO: 15982948 NR Description: NAD-dependent malate dehydrogenase [Prunus
  misc_feature (36)..(152): Homolog of NCBI NO: 11133373 NR Description: Malate dehydrogenase, cytoplasmic
  misc_feature (36)..(152): Homolog of NCBI NO: 37535388 NR Description: cytoplasmic malate dehydrogenase [Oryza sativa
  misc_feature (36)..(152): Homolog of NCBI NO: 15982948 NR Description: NAD-dependent malate dehydrogenase [Prunus
  misc_feature (36)..(152): Homolog of NCBI NO: 21593565 NR Description: cytosolic malate dehydrogenase [Arabidopsis
  misc_feature (36)..(152): Homolog of NCBI NO: 15239843 NR Description: malate dehydrogenase, cytosolic, putative thaliana] >gi|11133446|sp|P57106|MDHD_ARATH Malate dehydrogenase,
  misc_feature (36)..(152): Homolog of NCBI NO: 15219721 NR Description: malate dehydrogenase, cytosolic, putative thaliana] >gi|11133509|sp|P93819|MDHC_ARATH Malate dehydrogenase,
  misc_feature (36)..(152): Homolog of NCBI NO: 12229778 NR Description: Malate dehydrogenase, cytoplasmic
  misc_feature (36)..(152): Homolog of NCBI NO: 11133373 NR Description: Malate dehydrogenase, cytoplasmic
  misc_feature (36)..(152): Homolog of NCBI NO: 10798652 NR Description: malate dehydrogenase [Nicotiana tabacum]
  misc_feature (36)..(152): Homolog of NCBI NO: 10334493 NR Description: cytosolic malate dehydrogenase [Cicer arietinum]
  misc_feature (36)..(152): Homolog of NCBI NO: 18202485 NR Description: Malate dehydrogenase, cytoplasmic
  misc_feature (36)..(152): Homolog of NCBI NO: 12229778 NR Description: Malate dehydrogenase, cytoplasmic
  misc_feature (36)..(152): Homolog of NCBI NO: 10798652 NR Description: malate dehydrogenase [Nicotiana tabacum]
  misc_feature (36)..(152): Homolog of NCBI NO: 10334493 NR Description: cytosolic malate dehydrogenase [Cicer arietinum]
  misc_feature (36)..(152): Homolog of NCBI NO: 18202485 NR Description: Malate dehydrogenase, cytoplasmic
  misc_feature (36)..(152): Homolog of NCBI NO: 21593565 NR Description: cytosolic malate dehydrogenase [Arabidopsis
  misc_feature (10)..(10): Xaa is any aa, unknown or other
  misc_feature (11)..(11): Xaa is any aa, unknown or other
  misc_feature (26)..(26): Xaa is any aa, unknown or other
  misc_feature (27)..(27): Xaa is any aa, unknown or other
  misc_feature (29)..(29): Xaa is any aa, unknown or other
  misc_feature (30)..(30): Xaa is any aa, unknown or other
  misc_feature (32)..(32): Xaa is any aa, unknown or other
  misc_feature (33)..(33): Xaa is any aa, unknown or other
  misc_feature (34)..(34): Xaa is any aa, unknown or other
  misc_feature (40)..(40): Xaa is any aa, unknown or other
  misc_feature (47)..(47): Xaa is any aa, unknown or other
  misc_feature (50)..(50): Xaa is any aa, unknown or other
  misc_feature (55)..(55): Xaa is any aa, unknown or other
  misc_feature (56)..(56): Xaa is any aa, unknown or other
  misc_feature (63)..(63): Xaa is any aa, unknown or other
  misc_feature (78)..(78): Xaa is any aa, unknown or other
  misc_feature (87)..(87): Xaa is any aa, unknown or other
  misc_feature (93)..(93): Xaa is any aa, unknown or other
  misc_feature (97)..(97): Xaa is any aa, unknown or other
  misc_feature (104)..(104): Xaa is any aa, unknown or other
  misc_feature (106)..(106): Xaa is any aa, unknown or other
  misc_feature (117)..(117): Xaa is any aa, unknown or other
  misc_feature (118)..(118): Xaa is any aa, unknown or other
  misc_feature (123)..(123): Xaa is any aa, unknown or other
  misc_feature (132)..(132): Xaa is any aa, unknown or other
  misc_feature (133)..(133): Xaa is any aa, unknown or other
  misc_feature (140)..(140): Xaa is any aa, unknown or other
  misc_feature (148)..(148): Xaa is any aa, unknown or other

SEQ ID NO: 14773 - protein, 143 aa, Zea mays subsp. mays; identical to SEQ ID NO: 14235
  peptide (1)..(143): Ceres Seq. ID no. 15220342
  misc_feature (85)..(142): Pfam Name: lactate/malate dehydrogenase, alpha/beta Pfam Description: lactate/malate dehydrogenase, alpha/beta
  misc_feature (85)..(142): Pfam Name: lactate/malate dehydrogenase, alpha/beta Pfam Description: lactate/malate dehydrogenase, alpha/beta
  misc_feature (6)..(142): Homolog of NCBI NO: 18202485 NR Description: Malate dehydrogenase, cytoplasmic
  misc_feature (6)..(142): Homolog of NCBI NO: 37535388 NR Description: cytoplasmic malate dehydrogenase [Oryza sativa
  misc_feature (6)..(142): Homolog of NCBI NO: 21593565 NR Description: cytosolic malate dehydrogenase [Arabidopsis
  misc_feature (6)..(142): Homolog of NCBI NO: 15239843 NR Description: malate dehydrogenase, cytosolic, putative thaliana] >gi|11133446|sp|P57106|MDHD_ARATH Malate dehydrogenase,
  misc_feature (6)..(142): Homolog of NCBI NO: 15982948 NR Description: NAD-dependent malate dehydrogenase [Prunus
  misc_feature (6)..(142): Homolog of NCBI NO: 37535388 NR Description: cytoplasmic malate dehydrogenase [Oryza sativa
  misc_feature (6)..(142): Homolog of NCBI NO: 15239843 NR Description: malate dehydrogenase, cytosolic, putative thaliana] >gi|11133446|sp|P57106|MDHD_ARATH Malate dehydrogenase,
  misc_feature (6)..(142): Homolog of NCBI NO: 12229778 NR Description: Malate dehydrogenase, cytoplasmic
  misc_feature (6)..(142): Homolog of NCBI NO: 11133373 NR Description: Malate dehydrogenase, cytoplasmic
  misc_feature (6)..(142): Homolog of NCBI NO: 15219721 NR Description: malate dehydrogenase, cytosolic, putative thaliana] >gi|11133509|sp|P93819|MDHC_ARATH Malate dehydrogenase,
  misc_feature (6)..(142): Homolog of NCBI NO: 10334493 NR Description: cytosolic malate dehydrogenase [Cicer arietinum]
  misc_feature (6)..(142): Homolog of NCBI NO: 10798652 NR Description: malate dehydrogenase [Nicotiana tabacum]
  misc_feature (6)..(142): Homolog of NCBI NO: 15982948 NR Description: NAD-dependent malate dehydrogenase [Prunus
  misc_feature (6)..(142): Homolog of NCBI NO: 21593565 NR Description: cytosolic malate dehydrogenase [Arabidopsis
  misc_feature (6)..(142): Homolog of NCBI NO: 18202485 NR Description: Malate dehydrogenase, cytoplasmic
  misc_feature (6)..(142): Homolog of NCBI NO: 10798652 NR Description: malate dehydrogenase [Nicotiana tabacum]
  misc_feature (6)..(142): Homolog of NCBI NO: 10334493 NR Description: cytosolic malate dehydrogenase [Cicer arietinum]
  misc_feature (6)..(142): Homolog of NCBI NO: 15219721 NR Description: malate dehydrogenase, cytosolic, putative thaliana] >gi|11133509|sp|P93819|MDHC_ARATH Malate dehydrogenase,
  misc_feature (6)..(142): Homolog of NCBI NO: 11133373 NR Description: Malate dehydrogenase, cytoplasmic
  misc_feature (6)..(142): Homolog of NCBI NO: 12229778 NR Description: Malate dehydrogenase, cytoplasmic
  misc_feature (8)..(8): Xaa is any aa, unknown or other
  misc_feature (9)..(9): Xaa is any aa, unknown or other
  misc_feature (15)..(15): Xaa is any aa, unknown or other
  misc_feature (24)..(24): Xaa is any aa, unknown or other
  misc_feature (25)..(25): Xaa is any aa, unknown or other
  misc_feature (32)..(32): Xaa is any aa, unknown or other
  misc_feature (39)..(39): Xaa is any aa, unknown or other
  misc_feature (49)..(49): Xaa is any aa, unknown or other
  misc_feature (50)..(50): Xaa is any aa, unknown or other
  misc_feature (62)..(62): Xaa is any aa, unknown or other
  misc_feature (75)..(75): Xaa is any aa, unknown or other
  misc_feature (77)..(77): Xaa is any aa, unknown or other
  misc_feature (78)..(78): Xaa is any aa, unknown or other
  misc_feature (79)..(79): Xaa is any aa, unknown or other
  misc_feature (86)..(86): Xaa is any aa, unknown or other
  misc_feature (101)..(101): Xaa is any aa, unknown or other
  misc_feature (104)..(104): Xaa is any aa, unknown or other
  misc_feature (119)..(119): Xaa is any aa, unknown or other

SEQ ID NO: 14774 - protein, 130 aa, Zea mays subsp. mays; identical to SEQ ID NO: 14236
  peptide (1)..(130): Ceres Seq. ID no. 15220343
  misc_feature (72)..(129): Pfam Name: lactate/malate dehydrogenase, alpha/beta Pfam Description: lactate/malate dehydrogenase, alpha/beta
  misc_feature (72)..(129): Pfam Name: lactate/malate dehydrogenase, alpha/beta Pfam Description: lactate/malate dehydrogenase, alpha/beta
  misc_feature (1)..(129): Homolog of NCBI NO: 18202485 NR Description: Malate dehydrogenase, cytoplasmic
  misc_feature (1)..(129): Homolog of NCBI NO: 37535388 NR Description: cytoplasmic malate dehydrogenase [Oryza sativa
  misc_feature (1)..(129): Homolog of NCBI NO: 21593565 NR Description: cytosolic malate dehydrogenase [Arabidopsis
  misc_feature (1)..(129): Homolog of NCBI NO: 15239843 NR Description: malate dehydrogenase, cytosolic, putative thaliana] >gi|11133446|sp|P57106|MDHD_ARATH Malate dehydrogenase,
  misc_feature (1)..(129): Homolog of NCBI NO: 15982948 NR Description: NAD-dependent malate dehydrogenase [Prunus
  misc_feature (1)..(129): Homolog of NCBI NO: 37535388 NR Description: cytoplasmic malate dehydrogenase [Oryza sativa
  misc_feature (1)..(129): Homolog of NCBI NO: 15239843 NR Description: malate dehydrogenase, cytosolic, putative thaliana] >gi|11133446|sp|P57106|MDHD_ARATH Malate dehydrogenase,
  misc_feature (1)..(129): Homolog of NCBI NO: 12229778 NR Description: Malate dehydrogenase, cytoplasmic
  misc_feature (1)..(129): Homolog of NCBI NO: 11133373 NR Description: Malate dehydrogenase, cytoplasmic
  misc_feature (1)..(129): Homolog of NCBI NO: 15219721 NR Description: malate dehydrogenase, cytosolic, putative thaliana] >gi|11133509|sp|P93819|MDHC_ARATH Malate dehydrogenase,
  misc_feature (1)..(129): Homolog of NCBI NO: 10334493 NR Description: cytosolic malate dehydrogenase [Cicer arietinum]
  misc_feature (1)..(129): Homolog of NCBI NO: 10798652 NR Description: malate dehydrogenase [Nicotiana tabacum]
  misc_feature (1)..(129): Homolog of NCBI NO: 15982948 NR Description: NAD-dependent malate dehydrogenase [Prunus
  misc_feature (1)..(129): Homolog of NCBI NO: 21593565 NR Description: cytosolic malate dehydrogenase [Arabidopsis
  misc_feature (1)..(129): Homolog of NCBI NO: 18202485 NR Description: Malate dehydrogenase, cytoplasmic
  misc_feature (1)..(129): Homolog of NCBI NO: 10798652 NR Description: malate dehydrogenase [Nicotiana tabacum]
  misc_feature (1)..(129): Homolog of NCBI NO: 10334493 NR Description: cytosolic malate dehydrogenase [Cicer arietinum]
  misc_feature (1)..(129): Homolog of NCBI NO: 15219721 NR Description: malate dehydrogenase, cytosolic, putative thaliana] >gi|11133509|sp|P93819|MDHC_ARATH Malate dehydrogenase,
  misc_feature (1)..(129): Homolog of NCBI NO: 11133373 NR Description: Malate dehydrogenase, cytoplasmic
  misc_feature (1)..(129): Homolog of NCBI NO: 12229778 NR Description: Malate dehydrogenase, cytoplasmic
  misc_feature (2)..(2): Xaa is any aa, unknown or other
  misc_feature (11)..(11): Xaa is any aa, unknown or other
  misc_feature (12)..(12): Xaa is any aa, unknown or other
  misc_feature (19)..(19): Xaa is any aa, unknown or other
  misc_feature (26)..(26): Xaa is any aa, unknown or other
  misc_feature (36)..(36): Xaa is any aa, unknown or other
  misc_feature (37)..(37): Xaa is any aa, unknown or other
  misc_feature (49)..(49): Xaa is any aa, unknown or other
  misc_feature (62)..(62): Xaa is any aa, unknown or other
  misc_feature (64)..(64): Xaa is any aa, unknown or other
  misc_feature (65)..(65): Xaa is any aa, unknown or other
  misc_feature (66)..(66): Xaa is any aa, unknown or other
  misc_feature (73)..(73): Xaa is any aa, unknown or other
  misc_feature (88)..(88): Xaa is any aa, unknown or other
  misc_feature (91)..(91): Xaa is any aa, unknown or other
  misc_feature (106)..(106): Xaa is any aa, unknown or other

SEQ ID NO: 14775 - DNA, 1015 bp, Zea mays subsp. mays; identical to SEQ ID NO: 3770
  misc_feature (1)..(1015): Ceres Seq. ID no. 12595679
  misc_feature: MA Experiment ID: 108559 Result: Up-regulated in Transcription
  misc_feature: MA Experiment 108559 PARAMETER Experiment Name: Zm_5mM_NO_P Parameter: Age (day) Value: 8
  misc_feature: MA Experiment 108559 PARAMETER Experiment Name: Zm_5mM_NO_P Parameter: Organism Value: Zea mays
  misc_feature: MA Experiment 108559 PARAMETER Experiment Name: Zm_5mM_NO_P Parameter: Plant Line Value: 35A19
  misc_feature: MA Experiment 108559 PARAMETER Experiment Name: Zm_5mM_NO_P Parameter: Timepoint (hr) Value: 12
  misc_feature: MA Experiment 108559 PARAMETER Experiment Name: Zm_5mM_NO_P Parameter: Tissue Value: Aerial
  misc_feature: MA Experiment 108559 PARAMETER Experiment Name: Zm_5mM_NO_P Parameter: Treatment Value: 5mM NO vs. No Treatment
  misc_feature: MA Experiment ID: 20000477 Result: Up-regulated in Transcription
  misc_feature: MA Experiment 20000477 PARAMETER Experiment Name: Zm_5mM_SA_P Parameter: Age (day) Value: 10
  misc_feature: MA Experiment 20000477 PARAMETER Experiment Name: Zm_5mM_SA_P Parameter: Organism Value: Zea mays
  misc_feature: MA Experiment 20000477 PARAMETER Experiment Name: Zm_5mM_SA_P Parameter: Plant Line Value: 35A19
  misc_feature: MA Experiment 20000477 PARAMETER Experiment Name: Zm_5mM_SA_P Parameter: Timepoint (hr) Value: 48
  misc_feature: MA Experiment 20000477 PARAMETER Experiment Name: Zm_5mM_SA_P Parameter: Tissue Value: Aerial
  misc_feature: MA Experiment 20000477 PARAMETER Experiment Name: Zm_5mM_SA_P Parameter: Treatment Value: 5mM SA vs. No Treatment
  misc_feature: MA Experiment ID: 20000480 Result: Up-regulated in Transcription
  misc_feature: MA Experiment 20000480 PARAMETER Experiment Name: Zm_Drought_P Parameter: Age (day) Value: 11
  misc_feature: MA Experiment 20000480 PARAMETER Experiment Name: Zm_Drought_P Parameter: Organism Value: Zea mays
  misc_feature: MA Experiment 20000480 PARAMETER Experiment Name: Zm_Drought_P Parameter: Plant Line Value: 35A19
  misc_feature: MA Experiment 20000480 PARAMETER Experiment Name: Zm_Drought_P Parameter: Timepoint (hr) Value: 72
  misc_feature: MA Experiment 20000480 PARAMETER Experiment Name: Zm_Drought_P Parameter: Tissue Value: Aerial
  misc_feature: MA Experiment 20000480 PARAMETER Experiment Name: Zm_Drought_P Parameter: Treatment Value: Drought vs. No Drought
  misc_feature: MA Experiment ID: 20000535 Result: Up-regulated in Transcription
  misc_feature: MA Experiment 20000535 PARAMETER Experiment Name: Zm_Hybrid_Seed_Dev_P Parameter: DAP Value: 30 vs. 12
  misc_feature: MA Experiment 20000535 PARAMETER Experiment Name: Zm_Hybrid_Seed_Dev_P Parameter: Organism Value: Zea mays
  misc_feature: MA Experiment 20000535 PARAMETER Experiment Name: Zm_Hybrid_Seed_Dev_P Parameter: Plant Line Value: 35A19
  misc_feature: MA Experiment 20000535 PARAMETER Experiment Name: Zm_Hybrid_Seed_Dev_P Parameter: Tissue Value: Embryo vs. Unfert Floret

SEQ ID NO: 14776 - protein, 143 aa, Zea mays subsp. mays; identical to SEQ ID NO: 3771
  peptide (1)..(143): Ceres Seq. ID no. 12595680
  misc_feature (76)..(100): Pfam Name: A20-like zinc finger Pfam Description: A20-like zinc finger
  misc_feature (76)..(100): Pfam Name: A20-like zinc finger Pfam Description: A20-like zinc finger
  misc_feature (76)..(100): Pfam Name: A20-like zinc finger Pfam Description: A20-like zinc finger
  misc_feature (63)..(143): Homolog of NCBI NO: 35187687 NR Description: zinc-finger protein [Oryza sativa (indica
  misc_feature (63)..(143): Homolog of NCBI NO: 11361253 NR Description: hypothetical protein p85RF [imported] - Prunus
  misc_feature (63)..(143): Homolog of NCBI NO: 18403408 NR Description: expressed protein; protein id: At1g51200.1, by cDNA: gi_15912334 [Arabidopsis thaliana]
  misc_feature (63)..(143): Homolog of NCBI NO: 25082726 NR Description: expressed protein [Arabidopsis thaliana]
  misc_feature (62)..(143): Homolog of NCBI NO: 15231686 NR Description: zinc finger - like protein; protein id: supported by cDNA: gi_14596166 [Arabidopsis thaliana]
  misc_feature (63)..(143): Homolog of NCBI NO: 11361253 NR Description: hypothetical protein p85RF [imported] - Prunus
  misc_feature (63)..(143): Homolog of NCBI NO: 25082726 NR Description: expressed protein [Arabidopsis thaliana]
  misc_feature (63)..(143): Homolog of NCBI NO: 18403408 NR Description: expressed protein; protein id: At1g51200.1, by cDNA: gi_15912334 [Arabidopsis thaliana]
  misc_feature (63)..(143): Homolog of NCBI NO: 11361253 NR Description: hypothetical protein p85RF [imported] - Prunus
  misc_feature (63)..(143): Homolog of NCBI NO: 35187687 NR Description: zinc-finger protein [Oryza sativa (indica
  misc_feature (71)..(143): Homolog of NCBI NO: 29791559 NR Description: Unknown (protein for MGC:56057) [Danio rerio]
  misc_feature (62)..(143): Homolog of NCBI NO: 18404102 NR Description: expressed protein; protein id: At2g36320.1, by cDNA: 24255. [Arabidopsis thaliana] >gi|25408460|pir||C84779
  misc_feature (67)..(103): Homolog of NCBI NO: 30908921 NR Description: putative zinc finger transcription factor ZFP33
  misc_feature (64)..(136): Homolog of NCBI NO: 28269431 NR Description: putative zinc finger protein [Oryza sativa
  misc_feature (62)..(143): Homolog of NCBI NO: 14596167 NR Description: zinc finger-like protein [Arabidopsis thaliana]
  misc_feature (62)..(143): Homolog of NCBI NO: 15231686 NR Description: zinc finger - like protein; protein id: supported by cDNA: gi_14596166 [Arabidopsis thaliana]
  misc_feature (71)..(143): Homolog of NCBI NO: 29791559 NR Description: Unknown (protein for MGC:56057) [Danio rerio]
  misc_feature (62)..(143): Homolog of NCBI NO: 18404102 NR Description: expressed protein; protein id: At2g36320.1, by cDNA: 24255. [Arabidopsis thaliana] >gi|25408460|pir||C84779
  misc_feature (67)..(103): Homolog of NCBI NO: 30908921 NR Description: putative zinc finger transcription factor ZFP33
  misc_feature (64)..(136): Homolog of NCBI NO: 28269431 NR Description: putative zinc finger protein [Oryza sativa
  misc_feature (62)..(143): Homolog of NCBI NO: 14596167 NR Description: zinc finger-like protein [Arabidopsis thaliana]
  misc_feature (62)..(143): Homolog of NCBI NO: 15231686 NR Description: zinc finger - like protein; protein id: supported by cDNA: gi_14596166 [Arabidopsis thaliana]
  misc_feature (63)..(143): Homolog of NCBI NO: 25082726 NR Description: expressed protein [Arabidopsis thaliana]
  misc_feature (63)..(143): Homolog of NCBI NO: 18403408 NR Description: expressed protein; protein id: At1g51200.1, by cDNA: gi_15912334 [Arabidopsis thaliana]
  misc_feature (63)..(143): Homolog of NCBI NO: 35187687 NR Description: zinc-finger protein [Oryza sativa (indica
  misc_feature (62)..(143): Homolog of NCBI NO: 14596167 NR Description: zinc finger-like protein [Arabidopsis thaliana]
  misc_feature (64)..(136): Homolog of NCBI NO: 28269431 NR Description: putative zinc finger protein [Oryza sativa
  misc_feature (67)..(103): Homolog of NCBI NO: 30908921 NR Description: putative zinc finger transcription factor ZFP33
  misc_feature (62)..(143): Homolog of NCBI NO: 18404102 NR Description: expressed protein; protein id: At2g36320.1, by cDNA: 24255. [Arabidopsis thaliana] >gi|25408460|pir||C84779
  misc_feature (71)..(143): Homolog of NCBI NO: 29791559 NR Description: Unknown (protein for MGC:56057) [Danio rerio]

SEQ ID NO: 14777 - protein, 91 aa, Zea mays subsp. mays; identical to SEQ ID NO: 3772
  peptide (1)..(91): Ceres Seq. ID no. 12595681

SEQ ID NO: 14778 - protein, 82 aa, Zea mays subsp. mays; identical to SEQ ID NO: 3773
  peptide (1)..(82): Ceres Seq. ID no. 12595682
  misc_feature (23)..(63): Pfam Name: AN1-like Zinc finger Pfam Description: AN1-like Zinc finger
  misc_feature (23)..(63): Pfam Name: AN1-like Zinc finger Pfam Description: AN1-like Zinc finger
  misc_feature (23)..(63): Pfam Name: AN1-like Zinc finger Pfam Description: AN1-like Zinc finger
  misc_feature (1)..(82): Homolog of NCBI NO: 35187687 NR Description: zinc-finger protein [Oryza sativa (indica
  misc_feature (1)..(82): Homolog of NCBI NO: 11361253 NR Description: hypothetical protein p85RF [imported] - Prunus
  misc_feature (1)..(82): Homolog of NCBI NO: 18403408 NR Description: expressed protein; protein id: At1g51200.1, by cDNA: gi_15912334 [Arabidopsis thaliana]
  misc_feature (1)..(82): Homolog of NCBI NO: 25082726 NR Description: expressed protein [Arabidopsis thaliana]
  misc_feature (1)..(82): Homolog of NCBI NO: 15231686 NR Description: zinc finger - like protein; protein id: supported by cDNA: gi_14596166 [Arabidopsis thaliana]
  misc_feature (1)..(82): Homolog of NCBI NO: 11361253 NR Description: hypothetical protein p85RF [imported] - Prunus
  misc_feature (1)..(82): Homolog of NCBI NO: 25082726 NR Description: expressed protein [Arabidopsis thaliana]
  misc_feature (1)..(82): Homolog of NCBI NO: 18403408 NR Description: expressed protein; protein id: At1g51200.1, by cDNA: gi_15912334 [Arabidopsis thaliana]
  misc_feature (1)..(82): Homolog of NCBI NO: 11361253 NR Description: hypothetical protein p85RF [imported] - Prunus
  misc_feature (1)..(82): Homolog of NCBI NO: 35187687 NR Description: zinc-finger protein [Oryza sativa (indica
  misc_feature (3)..(82): Homolog of NCBI NO: 29791559 NR Description: Unknown (protein for MGC:56057) [Danio rerio]
  misc_feature (1)..(82): Homolog of NCBI NO: 18404102 NR Description: expressed protein; protein id: At2g36320.1, by cDNA: 24255. [Arabidopsis thaliana] >gi|25408460|pir||C84779
  misc_feature (3)..(82): Homolog of NCBI NO: 30908921 NR Description: putative zinc finger transcription factor ZFP33
  misc_feature (6)..(82): Homolog of NCBI NO: 28269431 NR Description: putative zinc finger protein [Oryza sativa
  misc_feature (1)..(82): Homolog of NCBI NO: 14596167 NR Description: zinc finger-like protein [Arabidopsis thaliana]
  misc_feature (1)..(82): Homolog of NCBI NO: 15231686 NR Description: zinc finger - like protein; protein id: supported by cDNA: gi_14596166 [Arabidopsis thaliana]
  misc_feature (3)..(82): Homolog of NCBI NO: 29791559 NR Description: Unknown (protein for MGC:56057) [Danio rerio]
  misc_feature (1)..(82): Homolog of NCBI NO: 18404102 NR Description: expressed protein; protein id: At2g36320.1, by cDNA: 24255. [Arabidopsis thaliana] >gi|25408460|pir||C84779
  misc_feature (3)..(82): Homolog of NCBI NO: 30908921 NR Description: putative zinc finger transcription factor ZFP33
  misc_feature (6)..(82): Homolog of NCBI NO: 28269431 NR Description: putative zinc finger protein [Oryza sativa
  misc_feature (1)..(82): Homolog of NCBI NO: 14596167 NR Description: zinc finger-like protein [Arabidopsis thaliana]
  misc_feature (1)..(82): Homolog of NCBI NO: 15231686 NR Description: zinc finger - like protein; protein id: supported by cDNA: gi_14596166 [Arabidopsis thaliana]
  misc_feature (1)..(82): Homolog of NCBI NO: 25082726 NR Description: expressed protein [Arabidopsis thaliana]
  misc_feature (1)..(82): Homolog of NCBI NO: 18403408 NR Description: expressed protein; protein id: At1g51200.1, by cDNA: gi_15912334 [Arabidopsis thaliana]
  misc_feature (1)..(82): Homolog of NCBI NO: 35187687 NR Description: zinc-finger protein [Oryza sativa (indica
  misc_feature (1)..(82): Homolog of NCBI NO: 14596167 NR Description: zinc finger-like protein [Arabidopsis thaliana]
  misc_feature (6)..(82): Homolog of NCBI NO: 28269431 NR Description: putative zinc finger protein [Oryza sativa
  misc_feature (3)..(82): Homolog of NCBI NO: 30908921 NR Description: putative zinc finger transcription factor ZFP33
  misc_feature (1)..(82): Homolog of NCBI NO: 18404102 NR Description: expressed protein; protein id: At2g36320.1, by cDNA: 24255. [Arabidopsis thaliana] >gi|25408460|pir||C84779
  misc_feature (3)..(82): Homolog of NCBI NO: 29791559 NR Description: Unknown (protein for MGC:56057) [Danio rerio]

SEQ ID NO: 14779 - protein, 81 aa, Zea mays subsp. mays; identical to SEQ ID NO: 3774
  peptide (1)..(81): Ceres Seq. ID no. 12595683
  misc_feature (14)..(38): Pfam Name: A20-like zinc finger Pfam Description: A20-like zinc finger
  misc_feature (14)..(38): Pfam Name: A20-like zinc finger Pfam Description: A20-like zinc finger
  misc_feature (14)..(38): Pfam Name: A20-like zinc finger Pfam Description: A20-like zinc finger
  misc_feature (1)..(81): Homolog of NCBI NO: 35187687 NR Description: zinc-finger protein [Oryza sativa (indica
  misc_feature (1)..(81): Homolog of NCBI NO: 11361253 NR Description: hypothetical protein p85RF [imported] - Prunus
  misc_feature (1)..(81): Homolog of NCBI NO: 18403408 NR Description: expressed protein; protein id: At1g51200.1, by cDNA: gi_15912334 [Arabidopsis thaliana]
  misc_feature (1)..(81): Homolog of NCBI NO: 25082726 NR Description: expressed protein [Arabidopsis thaliana]
  misc_feature (1)..(81): Homolog of NCBI NO: 15231686 NR Description: zinc finger - like protein; protein id: supported by cDNA: gi_14596166 [Arabidopsis thaliana]
  misc_feature (1)..(81): Homolog of NCBI NO: 11361253 NR Description: hypothetical protein p85RF [imported] - Prunus
  misc_feature (1)..(81): Homolog of NCBI NO: 25082726 NR Description: expressed protein [Arabidopsis thaliana]
  misc_feature (1)..(81): Homolog of NCBI NO: 18403408 NR Description: expressed protein; protein id: At1g51200.1, by cDNA: gi_15912334 [Arabidopsis thaliana]
  misc_feature (1)..(81): Homolog of NCBI NO: 11361253 NR Description: hypothetical protein p85RF [imported] - Prunus
  misc_feature (1)..(81): Homolog of NCBI NO: 35187687 NR Description: zinc-finger protein [Oryza sativa (indica
  misc_feature (9)..(81): Homolog of NCBI NO: 29791559 NR Description: Unknown (protein for MGC:56057) [Danio rerio]
  misc_feature (1)..(81): Homolog of NCBI NO: 18404102 NR Description: expressed protein; protein id: At2g36320.1, by cDNA: 24255. [Arabidopsis thaliana] >gi|25408460|pir||C84779
  misc_feature (5)..(41): Homolog of NCBI NO: 30908921 NR Description: putative zinc finger transcription factor ZFP33
  misc_feature (2)..(74): Homolog of NCBI NO: 28269431 NR Description: putative zinc finger protein [Oryza sativa
  misc_feature (1)..(81): Homolog of NCBI NO: 14596167 NR Description: zinc finger-like protein [Arabidopsis thaliana]
  misc_feature (1)..(81): Homolog of NCBI NO: 15231686 NR Description: zinc finger - like protein; protein id: supported by cDNA: gi_14596166 [Arabidopsis thaliana]
  misc_feature (9)..(81): Homolog of NCBI NO: 29791559 NR Description: Unknown (protein for MGC:56057) [Danio rerio]
  misc_feature (1)..(81): Homolog of NCBI NO: 18404102 NR Description: expressed protein; protein id: At2g36320.1, by cDNA: 24255. [Arabidopsis thaliana] >gi|25408460|pir||C84779
  misc_feature (5)..(41): Homolog of NCBI NO: 30908921 NR Description: putative zinc finger transcription factor ZFP33
  misc_feature (2)..(74): Homolog of NCBI NO: 28269431 NR Description: putative zinc finger protein [Oryza sativa
  misc_feature (1)..(81): Homolog of NCBI NO: 14596167 NR Description: zinc finger-like protein [Arabidopsis thaliana]
  misc_feature (1)..(81): Homolog of NCBI NO: 15231686 NR Description: zinc finger - like protein; protein id: supported by cDNA: gi_14596166 [Arabidopsis thaliana]
  misc_feature (1)..(81): Homolog of NCBI NO: 25082726 NR Description: expressed protein [Arabidopsis thaliana]
  misc_feature (1)..(81): Homolog of NCBI NO: 18403408 NR Description: expressed protein; protein id: At1g51200.1, by cDNA: gi_15912334 [Arabidopsis thaliana]
  misc_feature (1)..(81): Homolog of NCBI NO: 35187687 NR Description: zinc-finger protein [Oryza sativa (indica
  misc_feature (1)..(81): Homolog of NCBI NO: 14596167 NR Description: zinc finger-like protein [Arabidopsis thaliana]
  misc_feature (2)..(74): Homolog of NCBI NO: 28269431 NR Description: putative zinc finger protein [Oryza sativa
  misc_feature (5)..(41): Homolog of NCBI NO: 30908921 NR Description: putative zinc finger transcription factor ZFP33
  misc_feature (1)..(81): Homolog of NCBI NO: 18404102 NR Description: expressed protein; protein id: At2g36320.1, by cDNA: 24255. [Arabidopsis thaliana] >gi|25408460|pir||C84779
  misc_feature (9)..(81): Homolog of NCBI NO: 29791559 NR Description: Unknown (protein for MGC:56057) [Danio rerio]

SEQ ID NO: 14780 - DNA, 1610 bp, Zea mays subsp. mays
  misc_feature (1)..(1610): Ceres Seq. ID no. 13504118
  misc_feature: MA Experiment ID: 108527 Result: Up-regulated in Transcription
  misc_feature: MA Experiment 108527 PARAMETER Experiment Name: Zm_5mM_NO_P Parameter: Age (day) Value: 8
  misc_feature: MA Experiment 108527 PARAMETER Experiment Name: Zm_5mM_NO_P Parameter: Organism Value: Zea mays
  misc_feature: MA Experiment 108527 PARAMETER Experiment Name: Zm_5mM_NO_P Parameter: Plant Line Value: 35A19
  misc_feature: MA Experiment 108527 PARAMETER Experiment Name: Zm_5mM_NO_P Parameter: Timepoint (hr) Value: 6
  misc_feature: MA Experiment 108527 PARAMETER Experiment Name: Zm_5mM_NO_P Parameter: Tissue Value: Aerial
  misc_feature: MA Experiment 108527 PARAMETER Experiment Name: Zm_5mM_NO_P Parameter: Treatment Value: 5mM NO vs. No Treatment
  misc_feature: MA Experiment ID: 108529 Result: Up-regulated in Transcription
  misc_feature: MA Experiment 108529 PARAMETER Experiment Name: Zm_Imbibed_Seeds_P Parameter: Age (day) Value: 5 vs. 2
  misc_feature: MA Experiment 108529 PARAMETER Experiment Name: Zm_Imbibed_Seeds_P Parameter: Organism Value: Zea mays
  misc_feature: MA Experiment 108529 PARAMETER Experiment Name: Zm_Imbibed_Seeds_P Parameter: Plant Line Value: 35A19
  misc_feature: MA Experiment 108529 PARAMETER Experiment Name: Zm_Imbibed_Seeds_P Parameter: Tissue Value: Roots vs. Embryo
  misc_feature: MA Experiment ID: 108535 Result: Down-regulated in Transcription
  misc_feature: MA Experiment 108535 PARAMETER Experiment Name: Zm_Meristem_P Parameter: Age (day) Value: 8
  misc_feature: MA Experiment 108535 PARAMETER Experiment Name: Zm_Meristem_P Parameter: Organism Value: Zea mays
  misc_feature: MA Experiment 108535 PARAMETER Experiment Name: Zm_Meristem_P Parameter: Plant Line Value: 35A19
  misc_feature: MA Experiment 108535 PARAMETER Experiment Name: Zm_Meristem_P Parameter: Tissue Value: Root Meristem vs. Above Root Meristem
  misc_feature: MA Experiment ID: 108536 Result: Up-regulated in Transcription
  misc_feature: MA Experiment 108536 PARAMETER Experiment Name: Zm_Meristem_P Parameter: Age (day) Value: 8
  misc_feature: MA Experiment 108536 PARAMETER Experiment Name: Zm_Meristem_P Parameter: Organism Value: Zea mays
  misc_feature: MA Experiment 108536 PARAMETER Experiment Name: Zm_Meristem_P Parameter: Plant Line Value: 35A19
  misc_feature: MA Experiment 108536 PARAMETER Experiment Name: Zm_Meristem_P Parameter: Tissue Value: Shoot Meristem vs. Above Shoot Meristem
  misc_feature: MA Experiment ID: 108543 Result: Down-regulated in Transcription
  misc_feature: MA Experiment ID: 108544 Result: Up-regulated in Transcription
  misc_feature: MA Experiment ID: 108556 Result: Up-regulated in Transcription
  misc_feature: MA Experiment 108556 PARAMETER Experiment Name: Zm_Drought_P Parameter: Age (day) Value: 9
  misc_feature: MA Experiment 108556 PARAMETER Experiment Name: Zm_Drought_P Parameter: Organism Value: Zea mays
  misc_feature: MA Experiment 108556 PARAMETER Experiment Name: Zm_Drought_P Parameter: Plant Line Value: 35A19
  misc_feature: MA Experiment 108556 PARAMETER Experiment Name: Zm_Drought_P Parameter: Timepoint (hr) Value: 24
  misc_feature: MA Experiment 108556 PARAMETER Experiment Name: Zm_Drought_P Parameter: Tissue Value: Aerial
  misc_feature: MA Experiment 108556 PARAMETER Experiment Name: Zm_Drought_P Parameter: Treatment Value: Drought vs. No Drought
  misc_feature: MA Experiment ID: 108559 Result: Up-regulated in Transcription
  misc_feature: MA Experiment 108559 PARAMETER Experiment Name: Zm_5mM_NO_P Parameter: Age (day) Value: 8
  misc_feature: MA Experiment 108559 PARAMETER Experiment Name: Zm_5mM_NO_P Parameter: Organism Value: Zea mays
  misc_feature: MA Experiment 108559 PARAMETER Experiment Name: Zm_5mM_NO_P Parameter: Plant Line Value: 35A19
  misc_feature: MA Experiment 108559 PARAMETER Experiment Name: Zm_5mM_NO_P Parameter: Timepoint (hr) Value: 12
  misc_feature: MA Experiment 108559 PARAMETER Experiment Name: Zm_5mM_NO_P Parameter: Tissue Value: Aerial
  misc_feature: MA Experiment 108559 PARAMETER Experiment Name: Zm_5mM_NO_P Parameter: Treatment Value: 5mM NO vs. No Treatment
  misc_feature: MA Experiment ID: 108687 Result: Up-regulated in Transcription
  misc_feature: MA Experiment 108687 PARAMETER Experiment Name: Zm_Embryos-Flowers__P Parameter: Tissue Value: Embryo vs. Aerial+
  misc_feature: MA Experiment ID: 108688 Result: Down-regulated in Transcription
  misc_feature: MA Experiment 108688 PARAMETER Experiment Name: Zm_Embryos-Flowers__P Parameter: Tissue Value: Immature Flowers vs. Aerial+
  misc_feature: MA Experiment ID: 20000477 Result: Up-regulated in Transcription
  misc_feature: MA Experiment 20000477 PARAMETER Experiment Name: Zm_5mM_SA_P Parameter: Age (day) Value: 10
  misc_feature: MA Experiment 20000477 PARAMETER Experiment Name: Zm_5mM_SA_P Parameter: Organism Value: Zea mays
  misc_feature: MA Experiment 20000477 PARAMETER Experiment Name: Zm_5mM_SA_P Parameter: Plant Line Value: 35A19
  misc_feature: MA Experiment 20000477 PARAMETER Experiment Name: Zm_5mM_SA_P Parameter: Timepoint (hr) Value: 48
  misc_feature: MA Experiment 20000477 PARAMETER Experiment Name: Zm_5mM_SA_P Parameter: Tissue Value: Aerial
  misc_feature: MA Experiment 20000477 PARAMETER Experiment Name: Zm_5mM_SA_P Parameter: Treatment Value: 5mM SA vs. No Treatment
  misc_feature: MA Experiment ID: 20000479 Result: Up-regulated in Transcription
  misc_feature: MA Experiment 20000479 PARAMETER Experiment Name: Zm_Drought_P Parameter: Age (day) Value: 10
  misc_feature: MA Experiment 20000479 PARAMETER Experiment Name: Zm_Drought_P Parameter: Organism Value: Zea mays
  misc_feature: MA Experiment 20000479 PARAMETER Experiment Name: Zm_Drought_P Parameter: Plant Line Value: 35A19
  misc_feature: MA Experiment 20000479 PARAMETER Experiment Name: Zm_Drought_P Parameter: Timepoint (hr) Value: 48
  misc_feature: MA Experiment 20000479 PARAMETER Experiment Name: Zm_Drought_P Parameter: Tissue Value: Aerial
  misc_feature: MA Experiment 20000479 PARAMETER Experiment Name: Zm_Drought_P Parameter: Treatment Value: Drought vs. No Drought
  misc_feature: MA Experiment ID: 20000492 Result: Down-regulated in Transcription
  misc_feature: MA Experiment 20000492 PARAMETER Experiment Name: Zm_Hybrid_Seed_Dev_P Parameter: DAP Value: 12
  misc_feature: MA Experiment 20000492 PARAMETER Experiment Name: Zm_Hybrid_Seed_Dev_P Parameter: Organism Value: Zea mays
  misc_feature: MA Experiment 20000492 PARAMETER Experiment Name: Zm_Hybrid_Seed_Dev_P Parameter: Plant Line Value: 35A19
  misc_feature: MA Experiment 20000492 PARAMETER Experiment Name: Zm_Hybrid_Seed_Dev_P Parameter: Tissue Value: Fert Kernel vs. Unfert Floret
gttgctctgaaatcatccgtgcattttctttctttttatttggcaagggactttccttctcttttctttctcctaatttatagtggtgaccaaacagataagggacctgcgcgtcgctgagagggaggaagacattggattctacgctggtttcctcggcgcagcatacatgatcggcagaggcgtcgcgtcggtcttctggggcgtggtggcggaccgcgttggccggaagcccgtcatcgcgttctccgtcctctcggtcgtggtgttcaacaccctgttcgggctgagcgccaagtactggatggctatcgctacgaggtttctcctgggcgccctcaacggcttccttgcgccagcgaaggcgtactccatcgaggtctgccggcctgagcagcaggctctgggtatatcggtcgtaagcacagcgtgggggatgggcgtcataatcggcccggccatcggtggctacctcgcgcagcctgccaaacagtatccgcacctgttccatgagaaatcagtgtttggaaggttcccgtacctgttgccatgcctgtgcatctcgttcttcgccgccttggttgtcataagctgcgcatggctcccggagaccctacacaagcacagaggcctggagagagcagcagctgaagtggcagaaggcacgacagcagcagcagcagctcaagaaagcaccccggagccggagccggagccacctaagagcagcctgctcaggaaccggccactcatgtcctccatcgtcacgtactgcgtcttctccctccacgacaccgcgtacgtcgagatattttctctgtggaccgtgagtggcagagatcacggcggcctcagcttcgcgtccaaggacgtcggccaagtcctcaccgtcgctggcgccagtctcctggtgtaccaaatcttcgcctaccgttgggtcaacaagatcctcggcccagtcaactcaacccgagtttcgtcggcgctatccataccgataatcgccgcttaccccttcatgacgcgcttgtcgggaataaggcttggtgtgcctctctacgtcgcggcgatgctcaaaagcgtcctcgccatcaccagagtcaccggcacatcgctcctgcagaacaacgctgtgccacaggagcagaggggcgctgcgaacgggatagctacgacggcgatgtctctgtccaaggcgttcgctccggccgtggccggcatcttgttctcgtgggcacagaagcgccagcatgccgcgttctttccaggtgaccagatggtgtttctgctcctgaatctgacggaggtcatcgggctcgtgctcaccttcaagcctttcctcgcggttccccagcagtacaaacagtgaaagcggtgctgcgtgcgtgcgtgctctgcatggatactatagagaggtagctagctgctagccagtgtgtgtgggcgagagcgagacgagggagatggacatgtcaagtagaagcagaggatatgatgtcattatacatatttactttgcgagatatgtagttcctcatgagtcttcgctgtgcggttttctaaaaaaaaattgagataaagttggtctctcaattatatggtgcattccg

SEQ ID NO: 14781 - protein, 399 aa, Zea mays subsp. mays
  peptide (1)..(399): Ceres Seq. ID no. 13504119
  misc_feature (1)..(399): Homolog of NCBI NO: 23452819 NR Description: major facilitator superfamily antiporter [Zea
  misc_feature (1)..(398): Homolog of NCBI NO: 23452823 NR Description: major facilitator superfamily antiporter [Oryza
  misc_feature (1)..(396): Homolog of NCBI NO: 30684565 NR Description: transporter-related protein [Arabidopsis >gi|14517414|gb|AAK62597.1| AT5g13750/MXE10_2 [Arabidopsis
  misc_feature (1)..(394): Homolog of NCBI NO: 23452821 NR Description: major facilitator superfamily antiporter [Oryza
  misc_feature (1)..(396): Homolog of NCBI NO: 20260160 NR Description: transporter-like protein [Arabidopsis thaliana]
  misc_feature (1)..(396): Homolog of NCBI NO: 22326785 NR Description: transporter - related [Arabidopsis thaliana]
  misc_feature (1)..(392): Homolog of NCBI NO: 15229781 NR Description: transporter - related [Arabidopsis thaliana]
  misc_feature (1)..(396): Homolog of NCBI NO: 30684567 NR Description: transporter-related protein [Arabidopsis thaliana]
  misc_feature (1)..(368): Homolog of NCBI NO: 10177340 NR Description: transporter-like protein [Arabidopsis thaliana]
  misc_feature (1)..(396): Homolog of NCBI NO: 21555230 NR Description: transporter-like protein [Arabidopsis thaliana]
MIGRGVASVFWGVVADRVGRKPVIAFSVLSVVVFNTLFGLSAKYWMAIATRFLLGALNGFLAPAKAYSIEVCRPEQQALGISVVSTAWGMGVIIGPAIGGYLAQPAKQYPHLFHEKSVFGRFPYLLPCLCISFFAALVVISCAWLPETLHKHRGLERAAAEVAEGTTAAAAAQESTPEPEPEPPKSSLLRNRPLMSSIVTYCVFSLHDTAYVEIFSLWTVSGRDHGGLSFASKDVGQVLTVAGASLLVYQIFAYRWVNKILGPVNSTRVSSALSIPIIAAYPFMTRLSGIRLGVPLYVAAMLKSVLAITRVTGTSLLQNNAVPQEQRGAANGIATTAMSLSKAFAPAVAGILFSWAQKRQHAAFFPGDQMVFLLLNLTEVIGLVLTFKPFLAVPQQYKQ

SEQ ID NO: 14782 - protein, 354 aa, Zea mays subsp. mays
  peptide (1)..(354): Ceres Seq. ID no. 13504120
  misc_feature (1)..(354): Homolog of NCBI NO: 23452819 NR Description: major facilitator superfamily antiporter [Zea
  misc_feature (1)..(353): Homolog of NCBI NO: 23452823 NR Description: major facilitator superfamily antiporter [Oryza
  misc_feature (1)..(351): Homolog of NCBI NO: 30684565 NR Description: transporter-related protein [Arabidopsis >gi|14517414|gb|AAK62597.1| AT5g13750/MXE10_2 [Arabidopsis
  misc_feature (1)..(349): Homolog of NCBI NO: 23452821 NR Description: major facilitator superfamily antiporter [Oryza
  misc_feature (1)..(351): Homolog of NCBI NO: 20260160 NR Description: transporter-like protein [Arabidopsis thaliana]
  misc_feature (1)..(351): Homolog of NCBI NO: 22326785 NR Description: transporter - related [Arabidopsis thaliana]
  misc_feature (1)..(347): Homolog of NCBI NO: 15229781 NR Description: transporter - related [Arabidopsis thaliana]
  misc_feature (1)..(351): Homolog of NCBI NO: 30684567 NR Description: transporter-related protein [Arabidopsis thaliana]
  misc_feature (1)..(323): Homolog of NCBI NO: 10177340 NR Description: transporter-like protein [Arabidopsis thaliana]
  misc_feature (1)..(351): Homolog of NCBI NO: 21555230 NR Description: transporter-like protein [Arabidopsis thaliana]
MAIATRFLLGALNGFLAPAKAYSIEVCRPEQQALGISVVSTAWGMGVIIGPAIGGYLAQPAKQYPHLFHEKSVFGRFPYLLPCLCISFFAALVVISCAWLPETLHKHRGLERAAAEVAEGTTAAAAAQESTPEPEPEPPKSSLLRNRPLMSSIVTYCVFSLHDTAYVEIFSLWTVSGRDHGGLSFASKDVGQVLTVAGASLLVYQIFAYRWVNKILGPVNSTRVSSALSIPIIAAYPFMTRLSGIRLGVPLYVAAMLKSVLAITRVTGTSLLQNNAVPQEQRGAANGIATTAMSLSKAFAPAVAGILFSWAQKRQHAAFFPGDQMVFLLLNLTEVIGLVLTFKPFLAVPQQYKQ

SEQ ID NO: 14783 - protein, 310 aa, Zea mays subsp. mays
  peptide (1)..(310): Ceres Seq. ID no. 13504121
  misc_feature (1)..(310): Homolog of NCBI NO: 23452819 NR Description: major facilitator superfamily antiporter [Zea
  misc_feature (1)..(309): Homolog of NCBI NO: 23452823 NR Description: major facilitator superfamily antiporter [Oryza
  misc_feature (1)..(307): Homolog of NCBI NO: 30684565 NR Description: transporter-related protein [Arabidopsis >gi|14517414|gb|AAK62597.1| AT5g13750/MXE10_2 [Arabidopsis
  misc_feature (1)..(305): Homolog of NCBI NO: 23452821 NR Description: major facilitator superfamily antiporter [Oryza
  misc_feature (1)..(307): Homolog of NCBI NO: 20260160 NR Description: transporter-like protein [Arabidopsis thaliana]
  misc_feature (1)..(307): Homolog of NCBI NO: 22326785 NR Description: transporter - related [Arabidopsis thaliana]
  misc_feature (1)..(303): Homolog of NCBI NO: 15229781 NR Description: transporter - related [Arabidopsis thaliana]
  misc_feature (1)..(307): Homolog of NCBI NO: 30684567 NR Description: transporter-related protein [Arabidopsis thaliana]
  misc_feature (1)..(279): Homolog of NCBI NO: 10177340 NR Description: transporter-like protein [Arabidopsis thaliana]
  misc_feature (1)..(307): Homolog of NCBI NO: 21555230 NR Description: transporter-like protein [Arabidopsis thaliana]
MGVIIGPAIGGYLAQPAKQYPHLFHEKSVFGRFPYLLPCLCISFFAALVVISCAWLPETLHKHRGLERAAAEVAEGTTAAAAAQESTPEPEPEPPKSSLLRNRPLMSSIVTYCVFSLHDTAYVEIFSLWTVSGRDHGGLSFASKDVGQVLTVAGASLLVYQIFAYRWVNKILGPVNSTRVSSALSIPIIAAYPFMTRLSGIRLGVPLYVAAMLKSVLAITRVTGTSLLQNNAVPQEQRGAANGIATTAMSLSKAFAPAVAGILFSWAQKRQHAAFFPGDQMVFLLLNLTEVIGLVLTFKPFLAVPQQYKQ

SEQ ID NO: 14784 - DNA, 903 bp, Zea mays subsp. mays
  misc_feature (1)..(903): Ceres Seq. ID no. 12469489
  misc_feature: MA Experiment ID: 108543 Result: Down-regulated in Transcription
  misc_feature: MA Experiment ID: 20000535 Result: Up-regulated in Transcription
  misc_feature: MA Experiment 20000535 PARAMETER Experiment Name: Zm_Hybrid_Seed_Dev_P Parameter: DAP Value: 30 vs. 12
  misc_feature: MA Experiment 20000535 PARAMETER Experiment Name: Zm_Hybrid_Seed_Dev_P Parameter: Organism Value: Zea mays
  misc_feature: MA Experiment 20000535 PARAMETER Experiment Name: Zm_Hybrid_Seed_Dev_P Parameter: Plant Line Value: 35A19
  misc_feature: MA Experiment 20000535 PARAMETER Experiment Name: Zm_Hybrid_Seed_Dev_P Parameter: Tissue Value: Embryo vs. Unfert Floret
gtggcgggatcggatcggatcggatcgacacccagccagcgcgtggtgagtagaacacccccaagaggccaggactgagactgaccatgggagaagcgtgcagggacgcggcggctgcgggccagcagctgcggcaggacgaagagggcggaggaggagggcgtcacgcggagaaggagctcgtcggtgacccaataacccacgactcggtcgtctcggcgaagctgtacgaggacgtgccggcgacgccgatgatggcgctcaaccacatctcccgcctgtgcgaatccgtcgacgcgtccgtccggttctacgtcaaggcgctcggcttcgtgctcatccagcgcccgccggcgctcgacttctccggcgcatggctcttcaactacggcgtgggtatccacttcgtgcagcgcgacgacgcgcggcgggcccccaacgtgaggccggaggaggcggagctggaccccatggacaaccacgtgtcgttccagtgcgaggacatgggcgccatggagcggcggctgcgggagatgcgcgtgcggtacatgaagcggaccatcaacgaggaggaagggtcgcccatcgaccagctnttnttcagggacccggacggcttcatgatcgagatctgcaactgcgagaacctggagctcgtccccgccggcgccttcggccgcctcagactgccccgcgaccgccacaacccgcccgtgngcatggtcgccggcagcgacgagtagagggggagggggctttcgcgtccacgtgaccctccgccctacaaggccagcaccacaggccgggggaaatagtttgtggctcatataatcgccgcgggcgcttatgctggattntgggccgagttccagttttgaattcgaatttgtgctagttttggtt

SEQ ID NO: 14785 - protein, 218 aa, Zea mays subsp. mays
  peptide (1)..(218): Ceres Seq. ID no. 12469490
  misc_feature (1)..(218): Homolog of NCBI NO: 34395261 NR Description: glyoxalase family-like protein [Oryza sativa
  misc_feature (1)..(218): Homolog of NCBI NO: 34899038 NR Description: hypothetical protein~similar to Arabidopsis
  misc_feature (55)..(217): Homolog of NCBI NO: 15529260 NR Description: At2g28420/T1B3.6 [Arabidopsis thaliana]
  misc_feature (55)..(217): Homolog of NCBI NO: 18401734 NR Description: expressed protein; protein id: At2g28420.1, by cDNA: gi_15529259, supported by cDNA: gi_16974406 [Arabidopsis >gi|25407983|pir||F84684 hypothetical protein At2g28420
  misc_feature (53)..(209): Homolog of NCBI NO: 34910246 NR Description: OSJNBa0089K24.9 [Oryza sativa (japonica
  misc_feature (56)..(198): Homolog of NCBI NO: 18394235 NR Description: expressed protein; protein id: At1g15380.1, by cDNA: 5364., supported by cDNA: gi_18252884 [Arabidopsis
  misc_feature (49)..(198): Homolog of NCBI NO: 18412683 NR Description: expressed protein; protein id: At1g80160.1, by cDNA: 21663. [Arabidopsis thaliana]
  misc_feature (49)..(198): Homolog of NCBI NO: 25406639 NR Description: hypothetical protein F18B13.24 [imported] - thaliana >gi|5902371|gb|AAD55473.1|AC009322_13 Hypothetical
  misc_feature (170)..(170): Xaa is any aa, unknown or other
  misc_feature (171)..(171): Xaa is any aa, unknown or other
  misc_feature (211)..(211): Xaa is any aa, unknown or other
MGEACRDAAAAGQQLRQDEEGGGGGRHAEKELVGDPITHDSVVSAKLYEDVPATPMMALNHISRLCESVDASVRFYVKALGFVLIQRPPALDFSGAWLFNYGVGIHFVQRDDARRAPNVRPEEAELDPMDNHVSFQCEDMGAMERRLREMRVRYMKRTINEEEGSPIDQXXFRDPDGFMIEICNCENLELVPAGAFGRLRLPRDRHNPPVXMVAGSDE

SEQ ID NO: 14786 - protein, 163 aa, Zea mays subsp. mays
  peptide (1)..(163): Ceres Seq. ID no. 12469491
  misc_feature (1)..(163): Homolog of NCBI NO: 34395261 NR Description: glyoxalase family-like protein [Oryza sativa
  misc_feature (1)..(163): Homolog of NCBI NO: 34899038 NR Description: hypothetical protein~similar to Arabidopsis
  misc_feature (1)..(162): Homolog of NCBI NO: 15529260 NR Description: At2g28420/T1B3.6 [Arabidopsis thaliana]
  misc_feature (1)..(162): Homolog of NCBI NO: 18401734 NR Description: expressed protein; protein id: At2g28420.1, by cDNA: gi_15529259, supported by cDNA: gi_16974406 [Arabidopsis >gi|25407983|pir||F84684 hypothetical protein At2g28420
  misc_feature (1)..(154): Homolog of NCBI NO: 34910246 NR Description: OSJNBa0089K24.9 [Oryza sativa (japonica
  misc_feature (1)..(143): Homolog of NCBI NO: 18394235 NR Description: expressed protein; protein id: At1g15380.1, by cDNA: 5364., supported by cDNA: gi_18252884 [Arabidopsis
  misc_feature (1)..(143): Homolog of NCBI NO: 18412683 NR Description: expressed protein; protein id: At1g80160.1, by cDNA: 21663. [Arabidopsis thaliana]
  misc_feature (1)..(143): Homolog of NCBI NO: 25406639 NR Description: hypothetical protein F18B13.24 [imported] - thaliana >gi|5902371|gb|AAD55473.1|AC009322_13 Hypothetical
  misc_feature (115)..(115): Xaa is any aa, unknown or other
  misc_feature (116)..(116): Xaa is any aa, unknown or other
  misc_feature (156)..(156): Xaa is any aa, unknown or other
MMALNHISRLCESVDASVRFYVKALGFVLIQRPPALDFSGAWLFNYGVGIHFVQRDDARRAPNVRPEEAELDPMDNHVSFQCEDMGAMERRLREMRVRYMKRTINEEEGSPIDQXXFRDPDGFMIEICNCENLELVPAGAFGRLRLPRDRHNPPVXMVAGSDE

SEQ ID NO: 14787 - protein, 162 aa, Zea mays subsp. mays
  peptide (1)..(162): Ceres Seq. ID no. 12469492
  misc_feature (1)..(162): Homolog of NCBI NO: 34395261 NR Description: glyoxalase family-like protein [Oryza sativa
  misc_feature (1)..(162): Homolog of NCBI NO: 34899038 NR Description: hypothetical protein~similar to Arabidopsis
  misc_feature (1)..(161): Homolog of NCBI NO: 15529260 NR Description: At2g28420/T1B3.6 [Arabidopsis thaliana]
  misc_feature (1)..(161): Homolog of NCBI NO: 18401734 NR Description: expressed protein; protein id: At2g28420.1, by cDNA: gi_15529259, supported by cDNA: gi_16974406 [Arabidopsis >gi|25407983|pir||F84684 hypothetical protein At2g28420
  misc_feature (1)..(153): Homolog of NCBI NO: 34910246 NR Description: OSJNBa0089K24.9 [Oryza sativa (japonica
  misc_feature (1)..(142): Homolog of NCBI NO: 18394235 NR Description: expressed protein; protein id: At1g15380.1, by cDNA: 5364., supported by cDNA: gi_18252884 [Arabidopsis
  misc_feature (1)..(142): Homolog of NCBI NO: 18412683 NR Description: expressed protein; protein id: At1g80160.1, by cDNA: 21663. [Arabidopsis thaliana]
  misc_feature (1)..(142): Homolog of NCBI NO: 25406639 NR Description: hypothetical protein F18B13.24 [imported] - thaliana >gi|5902371|gb|AAD55473.1|AC009322_13 Hypothetical
  misc_feature (114)..(114): Xaa is any aa, unknown or other
  misc_feature (115)..(115): Xaa is any aa, unknown or other
  misc_feature (155)..(155): Xaa is any aa, unknown or other
MALNHISRLCESVDASVRFYVKALGFVLIQRPPALDFSGAWLFNYGVGIHFVQRDDARRAPNVRPEEAELDPMDNHVSFQCEDMGAMERRLREMRVRYMKRTINEEEGSPIDQXXFRDPDGFMIEICNCENLELVPAGAFGRLRLPRDRHNPPVXMVAGSDE

SEQ ID NO: 14788 - DNA, 505 bp, Zea mays subsp. mays
  misc_feature (1)..(505): Ceres Seq. ID no. 11415248
  misc_feature: MA Experiment ID: 108530 Result: Down-regulated in Transcription
  misc_feature: MA Experiment 108530 PARAMETER Experiment Name: Zm_Imbibed_Seeds_P Parameter: Age (day) Value: 6 vs. 2
  misc_feature: MA Experiment 108530 PARAMETER Experiment Name: Zm_Imbibed_Seeds_P Parameter: Organism Value: Zea mays
  misc_feature: MA Experiment 108530 PARAMETER Experiment Name: Zm_Imbibed_Seeds_P Parameter: Plant Line Value: 35A19
  misc_feature: MA Experiment 108530 PARAMETER Experiment Name: Zm_Imbibed_Seeds_P Parameter: Tissue Value: Aerial vs. Embryo
  misc_feature: MA Experiment ID: 108535 Result: Up-regulated in Transcription
  misc_feature: MA Experiment 108535 PARAMETER Experiment Name: Zm_Meristem_P Parameter: Age (day) Value: 8
  misc_feature: MA Experiment 108535 PARAMETER Experiment Name: Zm_Meristem_P Parameter: Organism Value: Zea mays
  misc_feature: MA Experiment 108535 PARAMETER Experiment Name: Zm_Meristem_P Parameter: Plant Line Value: 35A19
  misc_feature: MA Experiment 108535 PARAMETER Experiment Name: Zm_Meristem_P Parameter: Tissue Value: Root Meristem vs. Above Root Meristem
  misc_feature: MA Experiment ID: 20000108 Result: Up-regulated in Transcription
  misc_feature: MA Experiment 20000108 PARAMETER Experiment Name: Zm_Root-Tips_P Parameter: Age (day) Value: 12
  misc_feature: MA Experiment 20000108 PARAMETER Experiment Name: Zm_Root-Tips_P Parameter: Organism Value: Zea mays
  misc_feature: MA Experiment 20000108 PARAMETER Experiment Name: Zm_Root-Tips_P Parameter: Tissue Value: Root tips vs. Root mid region    35
  misc_feature: MA Experiment 20000108 PARAMETER Experiment Name: Zm_Root-Tips_P Parameter: Tissue Value: Root tips vs. Root mid region   Sequence Listing-Misc Features (4)
  misc_feature: MA Experiment ID: 20000488 Result: Up-regulated in Transcription
  misc_feature: MA Experiment 20000488 PARAMETER Experiment Name: Zm_50mM_NH4NO3_L_to_H_P Parameter: Organism Value: Zea mays
  misc_feature: MA Experiment 20000488 PARAMETER Experiment Name: Zm_50mM_NH4NO3_L_to_H_P Parameter: Timepoint (hr) Value: 8
  misc_feature: MA Experiment 20000488 PARAMETER Experiment Name: Zm_50mM_NH4NO3_L_to_H_P Parameter: Tissue Value: Leaves
  misc_feature: MA Experiment 20000488 PARAMETER Experiment Name: Zm_50mM_NH4NO3_L_to_H_P Parameter: Treatment Value: 50mM NH4NO3 vs. 100mM Mannitol
  misc_feature: MA Experiment ID: 20000534 Result: Down-regulated in Transcription
  misc_feature: MA Experiment 20000534 PARAMETER Experiment Name: Zm_Hybrid_Pollen_P Parameter: Age (day) Value: 8
  misc_feature: MA Experiment 20000534 PARAMETER Experiment Name: Zm_Hybrid_Pollen_P Parameter: Organism Value: Zea mays
  misc_feature: MA Experiment 20000534 PARAMETER Experiment Name: Zm_Hybrid_Pollen_P Parameter: Plant Line Value: 35A19
  misc_feature: MA Experiment 20000534 PARAMETER Experiment Name: Zm_Hybrid_Pollen_P Parameter: Tissue Value: Pollen vs. Aerial
  misc_feature: MA Experiment ID: 20000535 Result: Up-regulated in Transcription
  misc_feature: MA Experiment 20000535 PARAMETER Experiment Name: Zm_Hybrid_Seed_Dev_P Parameter: DAP Value: 30 vs. 12
  misc_feature: MA Experiment 20000535 PARAMETER Experiment Name: Zm_Hybrid_Seed_Dev_P Parameter: Organism Value: Zea mays
  misc_feature: MA Experiment 20000535 PARAMETER Experiment Name: Zm_Hybrid_Seed_Dev_P Parameter: Plant Line Value: 35A19
  misc_feature: MA Experiment 20000535 PARAMETER Experiment Name: Zm_Hybrid_Seed_Dev_P Parameter: Tissue Value: Embryo vs. Unfert Floret
agaagtttagaagaacggggagggaagcacgcccccaaacgttccgaggtttcgcctctcggagcgcaccaacgccacccggagcgactcgccaccggcgcggagaaggagggcggaggctaggcgatggcggacgagaatgaggctgggaagaaagaggaagaggaatttagcacaggccctctgtcagtactaatgatgagtgttaagaacaacacccaggttctcatcaattgccgcaacaacaagaagctgcttggccgggttcgtgcttttgatcgccactgtaacatggtgctcgagaacgtgcgggagatgtggacagaggtccccaagactggcaagggcaaaaagaaggctctgcctgtgaacaaggatagattcatcagcaagatgttcctcaggggcgactcggtcatcatcgtgctgaggaaccccaagtgacagcccaaccggaagccaggtctctgttgaaaactgtagcttatgatgtatgttggggatg

SEQ ID NO: 14789 - protein, 105 aa, Zea mays subsp. mays
  peptide (1)..(105): Ceres Seq. ID no. 11415249
  misc_feature (23)..(102): Pfam Name: LSM domain Pfam Description: LSM domain
  misc_feature (6)..(104): Homolog of NCBI NO: 22203734 NR Description: small nuclear ribonucleoprotein D2-like protein
  misc_feature (6)..(104): Homolog of NCBI NO: 27677236 NR Description: similar to Small nuclear ribonucleoprotein Sm D2
  misc_feature (1)..(105): Homolog of NCBI NO: 18407411 NR Description: putative small nuclear ribonucleoprotein D2;
  misc_feature (3)..(105): Homolog of NCBI NO: 30690747 NR Description: small nuclear ribonucleo protein D2 -related
  misc_feature (6)..(104): Homolog of NCBI NO: 21357623 NR Description: CG1249-PA [Drosophila melanogaster]
  misc_feature (6)..(104): Homolog of NCBI NO: 26337731 NR Description: unnamed protein product [Mus musculus]
  misc_feature (6)..(104): Homolog of NCBI NO: 4759158 NR Description: small nuclear ribonucleoprotein polypeptide D2; core protein D2 [Homo sapiens] >gi|20821553|ref|XP_133225.1| nuclear ribonucleoprotein D2 [Mus musculus]
  misc_feature (1)..(105): Homolog of NCBI NO: 21554692 NR Description: small nuclear ribonucleoprotein-like protein
  misc_feature (6)..(104): Homolog of NCBI NO: 39592141 NR Description: Hypothetical protein CBG23345 [Caenorhabditis
  misc_feature (9)..(104): Homolog of NCBI NO: 34881247 NR Description: similar to SNF2/RAD54 family protein [Rattus
MADENEAGKKEEEEFSTGPLSVLMMSVKNNTQVLINCRNNKKLLGRVRAFDRHCNMVLENVREMWTEVPKTGKGKKKALPVNKDRFISKMFLRGDSVIIVLRNPK

SEQ ID NO: 14790 - protein, 82 aa, Zea mays subsp. mays; identical to SEQ ID NO: 12477
  peptide (1)..(82): Ceres Seq. ID no. 11415250
  misc_feature (1)..(79): Pfam Name: LSM domain Pfam Description: LSM domain
  misc_feature (1)..(82): Homolog of NCBI NO: 18407411 NR Description: putative small nuclear ribonucleoprotein D2;
  misc_feature (1)..(82): Homolog of NCBI NO: 21554692 NR Description: small nuclear ribonucleoprotein-like protein
  misc_feature (1)..(82): Homolog of NCBI NO: 30690747 NR Description: small nuclear ribonucleo protein D2 -related
  misc_feature (1)..(81): Homolog of NCBI NO: 4759158 NR Description: small nuclear ribonucleoprotein polypeptide D2; core protein D2 [Homo sapiens] >gi|20821553|ref|XP_133225.1| nuclear ribonucleoprotein D2 [Mus musculus]
  misc_feature (1)..(81): Homolog of NCBI NO: 21357623 NR Description: CG1249-PA [Drosophila melanogaster]
  misc_feature (1)..(81): Homolog of NCBI NO: 26337731 NR Description: unnamed protein product [Mus musculus]
  misc_feature (1)..(81): Homolog of NCBI NO: 22203734 NR Description: small nuclear ribonucleoprotein D2-like protein
  misc_feature (1)..(81): Homolog of NCBI NO: 27677236 NR Description: similar to Small nuclear ribonucleoprotein Sm D2
  misc_feature (1)..(81): Homolog of NCBI NO: 39592141 NR Description: Hypothetical protein CBG23345 [Caenorhabditis
  misc_feature (1)..(81): Homolog of NCBI NO: 34881247 NR Description: similar to SNF2/RAD54 family protein [Rattus

SEQ ID NO: 14791 - protein, 81 aa, Zea mays subsp. mays; identical to SEQ ID NO: 12478
  peptide (1)..(81): Ceres Seq. ID no. 11415251
  misc_feature (1)..(78): Pfam Name: LSM domain Pfam Description: LSM domain
  misc_feature (1)..(81): Homolog of NCBI NO: 18407411 NR Description: putative small nuclear ribonucleoprotein D2;
  misc_feature (1)..(81): Homolog of NCBI NO: 21554692 NR Description: small nuclear ribonucleoprotein-like protein
  misc_feature (1)..(81): Homolog of NCBI NO: 30690747 NR Description: small nuclear ribonucleo protein D2 -related
  misc_feature (1)..(80): Homolog of NCBI NO: 4759158 NR Description: small nuclear ribonucleoprotein polypeptide D2; core protein D2 [Homo sapiens] >gi|20821553|ref|XP_133225.1| nuclear ribonucleoprotein D2 [Mus musculus]
  misc_feature (1)..(80): Homolog of NCBI NO: 21357623 NR Description: CG1249-PA [Drosophila melanogaster]
  misc_feature (1)..(80): Homolog of NCBI NO: 26337731 NR Description: unnamed protein product [Mus musculus]
  misc_feature (1)..(80): Homolog of NCBI NO: 22203734 NR Description: small nuclear ribonucleoprotein D2-like protein
  misc_feature (1)..(80): Homolog of NCBI NO: 27677236 NR Description: similar to Small nuclear ribonucleoprotein Sm D2
  misc_feature (1)..(80): Homolog of NCBI NO: 39592141 NR Description: Hypothetical protein CBG23345 [Caenorhabditis
  misc_feature (1)..(80): Homolog of NCBI NO: 34881247 NR Description: similar to SNF2/RAD54 family protein [Rattus

SEQ ID NO: 14792 - DNA, 431 bp, Zea mays subsp. mays
  misc_feature (1)..(431): Ceres Seq. ID no. 4489669
  misc_feature: MA Experiment ID: 108504 Result: Up-regulated in Transcription
  misc_feature: MA Experiment 108504 PARAMETER Experiment Name: Zm_Drought_P Parameter: Age (day) Value: 8
  misc_feature: MA Experiment 108504 PARAMETER Experiment Name: Zm_Drought_P Parameter: Organism Value: Zea mays
  misc_feature: MA Experiment 108504 PARAMETER Experiment Name: Zm_Drought_P Parameter: Plant Line Value: 35A19
  misc_feature: MA Experiment 108504 PARAMETER Experiment Name: Zm_Drought_P Parameter: Timepoint (hr) Value: 12
  misc_feature: MA Experiment 108504 PARAMETER Experiment Name: Zm_Drought_P Parameter: Tissue Value: Aerial
  misc_feature: MA Experiment 108504 PARAMETER Experiment Name: Zm_Drought_P Parameter: Treatment Value: Drought vs. No Drought
  misc_feature: MA Experiment ID: 108556 Result: Up-regulated in Transcription
  misc_feature: MA Experiment 108556 PARAMETER Experiment Name: Zm_Drought_P Parameter: Age (day) Value: 9
  misc_feature: MA Experiment 108556 PARAMETER Experiment Name: Zm_Drought_P Parameter: Organism Value: Zea mays
  misc_feature: MA Experiment 108556 PARAMETER Experiment Name: Zm_Drought_P Parameter: Plant Line Value: 35A19
  misc_feature: MA Experiment 108556 PARAMETER Experiment Name: Zm_Drought_P Parameter: Timepoint (hr) Value: 24
  misc_feature: MA Experiment 108556 PARAMETER Experiment Name: Zm_Drought_P Parameter: Tissue Value: Aerial
  misc_feature: MA Experiment 108556 PARAMETER Experiment Name: Zm_Drought_P Parameter: Treatment Value: Drought vs. No Drought
  misc_feature: MA Experiment ID: 108597 Result: Up-regulated in Transcription
  misc_feature: MA Experiment 108597 PARAMETER Experiment Name: Zm_100uM_ABA_P Parameter: Age (day) Value: 9
  misc_feature: MA Experiment 108597 PARAMETER Experiment Name: Zm_100uM_ABA_P Parameter: Organism Value: Zea mays
  misc_feature: MA Experiment 108597 PARAMETER Experiment Name: Zm_100uM_ABA_P Parameter: Plant Line Value: 35A19
  misc_feature: MA Experiment 108597 PARAMETER Experiment Name: Zm_100uM_ABA_P Parameter: Timepoint (hr) Value: 24
  misc_feature: MA Experiment 108597 PARAMETER Experiment Name: Zm_100uM_ABA_P Parameter: Tissue Value: Aerial
  misc_feature: MA Experiment 108597 PARAMETER Experiment Name: Zm_100uM_ABA_P Parameter: Treatment Value: 100uM ABA vs. No Treatment
  misc_feature: MA Experiment ID: 108689 Result: Up-regulated in Transcription
  misc_feature: MA Experiment 108689 PARAMETER Experiment Name: Zm_Drought_Roots_P Parameter: Age (day) Value: 9
  misc_feature: MA Experiment 108689 PARAMETER Experiment Name: Zm_Drought_Roots_P Parameter: Organism Value: Zea mays
  misc_feature: MA Experiment 108689 PARAMETER Experiment Name: Zm_Drought_Roots_P Parameter: Plant Line Value: 35A19
  misc_feature: MA Experiment 108689 PARAMETER Experiment Name: Zm_Drought_Roots_P Parameter: Timepoint (hr) Value: 24
  misc_feature: MA Experiment 108689 PARAMETER Experiment Name: Zm_Drought_Roots_P Parameter: Tissue Value: Roots
  misc_feature: MA Experiment 108689 PARAMETER Experiment Name: Zm_Drought_Roots_P Parameter: Treatment Value: Drought vs. No Drought
  misc_feature: MA Experiment ID: 20000480 Result: Up-regulated in Transcription
  misc_feature: MA Experiment 20000480 PARAMETER Experiment Name: Zm_Drought_P Parameter: Age (day) Value: 11
  misc_feature: MA Experiment 20000480 PARAMETER Experiment Name: Zm_Drought_P Parameter: Organism Value: Zea mays
  misc_feature: MA Experiment 20000480 PARAMETER Experiment Name: Zm_Drought_P Parameter: Plant Line Value: 35A19
  misc_feature: MA Experiment 20000480 PARAMETER Experiment Name: Zm_Drought_P Parameter: Timepoint (hr) Value: 72
  misc_feature: MA Experiment 20000480 PARAMETER Experiment Name: Zm_Drought_P Parameter: Tissue Value: Aerial
  misc_feature: MA Experiment 20000480 PARAMETER Experiment Name: Zm_Drought_P Parameter: Treatment Value: Drought vs. No Drought
acaacaagctcgacggaacaactgactagaactagtacgtagaaatccaacactcgggacgaaattaaaagagacgagacgacgcatcatccggsgtggcggcgcaggagggcggcatgaggctggtgtcgcacccgatcgcggcgcacgacgggcggctgccgcggcagtacacggcggaggggcagggcgccaagaaggacatgtcgccgccgctggaatggtacggcgtgcccgagggcgcgcggtcgctggcgctgctggtgcaggacatcgacgccgaccccatcgtgccgtggacgcactgggtggtggccaacatcccgcccgccaccaggggcctccccgaggggttctccggcgccgcgggggcggggccggggcgcgaccagctcggcggactgcaggagggggtcaacgactggaagcag

SEQ ID NO: 14793 - protein, 105 aa, Zea mays subsp. mays
  peptide (1)..(105): Ceres Seq. ID no. 4489670
  misc_feature (1)..(104): Homolog of NCBI NO: 10799810 NR Description: cold-regulated protein [Hordeum vulgare subsp.
  misc_feature (1)..(104): Homolog of NCBI NO: 26017213 NR Description: cold regulated protein [Triticum aestivum]
  misc_feature (1)..(104): Homolog of NCBI NO: 15240946 NR Description: putative protein; protein id: At5g01300.1, by cDNA: gi_20465384 [Arabidopsis thaliana]
  misc_feature (13)..(104): Homolog of NCBI NO: 21673435 NR Description: conserved hypothetical protein [Chlorobium TLS] >gi|21646536|gb|AAM71842.1| conserved hypothetical protein
  misc_feature (4)..(104): Homolog of NCBI NO: 17548245 NR Description: CONSERVED HYPOTHETICAL PROTEIN [Ralstonia >gi|17430491|emb|CAD17175.1| CONSERVED HYPOTHETICAL PROTEIN
  misc_feature (1)..(102): Homolog of NCBI NO: 15678301 NR Description: conserved protein [Methanothermobacter
  misc_feature (28)..(104): Homolog of NCBI NO: 30248206 NR Description: conserved hypothetical protein [Nitrosomonas ATCC 19718] >gi|30180091|emb|CAD84093.1| conserved hypothetical
  misc_feature (1)..(104): Homolog of NCBI NO: 23054005 NR Description: hypothetical protein [Geobacter metallireducens]
  misc_feature (15)..(103): Homolog of NCBI NO: 15606477 NR Description: hypothetical protein [Aquifex aeolicus]
  misc_feature (1)..(88): Homolog of NCBI NO: 455168 NR Description: ORF 1
MRLVSHPIAAHDGRLPRQYTAEGQGAKKDMSPPLEWYGVPEGARSLALLVQDIDADPIVPWTHWVVANIPPATRGLPEGFSGAAGAGPGRDQLGGLQEGVNDWKQ

SEQ ID NO: 14794 - protein, 76 aa, Zea mays subsp. mays
  peptide (1)..(76): Ceres Seq. ID no. 4489671
  misc_feature (1)..(75): Homolog of NCBI NO: 10799810 NR Description: cold-regulated protein [Hordeum vulgare subsp.
  misc_feature (1)..(75): Homolog of NCBI NO: 26017213 NR Description: cold regulated protein [Triticum aestivum]
  misc_feature (1)..(75): Homolog of NCBI NO: 15240946 NR Description: putative protein; protein id: At5g01300.1, by cDNA: gi_20465384 [Arabidopsis thaliana]
  misc_feature (1)..(75): Homolog of NCBI NO: 21673435 NR Description: conserved hypothetical protein [Chlorobium TLS] >gi|21646536|gb|AAM71842.1| conserved hypothetical protein
  misc_feature (1)..(75): Homolog of NCBI NO: 17548245 NR Description: CONSERVED HYPOTHETICAL PROTEIN [Ralstonia >gi|17430491|emb|CAD17175.1| CONSERVED HYPOTHETICAL PROTEIN
  misc_feature (1)..(73): Homolog of NCBI NO: 15678301 NR Description: conserved protein [Methanothermobacter
  misc_feature (1)..(75): Homolog of NCBI NO: 30248206 NR Description: conserved hypothetical protein [Nitrosomonas ATCC 19718] >gi|30180091|emb|CAD84093.1| conserved hypothetical
  misc_feature (1)..(75): Homolog of NCBI NO: 23054005 NR Description: hypothetical protein [Geobacter metallireducens]
  misc_feature (1)..(74): Homolog of NCBI NO: 15606477 NR Description: hypothetical protein [Aquifex aeolicus]
  misc_feature (1)..(59): Homolog of NCBI NO: 455168 NR Description: ORF 1
MSPPLEWYGVPEGARSLALLVQDIDADPIVPWTHWVVANIPPATRGLPEGFSGAAGAGPGRDQLGGLQEGVNDWKQ

SEQ ID NO: 14795 - protein, 70 aa, Zea mays subsp. mays
  peptide (1)..(70): Ceres Seq. ID no. 4489672
MVRRARGRAVAGAAGAGHRRRPHRAVDALGGGQHPARHQGPPRGVLRRRGGGAGARPARRTAGGGQRLEA

SEQ ID NO: 14796 - DNA, 516 bp, Zea mays subsp. mays
  misc_feature (1)..(516): Ceres Seq. ID no. 13635370
  misc_feature: MA Experiment ID: 20000535 Result: Up-regulated in Transcription
  misc_feature: MA Experiment 20000535 PARAMETER Experiment Name: Zm_Hybrid_Seed_Dev_P Parameter: DAP Value: 30 vs. 12
  misc_feature: MA Experiment 20000535 PARAMETER Experiment Name: Zm_Hybrid_Seed_Dev_P Parameter: Organism Value: Zea mays
  misc_feature: MA Experiment 20000535 PARAMETER Experiment Name: Zm_Hybrid_Seed_Dev_P Parameter: Plant Line Value: 35A19
  misc_feature: MA Experiment 20000535 PARAMETER Experiment Name: Zm_Hybrid_Seed_Dev_P Parameter: Tissue Value: Embryo vs. Unfert Floret
attatcgcgctcaggctcgtgccgctcgtggtcgtacgctgcagcaggcgatcggagcaaactaagaagcgaacaggccgcccgtcgacgccatggcgccggatctggtgaacggcgtgctcaactgggtggggacgccggccatggtggccagcctgctgctcttctacccgccctactatctcttcaagacatgctactccttcctttcctggctcttccccgaggacctcgccggcaaggtcgtcctcatcactggcgcttcctccggcatcggcgagcaactggcctaccagtacgcgctgaatcgggcgtccctcgccctcgtcgcgagaagggagtcgagcctccggcacgtcgccgaccgagcactcgagctcggcgcgcgcgacgtcgtcgtcctcccaggcgacgtctccacccccgacgactgcgacaggttcgttcggaccgcgatcagtcactacgaccgattggaccatctcgtgtgcyatgctggcgtcgcgagcgtcggcg

SEQ ID NO: 14797 - protein, 171 aa, Zea mays subsp. mays
  peptide (1)..(171): Ceres Seq. ID no. 13635371
  misc_feature (164)..(164): Xaa is any aa, unknown or other
LSRSGSCRSWSYAAAGDRSKLRSEQAARRRHGAGSGERRAQLGGDAGHGGQPAALLPALLSLQDMLLLPFLALPRGPRRQGRPHHWRFLRHRRATGLPVRAESGVPRPRREKGVEPPARRRPSTRARRARRRRPPRRRLHPRRLRQVRSDRDQSLRPIGPSRVXCWRRERR

SEQ ID NO: 14798 - protein, 141 aa, Zea mays subsp. mays
  peptide (1)..(141): Ceres Seq. ID no. 13635372
  misc_feature (2)..(140): Homolog of NCBI NO: 21742781 NR Description: OSJNBa0055C08.3 [Oryza sativa (japonica
  misc_feature (4)..(140): Homolog of NCBI NO: 15824408 NR Description: steroleosin [Sesamum indicum]
  misc_feature (4)..(140): Homolog of NCBI NO: 18423187 NR Description: short-chain dehydrogenase/reductase family protein
  misc_feature (4)..(137): Homolog of NCBI NO: 15232777 NR Description: short-chain dehydrogenase/reductase family protein
  misc_feature (4)..(137): Homolog of NCBI NO: 15232779 NR Description: short-chain dehydrogenase/reductase family protein
  misc_feature (4)..(132): Homolog of NCBI NO: 21311775 NR Description: steroleosin-B [Sesamum indicum]
  misc_feature (4)..(138): Homolog of NCBI NO: 8777392 NR Description: 11-beta-hydroxysteroid dehydrogenase-like
  misc_feature (4)..(138): Homolog of NCBI NO: 15241203 NR Description: short-chain dehydrogenase/reductase family protein
  misc_feature (4)..(138): Homolog of NCBI NO: 15241261 NR Description: short-chain dehydrogenase/reductase family [Arabidopsis thaliana] >gi|8777400|dbj|BAA96990.1| contains
  misc_feature (4)..(137): Homolog of NCBI NO: 15234888 NR Description: short-chain dehydrogenase/reductase family protein
  misc_feature (134)..(134): Xaa is any aa, unknown or other
MAPDLVNGVLNWVGTPAMVASLLLFYPPYYLFKTCYSFLSWLFPEDLAGKVVLITGASSGIGEQLAYQYALNRASLALVARRESSLRHVADRALELGARDVVVLPGDVSTPDDCDRFVRTAISHYDRLDHLVCXAGVASVG

SEQ ID NO: 14799 - protein, 124 aa, Zea mays subsp. mays
  peptide (1)..(124): Ceres Seq. ID no. 13635373
  misc_feature (1)..(123): Homolog of NCBI NO: 21742781 NR Description: OSJNBa0055C08.3 [Oryza sativa (japonica
  misc_feature (1)..(123): Homolog of NCBI NO: 15824408 NR Description: steroleosin [Sesamum indicum]
  misc_feature (1)..(123): Homolog of NCBI NO: 18423187 NR Description: short-chain dehydrogenase/reductase family protein
  misc_feature (1)..(120): Homolog of NCBI NO: 15232777 NR Description: short-chain dehydrogenase/reductase family protein
  misc_feature (1)..(120): Homolog of NCBI NO: 15232779 NR Description: short-chain dehydrogenase/reductase family protein
  misc_feature (1)..(115): Homolog of NCBI NO: 21311775 NR Description: steroleosin-B [Sesamum indicum]
  misc_feature (1)..(121): Homolog of NCBI NO: 8777392 NR Description: 11-beta-hydroxysteroid dehydrogenase-like
  misc_feature (1)..(121): Homolog of NCBI NO: 15241203 NR Description: short-chain dehydrogenase/reductase family protein
  misc_feature (1)..(121): Homolog of NCBI NO: 15241261 NR Description: short-chain dehydrogenase/reductase family [Arabidopsis thaliana] >gi|8777400|dbj|BAA96990.1| contains
  misc_feature (1)..(120): Homolog of NCBI NO: 15234888 NR Description: short-chain dehydrogenase/reductase family protein
  misc_feature (117)..(117): Xaa is any aa, unknown or other
MVASLLLFYPPYYLFKTCYSFLSWLFPEDLAGKVVLITGASSGIGEQLAYQYALNRASLALVARRESSLRHVADRALELGARDVVVLPGDVSTPDDCDRFVRTAISHYDRLDHLVCXAGVASVG

SEQ ID NO: 14800 - DNA, 846 bp, Zea mays subsp. mays
  misc_feature (1)..(846): Ceres Seq. ID no. 12348321
  misc_feature: MA Experiment ID: 108543 Result: Down-regulated in Transcription
atccgtagcgttccattccattccatcccatctccctcctcgcctacggcttcttccaccgcggcatcgtgcccggcctctgcttcggcgcgggcctggggattacgctgttcggcatggcctacatgttcgtccacgacggcctggtccaccgccgctttccggtcggccccatcgccgacgtgccctacttccgccgagtggctgcctcgcacaagatacaccacatggacaagttcggcggcgtcccgtatgggctcttcctgggaccaaaggagctggaggaggttggtggcctggacgagcttgttagcagtccggtgagtgaagctactgatactgaagacgcaggagaagaaaagacgcgtccagttgtatgcgttgtccgaacaagcgtgttcatgggccagagtgtgccaaatgagttctagctttaggcgagtgggccaaatgagtgtgggctgcgtcccagggtagtataagtactatgagtctgtaataatcaggacaagaagaatttagcatccagtagctaacagagctggaaaaggagctcgcgcgaaccagaagggccatctgatggattcgtacatggagctggaggaggttgtgagtccggcgcggcgagctcctccgcgcgctccgtggtttttgttttttgttttggtcgcttttttgttgatttcattgtcttgtttggtactggagggttggcgaatcgattttggatgcactggcgtagatgttggctgtccacttgccctgcatttcgaatggtctgggaaggcacggttcgtacatggaaaatgtccggtgccgtggaattactattgttttgtttgctgc

SEQ ID NO: 14801 - protein, 107 aa, Zea mays subsp. mays
  peptide (1)..(107): Ceres Seq. ID no. 12348322
IRSVPFHSIPSPSSPTASSTAASCPASASARAWGLRCSAWPTCSSTTAWSTAAFRSAPSPTCPTSAEWLPRTRYTTWTSSAASRMGSSWDQRSWRRLVAWTSLLAVR

SEQ ID NO: 14802 - protein, 104 aa, Zea mays subsp. mays
  peptide (1)..(104): Ceres Seq. ID no. 12348323
  misc_feature (1)..(64): Pfam Name: Carotene hydroxylase Pfam Description: Carotene hydroxylase
  misc_feature (1)..(64): Homolog of NCBI NO: 32488500 NR Description: OSJNBa0011J08.7 [Oryza sativa (japonica
  misc_feature (1)..(64): Homolog of NCBI NO: 5870600 NR Description: beta-carotene hydroxylase [Lycopersicon
  misc_feature (1)..(64): Homolog of NCBI NO: 9988836 NR Description: beta-carotene hydroxylase [Citrus unshiu]
  misc_feature (1)..(64): Homolog of NCBI NO: 11245486 NR Description: beta-carotene hydroxylase [Citrus unshiu]
  misc_feature (1)..(64): Homolog of NCBI NO: 9968545 NR Description: beta-carotene hydroxylase [Narcissus
  misc_feature (1)..(83): Homolog of NCBI NO: 33145986 NR Description: beta-carotene hydroxylase [Crocus sativus]
  misc_feature (1)..(64): Homolog of NCBI NO: 37536402 NR Description: putative beta-carotene hydroxylase [Oryza sativa
  misc_feature (1)..(64): Homolog of NCBI NO: 2956717 NR Description: beta-carotene hydroxylase 2 [Capsicum annuum]
  misc_feature (1)..(64): Homolog of NCBI NO: 9971820 NR Description: beta hydroxylase [Tagetes erecta]
  misc_feature (1)..(64): Homolog of NCBI NO: 1575296 NR Description: beta-carotene hydroxylase [Arabidopsis thaliana]
MAYMFVHDGLVHRRFPVGPIADVPYFRRVAASHKIHHMDKFGGVPYGLFLGPKELEEVGGLDELVSSPVSEATDTEDAGEEKTRPVVCVVRTSVFMGQSVPNEF

SEQ ID NO: 14803 - protein, 103 aa, Zea mays subsp. mays
  peptide (1)..(103): Ceres Seq. ID no. 12348324
SVAFHSIPSHLPPRLRLLPPRHRARPLLRRGPGDYAVRHGLHVRPRRPGPPPLSGRPHRRRALLPPSGCLAQDTPHGQVRRRPVWALPGTKGAGGGWWPGRAC

SEQ ID NO: 14804 - DNA, 2328 bp, Zea mays subsp. mays; identical to SEQ ID NO: 14429
  misc_feature (1)..(2328): Ceres Seq. ID no. 13635296
  misc_feature: MA Experiment ID: 108543 Result: Up-regulated in Transcription
  misc_feature: MA Experiment ID: 20000487 Result: Up-regulated in Transcription
  misc_feature: MA Experiment 20000487 PARAMETER Experiment Name: Zm_50mM_NH4NO3_L_to_H_P Parameter: Organism Value: Zea mays
  misc_feature: MA Experiment 20000487 PARAMETER Experiment Name: Zm_50mM_NH4NO3_L_to_H_P Parameter: Timepoint (hr) Value: 4
  misc_feature: MA Experiment 20000487 PARAMETER Experiment Name: Zm_50mM_NH4NO3_L_to_H_P Parameter: Tissue Value: Leaves
  misc_feature: MA Experiment 20000487 PARAMETER Experiment Name: Zm_50mM_NH4NO3_L_to_H_P Parameter: Treatment Value: 50mM NH4NO3 vs. 100mM Mannitol
  misc_feature: MA Experiment ID: 20000535 Result: Up-regulated in Transcription
  misc_feature: MA Experiment 20000535 PARAMETER Experiment Name: Zm_Hybrid_Seed_Dev_P Parameter: DAP Value: 30 vs. 12
  misc_feature: MA Experiment 20000535 PARAMETER Experiment Name: Zm_Hybrid_Seed_Dev_P Parameter: Organism Value: Zea mays
  misc_feature: MA Experiment 20000535 PARAMETER Experiment Name: Zm_Hybrid_Seed_Dev_P Parameter: Plant Line Value: 35A19
  misc_feature: MA Experiment 20000535 PARAMETER Experiment Name: Zm_Hybrid_Seed_Dev_P Parameter: Tissue Value: Embryo vs. Unfert Floret
  misc_feature: MA Experiment ID: 20000633 Result: Down-regulated in Transcription
  misc_feature: MA Experiment 20000633 PARAMETER Experiment Name: Zm_Herbicide-Treatments_P Parameter: Timepoint (hr) Value: 4
  misc_feature: MA Experiment 20000633 PARAMETER Experiment Name: Zm_Herbicide-Treatments_P Parameter: Tissue Value: Aerial
  misc_feature: MA Experiment 20000633 PARAMETER Experiment Name: Zm_Herbicide-Treatments_P Parameter: Treatment Value: Trimec vs. No Treatment
  misc_feature: MA Experiment ID: 20001613 Result: Up-regulated in Transcription
  misc_feature: MA Experiment 20001613 PARAMETER Experiment Name: Zm_50ppm_KNO3_L-to-H_P Parameter: Age (day) Value: 20
  misc_feature: MA Experiment 20001613 PARAMETER Experiment Name: Zm_50ppm_KNO3_L-to-H_P Parameter: Organism Value: Zea mays
  misc_feature: MA Experiment 20001613 PARAMETER Experiment Name: Zm_50ppm_KNO3_L-to-H_P Parameter: Plant Line Value: 35A19
  misc_feature: MA Experiment 20001613 PARAMETER Experiment Name: Zm_50ppm_KNO3_L-to-H_P Parameter: Timepoint (hr) Value: 24
  misc_feature: MA Experiment 20001613 PARAMETER Experiment Name: Zm_50ppm_KNO3_L-to-H_P Parameter: Tissue Value: Roots
  misc_feature: MA Experiment 20001613 PARAMETER Experiment Name: Zm_50ppm_KNO3_L-to-H_P Parameter: Treatment Value: 50ppm KNO3 vs. 50ppm KCl

SEQ ID NO: 14805 - protein, 676 aa, Zea mays subsp. mays; identical to SEQ ID NO: 14430
  peptide (1)..(676): Ceres Seq. ID no. 15220344
  misc_feature (324)..(517): Pfam Name: ATP synthase alpha/beta family, Pfam Description: ATP synthase alpha/beta family,
  misc_feature (324)..(517): Pfam Name: ATP synthase alpha/beta family, Pfam Description: ATP synthase alpha/beta family,
  misc_feature (324)..(517): Pfam Name: ATP synthase alpha/beta family, Pfam Description: ATP synthase alpha/beta family,
  misc_feature (107)..(674): Homolog of NCBI NO: 137460 NR Description: Vacuolar ATP synthase catalytic subunit A
  misc_feature (107)..(675): Homolog of NCBI NO: 11527563 NR Description: vacuolar proton-ATPase [Hordeum vulgare subsp.
  misc_feature (107)..(674): Homolog of NCBI NO: 401322 NR Description: Vacuolar ATP synthase catalytic subunit A
  misc_feature (107)..(674): Homolog of NCBI NO: 3169287 NR Description: vacuolar H+-ATPase catalytic subunit [Gossypium
  misc_feature (107)..(674): Homolog of NCBI NO: 2506211 NR Description: Vacuolar ATP synthase catalytic subunit A
  misc_feature (107)..(674): Homolog of NCBI NO: 2493122 NR Description: Vacuolar ATP synthase catalytic subunit A
  misc_feature (107)..(674): Homolog of NCBI NO: 12585490 NR Description: Vacuolar ATP synthase catalytic subunit A
  misc_feature (107)..(674): Homolog of NCBI NO: 15982954 NR Description: V-ATPase catalytic subunit A [Prunus persica]
  misc_feature (107)..(674): Homolog of NCBI NO: 3169287 NR Description: vacuolar H+-ATPase catalytic subunit [Gossypium
  misc_feature (107)..(674): Homolog of NCBI NO: 401322 NR Description: Vacuolar ATP synthase catalytic subunit A
  misc_feature (107)..(675): Homolog of NCBI NO: 11527563 NR Description: vacuolar proton-ATPase [Hordeum vulgare subsp.
  misc_feature (107)..(674): Homolog of NCBI NO: 137460 NR Description: Vacuolar ATP synthase catalytic subunit A
  misc_feature (107)..(674): Homolog of NCBI NO: 2506211 NR Description: Vacuolar ATP synthase catalytic subunit A
  misc_feature (107)..(674): Homolog of NCBI NO: 3169287 NR Description: vacuolar H+-ATPase catalytic subunit [Gossypium
  misc_feature (107)..(674): Homolog of NCBI NO: 401322 NR Description: Vacuolar ATP synthase catalytic subunit A
  misc_feature (107)..(675): Homolog of NCBI NO: 11527563 NR Description: vacuolar proton-ATPase [Hordeum vulgare subsp.
  misc_feature (107)..(674): Homolog of NCBI NO: 137460 NR Description: Vacuolar ATP synthase catalytic subunit A
  misc_feature (107)..(674): Homolog of NCBI NO: 27884018 NR Description: vacuolar H+-ATPase A2 subunit isoform; V-ATPase
  misc_feature (107)..(674): Homolog of NCBI NO: 27883932 NR Description: vacuolar H+-ATPase A1 subunit isoform; V-ATPase
  misc_feature (107)..(674): Homolog of NCBI NO: 15982954 NR Description: V-ATPase catalytic subunit A [Prunus persica]
  misc_feature (107)..(674): Homolog of NCBI NO: 12585490 NR Description: Vacuolar ATP synthase catalytic subunit A
  misc_feature (107)..(674): Homolog of NCBI NO: 2493122 NR Description: Vacuolar ATP synthase catalytic subunit A
  misc_feature (107)..(674): Homolog of NCBI NO: 2506211 NR Description: Vacuolar ATP synthase catalytic subunit A
  misc_feature (107)..(674): Homolog of NCBI NO: 27883932 NR Description: vacuolar H+-ATPase A1 subunit isoform; V-ATPase
  misc_feature (107)..(674): Homolog of NCBI NO: 27884018 NR Description: vacuolar H+-ATPase A2 subunit isoform; V-ATPase
  misc_feature (107)..(674): Homolog of NCBI NO: 2493122 NR Description: Vacuolar ATP synthase catalytic subunit A
  misc_feature (107)..(674): Homolog of NCBI NO: 12585490 NR Description: Vacuolar ATP synthase catalytic subunit A
  misc_feature (107)..(674): Homolog of NCBI NO: 15982954 NR Description: V-ATPase catalytic subunit A [Prunus persica]
  misc_feature (107)..(674): Homolog of NCBI NO: 27883932 NR Description: vacuolar H+-ATPase A1 subunit isoform; V-ATPase
  misc_feature (107)..(674): Homolog of NCBI NO: 27884018 NR Description: vacuolar H+-ATPase A2 subunit isoform; V-ATPase
  misc_feature (160)..(160): Xaa is any aa, unknown or other
  misc_feature (436)..(436): Xaa is any aa, unknown or other
  misc_feature (448)..(448): Xaa is any aa, unknown or other
  misc_feature (450)..(450): Xaa is any aa, unknown or other
  misc_feature (457)..(457): Xaa is any aa, unknown or other
  misc_feature (465)..(465): Xaa is any aa, unknown or other
  misc_feature (469)..(469): Xaa is any aa, unknown or other
  misc_feature (479)..(479): Xaa is any aa, unknown or other
  misc_feature (519)..(519): Xaa is any aa, unknown or other
  misc_feature (521)..(521): Xaa is any aa, unknown or other
  misc_feature (523)..(523): Xaa is any aa, unknown or other
  misc_feature (524)..(524): Xaa is any aa, unknown or other
  misc_feature (536)..(536): Xaa is any aa, unknown or other
  misc_feature (545)..(545): Xaa is any aa, unknown or other
  misc_feature (555)..(555): Xaa is any aa, unknown or other
  misc_feature (564)..(564): Xaa is any aa, unknown or other
  misc_feature (570)..(570): Xaa is any aa, unknown or other
  misc_feature (571)..(571): Xaa is any aa, unknown or other
  misc_feature (581)..(581): Xaa is any aa, unknown or other
  misc_feature (649)..(649): Xaa is any aa, unknown or other
  misc_feature (660)..(660): Xaa is any aa, unknown or other
  misc_feature (661)..(661): Xaa is any aa, unknown or other
  misc_feature (662)..(662): Xaa is any aa, unknown or other
  misc_feature (676)..(676): Xaa is any aa, unknown or other

SEQ ID NO: 14806 - protein, 601 aa, Zea mays subsp. mays; identical to SEQ ID NO: 14431
  peptide (1)..(601): Ceres Seq. ID no. 15220345
  misc_feature (249)..(442): Pfam Name: ATP synthase alpha/beta family, Pfam Description: ATP synthase alpha/beta family,
  misc_feature (249)..(442): Pfam Name: ATP synthase alpha/beta family, Pfam Description: ATP synthase alpha/beta family,
  misc_feature (249)..(442): Pfam Name: ATP synthase alpha/beta family, Pfam Description: ATP synthase alpha/beta family,
  misc_feature (32)..(599): Homolog of NCBI NO: 137460 NR Description: Vacuolar ATP synthase catalytic subunit A
  misc_feature (32)..(600): Homolog of NCBI NO: 11527563 NR Description: vacuolar proton-ATPase [Hordeum vulgare subsp.
  misc_feature (32)..(599): Homolog of NCBI NO: 401322 NR Description: Vacuolar ATP synthase catalytic subunit A
  misc_feature (32)..(599): Homolog of NCBI NO: 3169287 NR Description: vacuolar H+-ATPase catalytic subunit [Gossypium
  misc_feature (32)..(599): Homolog of NCBI NO: 2506211 NR Description: Vacuolar ATP synthase catalytic subunit A
  misc_feature (32)..(600): Homolog of NCBI NO: 11527563 NR Description: vacuolar proton-ATPase [Hordeum vulgare subsp.
  misc_feature (32)..(599): Homolog of NCBI NO: 3169287 NR Description: vacuolar H+-ATPase catalytic subunit [Gossypium
  misc_feature (32)..(599): Homolog of NCBI NO: 401322 NR Description: Vacuolar ATP synthase catalytic subunit A
  misc_feature (32)..(600): Homolog of NCBI NO: 11527563 NR Description: vacuolar proton-ATPase [Hordeum vulgare subsp.
  misc_feature (32)..(599): Homolog of NCBI NO: 137460 NR Description: Vacuolar ATP synthase catalytic subunit A
  misc_feature (32)..(599): Homolog of NCBI NO: 27884018 NR Description: vacuolar H+-ATPase A2 subunit isoform; V-ATPase
  misc_feature (32)..(599): Homolog of NCBI NO: 27883932 NR Description: vacuolar H+-ATPase A1 subunit isoform; V-ATPase
  misc_feature (32)..(599): Homolog of NCBI NO: 15982954 NR Description: V-ATPase catalytic subunit A [Prunus persica]
  misc_feature (32)..(599): Homolog of NCBI NO: 12585490 NR Description: Vacuolar ATP synthase catalytic subunit A
  misc_feature (32)..(599): Homolog of NCBI NO: 2493122 NR Description: Vacuolar ATP synthase catalytic subunit A
  misc_feature (32)..(599): Homolog of NCBI NO: 2506211 NR Description: Vacuolar ATP synthase catalytic subunit A
  misc_feature (32)..(599): Homolog of NCBI NO: 27884018 NR Description: vacuolar H+-ATPase A2 subunit isoform; V-ATPase
  misc_feature (32)..(599): Homolog of NCBI NO: 27883932 NR Description: vacuolar H+-ATPase A1 subunit isoform; V-ATPase
  misc_feature (32)..(599): Homolog of NCBI NO: 15982954 NR Description: V-ATPase catalytic subunit A [Prunus persica]
  misc_feature (32)..(599): Homolog of NCBI NO: 12585490 NR Description: Vacuolar ATP synthase catalytic subunit A
  misc_feature (32)..(599): Homolog of NCBI NO: 2493122 NR Description: Vacuolar ATP synthase catalytic subunit A
  misc_feature (32)..(599): Homolog of NCBI NO: 2506211 NR Description: Vacuolar ATP synthase catalytic subunit A
  misc_feature (32)..(599): Homolog of NCBI NO: 3169287 NR Description: vacuolar H+-ATPase catalytic subunit [Gossypium
  misc_feature (32)..(599): Homolog of NCBI NO: 401322 NR Description: Vacuolar ATP synthase catalytic subunit A
  misc_feature (32)..(599): Homolog of NCBI NO: 137460 NR Description: Vacuolar ATP synthase catalytic subunit A
  misc_feature (32)..(599): Homolog of NCBI NO: 2493122 NR Description: Vacuolar ATP synthase catalytic subunit A
  misc_feature (32)..(599): Homolog of NCBI NO: 12585490 NR Description: Vacuolar ATP synthase catalytic subunit A
  misc_feature (32)..(599): Homolog of NCBI NO: 15982954 NR Description: V-ATPase catalytic subunit A [Prunus persica]
  misc_feature (32)..(599): Homolog of NCBI NO: 27883932 NR Description: vacuolar H+-ATPase A1 subunit isoform; V-ATPase
  misc_feature (32)..(599): Homolog of NCBI NO: 27884018 NR Description: vacuolar H+-ATPase A2 subunit isoform; V-ATPase
  misc_feature (85)..(85): Xaa is any aa, unknown or other
  misc_feature (361)..(361): Xaa is any aa, unknown or other
  misc_feature (373)..(373): Xaa is any aa, unknown or other
  misc_feature (375)..(375): Xaa is any aa, unknown or other
  misc_feature (382)..(382): Xaa is any aa, unknown or other
  misc_feature (390)..(390): Xaa is any aa, unknown or other
  misc_feature (394)..(394): Xaa is any aa, unknown or other
  misc_feature (404)..(404): Xaa is any aa, unknown or other
  misc_feature (444)..(444): Xaa is any aa, unknown or other
  misc_feature (446)..(446): Xaa is any aa, unknown or other
  misc_feature (448)..(448): Xaa is any aa, unknown or other
  misc_feature (449)..(449): Xaa is any aa, unknown or other
  misc_feature (461)..(461): Xaa is any aa, unknown or other
  misc_feature (470)..(470): Xaa is any aa, unknown or other
  misc_feature (480)..(480): Xaa is any aa, unknown or other
  misc_feature (489)..(489): Xaa is any aa, unknown or other
  misc_feature (495)..(495): Xaa is any aa, unknown or other
  misc_feature (496)..(496): Xaa is any aa, unknown or other
  misc_feature (506)..(506): Xaa is any aa, unknown or other
  misc_feature (574)..(574): Xaa is any aa, unknown or other
  misc_feature (585)..(585): Xaa is any aa, unknown or other
  misc_feature (586)..(586): Xaa is any aa, unknown or other
  misc_feature (587)..(587): Xaa is any aa, unknown or other
  misc_feature (601)..(601): Xaa is any aa, unknown or other

SEQ ID NO: 14807 - protein, 589 aa, Zea mays subsp. mays; identical to SEQ ID NO: 14432
  peptide (1)..(589): Ceres Seq. ID no. 15220346
  misc_feature (237)..(430): Pfam Name: ATP synthase alpha/beta family, Pfam Description: ATP synthase alpha/beta family,
  misc_feature (237)..(430): Pfam Name: ATP synthase alpha/beta family, Pfam Description: ATP synthase alpha/beta family,
  misc_feature (237)..(430): Pfam Name: ATP synthase alpha/beta family, Pfam Description: ATP synthase alpha/beta family,
  misc_feature (20)..(587): Homolog of NCBI NO: 137460 NR Description: Vacuolar ATP synthase catalytic subunit A
  misc_feature (20)..(588): Homolog of NCBI NO: 11527563 NR Description: vacuolar proton-ATPase [Hordeum vulgare subsp.
  misc_feature (20)..(587): Homolog of NCBI NO: 401322 NR Description: Vacuolar ATP synthase catalytic subunit A
  misc_feature (20)..(587): Homolog of NCBI NO: 3169287 NR Description: vacuolar H+-ATPase catalytic subunit [Gossypium
  misc_feature (20)..(587): Homolog of NCBI NO: 2506211 NR Description: Vacuolar ATP synthase catalytic subunit A
  misc_feature (20)..(588): Homolog of NCBI NO: 11527563 NR Description: vacuolar proton-ATPase [Hordeum vulgare subsp.
  misc_feature (20)..(587): Homolog of NCBI NO: 3169287 NR Description: vacuolar H+-ATPase catalytic subunit [Gossypium
  misc_feature (20)..(587): Homolog of NCBI NO: 401322 NR Description: Vacuolar ATP synthase catalytic subunit A
  misc_feature (20)..(588): Homolog of NCBI NO: 11527563 NR Description: vacuolar proton-ATPase [Hordeum vulgare subsp.
  misc_feature (20)..(587): Homolog of NCBI NO: 137460 NR Description: Vacuolar ATP synthase catalytic subunit A
  misc_feature (20)..(587): Homolog of NCBI NO: 27884018 NR Description: vacuolar H+-ATPase A2 subunit isoform; V-ATPase
  misc_feature (20)..(587): Homolog of NCBI NO: 27883932 NR Description: vacuolar H+-ATPase A1 subunit isoform; V-ATPase
  misc_feature (20)..(587): Homolog of NCBI NO: 15982954 NR Description: V-ATPase catalytic subunit A [Prunus persica]
  misc_feature (20)..(587): Homolog of NCBI NO: 12585490 NR Description: Vacuolar ATP synthase catalytic subunit A
  misc_feature (20)..(587): Homolog of NCBI NO: 2493122 NR Description: Vacuolar ATP synthase catalytic subunit A
  misc_feature (20)..(587): Homolog of NCBI NO: 2506211 NR Description: Vacuolar ATP synthase catalytic subunit A
  misc_feature (20)..(587): Homolog of NCBI NO: 27884018 NR Description: vacuolar H+-ATPase A2 subunit isoform; V-ATPase
  misc_feature (20)..(587): Homolog of NCBI NO: 27883932 NR Description: vacuolar H+-ATPase A1 subunit isoform; V-ATPase
  misc_feature (20)..(587): Homolog of NCBI NO: 15982954 NR Description: V-ATPase catalytic subunit A [Prunus persica]
  misc_feature (20)..(587): Homolog of NCBI NO: 12585490 NR Description: Vacuolar ATP synthase catalytic subunit A
  misc_feature (20)..(587): Homolog of NCBI NO: 2493122 NR Description: Vacuolar ATP synthase catalytic subunit A
  misc_feature (20)..(587): Homolog of NCBI NO: 2506211 NR Description: Vacuolar ATP synthase catalytic subunit A
  misc_feature (20)..(587): Homolog of NCBI NO: 3169287 NR Description: vacuolar H+-ATPase catalytic subunit [Gossypium
  misc_feature (20)..(587): Homolog of NCBI NO: 401322 NR Description: Vacuolar ATP synthase catalytic subunit A
  misc_feature (20)..(587): Homolog of NCBI NO: 137460 NR Description: Vacuolar ATP synthase catalytic subunit A
  misc_feature (20)..(587): Homolog of NCBI NO: 2493122 NR Description: Vacuolar ATP synthase catalytic subunit A
  misc_feature (20)..(587): Homolog of NCBI NO: 12585490 NR Description: Vacuolar ATP synthase catalytic subunit A
  misc_feature (20)..(587): Homolog of NCBI NO: 15982954 NR Description: V-ATPase catalytic subunit A [Prunus persica]
  misc_feature (20)..(587): Homolog of NCBI NO: 27883932 NR Description: vacuolar H+-ATPase A1 subunit isoform; V-ATPase
  misc_feature (20)..(587): Homolog of NCBI NO: 27884018 NR Description: vacuolar H+-ATPase A2 subunit isoform; V-ATPase
  misc_feature (73)..(73): Xaa is any aa, unknown or other
  misc_feature (349)..(349): Xaa is any aa, unknown or other
  misc_feature (361)..(361): Xaa is any aa, unknown or other
  misc_feature (363)..(363): Xaa is any aa, unknown or other
  misc_feature (370)..(370): Xaa is any aa, unknown or other
  misc_feature (378)..(378): Xaa is any aa, unknown or other
  misc_feature (382)..(382): Xaa is any aa, unknown or other
  misc_feature (392)..(392): Xaa is any aa, unknown or other
  misc_feature (432)..(432): Xaa is any aa, unknown or other
  misc_feature (434)..(434): Xaa is any aa, unknown or other
  misc_feature (436)..(436): Xaa is any aa, unknown or other
  misc_feature (437)..(437): Xaa is any aa, unknown or other
  misc_feature (449)..(449): Xaa is any aa, unknown or other
  misc_feature (458)..(458): Xaa is any aa, unknown or other
  misc_feature (468)..(468): Xaa is any aa, unknown or other
  misc_feature (477)..(477): Xaa is any aa, unknown or other
  misc_feature (483)..(483): Xaa is any aa, unknown or other
  misc_feature (484)..(484): Xaa is any aa, unknown or other
  misc_feature (494)..(494): Xaa is any aa, unknown or other
  misc_feature (562)..(562): Xaa is any aa, unknown or other
  misc_feature (573)..(573): Xaa is any aa, unknown or other
  misc_feature (574)..(574): Xaa is any aa, unknown or other
  misc_feature (575)..(575): Xaa is any aa, unknown or other
  misc_feature (589)..(589): Xaa is any aa, unknown or other

SEQ ID NO: 14808 - DNA, 549 bp, Zea mays subsp. mays
  misc_feature (1)..(549): Ceres Seq. ID no. 13504101
  misc_feature: MA Experiment ID: 108504 Result: Down-regulated in Transcription
  misc_feature: MA Experiment 108504 PARAMETER Experiment Name: Zm_Drought_P Parameter: Age (day) Value: 8
  misc_feature: MA Experiment 108504 PARAMETER Experiment Name: Zm_Drought_P Parameter: Organism Value: Zea mays
  misc_feature: MA Experiment 108504 PARAMETER Experiment Name: Zm_Drought_P Parameter: Plant Line Value: 35A19
  misc_feature: MA Experiment 108504 PARAMETER Experiment Name: Zm_Drought_P Parameter: Timepoint (hr) Value: 12
  misc_feature: MA Experiment 108504 PARAMETER Experiment Name: Zm_Drought_P Parameter: Tissue Value: Aerial
  misc_feature: MA Experiment 108504 PARAMETER Experiment Name: Zm_Drought_P Parameter: Treatment Value: Drought vs. No Drought
  misc_feature: MA Experiment ID: 108515 Result: Down-regulated in Transcription
  misc_feature: MA Experiment 108515 PARAMETER Experiment Name: Zm_2mM_SA_P Parameter: Age (day) Value: 8
  misc_feature: MA Experiment 108515 PARAMETER Experiment Name: Zm_2mM_SA_P Parameter: Organism Value: Zea mays
  misc_feature: MA Experiment 108515 PARAMETER Experiment Name: Zm_2mM_SA_P Parameter: Plant Line Value: 35A19
  misc_feature: MA Experiment 108515 PARAMETER Experiment Name: Zm_2mM_SA_P Parameter: Timepoint (hr) Value: 12
  misc_feature: MA Experiment 108515 PARAMETER Experiment Name: Zm_2mM_SA_P Parameter: Tissue Value: Aerial
  misc_feature: MA Experiment 108515 PARAMETER Experiment Name: Zm_2mM_SA_P Parameter: Treatment Value: 2mM SA vs. No Treatment
  misc_feature: MA Experiment ID: 108523 Result: Down-regulated in Transcription
  misc_feature: MA Experiment 108523 PARAMETER Experiment Name: Zm_42deg_Heat_P Parameter: Age (day) Value: 8
  misc_feature: MA Experiment 108523 PARAMETER Experiment Name: Zm_42deg_Heat_P Parameter: Organism Value: Zea mays
  misc_feature: MA Experiment 108523 PARAMETER Experiment Name: Zm_42deg_Heat_P Parameter: Plant Line Value: 35A19
  misc_feature: MA Experiment 108523 PARAMETER Experiment Name: Zm_42deg_Heat_P Parameter: Temperature (deg C) Value: 42 vs. 22
  misc_feature: MA Experiment 108523 PARAMETER Experiment Name: Zm_42deg_Heat_P Parameter: Timepoint (hr) Value: 6
  misc_feature: MA Experiment 108523 PARAMETER Experiment Name: Zm_42deg_Heat_P Parameter: Tissue Value: Aerial
  misc_feature: MA Experiment ID: 108535 Result: Up-regulated in Transcription
  misc_feature: MA Experiment 108535 PARAMETER Experiment Name: Zm_Meristem_P Parameter: Age (day) Value: 8
  misc_feature: MA Experiment 108535 PARAMETER Experiment Name: Zm_Meristem_P Parameter: Organism Value: Zea mays
  misc_feature: MA Experiment 108535 PARAMETER Experiment Name: Zm_Meristem_P Parameter: Plant Line Value: 35A19
  misc_feature: MA Experiment 108535 PARAMETER Experiment Name: Zm_Meristem_P Parameter: Tissue Value: Root Meristem vs. Above Root Meristem
  misc_feature: MA Experiment ID: 108543 Result: Up-regulated in Transcription
  misc_feature: MA Experiment ID: 108544 Result: Down-regulated in Transcription
  misc_feature: MA Experiment ID: 108556 Result: Down-regulated in Transcription
  misc_feature: MA Experiment 108556 PARAMETER Experiment Name: Zm_Drought_P Parameter: Age (day) Value: 9
  misc_feature: MA Experiment 108556 PARAMETER Experiment Name: Zm_Drought_P Parameter: Organism Value: Zea mays
  misc_feature: MA Experiment 108556 PARAMETER Experiment Name: Zm_Drought_P Parameter: Plant Line Value: 35A19
  misc_feature: MA Experiment 108556 PARAMETER Experiment Name: Zm_Drought_P Parameter: Timepoint (hr) Value: 24
  misc_feature: MA Experiment 108556 PARAMETER Experiment Name: Zm_Drought_P Parameter: Tissue Value: Aerial
  misc_feature: MA Experiment 108556 PARAMETER Experiment Name: Zm_Drought_P Parameter: Treatment Value: Drought vs. No Drought
  misc_feature: MA Experiment ID: 108597 Result: Down-regulated in Transcription
  misc_feature: MA Experiment 108597 PARAMETER Experiment Name: Zm_100uM_ABA_P Parameter: Age (day) Value: 9
  misc_feature: MA Experiment 108597 PARAMETER Experiment Name: Zm_100uM_ABA_P Parameter: Organism Value: Zea mays
  misc_feature: MA Experiment 108597 PARAMETER Experiment Name: Zm_100uM_ABA_P Parameter: Plant Line Value: 35A19
  misc_feature: MA Experiment 108597 PARAMETER Experiment Name: Zm_100uM_ABA_P Parameter: Timepoint (hr) Value: 24
  misc_feature: MA Experiment 108597 PARAMETER Experiment Name: Zm_100uM_ABA_P Parameter: Tissue Value: Aerial
  misc_feature: MA Experiment 108597 PARAMETER Experiment Name: Zm_100uM_ABA_P Parameter: Treatment Value: 100uM ABA vs. No Treatment
  misc_feature: MA Experiment ID: 20000477 Result: Down-regulated in Transcription
  misc_feature: MA Experiment 20000477 PARAMETER Experiment Name: Zm_5mM_SA_P Parameter: Age (day) Value: 10
  misc_feature: MA Experiment 20000477 PARAMETER Experiment Name: Zm_5mM_SA_P Parameter: Organism Value: Zea mays
  misc_feature: MA Experiment 20000477 PARAMETER Experiment Name: Zm_5mM_SA_P Parameter: Plant Line Value: 35A19
  misc_feature: MA Experiment 20000477 PARAMETER Experiment Name: Zm_5mM_SA_P Parameter: Timepoint (hr) Value: 48
  misc_feature: MA Experiment 20000477 PARAMETER Experiment Name: Zm_5mM_SA_P Parameter: Tissue Value: Aerial
  misc_feature: MA Experiment 20000477 PARAMETER Experiment Name: Zm_5mM_SA_P Parameter: Treatment Value: 5mM SA vs. No Treatment
  misc_feature: MA Experiment ID: 20000480 Result: Down-regulated in Transcription
  misc_feature: MA Experiment 20000480 PARAMETER Experiment Name: Zm_Drought_P Parameter: Age (day) Value: 11
  misc_feature: MA Experiment 20000480 PARAMETER Experiment Name: Zm_Drought_P Parameter: Organism Value: Zea mays
  misc_feature: MA Experiment 20000480 PARAMETER Experiment Name: Zm_Drought_P Parameter: Plant Line Value: 35A19
  misc_feature: MA Experiment 20000480 PARAMETER Experiment Name: Zm_Drought_P Parameter: Timepoint (hr) Value: 72
  misc_feature: MA Experiment 20000480 PARAMETER Experiment Name: Zm_Drought_P Parameter: Tissue Value: Aerial
  misc_feature: MA Experiment 20000480 PARAMETER Experiment Name: Zm_Drought_P Parameter: Treatment Value: Drought vs. No Drought
  misc_feature: MA Experiment ID: 20000626 Result: Down-regulated in Transcription
  misc_feature: MA Experiment 20000626 PARAMETER Experiment Name: Zm_Herbicide-Treatments_P Parameter: Timepoint (hr) Value: 12
  misc_feature: MA Experiment 20000626 PARAMETER Experiment Name: Zm_Herbicide-Treatments_P Parameter: Tissue Value: Aerial
  misc_feature: MA Experiment 20000626 PARAMETER Experiment Name: Zm_Herbicide-Treatments_P Parameter: Treatment Value: Roundup vs. No Treatment
  misc_feature: MA Experiment ID: 20000632 Result: Down-regulated in Transcription
  misc_feature: MA Experiment 20000632 PARAMETER Experiment Name: Zm_Herbicide-Treatments_P Parameter: Timepoint (hr) Value: 4
  misc_feature: MA Experiment 20000632 PARAMETER Experiment Name: Zm_Herbicide-Treatments_P Parameter: Tissue Value: Aerial
  misc_feature: MA Experiment 20000632 PARAMETER Experiment Name: Zm_Herbicide-Treatments_P Parameter: Treatment Value: Glean vs. No Treatment
  misc_feature: MA Experiment ID: 20001614 Result: Up-regulated in Transcription
  misc_feature: MA Experiment 20001614 PARAMETER Experiment Name: Zm_50ppm_KNO3_L-to-H_P Parameter: Age (day) Value: 21
  misc_feature: MA Experiment 20001614 PARAMETER Experiment Name: Zm_50ppm_KNO3_L-to-H_P Parameter: Organism Value: Zea mays
  misc_feature: MA Experiment 20001614 PARAMETER Experiment Name: Zm_50ppm_KNO3_L-to-H_P Parameter: Plant Line Value: 35A19
  misc_feature: MA Experiment 20001614 PARAMETER Experiment Name: Zm_50ppm_KNO3_L-to-H_P Parameter: Timepoint (hr) Value: 48
  misc_feature: MA Experiment 20001614 PARAMETER Experiment Name: Zm_50ppm_KNO3_L-to-H_P Parameter: Tissue Value: Roots
  misc_feature: MA Experiment 20001614 PARAMETER Experiment Name: Zm_50ppm_KNO3_L-to-H_P Parameter: Treatment Value: 50ppm KNO3 vs. 50ppm KCl
accagagtcaccgcggtcggagttcaaatcccacaatcttcttgtagcacaccactgtcttcgtccaactcggcggcgatgtctgggcgcggcaagggcggcaaggggctgggcaagggcggcgcgaaacgccaccgtaaggttctccgcgacaacatccagggtatcacgaagccggcaatccggaggctggcgaggaggggcggcgtgaagcgtatctccgggcttatctacgaggaaacccgcggcgtgctcaagatcttcctcgagaatgtcatccgcgacgcggtcacctacaccgagcacgctcgccgcaagaccgtcaccgccatggatgttgtgtacgccctcaagcgccagggccgcactctgtacgggttcggtggttgagcgcatctcttccctcgtctgcagcggctgccggtggcgtttcctcagttccctctgccttgcttggcttgatgtagagagttatcagattaaaatatctctgatgtgcttcgttattgggtggaatcatgtgtcccagcagtgctgggaaatcaagat

SEQ ID NO: 14809 - protein, 129 aa, Zea mays subsp. mays
  peptide (1)..(129): Ceres Seq. ID no. 13504102
  misc_feature (21)..(129): Homolog of NCBI NO: 34876368 NR Description: similar to germinal histone H4 gene [Rattus
  misc_feature (27)..(129): Homolog of NCBI NO: 15226944 NR Description: histone H4 [Arabidopsis thaliana] histone H4 [Arabidopsis thaliana] >gi|15232318|ref|NP_190941.1|
  misc_feature (21)..(129): Homolog of NCBI NO: 17540668 NR Description: Histone H4 family member [Caenorhabditis elegans]
  misc_feature (27)..(129): Homolog of NCBI NO: 462243 NR Description: Histone H4 >gi|421921|pir||S32769 histone H4 - >gi|297150|emb|CAA48923.1| histone H4 [Lycopersicon esculentum] histone H4 [Lycopersicon esculentum] >gi|2746721|gb|AAB94924.1|
  misc_feature (27)..(129): Homolog of NCBI NO: 1806283 NR Description: Histone H4 homologue [Sesbania rostrata]
  misc_feature (27)..(129): Homolog of NCBI NO: 4504301 NR Description: H4 histone family, member A [Homo sapiens] H4 histone family, member B [Homo sapiens] H4 histone family, member C [Homo sapiens]
  misc_feature (27)..(129): Homolog of NCBI NO: 27692960 NR Description: Similar to germinal histone H4 gene [Mus musculus]
  misc_feature (27)..(129): Homolog of NCBI NO: 27692935 NR Description: Hist1h4i protein [Mus musculus]
  misc_feature (27)..(129): Homolog of NCBI NO: 37590121 NR Description: Hist1h4h protein [Mus musculus]
  misc_feature (27)..(129): Homolog of NCBI NO: 17352498 NR Description: histone H4; Bicoid interacting protein 2; histone melanogaster] >gi|17975542|ref|NP_524352.1| Histone H4
TRVTAVGVQIPQSSCSTPLSSSNSAAMSGRGKGGKGLGKGGAKRHRKVLRDNIQGITKPAIRRLARRGGVKRISGLIYEETRGVLKIFLENVIRDAVTYTEHARRKTVTAMDVVYALKRQGRTLYGFGG

SEQ ID NO: 14810 - protein, 103 aa, Zea mays subsp. mays; identical to SEQ ID NO: 7737
  peptide (1)..(103): Ceres Seq. ID no. 13504103
  misc_feature (1)..(103): Homolog of NCBI NO: 34876368 NR Description: similar to germinal histone H4 gene [Rattus
  misc_feature (1)..(103): Homolog of NCBI NO: 15226944 NR Description: histone H4 [Arabidopsis thaliana] histone H4 [Arabidopsis thaliana] >gi|15232318|ref|NP_190941.1|
  misc_feature (1)..(103): Homolog of NCBI NO: 17540668 NR Description: Histone H4 family member [Caenorhabditis elegans]
  misc_feature (1)..(103): Homolog of NCBI NO: 462243 NR Description: Histone H4 >gi|421921|pir||S32769 histone H4 - >gi|297150|emb|CAA48923.1| histone H4 [Lycopersicon esculentum] histone H4 [Lycopersicon esculentum] >gi|2746721|gb|AAB94924.1|
  misc_feature (1)..(103): Homolog of NCBI NO: 1806283 NR Description: Histone H4 homologue [Sesbania rostrata]
  misc_feature (1)..(103): Homolog of NCBI NO: 4504301 NR Description: H4 histone family, member A [Homo sapiens] H4 histone family, member B [Homo sapiens] H4 histone family, member C [Homo sapiens]
  misc_feature (1)..(103): Homolog of NCBI NO: 27692960 NR Description: Similar to germinal histone H4 gene [Mus musculus]
  misc_feature (1)..(103): Homolog of NCBI NO: 27692935 NR Description: Hist1h4i protein [Mus musculus]
  misc_feature (1)..(103): Homolog of NCBI NO: 37590121 NR Description: Hist1h4h protein [Mus musculus]
  misc_feature (1)..(103): Homolog of NCBI NO: 17352498 NR Description: histone H4; Bicoid interacting protein 2; histone melanogaster] >gi|17975542|ref|NP_524352.1| Histone H4

SEQ ID NO: 14811 - protein, 92 aa, Zea mays subsp. mays
  peptide (1)..(92): Ceres Seq. ID no. 13504104
MSSATRSPTPSTLAARPSPPWMLCTPSSARAALCTGSVVERISSLVCSGCRWRFLSSLCLAWLDVESYQIKISLMCFVIGWNHVSQQCWEIK

SEQ ID NO: 14812 - DNA, 924 bp, Zea mays subsp. mays
  misc_feature (1)..(924): Ceres Seq. ID no. 13502490
  misc_feature: MA Experiment ID: 108527 Result: Down-regulated in Transcription
  misc_feature: MA Experiment 108527 PARAMETER Experiment Name: Zm_5mM_NO_P Parameter: Age (day) Value: 8
  misc_feature: MA Experiment 108527 PARAMETER Experiment Name: Zm_5mM_NO_P Parameter: Organism Value: Zea mays
  misc_feature: MA Experiment 108527 PARAMETER Experiment Name: Zm_5mM_NO_P Parameter: Plant Line Value: 35A19
  misc_feature: MA Experiment 108527 PARAMETER Experiment Name: Zm_5mM_NO_P Parameter: Timepoint (hr) Value: 6
  misc_feature: MA Experiment 108527 PARAMETER Experiment Name: Zm_5mM_NO_P Parameter: Tissue Value: Aerial
  misc_feature: MA Experiment 108527 PARAMETER Experiment Name: Zm_5mM_NO_P Parameter: Treatment Value: 5mM NO vs. No Treatment
  misc_feature: MA Experiment ID: 108528 Result: Down-regulated in Transcription
  misc_feature: MA Experiment 108528 PARAMETER Experiment Name: Zm_Imbibed_Seeds_P Parameter: Age (day) Value: 5 vs. 2
  misc_feature: MA Experiment 108528 PARAMETER Experiment Name: Zm_Imbibed_Seeds_P Parameter: Organism Value: Zea mays
  misc_feature: MA Experiment 108528 PARAMETER Experiment Name: Zm_Imbibed_Seeds_P Parameter: Plant Line Value: 35A19
  misc_feature: MA Experiment 108528 PARAMETER Experiment Name: Zm_Imbibed_Seeds_P Parameter: Tissue Value: Aerial vs. Embryo
  misc_feature: MA Experiment ID: 108529 Result: Down-regulated in Transcription
  misc_feature: MA Experiment 108529 PARAMETER Experiment Name: Zm_Imbibed_Seeds_P Parameter: Age (day) Value: 5 vs. 2
  misc_feature: MA Experiment 108529 PARAMETER Experiment Name: Zm_Imbibed_Seeds_P Parameter: Organism Value: Zea mays
  misc_feature: MA Experiment 108529 PARAMETER Experiment Name: Zm_Imbibed_Seeds_P Parameter: Plant Line Value: 35A19
  misc_feature: MA Experiment 108529 PARAMETER Experiment Name: Zm_Imbibed_Seeds_P Parameter: Tissue Value: Roots vs. Embryo
  misc_feature: MA Experiment ID: 108530 Result: Down-regulated in Transcription
  misc_feature: MA Experiment 108530 PARAMETER Experiment Name: Zm_Imbibed_Seeds_P Parameter: Age (day) Value: 6 vs. 2
  misc_feature: MA Experiment 108530 PARAMETER Experiment Name: Zm_Imbibed_Seeds_P Parameter: Organism Value: Zea mays
  misc_feature: MA Experiment 108530 PARAMETER Experiment Name: Zm_Imbibed_Seeds_P Parameter: Plant Line Value: 35A19
  misc_feature: MA Experiment 108530 PARAMETER Experiment Name: Zm_Imbibed_Seeds_P Parameter: Tissue Value: Aerial vs. Embryo
  misc_feature: MA Experiment ID: 108535 Result: Up-regulated in Transcription
  misc_feature: MA Experiment 108535 PARAMETER Experiment Name: Zm_Meristem_P Parameter: Age (day) Value: 8
  misc_feature: MA Experiment 108535 PARAMETER Experiment Name: Zm_Meristem_P Parameter: Organism Value: Zea mays
  misc_feature: MA Experiment 108535 PARAMETER Experiment Name: Zm_Meristem_P Parameter: Plant Line Value: 35A19
  misc_feature: MA Experiment 108535 PARAMETER Experiment Name: Zm_Meristem_P Parameter: Tissue Value: Root Meristem vs. Above Root Meristem
  misc_feature: MA Experiment ID: 108544 Result: Down-regulated in Transcription
  misc_feature: MA Experiment ID: 20000108 Result: Up-regulated in Transcription
  misc_feature: MA Experiment 20000108 PARAMETER Experiment Name: Zm_Root-Tips_P Parameter: Age (day) Value: 12
  misc_feature: MA Experiment 20000108 PARAMETER Experiment Name: Zm_Root-Tips_P Parameter: Organism Value: Zea mays
  misc_feature: MA Experiment 20000108 PARAMETER Experiment Name: Zm_Root-Tips_P Parameter: Tissue Value: Root tips vs. Root mid region    35
  misc_feature: MA Experiment 20000108 PARAMETER Experiment Name: Zm_Root-Tips_P Parameter: Tissue Value: Root tips vs. Root mid region   Sequence Listing-Misc Features (4)
  misc_feature: MA Experiment ID: 20000487 Result: Up-regulated in Transcription
  misc_feature: MA Experiment 20000487 PARAMETER Experiment Name: Zm_50mM_NH4NO3_L_to_H_P Parameter: Organism Value: Zea mays
  misc_feature: MA Experiment 20000487 PARAMETER Experiment Name: Zm_50mM_NH4NO3_L_to_H_P Parameter: Timepoint (hr) Value: 4
  misc_feature: MA Experiment 20000487 PARAMETER Experiment Name: Zm_50mM_NH4NO3_L_to_H_P Parameter: Tissue Value: Leaves
  misc_feature: MA Experiment 20000487 PARAMETER Experiment Name: Zm_50mM_NH4NO3_L_to_H_P Parameter: Treatment Value: 50mM NH4NO3 vs. 100mM Mannitol
  misc_feature: MA Experiment ID: 20000488 Result: Up-regulated in Transcription
  misc_feature: MA Experiment 20000488 PARAMETER Experiment Name: Zm_50mM_NH4NO3_L_to_H_P Parameter: Organism Value: Zea mays
  misc_feature: MA Experiment 20000488 PARAMETER Experiment Name: Zm_50mM_NH4NO3_L_to_H_P Parameter: Timepoint (hr) Value: 8
  misc_feature: MA Experiment 20000488 PARAMETER Experiment Name: Zm_50mM_NH4NO3_L_to_H_P Parameter: Tissue Value: Leaves
  misc_feature: MA Experiment 20000488 PARAMETER Experiment Name: Zm_50mM_NH4NO3_L_to_H_P Parameter: Treatment Value: 50mM NH4NO3 vs. 100mM Mannitol
  misc_feature: MA Experiment ID: 20000492 Result: Up-regulated in Transcription
  misc_feature: MA Experiment 20000492 PARAMETER Experiment Name: Zm_Hybrid_Seed_Dev_P Parameter: DAP Value: 12
  misc_feature: MA Experiment 20000492 PARAMETER Experiment Name: Zm_Hybrid_Seed_Dev_P Parameter: Organism Value: Zea mays
  misc_feature: MA Experiment 20000492 PARAMETER Experiment Name: Zm_Hybrid_Seed_Dev_P Parameter: Plant Line Value: 35A19
  misc_feature: MA Experiment 20000492 PARAMETER Experiment Name: Zm_Hybrid_Seed_Dev_P Parameter: Tissue Value: Fert Kernel vs. Unfert Floret
  misc_feature: MA Experiment ID: 20000535 Result: Up-regulated in Transcription
  misc_feature: MA Experiment 20000535 PARAMETER Experiment Name: Zm_Hybrid_Seed_Dev_P Parameter: DAP Value: 30 vs. 12
  misc_feature: MA Experiment 20000535 PARAMETER Experiment Name: Zm_Hybrid_Seed_Dev_P Parameter: Organism Value: Zea mays
  misc_feature: MA Experiment 20000535 PARAMETER Experiment Name: Zm_Hybrid_Seed_Dev_P Parameter: Plant Line Value: 35A19
  misc_feature: MA Experiment 20000535 PARAMETER Experiment Name: Zm_Hybrid_Seed_Dev_P Parameter: Tissue Value: Embryo vs. Unfert Floret
  misc_feature: MA Experiment ID: 20000632 Result: Down-regulated in Transcription
  misc_feature: MA Experiment 20000632 PARAMETER Experiment Name: Zm_Herbicide-Treatments_P Parameter: Timepoint (hr) Value: 4
  misc_feature: MA Experiment 20000632 PARAMETER Experiment Name: Zm_Herbicide-Treatments_P Parameter: Tissue Value: Aerial
  misc_feature: MA Experiment 20000632 PARAMETER Experiment Name: Zm_Herbicide-Treatments_P Parameter: Treatment Value: Glean vs. No Treatment
  misc_feature: MA Experiment ID: 20000633 Result: Down-regulated in Transcription
  misc_feature: MA Experiment 20000633 PARAMETER Experiment Name: Zm_Herbicide-Treatments_P Parameter: Timepoint (hr) Value: 4
  misc_feature: MA Experiment 20000633 PARAMETER Experiment Name: Zm_Herbicide-Treatments_P Parameter: Tissue Value: Aerial
  misc_feature: MA Experiment 20000633 PARAMETER Experiment Name: Zm_Herbicide-Treatments_P Parameter: Treatment Value: Trimec vs. No Treatment
  misc_feature: MA Experiment ID: 20001613 Result: Up-regulated in Transcription
  misc_feature: MA Experiment 20001613 PARAMETER Experiment Name: Zm_50ppm_KNO3_L-to-H_P Parameter: Age (day) Value: 20
  misc_feature: MA Experiment 20001613 PARAMETER Experiment Name: Zm_50ppm_KNO3_L-to-H_P Parameter: Organism Value: Zea mays
  misc_feature: MA Experiment 20001613 PARAMETER Experiment Name: Zm_50ppm_KNO3_L-to-H_P Parameter: Plant Line Value: 35A19
  misc_feature: MA Experiment 20001613 PARAMETER Experiment Name: Zm_50ppm_KNO3_L-to-H_P Parameter: Timepoint (hr) Value: 24
  misc_feature: MA Experiment 20001613 PARAMETER Experiment Name: Zm_50ppm_KNO3_L-to-H_P Parameter: Tissue Value: Roots
  misc_feature: MA Experiment 20001613 PARAMETER Experiment Name: Zm_50ppm_KNO3_L-to-H_P Parameter: Treatment Value: 50ppm KNO3 vs. 50ppm KCl
tcccagctccgcctccctttcctaccttcttccctccgtctcccagctcgcgcaggcaggcgacacagcgacgctaaaaaccctagagcgaggaggcgtgccaggccagcggtttgcgatgacggcaccggcggacaaggggaagaaggccaagaccgatgccgacggcggcgaggagaacgagcaaatcgacggcgcccttgtcttctccatcgagaagctccaggagattcaggacgagctcgagaaggttaatgaggaagcaagtgacaaggttatggaggtggagcagaaatacagtgagattcgcagacctgtctatctcaagaggggtgacattatcaagaccatcccggacttttggctcacagcgtttttgagccatcctctactaagtgagcttctgactgaagaggatcagaagatattcaagtacttggactccattgatgtcgatgattctgatgttaaggcaggatattccatttaccttaacttctctgagaacccgtactttgaagacacaaagcttacaaagacctattcctttgttgatgatggaacaaccacaataaaagcttctcaaattaagtggaaggatggaatgggacctgcaaatggaaatggtattaacaagaagggaaacaagcggccattagtagtggaaagttttttctcctggtttagtgatacagagctcaagagtcttgctgatggtgtgcaagatgaggtggcggagatcatcaaggaagacttgtggcctaatcctttgaagtacttcaacaatgaggttgaagatgaatttgaaggagatgaagaagatgatgacgacgacgacgacgatgataatttggatggtgatgacaatgacgatgatggggaccaggagaactgagccctcgcgtttaggcggggaattatgtg

SEQ ID NO: 14813 - protein, 297 aa, Zea mays subsp. mays
  peptide (1)..(297): Ceres Seq. ID no. 13502491
  misc_feature (71)..(266): Pfam Name: Nucleosome assembly protein (NAP) Pfam Description: Nucleosome assembly protein (NAP)
  misc_feature (40)..(297): Homolog of NCBI NO: 14550112 NR Description: nucleosome/chromatin assembly factor A [Zea mays]
  misc_feature (40)..(288): Homolog of NCBI NO: 14550110 NR Description: nucleosome/chromatin assembly factor A [Zea mays]
  misc_feature (40)..(295): Homolog of NCBI NO: 21739223 NR Description: OSJNBa0072F16.2 [Oryza sativa (japonica
  misc_feature (45)..(296): Homolog of NCBI NO: 25354177 NR Description: hypothetical protein F6A14.10 [imported] - thaliana >gi|6730705|gb|AAF27100.1|AC011809_9 Putative phospatase
  misc_feature (45)..(296): Homolog of NCBI NO: 18394656 NR Description: expressed protein [Arabidopsis thaliana] putative SET protein, phospatase 2A inhibitor [Arabidopsis
  misc_feature (44)..(295): Homolog of NCBI NO: 15221298 NR Description: SET protein, phospatase 2A inhibitor -related
  misc_feature (45)..(267): Homolog of NCBI NO: 26451105 NR Description: unknown protein [Arabidopsis thaliana]
  misc_feature (40)..(296): Homolog of NCBI NO: 2144100 NR Description: Set beta isoform - rat >gi|545265|gb|AAC60682.1| beta isoform [Rattus sp.] >gi|12860381|dbj|BAB31936.1| unnamed
  misc_feature (40)..(296): Homolog of NCBI NO: 1711383 NR Description: SET protein (HLA-DR associated protein II) (Phosphatase 2A inhibitor I2PP2A) >gi|403009|emb|CAA52982.1| (Putative HLA DR Associated Protein II) [Homo sapiens]
  misc_feature (40)..(297): Homolog of NCBI NO: 28279779 NR Description: Similar to SET translocation (myeloid
PSSASLSYLLPSVSQLAQAGDTATLKTLERGGVPGQRFAMTAPADKGKKAKTDADGGEENEQIDGALVFSIEKLQEIQDELEKVNEEASDKVMEVEQKYSEIRRPVYLKRGDIIKTIPDFWLTAFLSHPLLSELLTEEDQKIFKYLDSIDVDDSDVKAGYSIYLNFSENPYFEDTKLTKTYSFVDDGTTTIKASQIKWKDGMGPANGNGINKKGNKRPLVVESFFSWFSDTELKSLADGVQDEVAEIIKEDLWPNPLKYFNNEVEDEFEGDEEDDDDDDDDDNLDGDDNDDDGDQEN

SEQ ID NO: 14814 - protein, 258 aa, Zea mays subsp. mays
  peptide (1)..(258): Ceres Seq. ID no. 13502492
  misc_feature (32)..(227): Pfam Name: Nucleosome assembly protein (NAP) Pfam Description: Nucleosome assembly protein (NAP)
  misc_feature (1)..(258): Homolog of NCBI NO: 14550112 NR Description: nucleosome/chromatin assembly factor A [Zea mays]
  misc_feature (1)..(249): Homolog of NCBI NO: 14550110 NR Description: nucleosome/chromatin assembly factor A [Zea mays]
  misc_feature (1)..(256): Homolog of NCBI NO: 21739223 NR Description: OSJNBa0072F16.2 [Oryza sativa (japonica
  misc_feature (6)..(257): Homolog of NCBI NO: 25354177 NR Description: hypothetical protein F6A14.10 [imported] - thaliana >gi|6730705|gb|AAF27100.1|AC011809_9 Putative phospatase
  misc_feature (6)..(257): Homolog of NCBI NO: 18394656 NR Description: expressed protein [Arabidopsis thaliana] putative SET protein, phospatase 2A inhibitor [Arabidopsis
  misc_feature (5)..(256): Homolog of NCBI NO: 15221298 NR Description: SET protein, phospatase 2A inhibitor -related
  misc_feature (6)..(228): Homolog of NCBI NO: 26451105 NR Description: unknown protein [Arabidopsis thaliana]
  misc_feature (1)..(257): Homolog of NCBI NO: 2144100 NR Description: Set beta isoform - rat >gi|545265|gb|AAC60682.1| beta isoform [Rattus sp.] >gi|12860381|dbj|BAB31936.1| unnamed
  misc_feature (1)..(257): Homolog of NCBI NO: 1711383 NR Description: SET protein (HLA-DR associated protein II) (Phosphatase 2A inhibitor I2PP2A) >gi|403009|emb|CAA52982.1| (Putative HLA DR Associated Protein II) [Homo sapiens]
  misc_feature (1)..(258): Homolog of NCBI NO: 28279779 NR Description: Similar to SET translocation (myeloid
MTAPADKGKKAKTDADGGEENEQIDGALVFSIEKLQEIQDELEKVNEEASDKVMEVEQKYSEIRRPVYLKRGDIIKTIPDFWLTAFLSHPLLSELLTEEDQKIFKYLDSIDVDDSDVKAGYSIYLNFSENPYFEDTKLTKTYSFVDDGTTTIKASQIKWKDGMGPANGNGINKKGNKRPLVVESFFSWFSDTELKSLADGVQDEVAEIIKEDLWPNPLKYFNNEVEDEFEGDEEDDDDDDDDDNLDGDDNDDDGDQEN

SEQ ID NO: 14815 - protein, 205 aa, Zea mays subsp. mays
  peptide (1)..(205): Ceres Seq. ID no. 13502493
  misc_feature (1)..(174): Pfam Name: Nucleosome assembly protein (NAP) Pfam Description: Nucleosome assembly protein (NAP)
  misc_feature (1)..(205): Homolog of NCBI NO: 14550112 NR Description: nucleosome/chromatin assembly factor A [Zea mays]
  misc_feature (1)..(196): Homolog of NCBI NO: 14550110 NR Description: nucleosome/chromatin assembly factor A [Zea mays]
  misc_feature (1)..(203): Homolog of NCBI NO: 21739223 NR Description: OSJNBa0072F16.2 [Oryza sativa (japonica
  misc_feature (1)..(204): Homolog of NCBI NO: 25354177 NR Description: hypothetical protein F6A14.10 [imported] - thaliana >gi|6730705|gb|AAF27100.1|AC011809_9 Putative phospatase
  misc_feature (1)..(204): Homolog of NCBI NO: 18394656 NR Description: expressed protein [Arabidopsis thaliana] putative SET protein, phospatase 2A inhibitor [Arabidopsis
  misc_feature (1)..(203): Homolog of NCBI NO: 15221298 NR Description: SET protein, phospatase 2A inhibitor -related
  misc_feature (1)..(175): Homolog of NCBI NO: 26451105 NR Description: unknown protein [Arabidopsis thaliana]
  misc_feature (1)..(204): Homolog of NCBI NO: 2144100 NR Description: Set beta isoform - rat >gi|545265|gb|AAC60682.1| beta isoform [Rattus sp.] >gi|12860381|dbj|BAB31936.1| unnamed
  misc_feature (1)..(204): Homolog of NCBI NO: 1711383 NR Description: SET protein (HLA-DR associated protein II) (Phosphatase 2A inhibitor I2PP2A) >gi|403009|emb|CAA52982.1| (Putative HLA DR Associated Protein II) [Homo sapiens]
  misc_feature (1)..(205): Homolog of NCBI NO: 28279779 NR Description: Similar to SET translocation (myeloid
MEVEQKYSEIRRPVYLKRGDIIKTIPDFWLTAFLSHPLLSELLTEEDQKIFKYLDSIDVDDSDVKAGYSIYLNFSENPYFEDTKLTKTYSFVDDGTTTIKASQIKWKDGMGPANGNGINKKGNKRPLVVESFFSWFSDTELKSLADGVQDEVAEIIKEDLWPNPLKYFNNEVEDEFEGDEEDDDDDDDDDNLDGDDNDDDGDQEN

SEQ ID NO: 14816 - DNA, 414 bp, Zea mays subsp. mays
  misc_feature (1)..(414): Ceres Seq. ID no. 4489390
  misc_feature: MA Experiment ID: 108687 Result: Up-regulated in Transcription
  misc_feature: MA Experiment 108687 PARAMETER Experiment Name: Zm_Embryos-Flowers__P Parameter: Tissue Value: Embryo vs. Aerial+
actcacctctcgccaaacttcctcttccgagaatgccagattatccactgcggcctcttcctcgtgctcctcctccagtcctcccttcccaccatgattaccacccacctctccccagccctcaagcaccgctccccgtccccgctccactccacctaccactcccaccaccacctccccgtgcacctcccgctccccctcccccgccgccactgccacctcgctaagcccgccgccgccgcctcgccagaccttctcgcgagcatcgagyccgtggcctccgcggcctccgtgctggccgccatcgtgctggtccacgagtcgggccacttcctcgccgcggcgtcccggggcatccacgtctcccagttctccatcggcttcggcccggcgctggcccgcttccgcctcggc

SEQ ID NO: 14817 - protein, 138 aa, Zea mays subsp. mays
  peptide (1)..(138): Ceres Seq. ID no. 4489391
  misc_feature (33)..(137): Homolog of NCBI NO: 29837756 NR Description: unknown protein [Oryza sativa (japonica
  misc_feature (86)..(135): Homolog of NCBI NO: 18402981 NR Description: expressed protein; protein id: At2g32480.1, by cDNA: 18983., supported by cDNA: gi_14423491 [Arabidopsis
  misc_feature (88)..(135): Homolog of NCBI NO: 15010610 NR Description: At1g05140/YUP8H12_25 [Arabidopsis thaliana]
  misc_feature (91)..(91): Xaa is any aa, unknown or other
THLSPNFLFRECQIIHCGLFLVLLLQSSLPTMITTHLSPALKHRSPSPLHSTYHSHHHLPVHLPLPLPRRHCHLAKPAAAASPDLLASIEXVASAASVLAAIVLVHESGHFLAAASRGIHVSQFSIGFGPALARFRLG

SEQ ID NO: 14818 - protein, 107 aa, Zea mays subsp. mays
  peptide (1)..(107): Ceres Seq. ID no. 4489392
  misc_feature (2)..(106): Homolog of NCBI NO: 29837756 NR Description: unknown protein [Oryza sativa (japonica
  misc_feature (55)..(104): Homolog of NCBI NO: 18402981 NR Description: expressed protein; protein id: At2g32480.1, by cDNA: 18983., supported by cDNA: gi_14423491 [Arabidopsis
  misc_feature (57)..(104): Homolog of NCBI NO: 15010610 NR Description: At1g05140/YUP8H12_25 [Arabidopsis thaliana]
  misc_feature (60)..(60): Xaa is any aa, unknown or other
MITTHLSPALKHRSPSPLHSTYHSHHHLPVHLPLPLPRRHCHLAKPAAAASPDLLASIEXVASAASVLAAIVLVHESGHFLAAASRGIHVSQFSIGFGPALARFRLG

SEQ ID NO: 14819 - protein, 74 aa, Zea mays subsp. mays
  peptide (1)..(74): Ceres Seq. ID no. 4489393
  misc_feature (5)..(74): Pfam Name: Extensin-like region Pfam Description: Extensin-like region
  misc_feature (2)..(74): Homolog of NCBI NO: 14017929 NR Description: KIAA1856 protein [Homo sapiens]
  misc_feature (2)..(74): Homolog of NCBI NO: 37538336 NR Description: KIAA1856 protein [Homo sapiens]
  misc_feature (6)..(73): Homolog of NCBI NO: 7484420 NR Description: pherophorin-S - Volvox carteri
  misc_feature (1)..(73): Homolog of NCBI NO: 6523547 NR Description: hydroxyproline-rich glycoprotein DZ-HRGP [Volvox
  misc_feature (1)..(73): Homolog of NCBI NO: 7484420 NR Description: pherophorin-S - Volvox carteri
  misc_feature (1)..(74): Homolog of NCBI NO: 6523547 NR Description: hydroxyproline-rich glycoprotein DZ-HRGP [Volvox
  misc_feature (2)..(74): Homolog of NCBI NO: 19263450 NR Description: putative glycine-rich protein [Equine herpesvirus
  misc_feature (1)..(74): Homolog of NCBI NO: 226743 NR Description: sulfated surface glycoprotein SSG185
  misc_feature (7)..(73): Homolog of NCBI NO: 6523547 NR Description: hydroxyproline-rich glycoprotein DZ-HRGP [Volvox
  misc_feature (1)..(73): Homolog of NCBI NO: 21322711 NR Description: pherophorin-dz1 protein [Volvox carteri f.
SPLAKLPLPRMPDYPLRPLPRAPPPVLPSHHDYHPPLPSPQAPLPVPAPLHLPLPPPPPRAPPAPPPPPPLPPR

SEQ ID NO: 14820 - DNA, 1864 bp, Zea mays subsp. mays
  misc_feature (1)..(1864): Ceres Seq. ID no. 13502421
  misc_feature: MA Experiment ID: 108528 Result: Down-regulated in Transcription
  misc_feature: MA Experiment 108528 PARAMETER Experiment Name: Zm_Imbibed_Seeds_P Parameter: Age (day) Value: 5 vs. 2
  misc_feature: MA Experiment 108528 PARAMETER Experiment Name: Zm_Imbibed_Seeds_P Parameter: Organism Value: Zea mays
  misc_feature: MA Experiment 108528 PARAMETER Experiment Name: Zm_Imbibed_Seeds_P Parameter: Plant Line Value: 35A19
  misc_feature: MA Experiment 108528 PARAMETER Experiment Name: Zm_Imbibed_Seeds_P Parameter: Tissue Value: Aerial vs. Embryo
  misc_feature: MA Experiment ID: 108529 Result: Up-regulated in Transcription
  misc_feature: MA Experiment 108529 PARAMETER Experiment Name: Zm_Imbibed_Seeds_P Parameter: Age (day) Value: 5 vs. 2
  misc_feature: MA Experiment 108529 PARAMETER Experiment Name: Zm_Imbibed_Seeds_P Parameter: Organism Value: Zea mays
  misc_feature: MA Experiment 108529 PARAMETER Experiment Name: Zm_Imbibed_Seeds_P Parameter: Plant Line Value: 35A19
  misc_feature: MA Experiment 108529 PARAMETER Experiment Name: Zm_Imbibed_Seeds_P Parameter: Tissue Value: Roots vs. Embryo
  misc_feature: MA Experiment ID: 108535 Result: Down-regulated in Transcription
  misc_feature: MA Experiment 108535 PARAMETER Experiment Name: Zm_Meristem_P Parameter: Age (day) Value: 8
  misc_feature: MA Experiment 108535 PARAMETER Experiment Name: Zm_Meristem_P Parameter: Organism Value: Zea mays
  misc_feature: MA Experiment 108535 PARAMETER Experiment Name: Zm_Meristem_P Parameter: Plant Line Value: 35A19
  misc_feature: MA Experiment 108535 PARAMETER Experiment Name: Zm_Meristem_P Parameter: Tissue Value: Root Meristem vs. Above Root Meristem
  misc_feature: MA Experiment ID: 108536 Result: Up-regulated in Transcription
  misc_feature: MA Experiment 108536 PARAMETER Experiment Name: Zm_Meristem_P Parameter: Age (day) Value: 8
  misc_feature: MA Experiment 108536 PARAMETER Experiment Name: Zm_Meristem_P Parameter: Organism Value: Zea mays
  misc_feature: MA Experiment 108536 PARAMETER Experiment Name: Zm_Meristem_P Parameter: Plant Line Value: 35A19
  misc_feature: MA Experiment 108536 PARAMETER Experiment Name: Zm_Meristem_P Parameter: Tissue Value: Shoot Meristem vs. Above Shoot Meristem
  misc_feature: MA Experiment ID: 108546 Result: Up-regulated in Transcription
  misc_feature: MA Experiment 108546 PARAMETER Experiment Name: Zm_Imbibed_Seeds_P Parameter: Age (day) Value: 3 vs. 2
  misc_feature: MA Experiment 108546 PARAMETER Experiment Name: Zm_Imbibed_Seeds_P Parameter: Organism Value: Zea mays
  misc_feature: MA Experiment 108546 PARAMETER Experiment Name: Zm_Imbibed_Seeds_P Parameter: Plant Line Value: 35A19
  misc_feature: MA Experiment 108546 PARAMETER Experiment Name: Zm_Imbibed_Seeds_P Parameter: Tissue Value: Roots vs. Embryo
  misc_feature: MA Experiment ID: 20000478 Result: Up-regulated in Transcription
  misc_feature: MA Experiment 20000478 PARAMETER Experiment Name: Zm_5mM_SA_P Parameter: Age (day) Value: 11
  misc_feature: MA Experiment 20000478 PARAMETER Experiment Name: Zm_5mM_SA_P Parameter: Organism Value: Zea mays
  misc_feature: MA Experiment 20000478 PARAMETER Experiment Name: Zm_5mM_SA_P Parameter: Plant Line Value: 35A19
  misc_feature: MA Experiment 20000478 PARAMETER Experiment Name: Zm_5mM_SA_P Parameter: Timepoint (hr) Value: 72
  misc_feature: MA Experiment 20000478 PARAMETER Experiment Name: Zm_5mM_SA_P Parameter: Tissue Value: Aerial
  misc_feature: MA Experiment 20000478 PARAMETER Experiment Name: Zm_5mM_SA_P Parameter: Treatment Value: 5mM SA vs. No Treatment
  misc_feature: MA Experiment ID: 20000479 Result: Up-regulated in Transcription
  misc_feature: MA Experiment 20000479 PARAMETER Experiment Name: Zm_Drought_P Parameter: Age (day) Value: 10
  misc_feature: MA Experiment 20000479 PARAMETER Experiment Name: Zm_Drought_P Parameter: Organism Value: Zea mays
  misc_feature: MA Experiment 20000479 PARAMETER Experiment Name: Zm_Drought_P Parameter: Plant Line Value: 35A19
  misc_feature: MA Experiment 20000479 PARAMETER Experiment Name: Zm_Drought_P Parameter: Timepoint (hr) Value: 48
  misc_feature: MA Experiment 20000479 PARAMETER Experiment Name: Zm_Drought_P Parameter: Tissue Value: Aerial
  misc_feature: MA Experiment 20000479 PARAMETER Experiment Name: Zm_Drought_P Parameter: Treatment Value: Drought vs. No Drought
  misc_feature: MA Experiment ID: 20001610 Result: Up-regulated in Transcription
  misc_feature: MA Experiment 20001610 PARAMETER Experiment Name: Zm_50ppm_KNO3_L-to-H_P Parameter: Age (day) Value: 19
  misc_feature: MA Experiment 20001610 PARAMETER Experiment Name: Zm_50ppm_KNO3_L-to-H_P Parameter: Organism Value: Zea mays
  misc_feature: MA Experiment 20001610 PARAMETER Experiment Name: Zm_50ppm_KNO3_L-to-H_P Parameter: Plant Line Value: 35A19
  misc_feature: MA Experiment 20001610 PARAMETER Experiment Name: Zm_50ppm_KNO3_L-to-H_P Parameter: Timepoint (hr) Value: 2
  misc_feature: MA Experiment 20001610 PARAMETER Experiment Name: Zm_50ppm_KNO3_L-to-H_P Parameter: Tissue Value: Roots
  misc_feature: MA Experiment 20001610 PARAMETER Experiment Name: Zm_50ppm_KNO3_L-to-H_P Parameter: Treatment Value: 50ppm KNO3 vs. 50ppm KCl
tggccatggtgcaaggcgaggagagttcttggaggatggagagggcagcgctgcctctcaaccaggcgctcgcgtacggagtccaagcccacgccgccgccgccgctgcaccgccgacctgcttcctggacttccagcctgcggccgcatccgctgcctacttcgggttcggtgagctggaggaggccctcatccacggtggtggcgccgccagcgccggcggcggcgtcgatccgggcgtgatcatcaagaacgacgtcgcgcaggcaaagtcagcggcaggatatctcgcgggcgctggcaccggcaggccccccacgctggagatcttcccttcgtggccaatgaggcaccaacagcagctgcacagtgggaattcgcagtcagtagggagcaccggcactgactcgagctcagctcagaacacaatgtctcagatggagttggtgtccccagcctcctctgcgccgcggcaggaggtcatgatggtgaccactgatgattacagctacaagccaggcctcgccgctgcgcccgctgctgccgccccgccgagctttcagcagcaccacccgctcccgctgcagctgcacggaggagagggagggggagaccatgacaagaggaagcatggatccacaagaaaagatggcaagttggtagatgccaagacggaacggcggctggcgcagaacagagaggctgcgaggaagagcaggctgaggaagaaggcttacgtgcagcagctcgagactagcaggatcaggcttcagcaggtcgagcatgagctccagagagcacggtcacagggcctgttcgttggagggtgcagcgccgccggggacatgagctctggcgccgccatgttcgacatggagtacgcgcggtggcttgacgacgacaccaagcggctggcggagctccgaggcgggctgcaggcgcacctgctggacggcaacctgggactcatcgtggaggagtgcatgcagcactacgacgagctgttccagctcaaggcggcgctcgcgcgctccgacgtcttccacctcctcaccggctcctgggccacccccgccgagcgctgcttcttctggatgggcggcttccgcccgtccgagctgctcaagatcctgataccgcagctggacccgctgacggagcagcagctgctggggatctgcaatctgcagcagtcgtcggagcaagcggaggaagctctcgcccagggcctgcaccagctgcaccagtccctggccgacacagtcgccgcgggcacgctcaacgacggcgccgccgcccccaactacatgaacatcatggccgtcgcacttgagaagctcgccagcctcgaaaatttctatcaacaggccgacaatctaaggcaccagacgttgcatcagatgcgccggatcctgaccactcggcaggctgcgcggtgcttcctctccattggggagtactacagccgcctcagagctctcagcaacctctgggcttcccgtccccgcgacaacttcatcgggacagagagcctcagccccacagcaacggaactgcaagccctgcaccaccagcagcagaaccagttcgccggattttgaggcctcacctggtgagggagggtgtaaaactttggccgcgagggtggtgttacaaagattagaggttttgagagggagatgcattgtaatgttctatcattaaagtactgagaaagcaacatcactaggcgaaaagggcggggagaaggaattgctgtagtgcgatgttgggtggctcacctgttcatatggctcttgaactgattgaagggttagcaccgcagaatttttgtgcgtgtcaggagagaacaaatcagttacac

SEQ ID NO: 14821 - protein, 532 aa, Zea mays subsp. mays
  peptide (1)..(532): Ceres Seq. ID no. 13502422
  misc_feature (221)..(279): Pfam Name: bZIP transcription factor Pfam Description: bZIP transcription factor
  misc_feature (2)..(532): Homolog of NCBI NO: 7489717 NR Description: basic leucine zipper protein - maize basic leucine zipper protein [Zea mays]
  misc_feature (2)..(532): Homolog of NCBI NO: 28630433 NR Description: liguleless2-like protein [Zea mays]
  misc_feature (43)..(458): Homolog of NCBI NO: 34908472 NR Description: putative basic leucine zipper protein [Oryza
  misc_feature (444)..(532): Homolog of NCBI NO: 34908472 NR Description: putative basic leucine zipper protein [Oryza
  misc_feature (100)..(532): Homolog of NCBI NO: 30680599 NR Description: bZIP protein [Arabidopsis thaliana]
  misc_feature (217)..(524): Homolog of NCBI NO: 6664324 NR Description: T27G7.2 [Arabidopsis thaliana]
  misc_feature (100)..(524): Homolog of NCBI NO: 6579203 NR Description: T23G18.19 [Arabidopsis thaliana]
  misc_feature (218)..(504): Homolog of NCBI NO: 9759540 NR Description: bZIP transcription factor-like protein
  misc_feature (195)..(503): Homolog of NCBI NO: 17025920 NR Description: bZIP transcription factor [Oryza sativa]
  misc_feature (151)..(504): Homolog of NCBI NO: 30681632 NR Description: bZIP transcription factor family protein
AMVQGEESSWRMERAALPLNQALAYGVQAHAAAAAAPPTCFLDFQPAAASAAYFGFGELEEALIHGGGAASAGGGVDPGVIIKNDVAQAKSAAGYLAGAGTGRPPTLEIFPSWPMRHQQQLHSGNSQSVGSTGTDSSSAQNTMSQMELVSPASSAPRQEVMMVTTDDYSYKPGLAAAPAAAAPPSFQQHHPLPLQLHGGEGGGDHDKRKHGSTRKDGKLVDAKTERRLAQNREAARKSRLRKKAYVQQLETSRIRLQQVEHELQRARSQGLFVGGCSAAGDMSSGAAMFDMEYARWLDDDTKRLAELRGGLQAHLLDGNLGLIVEECMQHYDELFQLKAALARSDVFHLLTGSWATPAERCFFWMGGFRPSELLKILIPQLDPLTEQQLLGICNLQQSSEQAEEALAQGLHQLHQSLADTVAAGTLNDGAAAPNYMNIMAVALEKLASLENFYQQADNLRHQTLHQMRRILTTRQAARCFLSIGEYYSRLRALSNLWASRPRDNFIGTESLSPTATELQALHHQQQNQFAGF

SEQ ID NO: 14822 - protein, 531 aa, Zea mays subsp. mays
  peptide (1)..(531): Ceres Seq. ID no. 13502423
  misc_feature (220)..(278): Pfam Name: bZIP transcription factor Pfam Description: bZIP transcription factor
  misc_feature (1)..(531): Homolog of NCBI NO: 7489717 NR Description: basic leucine zipper protein - maize basic leucine zipper protein [Zea mays]
  misc_feature (1)..(531): Homolog of NCBI NO: 28630433 NR Description: liguleless2-like protein [Zea mays]
  misc_feature (42)..(457): Homolog of NCBI NO: 34908472 NR Description: putative basic leucine zipper protein [Oryza
  misc_feature (443)..(531): Homolog of NCBI NO: 34908472 NR Description: putative basic leucine zipper protein [Oryza
  misc_feature (99)..(531): Homolog of NCBI NO: 30680599 NR Description: bZIP protein [Arabidopsis thaliana]
  misc_feature (216)..(523): Homolog of NCBI NO: 6664324 NR Description: T27G7.2 [Arabidopsis thaliana]
  misc_feature (99)..(523): Homolog of NCBI NO: 6579203 NR Description: T23G18.19 [Arabidopsis thaliana]
  misc_feature (217)..(503): Homolog of NCBI NO: 9759540 NR Description: bZIP transcription factor-like protein
  misc_feature (194)..(502): Homolog of NCBI NO: 17025920 NR Description: bZIP transcription factor [Oryza sativa]
  misc_feature (150)..(503): Homolog of NCBI NO: 30681632 NR Description: bZIP transcription factor family protein
MVQGEESSWRMERAALPLNQALAYGVQAHAAAAAAPPTCFLDFQPAAASAAYFGFGELEEALIHGGGAASAGGGVDPGVIIKNDVAQAKSAAGYLAGAGTGRPPTLEIFPSWPMRHQQQLHSGNSQSVGSTGTDSSSAQNTMSQMELVSPASSAPRQEVMMVTTDDYSYKPGLAAAPAAAAPPSFQQHHPLPLQLHGGEGGGDHDKRKHGSTRKDGKLVDAKTERRLAQNREAARKSRLRKKAYVQQLETSRIRLQQVEHELQRARSQGLFVGGCSAAGDMSSGAAMFDMEYARWLDDDTKRLAELRGGLQAHLLDGNLGLIVEECMQHYDELFQLKAALARSDVFHLLTGSWATPAERCFFWMGGFRPSELLKILIPQLDPLTEQQLLGICNLQQSSEQAEEALAQGLHQLHQSLADTVAAGTLNDGAAAPNYMNIMAVALEKLASLENFYQQADNLRHQTLHQMRRILTTRQAARCFLSIGEYYSRLRALSNLWASRPRDNFIGTESLSPTATELQALHHQQQNQFAGF

SEQ ID NO: 14823 - protein, 521 aa, Zea mays subsp. mays
  peptide (1)..(521): Ceres Seq. ID no. 13502424
  misc_feature (210)..(268): Pfam Name: bZIP transcription factor Pfam Description: bZIP transcription factor
  misc_feature (1)..(521): Homolog of NCBI NO: 7489717 NR Description: basic leucine zipper protein - maize basic leucine zipper protein [Zea mays]
  misc_feature (1)..(521): Homolog of NCBI NO: 28630433 NR Description: liguleless2-like protein [Zea mays]
  misc_feature (32)..(447): Homolog of NCBI NO: 34908472 NR Description: putative basic leucine zipper protein [Oryza
  misc_feature (433)..(521): Homolog of NCBI NO: 34908472 NR Description: putative basic leucine zipper protein [Oryza
  misc_feature (89)..(521): Homolog of NCBI NO: 30680599 NR Description: bZIP protein [Arabidopsis thaliana]
  misc_feature (206)..(513): Homolog of NCBI NO: 6664324 NR Description: T27G7.2 [Arabidopsis thaliana]
  misc_feature (89)..(513): Homolog of NCBI NO: 6579203 NR Description: T23G18.19 [Arabidopsis thaliana]
  misc_feature (207)..(493): Homolog of NCBI NO: 9759540 NR Description: bZIP transcription factor-like protein
  misc_feature (184)..(492): Homolog of NCBI NO: 17025920 NR Description: bZIP transcription factor [Oryza sativa]
  misc_feature (140)..(493): Homolog of NCBI NO: 30681632 NR Description: bZIP transcription factor family protein
MERAALPLNQALAYGVQAHAAAAAAPPTCFLDFQPAAASAAYFGFGELEEALIHGGGAASAGGGVDPGVIIKNDVAQAKSAAGYLAGAGTGRPPTLEIFPSWPMRHQQQLHSGNSQSVGSTGTDSSSAQNTMSQMELVSPASSAPRQEVMMVTTDDYSYKPGLAAAPAAAAPPSFQQHHPLPLQLHGGEGGGDHDKRKHGSTRKDGKLVDAKTERRLAQNREAARKSRLRKKAYVQQLETSRIRLQQVEHELQRARSQGLFVGGCSAAGDMSSGAAMFDMEYARWLDDDTKRLAELRGGLQAHLLDGNLGLIVEECMQHYDELFQLKAALARSDVFHLLTGSWATPAERCFFWMGGFRPSELLKILIPQLDPLTEQQLLGICNLQQSSEQAEEALAQGLHQLHQSLADTVAAGTLNDGAAAPNYMNIMAVALEKLASLENFYQQADNLRHQTLHQMRRILTTRQAARCFLSIGEYYSRLRALSNLWASRPRDNFIGTESLSPTATELQALHHQQQNQFAGF

SEQ ID NO: 14824 - DNA, 377 bp, Zea mays subsp. mays
  misc_feature (1)..(377): Ceres Seq. ID no. 13635381
  misc_feature: MA Experiment ID: 20000487 Result: Up-regulated in Transcription
  misc_feature: MA Experiment 20000487 PARAMETER Experiment Name: Zm_50mM_NH4NO3_L_to_H_P Parameter: Organism Value: Zea mays
  misc_feature: MA Experiment 20000487 PARAMETER Experiment Name: Zm_50mM_NH4NO3_L_to_H_P Parameter: Timepoint (hr) Value: 4
  misc_feature: MA Experiment 20000487 PARAMETER Experiment Name: Zm_50mM_NH4NO3_L_to_H_P Parameter: Tissue Value: Leaves
  misc_feature: MA Experiment 20000487 PARAMETER Experiment Name: Zm_50mM_NH4NO3_L_to_H_P Parameter: Treatment Value: 50mM NH4NO3 vs. 100mM Mannitol
aagaaccctagcgcccgtcctgccgccgctgcagccgccatcgcacggccatgggtatcgatctcgtagccggcggccgcaacaagaagaccaagcgcacggcgcccaagtccgacgatgtctacctcaagctcctcgtcaagctctaccgcttccttgtgcgcaggacaaagagcaacttcaacgccgtgatcctcaagcgcctcttcatgagcaagaccaaccgcccgccgctctcgatgcgccgcctcgtcaggttcatggaggggaagggtgatcagatcgccgtgattgtgggcaccgtgaccgacgacaagaggatcagcgaggtgccggcgatgaaggtctgcgcgctcaggttcactgagacagcgagg

SEQ ID NO: 14825 - protein, 109 aa, Zea mays subsp. mays
  peptide (1)..(109): Ceres Seq. ID no. 13635382
  misc_feature (1)..(108): Homolog of NCBI NO: 34393858 NR Description: putative cytoplasmic ribosomal protein L18 [Oryza
  misc_feature (1)..(108): Homolog of NCBI NO: 34897628 NR Description: cytoplasmic ribosomal protein L18 [Oryza sativa]
  misc_feature (1)..(108): Homolog of NCBI NO: 15241061 NR Description: 60S ribosomal protein L18 (RPL18C) [Arabidopsis >gi|15810153|gb|AAL07220.1| putative 60S ribosomal protein thaliana] >gi|21689771|gb|AAM67529.1| putative 60S ribosomal
  misc_feature (1)..(108): Homolog of NCBI NO: 606970 NR Description: cytoplasmic ribosomal protein L18
  misc_feature (1)..(108): Homolog of NCBI NO: 15230011 NR Description: 60S ribosomal protein L18 (RPL18B) [Arabidopsis >gi|21431838|sp|P42791|RL18_ARATH 60S ribosomal protein L18 putative 60S ribosomal protein L18 [Arabidopsis thaliana]
  misc_feature (1)..(108): Homolog of NCBI NO: 28798549 NR Description: 60S ribosomal protein [Medicago sativa]
  misc_feature (4)..(108): Homolog of NCBI NO: 6094021 NR Description: 60S RIBOSOMAL PROTEIN L18
  misc_feature (2)..(108): Homolog of NCBI NO: 7440855 NR Description: ribosomal protein L18, cytosolic - Arabidopsis
  misc_feature (1)..(108): Homolog of NCBI NO: 4506607 NR Description: ribosomal protein L18; 60S ribosomal protein L18 sapiens] >gi|548749|sp|Q07020|RL18_HUMAN 60S ribosomal protein
  misc_feature (1)..(108): Homolog of NCBI NO: 12840700 NR Description: unnamed protein product [Mus musculus]
MGIDLVAGGRNKKTKRTAPKSDDVYLKLLVKLYRFLVRRTKSNFNAVILKRLFMSKTNRPPLSMRRLVRFMEGKGDQIAVIVGTVTDDKRISEVPAMKVCALRFTETAR

SEQ ID NO: 14826 - protein, 91 aa, Zea mays subsp. mays
  peptide (1)..(91): Ceres Seq. ID no. 13635383
RTLAPVLPPLQPPSHGHGYRSRSRRPQQEDQAHGAQVRRCLPQAPRQALPLPCAQDKEQLQRRDPQAPLHEQDQPPAALDAPPRQVHGGEG

SEQ ID NO: 14827 - protein, 56 aa, Zea mays subsp. mays
  peptide (1)..(56): Ceres Seq. ID no. 13635384
  misc_feature (1)..(55): Homolog of NCBI NO: 34393858 NR Description: putative cytoplasmic ribosomal protein L18 [Oryza
  misc_feature (1)..(55): Homolog of NCBI NO: 34897628 NR Description: cytoplasmic ribosomal protein L18 [Oryza sativa]
  misc_feature (1)..(55): Homolog of NCBI NO: 15241061 NR Description: 60S ribosomal protein L18 (RPL18C) [Arabidopsis >gi|15810153|gb|AAL07220.1| putative 60S ribosomal protein thaliana] >gi|21689771|gb|AAM67529.1| putative 60S ribosomal
  misc_feature (1)..(55): Homolog of NCBI NO: 606970 NR Description: cytoplasmic ribosomal protein L18
  misc_feature (1)..(55): Homolog of NCBI NO: 15230011 NR Description: 60S ribosomal protein L18 (RPL18B) [Arabidopsis >gi|21431838|sp|P42791|RL18_ARATH 60S ribosomal protein L18 putative 60S ribosomal protein L18 [Arabidopsis thaliana]
  misc_feature (1)..(55): Homolog of NCBI NO: 28798549 NR Description: 60S ribosomal protein [Medicago sativa]
  misc_feature (1)..(55): Homolog of NCBI NO: 6094021 NR Description: 60S RIBOSOMAL PROTEIN L18
  misc_feature (1)..(55): Homolog of NCBI NO: 7440855 NR Description: ribosomal protein L18, cytosolic - Arabidopsis
  misc_feature (1)..(55): Homolog of NCBI NO: 4506607 NR Description: ribosomal protein L18; 60S ribosomal protein L18 sapiens] >gi|548749|sp|Q07020|RL18_HUMAN 60S ribosomal protein
  misc_feature (1)..(55): Homolog of NCBI NO: 12840700 NR Description: unnamed protein product [Mus musculus]
MSKTNRPPLSMRRLVRFMEGKGDQIAVIVGTVTDDKRISEVPAMKVCALRFTETAR

SEQ ID NO: 14828 - DNA, 800 bp, Zea mays subsp. mays
  misc_feature (1)..(800): Ceres Seq. ID no. 13600565
  misc_feature: MA Experiment ID: 108687 Result: Up-regulated in Transcription
  misc_feature: MA Experiment 108687 PARAMETER Experiment Name: Zm_Embryos-Flowers__P Parameter: Tissue Value: Embryo vs. Aerial+
  misc_feature: MA Experiment ID: 108688 Result: Down-regulated in Transcription
  misc_feature: MA Experiment 108688 PARAMETER Experiment Name: Zm_Embryos-Flowers__P Parameter: Tissue Value: Immature Flowers vs. Aerial+
cccaacattagcacaaagaacacaatagaccactgatttcacaatgaaaagggagacaatgccttcatggctagaactgttgcttgcaacacaattctttacgacttgtgctaaccatcttcttgctagtcgcaatgaatgtaacctattttgcacccagtgtgagaccaaaccagctgctttctgtaactattgtcgttcaagtgatcattccacccaccgtgtaatccagataaggcgttcatcgtaccatgacgttgtgagggtgtccgagattgaggatatctttgatgtcagcgatgtgcaaacttatgtaatcaatagtgcaaggattgtattcctgaatgagcggccacaactgcgtgcttctagtgtccccatttgtaaggcacccacatcatcaacacatagctgtgagacatgtagccgtgtgctacttgatgcatttcgcttctgctctcttggatgcaatcttagaggcttaaatatggaagctggtatgcaagctatggttggcaacaaccctcggtccaatggtatggatcatgtggctaggattgacaatgttggttcaagtactacaaatgaccaaaacagctgcaatgacaagaactacgaagaaccaccaccaaaaagggttgctcgtcacagacgcaagggaattccccaacgtgcgccattcttctaatctgaacatcatgacaatgtccagtaaatgttgtgggaaataagaagagataatatttgtcatgggtgaaatgaatgaatgaaataaataaaagaatgaatgaatggcccct

SEQ ID NO: 14829 - protein, 214 aa, Zea mays subsp. mays
  peptide (1)..(214): Ceres Seq. ID no. 13600566
  misc_feature (4)..(181): Pfam Name: Protein of unknown function, DUF597 Pfam Description: Protein of unknown function, DUF597
  misc_feature (1)..(181): Homolog of NCBI NO: 20805059 NR Description: B1108H10.20 [Oryza sativa (japonica
  misc_feature (4)..(213): Homolog of NCBI NO: 37537092 NR Description: unknown protein [Oryza sativa (japonica
  misc_feature (4)..(213): Homolog of NCBI NO: 6714272 NR Description: F6N18.8 [Arabidopsis thaliana]
  misc_feature (4)..(213): Homolog of NCBI NO: 18398555 NR Description: expressed protein [Arabidopsis thaliana]
  misc_feature (2)..(213): Homolog of NCBI NO: 38346725 NR Description: OSJNBa0086O06.23 [Oryza sativa (japonica
  misc_feature (4)..(213): Homolog of NCBI NO: 21554139 NR Description: unknown [Arabidopsis thaliana]
  misc_feature (7)..(213): Homolog of NCBI NO: 15217560 NR Description: hypothetical protein [Arabidopsis thaliana]
  misc_feature (62)..(214): Homolog of NCBI NO: 20805062 NR Description: B1108H10.23 [Oryza sativa (japonica
  misc_feature (5)..(190): Homolog of NCBI NO: 18394936 NR Description: expressed protein [Arabidopsis thaliana] At1g21000/F9H16_1 [Arabidopsis thaliana]
  misc_feature (5)..(190): Homolog of NCBI NO: 25337907 NR Description: hypothetical protein F9H16.1 - Arabidopsis >gi|4836888|gb|AAD30591.1|AC007369_1 Unknown protein [Arabidopsis >gi|13877713|gb|AAK43934.1|AF370615_1 Unknown protein
MKRETMPSWLELLLATQFFTTCANHLLASRNECNLFCTQCETKPAAFCNYCRSSDHSTHRVIQIRRSSYHDVVRVSEIEDIFDVSDVQTYVINSARIVFLNERPQLRASSVPICKAPTSSTHSCETCSRVLLDAFRFCSLGCNLRGLNMEAGMQAMVGNNPRSNGMDHVARIDNVGSSTTNDQNSCNDKNYEEPPPKRVARHRRKGIPQRAPFF

SEQ ID NO: 14830 - protein, 209 aa, Zea mays subsp. mays
  peptide (1)..(209): Ceres Seq. ID no. 13600567
  misc_feature (1)..(176): Pfam Name: Protein of unknown function, DUF597 Pfam Description: Protein of unknown function, DUF597
  misc_feature (57)..(209): Homolog of NCBI NO: 20805062 NR Description: B1108H10.23 [Oryza sativa (japonica
  misc_feature (1)..(185): Homolog of NCBI NO: 18394936 NR Description: expressed protein [Arabidopsis thaliana] At1g21000/F9H16_1 [Arabidopsis thaliana]
  misc_feature (1)..(208): Homolog of NCBI NO: 37537092 NR Description: unknown protein [Oryza sativa (japonica
  misc_feature (1)..(208): Homolog of NCBI NO: 18398555 NR Description: expressed protein [Arabidopsis thaliana]
  misc_feature (1)..(208): Homolog of NCBI NO: 21554139 NR Description: unknown [Arabidopsis thaliana]
  misc_feature (2)..(208): Homolog of NCBI NO: 15217560 NR Description: hypothetical protein [Arabidopsis thaliana]
  misc_feature (1)..(208): Homolog of NCBI NO: 38346725 NR Description: OSJNBa0086O06.23 [Oryza sativa (japonica
  misc_feature (1)..(208): Homolog of NCBI NO: 6714272 NR Description: F6N18.8 [Arabidopsis thaliana]
  misc_feature (1)..(176): Homolog of NCBI NO: 20805059 NR Description: B1108H10.20 [Oryza sativa (japonica
  misc_feature (1)..(185): Homolog of NCBI NO: 25337907 NR Description: hypothetical protein F9H16.1 - Arabidopsis >gi|4836888|gb|AAD30591.1|AC007369_1 Unknown protein [Arabidopsis >gi|13877713|gb|AAK43934.1|AF370615_1 Unknown protein
MPSWLELLLATQFFTTCANHLLASRNECNLFCTQCETKPAAFCNYCRSSDHSTHRVIQIRRSSYHDVVRVSEIEDIFDVSDVQTYVINSARIVFLNERPQLRASSVPICKAPTSSTHSCETCSRVLLDAFRFCSLGCNLRGLNMEAGMQAMVGNNPRSNGMDHVARIDNVGSSTTNDQNSCNDKNYEEPPPKRVARHRRKGIPQRAPFF

SEQ ID NO: 14831 - DNA, 2211 bp, Zea mays subsp. mays
  misc_feature (1)..(2211): Ceres Seq. ID no. 13635385
  misc_feature: MA Experiment ID: 108543 Result: Up-regulated in Transcription
  misc_feature: MA Experiment ID: 108556 Result: Up-regulated in Transcription
  misc_feature: MA Experiment 108556 PARAMETER Experiment Name: Zm_Drought_P Parameter: Age (day) Value: 9
  misc_feature: MA Experiment 108556 PARAMETER Experiment Name: Zm_Drought_P Parameter: Organism Value: Zea mays
  misc_feature: MA Experiment 108556 PARAMETER Experiment Name: Zm_Drought_P Parameter: Plant Line Value: 35A19
  misc_feature: MA Experiment 108556 PARAMETER Experiment Name: Zm_Drought_P Parameter: Timepoint (hr) Value: 24
  misc_feature: MA Experiment 108556 PARAMETER Experiment Name: Zm_Drought_P Parameter: Tissue Value: Aerial
  misc_feature: MA Experiment 108556 PARAMETER Experiment Name: Zm_Drought_P Parameter: Treatment Value: Drought vs. No Drought
  misc_feature: MA Experiment ID: 20000535 Result: Up-regulated in Transcription
  misc_feature: MA Experiment 20000535 PARAMETER Experiment Name: Zm_Hybrid_Seed_Dev_P Parameter: DAP Value: 30 vs. 12
  misc_feature: MA Experiment 20000535 PARAMETER Experiment Name: Zm_Hybrid_Seed_Dev_P Parameter: Organism Value: Zea mays
  misc_feature: MA Experiment 20000535 PARAMETER Experiment Name: Zm_Hybrid_Seed_Dev_P Parameter: Plant Line Value: 35A19
  misc_feature: MA Experiment 20000535 PARAMETER Experiment Name: Zm_Hybrid_Seed_Dev_P Parameter: Tissue Value: Embryo vs. Unfert Floret
actgccgcgccgctcccgcctccctcttctccatccgacgagctcgagaagccaccatgatctccgcgcgcaccgccgcagcttcccccgcctccctgtggaagcggggaggacaaagtgagggcggcggcagttgcgacggatgtcggacctacaggaacactttgcggagggccgcagcagcgaaggtgcgtgccttgccgtcgagggcggtggaggcggtcaaaatgggctccgccgcggaggtggagcaggaggaggcggaggtagccgcggccgcggacggcgtcgtcgtcgaggaccactacggcgaggacagcgccaccgaggagctgcccatcatgccctgggccttctccgtcgcaagcggttacaccctcttgagggatccacatcacaacaagggtcttgctttcacggagaaggagagggatgcacaccacttgcgtgggctgcttcctcctgcagttgttcctcaagaactccaaattaagaagatcatgcacaacctgcggcagtaccaggtccctttgcagcgctatatggccatgatggaccttcaggagaggaacgagaggcttttctacaagcttttaattgataacgtggaggagctgcttcctgtggtttatacaccaactgtaggtgaggcctgccagaagtatgggtccatctttcgacaaccacagggtctgtatgtcagcttgagggacaaagggaaggtcctagaagttctaaggaactggccacataggaacattcaagttatctgtgttactgatggtgagcgaatcttgggacttggagatttgggttctcagggaatgggaattcctgtaggcaaacttgctctatacactgctcttggaggagttcgtccatcagcttgtttgcctatcacaatcgatgttggcacaaataatgagaaactgcttaatgatgagttttacattggactccggcaaaaacgtgcaactggcgaggagtatcatgagcttatggaagagttcatggctgctgttaagcaaatctacggcgagaaagtcctcattcagtttgaggacttcgcgaatcataatgcttttaatttgcttgcaaaatatagcaagagccatcttgttttcaatgatgacatccagggcacagcatcagtggtccttgcaggtttgttagcagcactcaaggtggttggtgggaccttggcagagcacacttatttattccttggtgctggggagggtggaactggtattgcagaactcattgctcttgagatttcaaaacagacgtcggctccaattgaagagtgccgcaagaagatttggttggtggactcaaagggtttgattgttgactctcgtaaaaactccgttcagtcattcaaaaaaccttgggcacatgagcatgagggcttgacaactttgtacgatgctgttcagtgcatcaaacctacagttctgattgggacgtctggagttggaagaacattcacaaaagaagttgttgaggccatggcttccttcaatgagaggcctatcatcttttcactgtcaaatccaacctctcattctgaatgtactgctgaagaagcatataactggactcagggtcgtgtaatatttgccagtggcagtccatttgaccctgtggagtacgatgggaaggtttttgtacctggacagtcgaacaacgcctacattttccctggatttggcctcggtcttgttatctctggagccatccgtgtccacgaggacatgcttcttgccgcctcggaagcactagctgctcaggccacacaggagaacttcgacaagggatcaatcttcccgcccttcaccaacattagaaagatctctgcgcgcattgcccgagccgtggctgcaaaagcttatgaactcggtttggcgacccgtctgcctcccccaagggacctggtgaaatatgcacagagctgcatgtacactcctgtctaccgtaactaccggtagtgctgctgggatcaattctgcagtaataaaatatgtcgacgcagatgatcctgcaatgttgtagtttattttttcatttgttggccctgctgctgaccacctttgtggctgctagacactgtacctgtctatgcatatatgatactggaacatttggcgcgctgtgggcgtccctgtcatgagatcaattgcagaaataaaatgcaatttagatttgagc

SEQ ID NO: 14832 - protein, 662 aa, Zea mays subsp. mays
  peptide (1)..(662): Ceres Seq. ID no. 13635386
  misc_feature (378)..(631): Pfam Name: Malic enzyme, NAD binding domain Pfam Description: Malic enzyme, NAD binding domain
  misc_feature (19)..(662): Homolog of NCBI NO: 1170871 NR Description: NADP-DEPENDENT MALIC ENZYME, CHLOROPLAST
  misc_feature (19)..(662): Homolog of NCBI NO: 126737 NR Description: NADP-DEPENDENT MALIC ENZYME, CHLOROPLAST
  misc_feature (19)..(662): Homolog of NCBI NO: 30575690 NR Description: NADP-malic enzyme [Zea mays]
  misc_feature (19)..(662): Homolog of NCBI NO: 30526303 NR Description: NADP-dependent malic enzyme [Sorghum bicolor]
  misc_feature (59)..(662): Homolog of NCBI NO: 8118507 NR Description: NADP-dependent malic protein [Ricinus communis]
  misc_feature (93)..(662): Homolog of NCBI NO: 7431234 NR Description: malate dehydrogenase
  misc_feature (57)..(662): Homolog of NCBI NO: 1561774 NR Description: malate dehydrogenase [Vitis vinifera]
  misc_feature (78)..(662): Homolog of NCBI NO: 15219980 NR Description: malate oxidoreductase -related [Arabidopsis
  misc_feature (86)..(662): Homolog of NCBI NO: 7431231 NR Description: malate dehydrogenase
  misc_feature (91)..(662): Homolog of NCBI NO: 7431235 NR Description: probable malate dehydrogenase
CRAAPASLFSIRRAREATMISARTAAASPASLWKRGGQSEGGGSCDGCRTYRNTLRRAAAAKVRALPSRAVEAVKMGSAAEVEQEEAEVAAAADGVVVEDHYGEDSATEELPIMPWAFSVASGYTLLRDPHHNKGLAFTEKERDAHHLRGLLPPAVVPQELQIKKIMHNLRQYQVPLQRYMAMMDLQERNERLFYKLLIDNVEELLPVVYTPTVGEACQKYGSIFRQPQGLYVSLRDKGKVLEVLRNWPHRNIQVICVTDGERILGLGDLGSQGMGIPVGKLALYTALGGVRPSACLPITIDVGTNNEKLLNDEFYIGLRQKRATGEEYHELMEEFMAAVKQIYGEKVLIQFEDFANHNAFNLLAKYSKSHLVFNDDIQGTASVVLAGLLAALKVVGGTLAEHTYLFLGAGEGGTGIAELIALEISKQTSAPIEECRKKIWLVDSKGLIVDSRKNSVQSFKKPWAHEHEGLTTLYDAVQCIKPTVLIGTSGVGRTFTKEVVEAMASFNERPIIFSLSNPTSHSECTAEEAYNWTQGRVIFASGSPFDPVEYDGKVFVPGQSNNAYIFPGFGLGLVISGAIRVHEDMLLAASEALAAQATQENFDKGSIFPPFTNIRKISARIARAVAAKAYELGLATRLPPPRDLVKYAQSCMYTPVYRNYR

SEQ ID NO: 14833 - protein, 644 aa, Zea mays subsp. mays
  peptide (1)..(644): Ceres Seq. ID no. 13635387
  misc_feature (360)..(613): Pfam Name: Malic enzyme, NAD binding domain Pfam Description: Malic enzyme, NAD binding domain
  misc_feature (1)..(644): Homolog of NCBI NO: 1170871 NR Description: NADP-DEPENDENT MALIC ENZYME, CHLOROPLAST
  misc_feature (1)..(644): Homolog of NCBI NO: 126737 NR Description: NADP-DEPENDENT MALIC ENZYME, CHLOROPLAST
  misc_feature (1)..(644): Homolog of NCBI NO: 30575690 NR Description: NADP-malic enzyme [Zea mays]
  misc_feature (1)..(644): Homolog of NCBI NO: 30526303 NR Description: NADP-dependent malic enzyme [Sorghum bicolor]
  misc_feature (41)..(644): Homolog of NCBI NO: 8118507 NR Description: NADP-dependent malic protein [Ricinus communis]
  misc_feature (75)..(644): Homolog of NCBI NO: 7431234 NR Description: malate dehydrogenase
  misc_feature (39)..(644): Homolog of NCBI NO: 1561774 NR Description: malate dehydrogenase [Vitis vinifera]
  misc_feature (60)..(644): Homolog of NCBI NO: 15219980 NR Description: malate oxidoreductase -related [Arabidopsis
  misc_feature (68)..(644): Homolog of NCBI NO: 7431231 NR Description: malate dehydrogenase
  misc_feature (73)..(644): Homolog of NCBI NO: 7431235 NR Description: probable malate dehydrogenase
MISARTAAASPASLWKRGGQSEGGGSCDGCRTYRNTLRRAAAAKVRALPSRAVEAVKMGSAAEVEQEEAEVAAAADGVVVEDHYGEDSATEELPIMPWAFSVASGYTLLRDPHHNKGLAFTEKERDAHHLRGLLPPAVVPQELQIKKIMHNLRQYQVPLQRYMAMMDLQERNERLFYKLLIDNVEELLPVVYTPTVGEACQKYGSIFRQPQGLYVSLRDKGKVLEVLRNWPHRNIQVICVTDGERILGLGDLGSQGMGIPVGKLALYTALGGVRPSACLPITIDVGTNNEKLLNDEFYIGLRQKRATGEEYHELMEEFMAAVKQIYGEKVLIQFEDFANHNAFNLLAKYSKSHLVFNDDIQGTASVVLAGLLAALKVVGGTLAEHTYLFLGAGEGGTGIAELIALEISKQTSAPIEECRKKIWLVDSKGLIVDSRKNSVQSFKKPWAHEHEGLTTLYDAVQCIKPTVLIGTSGVGRTFTKEVVEAMASFNERPIIFSLSNPTSHSECTAEEAYNWTQGRVIFASGSPFDPVEYDGKVFVPGQSNNAYIFPGFGLGLVISGAIRVHEDMLLAASEALAAQATQENFDKGSIFPPFTNIRKISARIARAVAAKAYELGLATRLPPPRDLVKYAQSCMYTPVYRNYR

SEQ ID NO: 14834 - protein, 587 aa, Zea mays subsp. mays
  peptide (1)..(587): Ceres Seq. ID no. 13635388
  misc_feature (303)..(556): Pfam Name: Malic enzyme, NAD binding domain Pfam Description: Malic enzyme, NAD binding domain
  misc_feature (1)..(587): Homolog of NCBI NO: 1170871 NR Description: NADP-DEPENDENT MALIC ENZYME, CHLOROPLAST
  misc_feature (1)..(587): Homolog of NCBI NO: 126737 NR Description: NADP-DEPENDENT MALIC ENZYME, CHLOROPLAST
  misc_feature (1)..(587): Homolog of NCBI NO: 30575690 NR Description: NADP-malic enzyme [Zea mays]
  misc_feature (1)..(587): Homolog of NCBI NO: 30526303 NR Description: NADP-dependent malic enzyme [Sorghum bicolor]
  misc_feature (1)..(587): Homolog of NCBI NO: 8118507 NR Description: NADP-dependent malic protein [Ricinus communis]
  misc_feature (18)..(587): Homolog of NCBI NO: 7431234 NR Description: malate dehydrogenase
  misc_feature (1)..(587): Homolog of NCBI NO: 1561774 NR Description: malate dehydrogenase [Vitis vinifera]
  misc_feature (3)..(587): Homolog of NCBI NO: 15219980 NR Description: malate oxidoreductase -related [Arabidopsis
  misc_feature (11)..(587): Homolog of NCBI NO: 7431231 NR Description: malate dehydrogenase
  misc_feature (16)..(587): Homolog of NCBI NO: 7431235 NR Description: probable malate dehydrogenase
MGSAAEVEQEEAEVAAAADGVVVEDHYGEDSATEELPIMPWAFSVASGYTLLRDPHHNKGLAFTEKERDAHHLRGLLPPAVVPQELQIKKIMHNLRQYQVPLQRYMAMMDLQERNERLFYKLLIDNVEELLPVVYTPTVGEACQKYGSIFRQPQGLYVSLRDKGKVLEVLRNWPHRNIQVICVTDGERILGLGDLGSQGMGIPVGKLALYTALGGVRPSACLPITIDVGTNNEKLLNDEFYIGLRQKRATGEEYHELMEEFMAAVKQIYGEKVLIQFEDFANHNAFNLLAKYSKSHLVFNDDIQGTASVVLAGLLAALKVVGGTLAEHTYLFLGAGEGGTGIAELIALEISKQTSAPIEECRKKIWLVDSKGLIVDSRKNSVQSFKKPWAHEHEGLTTLYDAVQCIKPTVLIGTSGVGRTFTKEVVEAMASFNERPIIFSLSNPTSHSECTAEEAYNWTQGRVIFASGSPFDPVEYDGKVFVPGQSNNAYIFPGFGLGLVISGAIRVHEDMLLAASEALAAQATQENFDKGSIFPPFTNIRKISARIARAVAAKAYELGLATRLPPPRDLVKYAQSCMYTPVYRNYR

SEQ ID NO: 14835 - DNA, 480 bp, Zea mays subsp. mays
  misc_feature (1)..(480): Ceres Seq. ID no. 4583495
  misc_feature: MA Experiment ID: 108529 Result: Up-regulated in Transcription
  misc_feature: MA Experiment 108529 PARAMETER Experiment Name: Zm_Imbibed_Seeds_P Parameter: Age (day) Value: 5 vs. 2
  misc_feature: MA Experiment 108529 PARAMETER Experiment Name: Zm_Imbibed_Seeds_P Parameter: Organism Value: Zea mays
  misc_feature: MA Experiment 108529 PARAMETER Experiment Name: Zm_Imbibed_Seeds_P Parameter: Plant Line Value: 35A19
  misc_feature: MA Experiment 108529 PARAMETER Experiment Name: Zm_Imbibed_Seeds_P Parameter: Tissue Value: Roots vs. Embryo
  misc_feature: MA Experiment ID: 108543 Result: Up-regulated in Transcription
accaagctggtggttgaggttagaagaggagctagagcgagagagtcccatcgcaacacacaaaaggaagaggaagaggaagaggaaggcgagaacgatgggcttgctcctgctgctcctcgtcgcggcggcggcgacagctcctgcggccgacgcatggggcaaggaggggcactacatggtgtgcaagatcgctgagagctttctgacgaaagaggcctcgacggcggtgaaggagctgctgccggggtgggccggcggcgagctcgcggagacgtgctcttgggcggacacgcagaggttccggtaccgctggtccagcccgctgcacttcgccgacacgccaggggactgcgagttcgactacgcccgggactgccacaacaccaaaggggagaagaacatgtgcgtggtcggagccatcaacaactacacggcggcgctgaaagactcatcaagtccttttgatccgacggagag

SEQ ID NO: 14836 - protein, 159 aa, Zea mays subsp. mays
  peptide (1)..(159): Ceres Seq. ID no. 4583496
  misc_feature (30)..(158): Homolog of NCBI NO: 38345900 NR Description: OSJNBa0060D06.10 [Oryza sativa (japonica
  misc_feature (33)..(158): Homolog of NCBI NO: 7489371 NR Description: endonuclease (EC 3.1.30.-) precursor - barley
  misc_feature (33)..(158): Homolog of NCBI NO: 5672692 NR Description: nuclease I [Hordeum vulgare]
  misc_feature (33)..(158): Homolog of NCBI NO: 13274190 NR Description: putative nuclease [Hordeum vulgare subsp. vulgare]
  misc_feature (29)..(158): Homolog of NCBI NO: 9558456 NR Description: unnamed protein product [Oryza sativa (japonica
  misc_feature (29)..(158): Homolog of NCBI NO: 34895514 NR Description: putative bifunctional nuclease [Oryza sativa
  misc_feature (33)..(148): Homolog of NCBI NO: 3551956 NR Description: senescence-associated protein 6 [Hemerocallis
  misc_feature (35)..(148): Homolog of NCBI NO: 15221343 NR Description: putative bifunctional nuclease; protein id: supported by cDNA: 256130. [Arabidopsis thaliana]
  misc_feature (35)..(148): Homolog of NCBI NO: 21554516 NR Description: putative bifunctional nuclease [Arabidopsis
  misc_feature (48)..(148): Homolog of NCBI NO: 4099835 NR Description: bifunctional nuclease [Zinnia elegans]
PSWWLRLEEELERESPIATHKRKRKRKRKARTMGLLLLLLVAAAATAPAADAWGKEGHYMVCKIAESFLTKEASTAVKELLPGWAGGELAETCSWADTQRFRYRWSSPLHFADTPGDCEFDYARDCHNTKGEKNMCVVGAINNYTAALKDSSSPFDPTE

SEQ ID NO: 14837 - protein, 127 aa, Zea mays subsp. mays
  peptide (1)..(127): Ceres Seq. ID no. 4583497
  misc_feature (1)..(126): Homolog of NCBI NO: 38345900 NR Description: OSJNBa0060D06.10 [Oryza sativa (japonica
  misc_feature (1)..(126): Homolog of NCBI NO: 7489371 NR Description: endonuclease (EC 3.1.30.-) precursor - barley
  misc_feature (1)..(126): Homolog of NCBI NO: 5672692 NR Description: nuclease I [Hordeum vulgare]
  misc_feature (1)..(126): Homolog of NCBI NO: 13274190 NR Description: putative nuclease [Hordeum vulgare subsp. vulgare]
  misc_feature (1)..(126): Homolog of NCBI NO: 9558456 NR Description: unnamed protein product [Oryza sativa (japonica
  misc_feature (1)..(126): Homolog of NCBI NO: 34895514 NR Description: putative bifunctional nuclease [Oryza sativa
  misc_feature (1)..(116): Homolog of NCBI NO: 3551956 NR Description: senescence-associated protein 6 [Hemerocallis
  misc_feature (3)..(116): Homolog of NCBI NO: 15221343 NR Description: putative bifunctional nuclease; protein id: supported by cDNA: 256130. [Arabidopsis thaliana]
  misc_feature (3)..(116): Homolog of NCBI NO: 21554516 NR Description: putative bifunctional nuclease [Arabidopsis
  misc_feature (16)..(116): Homolog of NCBI NO: 4099835 NR Description: bifunctional nuclease [Zinnia elegans]
MGLLLLLLVAAAATAPAADAWGKEGHYMVCKIAESFLTKEASTAVKELLPGWAGGELAETCSWADTQRFRYRWSSPLHFADTPGDCEFDYARDCHNTKGEKNMCVVGAINNYTAALKDSSSPFDPTE

SEQ ID NO: 14838 - protein, 100 aa, Zea mays subsp. mays
  peptide (1)..(100): Ceres Seq. ID no. 4583498
  misc_feature (1)..(99): Homolog of NCBI NO: 38345900 NR Description: OSJNBa0060D06.10 [Oryza sativa (japonica
  misc_feature (1)..(99): Homolog of NCBI NO: 7489371 NR Description: endonuclease (EC 3.1.30.-) precursor - barley
  misc_feature (1)..(99): Homolog of NCBI NO: 5672692 NR Description: nuclease I [Hordeum vulgare]
  misc_feature (1)..(99): Homolog of NCBI NO: 13274190 NR Description: putative nuclease [Hordeum vulgare subsp. vulgare]
  misc_feature (1)..(99): Homolog of NCBI NO: 9558456 NR Description: unnamed protein product [Oryza sativa (japonica
  misc_feature (1)..(99): Homolog of NCBI NO: 34895514 NR Description: putative bifunctional nuclease [Oryza sativa
  misc_feature (1)..(89): Homolog of NCBI NO: 3551956 NR Description: senescence-associated protein 6 [Hemerocallis
  misc_feature (1)..(89): Homolog of NCBI NO: 15221343 NR Description: putative bifunctional nuclease; protein id: supported by cDNA: 256130. [Arabidopsis thaliana]
  misc_feature (1)..(89): Homolog of NCBI NO: 21554516 NR Description: putative bifunctional nuclease [Arabidopsis
  misc_feature (1)..(89): Homolog of NCBI NO: 4099835 NR Description: bifunctional nuclease [Zinnia elegans]
MVCKIAESFLTKEASTAVKELLPGWAGGELAETCSWADTQRFRYRWSSPLHFADTPGDCEFDYARDCHNTKGEKNMCVVGAINNYTAALKDSSSPFDPTE

SEQ ID NO: 14839 - DNA, 756 bp, Zea mays subsp. mays
  misc_feature (1)..(756): Ceres Seq. ID no. 12469433
  misc_feature: MA Experiment ID: 108522 Result: Up-regulated in Transcription
  misc_feature: MA Experiment 108522 PARAMETER Experiment Name: Zm_42deg_Heat_P Parameter: Age (day) Value: 8
  misc_feature: MA Experiment 108522 PARAMETER Experiment Name: Zm_42deg_Heat_P Parameter: Organism Value: Zea mays
  misc_feature: MA Experiment 108522 PARAMETER Experiment Name: Zm_42deg_Heat_P Parameter: Plant Line Value: 35A19
  misc_feature: MA Experiment 108522 PARAMETER Experiment Name: Zm_42deg_Heat_P Parameter: Temperature (deg C) Value: 42 vs. 22
  misc_feature: MA Experiment 108522 PARAMETER Experiment Name: Zm_42deg_Heat_P Parameter: Timepoint (hr) Value: 1
  misc_feature: MA Experiment 108522 PARAMETER Experiment Name: Zm_42deg_Heat_P Parameter: Tissue Value: Aerial
  misc_feature: MA Experiment ID: 108543 Result: Down-regulated in Transcription
  misc_feature: MA Experiment ID: 108556 Result: Up-regulated in Transcription
  misc_feature: MA Experiment 108556 PARAMETER Experiment Name: Zm_Drought_P Parameter: Age (day) Value: 9
  misc_feature: MA Experiment 108556 PARAMETER Experiment Name: Zm_Drought_P Parameter: Organism Value: Zea mays
  misc_feature: MA Experiment 108556 PARAMETER Experiment Name: Zm_Drought_P Parameter: Plant Line Value: 35A19
  misc_feature: MA Experiment 108556 PARAMETER Experiment Name: Zm_Drought_P Parameter: Timepoint (hr) Value: 24
  misc_feature: MA Experiment 108556 PARAMETER Experiment Name: Zm_Drought_P Parameter: Tissue Value: Aerial
  misc_feature: MA Experiment 108556 PARAMETER Experiment Name: Zm_Drought_P Parameter: Treatment Value: Drought vs. No Drought
  misc_feature: MA Experiment ID: 108688 Result: Down-regulated in Transcription
  misc_feature: MA Experiment 108688 PARAMETER Experiment Name: Zm_Embryos-Flowers__P Parameter: Tissue Value: Immature Flowers vs. Aerial+
  misc_feature: MA Experiment ID: 20000480 Result: Up-regulated in Transcription
  misc_feature: MA Experiment 20000480 PARAMETER Experiment Name: Zm_Drought_P Parameter: Age (day) Value: 11
  misc_feature: MA Experiment 20000480 PARAMETER Experiment Name: Zm_Drought_P Parameter: Organism Value: Zea mays
  misc_feature: MA Experiment 20000480 PARAMETER Experiment Name: Zm_Drought_P Parameter: Plant Line Value: 35A19
  misc_feature: MA Experiment 20000480 PARAMETER Experiment Name: Zm_Drought_P Parameter: Timepoint (hr) Value: 72
  misc_feature: MA Experiment 20000480 PARAMETER Experiment Name: Zm_Drought_P Parameter: Tissue Value: Aerial
  misc_feature: MA Experiment 20000480 PARAMETER Experiment Name: Zm_Drought_P Parameter: Treatment Value: Drought vs. No Drought
  misc_feature: MA Experiment ID: 20000535 Result: Up-regulated in Transcription
  misc_feature: MA Experiment 20000535 PARAMETER Experiment Name: Zm_Hybrid_Seed_Dev_P Parameter: DAP Value: 30 vs. 12
  misc_feature: MA Experiment 20000535 PARAMETER Experiment Name: Zm_Hybrid_Seed_Dev_P Parameter: Organism Value: Zea mays
  misc_feature: MA Experiment 20000535 PARAMETER Experiment Name: Zm_Hybrid_Seed_Dev_P Parameter: Plant Line Value: 35A19
  misc_feature: MA Experiment 20000535 PARAMETER Experiment Name: Zm_Hybrid_Seed_Dev_P Parameter: Tissue Value: Embryo vs. Unfert Floret
acggcatcgttgtccacgccgagtcgccgactgatcacttctcttccagcgagtacacacatcacacagcgaagggcagcgcatcgtgctgcggcggccggaggtgatcgacaagcacctctctaggaataataaataatggcgcagttggtggacaaggcgaaggggttcgtcgccgacaagctggccaacatccagaagccggaggcggagctggccgacgtcacggtggggcacgtgggccgcgatggcgccacgctggcggggcgcgtggacgtgcgcaacccgtactcgcacgccatcccggtgtgtgaggtgacctacacgctgcggagcgccgggcggacggtggcgtcagggacggtgcccgacccggggtcgctcgccggcgacggggctaccacgcgcctcgacgtgcccgtcaaggtgccctacgacttcctggttagcctcgccaaggacgccggcagggactgggacatcgactatganatgcgtgtcgggctcaccgttgacctccccgtcgtcggcaaactcacgctgccgctcaccaagtccggcgagctcaagctccccaccctctccagcatnttctgatcgatcgatctgcgtgctgctcgctcgatccgtaactgcggccttgcgtgttcatgactgatctgcctactcgataatatgtaaaccgctctcttgagtgttgttgttgtgctgcttgagtagtacgagacctaataataataaactacagtgatgtgt

SEQ ID NO: 14840 - protein, 152 aa, Zea mays subsp. mays
  peptide (1)..(152): Ceres Seq. ID no. 12469434
  misc_feature (2)..(152): Pfam Name: Late embryogenesis abundant protein Pfam Description: Late embryogenesis abundant protein
  misc_feature (1)..(152): Homolog of NCBI NO: 34904186 NR Description: putative late embryogenesis abundant protein
  misc_feature (1)..(152): Homolog of NCBI NO: 1170745 NR Description: Late embryogenesis abundant protein Lea14-A
  misc_feature (1)..(152): Homolog of NCBI NO: 1170746 NR Description: Desiccation protectant protein Lea14 homolog
  misc_feature (4)..(147): Homolog of NCBI NO: 34912834 NR Description: putative embryogenesis-abundant protein [Oryza
  misc_feature (1)..(152): Homolog of NCBI NO: 15225930 NR Description: putative desiccation related protein; protein id:
  misc_feature (1)..(152): Homolog of NCBI NO: 21555248 NR Description: putative desiccation related protein [Arabidopsis
  misc_feature (118)..(118): Xaa is any aa, unknown or other
  misc_feature (151)..(151): Xaa is any aa, unknown or other
MAQLVDKAKGFVADKLANIQKPEAELADVTVGHVGRDGATLAGRVDVRNPYSHAIPVCEVTYTLRSAGRTVASGTVPDPGSLAGDGATTRLDVPVKVPYDFLVSLAKDAGRDWDIDYXMRVGLTVDLPVVGKLTLPLTKSGELKLPTLSSXF

SEQ ID NO: 14841 - DNA, 497 bp, Zea mays subsp. mays
  misc_feature (1)..(497): Ceres Seq. ID no. 4488984
  misc_feature: MA Experiment ID: 108523 Result: Down-regulated in Transcription
  misc_feature: MA Experiment 108523 PARAMETER Experiment Name: Zm_42deg_Heat_P Parameter: Age (day) Value: 8
  misc_feature: MA Experiment 108523 PARAMETER Experiment Name: Zm_42deg_Heat_P Parameter: Organism Value: Zea mays
  misc_feature: MA Experiment 108523 PARAMETER Experiment Name: Zm_42deg_Heat_P Parameter: Plant Line Value: 35A19
  misc_feature: MA Experiment 108523 PARAMETER Experiment Name: Zm_42deg_Heat_P Parameter: Temperature (deg C) Value: 42 vs. 22
  misc_feature: MA Experiment 108523 PARAMETER Experiment Name: Zm_42deg_Heat_P Parameter: Timepoint (hr) Value: 6
  misc_feature: MA Experiment 108523 PARAMETER Experiment Name: Zm_42deg_Heat_P Parameter: Tissue Value: Aerial
  misc_feature: MA Experiment ID: 108529 Result: Down-regulated in Transcription
  misc_feature: MA Experiment 108529 PARAMETER Experiment Name: Zm_Imbibed_Seeds_P Parameter: Age (day) Value: 5 vs. 2
  misc_feature: MA Experiment 108529 PARAMETER Experiment Name: Zm_Imbibed_Seeds_P Parameter: Organism Value: Zea mays
  misc_feature: MA Experiment 108529 PARAMETER Experiment Name: Zm_Imbibed_Seeds_P Parameter: Plant Line Value: 35A19
  misc_feature: MA Experiment 108529 PARAMETER Experiment Name: Zm_Imbibed_Seeds_P Parameter: Tissue Value: Roots vs. Embryo
  misc_feature: MA Experiment ID: 108543 Result: Up-regulated in Transcription
  misc_feature: MA Experiment ID: 108544 Result: Down-regulated in Transcription
  misc_feature: MA Experiment ID: 108546 Result: Down-regulated in Transcription
  misc_feature: MA Experiment 108546 PARAMETER Experiment Name: Zm_Imbibed_Seeds_P Parameter: Age (day) Value: 3 vs. 2
  misc_feature: MA Experiment 108546 PARAMETER Experiment Name: Zm_Imbibed_Seeds_P Parameter: Organism Value: Zea mays
  misc_feature: MA Experiment 108546 PARAMETER Experiment Name: Zm_Imbibed_Seeds_P Parameter: Plant Line Value: 35A19
  misc_feature: MA Experiment 108546 PARAMETER Experiment Name: Zm_Imbibed_Seeds_P Parameter: Tissue Value: Roots vs. Embryo
gtttggctatagagcctacatgccgcagatcaggcaacagggggagcacgagtgcctgcaccgggacatgatggtcgggttcggcaagtggagctggagcccgctgcagctggagaacccgttcgccgacgccgacgatggccagggggcggggaaggtgcacctgtggcacggcgccgaggacctcatcgtgccggtcagcctttccaggtacatcagccagaagctgccgtgggtcgtctaccacgagctccccaagtcgggacatctcttcccgatcgccgaggggatggctgacatcattgtcaagtccctgctgctcggagaccatcatccgtcgtcgtcggcctcacagcctcctcattctccatgaatccaggtcgtcacgtagtccgttcgcatctcgtggcccgtctctcactgtttctgtaaagggaccgaatgaccgatggtgcagctttctctagcgcgtagctaggatgctctgtctttttttt

SEQ ID NO: 14842 - protein, 123 aa, Zea mays subsp. mays
  peptide (1)..(123): Ceres Seq. ID no. 4488985
  misc_feature (9)..(104): Pfam Name: alpha/beta hydrolase fold Pfam Description: alpha/beta hydrolase fold
  misc_feature (1)..(114): Homolog of NCBI NO: 38346334 NR Description: OSJNBa0073L04.5 [Oryza sativa (japonica
  misc_feature (9)..(109): Homolog of NCBI NO: 18404095 NR Description: expressed protein; protein id: At2g36290.1, by cDNA: 5167. [Arabidopsis thaliana] >gi|25408458|pir||H84778
  misc_feature (9)..(109): Homolog of NCBI NO: 28416665 NR Description: At2g36290 [Arabidopsis thaliana]
  misc_feature (5)..(106): Homolog of NCBI NO: 11357595 NR Description: hypothetical protein F24B22.200 - Arabidopsis (fragment) >gi|6822070|emb|CAB70998.1| putative protein
  misc_feature (5)..(106): Homolog of NCBI NO: 15232465 NR Description: putative protein (fragment); protein id:
  misc_feature (4)..(109): Homolog of NCBI NO: 18410575 NR Description: expressed protein; protein id: At1g74280.1, by cDNA: 119889. [Arabidopsis thaliana] >gi|25406331|pir||C96771
  misc_feature (4)..(106): Homolog of NCBI NO: 18410582 NR Description: expressed protein; protein id: At1g74300.1, by cDNA: 31039. [Arabidopsis thaliana] >gi|25406334|pir||E96771
  misc_feature (4)..(106): Homolog of NCBI NO: 21592662 NR Description: unknown [Arabidopsis thaliana]
  misc_feature (4)..(106): Homolog of NCBI NO: 21537089 NR Description: unknown [Arabidopsis thaliana]
  misc_feature (2)..(109): Homolog of NCBI NO: 15221193 NR Description: unknown protein; protein id: At1g74290.1
FGYRAYMPQIRQQGEHECLHRDMMVGFGKWSWSPLQLENPFADADDGQGAGKVHLWHGAEDLIVPVSLSRYISQKLPWVVYHELPKSGHLFPIAEGMADIIVKSLLLGDHHPSSSASQPPHSP

SEQ ID NO: 14843 - protein, 117 aa, Zea mays subsp. mays
  peptide (1)..(117): Ceres Seq. ID no. 4488986
  misc_feature (3)..(98): Pfam Name: alpha/beta hydrolase fold Pfam Description: alpha/beta hydrolase fold
  misc_feature (1)..(108): Homolog of NCBI NO: 38346334 NR Description: OSJNBa0073L04.5 [Oryza sativa (japonica
  misc_feature (3)..(103): Homolog of NCBI NO: 18404095 NR Description: expressed protein; protein id: At2g36290.1, by cDNA: 5167. [Arabidopsis thaliana] >gi|25408458|pir||H84778
  misc_feature (3)..(103): Homolog of NCBI NO: 28416665 NR Description: At2g36290 [Arabidopsis thaliana]
  misc_feature (1)..(100): Homolog of NCBI NO: 11357595 NR Description: hypothetical protein F24B22.200 - Arabidopsis (fragment) >gi|6822070|emb|CAB70998.1| putative protein
  misc_feature (1)..(100): Homolog of NCBI NO: 15232465 NR Description: putative protein (fragment); protein id:
  misc_feature (1)..(103): Homolog of NCBI NO: 18410575 NR Description: expressed protein; protein id: At1g74280.1, by cDNA: 119889. [Arabidopsis thaliana] >gi|25406331|pir||C96771
  misc_feature (1)..(100): Homolog of NCBI NO: 18410582 NR Description: expressed protein; protein id: At1g74300.1, by cDNA: 31039. [Arabidopsis thaliana] >gi|25406334|pir||E96771
  misc_feature (1)..(100): Homolog of NCBI NO: 21592662 NR Description: unknown [Arabidopsis thaliana]
  misc_feature (1)..(100): Homolog of NCBI NO: 21537089 NR Description: unknown [Arabidopsis thaliana]
  misc_feature (1)..(103): Homolog of NCBI NO: 15221193 NR Description: unknown protein; protein id: At1g74290.1
MPQIRQQGEHECLHRDMMVGFGKWSWSPLQLENPFADADDGQGAGKVHLWHGAEDLIVPVSLSRYISQKLPWVVYHELPKSGHLFPIAEGMADIIVKSLLLGDHHPSSSASQPPHSP

SEQ ID NO: 14844 - protein, 109 aa, Zea mays subsp. mays
  peptide (1)..(109): Ceres Seq. ID no. 4488987
MARGRGRCTCGTAPRTSSCRSAFPGTSARSCRGSSTTSSPSRDISSRSPRGWLTSLSSPCCSETIIRRRRPHSLLILHESRSSRSPFASRGPSLTVSVKGPNDRWCSFL

SEQ ID NO: 14845 - DNA, 1113 bp, Zea mays subsp. mays; identical to SEQ ID NO: 14415
  misc_feature (1)..(1113): Ceres Seq. ID no. 13635288
  misc_feature: MA Experiment ID: 108515 Result: Up-regulated in Transcription
  misc_feature: MA Experiment 108515 PARAMETER Experiment Name: Zm_2mM_SA_P Parameter: Age (day) Value: 8
  misc_feature: MA Experiment 108515 PARAMETER Experiment Name: Zm_2mM_SA_P Parameter: Organism Value: Zea mays
  misc_feature: MA Experiment 108515 PARAMETER Experiment Name: Zm_2mM_SA_P Parameter: Plant Line Value: 35A19
  misc_feature: MA Experiment 108515 PARAMETER Experiment Name: Zm_2mM_SA_P Parameter: Timepoint (hr) Value: 12
  misc_feature: MA Experiment 108515 PARAMETER Experiment Name: Zm_2mM_SA_P Parameter: Tissue Value: Aerial
  misc_feature: MA Experiment 108515 PARAMETER Experiment Name: Zm_2mM_SA_P Parameter: Treatment Value: 2mM SA vs. No Treatment
  misc_feature: MA Experiment ID: 108526 Result: Up-regulated in Transcription
  misc_feature: MA Experiment 108526 PARAMETER Experiment Name: Zm_5mM_NO_P Parameter: Age (day) Value: 8
  misc_feature: MA Experiment 108526 PARAMETER Experiment Name: Zm_5mM_NO_P Parameter: Organism Value: Zea mays
  misc_feature: MA Experiment 108526 PARAMETER Experiment Name: Zm_5mM_NO_P Parameter: Plant Line Value: 35A19
  misc_feature: MA Experiment 108526 PARAMETER Experiment Name: Zm_5mM_NO_P Parameter: Timepoint (hr) Value: 1
  misc_feature: MA Experiment 108526 PARAMETER Experiment Name: Zm_5mM_NO_P Parameter: Tissue Value: Aerial
  misc_feature: MA Experiment 108526 PARAMETER Experiment Name: Zm_5mM_NO_P Parameter: Treatment Value: 5mM NO vs. No Treatment
  misc_feature: MA Experiment ID: 108527 Result: Up-regulated in Transcription
  misc_feature: MA Experiment 108527 PARAMETER Experiment Name: Zm_5mM_NO_P Parameter: Age (day) Value: 8
  misc_feature: MA Experiment 108527 PARAMETER Experiment Name: Zm_5mM_NO_P Parameter: Organism Value: Zea mays
  misc_feature: MA Experiment 108527 PARAMETER Experiment Name: Zm_5mM_NO_P Parameter: Plant Line Value: 35A19
  misc_feature: MA Experiment 108527 PARAMETER Experiment Name: Zm_5mM_NO_P Parameter: Timepoint (hr) Value: 6
  misc_feature: MA Experiment 108527 PARAMETER Experiment Name: Zm_5mM_NO_P Parameter: Tissue Value: Aerial
  misc_feature: MA Experiment 108527 PARAMETER Experiment Name: Zm_5mM_NO_P Parameter: Treatment Value: 5mM NO vs. No Treatment
  misc_feature: MA Experiment ID: 108528 Result: Down-regulated in Transcription
  misc_feature: MA Experiment 108528 PARAMETER Experiment Name: Zm_Imbibed_Seeds_P Parameter: Age (day) Value: 5 vs. 2
  misc_feature: MA Experiment 108528 PARAMETER Experiment Name: Zm_Imbibed_Seeds_P Parameter: Organism Value: Zea mays
  misc_feature: MA Experiment 108528 PARAMETER Experiment Name: Zm_Imbibed_Seeds_P Parameter: Plant Line Value: 35A19
  misc_feature: MA Experiment 108528 PARAMETER Experiment Name: Zm_Imbibed_Seeds_P Parameter: Tissue Value: Aerial vs. Embryo
  misc_feature: MA Experiment ID: 108530 Result: Down-regulated in Transcription
  misc_feature: MA Experiment 108530 PARAMETER Experiment Name: Zm_Imbibed_Seeds_P Parameter: Age (day) Value: 6 vs. 2
  misc_feature: MA Experiment 108530 PARAMETER Experiment Name: Zm_Imbibed_Seeds_P Parameter: Organism Value: Zea mays
  misc_feature: MA Experiment 108530 PARAMETER Experiment Name: Zm_Imbibed_Seeds_P Parameter: Plant Line Value: 35A19
  misc_feature: MA Experiment 108530 PARAMETER Experiment Name: Zm_Imbibed_Seeds_P Parameter: Tissue Value: Aerial vs. Embryo
  misc_feature: MA Experiment ID: 108545 Result: Down-regulated in Transcription
  misc_feature: MA Experiment 108545 PARAMETER Experiment Name: Zm_Imbibed_Seeds_P Parameter: Age (day) Value: 3 vs. 2
  misc_feature: MA Experiment 108545 PARAMETER Experiment Name: Zm_Imbibed_Seeds_P Parameter: Organism Value: Zea mays
  misc_feature: MA Experiment 108545 PARAMETER Experiment Name: Zm_Imbibed_Seeds_P Parameter: Plant Line Value: 35A19
  misc_feature: MA Experiment 108545 PARAMETER Experiment Name: Zm_Imbibed_Seeds_P Parameter: Tissue Value: Aerial vs. Embryo
  misc_feature: MA Experiment ID: 108547 Result: Down-regulated in Transcription
  misc_feature: MA Experiment 108547 PARAMETER Experiment Name: Zm_Imbibed_Seeds_P Parameter: Age (day) Value: 4 vs. 2
  misc_feature: MA Experiment 108547 PARAMETER Experiment Name: Zm_Imbibed_Seeds_P Parameter: Organism Value: Zea mays
  misc_feature: MA Experiment 108547 PARAMETER Experiment Name: Zm_Imbibed_Seeds_P Parameter: Plant Line Value: 35A19
  misc_feature: MA Experiment 108547 PARAMETER Experiment Name: Zm_Imbibed_Seeds_P Parameter: Tissue Value: Aerial vs. Embryo
  misc_feature: MA Experiment ID: 108556 Result: Down-regulated in Transcription
  misc_feature: MA Experiment 108556 PARAMETER Experiment Name: Zm_Drought_P Parameter: Age (day) Value: 9
  misc_feature: MA Experiment 108556 PARAMETER Experiment Name: Zm_Drought_P Parameter: Organism Value: Zea mays
  misc_feature: MA Experiment 108556 PARAMETER Experiment Name: Zm_Drought_P Parameter: Plant Line Value: 35A19
  misc_feature: MA Experiment 108556 PARAMETER Experiment Name: Zm_Drought_P Parameter: Timepoint (hr) Value: 24
  misc_feature: MA Experiment 108556 PARAMETER Experiment Name: Zm_Drought_P Parameter: Tissue Value: Aerial
  misc_feature: MA Experiment 108556 PARAMETER Experiment Name: Zm_Drought_P Parameter: Treatment Value: Drought vs. No Drought
  misc_feature: MA Experiment ID: 108559 Result: Up-regulated in Transcription
  misc_feature: MA Experiment 108559 PARAMETER Experiment Name: Zm_5mM_NO_P Parameter: Age (day) Value: 8
  misc_feature: MA Experiment 108559 PARAMETER Experiment Name: Zm_5mM_NO_P Parameter: Organism Value: Zea mays
  misc_feature: MA Experiment 108559 PARAMETER Experiment Name: Zm_5mM_NO_P Parameter: Plant Line Value: 35A19
  misc_feature: MA Experiment 108559 PARAMETER Experiment Name: Zm_5mM_NO_P Parameter: Timepoint (hr) Value: 12
  misc_feature: MA Experiment 108559 PARAMETER Experiment Name: Zm_5mM_NO_P Parameter: Tissue Value: Aerial
  misc_feature: MA Experiment 108559 PARAMETER Experiment Name: Zm_5mM_NO_P Parameter: Treatment Value: 5mM NO vs. No Treatment
  misc_feature: MA Experiment ID: 108597 Result: Down-regulated in Transcription
  misc_feature: MA Experiment 108597 PARAMETER Experiment Name: Zm_100uM_ABA_P Parameter: Age (day) Value: 9
  misc_feature: MA Experiment 108597 PARAMETER Experiment Name: Zm_100uM_ABA_P Parameter: Organism Value: Zea mays
  misc_feature: MA Experiment 108597 PARAMETER Experiment Name: Zm_100uM_ABA_P Parameter: Plant Line Value: 35A19
  misc_feature: MA Experiment 108597 PARAMETER Experiment Name: Zm_100uM_ABA_P Parameter: Timepoint (hr) Value: 24
  misc_feature: MA Experiment 108597 PARAMETER Experiment Name: Zm_100uM_ABA_P Parameter: Tissue Value: Aerial
  misc_feature: MA Experiment 108597 PARAMETER Experiment Name: Zm_100uM_ABA_P Parameter: Treatment Value: 100uM ABA vs. No Treatment
  misc_feature: MA Experiment ID: 108687 Result: Up-regulated in Transcription
  misc_feature: MA Experiment 108687 PARAMETER Experiment Name: Zm_Embryos-Flowers__P Parameter: Tissue Value: Embryo vs. Aerial+
  misc_feature: MA Experiment ID: 108688 Result: Down-regulated in Transcription
  misc_feature: MA Experiment 108688 PARAMETER Experiment Name: Zm_Embryos-Flowers__P Parameter: Tissue Value: Immature Flowers vs. Aerial+
  misc_feature: MA Experiment ID: 108689 Result: Down-regulated in Transcription
  misc_feature: MA Experiment 108689 PARAMETER Experiment Name: Zm_Drought_Roots_P Parameter: Age (day) Value: 9
  misc_feature: MA Experiment 108689 PARAMETER Experiment Name: Zm_Drought_Roots_P Parameter: Organism Value: Zea mays
  misc_feature: MA Experiment 108689 PARAMETER Experiment Name: Zm_Drought_Roots_P Parameter: Plant Line Value: 35A19
  misc_feature: MA Experiment 108689 PARAMETER Experiment Name: Zm_Drought_Roots_P Parameter: Timepoint (hr) Value: 24
  misc_feature: MA Experiment 108689 PARAMETER Experiment Name: Zm_Drought_Roots_P Parameter: Tissue Value: Roots
  misc_feature: MA Experiment 108689 PARAMETER Experiment Name: Zm_Drought_Roots_P Parameter: Treatment Value: Drought vs. No Drought
  misc_feature: MA Experiment ID: 20000108 Result: Down-regulated in Transcription
  misc_feature: MA Experiment 20000108 PARAMETER Experiment Name: Zm_Root-Tips_P Parameter: Age (day) Value: 12
  misc_feature: MA Experiment 20000108 PARAMETER Experiment Name: Zm_Root-Tips_P Parameter: Organism Value: Zea mays
  misc_feature: MA Experiment 20000108 PARAMETER Experiment Name: Zm_Root-Tips_P Parameter: Tissue Value: Root tips vs. Root mid region    35
  misc_feature: MA Experiment 20000108 PARAMETER Experiment Name: Zm_Root-Tips_P Parameter: Tissue Value: Root tips vs. Root mid region   Sequence Listing-Misc Features (4)
  misc_feature: MA Experiment ID: 20000477 Result: Up-regulated in Transcription
  misc_feature: MA Experiment 20000477 PARAMETER Experiment Name: Zm_5mM_SA_P Parameter: Age (day) Value: 10
  misc_feature: MA Experiment 20000477 PARAMETER Experiment Name: Zm_5mM_SA_P Parameter: Organism Value: Zea mays
  misc_feature: MA Experiment 20000477 PARAMETER Experiment Name: Zm_5mM_SA_P Parameter: Plant Line Value: 35A19
  misc_feature: MA Experiment 20000477 PARAMETER Experiment Name: Zm_5mM_SA_P Parameter: Timepoint (hr) Value: 48
  misc_feature: MA Experiment 20000477 PARAMETER Experiment Name: Zm_5mM_SA_P Parameter: Tissue Value: Aerial
  misc_feature: MA Experiment 20000477 PARAMETER Experiment Name: Zm_5mM_SA_P Parameter: Treatment Value: 5mM SA vs. No Treatment
  misc_feature: MA Experiment ID: 20000480 Result: Down-regulated in Transcription
  misc_feature: MA Experiment 20000480 PARAMETER Experiment Name: Zm_Drought_P Parameter: Age (day) Value: 11
  misc_feature: MA Experiment 20000480 PARAMETER Experiment Name: Zm_Drought_P Parameter: Organism Value: Zea mays
  misc_feature: MA Experiment 20000480 PARAMETER Experiment Name: Zm_Drought_P Parameter: Plant Line Value: 35A19
  misc_feature: MA Experiment 20000480 PARAMETER Experiment Name: Zm_Drought_P Parameter: Timepoint (hr) Value: 72
  misc_feature: MA Experiment 20000480 PARAMETER Experiment Name: Zm_Drought_P Parameter: Tissue Value: Aerial
  misc_feature: MA Experiment 20000480 PARAMETER Experiment Name: Zm_Drought_P Parameter: Treatment Value: Drought vs. No Drought
  misc_feature: MA Experiment ID: 20000626 Result: Up-regulated in Transcription
  misc_feature: MA Experiment 20000626 PARAMETER Experiment Name: Zm_Herbicide-Treatments_P Parameter: Timepoint (hr) Value: 12
  misc_feature: MA Experiment 20000626 PARAMETER Experiment Name: Zm_Herbicide-Treatments_P Parameter: Tissue Value: Aerial
  misc_feature: MA Experiment 20000626 PARAMETER Experiment Name: Zm_Herbicide-Treatments_P Parameter: Treatment Value: Roundup vs. No Treatment
  misc_feature: MA Experiment ID: 20000627 Result: Up-regulated in Transcription
  misc_feature: MA Experiment 20000627 PARAMETER Experiment Name: Zm_Herbicide-Treatments_P Parameter: Timepoint (hr) Value: 12
  misc_feature: MA Experiment 20000627 PARAMETER Experiment Name: Zm_Herbicide-Treatments_P Parameter: Tissue Value: Aerial
  misc_feature: MA Experiment 20000627 PARAMETER Experiment Name: Zm_Herbicide-Treatments_P Parameter: Treatment Value: Finale vs. No Treatment
  misc_feature: MA Experiment ID: 20000630 Result: Up-regulated in Transcription
  misc_feature: MA Experiment 20000630 PARAMETER Experiment Name: Zm_Herbicide-Treatments_P Parameter: Timepoint (hr) Value: 4
  misc_feature: MA Experiment 20000630 PARAMETER Experiment Name: Zm_Herbicide-Treatments_P Parameter: Tissue Value: Aerial
  misc_feature: MA Experiment 20000630 PARAMETER Experiment Name: Zm_Herbicide-Treatments_P Parameter: Treatment Value: Roundup vs. No Treatment

SEQ ID NO: 14846 - protein, 253 aa, Zea mays subsp. mays; identical to SEQ ID NO: 14416
  peptide (1)..(253): Ceres Seq. ID no. 13635289
  misc_feature (32)..(253): Homolog of NCBI NO: 4468796 NR Description: GST6 protein [Zea mays]
  misc_feature (40)..(251): Homolog of NCBI NO: 7447304 NR Description: glutathione transferase (EC 2.5.1.18) - maize
  misc_feature (35)..(253): Homolog of NCBI NO: 11177831 NR Description: putative glutathione S-transferase OsGSTU5 [Oryza
  misc_feature (32)..(251): Homolog of NCBI NO: 6683765 NR Description: glutathione-S-transferase [Hordeum vulgare]
  misc_feature (32)..(251): Homolog of NCBI NO: 20067419 NR Description: glutathione transferase [Triticum aestivum]
  misc_feature (32)..(251): Homolog of NCBI NO: 20067417 NR Description: glutathione transferase [Triticum aestivum]
  misc_feature (32)..(251): Homolog of NCBI NO: 20067415 NR Description: glutathione transferase [Triticum aestivum]
  misc_feature (32)..(253): Homolog of NCBI NO: 33357806 NR Description: Chain A, Crystal Structure Solution Of Rice Gst1 In Complex With Glutathione. >gi|33357807|pdb|1OYJ|B Chain B, Structure Solution Of Rice Gst1 (Osgstu1) In Complex With Gst1
  misc_feature (34)..(251): Homolog of NCBI NO: 416652 NR Description: PROBABLE GLUTATHIONE S-TRANSFERASE (AUXIN-INDUCED
  misc_feature (34)..(251): Homolog of NCBI NO: 1346215 NR Description: PROBABLE GLUTATHIONE S-TRANSFERASE PARC
  misc_feature (32)..(253): Homolog of NCBI NO: 4468796 NR Description: GST6 protein [Zea mays]
  misc_feature (40)..(251): Homolog of NCBI NO: 7447304 NR Description: glutathione transferase (EC 2.5.1.18) - maize
  misc_feature (35)..(253): Homolog of NCBI NO: 11177831 NR Description: putative glutathione S-transferase OsGSTU5 [Oryza
  misc_feature (32)..(251): Homolog of NCBI NO: 6683765 NR Description: glutathione-S-transferase [Hordeum vulgare]
  misc_feature (32)..(251): Homolog of NCBI NO: 20067419 NR Description: glutathione transferase [Triticum aestivum]
  misc_feature (32)..(251): Homolog of NCBI NO: 20067417 NR Description: glutathione transferase [Triticum aestivum]
  misc_feature (32)..(251): Homolog of NCBI NO: 20067415 NR Description: glutathione transferase [Triticum aestivum]
  misc_feature (32)..(253): Homolog of NCBI NO: 33357806 NR Description: Chain A, Crystal Structure Solution Of Rice Gst1 In Complex With Glutathione. >gi|33357807|pdb|1OYJ|B Chain B, Structure Solution Of Rice Gst1 (Osgstu1) In Complex With Gst1
  misc_feature (34)..(251): Homolog of NCBI NO: 416652 NR Description: PROBABLE GLUTATHIONE S-TRANSFERASE (AUXIN-INDUCED
  misc_feature (34)..(251): Homolog of NCBI NO: 1346215 NR Description: PROBABLE GLUTATHIONE S-TRANSFERASE PARC

SEQ ID NO: 14847 - protein, 222 aa, Zea mays subsp. mays; identical to SEQ ID NO: 14417
  peptide (1)..(222): Ceres Seq. ID no. 13635290
  misc_feature (1)..(222): Homolog of NCBI NO: 4468796 NR Description: GST6 protein [Zea mays]
  misc_feature (9)..(220): Homolog of NCBI NO: 7447304 NR Description: glutathione transferase (EC 2.5.1.18) - maize
  misc_feature (4)..(222): Homolog of NCBI NO: 11177831 NR Description: putative glutathione S-transferase OsGSTU5 [Oryza
  misc_feature (1)..(220): Homolog of NCBI NO: 6683765 NR Description: glutathione-S-transferase [Hordeum vulgare]
  misc_feature (1)..(220): Homolog of NCBI NO: 20067419 NR Description: glutathione transferase [Triticum aestivum]
  misc_feature (1)..(220): Homolog of NCBI NO: 20067417 NR Description: glutathione transferase [Triticum aestivum]
  misc_feature (1)..(220): Homolog of NCBI NO: 20067415 NR Description: glutathione transferase [Triticum aestivum]
  misc_feature (1)..(222): Homolog of NCBI NO: 33357806 NR Description: Chain A, Crystal Structure Solution Of Rice Gst1 In Complex With Glutathione. >gi|33357807|pdb|1OYJ|B Chain B, Structure Solution Of Rice Gst1 (Osgstu1) In Complex With Gst1
  misc_feature (3)..(220): Homolog of NCBI NO: 416652 NR Description: PROBABLE GLUTATHIONE S-TRANSFERASE (AUXIN-INDUCED
  misc_feature (3)..(220): Homolog of NCBI NO: 1346215 NR Description: PROBABLE GLUTATHIONE S-TRANSFERASE PARC
  misc_feature (4)..(222): Homolog of NCBI NO: 11177831 NR Description: putative glutathione S-transferase OsGSTU5 [Oryza
  misc_feature (1)..(220): Homolog of NCBI NO: 6683765 NR Description: glutathione-S-transferase [Hordeum vulgare]
  misc_feature (1)..(220): Homolog of NCBI NO: 20067419 NR Description: glutathione transferase [Triticum aestivum]
  misc_feature (1)..(220): Homolog of NCBI NO: 20067417 NR Description: glutathione transferase [Triticum aestivum]
  misc_feature (1)..(220): Homolog of NCBI NO: 20067415 NR Description: glutathione transferase [Triticum aestivum]
  misc_feature (1)..(222): Homolog of NCBI NO: 33357806 NR Description: Chain A, Crystal Structure Solution Of Rice Gst1 In Complex With Glutathione. >gi|33357807|pdb|1OYJ|B Chain B, Structure Solution Of Rice Gst1 (Osgstu1) In Complex With Gst1
  misc_feature (3)..(220): Homolog of NCBI NO: 416652 NR Description: PROBABLE GLUTATHIONE S-TRANSFERASE (AUXIN-INDUCED
  misc_feature (3)..(220): Homolog of NCBI NO: 1346215 NR Description: PROBABLE GLUTATHIONE S-TRANSFERASE PARC
  misc_feature (1)..(222): Homolog of NCBI NO: 4468796 NR Description: GST6 protein [Zea mays]
  misc_feature (9)..(220): Homolog of NCBI NO: 7447304 NR Description: glutathione transferase (EC 2.5.1.18) - maize

SEQ ID NO: 14848 - protein, 141 aa, Zea mays subsp. mays; identical to SEQ ID NO: 14418
  peptide (1)..(141): Ceres Seq. ID no. 13635291

SEQ ID NO: 14849 - DNA, 892 bp, Zea mays subsp. mays
  misc_feature (1)..(892): Ceres Seq. ID no. 13504093
  misc_feature: MA Experiment ID: 108530 Result: Down-regulated in Transcription
  misc_feature: MA Experiment 108530 PARAMETER Experiment Name: Zm_Imbibed_Seeds_P Parameter: Age (day) Value: 6 vs. 2
  misc_feature: MA Experiment 108530 PARAMETER Experiment Name: Zm_Imbibed_Seeds_P Parameter: Organism Value: Zea mays
  misc_feature: MA Experiment 108530 PARAMETER Experiment Name: Zm_Imbibed_Seeds_P Parameter: Plant Line Value: 35A19
  misc_feature: MA Experiment 108530 PARAMETER Experiment Name: Zm_Imbibed_Seeds_P Parameter: Tissue Value: Aerial vs. Embryo
  misc_feature: MA Experiment ID: 108535 Result: Up-regulated in Transcription
  misc_feature: MA Experiment 108535 PARAMETER Experiment Name: Zm_Meristem_P Parameter: Age (day) Value: 8
  misc_feature: MA Experiment 108535 PARAMETER Experiment Name: Zm_Meristem_P Parameter: Organism Value: Zea mays
  misc_feature: MA Experiment 108535 PARAMETER Experiment Name: Zm_Meristem_P Parameter: Plant Line Value: 35A19
  misc_feature: MA Experiment 108535 PARAMETER Experiment Name: Zm_Meristem_P Parameter: Tissue Value: Root Meristem vs. Above Root Meristem
  misc_feature: MA Experiment ID: 108544 Result: Down-regulated in Transcription
  misc_feature: MA Experiment ID: 20000488 Result: Up-regulated in Transcription
  misc_feature: MA Experiment 20000488 PARAMETER Experiment Name: Zm_50mM_NH4NO3_L_to_H_P Parameter: Organism Value: Zea mays
  misc_feature: MA Experiment 20000488 PARAMETER Experiment Name: Zm_50mM_NH4NO3_L_to_H_P Parameter: Timepoint (hr) Value: 8
  misc_feature: MA Experiment 20000488 PARAMETER Experiment Name: Zm_50mM_NH4NO3_L_to_H_P Parameter: Tissue Value: Leaves
  misc_feature: MA Experiment 20000488 PARAMETER Experiment Name: Zm_50mM_NH4NO3_L_to_H_P Parameter: Treatment Value: 50mM NH4NO3 vs. 100mM Mannitol
  misc_feature: MA Experiment ID: 20001612 Result: Up-regulated in Transcription
  misc_feature: MA Experiment 20001612 PARAMETER Experiment Name: Zm_50ppm_KNO3_L-to-H_P Parameter: Age (day) Value: 19
  misc_feature: MA Experiment 20001612 PARAMETER Experiment Name: Zm_50ppm_KNO3_L-to-H_P Parameter: Organism Value: Zea mays
  misc_feature: MA Experiment 20001612 PARAMETER Experiment Name: Zm_50ppm_KNO3_L-to-H_P Parameter: Plant Line Value: 35A19
  misc_feature: MA Experiment 20001612 PARAMETER Experiment Name: Zm_50ppm_KNO3_L-to-H_P Parameter: Timepoint (hr) Value: 8
  misc_feature: MA Experiment 20001612 PARAMETER Experiment Name: Zm_50ppm_KNO3_L-to-H_P Parameter: Tissue Value: Roots
  misc_feature: MA Experiment 20001612 PARAMETER Experiment Name: Zm_50ppm_KNO3_L-to-H_P Parameter: Treatment Value: 50ppm KNO3 vs. 50ppm KCl
ccaccaaattaaaccgccggcgcctccacttcgcgttctcgcctcatctcctcccgctcagccgctgcaggatccggcggcgaaggtaaggcaagatgtacaccgcgaggaagaagatccagaaggataagggccttgagccctccgagttcgaggactccgtcgcccaggctttcttcgacctggagaacggtaaccaggagctcaagagcgacctcaaggacctttacatcaacggtgctatccagctggatgttgccgggagcaggaaggctgttgtgatccacgtcccataccgcttgcgtaaggccttcaggaagatccatgtcaggatcgtcagggagctggagaagaaattcagcggcaaggatgtggtaattgttgccacaaggaggancgtgaggccgcccaagaagggttcagctgttcagcgccctcgctccaggactntgactgctgtccacgatggcatcttggaggatgttgtcttcccagctgagattgtggggaagcgagtcaggtaccgtntggatggngccaagatcatcaaggtaacctacatgtnttattgaggaactgaaagatgccacatgatcttnttggacccaaaggagaggaacaaccccgaatacaagctggacacctacactacggtntaccgcaggctgtgtgggaaagatgtggtctttgagtaccctatgaccgaaaatgcataaatatgacgccccggatatccccatttcatttcgttgaatntgggtgtttctttggggtctcaactagactgctccgtatgtacttcaaaaaccatagttttgatgccaaagttgcctaggaatttggtactcgggaattggcagcggacgtgaacaatgttaagttttgagcattt

SEQ ID NO: 14850 - protein, 158 aa, Zea mays subsp. mays
  peptide (1)..(158): Ceres Seq. ID no. 13504094
  misc_feature (4)..(158): Pfam Name: Ribosomal protein S7e Pfam Description: Ribosomal protein S7e
  misc_feature (1)..(158): Homolog of NCBI NO: 4588906 NR Description: ribosomal protein S7 [Secale cereale]
  misc_feature (1)..(158): Homolog of NCBI NO: 22671664 NR Description: ribosomal protein S7 [Oryza sativa (japonica
  misc_feature (1)..(158): Homolog of NCBI NO: 14787424 NR Description: Ribosomal protein S7 [Hordeum vulgare subsp.
  misc_feature (1)..(158): Homolog of NCBI NO: 20139964 NR Description: 40S ribosomal protein S7 unknown [Avicennia marina] >gi|4128206|gb|AAD03501.1| 40S
  misc_feature (1)..(158): Homolog of NCBI NO: 20139962 NR Description: 40S ribosomal protein S7
  misc_feature (1)..(158): Homolog of NCBI NO: 15221972 NR Description: 40S ribosomal protein S7 (RPS7A) [Arabidopsis >gi|30694420|ref|NP_849786.1| 40S ribosomal protein S7 (RPS7A) thaliana] >gi|25294579|pir||A96526 probable 40S ribosomal protein
  misc_feature (1)..(158): Homolog of NCBI NO: 15232926 NR Description: 40S ribosomal protein S7 (RPS7B) [Arabidopsis >gi|30678607|ref|NP_850504.1| 40S ribosomal protein S7 (RPS7B) thaliana] >gi|6957719|gb|AAF32463.1| putative 40S ribosomal
  misc_feature (1)..(158): Homolog of NCBI NO: 15237278 NR Description: 40S ribosomal protein S7 (RPS7C) [Arabidopsis
  misc_feature (1)..(158): Homolog of NCBI NO: 21592413 NR Description: 40S ribosomal protein S7-like [Arabidopsis
  misc_feature (1)..(158): Homolog of NCBI NO: 28630350 NR Description: ribosomal protein S7 [Petromyzon marinus]
  misc_feature (101)..(101): Xaa is any aa, unknown or other
  misc_feature (119)..(119): Xaa is any aa, unknown or other
  misc_feature (145)..(145): Xaa is any aa, unknown or other
  misc_feature (147)..(147): Xaa is any aa, unknown or other
  misc_feature (157)..(157): Xaa is any aa, unknown or other
MYTARKKIQKDKGLEPSEFEDSVAQAFFDLENGNQELKSDLKDLYINGAIQLDVAGSRKAVVIHVPYRLRKAFRKIHVRIVRELEKKFSGKDVVIVATRRXVRPPKKGSAVQRPRSRTXTAVHDGILEDVVFPAEIVGKRVRYRXDXAKIIKVTYMXY

SEQ ID NO: 14851 - DNA, 878 bp, Zea mays subsp. mays
  misc_feature (1)..(878): Ceres Seq. ID no. 12469416
  misc_feature: MA Experiment ID: 108535 Result: Up-regulated in Transcription
  misc_feature: MA Experiment 108535 PARAMETER Experiment Name: Zm_Meristem_P Parameter: Age (day) Value: 8
  misc_feature: MA Experiment 108535 PARAMETER Experiment Name: Zm_Meristem_P Parameter: Organism Value: Zea mays
  misc_feature: MA Experiment 108535 PARAMETER Experiment Name: Zm_Meristem_P Parameter: Plant Line Value: 35A19
  misc_feature: MA Experiment 108535 PARAMETER Experiment Name: Zm_Meristem_P Parameter: Tissue Value: Root Meristem vs. Above Root Meristem
  misc_feature: MA Experiment ID: 20000492 Result: Up-regulated in Transcription
  misc_feature: MA Experiment 20000492 PARAMETER Experiment Name: Zm_Hybrid_Seed_Dev_P Parameter: DAP Value: 12
  misc_feature: MA Experiment 20000492 PARAMETER Experiment Name: Zm_Hybrid_Seed_Dev_P Parameter: Organism Value: Zea mays
  misc_feature: MA Experiment 20000492 PARAMETER Experiment Name: Zm_Hybrid_Seed_Dev_P Parameter: Plant Line Value: 35A19
  misc_feature: MA Experiment 20000492 PARAMETER Experiment Name: Zm_Hybrid_Seed_Dev_P Parameter: Tissue Value: Fert Kernel vs. Unfert Floret
  misc_feature: MA Experiment ID: 20000534 Result: Up-regulated in Transcription
  misc_feature: MA Experiment 20000534 PARAMETER Experiment Name: Zm_Hybrid_Pollen_P Parameter: Age (day) Value: 8
  misc_feature: MA Experiment 20000534 PARAMETER Experiment Name: Zm_Hybrid_Pollen_P Parameter: Organism Value: Zea mays
  misc_feature: MA Experiment 20000534 PARAMETER Experiment Name: Zm_Hybrid_Pollen_P Parameter: Plant Line Value: 35A19
  misc_feature: MA Experiment 20000534 PARAMETER Experiment Name: Zm_Hybrid_Pollen_P Parameter: Tissue Value: Pollen vs. Aerial
  misc_feature: MA Experiment ID: 20000535 Result: Up-regulated in Transcription
  misc_feature: MA Experiment 20000535 PARAMETER Experiment Name: Zm_Hybrid_Seed_Dev_P Parameter: DAP Value: 30 vs. 12
  misc_feature: MA Experiment 20000535 PARAMETER Experiment Name: Zm_Hybrid_Seed_Dev_P Parameter: Organism Value: Zea mays
  misc_feature: MA Experiment 20000535 PARAMETER Experiment Name: Zm_Hybrid_Seed_Dev_P Parameter: Plant Line Value: 35A19
  misc_feature: MA Experiment 20000535 PARAMETER Experiment Name: Zm_Hybrid_Seed_Dev_P Parameter: Tissue Value: Embryo vs. Unfert Floret
  misc_feature: MA Experiment ID: 20000632 Result: Down-regulated in Transcription
  misc_feature: MA Experiment 20000632 PARAMETER Experiment Name: Zm_Herbicide-Treatments_P Parameter: Timepoint (hr) Value: 4
  misc_feature: MA Experiment 20000632 PARAMETER Experiment Name: Zm_Herbicide-Treatments_P Parameter: Tissue Value: Aerial
  misc_feature: MA Experiment 20000632 PARAMETER Experiment Name: Zm_Herbicide-Treatments_P Parameter: Treatment Value: Glean vs. No Treatment
cattagcatccctgaaagcgctctttcctaatttccatacaaaagaaacactatcaagccaagaggagcttgctcctttcctgaagttctcatctcgcatggctgcaatcgatttcattgtctgtgaggaaagtgatgcttttgtggctaacaacattgggaacatggccaaaattctggctgggcaaaggagatattttggacacaagagaacaatccggccaaatgctaaacagctctatcccttattcatgaagaggggaaatatgtcatgggatgcatttgcctcacaggtgcgaacaatccagaaaggatatatgggagagcccatggaaatcacaccaggaagaggcgaatttcatgcaaaccctgccgcctgtatatgtgaaaagaccagcagaaactcagcaatagtcaaatccatttctggaaataacctggaacctgtaactgacagtggaataaggaaaaccattggcattagtagaccaccatatcctgtttatactgatgaagaggcagatggatntgatacagaagaagatccggacagcagtgggagaggagaggtgattgacactgaacctgacgatgattntgcggtcagacaggaggatcctgagctagaggagatcctgtcagattagttcagttgtgcggctgtttcctccggttaagctatgcaaatctgactgcatatacatgtgttgtatgtggcagcaattttatggtttgggcatcnccgaactagcttagatctgcanccgctggtgtacatagattttgtggtgtgcagctgtccaccctctttttnttagctgaatgagggcatgatcatgtttgtcacctgngcaagccagattngcnnnccttttttt

SEQ ID NO: 14852 - protein, 214 aa, Zea mays subsp. mays
  peptide (1)..(214): Ceres Seq. ID no. 12469417
  misc_feature (1)..(94): Pfam Name: Plant protein family Pfam Description: Plant protein family
  misc_feature (1)..(130): Homolog of NCBI NO: 22328730 NR Description: growth regulator like protein; protein id: supported by cDNA: gi_20856497 [Arabidopsis thaliana] AT4g16650/dl4350w [Arabidopsis thaliana]
  misc_feature (1)..(194): Homolog of NCBI NO: 322752 NR Description: auxin-independent growth promoter - common
  misc_feature (1)..(146): Homolog of NCBI NO: 38345930 NR Description: OSJNBb0078D11.5 [Oryza sativa (japonica
  misc_feature (1)..(214): Homolog of NCBI NO: 8778600 NR Description: F5M15.13 [Arabidopsis thaliana]
  misc_feature (1)..(214): Homolog of NCBI NO: 8886957 NR Description: F2D10.3 [Arabidopsis thaliana]
  misc_feature (1)..(214): Homolog of NCBI NO: 30686880 NR Description: axi 1 protein -related [Arabidopsis thaliana]
  misc_feature (1)..(214): Homolog of NCBI NO: 6573718 NR Description: T23E18.20 [Arabidopsis thaliana]
  misc_feature (1)..(214): Homolog of NCBI NO: 18411065 NR Description: putative auxin-independent growth promoter; id: At1g76270.1, supported by cDNA: gi_15292904 [Arabidopsis
  misc_feature (1)..(214): Homolog of NCBI NO: 25406439 NR Description: hypothetical protein F15M4.23 [imported] -
  misc_feature (1)..(132): Homolog of NCBI NO: 15233840 NR Description: putative growth regulator protein; protein id: [Arabidopsis thaliana] >gi|7488119|pir||T05667 probable growth
  misc_feature (176)..(176): Xaa is any aa, unknown or other
  misc_feature (199)..(199): Xaa is any aa, unknown or other
LASLKALFPNFHTKETLSSQEELAPFLKFSSRMAAIDFIVCEESDAFVANNIGNMAKILAGQRRYFGHKRTIRPNAKQLYPLFMKRGNMSWDAFASQVRTIQKGYMGEPMEITPGRGEFHANPAACICEKTSRNSAIVKSISGNNLEPVTDSGIRKTIGISRPPYPVYTDEEADGXDTEEDPDSSGRGEVIDTEPDDDXAVRQEDPELEEILSD

SEQ ID NO: 14853 - protein, 182 aa, Zea mays subsp. mays
  peptide (1)..(182): Ceres Seq. ID no. 12469418
  misc_feature (1)..(62): Pfam Name: Plant protein family Pfam Description: Plant protein family
  misc_feature (1)..(162): Homolog of NCBI NO: 322752 NR Description: auxin-independent growth promoter - common
  misc_feature (1)..(114): Homolog of NCBI NO: 38345930 NR Description: OSJNBb0078D11.5 [Oryza sativa (japonica
  misc_feature (1)..(182): Homolog of NCBI NO: 8778600 NR Description: F5M15.13 [Arabidopsis thaliana]
  misc_feature (1)..(182): Homolog of NCBI NO: 8886957 NR Description: F2D10.3 [Arabidopsis thaliana]
  misc_feature (1)..(182): Homolog of NCBI NO: 30686880 NR Description: axi 1 protein -related [Arabidopsis thaliana]
  misc_feature (1)..(182): Homolog of NCBI NO: 6573718 NR Description: T23E18.20 [Arabidopsis thaliana]
  misc_feature (1)..(182): Homolog of NCBI NO: 18411065 NR Description: putative auxin-independent growth promoter; id: At1g76270.1, supported by cDNA: gi_15292904 [Arabidopsis
  misc_feature (1)..(182): Homolog of NCBI NO: 25406439 NR Description: hypothetical protein F15M4.23 [imported] -
  misc_feature (1)..(100): Homolog of NCBI NO: 15233840 NR Description: putative growth regulator protein; protein id: [Arabidopsis thaliana] >gi|7488119|pir||T05667 probable growth
  misc_feature (1)..(98): Homolog of NCBI NO: 22328730 NR Description: growth regulator like protein; protein id: supported by cDNA: gi_20856497 [Arabidopsis thaliana] AT4g16650/dl4350w [Arabidopsis thaliana]
  misc_feature (144)..(144): Xaa is any aa, unknown or other
  misc_feature (167)..(167): Xaa is any aa, unknown or other
MAAIDFIVCEESDAFVANNIGNMAKILAGQRRYFGHKRTIRPNAKQLYPLFMKRGNMSWDAFASQVRTIQKGYMGEPMEITPGRGEFHANPAACICEKTSRNSAIVKSISGNNLEPVTDSGIRKTIGISRPPYPVYTDEEADGXDTEEDPDSSGRGEVIDTEPDDDXAVRQEDPELEEILSD

SEQ ID NO: 14854 - protein, 160 aa, Zea mays subsp. mays
  peptide (1)..(160): Ceres Seq. ID no. 12469419
  misc_feature (1)..(140): Homolog of NCBI NO: 322752 NR Description: auxin-independent growth promoter - common
  misc_feature (1)..(92): Homolog of NCBI NO: 38345930 NR Description: OSJNBb0078D11.5 [Oryza sativa (japonica
  misc_feature (1)..(160): Homolog of NCBI NO: 8778600 NR Description: F5M15.13 [Arabidopsis thaliana]
  misc_feature (1)..(160): Homolog of NCBI NO: 8886957 NR Description: F2D10.3 [Arabidopsis thaliana]
  misc_feature (1)..(160): Homolog of NCBI NO: 30686880 NR Description: axi 1 protein -related [Arabidopsis thaliana]
  misc_feature (1)..(160): Homolog of NCBI NO: 6573718 NR Description: T23E18.20 [Arabidopsis thaliana]
  misc_feature (1)..(160): Homolog of NCBI NO: 25406439 NR Description: hypothetical protein F15M4.23 [imported] -
  misc_feature (1)..(160): Homolog of NCBI NO: 18411065 NR Description: putative auxin-independent growth promoter; id: At1g76270.1, supported by cDNA: gi_15292904 [Arabidopsis
  misc_feature (1)..(78): Homolog of NCBI NO: 15233840 NR Description: putative growth regulator protein; protein id: [Arabidopsis thaliana] >gi|7488119|pir||T05667 probable growth
  misc_feature (1)..(76): Homolog of NCBI NO: 22328730 NR Description: growth regulator like protein; protein id: supported by cDNA: gi_20856497 [Arabidopsis thaliana] AT4g16650/dl4350w [Arabidopsis thaliana]
  misc_feature (122)..(122): Xaa is any aa, unknown or other
  misc_feature (145)..(145): Xaa is any aa, unknown or other
MAKILAGQRRYFGHKRTIRPNAKQLYPLFMKRGNMSWDAFASQVRTIQKGYMGEPMEITPGRGEFHANPAACICEKTSRNSAIVKSISGNNLEPVTDSGIRKTIGISRPPYPVYTDEEADGXDTEEDPDSSGRGEVIDTEPDDDXAVRQEDPELEEILSD

SEQ ID NO: 14855 - DNA, 922 bp, Zea mays subsp. mays
  misc_feature (1)..(922): Ceres Seq. ID no. 13589090
  misc_feature: MA Experiment ID: 108543 Result: Up-regulated in Transcription
  misc_feature: MA Experiment ID: 20000535 Result: Down-regulated in Transcription
  misc_feature: MA Experiment 20000535 PARAMETER Experiment Name: Zm_Hybrid_Seed_Dev_P Parameter: DAP Value: 30 vs. 12
  misc_feature: MA Experiment 20000535 PARAMETER Experiment Name: Zm_Hybrid_Seed_Dev_P Parameter: Organism Value: Zea mays
  misc_feature: MA Experiment 20000535 PARAMETER Experiment Name: Zm_Hybrid_Seed_Dev_P Parameter: Plant Line Value: 35A19
  misc_feature: MA Experiment 20000535 PARAMETER Experiment Name: Zm_Hybrid_Seed_Dev_P Parameter: Tissue Value: Embryo vs. Unfert Floret
acggagggcaaggaaactcgctcccactctactcctatccactgcggcctggacgcgtgcgagagacttgaccaagcagcagcagcagggatggcgcctctgaagctgtacgggatgccgctgtcccccaacgtggtgcgcgtggccaccgtgctcaacgagaagggcctcgacttcgagatcgtccccgtcgacctcaccaccggcgcccacaagcagcccgacttcctcgccctcaaccctttcggccagatcccggctctcgtcgacggagacgaagtcctcttcgagtcccgtgcgatcaaccggtacatcgccagcaagtacgcgtcggagggcacggacctgctccccgcgacggcgtcggcggcgaagctggaggtgtggctagaggtggagtcgcaccacttctacccgaaccgggtcgccgctggtgttccagctgctcgtgaggccgctcctgggcggcgccccgacgcggcggtggtggacaagcacgcggagcagctcgccaaggtgctcgacgtgtacgagcgcacctcgcccgcaacaagtacctcgccggggacgagttcacgctcgccgacgccaaccacgcgctcctacctgctctacctcagcaagaccccaaggccggctcgtcgccgcccgccccacgtcaaggcctggtgggaggccatcgtcgcccgccccgcgttccagaagaccgtcgccgccatccccttgcccccgccgccctcctcctcggcttgacctcgccttgcgttgcgccgttgcctgggtcgcggatgctcggagccccgagtcgaataaaagaggcagcatcctgtcttgcatttgctcgtgcgccatgtgttaacagcctgtgtaataaacactgttgcctttcgtgtgtgttcattgccttttggttggtctttgc

SEQ ID NO: 14856 - protein, 250 aa, Zea mays subsp. mays
  peptide (1)..(250): Ceres Seq. ID no. 13589091
  misc_feature (31)..(250): Homolog of NCBI NO: 66616 NR Description: glutathione transferase (EC 2.5.1.18) III
  misc_feature (31)..(250): Homolog of NCBI NO: 25287128 NR Description: glutathione transferase (EC 2.5.1.18) III(a) - maize >gi|4468792|emb|CAB38118.1| Glutathione transferase
  misc_feature (31)..(250): Homolog of NCBI NO: 25287127 NR Description: glutathione transferase (EC 2.5.1.18) III(b) - maize >gi|4468794|emb|CAB38119.1| Glutathione transferase
  misc_feature (32)..(246): Homolog of NCBI NO: 3891593 NR Description: Structure Of Glutathione S-Transferase Iii In Apo
  misc_feature (31)..(250): Homolog of NCBI NO: 1170090 NR Description: GLUTATHIONE S-TRANSFERASE III (GST-III) (GST
  misc_feature (34)..(244): Homolog of NCBI NO: 34907162 NR Description: putative glutathione S-transferase [Oryza sativa
  misc_feature (34)..(244): Homolog of NCBI NO: 11177843 NR Description: putative glutathione S-transferase OsGSTF4 [Oryza
  misc_feature (31)..(244): Homolog of NCBI NO: 23504745 NR Description: glutathione transferase F5 [Triticum aestivum]
  misc_feature (34)..(236): Homolog of NCBI NO: 18150415 NR Description: glutathione S-transferase [Allium cepa]
  misc_feature (31)..(244): Homolog of NCBI NO: 25287121 NR Description: glutathione transferase (EC 2.5.1.18) GST2d - Alopecurus myosuroides >gi|4127372|emb|CAA09193.1| glutathione
TEGKETRSHSTPIHCGLDACERLDQAAAAGMAPLKLYGMPLSPNVVRVATVLNEKGLDFEIVPVDLTTGAHKQPDFLALNPFGQIPALVDGDEVLFESRAINRYIASKYASEGTDLLPATASAAKLEVWLEVESHHFYPNRVAAGVPAAREAAPGRRPDAAVVDKHAEQLAKVLDVYERTSPATSTSPGTSSRSPTPTTRSYLLYLSKTPRPARRRPPHVKAWWEAIVARPAFQKTVAAIPLPPPPSSSA

SEQ ID NO: 14857 - protein, 220 aa, Zea mays subsp. mays
  peptide (1)..(220): Ceres Seq. ID no. 13589092
  misc_feature (1)..(220): Homolog of NCBI NO: 66616 NR Description: glutathione transferase (EC 2.5.1.18) III
  misc_feature (1)..(220): Homolog of NCBI NO: 25287128 NR Description: glutathione transferase (EC 2.5.1.18) III(a) - maize >gi|4468792|emb|CAB38118.1| Glutathione transferase
  misc_feature (1)..(220): Homolog of NCBI NO: 25287127 NR Description: glutathione transferase (EC 2.5.1.18) III(b) - maize >gi|4468794|emb|CAB38119.1| Glutathione transferase
  misc_feature (2)..(216): Homolog of NCBI NO: 3891593 NR Description: Structure Of Glutathione S-Transferase Iii In Apo
  misc_feature (1)..(220): Homolog of NCBI NO: 1170090 NR Description: GLUTATHIONE S-TRANSFERASE III (GST-III) (GST
  misc_feature (4)..(214): Homolog of NCBI NO: 34907162 NR Description: putative glutathione S-transferase [Oryza sativa
  misc_feature (4)..(214): Homolog of NCBI NO: 11177843 NR Description: putative glutathione S-transferase OsGSTF4 [Oryza
  misc_feature (1)..(214): Homolog of NCBI NO: 23504745 NR Description: glutathione transferase F5 [Triticum aestivum]
  misc_feature (4)..(206): Homolog of NCBI NO: 18150415 NR Description: glutathione S-transferase [Allium cepa]
  misc_feature (1)..(214): Homolog of NCBI NO: 25287121 NR Description: glutathione transferase (EC 2.5.1.18) GST2d - Alopecurus myosuroides >gi|4127372|emb|CAA09193.1| glutathione
MAPLKLYGMPLSPNVVRVATVLNEKGLDFEIVPVDLTTGAHKQPDFLALNPFGQIPALVDGDEVLFESRAINRYIASKYASEGTDLLPATASAAKLEVWLEVESHHFYPNRVAAGVPAAREAAPGRRPDAAVVDKHAEQLAKVLDVYERTSPATSTSPGTSSRSPTPTTRSYLLYLSKTPRPARRRPPHVKAWWEAIVARPAFQKTVAAIPLPPPPSSSA

SEQ ID NO: 14858 - protein, 212 aa, Zea mays subsp. mays
  peptide (1)..(212): Ceres Seq. ID no. 13589093
  misc_feature (1)..(212): Homolog of NCBI NO: 66616 NR Description: glutathione transferase (EC 2.5.1.18) III
  misc_feature (1)..(212): Homolog of NCBI NO: 25287128 NR Description: glutathione transferase (EC 2.5.1.18) III(a) - maize >gi|4468792|emb|CAB38118.1| Glutathione transferase
  misc_feature (1)..(212): Homolog of NCBI NO: 25287127 NR Description: glutathione transferase (EC 2.5.1.18) III(b) - maize >gi|4468794|emb|CAB38119.1| Glutathione transferase
  misc_feature (1)..(208): Homolog of NCBI NO: 3891593 NR Description: Structure Of Glutathione S-Transferase Iii In Apo
  misc_feature (1)..(212): Homolog of NCBI NO: 1170090 NR Description: GLUTATHIONE S-TRANSFERASE III (GST-III) (GST
  misc_feature (1)..(206): Homolog of NCBI NO: 34907162 NR Description: putative glutathione S-transferase [Oryza sativa
  misc_feature (1)..(206): Homolog of NCBI NO: 11177843 NR Description: putative glutathione S-transferase OsGSTF4 [Oryza
  misc_feature (1)..(206): Homolog of NCBI NO: 23504745 NR Description: glutathione transferase F5 [Triticum aestivum]
  misc_feature (1)..(198): Homolog of NCBI NO: 18150415 NR Description: glutathione S-transferase [Allium cepa]
  misc_feature (1)..(206): Homolog of NCBI NO: 25287121 NR Description: glutathione transferase (EC 2.5.1.18) GST2d - Alopecurus myosuroides >gi|4127372|emb|CAA09193.1| glutathione
MPLSPNVVRVATVLNEKGLDFEIVPVDLTTGAHKQPDFLALNPFGQIPALVDGDEVLFESRAINRYIASKYASEGTDLLPATASAAKLEVWLEVESHHFYPNRVAAGVPAAREAAPGRRPDAAVVDKHAEQLAKVLDVYERTSPATSTSPGTSSRSPTPTTRSYLLYLSKTPRPARRRPPHVKAWWEAIVARPAFQKTVAAIPLPPPPSSSA

SEQ ID NO: 14859 - DNA, 468 bp, Zea mays subsp. mays
  misc_feature (1)..(468): Ceres Seq. ID no. 4581778
  misc_feature: MA Experiment ID: 108528 Result: Down-regulated in Transcription
  misc_feature: MA Experiment 108528 PARAMETER Experiment Name: Zm_Imbibed_Seeds_P Parameter: Age (day) Value: 5 vs. 2
  misc_feature: MA Experiment 108528 PARAMETER Experiment Name: Zm_Imbibed_Seeds_P Parameter: Organism Value: Zea mays
  misc_feature: MA Experiment 108528 PARAMETER Experiment Name: Zm_Imbibed_Seeds_P Parameter: Plant Line Value: 35A19
  misc_feature: MA Experiment 108528 PARAMETER Experiment Name: Zm_Imbibed_Seeds_P Parameter: Tissue Value: Aerial vs. Embryo
  misc_feature: MA Experiment ID: 108530 Result: Down-regulated in Transcription
  misc_feature: MA Experiment 108530 PARAMETER Experiment Name: Zm_Imbibed_Seeds_P Parameter: Age (day) Value: 6 vs. 2
  misc_feature: MA Experiment 108530 PARAMETER Experiment Name: Zm_Imbibed_Seeds_P Parameter: Organism Value: Zea mays
  misc_feature: MA Experiment 108530 PARAMETER Experiment Name: Zm_Imbibed_Seeds_P Parameter: Plant Line Value: 35A19
  misc_feature: MA Experiment 108530 PARAMETER Experiment Name: Zm_Imbibed_Seeds_P Parameter: Tissue Value: Aerial vs. Embryo
  misc_feature: MA Experiment ID: 108535 Result: Up-regulated in Transcription
  misc_feature: MA Experiment 108535 PARAMETER Experiment Name: Zm_Meristem_P Parameter: Age (day) Value: 8
  misc_feature: MA Experiment 108535 PARAMETER Experiment Name: Zm_Meristem_P Parameter: Organism Value: Zea mays
  misc_feature: MA Experiment 108535 PARAMETER Experiment Name: Zm_Meristem_P Parameter: Plant Line Value: 35A19
  misc_feature: MA Experiment 108535 PARAMETER Experiment Name: Zm_Meristem_P Parameter: Tissue Value: Root Meristem vs. Above Root Meristem
  misc_feature: MA Experiment ID: 108543 Result: Up-regulated in Transcription
  misc_feature: MA Experiment ID: 108556 Result: Down-regulated in Transcription
  misc_feature: MA Experiment 108556 PARAMETER Experiment Name: Zm_Drought_P Parameter: Age (day) Value: 9
  misc_feature: MA Experiment 108556 PARAMETER Experiment Name: Zm_Drought_P Parameter: Organism Value: Zea mays
  misc_feature: MA Experiment 108556 PARAMETER Experiment Name: Zm_Drought_P Parameter: Plant Line Value: 35A19
  misc_feature: MA Experiment 108556 PARAMETER Experiment Name: Zm_Drought_P Parameter: Timepoint (hr) Value: 24
  misc_feature: MA Experiment 108556 PARAMETER Experiment Name: Zm_Drought_P Parameter: Tissue Value: Aerial
  misc_feature: MA Experiment 108556 PARAMETER Experiment Name: Zm_Drought_P Parameter: Treatment Value: Drought vs. No Drought
  misc_feature: MA Experiment ID: 20000108 Result: Up-regulated in Transcription
  misc_feature: MA Experiment 20000108 PARAMETER Experiment Name: Zm_Root-Tips_P Parameter: Age (day) Value: 12
  misc_feature: MA Experiment 20000108 PARAMETER Experiment Name: Zm_Root-Tips_P Parameter: Organism Value: Zea mays
  misc_feature: MA Experiment 20000108 PARAMETER Experiment Name: Zm_Root-Tips_P Parameter: Tissue Value: Root tips vs. Root mid region    35
  misc_feature: MA Experiment 20000108 PARAMETER Experiment Name: Zm_Root-Tips_P Parameter: Tissue Value: Root tips vs. Root mid region   Sequence Listing-Misc Features (4)
  misc_feature: MA Experiment ID: 20000477 Result: Down-regulated in Transcription
  misc_feature: MA Experiment 20000477 PARAMETER Experiment Name: Zm_5mM_SA_P Parameter: Age (day) Value: 10
  misc_feature: MA Experiment 20000477 PARAMETER Experiment Name: Zm_5mM_SA_P Parameter: Organism Value: Zea mays
  misc_feature: MA Experiment 20000477 PARAMETER Experiment Name: Zm_5mM_SA_P Parameter: Plant Line Value: 35A19
  misc_feature: MA Experiment 20000477 PARAMETER Experiment Name: Zm_5mM_SA_P Parameter: Timepoint (hr) Value: 48
  misc_feature: MA Experiment 20000477 PARAMETER Experiment Name: Zm_5mM_SA_P Parameter: Tissue Value: Aerial
  misc_feature: MA Experiment 20000477 PARAMETER Experiment Name: Zm_5mM_SA_P Parameter: Treatment Value: 5mM SA vs. No Treatment
  misc_feature: MA Experiment ID: 20000478 Result: Down-regulated in Transcription
  misc_feature: MA Experiment 20000478 PARAMETER Experiment Name: Zm_5mM_SA_P Parameter: Age (day) Value: 11
  misc_feature: MA Experiment 20000478 PARAMETER Experiment Name: Zm_5mM_SA_P Parameter: Organism Value: Zea mays
  misc_feature: MA Experiment 20000478 PARAMETER Experiment Name: Zm_5mM_SA_P Parameter: Plant Line Value: 35A19
  misc_feature: MA Experiment 20000478 PARAMETER Experiment Name: Zm_5mM_SA_P Parameter: Timepoint (hr) Value: 72
  misc_feature: MA Experiment 20000478 PARAMETER Experiment Name: Zm_5mM_SA_P Parameter: Tissue Value: Aerial
  misc_feature: MA Experiment 20000478 PARAMETER Experiment Name: Zm_5mM_SA_P Parameter: Treatment Value: 5mM SA vs. No Treatment
  misc_feature: MA Experiment ID: 20000479 Result: Down-regulated in Transcription
  misc_feature: MA Experiment 20000479 PARAMETER Experiment Name: Zm_Drought_P Parameter: Age (day) Value: 10
  misc_feature: MA Experiment 20000479 PARAMETER Experiment Name: Zm_Drought_P Parameter: Organism Value: Zea mays
  misc_feature: MA Experiment 20000479 PARAMETER Experiment Name: Zm_Drought_P Parameter: Plant Line Value: 35A19
  misc_feature: MA Experiment 20000479 PARAMETER Experiment Name: Zm_Drought_P Parameter: Timepoint (hr) Value: 48
  misc_feature: MA Experiment 20000479 PARAMETER Experiment Name: Zm_Drought_P Parameter: Tissue Value: Aerial
  misc_feature: MA Experiment 20000479 PARAMETER Experiment Name: Zm_Drought_P Parameter: Treatment Value: Drought vs. No Drought
  misc_feature: MA Experiment ID: 20000533 Result: Down-regulated in Transcription
  misc_feature: MA Experiment 20000533 PARAMETER Experiment Name: Zm_0.001percent_MeJA_P Parameter: Age (day) Value: 11
  misc_feature: MA Experiment 20000533 PARAMETER Experiment Name: Zm_0.001percent_MeJA_P Parameter: Organism Value: Zea mays
  misc_feature: MA Experiment 20000533 PARAMETER Experiment Name: Zm_0.001percent_MeJA_P Parameter: Plant Line Value: 35A19
  misc_feature: MA Experiment 20000533 PARAMETER Experiment Name: Zm_0.001percent_MeJA_P Parameter: Timepoint (hr) Value: 72
  misc_feature: MA Experiment 20000533 PARAMETER Experiment Name: Zm_0.001percent_MeJA_P Parameter: Tissue Value: Aerial
  misc_feature: MA Experiment 20000533 PARAMETER Experiment Name: Zm_0.001percent_MeJA_P Parameter: Treatment Value: 0.001percent MeJA vs. No Treatment
  misc_feature: MA Experiment ID: 20000535 Result: Up-regulated in Transcription
  misc_feature: MA Experiment 20000535 PARAMETER Experiment Name: Zm_Hybrid_Seed_Dev_P Parameter: DAP Value: 30 vs. 12
  misc_feature: MA Experiment 20000535 PARAMETER Experiment Name: Zm_Hybrid_Seed_Dev_P Parameter: Organism Value: Zea mays
  misc_feature: MA Experiment 20000535 PARAMETER Experiment Name: Zm_Hybrid_Seed_Dev_P Parameter: Plant Line Value: 35A19
  misc_feature: MA Experiment 20000535 PARAMETER Experiment Name: Zm_Hybrid_Seed_Dev_P Parameter: Tissue Value: Embryo vs. Unfert Floret
gtttgttgagacaaccgttggctttgacaccatatgcaaggtgaacgcacaacttatcagcaatgtatgcactgatgctctatctgctgagaagtattactactttattcgcctgatgggacgcaaggcttctcatgtggcattggaatgtgctcttcaatcacatccaaacatggttatcctaggagaggaggtggctgcttccaaacttacaatttttgatattacgaagcagatttgtgatgcagttcaggcaagggctgaaaaagacaagaaccatggggttattcttattcctgagggccttgtggagagtattcctgaactatatgctctgcttcaggaaatccatggcctccatggcaaaggtgtttctgttgagaatatctcttctcagctttcaccttgggcatctgcactctttgagtttttgcccccttttatcaggaagcagctactactacatcc

SEQ ID NO: 14860 - protein, 155 aa, Zea mays subsp. mays
  peptide (1)..(155): Ceres Seq. ID no. 4581779
  misc_feature (1)..(142): Pfam Name: Phosphofructokinase Pfam Description: Phosphofructokinase
  misc_feature (1)..(154): Homolog of NCBI NO: 3790102 NR Description: pyrophosphate-dependent phosphofructokinase alpha
  misc_feature (1)..(154): Homolog of NCBI NO: 2499488 NR Description: Pyrophosphate--fructose 6-phosphate
  misc_feature (1)..(154): Homolog of NCBI NO: 129881 NR Description: Pyrophosphate--fructose 6-phosphate
  misc_feature (1)..(154): Homolog of NCBI NO: 15223082 NR Description: putative pyrophosphate-dependent alpha subunit; protein id: At1g76550.1 [Arabidopsis thaliana]
  misc_feature (1)..(154): Homolog of NCBI NO: 15218074 NR Description: putative pyrophosphate-dependent alpha subunit; protein id: At1g20950.1, supported by cDNA:
  misc_feature (1)..(154): Homolog of NCBI NO: 29647436 NR Description: putative pyrophosphate--fructose 6-phosphate 1-
  misc_feature (1)..(154): Homolog of NCBI NO: 29367525 NR Description: fructose-6-phosphate 1-phosphotransferase [Oryza
  misc_feature (2)..(154): Homolog of NCBI NO: 100462 NR Description: diphosphate-fructose-6-phosphate
  misc_feature (2)..(154): Homolog of NCBI NO: 2507174 NR Description: PYROPHOSPHATE--FRUCTOSE 6-PHOSPHATE
  misc_feature (2)..(154): Homolog of NCBI NO: 2499489 NR Description: Pyrophosphate--fructose 6-phosphate
FVETTVGFDTICKVNAQLISNVCTDALSAEKYYYFIRLMGRKASHVALECALQSHPNMVILGEEVAASKLTIFDITKQICDAVQARAEKDKNHGVILIPEGLVESIPELYALLQEIHGLHGKGVSVENISSQLSPWASALFEFLPPFIRKQLLLH

SEQ ID NO: 14861 - protein, 117 aa, Zea mays subsp. mays
  peptide (1)..(117): Ceres Seq. ID no. 4581780
  misc_feature (1)..(104): Pfam Name: Phosphofructokinase Pfam Description: Phosphofructokinase
  misc_feature (1)..(116): Homolog of NCBI NO: 3790102 NR Description: pyrophosphate-dependent phosphofructokinase alpha
  misc_feature (1)..(116): Homolog of NCBI NO: 2499488 NR Description: Pyrophosphate--fructose 6-phosphate
  misc_feature (1)..(116): Homolog of NCBI NO: 129881 NR Description: Pyrophosphate--fructose 6-phosphate
  misc_feature (1)..(116): Homolog of NCBI NO: 15223082 NR Description: putative pyrophosphate-dependent alpha subunit; protein id: At1g76550.1 [Arabidopsis thaliana]
  misc_feature (1)..(116): Homolog of NCBI NO: 15218074 NR Description: putative pyrophosphate-dependent alpha subunit; protein id: At1g20950.1, supported by cDNA:
  misc_feature (1)..(116): Homolog of NCBI NO: 29647436 NR Description: putative pyrophosphate--fructose 6-phosphate 1-
  misc_feature (1)..(116): Homolog of NCBI NO: 29367525 NR Description: fructose-6-phosphate 1-phosphotransferase [Oryza
  misc_feature (1)..(116): Homolog of NCBI NO: 100462 NR Description: diphosphate-fructose-6-phosphate
  misc_feature (1)..(116): Homolog of NCBI NO: 2507174 NR Description: PYROPHOSPHATE--FRUCTOSE 6-PHOSPHATE
  misc_feature (1)..(116): Homolog of NCBI NO: 2499489 NR Description: Pyrophosphate--fructose 6-phosphate
MGRKASHVALECALQSHPNMVILGEEVAASKLTIFDITKQICDAVQARAEKDKNHGVILIPEGLVESIPELYALLQEIHGLHGKGVSVENISSQLSPWASALFEFLPPFIRKQLLLH

SEQ ID NO: 14862 - protein, 98 aa, Zea mays subsp. mays
  peptide (1)..(98): Ceres Seq. ID no. 4581781
  misc_feature (1)..(85): Pfam Name: Phosphofructokinase Pfam Description: Phosphofructokinase
  misc_feature (1)..(97): Homolog of NCBI NO: 3790102 NR Description: pyrophosphate-dependent phosphofructokinase alpha
  misc_feature (1)..(97): Homolog of NCBI NO: 2499488 NR Description: Pyrophosphate--fructose 6-phosphate
  misc_feature (1)..(97): Homolog of NCBI NO: 129881 NR Description: Pyrophosphate--fructose 6-phosphate
  misc_feature (1)..(97): Homolog of NCBI NO: 15223082 NR Description: putative pyrophosphate-dependent alpha subunit; protein id: At1g76550.1 [Arabidopsis thaliana]
  misc_feature (1)..(97): Homolog of NCBI NO: 15218074 NR Description: putative pyrophosphate-dependent alpha subunit; protein id: At1g20950.1, supported by cDNA:
  misc_feature (1)..(97): Homolog of NCBI NO: 29647436 NR Description: putative pyrophosphate--fructose 6-phosphate 1-
  misc_feature (1)..(97): Homolog of NCBI NO: 29367525 NR Description: fructose-6-phosphate 1-phosphotransferase [Oryza
  misc_feature (1)..(97): Homolog of NCBI NO: 100462 NR Description: diphosphate-fructose-6-phosphate
  misc_feature (1)..(97): Homolog of NCBI NO: 2507174 NR Description: PYROPHOSPHATE--FRUCTOSE 6-PHOSPHATE
  misc_feature (1)..(97): Homolog of NCBI NO: 2499489 NR Description: Pyrophosphate--fructose 6-phosphate
MVILGEEVAASKLTIFDITKQICDAVQARAEKDKNHGVILIPEGLVESIPELYALLQEIHGLHGKGVSVENISSQLSPWASALFEFLPPFIRKQLLLH

SEQ ID NO: 14863 - DNA, 626 bp, Zea mays subsp. mays
  misc_feature (1)..(626): Ceres Seq. ID no. 12469393
  misc_feature: MA Experiment ID: 108523 Result: Down-regulated in Transcription
  misc_feature: MA Experiment 108523 PARAMETER Experiment Name: Zm_42deg_Heat_P Parameter: Age (day) Value: 8
  misc_feature: MA Experiment 108523 PARAMETER Experiment Name: Zm_42deg_Heat_P Parameter: Organism Value: Zea mays
  misc_feature: MA Experiment 108523 PARAMETER Experiment Name: Zm_42deg_Heat_P Parameter: Plant Line Value: 35A19
  misc_feature: MA Experiment 108523 PARAMETER Experiment Name: Zm_42deg_Heat_P Parameter: Temperature (deg C) Value: 42 vs. 22
  misc_feature: MA Experiment 108523 PARAMETER Experiment Name: Zm_42deg_Heat_P Parameter: Timepoint (hr) Value: 6
  misc_feature: MA Experiment 108523 PARAMETER Experiment Name: Zm_42deg_Heat_P Parameter: Tissue Value: Aerial
  misc_feature: MA Experiment ID: 108527 Result: Down-regulated in Transcription
  misc_feature: MA Experiment 108527 PARAMETER Experiment Name: Zm_5mM_NO_P Parameter: Age (day) Value: 8
  misc_feature: MA Experiment 108527 PARAMETER Experiment Name: Zm_5mM_NO_P Parameter: Organism Value: Zea mays
  misc_feature: MA Experiment 108527 PARAMETER Experiment Name: Zm_5mM_NO_P Parameter: Plant Line Value: 35A19
  misc_feature: MA Experiment 108527 PARAMETER Experiment Name: Zm_5mM_NO_P Parameter: Timepoint (hr) Value: 6
  misc_feature: MA Experiment 108527 PARAMETER Experiment Name: Zm_5mM_NO_P Parameter: Tissue Value: Aerial
  misc_feature: MA Experiment 108527 PARAMETER Experiment Name: Zm_5mM_NO_P Parameter: Treatment Value: 5mM NO vs. No Treatment
attatgtagagacatttcaagaaagataatgcgaggtatagccttggctttgggaggggcaattgatgcttttgaaggggatacagctggagatcctttctgggtgttaaggttgattggttatcccgtagatattccagaagagcagcgcactgatactggctgtggagctcatacagattatggacttctaacactggttaaccaggatgatgacatatgtgcccttgaggtgcaaaatcgttctggtgagtggatatatgcaacgccgattcccggaacctttgtttgtaacatcggtgacatgctgaaggtttggacaaatggaatatatcagcccacccttcacagagttgtcaacaattcccagcattaccgtgtatctgttgcattcttctacgagtccaacttcgatgctgcagtagagcctgttgagttctgccgggagaaaaccggcggcgctgctaagtacgaaaaggttgtgtacggggagcatttggttcagaaagtattgacgaacttcgtcatgtaaatttgctaagtacgacaaataaatntgcattgcagcatcagaactccagacctatttggtgtgtagtgctgtaccagaaaggtagtaacggact

SEQ ID NO: 14864 - protein, 176 aa, Zea mays subsp. mays
  peptide (1)..(176): Ceres Seq. ID no. 12469394
  misc_feature (32)..(134): Pfam Name: 2OG-Fe(II) oxygenase superfamily Pfam Description: 2OG-Fe(II) oxygenase superfamily
  misc_feature (1)..(174): Homolog of NCBI NO: 6984228 NR Description: putative flavonol synthase-like protein
  misc_feature (1)..(176): Homolog of NCBI NO: 18409039 NR Description: flavonol synthase - like protein; protein id:
  misc_feature (1)..(176): Homolog of NCBI NO: 21554579 NR Description: flavonol synthase-like protein [Arabidopsis
  misc_feature (1)..(174): Homolog of NCBI NO: 11255891 NR Description: hypothetical protein T9C5.210 - Arabidopsis >gi|6561962|emb|CAB62466.1| putative protein [Arabidopsis
  misc_feature (1)..(174): Homolog of NCBI NO: 19423910 NR Description: unknown protein [Arabidopsis thaliana]
  misc_feature (1)..(174): Homolog of NCBI NO: 22331716 NR Description: oxidoreductase (din11), putative; protein id: [Arabidopsis thaliana] >gi|24030245|gb|AAN41298.1| unknown
  misc_feature (1)..(174): Homolog of NCBI NO: 15229181 NR Description: putative protein; protein id: At3g49630.1
  misc_feature (1)..(176): Homolog of NCBI NO: 11255902 NR Description: flavonol synthase-like protein - Arabidopsis
  misc_feature (5)..(145): Homolog of NCBI NO: 23130050 NR Description: hypothetical protein [Nostoc punctiforme]
  misc_feature (5)..(174): Homolog of NCBI NO: 15599386 NR Description: probable iron/ascorbate oxidoreductase aeruginosa PA01] >gi|11351420|pir||E83122 probable iron/ascorbate
LCRDISRKIMRGIALALGGAIDAFEGDTAGDPFWVLRLIGYPVDIPEEQRTDTGCGAHTDYGLLTLVNQDDDICALEVQNRSGEWIYATPIPGTFVCNIGDMLKVWTNGIYQPTLHRVVNNSQHYRVSVAFFYESNFDAAVEPVEFCREKTGGAAKYEKVVYGEHLVQKVLTNFVM

SEQ ID NO: 14865 - protein, 167 aa, Zea mays subsp. mays
  peptide (1)..(167): Ceres Seq. ID no. 12469395
  misc_feature (23)..(125): Pfam Name: 2OG-Fe(II) oxygenase superfamily Pfam Description: 2OG-Fe(II) oxygenase superfamily
  misc_feature (1)..(165): Homolog of NCBI NO: 6984228 NR Description: putative flavonol synthase-like protein
  misc_feature (1)..(167): Homolog of NCBI NO: 18409039 NR Description: flavonol synthase - like protein; protein id:
  misc_feature (1)..(167): Homolog of NCBI NO: 21554579 NR Description: flavonol synthase-like protein [Arabidopsis
  misc_feature (1)..(165): Homolog of NCBI NO: 11255891 NR Description: hypothetical protein T9C5.210 - Arabidopsis >gi|6561962|emb|CAB62466.1| putative protein [Arabidopsis
  misc_feature (1)..(165): Homolog of NCBI NO: 19423910 NR Description: unknown protein [Arabidopsis thaliana]
  misc_feature (1)..(165): Homolog of NCBI NO: 22331716 NR Description: oxidoreductase (din11), putative; protein id: [Arabidopsis thaliana] >gi|24030245|gb|AAN41298.1| unknown
  misc_feature (1)..(165): Homolog of NCBI NO: 15229181 NR Description: putative protein; protein id: At3g49630.1
  misc_feature (1)..(167): Homolog of NCBI NO: 11255902 NR Description: flavonol synthase-like protein - Arabidopsis
  misc_feature (1)..(136): Homolog of NCBI NO: 23130050 NR Description: hypothetical protein [Nostoc punctiforme]
  misc_feature (1)..(165): Homolog of NCBI NO: 15599386 NR Description: probable iron/ascorbate oxidoreductase aeruginosa PA01] >gi|11351420|pir||E83122 probable iron/ascorbate
MRGIALALGGAIDAFEGDTAGDPFWVLRLIGYPVDIPEEQRTDTGCGAHTDYGLLTLVNQDDDICALEVQNRSGEWIYATPIPGTFVCNIGDMLKVWTNGIYQPTLHRVVNNSQHYRVSVAFFYESNFDAAVEPVEFCREKTGGAAKYEKVVYGEHLVQKVLTNFVM

SEQ ID NO: 14866 - DNA, 519 bp, Zea mays subsp. mays
  misc_feature (1)..(519): Ceres Seq. ID no. 4488403
  misc_feature: MA Experiment ID: 108522 Result: Down-regulated in Transcription
  misc_feature: MA Experiment 108522 PARAMETER Experiment Name: Zm_42deg_Heat_P Parameter: Age (day) Value: 8
  misc_feature: MA Experiment 108522 PARAMETER Experiment Name: Zm_42deg_Heat_P Parameter: Organism Value: Zea mays
  misc_feature: MA Experiment 108522 PARAMETER Experiment Name: Zm_42deg_Heat_P Parameter: Plant Line Value: 35A19
  misc_feature: MA Experiment 108522 PARAMETER Experiment Name: Zm_42deg_Heat_P Parameter: Temperature (deg C) Value: 42 vs. 22
  misc_feature: MA Experiment 108522 PARAMETER Experiment Name: Zm_42deg_Heat_P Parameter: Timepoint (hr) Value: 1
  misc_feature: MA Experiment 108522 PARAMETER Experiment Name: Zm_42deg_Heat_P Parameter: Tissue Value: Aerial
  misc_feature: MA Experiment ID: 108535 Result: Up-regulated in Transcription
  misc_feature: MA Experiment 108535 PARAMETER Experiment Name: Zm_Meristem_P Parameter: Age (day) Value: 8
  misc_feature: MA Experiment 108535 PARAMETER Experiment Name: Zm_Meristem_P Parameter: Organism Value: Zea mays
  misc_feature: MA Experiment 108535 PARAMETER Experiment Name: Zm_Meristem_P Parameter: Plant Line Value: 35A19
  misc_feature: MA Experiment 108535 PARAMETER Experiment Name: Zm_Meristem_P Parameter: Tissue Value: Root Meristem vs. Above Root Meristem
  misc_feature: MA Experiment ID: 20000487 Result: Up-regulated in Transcription
  misc_feature: MA Experiment 20000487 PARAMETER Experiment Name: Zm_50mM_NH4NO3_L_to_H_P Parameter: Organism Value: Zea mays
  misc_feature: MA Experiment 20000487 PARAMETER Experiment Name: Zm_50mM_NH4NO3_L_to_H_P Parameter: Timepoint (hr) Value: 4
  misc_feature: MA Experiment 20000487 PARAMETER Experiment Name: Zm_50mM_NH4NO3_L_to_H_P Parameter: Tissue Value: Leaves
  misc_feature: MA Experiment 20000487 PARAMETER Experiment Name: Zm_50mM_NH4NO3_L_to_H_P Parameter: Treatment Value: 50mM NH4NO3 vs. 100mM Mannitol
agatcaggatccattaacacccctacgtacgcctttcctctggaaacccttctctcgcctgcctctcccccgccgcgccgccacttcccctctcccgtcaactccggcttccgcgcgaggtcgagctagcgtttggagttctcgagacctgctgtgatggcgacagagcaagcggcggagaactacacggtggaggacctcgtggccctgaacccctacaaccccgacatcctcmacgacctcgagaagttcgtcaatgagcaggtctcatctcagacatataacttggatgcaaatctcagccttcttcgcttgtaccagtttgagccagaaaggatgagcatacagattgtggcccacatactgattaagcaaatggaggagcaattcaaggtattgatagttctttctcactacctagagactgctaggttcagtcaattttgggatgaagcagcaaagaaccgccacatatcggaagcagtgccaggtttcgaacaagcaatccaatcctatgcg

SEQ ID NO: 14867 - protein, 121 aa, Zea mays subsp. mays
  peptide (1)..(121): Ceres Seq. ID no. 4488404
  misc_feature (5)..(74): Pfam Name: Eukaryotic translation initiation factor 3 Pfam Description: Eukaryotic translation initiation factor 3
  misc_feature (5)..(74): Homolog of NCBI NO: 15234123 NR Description: putative protein; protein id: At4g33250.1, by cDNA: gi_12407752, supported by cDNA: gi_14335023, supported cDNA: gi_15292988, supported by cDNA: gi_20147104, supported by
  misc_feature (73)..(120): Homolog of NCBI NO: 15234123 NR Description: putative protein; protein id: At4g33250.1, by cDNA: gi_12407752, supported by cDNA: gi_14335023, supported cDNA: gi_15292988, supported by cDNA: gi_20147104, supported by
  misc_feature (1)..(74): Homolog of NCBI NO: 23396617 NR Description: Eukaryotic translation initiation factor 3
  misc_feature (12)..(120): Homolog of NCBI NO: 23396617 NR Description: Eukaryotic translation initiation factor 3
  misc_feature (15)..(74): Homolog of NCBI NO: 10801345 NR Description: muscle specific gene [Homo sapiens]
  misc_feature (15)..(74): Homolog of NCBI NO: 21312044 NR Description: RIKEN cDNA 1200009C21 [Mus musculus]
  misc_feature (15)..(74): Homolog of NCBI NO: 27730981 NR Description: similar to RIKEN cDNA 1200009C21 [Mus musculus]
  misc_feature (73)..(120): Homolog of NCBI NO: 10801345 NR Description: muscle specific gene [Homo sapiens]
  misc_feature (73)..(120): Homolog of NCBI NO: 21312044 NR Description: RIKEN cDNA 1200009C21 [Mus musculus]
  misc_feature (73)..(120): Homolog of NCBI NO: 27730981 NR Description: similar to RIKEN cDNA 1200009C21 [Mus musculus]
  misc_feature (27)..(27): Xaa is any aa, unknown or other
MATEQAAENYTVEDLVALNPYNPDILXDLEKFVNEQVSSQTYNLDANLSLLRLYQFEPERMSIQIVAHILIKQMEEQFKVLIVLSHYLETARFSQFWDEAAKNRHISEAVPGFEQAIQSYA

SEQ ID NO: 14868 - protein, 61 aa, Zea mays subsp. mays
  peptide (1)..(61): Ceres Seq. ID no. 4488405
  misc_feature (13)..(60): Homolog of NCBI NO: 15234123 NR Description: putative protein; protein id: At4g33250.1, by cDNA: gi_12407752, supported by cDNA: gi_14335023, supported cDNA: gi_15292988, supported by cDNA: gi_20147104, supported by
  misc_feature (1)..(14): Homolog of NCBI NO: 23396617 NR Description: Eukaryotic translation initiation factor 3
  misc_feature (1)..(60): Homolog of NCBI NO: 23396617 NR Description: Eukaryotic translation initiation factor 3
  misc_feature (1)..(14): Homolog of NCBI NO: 10801345 NR Description: muscle specific gene [Homo sapiens]
  misc_feature (1)..(14): Homolog of NCBI NO: 21312044 NR Description: RIKEN cDNA 1200009C21 [Mus musculus]
  misc_feature (1)..(14): Homolog of NCBI NO: 27730981 NR Description: similar to RIKEN cDNA 1200009C21 [Mus musculus]
  misc_feature (13)..(60): Homolog of NCBI NO: 10801345 NR Description: muscle specific gene [Homo sapiens]
  misc_feature (13)..(60): Homolog of NCBI NO: 21312044 NR Description: RIKEN cDNA 1200009C21 [Mus musculus]
  misc_feature (13)..(60): Homolog of NCBI NO: 27730981 NR Description: similar to RIKEN cDNA 1200009C21 [Mus musculus]
  misc_feature (1)..(14): Homolog of NCBI NO: 15234123 NR Description: putative protein; protein id: At4g33250.1, by cDNA: gi_12407752, supported by cDNA: gi_14335023, supported cDNA: gi_15292988, supported by cDNA: gi_20147104, supported by
MSIQIVAHILIKQMEEQFKVLIVLSHYLETARFSQFWDEAAKNRHISEAVPGFEQAIQSYA

SEQ ID NO: 14869 - DNA, 487 bp, Zea mays subsp. mays
  misc_feature (1)..(487): Ceres Seq. ID no. 13586835
  misc_feature: MA Experiment ID: 108543 Result: Up-regulated in Transcription
  misc_feature: MA Experiment ID: 108597 Result: Up-regulated in Transcription
  misc_feature: MA Experiment 108597 PARAMETER Experiment Name: Zm_100uM_ABA_P Parameter: Age (day) Value: 9
  misc_feature: MA Experiment 108597 PARAMETER Experiment Name: Zm_100uM_ABA_P Parameter: Organism Value: Zea mays
  misc_feature: MA Experiment 108597 PARAMETER Experiment Name: Zm_100uM_ABA_P Parameter: Plant Line Value: 35A19
  misc_feature: MA Experiment 108597 PARAMETER Experiment Name: Zm_100uM_ABA_P Parameter: Timepoint (hr) Value: 24
  misc_feature: MA Experiment 108597 PARAMETER Experiment Name: Zm_100uM_ABA_P Parameter: Tissue Value: Aerial
  misc_feature: MA Experiment 108597 PARAMETER Experiment Name: Zm_100uM_ABA_P Parameter: Treatment Value: 100uM ABA vs. No Treatment
  misc_feature: MA Experiment ID: 20000487 Result: Up-regulated in Transcription
  misc_feature: MA Experiment 20000487 PARAMETER Experiment Name: Zm_50mM_NH4NO3_L_to_H_P Parameter: Organism Value: Zea mays
  misc_feature: MA Experiment 20000487 PARAMETER Experiment Name: Zm_50mM_NH4NO3_L_to_H_P Parameter: Timepoint (hr) Value: 4
  misc_feature: MA Experiment 20000487 PARAMETER Experiment Name: Zm_50mM_NH4NO3_L_to_H_P Parameter: Tissue Value: Leaves
  misc_feature: MA Experiment 20000487 PARAMETER Experiment Name: Zm_50mM_NH4NO3_L_to_H_P Parameter: Treatment Value: 50mM NH4NO3 vs. 100mM Mannitol
  misc_feature: MA Experiment ID: 20000633 Result: Down-regulated in Transcription
  misc_feature: MA Experiment 20000633 PARAMETER Experiment Name: Zm_Herbicide-Treatments_P Parameter: Timepoint (hr) Value: 4
  misc_feature: MA Experiment 20000633 PARAMETER Experiment Name: Zm_Herbicide-Treatments_P Parameter: Tissue Value: Aerial
  misc_feature: MA Experiment 20000633 PARAMETER Experiment Name: Zm_Herbicide-Treatments_P Parameter: Treatment Value: Trimec vs. No Treatment
  misc_feature: MA Experiment ID: 20001613 Result: Up-regulated in Transcription
  misc_feature: MA Experiment 20001613 PARAMETER Experiment Name: Zm_50ppm_KNO3_L-to-H_P Parameter: Age (day) Value: 20
  misc_feature: MA Experiment 20001613 PARAMETER Experiment Name: Zm_50ppm_KNO3_L-to-H_P Parameter: Organism Value: Zea mays
  misc_feature: MA Experiment 20001613 PARAMETER Experiment Name: Zm_50ppm_KNO3_L-to-H_P Parameter: Plant Line Value: 35A19
  misc_feature: MA Experiment 20001613 PARAMETER Experiment Name: Zm_50ppm_KNO3_L-to-H_P Parameter: Timepoint (hr) Value: 24
  misc_feature: MA Experiment 20001613 PARAMETER Experiment Name: Zm_50ppm_KNO3_L-to-H_P Parameter: Tissue Value: Roots
  misc_feature: MA Experiment 20001613 PARAMETER Experiment Name: Zm_50ppm_KNO3_L-to-H_P Parameter: Treatment Value: 50ppm KNO3 vs. 50ppm KCl
ataattttgggcattaattgcacgtctcctccccacctctccttccctccacccgtgccgtcgcctcgcctatccgatctgccacctcctcccgtctcgcacgttccttcccaactccgcagcgtagcctctccgcggcgcgatccagatccaggtttttcagcatgggcctggtgaaggaaggcatcgacatggaggagggaacccttgagatcggcatggagtacaggactgtatctggtgttgctgggcctctggtcatattggataaagtaaagggcccaaagtaccaagaaattgtaaacatccgacttggagatggcaccaatcgccgtggtcaagtcctggaagttgatggcgaaaaagctgttgtgcaggtctttgaaggaacttctggaatagacaacaaatacacaaccgtgcagtttacaggcgaggttttgaaaactcctgtctcacttgatatgcttgggcgcatttttaatgg

SEQ ID NO: 14870 - protein, 107 aa, Zea mays subsp. mays
  peptide (1)..(107): Ceres Seq. ID no. 13586836
  misc_feature (24)..(90): Pfam Name: ATP synthase alpha/beta family, beta-barrel domain Pfam Description: ATP synthase alpha/beta family, beta-barrel
  misc_feature (1)..(106): Homolog of NCBI NO: 2493131 NR Description: Vacuolar ATP synthase subunit B isoform 1 B subunit 1) (Vacuolar proton pump B subunit 1)
  misc_feature (1)..(106): Homolog of NCBI NO: 14150751 NR Description: vacuolar ATPase B subunit [Oryza sativa]
  misc_feature (1)..(106): Homolog of NCBI NO: 6715512 NR Description: vacuolar H+-ATPase B subunit [Nicotiana tabacum]
  misc_feature (1)..(106): Homolog of NCBI NO: 2493129 NR Description: Vacuolar ATP synthase subunit B isoform 1 B subunit 1) (Vacuolar proton pump B subunit 1)
  misc_feature (3)..(106): Homolog of NCBI NO: 17065080 NR Description: Unknown protein [Arabidopsis thaliana]
  misc_feature (3)..(106): Homolog of NCBI NO: 25290450 NR Description: hypothetical protein F14O10.13 - Arabidopsis >gi|9558599|gb|AAF88162.1|AC026234_13 Nearly identical to
  misc_feature (3)..(106): Homolog of NCBI NO: 22329688 NR Description: vacuolar H+-ATPase subunit B -related
  misc_feature (3)..(106): Homolog of NCBI NO: 34910488 NR Description: putative H+-transporting ATP synthase [Oryza
  misc_feature (9)..(106): Homolog of NCBI NO: 2493132 NR Description: Vacuolar ATP synthase subunit B isoform 2 B subunit 2) (Vacuolar proton pump B subunit 2)
  misc_feature (1)..(106): Homolog of NCBI NO: 6721533 NR Description: vacuolar H+-ATPase B subunit [Citrus unshiu]
MGLVKEGIDMEEGTLEIGMEYRTVSGVAGPLVILDKVKGPKYQEIVNIRLGDGTNRRGQVLEVDGEKAVVQVFEGTSGIDNKYTTVQFTGEVLKTPVSLDMLGRIFN

SEQ ID NO: 14871 - protein, 98 aa, Zea mays subsp. mays
  peptide (1)..(98): Ceres Seq. ID no. 13586837
  misc_feature (15)..(81): Pfam Name: ATP synthase alpha/beta family, beta-barrel domain Pfam Description: ATP synthase alpha/beta family, beta-barrel
  misc_feature (1)..(97): Homolog of NCBI NO: 2493131 NR Description: Vacuolar ATP synthase subunit B isoform 1 B subunit 1) (Vacuolar proton pump B subunit 1)
  misc_feature (1)..(97): Homolog of NCBI NO: 14150751 NR Description: vacuolar ATPase B subunit [Oryza sativa]
  misc_feature (1)..(97): Homolog of NCBI NO: 6715512 NR Description: vacuolar H+-ATPase B subunit [Nicotiana tabacum]
  misc_feature (1)..(97): Homolog of NCBI NO: 2493129 NR Description: Vacuolar ATP synthase subunit B isoform 1 B subunit 1) (Vacuolar proton pump B subunit 1)
  misc_feature (1)..(97): Homolog of NCBI NO: 17065080 NR Description: Unknown protein [Arabidopsis thaliana]
  misc_feature (1)..(97): Homolog of NCBI NO: 25290450 NR Description: hypothetical protein F14O10.13 - Arabidopsis >gi|9558599|gb|AAF88162.1|AC026234_13 Nearly identical to
  misc_feature (1)..(97): Homolog of NCBI NO: 22329688 NR Description: vacuolar H+-ATPase subunit B -related
  misc_feature (1)..(97): Homolog of NCBI NO: 34910488 NR Description: putative H+-transporting ATP synthase [Oryza
  misc_feature (1)..(97): Homolog of NCBI NO: 2493132 NR Description: Vacuolar ATP synthase subunit B isoform 2 B subunit 2) (Vacuolar proton pump B subunit 2)
  misc_feature (1)..(97): Homolog of NCBI NO: 6721533 NR Description: vacuolar H+-ATPase B subunit [Citrus unshiu]
MEEGTLEIGMEYRTVSGVAGPLVILDKVKGPKYQEIVNIRLGDGTNRRGQVLEVDGEKAVVQVFEGTSGIDNKYTTVQFTGEVLKTPVSLDMLGRIFN

SEQ ID NO: 14872 - protein, 89 aa, Zea mays subsp. mays
  peptide (1)..(89): Ceres Seq. ID no. 13586838
  misc_feature (6)..(72): Pfam Name: ATP synthase alpha/beta family, beta-barrel domain Pfam Description: ATP synthase alpha/beta family, beta-barrel
  misc_feature (1)..(88): Homolog of NCBI NO: 2493131 NR Description: Vacuolar ATP synthase subunit B isoform 1 B subunit 1) (Vacuolar proton pump B subunit 1)
  misc_feature (1)..(88): Homolog of NCBI NO: 14150751 NR Description: vacuolar ATPase B subunit [Oryza sativa]
  misc_feature (1)..(88): Homolog of NCBI NO: 6715512 NR Description: vacuolar H+-ATPase B subunit [Nicotiana tabacum]
  misc_feature (1)..(88): Homolog of NCBI NO: 2493129 NR Description: Vacuolar ATP synthase subunit B isoform 1 B subunit 1) (Vacuolar proton pump B subunit 1)
  misc_feature (1)..(88): Homolog of NCBI NO: 17065080 NR Description: Unknown protein [Arabidopsis thaliana]
  misc_feature (1)..(88): Homolog of NCBI NO: 22329688 NR Description: vacuolar H+-ATPase subunit B -related
  misc_feature (1)..(88): Homolog of NCBI NO: 25290450 NR Description: hypothetical protein F14O10.13 - Arabidopsis >gi|9558599|gb|AAF88162.1|AC026234_13 Nearly identical to
  misc_feature (1)..(88): Homolog of NCBI NO: 34910488 NR Description: putative H+-transporting ATP synthase [Oryza
  misc_feature (1)..(88): Homolog of NCBI NO: 2493132 NR Description: Vacuolar ATP synthase subunit B isoform 2 B subunit 2) (Vacuolar proton pump B subunit 2)
  misc_feature (1)..(88): Homolog of NCBI NO: 6721533 NR Description: vacuolar H+-ATPase B subunit [Citrus unshiu]
MEYRTVSGVAGPLVILDKVKGPKYQEIVNIRLGDGTNRRGQVLEVDGEKAVVQVFEGTSGIDNKYTTVQFTGEVLKTPVSLDMLGRIFN

SEQ ID NO: 14873 - DNA, 828 bp, Zea mays subsp. mays
  misc_feature (1)..(828): Ceres Seq. ID no. 12595473
  misc_feature: MA Experiment ID: 108532 Result: Up-regulated in Transcription
  misc_feature: MA Experiment 108532 PARAMETER Experiment Name: Zm_20uM_KNO3_H-to-L_P Parameter: Age (day) Value: 11
  misc_feature: MA Experiment 108532 PARAMETER Experiment Name: Zm_20uM_KNO3_H-to-L_P Parameter: Organism Value: Zea mays
  misc_feature: MA Experiment 108532 PARAMETER Experiment Name: Zm_20uM_KNO3_H-to-L_P Parameter: Plant Line Value: 35A19
  misc_feature: MA Experiment 108532 PARAMETER Experiment Name: Zm_20uM_KNO3_H-to-L_P Parameter: Timepoint (hr) Value: 16
  misc_feature: MA Experiment 108532 PARAMETER Experiment Name: Zm_20uM_KNO3_H-to-L_P Parameter: Tissue Value: Roots
  misc_feature: MA Experiment 108532 PARAMETER Experiment Name: Zm_20uM_KNO3_H-to-L_P Parameter: Treatment Value: 20uM KNO3 vs. 60mM KNO3
  misc_feature: MA Experiment ID: 20000535 Result: Up-regulated in Transcription
  misc_feature: MA Experiment 20000535 PARAMETER Experiment Name: Zm_Hybrid_Seed_Dev_P Parameter: DAP Value: 30 vs. 12
  misc_feature: MA Experiment 20000535 PARAMETER Experiment Name: Zm_Hybrid_Seed_Dev_P Parameter: Organism Value: Zea mays
  misc_feature: MA Experiment 20000535 PARAMETER Experiment Name: Zm_Hybrid_Seed_Dev_P Parameter: Plant Line Value: 35A19
  misc_feature: MA Experiment 20000535 PARAMETER Experiment Name: Zm_Hybrid_Seed_Dev_P Parameter: Tissue Value: Embryo vs. Unfert Floret
aaatccatgtactatgtttccacgtcatgcaacgcaacattccaaaaccatggatcatctataaatggctagctcccacatatgaactagtctctatcatcatccaatccagatcagcaaagcggcagtgcgtagagaggatcgtcgaacagaacagcatgaagatggtcatcgttctcgtcgtgtgcctggctctgtcagctgccagcgcctctgcaatgcagatgccctgcccctgcgcggggctgcagggcttgtacggcgctggcgccggcctgacgacgatgatgggcgccggcgggctgtacccctacgcggagtacctgaggcagccgcagtgcagcccgctggcggcggcgccctactacgccgggtgtgggcagccgagcgccatgttccagccgctccggcaacagtgctgccagcagcagatgaggatgatggacgtgcagtccgtcgcgcagcagctgcagatgatgatgcagcttgagcgtgccgctgccgccagcagcagcctgtacgagccagctctgatgcagcagcagcagcagctgctggcagcccagggtctcaaccccatggccatgatgatggcgcagaacatgccggccatgggtggactctaccagtaccagctgcccagctaccgcaccaacccctgtggcgtctccgctgccattccgccctactactgattcatgatatttgggaaatctcctctatccatctctctctatctatatatgtaataatgcagtaagacgacacacattatcatgtgtggtatgaccaataatatatgcatggtcataataaagttttggtttt

SEQ ID NO: 14874 - protein, 230 aa, Zea mays subsp. mays
  peptide (1)..(230): Ceres Seq. ID no. 12595474
  misc_feature (106)..(208): Pfam Name: Protease inhibitor/seed storage/LTP family Pfam Description: Protease inhibitor/seed storage/LTP family
  misc_feature (106)..(208): Pfam Name: Protease inhibitor/seed storage/LTP family Pfam Description: Protease inhibitor/seed storage/LTP family
  misc_feature (106)..(208): Pfam Name: Protease inhibitor/seed storage/LTP family Pfam Description: Protease inhibitor/seed storage/LTP family
  misc_feature (106)..(208): Pfam Name: Protease inhibitor/seed storage/LTP family Pfam Description: Protease inhibitor/seed storage/LTP family
  misc_feature (53)..(230): Homolog of NCBI NO: 16305115 NR Description: 15kD beta zein [Zea mays]
  misc_feature (53)..(230): Homolog of NCBI NO: 419803 NR Description: zein protein - maize >gi|168705|gb|AAA33543.1|
  misc_feature (53)..(230): Homolog of NCBI NO: 16305115 NR Description: 15kD beta zein [Zea mays]
  misc_feature (53)..(230): Homolog of NCBI NO: 168664 NR Description: zein protein precursor
  misc_feature (53)..(230): Homolog of NCBI NO: 16305115 NR Description: 15kD beta zein [Zea mays]
  misc_feature (53)..(230): Homolog of NCBI NO: 168664 NR Description: zein protein precursor
  misc_feature (53)..(230): Homolog of NCBI NO: 100552 NR Description: beta-coixin, 17K, precursor - Job's tears
  misc_feature (53)..(230): Homolog of NCBI NO: 141616 NR Description: ZEIN-BETA PRECURSOR (16 KD) (ZEIN 2) (CLONE 15A3)
  misc_feature (53)..(230): Homolog of NCBI NO: 168664 NR Description: zein protein precursor
  misc_feature (53)..(230): Homolog of NCBI NO: 419803 NR Description: zein protein - maize >gi|168705|gb|AAA33543.1|
  misc_feature (53)..(230): Homolog of NCBI NO: 16305115 NR Description: 15kD beta zein [Zea mays]
  misc_feature (53)..(230): Homolog of NCBI NO: 100552 NR Description: beta-coixin, 17K, precursor - Job's tears
  misc_feature (53)..(230): Homolog of NCBI NO: 141616 NR Description: ZEIN-BETA PRECURSOR (16 KD) (ZEIN 2) (CLONE 15A3)
  misc_feature (53)..(230): Homolog of NCBI NO: 419803 NR Description: zein protein - maize >gi|168705|gb|AAA33543.1|
  misc_feature (53)..(230): Homolog of NCBI NO: 100552 NR Description: beta-coixin, 17K, precursor - Job's tears
  misc_feature (53)..(230): Homolog of NCBI NO: 141616 NR Description: ZEIN-BETA PRECURSOR (16 KD) (ZEIN 2) (CLONE 15A3)
  misc_feature (53)..(230): Homolog of NCBI NO: 419803 NR Description: zein protein - maize >gi|168705|gb|AAA33543.1|
  misc_feature (53)..(230): Homolog of NCBI NO: 168664 NR Description: zein protein precursor
  misc_feature (53)..(230): Homolog of NCBI NO: 141616 NR Description: ZEIN-BETA PRECURSOR (16 KD) (ZEIN 2) (CLONE 15A3)
  misc_feature (53)..(230): Homolog of NCBI NO: 100552 NR Description: beta-coixin, 17K, precursor - Job's tears
IHVLCFHVMQRNIPKPWIIYKWLAPTYELVSIIIQSRSAKRQCVERIVEQNSMKMVIVLVVCLALSAASASAMQMPCPCAGLQGLYGAGAGLTTMMGAGGLYPYAEYLRQPQCSPLAAAPYYAGCGQPSAMFQPLRQQCCQQQMRMMDVQSVAQQLQMMMQLERAAAASSSLYEPALMQQQQQLLAAQGLNPMAMMMAQNMPAMGGLYQYQLPSYRTNPCGVSAAIPPYY

SEQ ID NO: 14875 - protein, 222 aa, Zea mays subsp. mays
  peptide (1)..(222): Ceres Seq. ID no. 12595475
  misc_feature (98)..(200): Pfam Name: Protease inhibitor/seed storage/LTP family Pfam Description: Protease inhibitor/seed storage/LTP family
  misc_feature (98)..(200): Pfam Name: Protease inhibitor/seed storage/LTP family Pfam Description: Protease inhibitor/seed storage/LTP family
  misc_feature (98)..(200): Pfam Name: Protease inhibitor/seed storage/LTP family Pfam Description: Protease inhibitor/seed storage/LTP family
  misc_feature (98)..(200): Pfam Name: Protease inhibitor/seed storage/LTP family Pfam Description: Protease inhibitor/seed storage/LTP family
  misc_feature (45)..(222): Homolog of NCBI NO: 419803 NR Description: zein protein - maize >gi|168705|gb|AAA33543.1|
  misc_feature (45)..(222): Homolog of NCBI NO: 168664 NR Description: zein protein precursor
  misc_feature (45)..(222): Homolog of NCBI NO: 16305115 NR Description: 15kD beta zein [Zea mays]
  misc_feature (45)..(222): Homolog of NCBI NO: 168664 NR Description: zein protein precursor
  misc_feature (45)..(222): Homolog of NCBI NO: 16305115 NR Description: 15kD beta zein [Zea mays]
  misc_feature (45)..(222): Homolog of NCBI NO: 168664 NR Description: zein protein precursor
  misc_feature (45)..(222): Homolog of NCBI NO: 100552 NR Description: beta-coixin, 17K, precursor - Job's tears
  misc_feature (45)..(222): Homolog of NCBI NO: 141616 NR Description: ZEIN-BETA PRECURSOR (16 KD) (ZEIN 2) (CLONE 15A3)
  misc_feature (45)..(222): Homolog of NCBI NO: 168664 NR Description: zein protein precursor
  misc_feature (45)..(222): Homolog of NCBI NO: 419803 NR Description: zein protein - maize >gi|168705|gb|AAA33543.1|
  misc_feature (45)..(222): Homolog of NCBI NO: 16305115 NR Description: 15kD beta zein [Zea mays]
  misc_feature (45)..(222): Homolog of NCBI NO: 100552 NR Description: beta-coixin, 17K, precursor - Job's tears
  misc_feature (45)..(222): Homolog of NCBI NO: 141616 NR Description: ZEIN-BETA PRECURSOR (16 KD) (ZEIN 2) (CLONE 15A3)
  misc_feature (45)..(222): Homolog of NCBI NO: 419803 NR Description: zein protein - maize >gi|168705|gb|AAA33543.1|
  misc_feature (45)..(222): Homolog of NCBI NO: 100552 NR Description: beta-coixin, 17K, precursor - Job's tears
  misc_feature (45)..(222): Homolog of NCBI NO: 141616 NR Description: ZEIN-BETA PRECURSOR (16 KD) (ZEIN 2) (CLONE 15A3)
  misc_feature (45)..(222): Homolog of NCBI NO: 419803 NR Description: zein protein - maize >gi|168705|gb|AAA33543.1|
  misc_feature (45)..(222): Homolog of NCBI NO: 16305115 NR Description: 15kD beta zein [Zea mays]
  misc_feature (45)..(222): Homolog of NCBI NO: 141616 NR Description: ZEIN-BETA PRECURSOR (16 KD) (ZEIN 2) (CLONE 15A3)
  misc_feature (45)..(222): Homolog of NCBI NO: 100552 NR Description: beta-coixin, 17K, precursor - Job's tears
MQRNIPKPWIIYKWLAPTYELVSIIIQSRSAKRQCVERIVEQNSMKMVIVLVVCLALSAASASAMQMPCPCAGLQGLYGAGAGLTTMMGAGGLYPYAEYLRQPQCSPLAAAPYYAGCGQPSAMFQPLRQQCCQQQMRMMDVQSVAQQLQMMMQLERAAAASSSLYEPALMQQQQQLLAAQGLNPMAMMMAQNMPAMGGLYQYQLPSYRTNPCGVSAAIPPYY

SEQ ID NO: 14876 - protein, 178 aa, Zea mays subsp. mays
  peptide (1)..(178): Ceres Seq. ID no. 12595476
  misc_feature (54)..(156): Pfam Name: Protease inhibitor/seed storage/LTP family Pfam Description: Protease inhibitor/seed storage/LTP family
  misc_feature (54)..(156): Pfam Name: Protease inhibitor/seed storage/LTP family Pfam Description: Protease inhibitor/seed storage/LTP family
  misc_feature (54)..(156): Pfam Name: Protease inhibitor/seed storage/LTP family Pfam Description: Protease inhibitor/seed storage/LTP family
  misc_feature (54)..(156): Pfam Name: Protease inhibitor/seed storage/LTP family Pfam Description: Protease inhibitor/seed storage/LTP family
  misc_feature (1)..(178): Homolog of NCBI NO: 16305115 NR Description: 15kD beta zein [Zea mays]
  misc_feature (1)..(178): Homolog of NCBI NO: 419803 NR Description: zein protein - maize >gi|168705|gb|AAA33543.1|
  misc_feature (1)..(178): Homolog of NCBI NO: 16305115 NR Description: 15kD beta zein [Zea mays]
  misc_feature (1)..(178): Homolog of NCBI NO: 168664 NR Description: zein protein precursor
  misc_feature (1)..(178): Homolog of NCBI NO: 16305115 NR Description: 15kD beta zein [Zea mays]
  misc_feature (1)..(178): Homolog of NCBI NO: 168664 NR Description: zein protein precursor
  misc_feature (1)..(178): Homolog of NCBI NO: 100552 NR Description: beta-coixin, 17K, precursor - Job's tears
  misc_feature (1)..(178): Homolog of NCBI NO: 141616 NR Description: ZEIN-BETA PRECURSOR (16 KD) (ZEIN 2) (CLONE 15A3)
  misc_feature (1)..(178): Homolog of NCBI NO: 168664 NR Description: zein protein precursor
  misc_feature (1)..(178): Homolog of NCBI NO: 419803 NR Description: zein protein - maize >gi|168705|gb|AAA33543.1|
  misc_feature (1)..(178): Homolog of NCBI NO: 16305115 NR Description: 15kD beta zein [Zea mays]
  misc_feature (1)..(178): Homolog of NCBI NO: 100552 NR Description: beta-coixin, 17K, precursor - Job's tears
  misc_feature (1)..(178): Homolog of NCBI NO: 141616 NR Description: ZEIN-BETA PRECURSOR (16 KD) (ZEIN 2) (CLONE 15A3)
  misc_feature (1)..(178): Homolog of NCBI NO: 419803 NR Description: zein protein - maize >gi|168705|gb|AAA33543.1|
  misc_feature (1)..(178): Homolog of NCBI NO: 100552 NR Description: beta-coixin, 17K, precursor - Job's tears
  misc_feature (1)..(178): Homolog of NCBI NO: 141616 NR Description: ZEIN-BETA PRECURSOR (16 KD) (ZEIN 2) (CLONE 15A3)
  misc_feature (1)..(178): Homolog of NCBI NO: 419803 NR Description: zein protein - maize >gi|168705|gb|AAA33543.1|
  misc_feature (1)..(178): Homolog of NCBI NO: 168664 NR Description: zein protein precursor
  misc_feature (1)..(178): Homolog of NCBI NO: 141616 NR Description: ZEIN-BETA PRECURSOR (16 KD) (ZEIN 2) (CLONE 15A3)
  misc_feature (1)..(178): Homolog of NCBI NO: 100552 NR Description: beta-coixin, 17K, precursor - Job's tears
MKMVIVLVVCLALSAASASAMQMPCPCAGLQGLYGAGAGLTTMMGAGGLYPYAEYLRQPQCSPLAAAPYYAGCGQPSAMFQPLRQQCCQQQMRMMDVQSVAQQLQMMMQLERAAAASSSLYEPALMQQQQQLLAAQGLNPMAMMMAQNMPAMGGLYQYQLPSYRTNPCGVSAAIPPYY

SEQ ID NO: 14877 - DNA, 1694 bp, Zea mays subsp. mays
  misc_feature (1)..(1694): Ceres Seq. ID no. 12344383
  misc_feature: MA Experiment ID: 108535 Result: Up-regulated in Transcription
  misc_feature: MA Experiment 108535 PARAMETER Experiment Name: Zm_Meristem_P Parameter: Age (day) Value: 8
  misc_feature: MA Experiment 108535 PARAMETER Experiment Name: Zm_Meristem_P Parameter: Organism Value: Zea mays
  misc_feature: MA Experiment 108535 PARAMETER Experiment Name: Zm_Meristem_P Parameter: Plant Line Value: 35A19
  misc_feature: MA Experiment 108535 PARAMETER Experiment Name: Zm_Meristem_P Parameter: Tissue Value: Root Meristem vs. Above Root Meristem
  misc_feature: MA Experiment ID: 108556 Result: Down-regulated in Transcription
  misc_feature: MA Experiment 108556 PARAMETER Experiment Name: Zm_Drought_P Parameter: Age (day) Value: 9
  misc_feature: MA Experiment 108556 PARAMETER Experiment Name: Zm_Drought_P Parameter: Organism Value: Zea mays
  misc_feature: MA Experiment 108556 PARAMETER Experiment Name: Zm_Drought_P Parameter: Plant Line Value: 35A19
  misc_feature: MA Experiment 108556 PARAMETER Experiment Name: Zm_Drought_P Parameter: Timepoint (hr) Value: 24
  misc_feature: MA Experiment 108556 PARAMETER Experiment Name: Zm_Drought_P Parameter: Tissue Value: Aerial
  misc_feature: MA Experiment 108556 PARAMETER Experiment Name: Zm_Drought_P Parameter: Treatment Value: Drought vs. No Drought
ttataaaacctagctcctcaagctccagacgcagtcgaccgccgcagaccgggagtagtcgacgcgccgtcactgaatcctcagatcacggctagccgtaatcacgccactctgctgactcccggcgagcagtgtaacattttccttcagccatgggcaaggagaagactcacatcaacattgtggtcattggacatgtcgactctggcaagtcgaccaccactggccacctgatctacaagctcggcggtattgacnagcgtgtgattgagaggttcgagaaagaggccgcggagatgaacaagcggtcattcaagtatgcctgggtgcttgacaagctcaagggcgagcgtgagagaggtatcacaattgatattgctttgtggaagttcgagaccaccaagtactactgcactgtcattgatgcccctggacaccgtgacttcatcaagaatatgattactggcacttcccaagctgactgcgctgttctnatcattgactccactactggtggttntgaggctggtatctccaaggatggacagacccgcgagcatgctctccttgctttcacgctnggagtgaagcagatgatttgctgttgcaacaagatggatgccaccacacccaagtactccaaggcccgttatgatgagattgtgaaggaagtctcttcctacctgaagaaggtnggatacaaccctgacaagatccactttgttcccatctctggtttcgaaggtgacaacatgattgagaggtccaccaaccttgactggtacaagggcccaaccctacttgaggctttggacttgatcaatgagccgaagaggccttcagacaagcccctgcgtctccccctacaggatgtgtacaagattggtggtatnggaactgttcctgttgggcgtgttgagactggtatcatcaagcctggtatggttgttacctttggtcctagtggccttactactgaggtgaagtctgttgaaatgcaccatgaggctctccaggaggcccttcctggtgacaatgttggcttcaatgttaagaatgttgctgtgaaggatctgaagcgtgggtatgtggcctccaactccaaggatgaccctgccaaggaggctgctagcttcacgtcccaggtcatcatcatgaaccaccctgggcagattggcaacggctatgccccagtgctggactgccacacctcgcacattgctgtcaagtttgcggagctcattaccaagattgataggcggtctggcaaagagcttgagaaggagcccaaattcctcaagaatggtgatgctggtatggtgaagatggttcccactaagcccatggtagtggagaccttttctgaatatcctcctcttggtcgctttgctgtccgtgacatgaggcaaacggtggctgtcggagtcatcaagagtgtggagaagaaggatccaactggagccaaggtgaccaaggctgccgcaaagaagaaatgatgtgtctggctggttctgtgtttgcttgagggaaacctagtggaaacataaaatatctcgtcttgttcacgtcattgtctgaactatgctcgcaacgtttgcctggtcgatttagaatggttattttcgttaaaaccagagtgttatttaagacttatccgaacatctggtgagccatatatggttactagttttgtt

SEQ ID NO: 14878 - protein, 447 aa, Zea mays subsp. mays
  peptide (1)..(447): Ceres Seq. ID no. 12344384
  misc_feature (5)..(227): Pfam Name: Elongation factor Tu GTP binding domain Pfam Description: Elongation factor Tu GTP binding domain
  misc_feature (1)..(447): Homolog of NCBI NO: 2282584 NR Description: elongation factor 1-alpha [Zea mays]
  misc_feature (1)..(447): Homolog of NCBI NO: 3122071 NR Description: ELONGATION FACTOR 1-ALPHA (EF-1-ALPHA)
  misc_feature (1)..(447): Homolog of NCBI NO: 18873725 NR Description: elongation factor 1 alpha [Saccharum hybrid
  misc_feature (1)..(447): Homolog of NCBI NO: 2662341 NR Description: EF-1 alpha [Oryza sativa]
  misc_feature (1)..(447): Homolog of NCBI NO: 2662343 NR Description: EF-1 alpha [Oryza sativa]
  misc_feature (1)..(447): Homolog of NCBI NO: 6015059 NR Description: ELONGATION FACTOR 1-ALPHA (EF-1-ALPHA)
  misc_feature (7)..(447): Homolog of NCBI NO: 18873727 NR Description: elongation factor 1 alpha [Saccharum hybrid
  misc_feature (1)..(447): Homolog of NCBI NO: 7230387 NR Description: elongation factor 1 alpha [Zea mays]
  misc_feature (1)..(447): Homolog of NCBI NO: 7230385 NR Description: elongation factor 1 alpha [Zea mays]
  misc_feature (1)..(447): Homolog of NCBI NO: 1864017 NR Description: elongation factor-1 alpha [Nicotiana tabacum]
  misc_feature (36)..(36): Xaa is any aa, unknown or other
  misc_feature (114)..(114): Xaa is any aa, unknown or other
  misc_feature (123)..(123): Xaa is any aa, unknown or other
  misc_feature (143)..(143): Xaa is any aa, unknown or other
  misc_feature (181)..(181): Xaa is any aa, unknown or other
  misc_feature (247)..(247): Xaa is any aa, unknown or other
MGKEKTHINIVVIGHVDSGKSTTTGHLIYKLGGIDXRVIERFEKEAAEMNKRSFKYAWVLDKLKGERERGITIDIALWKFETTKYYCTVIDAPGHRDFIKNMITGTSQADCAVXIIDSTTGGXEAGISKDGQTREHALLAFTXGVKQMICCCNKMDATTPKYSKARYDEIVKEVSSYLKKXGYNPDKIHFVPISGFEGDNMIERSTNLDWYKGPTLLEALDLINEPKRPSDKPLRLPLQDVYKIGGXGTVPVGRVETGIIKPGMVVTFGPSGLTTEVKSVEMHHEALQEALPGDNVGFNVKNVAVKDLKRGYVASNSKDDPAKEAASFTSQVIIMNHPGQIGNGYAPVLDCHTSHIAVKFAELITKIDRRSGKELEKEPKFLKNGDAGMVKMVPTKPMVVETFSEYPPLGRFAVRDMRQTVAVGVIKSVEKKDPTGAKVTKAAAKKK

SEQ ID NO: 14879 - protein, 399 aa, Zea mays subsp. mays
  peptide (1)..(399): Ceres Seq. ID no. 12344385
  misc_feature (1)..(179): Pfam Name: Elongation factor Tu GTP binding domain Pfam Description: Elongation factor Tu GTP binding domain
  misc_feature (1)..(399): Homolog of NCBI NO: 2282584 NR Description: elongation factor 1-alpha [Zea mays]
  misc_feature (1)..(399): Homolog of NCBI NO: 3122071 NR Description: ELONGATION FACTOR 1-ALPHA (EF-1-ALPHA)
  misc_feature (1)..(399): Homolog of NCBI NO: 18873725 NR Description: elongation factor 1 alpha [Saccharum hybrid
  misc_feature (1)..(399): Homolog of NCBI NO: 2662341 NR Description: EF-1 alpha [Oryza sativa]
  misc_feature (1)..(399): Homolog of NCBI NO: 2662343 NR Description: EF-1 alpha [Oryza sativa]
  misc_feature (1)..(399): Homolog of NCBI NO: 6015059 NR Description: ELONGATION FACTOR 1-ALPHA (EF-1-ALPHA)
  misc_feature (1)..(399): Homolog of NCBI NO: 18873727 NR Description: elongation factor 1 alpha [Saccharum hybrid
  misc_feature (1)..(399): Homolog of NCBI NO: 7230387 NR Description: elongation factor 1 alpha [Zea mays]
  misc_feature (1)..(399): Homolog of NCBI NO: 7230385 NR Description: elongation factor 1 alpha [Zea mays]
  misc_feature (1)..(399): Homolog of NCBI NO: 1864017 NR Description: elongation factor-1 alpha [Nicotiana tabacum]
  misc_feature (66)..(66): Xaa is any aa, unknown or other
  misc_feature (75)..(75): Xaa is any aa, unknown or other
  misc_feature (95)..(95): Xaa is any aa, unknown or other
  misc_feature (133)..(133): Xaa is any aa, unknown or other
  misc_feature (199)..(199): Xaa is any aa, unknown or other
MNKRSFKYAWVLDKLKGERERGITIDIALWKFETTKYYCTVIDAPGHRDFIKNMITGTSQADCAVXIIDSTTGGXEAGISKDGQTREHALLAFTXGVKQMICCCNKMDATTPKYSKARYDEIVKEVSSYLKKXGYNPDKIHFVPISGFEGDNMIERSTNLDWYKGPTLLEALDLINEPKRPSDKPLRLPLQDVYKIGGXGTVPVGRVETGIIKPGMVVTFGPSGLTTEVKSVEMHHEALQEALPGDNVGFNVKNVAVKDLKRGYVASNSKDDPAKEAASFTSQVIIMNHPGQIGNGYAPVLDCHTSHIAVKFAELITKIDRRSGKELEKEPKFLKNGDAGMVKMVPTKPMVVETFSEYPPLGRFAVRDMRQTVAVGVIKSVEKKDPTGAKVTKAAAKKK

SEQ ID NO: 14880 - protein, 346 aa, Zea mays subsp. mays
  peptide (1)..(346): Ceres Seq. ID no. 12344386
  misc_feature (1)..(126): Pfam Name: Elongation factor Tu GTP binding domain Pfam Description: Elongation factor Tu GTP binding domain
  misc_feature (1)..(346): Homolog of NCBI NO: 2282584 NR Description: elongation factor 1-alpha [Zea mays]
  misc_feature (1)..(346): Homolog of NCBI NO: 3122071 NR Description: ELONGATION FACTOR 1-ALPHA (EF-1-ALPHA)
  misc_feature (1)..(346): Homolog of NCBI NO: 18873725 NR Description: elongation factor 1 alpha [Saccharum hybrid
  misc_feature (1)..(346): Homolog of NCBI NO: 2662341 NR Description: EF-1 alpha [Oryza sativa]
  misc_feature (1)..(346): Homolog of NCBI NO: 2662343 NR Description: EF-1 alpha [Oryza sativa]
  misc_feature (1)..(346): Homolog of NCBI NO: 6015059 NR Description: ELONGATION FACTOR 1-ALPHA (EF-1-ALPHA)
  misc_feature (1)..(346): Homolog of NCBI NO: 18873727 NR Description: elongation factor 1 alpha [Saccharum hybrid
  misc_feature (1)..(346): Homolog of NCBI NO: 7230387 NR Description: elongation factor 1 alpha [Zea mays]
  misc_feature (1)..(346): Homolog of NCBI NO: 7230385 NR Description: elongation factor 1 alpha [Zea mays]
  misc_feature (1)..(346): Homolog of NCBI NO: 1864017 NR Description: elongation factor-1 alpha [Nicotiana tabacum]
  misc_feature (13)..(13): Xaa is any aa, unknown or other
  misc_feature (22)..(22): Xaa is any aa, unknown or other
  misc_feature (42)..(42): Xaa is any aa, unknown or other
  misc_feature (80)..(80): Xaa is any aa, unknown or other
  misc_feature (146)..(146): Xaa is any aa, unknown or other
MITGTSQADCAVXIIDSTTGGXEAGISKDGQTREHALLAFTXGVKQMICCCNKMDATTPKYSKARYDEIVKEVSSYLKKXGYNPDKIHFVPISGFEGDNMIERSTNLDWYKGPTLLEALDLINEPKRPSDKPLRLPLQDVYKIGGXGTVPVGRVETGIIKPGMVVTFGPSGLTTEVKSVEMHHEALQEALPGDNVGFNVKNVAVKDLKRGYVASNSKDDPAKEAASFTSQVIIMNHPGQIGNGYAPVLDCHTSHIAVKFAELITKIDRRSGKELEKEPKFLKNGDAGMVKMVPTKPMVVETFSEYPPLGRFAVRDMRQTVAVGVIKSVEKKDPTGAKVTKAAAKKK

SEQ ID NO: 14881 - DNA, 874 bp, Zea mays subsp. mays
  misc_feature (1)..(874): Ceres Seq. ID no. 12469372
  misc_feature: MA Experiment ID: 108522 Result: Up-regulated in Transcription
  misc_feature: MA Experiment 108522 PARAMETER Experiment Name: Zm_42deg_Heat_P Parameter: Age (day) Value: 8
  misc_feature: MA Experiment 108522 PARAMETER Experiment Name: Zm_42deg_Heat_P Parameter: Organism Value: Zea mays
  misc_feature: MA Experiment 108522 PARAMETER Experiment Name: Zm_42deg_Heat_P Parameter: Plant Line Value: 35A19
  misc_feature: MA Experiment 108522 PARAMETER Experiment Name: Zm_42deg_Heat_P Parameter: Temperature (deg C) Value: 42 vs. 22
  misc_feature: MA Experiment 108522 PARAMETER Experiment Name: Zm_42deg_Heat_P Parameter: Timepoint (hr) Value: 1
  misc_feature: MA Experiment 108522 PARAMETER Experiment Name: Zm_42deg_Heat_P Parameter: Tissue Value: Aerial
  misc_feature: MA Experiment ID: 108523 Result: Up-regulated in Transcription
  misc_feature: MA Experiment 108523 PARAMETER Experiment Name: Zm_42deg_Heat_P Parameter: Age (day) Value: 8
  misc_feature: MA Experiment 108523 PARAMETER Experiment Name: Zm_42deg_Heat_P Parameter: Organism Value: Zea mays
  misc_feature: MA Experiment 108523 PARAMETER Experiment Name: Zm_42deg_Heat_P Parameter: Plant Line Value: 35A19
  misc_feature: MA Experiment 108523 PARAMETER Experiment Name: Zm_42deg_Heat_P Parameter: Temperature (deg C) Value: 42 vs. 22
  misc_feature: MA Experiment 108523 PARAMETER Experiment Name: Zm_42deg_Heat_P Parameter: Timepoint (hr) Value: 6
  misc_feature: MA Experiment 108523 PARAMETER Experiment Name: Zm_42deg_Heat_P Parameter: Tissue Value: Aerial
  misc_feature: MA Experiment ID: 108527 Result: Up-regulated in Transcription
  misc_feature: MA Experiment 108527 PARAMETER Experiment Name: Zm_5mM_NO_P Parameter: Age (day) Value: 8
  misc_feature: MA Experiment 108527 PARAMETER Experiment Name: Zm_5mM_NO_P Parameter: Organism Value: Zea mays
  misc_feature: MA Experiment 108527 PARAMETER Experiment Name: Zm_5mM_NO_P Parameter: Plant Line Value: 35A19
  misc_feature: MA Experiment 108527 PARAMETER Experiment Name: Zm_5mM_NO_P Parameter: Timepoint (hr) Value: 6
  misc_feature: MA Experiment 108527 PARAMETER Experiment Name: Zm_5mM_NO_P Parameter: Tissue Value: Aerial
  misc_feature: MA Experiment 108527 PARAMETER Experiment Name: Zm_5mM_NO_P Parameter: Treatment Value: 5mM NO vs. No Treatment
  misc_feature: MA Experiment ID: 108556 Result: Up-regulated in Transcription
  misc_feature: MA Experiment 108556 PARAMETER Experiment Name: Zm_Drought_P Parameter: Age (day) Value: 9
  misc_feature: MA Experiment 108556 PARAMETER Experiment Name: Zm_Drought_P Parameter: Organism Value: Zea mays
  misc_feature: MA Experiment 108556 PARAMETER Experiment Name: Zm_Drought_P Parameter: Plant Line Value: 35A19
  misc_feature: MA Experiment 108556 PARAMETER Experiment Name: Zm_Drought_P Parameter: Timepoint (hr) Value: 24
  misc_feature: MA Experiment 108556 PARAMETER Experiment Name: Zm_Drought_P Parameter: Tissue Value: Aerial
  misc_feature: MA Experiment 108556 PARAMETER Experiment Name: Zm_Drought_P Parameter: Treatment Value: Drought vs. No Drought
  misc_feature: MA Experiment ID: 108559 Result: Up-regulated in Transcription
  misc_feature: MA Experiment 108559 PARAMETER Experiment Name: Zm_5mM_NO_P Parameter: Age (day) Value: 8
  misc_feature: MA Experiment 108559 PARAMETER Experiment Name: Zm_5mM_NO_P Parameter: Organism Value: Zea mays
  misc_feature: MA Experiment 108559 PARAMETER Experiment Name: Zm_5mM_NO_P Parameter: Plant Line Value: 35A19
  misc_feature: MA Experiment 108559 PARAMETER Experiment Name: Zm_5mM_NO_P Parameter: Timepoint (hr) Value: 12
  misc_feature: MA Experiment 108559 PARAMETER Experiment Name: Zm_5mM_NO_P Parameter: Tissue Value: Aerial
  misc_feature: MA Experiment 108559 PARAMETER Experiment Name: Zm_5mM_NO_P Parameter: Treatment Value: 5mM NO vs. No Treatment
  misc_feature: MA Experiment ID: 20000535 Result: Up-regulated in Transcription
  misc_feature: MA Experiment 20000535 PARAMETER Experiment Name: Zm_Hybrid_Seed_Dev_P Parameter: DAP Value: 30 vs. 12
  misc_feature: MA Experiment 20000535 PARAMETER Experiment Name: Zm_Hybrid_Seed_Dev_P Parameter: Organism Value: Zea mays
  misc_feature: MA Experiment 20000535 PARAMETER Experiment Name: Zm_Hybrid_Seed_Dev_P Parameter: Plant Line Value: 35A19
  misc_feature: MA Experiment 20000535 PARAMETER Experiment Name: Zm_Hybrid_Seed_Dev_P Parameter: Tissue Value: Embryo vs. Unfert Floret
gggatctgacggcaattccccaattcgattccatcccatgggttggcgttggcacgacgacgacggtgacagcggccggggcctcggcggtgtccctgacctcgctggtggcgggggcgatggggcgcagtgcgccacgcgacgggtggtgcagtcccgctgccacacggaggaagtcgagcccggccgatttgtccgcaagtgcgagaagacggagcagctcctccgcgactgcgtcggcaggccctctgaactggtggaatccaaaactgaaaacactgaagaagatgtcacagaagaaatgaagagcggttcactttctcttgggtttccaagaaacgagcccttcgcattccctggactccgcagtgacatggaagcccttgagaaagacttctttgggagcctagggaacgtcctggatgaagctgagcggatggccaacagcttcgtcagatcttttggttttccacctgctcatgacagcggatcaagtccatttcgaagacagcctgcagacaggcatattgaggaagataccgcaaagaataagactgagagcgactactcagaattcaggagcaagatttcagatgtgtaagcagctgtanagctgcagttatntggcctgtgtccatgagctgaaacctgagaagtgagagctttgcaatntcncggtccttatatgtttctctttggaacaaaataggnacttgcggcctgcaggtgctgtttagcctcgcttagtatggtaatngtaatggtagatgaagtgatttgcctgtcanaggtgaggagtattatntgttatgttcggttttgcagggccattttgtacagtactttttgcagacccagcatttgaaatgtttgc

SEQ ID NO: 14882 - protein, 199 aa, Zea mays subsp. mays
  peptide (1)..(199): Ceres Seq. ID no. 12469373
  misc_feature (13)..(187): Homolog of NCBI NO: 15227527 NR Description: hypothetical protein; protein id: At2g35900.1, by cDNA: gi_17529097 [Arabidopsis thaliana]
  misc_feature (13)..(87): Homolog of NCBI NO: 34909928 NR Description: P0665A11.24 [Oryza sativa (japonica
  misc_feature (98)..(199): Homolog of NCBI NO: 34909928 NR Description: P0665A11.24 [Oryza sativa (japonica
GSDGNSPIRFHPMGWRWHDDDGDSGRGLGGVPDLAGGGGDGAQCATRRVVQSRCHTEEVEPGRFVRKCEKTEQLLRDCVGRPSELVESKTENTEEDVTEEMKSGSLSLGFPRNEPFAFPGLRSDMEALEKDFFGSLGNVLDEAERMANSFVRSFGFPPAHDSGSSPFRRQPADRHIEEDTAKNKTESDYSEFRSKISDV

SEQ ID NO: 14883 - protein, 187 aa, Zea mays subsp. mays
  peptide (1)..(187): Ceres Seq. ID no. 12469374
  misc_feature (1)..(175): Homolog of NCBI NO: 15227527 NR Description: hypothetical protein; protein id: At2g35900.1, by cDNA: gi_17529097 [Arabidopsis thaliana]
  misc_feature (1)..(75): Homolog of NCBI NO: 34909928 NR Description: P0665A11.24 [Oryza sativa (japonica
  misc_feature (86)..(187): Homolog of NCBI NO: 34909928 NR Description: P0665A11.24 [Oryza sativa (japonica
MGWRWHDDDGDSGRGLGGVPDLAGGGGDGAQCATRRVVQSRCHTEEVEPGRFVRKCEKTEQLLRDCVGRPSELVESKTENTEEDVTEEMKSGSLSLGFPRNEPFAFPGLRSDMEALEKDFFGSLGNVLDEAERMANSFVRSFGFPPAHDSGSSPFRRQPADRHIEEDTAKNKTESDYSEFRSKISDV

SEQ ID NO: 14884 - protein, 100 aa, Zea mays subsp. mays
  peptide (1)..(100): Ceres Seq. ID no. 12469375
DLTAIPQFDSIPWVGVGTTTTVTAAGASAVSLTSLVAGAMGRSAPRDGWCSPAATRRKSSPADLSASARRRSSSSATASAGPLNWWNPKLKTLKKMSQKK

SEQ ID NO: 14885 - DNA, 905 bp, Zea mays subsp. mays
  misc_feature (1)..(905): Ceres Seq. ID no. 12469368
  misc_feature: MA Experiment ID: 108687 Result: Up-regulated in Transcription
  misc_feature: MA Experiment 108687 PARAMETER Experiment Name: Zm_Embryos-Flowers__P Parameter: Tissue Value: Embryo vs. Aerial+
tgttggactcggacctgttgctgcgtgcagccgcgtccgggtttgggttcatgatgcgcgacatgacggtggagaactgggcggggccggcggggcaccaggcggtggcgctgcgcgtgagcgccgaccgcgccgtcgtccaccgctgcagcatcgccgggtaccaggacacgctgtacgcgcattctaaccgccagttctaccgcgactgcgacatctacggcaccgtggacttcgtcttcggcaatgccgccgccgtgctccagcgctgcaacctctgggcgcgcgtgccgctgccgggccagaagaacaccgtcaccgcgcagagccggaacgattcgtgccagcgcaccggcatcgtcctccacgcctgccgcctcgtggcggccgcgccggcagaaggcctctcgcccgcggcggccccggcgcccgtcccggaccgttcgccgctgctcctctccccgacgacgtacctgggccggccatggaagtccttctccagggtggtggtgatgatgtcgtacatcggcccgcacgtgccgccgcagggatggatggagtggaacgccaccagcacctacgcactcgacaggctttacttcggcgagtacatgaactacgggcccggcgctgggttggccgggcgtgttgcgtggcctggccnccgcgtcatcaacagcaccgcggaagcggagagcttcacggtggcgcggttcatcgacggcgcgtcctggctgccggccgccggggtctccttcgttgccgggctctcgctgctgtaatcgtcttgatggaaatcccagggcacaccagggaccaggcaggctgagtgacaagtagacgtgataatgtacttttagtggcggcagttcgaatcaattcaaatcattttgctgtgagatttc

SEQ ID NO: 14886 - protein, 259 aa, Zea mays subsp. mays
  peptide (1)..(259): Ceres Seq. ID no. 12469369
  misc_feature (10)..(241): Pfam Name: Pectinesterase Pfam Description: Pectinesterase
  misc_feature (10)..(258): Homolog of NCBI NO: 34904380 NR Description: unnamed protein product [Oryza sativa (japonica group)] >gi|8467996|dbj|BAA96597.1| unnamed protein product
  misc_feature (10)..(256): Homolog of NCBI NO: 34908778 NR Description: putative pectin esterase [Oryza sativa (japonica group)] >gi|20161185|dbj|BAB90112.1| putative pectin esterase
  misc_feature (10)..(254): Homolog of NCBI NO: 6093744 NR Description: Pectinesterase PPE8B precursor (Pectin
  misc_feature (10)..(131): Homolog of NCBI NO: 34902864 NR Description: unnamed protein product [Oryza sativa (japonica group)] >gi|5922617|dbj|BAA84618.1| unnamed protein product
  misc_feature (156)..(257): Homolog of NCBI NO: 34902864 NR Description: unnamed protein product [Oryza sativa (japonica group)] >gi|5922617|dbj|BAA84618.1| unnamed protein product
  misc_feature (10)..(126): Homolog of NCBI NO: 14582864 NR Description: putative pectin methylesterase LuPME1 [Linum
  misc_feature (156)..(256): Homolog of NCBI NO: 14582864 NR Description: putative pectin methylesterase LuPME1 [Linum
  misc_feature (10)..(256): Homolog of NCBI NO: 29539387 NR Description: pectin methylesterase [Pisum sativum]
  misc_feature (11)..(131): Homolog of NCBI NO: 15236734 NR Description: pectinesterase family; protein id: At4g00190.1
  misc_feature (156)..(256): Homolog of NCBI NO: 15236734 NR Description: pectinesterase family; protein id: At4g00190.1
  misc_feature (221)..(221): Xaa is any aa, unknown or other
LDSDLLLRAAASGFGFMMRDMTVENWAGPAGHQAVALRVSADRAVVHRCSIAGYQDTLYAHSNRQFYRDCDIYGTVDFVFGNAAAVLQRCNLWARVPLPGQKNTVTAQSRNDSCQRTGIVLHACRLVAAAPAEGLSPAAAPAPVPDRSPLLLSPTTYLGRPWKSFSRVVVMMSYIGPHVPPQGWMEWNATSTYALDRLYFGEYMNYGPGAGLAGRVAWPGXRVINSTAEAESFTVARFIDGASWLPAAGVSFVAGLSLL

SEQ ID NO: 14887 - protein, 243 aa, Zea mays subsp. mays
  peptide (1)..(243): Ceres Seq. ID no. 12469370
  misc_feature (1)..(225): Pfam Name: Pectinesterase Pfam Description: Pectinesterase
  misc_feature (1)..(242): Homolog of NCBI NO: 34904380 NR Description: unnamed protein product [Oryza sativa (japonica group)] >gi|8467996|dbj|BAA96597.1| unnamed protein product
  misc_feature (1)..(240): Homolog of NCBI NO: 34908778 NR Description: putative pectin esterase [Oryza sativa (japonica group)] >gi|20161185|dbj|BAB90112.1| putative pectin esterase
  misc_feature (1)..(238): Homolog of NCBI NO: 6093744 NR Description: Pectinesterase PPE8B precursor (Pectin
  misc_feature (1)..(115): Homolog of NCBI NO: 34902864 NR Description: unnamed protein product [Oryza sativa (japonica group)] >gi|5922617|dbj|BAA84618.1| unnamed protein product
  misc_feature (140)..(241): Homolog of NCBI NO: 34902864 NR Description: unnamed protein product [Oryza sativa (japonica group)] >gi|5922617|dbj|BAA84618.1| unnamed protein product
  misc_feature (1)..(110): Homolog of NCBI NO: 14582864 NR Description: putative pectin methylesterase LuPME1 [Linum
  misc_feature (140)..(240): Homolog of NCBI NO: 14582864 NR Description: putative pectin methylesterase LuPME1 [Linum
  misc_feature (1)..(240): Homolog of NCBI NO: 29539387 NR Description: pectin methylesterase [Pisum sativum]
  misc_feature (1)..(115): Homolog of NCBI NO: 15236734 NR Description: pectinesterase family; protein id: At4g00190.1
  misc_feature (140)..(240): Homolog of NCBI NO: 15236734 NR Description: pectinesterase family; protein id: At4g00190.1
  misc_feature (205)..(205): Xaa is any aa, unknown or other
MMRDMTVENWAGPAGHQAVALRVSADRAVVHRCSIAGYQDTLYAHSNRQFYRDCDIYGTVDFVFGNAAAVLQRCNLWARVPLPGQKNTVTAQSRNDSCQRTGIVLHACRLVAAAPAEGLSPAAAPAPVPDRSPLLLSPTTYLGRPWKSFSRVVVMMSYIGPHVPPQGWMEWNATSTYALDRLYFGEYMNYGPGAGLAGRVAWPGXRVINSTAEAESFTVARFIDGASWLPAAGVSFVAGLSLL

SEQ ID NO: 14888 - protein, 242 aa, Zea mays subsp. mays
  peptide (1)..(242): Ceres Seq. ID no. 12469371
  misc_feature (1)..(224): Pfam Name: Pectinesterase Pfam Description: Pectinesterase
  misc_feature (139)..(240): Homolog of NCBI NO: 34902864 NR Description: unnamed protein product [Oryza sativa (japonica group)] >gi|5922617|dbj|BAA84618.1| unnamed protein product
  misc_feature (1)..(109): Homolog of NCBI NO: 14582864 NR Description: putative pectin methylesterase LuPME1 [Linum
  misc_feature (139)..(239): Homolog of NCBI NO: 14582864 NR Description: putative pectin methylesterase LuPME1 [Linum
  misc_feature (1)..(241): Homolog of NCBI NO: 34904380 NR Description: unnamed protein product [Oryza sativa (japonica group)] >gi|8467996|dbj|BAA96597.1| unnamed protein product
  misc_feature (1)..(237): Homolog of NCBI NO: 6093744 NR Description: Pectinesterase PPE8B precursor (Pectin
  misc_feature (1)..(114): Homolog of NCBI NO: 34902864 NR Description: unnamed protein product [Oryza sativa (japonica group)] >gi|5922617|dbj|BAA84618.1| unnamed protein product
  misc_feature (1)..(239): Homolog of NCBI NO: 34908778 NR Description: putative pectin esterase [Oryza sativa (japonica group)] >gi|20161185|dbj|BAB90112.1| putative pectin esterase
  misc_feature (1)..(239): Homolog of NCBI NO: 29539387 NR Description: pectin methylesterase [Pisum sativum]
  misc_feature (1)..(114): Homolog of NCBI NO: 15236734 NR Description: pectinesterase family; protein id: At4g00190.1
  misc_feature (139)..(239): Homolog of NCBI NO: 15236734 NR Description: pectinesterase family; protein id: At4g00190.1
  misc_feature (204)..(204): Xaa is any aa, unknown or other
MRDMTVENWAGPAGHQAVALRVSADRAVVHRCSIAGYQDTLYAHSNRQFYRDCDIYGTVDFVFGNAAAVLQRCNLWARVPLPGQKNTVTAQSRNDSCQRTGIVLHACRLVAAAPAEGLSPAAAPAPVPDRSPLLLSPTTYLGRPWKSFSRVVVMMSYIGPHVPPQGWMEWNATSTYALDRLYFGEYMNYGPGAGLAGRVAWPGXRVINSTAEAESFTVARFIDGASWLPAAGVSFVAGLSLL

SEQ ID NO: 14889 - DNA, 771 bp, Zea mays subsp. mays
  misc_feature (1)..(771): Ceres Seq. ID no. 14306082
  misc_feature: MA Experiment ID: 108543 Result: Down-regulated in Transcription
  misc_feature: MA Experiment ID: 20000535 Result: Up-regulated in Transcription
  misc_feature: MA Experiment 20000535 PARAMETER Experiment Name: Zm_Hybrid_Seed_Dev_P Parameter: DAP Value: 30 vs. 12
  misc_feature: MA Experiment 20000535 PARAMETER Experiment Name: Zm_Hybrid_Seed_Dev_P Parameter: Organism Value: Zea mays
  misc_feature: MA Experiment 20000535 PARAMETER Experiment Name: Zm_Hybrid_Seed_Dev_P Parameter: Plant Line Value: 35A19
  misc_feature: MA Experiment 20000535 PARAMETER Experiment Name: Zm_Hybrid_Seed_Dev_P Parameter: Tissue Value: Embryo vs. Unfert Floret
accggatcaccagcctacagctcgtcacatctctctctccgcccggccggcctctagactcactctagccatatggccacggtgcacggcagcaggctcatcttcctcttcgaggccacgctcttctcggcgctgctgctcgtcccggcacgccctgcttccgccacagacggcagcgcgtacccggccggcgactgcccctacccgtgcctgccgccgcccgccgtcaccgccaactgcccgccgcctccgccggctgcggcgtcgtactcgtacccgccaccgccgggggcttacattccctacttccagcctgcggcgggtggcggtggtggcggcggtagtggggggtacggcggctacccggcgccgccgccgcccaaccccatcctgccgtggtacccatggtactacaagacgccgccgtcgtcctcggccgccacgtcgggcagggggagtcgcgttcttcttgggtcggccgccatggtagctgctgctgccctgctgatcatggcttagccgcagcccgcagcagtcgttctttttgcatcttcgatcttgtcctctcccccaggttttctttctttttttcttttgttgatttactgctcaggatttatattcagaggtatatatataacgaggcagcattatatatattgcttgtactcctaatttatcagctacatgtctctagttccatgattaaaatgattaccactcaactttgagtagtggagcaactatgggcgtgtttgccaccttggtccg

SEQ ID NO: 14890 - protein, 162 aa, Zea mays subsp. mays
  peptide (1)..(162): Ceres Seq. ID no. 14306083
PDHQPTARHISLSARPASRLTLAIWPRCTAAGSSSSSRPRSSRRCCSSRHALLPPQTAARTRPATAPTRACRRPPSPPTARRLRRLRRRTRTRHRRGLTFPTSSLRRVAVVAAVVGGTAATRRRRRPTPSCRGTHGTTRRRRRPRPPRRAGGVAFFLGRPPW

SEQ ID NO: 14891 - protein, 148 aa, Zea mays subsp. mays
  peptide (1)..(148): Ceres Seq. ID no. 14306084
  misc_feature (43)..(118): Pfam Name: Extensin-like region Pfam Description: Extensin-like region
  misc_feature (17)..(146): Homolog of NCBI NO: 34894212 NR Description: P0439B06.27 [Oryza sativa (japonica
  misc_feature (1)..(123): Homolog of NCBI NO: 18423010 NR Description: proline-rich protein family [Arabidopsis >gi|10177157|dbj|BAB10346.1| gene_id:K21P3.16~unknown protein thaliana] >gi|21553492|gb|AAM62585.1| extensin like protein
  misc_feature (17)..(139): Homolog of NCBI NO: 18397707 NR Description: proline-rich protein family [Arabidopsis >gi|7549638|gb|AAF63823.1| unknown protein [Arabidopsis thaliana]
  misc_feature (42)..(145): Homolog of NCBI NO: 18409730 NR Description: proline-rich protein family [Arabidopsis
  misc_feature (42)..(147): Homolog of NCBI NO: 15220010 NR Description: expressed protein [Arabidopsis thaliana]
  misc_feature (1)..(131): Homolog of NCBI NO: 15234820 NR Description: proline-rich protein family [Arabidopsis thaliana]
  misc_feature (58)..(143): Homolog of NCBI NO: 34894480 NR Description: OJ1116_C07.3 [Oryza sativa (japonica
  misc_feature (38)..(141): Homolog of NCBI NO: 18422542 NR Description: proline-rich protein family [Arabidopsis thaliana]
  misc_feature (29)..(137): Homolog of NCBI NO: 7510074 NR Description: hypothetical protein Y50E8A.g - Caenorhabditis
MATVHGSRLIFLFEATLFSALLLVPARPASATDGSAYPAGDCPYPCLPPPAVTANCPPPPPAAASYSYPPPPGAYIPYFQPAAGGGGGGGSGGYGGYPAPPPPNPILPWYPWYYKTPPSSSAATSGRGSRVLLGSAAMVAAAALLIMA

SEQ ID NO: 14892 - protein, 108 aa, Zea mays subsp. mays
  peptide (1)..(108): Ceres Seq. ID no. 14306085
MVLQDAAVVLGRHVGQGESRSSWVGRHGSCCCPADHGLAAARSSRSFCIFDLVLSPRFSFFFSFVDLLLRIYIQRYIYNEAALYILLVLLIYQLHVSSSMIKMITTQL

SEQ ID NO: 14893 - DNA, 1114 bp, Zea mays subsp. mays
  misc_feature (1)..(1114): Ceres Seq. ID no. 14306124
  misc_feature: MA Experiment ID: 108527 Result: Up-regulated in Transcription
  misc_feature: MA Experiment 108527 PARAMETER Experiment Name: Zm_5mM_NO_P Parameter: Age (day) Value: 8
  misc_feature: MA Experiment 108527 PARAMETER Experiment Name: Zm_5mM_NO_P Parameter: Organism Value: Zea mays
  misc_feature: MA Experiment 108527 PARAMETER Experiment Name: Zm_5mM_NO_P Parameter: Plant Line Value: 35A19
  misc_feature: MA Experiment 108527 PARAMETER Experiment Name: Zm_5mM_NO_P Parameter: Timepoint (hr) Value: 6
  misc_feature: MA Experiment 108527 PARAMETER Experiment Name: Zm_5mM_NO_P Parameter: Tissue Value: Aerial
  misc_feature: MA Experiment 108527 PARAMETER Experiment Name: Zm_5mM_NO_P Parameter: Treatment Value: 5mM NO vs. No Treatment
  misc_feature: MA Experiment ID: 108535 Result: Down-regulated in Transcription
  misc_feature: MA Experiment 108535 PARAMETER Experiment Name: Zm_Meristem_P Parameter: Age (day) Value: 8
  misc_feature: MA Experiment 108535 PARAMETER Experiment Name: Zm_Meristem_P Parameter: Organism Value: Zea mays
  misc_feature: MA Experiment 108535 PARAMETER Experiment Name: Zm_Meristem_P Parameter: Plant Line Value: 35A19
  misc_feature: MA Experiment 108535 PARAMETER Experiment Name: Zm_Meristem_P Parameter: Tissue Value: Root Meristem vs. Above Root Meristem
aaaccggagcattccattgtaccccgcggtgacgcgtcccggccccggcggccggcgggtctgcctaccggtaccggccccgctcgctcgccgagtcaacggcttgactgcgcccgcccgccacgttcgtagtactatacaagtacatgcctttgccttccctttcctctcctctcctcctctcccacagtcccacccgtttcgcagtgcagaagccggcgaaacttccaagcccaaggaaggaaaaaaaaaactgtcacctttaactcgatcccctcttccccgcccgagtcagagcggcggcgccggagccggagccgacagcttccggcaagcgggggctacttggtgcggcgggctatttccgcggttttgtgccacagcgggactgaactgcccgcccaggctgccctatcagggtcaccaagattgaacaagactgaactgccgcgcttcaggatactgaactgccatctcagttaaatgatatactgcacaacagtgggcagcgatagtttgagacacattagcaatgagttgtttttctcaccttttcaagagaaaaagggggccacaacaacaagacgatccatctgacaattatttcactggttctgagaatataacaagattcagctacagggaactggttagagccacatcaaattttgaccaaggcaataagattggtgagggcggctatggacctgtctacaagggaacactcaaggatgggacacttattgccgtgaaggttctgtctttacattctagacaaggggcaaaggagtttcttaatgagcttcttgcaatctctgatgtaacacatgagaatcttgtcaaactctatggctgctgtgtagaaggaaaccacaggatccttatctacaattatcttgaaaataatagtcttgcacatacccttctagattcgcgacacagcaacatccagttcaactggagaactcgggtaaatatctgcatcggtgttgcccaaggattagctttcctccatggcagtgtcagccctcacattgttcaccgtgacatcaaggcgagcaatatacttcttgataaggatatgacgccaaaaatatctgattttggtctggca

SEQ ID NO: 14894 - protein, 194 aa, Zea mays subsp. mays
  peptide (1)..(194): Ceres Seq. ID no. 14306125
  misc_feature (3)..(193): Homolog of NCBI NO: 38344329 NR Description: OSJNBa0058K23.11 [Oryza sativa (japonica
  misc_feature (22)..(193): Homolog of NCBI NO: 18394385 NR Description: protein kinase family [Arabidopsis thaliana] Unknown protein [Arabidopsis thaliana]
  misc_feature (29)..(193): Homolog of NCBI NO: 25287648 NR Description: hypothetical protein F19K19.4 [imported] - thaliana >gi|9989053|gb|AAG10816.1|AC011808_4 Unknown protein
  misc_feature (28)..(193): Homolog of NCBI NO: 5923666 NR Description: putative receptor ser/thr protein kinase
  misc_feature (28)..(193): Homolog of NCBI NO: 18398327 NR Description: protein kinase family [Arabidopsis thaliana]
  misc_feature (28)..(193): Homolog of NCBI NO: 6403501 NR Description: putative protein kinase [Arabidopsis thaliana]
  misc_feature (27)..(193): Homolog of NCBI NO: 34901978 NR Description: putative receptor ser/thr protein [Oryza sativa
  misc_feature (1)..(193): Homolog of NCBI NO: 38344039 NR Description: OSJNBb0017I01.6 [Oryza sativa (japonica
  misc_feature (63)..(193): Homolog of NCBI NO: 5679843 NR Description: Putitive Ser/Thr protein kinase [Oryza sativa
  misc_feature (10)..(149): Homolog of NCBI NO: 5852099 NR Description: zwh22.1 [Oryza sativa (indica cultivar-group)]
MSCFSHLFKRKRGPQQQDDPSDNYFTGSENITRFSYRELVRATSNFDQGNKIGEGGYGPVYKGTLKDGTLIAVKVLSLHSRQGAKEFLNELLAISDVTHENLVKLYGCCVEGNHRILIYNYLENNSLAHTLLDSRHSNIQFNWRTRVNICIGVAQGLAFLHGSVSPHIVHRDIKASNILLDKDMTPKISDFGLA

SEQ ID NO: 14895 - protein, 143 aa, Zea mays subsp. mays
  peptide (1)..(143): Ceres Seq. ID no. 14306126
  misc_feature (80)..(143): Homolog of NCBI NO: 15219817 NR Description: receptor-related kinase [Arabidopsis thaliana] putative receptor kinase [Arabidopsis thaliana]
NRSIPLYPAVTRPGPGGRRVCLPVPAPLARRVNGLTAPARHVRSTIQVHAFAFPFLSSPPLPQSHPFRSAEAGETSKPKEGKKKLSPLTRSPLPRPSQSGGAGAGADSFRQAGATWCGGLFPRFCATAGLNCPPRLPYQGHQD

SEQ ID NO: 14896 - DNA, 854 bp, Zea mays subsp. mays
  misc_feature (1)..(854): Ceres Seq. ID no. 13635448
  misc_feature: MA Experiment ID: 108535 Result: Up-regulated in Transcription
  misc_feature: MA Experiment 108535 PARAMETER Experiment Name: Zm_Meristem_P Parameter: Age (day) Value: 8
  misc_feature: MA Experiment 108535 PARAMETER Experiment Name: Zm_Meristem_P Parameter: Organism Value: Zea mays
  misc_feature: MA Experiment 108535 PARAMETER Experiment Name: Zm_Meristem_P Parameter: Plant Line Value: 35A19
  misc_feature: MA Experiment 108535 PARAMETER Experiment Name: Zm_Meristem_P Parameter: Tissue Value: Root Meristem vs. Above Root Meristem
acccacccccacacccacgcgcccggcggcgtgctctctgctctctgctgtctgctctgcacccaggaccttcggccacaggagctcagccctatccctcgacggagctcgcggcggctcgacccttccccatctccagctgcacgcggtctccaccgcctggaatccagggcctccgacgccaccccacctacaccgactggaatcgaggaccgtcggcgccgccgtcccctgcctgctgcctcgactcaactgtgtcagggtattcgcaaacggtgacaaaggttctgtcttgccttgctgtggagccatggctgcaaagatacgcgtggtgatgaagtcttttatgagccaaagcaaccaggtcgtagggcttctgccattcacaaagaaggtcggactacctgaatcgcgagccttgtacaccgtgctgcggtcgccgcatatcgataagaagtccagggaacagttctcgatgcatgtcaagaaacagtttgtggaactgacagccaaaccgcacgagctccacaagaagttcttctggctaaaacgcctgcgcatacctggggcccagtacgaggtgcagatttctttcaagacacgcctggatatggcgagcctaaggtcccaggctccttgatggctcacgatgatcgttcttatcgtcccgcgaaagtttgaagtgctgagactggtactcagaacttgtatccatcaacatttcatatgaagacatgcttattttgatgactttcgaaaaatgtagctgctaactatttccagtgcagttttgagtgcttatggcttgattcacacaaatgtagctgctacgttcagaaataaaaaaattatgg

SEQ ID NO: 14897 - protein, 212 aa, Zea mays subsp. mays
  peptide (1)..(212): Ceres Seq. ID no. 13635449
  misc_feature (107)..(196): Pfam Name: Ribosomal protein S10p/S20e Pfam Description: Ribosomal protein S10p/S20e
  misc_feature (104)..(212): Homolog of NCBI NO: 11177526 NR Description: ribosomal protein S10 [Zea mays]
  misc_feature (104)..(212): Homolog of NCBI NO: 11528351 NR Description: ribosomal protein S10 [Zea mays]
  misc_feature (104)..(209): Homolog of NCBI NO: 9229951 NR Description: mitochondrial ribosomal protein S10 [Oryza sativa
  misc_feature (104)..(209): Homolog of NCBI NO: 9229953 NR Description: mitochondrial ribosomal protein S10 [Oryza sativa
  misc_feature (104)..(208): Homolog of NCBI NO: 2119076 NR Description: ribosomal protein S10 - potato mitochondrion
  misc_feature (104)..(208): Homolog of NCBI NO: 1362069 NR Description: ribosomal protein S10 - garden pea mitochondrion
  misc_feature (104)..(208): Homolog of NCBI NO: 1710792 NR Description: MITOCHONDRIAL RIBOSOMAL PROTEIN S10
  misc_feature (104)..(208): Homolog of NCBI NO: 11177522 NR Description: ribosomal protein S10 [Oxalis regnellii]
  misc_feature (107)..(207): Homolog of NCBI NO: 2119078 NR Description: ribosomal protein S10 precursor - Arabidopsis >gi|517331|emb|CAA56711.1| ribosomal protein S10 [Arabidopsis
  misc_feature (107)..(207): Homolog of NCBI NO: 15228720 NR Description: 40S ribosomal protein S10, mitochondrial [Arabidopsis thaliana] >gi|21542442|sp|P42797|RT10_ARATH 40S protein S10, mitochondrial precursor >gi|9293864|dbj|BAB01767.1|
PTPTPTRPAACSLLSAVCSAPRTFGHRSSALSLDGARGGSTLPHLQLHAVSTAWNPGPPTPPHLHRLESRTVGAAVPCLLPRLNCVRVFANGDKGSVLPCCGAMAAKIRVVMKSFMSQSNQVVGLLPFTKKVGLPESRALYTVLRSPHIDKKSREQFSMHVKKQFVELTAKPHELHKKFFWLKRLRIPGAQYEVQISFKTRLDMASLRSQAP

SEQ ID NO: 14898 - protein, 110 aa, Zea mays subsp. mays
  peptide (1)..(110): Ceres Seq. ID no. 13635450
PPPHPRARRRALCSLLSALHPGPSATGAQPYPSTELAAARPFPISSCTRSPPPGIQGLRRHPTYTDWNRGPSAPPSPACCLDSTVSGYSQTVTKVLSCLAVEPWLQRYAW

SEQ ID NO: 14899 - protein, 109 aa, Zea mays subsp. mays
  peptide (1)..(109): Ceres Seq. ID no. 13635451
  misc_feature (4)..(93): Pfam Name: Ribosomal protein S10p/S20e Pfam Description: Ribosomal protein S10p/S20e
  misc_feature (1)..(109): Homolog of NCBI NO: 11177526 NR Description: ribosomal protein S10 [Zea mays]
  misc_feature (1)..(109): Homolog of NCBI NO: 11528351 NR Description: ribosomal protein S10 [Zea mays]
  misc_feature (1)..(106): Homolog of NCBI NO: 9229951 NR Description: mitochondrial ribosomal protein S10 [Oryza sativa
  misc_feature (1)..(106): Homolog of NCBI NO: 9229953 NR Description: mitochondrial ribosomal protein S10 [Oryza sativa
  misc_feature (1)..(105): Homolog of NCBI NO: 2119076 NR Description: ribosomal protein S10 - potato mitochondrion
  misc_feature (1)..(105): Homolog of NCBI NO: 1362069 NR Description: ribosomal protein S10 - garden pea mitochondrion
  misc_feature (1)..(105): Homolog of NCBI NO: 1710792 NR Description: MITOCHONDRIAL RIBOSOMAL PROTEIN S10
  misc_feature (1)..(105): Homolog of NCBI NO: 11177522 NR Description: ribosomal protein S10 [Oxalis regnellii]
  misc_feature (4)..(104): Homolog of NCBI NO: 2119078 NR Description: ribosomal protein S10 precursor - Arabidopsis >gi|517331|emb|CAA56711.1| ribosomal protein S10 [Arabidopsis
  misc_feature (4)..(104): Homolog of NCBI NO: 15228720 NR Description: 40S ribosomal protein S10, mitochondrial [Arabidopsis thaliana] >gi|21542442|sp|P42797|RT10_ARATH 40S protein S10, mitochondrial precursor >gi|9293864|dbj|BAB01767.1|
MAAKIRVVMKSFMSQSNQVVGLLPFTKKVGLPESRALYTVLRSPHIDKKSREQFSMHVKKQFVELTAKPHELHKKFFWLKRLRIPGAQYEVQISFKTRLDMASLRSQAP

SEQ ID NO: 14900 - DNA, 456 bp, Zea mays subsp. mays
  misc_feature (1)..(456): Ceres Seq. ID no. 4487388
  misc_feature: MA Experiment ID: 108543 Result: Up-regulated in Transcription
  misc_feature: MA Experiment ID: 108556 Result: Down-regulated in Transcription
  misc_feature: MA Experiment 108556 PARAMETER Experiment Name: Zm_Drought_P Parameter: Age (day) Value: 9
  misc_feature: MA Experiment 108556 PARAMETER Experiment Name: Zm_Drought_P Parameter: Organism Value: Zea mays
  misc_feature: MA Experiment 108556 PARAMETER Experiment Name: Zm_Drought_P Parameter: Plant Line Value: 35A19
  misc_feature: MA Experiment 108556 PARAMETER Experiment Name: Zm_Drought_P Parameter: Timepoint (hr) Value: 24
  misc_feature: MA Experiment 108556 PARAMETER Experiment Name: Zm_Drought_P Parameter: Tissue Value: Aerial
  misc_feature: MA Experiment 108556 PARAMETER Experiment Name: Zm_Drought_P Parameter: Treatment Value: Drought vs. No Drought
  misc_feature: MA Experiment ID: 20000479 Result: Down-regulated in Transcription
  misc_feature: MA Experiment 20000479 PARAMETER Experiment Name: Zm_Drought_P Parameter: Age (day) Value: 10
  misc_feature: MA Experiment 20000479 PARAMETER Experiment Name: Zm_Drought_P Parameter: Organism Value: Zea mays
  misc_feature: MA Experiment 20000479 PARAMETER Experiment Name: Zm_Drought_P Parameter: Plant Line Value: 35A19
  misc_feature: MA Experiment 20000479 PARAMETER Experiment Name: Zm_Drought_P Parameter: Timepoint (hr) Value: 48
  misc_feature: MA Experiment 20000479 PARAMETER Experiment Name: Zm_Drought_P Parameter: Tissue Value: Aerial
  misc_feature: MA Experiment 20000479 PARAMETER Experiment Name: Zm_Drought_P Parameter: Treatment Value: Drought vs. No Drought
  misc_feature: Pfam Name: HEAT Pfam Description: HEAT repeat
ccccgttcagtcgcagcccaggccgacgacggcagagagcgagccgacgccgccgcaccctcgtgccagaccttagctaaaagattggattcaaaggactgggttatgacatgtgaagctctcaacaatgttcgtcagttggcaatgtatcacaaggaacgattgcaggagcttctggagcctgtagttcctcttatcgtgaaatctgtgaagaacccaagaagtgctgtatgcaaaactgcactaatgacttgtgctgacatctttaaggcctatggtgacttaatggttcactcaatcgatccactgctagtacaactgtttctgaaggcttcacaagataagcgttttgtctgtgaagctgcagaggcagctcttatatcgatgacaagttggatctcccctttactactcttgccaagaatgctgccttacctcaagaacaagaatccacgg

SEQ ID NO: 14901 - protein, 152 aa, Zea mays subsp. mays
  peptide (1)..(152): Ceres Seq. ID no. 4487389
  misc_feature: Pfam Name: HEAT Pfam Description: HEAT repeat
  misc_feature (10)..(151): Homolog of NCBI NO: 15241493 NR Description: putative protein; protein id: At5g14790.1, by cDNA: 98046., supported by cDNA: gi_20260677 [Arabidopsis
  misc_feature (23)..(151): Homolog of NCBI NO: 18395821 NR Description: expressed protein; protein id: At3g01450.1, by cDNA: 125711. [Arabidopsis thaliana]
  misc_feature (23)..(151): Homolog of NCBI NO: 21537265 NR Description: unknown [Arabidopsis thaliana]
  misc_feature (21)..(151): Homolog of NCBI NO: 21593517 NR Description: unknown [Arabidopsis thaliana]
  misc_feature (21)..(151): Homolog of NCBI NO: 18414533 NR Description: expressed protein; protein id: At4g15830.1,
  misc_feature (35)..(151): Homolog of NCBI NO: 9294314 NR Description: gb|AAF24615.1~gene_id:K24M9.2~similar to unknown
  misc_feature (62)..(151): Homolog of NCBI NO: 15229670 NR Description: unknown protein; protein id: At3g18530.1
  misc_feature (62)..(151): Homolog of NCBI NO: 7485173 NR Description: hypothetical protein - Arabidopsis thaliana hypothetical protein [Arabidopsis thaliana]
  misc_feature (29)..(135): Homolog of NCBI NO: 40807213 NR Description: Unknown (protein for IMAGE:6161345) [Homo sapiens]
PRSVAAQADDGRERADAAAPSCQTLAKRLDSKDWVMTCEALNNVRQLAMYHKERLQELLEPVVPLIVKSVKNPRSAVCKTALMTCADIFKAYGDLMVHSIDPLLVQLFLKASQDKRFVCEAAEAALISMTSWISPLLLLPRMLPYLKNKNPR

SEQ ID NO: 14902 - protein, 117 aa, Zea mays subsp. mays
  peptide (1)..(117): Ceres Seq. ID no. 4487390
  misc_feature: Pfam Name: HEAT Pfam Description: HEAT repeat
  misc_feature (1)..(116): Homolog of NCBI NO: 15241493 NR Description: putative protein; protein id: At5g14790.1, by cDNA: 98046., supported by cDNA: gi_20260677 [Arabidopsis
  misc_feature (1)..(116): Homolog of NCBI NO: 18395821 NR Description: expressed protein; protein id: At3g01450.1, by cDNA: 125711. [Arabidopsis thaliana]
  misc_feature (1)..(116): Homolog of NCBI NO: 21537265 NR Description: unknown [Arabidopsis thaliana]
  misc_feature (1)..(116): Homolog of NCBI NO: 21593517 NR Description: unknown [Arabidopsis thaliana]
  misc_feature (1)..(116): Homolog of NCBI NO: 18414533 NR Description: expressed protein; protein id: At4g15830.1,
  misc_feature (1)..(116): Homolog of NCBI NO: 9294314 NR Description: gb|AAF24615.1~gene_id:K24M9.2~similar to unknown
  misc_feature (27)..(116): Homolog of NCBI NO: 15229670 NR Description: unknown protein; protein id: At3g18530.1
  misc_feature (27)..(116): Homolog of NCBI NO: 7485173 NR Description: hypothetical protein - Arabidopsis thaliana hypothetical protein [Arabidopsis thaliana]
  misc_feature (1)..(100): Homolog of NCBI NO: 40807213 NR Description: Unknown (protein for IMAGE:6161345) [Homo sapiens]
MTCEALNNVRQLAMYHKERLQELLEPVVPLIVKSVKNPRSAVCKTALMTCADIFKAYGDLMVHSIDPLLVQLFLKASQDKRFVCEAAEAALISMTSWISPLLLLPRMLPYLKNKNPR

SEQ ID NO: 14903 - protein, 104 aa, Zea mays subsp. mays
  peptide (1)..(104): Ceres Seq. ID no. 4487391
  misc_feature: Pfam Name: HEAT Pfam Description: HEAT repeat
  misc_feature (1)..(103): Homolog of NCBI NO: 15241493 NR Description: putative protein; protein id: At5g14790.1, by cDNA: 98046., supported by cDNA: gi_20260677 [Arabidopsis
  misc_feature (1)..(103): Homolog of NCBI NO: 18395821 NR Description: expressed protein; protein id: At3g01450.1, by cDNA: 125711. [Arabidopsis thaliana]
  misc_feature (1)..(103): Homolog of NCBI NO: 21537265 NR Description: unknown [Arabidopsis thaliana]
  misc_feature (1)..(103): Homolog of NCBI NO: 21593517 NR Description: unknown [Arabidopsis thaliana]
  misc_feature (1)..(103): Homolog of NCBI NO: 18414533 NR Description: expressed protein; protein id: At4g15830.1,
  misc_feature (1)..(103): Homolog of NCBI NO: 9294314 NR Description: gb|AAF24615.1~gene_id:K24M9.2~similar to unknown
  misc_feature (14)..(103): Homolog of NCBI NO: 15229670 NR Description: unknown protein; protein id: At3g18530.1
  misc_feature (14)..(103): Homolog of NCBI NO: 7485173 NR Description: hypothetical protein - Arabidopsis thaliana hypothetical protein [Arabidopsis thaliana]
  misc_feature (1)..(87): Homolog of NCBI NO: 40807213 NR Description: Unknown (protein for IMAGE:6161345) [Homo sapiens]
MYHKERLQELLEPVVPLIVKSVKNPRSAVCKTALMTCADIFKAYGDLMVHSIDPLLVQLFLKASQDKRFVCEAAEAALISMTSWISPLLLLPRMLPYLKNKNPR

SEQ ID NO: 14904 - DNA, 1094 bp, Zea mays subsp. mays; identical to SEQ ID NO: 14345
  misc_feature (1)..(1094): Ceres Seq. ID no. 13504098
  misc_feature: MA Experiment ID: 108504 Result: Up-regulated in Transcription
  misc_feature: MA Experiment 108504 PARAMETER Experiment Name: Zm_Drought_P Parameter: Age (day) Value: 8
  misc_feature: MA Experiment 108504 PARAMETER Experiment Name: Zm_Drought_P Parameter: Organism Value: Zea mays
  misc_feature: MA Experiment 108504 PARAMETER Experiment Name: Zm_Drought_P Parameter: Plant Line Value: 35A19
  misc_feature: MA Experiment 108504 PARAMETER Experiment Name: Zm_Drought_P Parameter: Timepoint (hr) Value: 12
  misc_feature: MA Experiment 108504 PARAMETER Experiment Name: Zm_Drought_P Parameter: Tissue Value: Aerial
  misc_feature: MA Experiment 108504 PARAMETER Experiment Name: Zm_Drought_P Parameter: Treatment Value: Drought vs. No Drought
  misc_feature: MA Experiment ID: 108522 Result: Up-regulated in Transcription
  misc_feature: MA Experiment 108522 PARAMETER Experiment Name: Zm_42deg_Heat_P Parameter: Age (day) Value: 8
  misc_feature: MA Experiment 108522 PARAMETER Experiment Name: Zm_42deg_Heat_P Parameter: Organism Value: Zea mays
  misc_feature: MA Experiment 108522 PARAMETER Experiment Name: Zm_42deg_Heat_P Parameter: Plant Line Value: 35A19
  misc_feature: MA Experiment 108522 PARAMETER Experiment Name: Zm_42deg_Heat_P Parameter: Temperature (deg C) Value: 42 vs. 22
  misc_feature: MA Experiment 108522 PARAMETER Experiment Name: Zm_42deg_Heat_P Parameter: Timepoint (hr) Value: 1
  misc_feature: MA Experiment 108522 PARAMETER Experiment Name: Zm_42deg_Heat_P Parameter: Tissue Value: Aerial
  misc_feature: MA Experiment ID: 108523 Result: Up-regulated in Transcription
  misc_feature: MA Experiment 108523 PARAMETER Experiment Name: Zm_42deg_Heat_P Parameter: Age (day) Value: 8
  misc_feature: MA Experiment 108523 PARAMETER Experiment Name: Zm_42deg_Heat_P Parameter: Organism Value: Zea mays
  misc_feature: MA Experiment 108523 PARAMETER Experiment Name: Zm_42deg_Heat_P Parameter: Plant Line Value: 35A19
  misc_feature: MA Experiment 108523 PARAMETER Experiment Name: Zm_42deg_Heat_P Parameter: Temperature (deg C) Value: 42 vs. 22
  misc_feature: MA Experiment 108523 PARAMETER Experiment Name: Zm_42deg_Heat_P Parameter: Timepoint (hr) Value: 6
  misc_feature: MA Experiment 108523 PARAMETER Experiment Name: Zm_42deg_Heat_P Parameter: Tissue Value: Aerial
  misc_feature: MA Experiment ID: 108526 Result: Up-regulated in Transcription
  misc_feature: MA Experiment 108526 PARAMETER Experiment Name: Zm_5mM_NO_P Parameter: Age (day) Value: 8
  misc_feature: MA Experiment 108526 PARAMETER Experiment Name: Zm_5mM_NO_P Parameter: Organism Value: Zea mays
  misc_feature: MA Experiment 108526 PARAMETER Experiment Name: Zm_5mM_NO_P Parameter: Plant Line Value: 35A19
  misc_feature: MA Experiment 108526 PARAMETER Experiment Name: Zm_5mM_NO_P Parameter: Timepoint (hr) Value: 1
  misc_feature: MA Experiment 108526 PARAMETER Experiment Name: Zm_5mM_NO_P Parameter: Tissue Value: Aerial
  misc_feature: MA Experiment 108526 PARAMETER Experiment Name: Zm_5mM_NO_P Parameter: Treatment Value: 5mM NO vs. No Treatment
  misc_feature: MA Experiment ID: 108527 Result: Up-regulated in Transcription
  misc_feature: MA Experiment 108527 PARAMETER Experiment Name: Zm_5mM_NO_P Parameter: Age (day) Value: 8
  misc_feature: MA Experiment 108527 PARAMETER Experiment Name: Zm_5mM_NO_P Parameter: Organism Value: Zea mays
  misc_feature: MA Experiment 108527 PARAMETER Experiment Name: Zm_5mM_NO_P Parameter: Plant Line Value: 35A19
  misc_feature: MA Experiment 108527 PARAMETER Experiment Name: Zm_5mM_NO_P Parameter: Timepoint (hr) Value: 6
  misc_feature: MA Experiment 108527 PARAMETER Experiment Name: Zm_5mM_NO_P Parameter: Tissue Value: Aerial
  misc_feature: MA Experiment 108527 PARAMETER Experiment Name: Zm_5mM_NO_P Parameter: Treatment Value: 5mM NO vs. No Treatment
  misc_feature: MA Experiment ID: 108533 Result: Up-regulated in Transcription
  misc_feature: MA Experiment 108533 PARAMETER Experiment Name: Zm_4deg_Cold_P Parameter: Age (hr) Value: 8
  misc_feature: MA Experiment 108533 PARAMETER Experiment Name: Zm_4deg_Cold_P Parameter: Organism Value: Zea mays
  misc_feature: MA Experiment 108533 PARAMETER Experiment Name: Zm_4deg_Cold_P Parameter: Plant Line Value: 35A19
  misc_feature: MA Experiment 108533 PARAMETER Experiment Name: Zm_4deg_Cold_P Parameter: Temperature (deg C) Value: 4 vs. 22
  misc_feature: MA Experiment 108533 PARAMETER Experiment Name: Zm_4deg_Cold_P Parameter: Timepoint (hr) Value: 1
  misc_feature: MA Experiment 108533 PARAMETER Experiment Name: Zm_4deg_Cold_P Parameter: Tissue Value: Aerial
  misc_feature: MA Experiment ID: 108534 Result: Up-regulated in Transcription
  misc_feature: MA Experiment 108534 PARAMETER Experiment Name: Zm_4deg_Cold_P Parameter: Age (hr) Value: 8
  misc_feature: MA Experiment 108534 PARAMETER Experiment Name: Zm_4deg_Cold_P Parameter: Organism Value: Zea mays
  misc_feature: MA Experiment 108534 PARAMETER Experiment Name: Zm_4deg_Cold_P Parameter: Plant Line Value: 35A19
  misc_feature: MA Experiment 108534 PARAMETER Experiment Name: Zm_4deg_Cold_P Parameter: Temperature (deg C) Value: 4 vs. 22
  misc_feature: MA Experiment 108534 PARAMETER Experiment Name: Zm_4deg_Cold_P Parameter: Timepoint (hr) Value: 6
  misc_feature: MA Experiment 108534 PARAMETER Experiment Name: Zm_4deg_Cold_P Parameter: Tissue Value: Aerial
  misc_feature: MA Experiment ID: 108542 Result: Up-regulated in Transcription
  misc_feature: MA Experiment 108542 PARAMETER Experiment Name: Zm_150mM_NaCl_P Parameter: Age (day) Value: 8
  misc_feature: MA Experiment 108542 PARAMETER Experiment Name: Zm_150mM_NaCl_P Parameter: Organism Value: Zea mays
  misc_feature: MA Experiment 108542 PARAMETER Experiment Name: Zm_150mM_NaCl_P Parameter: Plant Line Value: 35A19
  misc_feature: MA Experiment 108542 PARAMETER Experiment Name: Zm_150mM_NaCl_P Parameter: Timepoint (hr) Value: 6
  misc_feature: MA Experiment 108542 PARAMETER Experiment Name: Zm_150mM_NaCl_P Parameter: Tissue Value: Aerial
  misc_feature: MA Experiment 108542 PARAMETER Experiment Name: Zm_150mM_NaCl_P Parameter: Treatment Value: 150mM NaCl vs. No Treatment
  misc_feature: MA Experiment ID: 108556 Result: Up-regulated in Transcription
  misc_feature: MA Experiment 108556 PARAMETER Experiment Name: Zm_Drought_P Parameter: Age (day) Value: 9
  misc_feature: MA Experiment 108556 PARAMETER Experiment Name: Zm_Drought_P Parameter: Organism Value: Zea mays
  misc_feature: MA Experiment 108556 PARAMETER Experiment Name: Zm_Drought_P Parameter: Plant Line Value: 35A19
  misc_feature: MA Experiment 108556 PARAMETER Experiment Name: Zm_Drought_P Parameter: Timepoint (hr) Value: 24
  misc_feature: MA Experiment 108556 PARAMETER Experiment Name: Zm_Drought_P Parameter: Tissue Value: Aerial
  misc_feature: MA Experiment 108556 PARAMETER Experiment Name: Zm_Drought_P Parameter: Treatment Value: Drought vs. No Drought
  misc_feature: MA Experiment ID: 108559 Result: Up-regulated in Transcription
  misc_feature: MA Experiment 108559 PARAMETER Experiment Name: Zm_5mM_NO_P Parameter: Age (day) Value: 8
  misc_feature: MA Experiment 108559 PARAMETER Experiment Name: Zm_5mM_NO_P Parameter: Organism Value: Zea mays
  misc_feature: MA Experiment 108559 PARAMETER Experiment Name: Zm_5mM_NO_P Parameter: Plant Line Value: 35A19
  misc_feature: MA Experiment 108559 PARAMETER Experiment Name: Zm_5mM_NO_P Parameter: Timepoint (hr) Value: 12
  misc_feature: MA Experiment 108559 PARAMETER Experiment Name: Zm_5mM_NO_P Parameter: Tissue Value: Aerial
  misc_feature: MA Experiment 108559 PARAMETER Experiment Name: Zm_5mM_NO_P Parameter: Treatment Value: 5mM NO vs. No Treatment
  misc_feature: MA Experiment ID: 108597 Result: Up-regulated in Transcription
  misc_feature: MA Experiment 108597 PARAMETER Experiment Name: Zm_100uM_ABA_P Parameter: Age (day) Value: 9
  misc_feature: MA Experiment 108597 PARAMETER Experiment Name: Zm_100uM_ABA_P Parameter: Organism Value: Zea mays
  misc_feature: MA Experiment 108597 PARAMETER Experiment Name: Zm_100uM_ABA_P Parameter: Plant Line Value: 35A19
  misc_feature: MA Experiment 108597 PARAMETER Experiment Name: Zm_100uM_ABA_P Parameter: Timepoint (hr) Value: 24
  misc_feature: MA Experiment 108597 PARAMETER Experiment Name: Zm_100uM_ABA_P Parameter: Tissue Value: Aerial
  misc_feature: MA Experiment 108597 PARAMETER Experiment Name: Zm_100uM_ABA_P Parameter: Treatment Value: 100uM ABA vs. No Treatment
  misc_feature: MA Experiment ID: 20000479 Result: Up-regulated in Transcription
  misc_feature: MA Experiment 20000479 PARAMETER Experiment Name: Zm_Drought_P Parameter: Age (day) Value: 10
  misc_feature: MA Experiment 20000479 PARAMETER Experiment Name: Zm_Drought_P Parameter: Organism Value: Zea mays
  misc_feature: MA Experiment 20000479 PARAMETER Experiment Name: Zm_Drought_P Parameter: Plant Line Value: 35A19
  misc_feature: MA Experiment 20000479 PARAMETER Experiment Name: Zm_Drought_P Parameter: Timepoint (hr) Value: 48
  misc_feature: MA Experiment 20000479 PARAMETER Experiment Name: Zm_Drought_P Parameter: Tissue Value: Aerial
  misc_feature: MA Experiment 20000479 PARAMETER Experiment Name: Zm_Drought_P Parameter: Treatment Value: Drought vs. No Drought
  misc_feature: MA Experiment ID: 20000480 Result: Up-regulated in Transcription
  misc_feature: MA Experiment 20000480 PARAMETER Experiment Name: Zm_Drought_P Parameter: Age (day) Value: 11
  misc_feature: MA Experiment 20000480 PARAMETER Experiment Name: Zm_Drought_P Parameter: Organism Value: Zea mays
  misc_feature: MA Experiment 20000480 PARAMETER Experiment Name: Zm_Drought_P Parameter: Plant Line Value: 35A19
  misc_feature: MA Experiment 20000480 PARAMETER Experiment Name: Zm_Drought_P Parameter: Timepoint (hr) Value: 72
  misc_feature: MA Experiment 20000480 PARAMETER Experiment Name: Zm_Drought_P Parameter: Tissue Value: Aerial
  misc_feature: MA Experiment 20000480 PARAMETER Experiment Name: Zm_Drought_P Parameter: Treatment Value: Drought vs. No Drought
  misc_feature: MA Experiment ID: 20000630 Result: Up-regulated in Transcription
  misc_feature: MA Experiment 20000630 PARAMETER Experiment Name: Zm_Herbicide-Treatments_P Parameter: Timepoint (hr) Value: 4
  misc_feature: MA Experiment 20000630 PARAMETER Experiment Name: Zm_Herbicide-Treatments_P Parameter: Tissue Value: Aerial
  misc_feature: MA Experiment 20000630 PARAMETER Experiment Name: Zm_Herbicide-Treatments_P Parameter: Treatment Value: Roundup vs. No Treatment

SEQ ID NO: 14905 - protein, 214 aa, Zea mays subsp. mays; identical to SEQ ID NO: 14346
  peptide (1)..(214): Ceres Seq. ID no. 13504099
  misc_feature (1)..(208): Pfam Name: Eukaryotic aspartyl protease Pfam Description: Eukaryotic aspartyl protease
  misc_feature (1)..(208): Pfam Name: Eukaryotic aspartyl protease Pfam Description: Eukaryotic aspartyl protease
  misc_feature (1)..(214): Homolog of NCBI NO: 15231625 NR Description: expressed protein [Arabidopsis thaliana]
  misc_feature (1)..(214): Homolog of NCBI NO: 15228044 NR Description: chloroplast nucleoid DNA binding protein -related thaliana] >gi|20197868|gb|AAM15292.1| putative chloroplast DNA binding protein [Arabidopsis thaliana]
  misc_feature (1)..(214): Homolog of NCBI NO: 25408826 NR Description: hypothetical protein At2g42980 [imported] -
  misc_feature (6)..(212): Homolog of NCBI NO: 15223368 NR Description: chloroplast nucleoid DNA binding protein -related
  misc_feature (1)..(212): Homolog of NCBI NO: 15230868 NR Description: expressed protein [Arabidopsis thaliana]
  misc_feature (1)..(214): Homolog of NCBI NO: 15228044 NR Description: chloroplast nucleoid DNA binding protein -related thaliana] >gi|20197868|gb|AAM15292.1| putative chloroplast DNA binding protein [Arabidopsis thaliana]
  misc_feature (6)..(212): Homolog of NCBI NO: 15223368 NR Description: chloroplast nucleoid DNA binding protein -related
  misc_feature (1)..(211): Homolog of NCBI NO: 28392860 NR Description: unknown protein [Arabidopsis thaliana]
  misc_feature (1)..(211): Homolog of NCBI NO: 15231010 NR Description: expressed protein [Arabidopsis thaliana]
  misc_feature (1)..(211): Homolog of NCBI NO: 15290061 NR Description: nucleoid DNA-binding protein cnd41-like protein
  misc_feature (1)..(211): Homolog of NCBI NO: 15228618 NR Description: expressed protein [Arabidopsis thaliana]
  misc_feature (6)..(212): Homolog of NCBI NO: 21594980 NR Description: chloroplast nucleoid DNA binding protein,
  misc_feature (1)..(212): Homolog of NCBI NO: 15230868 NR Description: expressed protein [Arabidopsis thaliana]
  misc_feature (1)..(214): Homolog of NCBI NO: 25408826 NR Description: hypothetical protein At2g42980 [imported] -
  misc_feature (1)..(214): Homolog of NCBI NO: 15231625 NR Description: expressed protein [Arabidopsis thaliana]
  misc_feature (6)..(212): Homolog of NCBI NO: 21594980 NR Description: chloroplast nucleoid DNA binding protein,
  misc_feature (1)..(211): Homolog of NCBI NO: 15228618 NR Description: expressed protein [Arabidopsis thaliana]
  misc_feature (1)..(211): Homolog of NCBI NO: 15290061 NR Description: nucleoid DNA-binding protein cnd41-like protein
  misc_feature (1)..(211): Homolog of NCBI NO: 15231010 NR Description: expressed protein [Arabidopsis thaliana]
  misc_feature (1)..(211): Homolog of NCBI NO: 28392860 NR Description: unknown protein [Arabidopsis thaliana]
  misc_feature (161)..(161): Xaa is any aa, unknown or other

SEQ ID NO: 14906 - protein, 186 aa, Zea mays subsp. mays; identical to SEQ ID NO: 14347
  peptide (1)..(186): Ceres Seq. ID no. 13504100
  misc_feature (162)..(162): Xaa is any aa, unknown or other

SEQ ID NO: 14907 - DNA, 471 bp, Zea mays subsp. mays
  misc_feature (1)..(471): Ceres Seq. ID no. 4487301
  misc_feature: MA Experiment ID: 108528 Result: Down-regulated in Transcription
  misc_feature: MA Experiment 108528 PARAMETER Experiment Name: Zm_Imbibed_Seeds_P Parameter: Age (day) Value: 5 vs. 2
  misc_feature: MA Experiment 108528 PARAMETER Experiment Name: Zm_Imbibed_Seeds_P Parameter: Organism Value: Zea mays
  misc_feature: MA Experiment 108528 PARAMETER Experiment Name: Zm_Imbibed_Seeds_P Parameter: Plant Line Value: 35A19
  misc_feature: MA Experiment 108528 PARAMETER Experiment Name: Zm_Imbibed_Seeds_P Parameter: Tissue Value: Aerial vs. Embryo
  misc_feature: MA Experiment ID: 108529 Result: Down-regulated in Transcription
  misc_feature: MA Experiment 108529 PARAMETER Experiment Name: Zm_Imbibed_Seeds_P Parameter: Age (day) Value: 5 vs. 2
  misc_feature: MA Experiment 108529 PARAMETER Experiment Name: Zm_Imbibed_Seeds_P Parameter: Organism Value: Zea mays
  misc_feature: MA Experiment 108529 PARAMETER Experiment Name: Zm_Imbibed_Seeds_P Parameter: Plant Line Value: 35A19
  misc_feature: MA Experiment 108529 PARAMETER Experiment Name: Zm_Imbibed_Seeds_P Parameter: Tissue Value: Roots vs. Embryo
  misc_feature: MA Experiment ID: 20000632 Result: Down-regulated in Transcription
  misc_feature: MA Experiment 20000632 PARAMETER Experiment Name: Zm_Herbicide-Treatments_P Parameter: Timepoint (hr) Value: 4
  misc_feature: MA Experiment 20000632 PARAMETER Experiment Name: Zm_Herbicide-Treatments_P Parameter: Tissue Value: Aerial
  misc_feature: MA Experiment 20000632 PARAMETER Experiment Name: Zm_Herbicide-Treatments_P Parameter: Treatment Value: Glean vs. No Treatment
attggcaagggtttagggcgcagcagagtctggtgtctcttgctccgaccccgttggcgactgagacgcgatccccttctcctgcactgccgtcctccgtcgctgcgatgcctcggtattactgtgactactgcgacacctacctgacccatgactcgccatctgtccggaaacaacataatgctggatacaaacacaaggcgaatgttcgaacctactatcagcaatttgaggagcagcaaactcaaagtttaattgatcaaagaatcaaggagcatcttggacaagctgcagctttccaagcaggtgcccctttcaaccaacatctgcttgcattcccaggagctatggcccgccctcgtcttccaattctgccaacccctggcatgcctcatgggtttcctcaagcacctggcgcaccattgatgccaggaattaggccccngattttaccagctccaggttatcctg

SEQ ID NO: 14908 - protein, 156 aa, Zea mays subsp. mays
  peptide (1)..(156): Ceres Seq. ID no. 4487302
  misc_feature (36)..(155): Homolog of NCBI NO: 18412147 NR Description: putative C-type U1 snRNP; protein id:
  misc_feature (36)..(155): Homolog of NCBI NO: 28466929 NR Description: At4g03120 [Arabidopsis thaliana]
  misc_feature (36)..(143): Homolog of NCBI NO: 25295939 NR Description: probable C-type U1 snRNP [imported] - Arabidopsis
  misc_feature (36)..(154): Homolog of NCBI NO: 6755596 NR Description: U1 small nuclear ribonucleoprotein 1C [Mus
  misc_feature (36)..(154): Homolog of NCBI NO: 34852241 NR Description: similar to U1 snRNP-specific protein C [Rattus
  misc_feature (36)..(155): Homolog of NCBI NO: 39580999 NR Description: Hypothetical protein CBG19656 [Caenorhabditis
  misc_feature (36)..(154): Homolog of NCBI NO: 4507127 NR Description: small nuclear ribonucleoprotein polypeptide C
  misc_feature (36)..(155): Homolog of NCBI NO: 17539712 NR Description: Small nuclear ribonucleoprotein polypeptide C
  misc_feature (34)..(155): Homolog of NCBI NO: 31242193 NR Description: ENSANGP00000018169 [Anopheles gambiae]
  misc_feature (36)..(154): Homolog of NCBI NO: 24648101 NR Description: CG5454-PA [Drosophila melanogaster]
  misc_feature (148)..(148): Xaa is any aa, unknown or other
WQGFRAQQSLVSLAPTPLATETRSPSPALPSSVAAMPRYYCDYCDTYLTHDSPSVRKQHNAGYKHKANVRTYYQQFEEQQTQSLIDQRIKEHLGQAAAFQAGAPFNQHLLAFPGAMARPRLPILPTPGMPHGFPQAPGAPLMPGIRPXILPAPGYP

SEQ ID NO: 14909 - protein, 121 aa, Zea mays subsp. mays
  peptide (1)..(121): Ceres Seq. ID no. 4487303
  misc_feature (1)..(120): Homolog of NCBI NO: 18412147 NR Description: putative C-type U1 snRNP; protein id:
  misc_feature (1)..(120): Homolog of NCBI NO: 28466929 NR Description: At4g03120 [Arabidopsis thaliana]
  misc_feature (1)..(108): Homolog of NCBI NO: 25295939 NR Description: probable C-type U1 snRNP [imported] - Arabidopsis
  misc_feature (1)..(119): Homolog of NCBI NO: 6755596 NR Description: U1 small nuclear ribonucleoprotein 1C [Mus
  misc_feature (1)..(119): Homolog of NCBI NO: 34852241 NR Description: similar to U1 snRNP-specific protein C [Rattus
  misc_feature (1)..(120): Homolog of NCBI NO: 39580999 NR Description: Hypothetical protein CBG19656 [Caenorhabditis
  misc_feature (1)..(119): Homolog of NCBI NO: 4507127 NR Description: small nuclear ribonucleoprotein polypeptide C
  misc_feature (1)..(120): Homolog of NCBI NO: 17539712 NR Description: Small nuclear ribonucleoprotein polypeptide C
  misc_feature (1)..(120): Homolog of NCBI NO: 31242193 NR Description: ENSANGP00000018169 [Anopheles gambiae]
  misc_feature (1)..(119): Homolog of NCBI NO: 24648101 NR Description: CG5454-PA [Drosophila melanogaster]
  misc_feature (113)..(113): Xaa is any aa, unknown or other
MPRYYCDYCDTYLTHDSPSVRKQHNAGYKHKANVRTYYQQFEEQQTQSLIDQRIKEHLGQAAAFQAGAPFNQHLLAFPGAMARPRLPILPTPGMPHGFPQAPGAPLMPGIRPXILPAPGYP

SEQ ID NO: 14910 - DNA, 1181 bp, Zea mays subsp. mays
  misc_feature (1)..(1181): Ceres Seq. ID no. 13622983
  misc_feature: MA Experiment ID: 108535 Result: Up-regulated in Transcription
  misc_feature: MA Experiment 108535 PARAMETER Experiment Name: Zm_Meristem_P Parameter: Age (day) Value: 8
  misc_feature: MA Experiment 108535 PARAMETER Experiment Name: Zm_Meristem_P Parameter: Organism Value: Zea mays
  misc_feature: MA Experiment 108535 PARAMETER Experiment Name: Zm_Meristem_P Parameter: Plant Line Value: 35A19
  misc_feature: MA Experiment 108535 PARAMETER Experiment Name: Zm_Meristem_P Parameter: Tissue Value: Root Meristem vs. Above Root Meristem
  misc_feature: MA Experiment ID: 20000535 Result: Up-regulated in Transcription
  misc_feature: MA Experiment 20000535 PARAMETER Experiment Name: Zm_Hybrid_Seed_Dev_P Parameter: DAP Value: 30 vs. 12
  misc_feature: MA Experiment 20000535 PARAMETER Experiment Name: Zm_Hybrid_Seed_Dev_P Parameter: Organism Value: Zea mays
  misc_feature: MA Experiment 20000535 PARAMETER Experiment Name: Zm_Hybrid_Seed_Dev_P Parameter: Plant Line Value: 35A19
  misc_feature: MA Experiment 20000535 PARAMETER Experiment Name: Zm_Hybrid_Seed_Dev_P Parameter: Tissue Value: Embryo vs. Unfert Floret
aaacgatacacgccgcgatagaaacactcagacacaccctctccatccgcccctccaccctcctcttcctcctcccgtcgcggcttcccccgattggcatccggggcgggcccatcccccacccggccgccgcgcgcgtccatggacggcctgcacggtacggacgcctgcttctcccccgcgagggccgtctcgccgcaggtgaggctaccggggccgccggacgtgggcagtcagtacctggcggagctgctgcaggagcaccagaagctgggacccttcatgcaggtgctcccaatctgcagcaggctgctgaatcaagagagtaggtgttccgcaaggagctatgggttggcaaggacccccacagagccctgcttcttatatcgtcaagaagattttgcggttggaagtaccgacagaaacataccctaatttcaattttatcggtcgtcttcttggaccaaggggaaattctttaaagaggattgaagcctgtacaggctgtcgtgtattcatcagagggaaaggctcaattaaagattctggcaaggaggaacaactcaagggaagacctggctatgaacacttgagtgaacccctccatatcttgattgaagctgagttacctgctaatgtgattgatgcaagacttgcaaaggcacaagagatccttgaagagttgttgaaaccagtggacgagtcacaagactactacaagagacagcaactccgagaacttgccatgttgaattcgccactccgagaggagagtccacgttcaggcggtgctcctccaagtcccttcagtaagactgtctccggtaggccgaataaaacaggggacacagaattgtagatgacactatttatcactgtttgaagagagaagtttgaaataggggatctactggagatagcctaacggcggcatgaaaagagtgaaacaatgacacccattcctccatcttgatcctccggcaaccccacttagtccatgccttcacatcctattttccatgagcaaagctttcatgatggtgttggtagtgtgtgacatcctttaatgtactagcaggtgaattttgatctcccatcccatgtgacattaaccttgagtgacagatgactatgcgtagtgtatcctctatgactgtataattagaacatttgatttatct

SEQ ID NO: 14911 - protein, 170 aa, Zea mays subsp. mays
  peptide (1)..(170): Ceres Seq. ID no. 13622984
  misc_feature (20)..(75): Pfam Name: KH domain Pfam Description: KH domain
  misc_feature (1)..(166): Homolog of NCBI NO: 12322716 NR Description: unknown protein; 28504-31237 [Arabidopsis
  misc_feature (1)..(166): Homolog of NCBI NO: 30680583 NR Description: KH domain protein [Arabidopsis thaliana]
  misc_feature (1)..(155): Homolog of NCBI NO: 34900448 NR Description: contains EST C27129(C51039)~similar to
  misc_feature (1)..(166): Homolog of NCBI NO: 15224909 NR Description: KH domain protein [Arabidopsis thaliana]
  misc_feature (1)..(166): Homolog of NCBI NO: 40645104 NR Description: hypothetical protein [Nicotiana tabacum]
  misc_feature (1)..(155): Homolog of NCBI NO: 34909270 NR Description: P0454H12.18 [Oryza sativa (japonica
  misc_feature (1)..(170): Homolog of NCBI NO: 16930473 NR Description: At1g09660/F21M12_5 [Arabidopsis thaliana]
  misc_feature (1)..(170): Homolog of NCBI NO: 22329449 NR Description: KH domain quaking protein, putative [Arabidopsis >gi|26452384|dbj|BAC43277.1| putative elongation factor
  misc_feature (1)..(151): Homolog of NCBI NO: 15236738 NR Description: KH domain protein [Arabidopsis thaliana]
  misc_feature (1)..(151): Homolog of NCBI NO: 20268733 NR Description: unknown protein [Arabidopsis thaliana]
MGWQGPPQSPASYIVKKILRLEVPTETYPNFNFIGRLLGPRGNSLKRIEACTGCRVFIRGKGSIKDSGKEEQLKGRPGYEHLSEPLHILIEAELPANVIDARLAKAQEILEELLKPVDESQDYYKRQQLRELAMLNSPLREESPRSGGAPPSPFSKTVSGRPNKTGDTEL

SEQ ID NO: 14912 - protein, 108 aa, Zea mays subsp. mays
  peptide (1)..(108): Ceres Seq. ID no. 13622985
TIHAAIETLRHTLSIRPSTLLFLLPSRLPPIGIRGGPIPHPAAARVHGRPARYGRLLLPREGRLAAGEATGAAGRGQSVPGGAAAGAPEAGTLHAGAPNLQQAAESRE

SEQ ID NO: 14913 - protein, 97 aa, Zea mays subsp. mays
  peptide (1)..(97): Ceres Seq. ID no. 13622986
  misc_feature (1)..(61): Homolog of NCBI NO: 12322716 NR Description: unknown protein; 28504-31237 [Arabidopsis
  misc_feature (1)..(61): Homolog of NCBI NO: 30680583 NR Description: KH domain protein [Arabidopsis thaliana]
  misc_feature (3)..(61): Homolog of NCBI NO: 34900448 NR Description: contains EST C27129(C51039)~similar to
  misc_feature (1)..(61): Homolog of NCBI NO: 15224909 NR Description: KH domain protein [Arabidopsis thaliana]
  misc_feature (1)..(61): Homolog of NCBI NO: 40645104 NR Description: hypothetical protein [Nicotiana tabacum]
  misc_feature (1)..(66): Homolog of NCBI NO: 34909270 NR Description: P0454H12.18 [Oryza sativa (japonica
  misc_feature (18)..(63): Homolog of NCBI NO: 16930473 NR Description: At1g09660/F21M12_5 [Arabidopsis thaliana]
  misc_feature (18)..(63): Homolog of NCBI NO: 22329449 NR Description: KH domain quaking protein, putative [Arabidopsis >gi|26452384|dbj|BAC43277.1| putative elongation factor
  misc_feature (1)..(61): Homolog of NCBI NO: 15236738 NR Description: KH domain protein [Arabidopsis thaliana]
  misc_feature (1)..(61): Homolog of NCBI NO: 20268733 NR Description: unknown protein [Arabidopsis thaliana]
MDGLHGTDACFSPARAVSPQVRLPGPPDVGSQYLAELLQEHQKLGPFMQVLPICSRLLNQESRCSARSYGLARTPTEPCFLYRQEDFAVGSTDRNIP

SEQ ID NO: 14914 - DNA, 1863 bp, Zea mays subsp. mays
  misc_feature (1)..(1863): Ceres Seq. ID no. 13635478
  misc_feature: MA Experiment ID: 108527 Result: Down-regulated in Transcription
  misc_feature: MA Experiment 108527 PARAMETER Experiment Name: Zm_5mM_NO_P Parameter: Age (day) Value: 8
  misc_feature: MA Experiment 108527 PARAMETER Experiment Name: Zm_5mM_NO_P Parameter: Organism Value: Zea mays
  misc_feature: MA Experiment 108527 PARAMETER Experiment Name: Zm_5mM_NO_P Parameter: Plant Line Value: 35A19
  misc_feature: MA Experiment 108527 PARAMETER Experiment Name: Zm_5mM_NO_P Parameter: Timepoint (hr) Value: 6
  misc_feature: MA Experiment 108527 PARAMETER Experiment Name: Zm_5mM_NO_P Parameter: Tissue Value: Aerial
  misc_feature: MA Experiment 108527 PARAMETER Experiment Name: Zm_5mM_NO_P Parameter: Treatment Value: 5mM NO vs. No Treatment
  misc_feature: MA Experiment ID: 108559 Result: Down-regulated in Transcription
  misc_feature: MA Experiment 108559 PARAMETER Experiment Name: Zm_5mM_NO_P Parameter: Age (day) Value: 8
  misc_feature: MA Experiment 108559 PARAMETER Experiment Name: Zm_5mM_NO_P Parameter: Organism Value: Zea mays
  misc_feature: MA Experiment 108559 PARAMETER Experiment Name: Zm_5mM_NO_P Parameter: Plant Line Value: 35A19
  misc_feature: MA Experiment 108559 PARAMETER Experiment Name: Zm_5mM_NO_P Parameter: Timepoint (hr) Value: 12
  misc_feature: MA Experiment 108559 PARAMETER Experiment Name: Zm_5mM_NO_P Parameter: Tissue Value: Aerial
  misc_feature: MA Experiment 108559 PARAMETER Experiment Name: Zm_5mM_NO_P Parameter: Treatment Value: 5mM NO vs. No Treatment
  misc_feature: MA Experiment ID: 108688 Result: Down-regulated in Transcription
  misc_feature: MA Experiment 108688 PARAMETER Experiment Name: Zm_Embryos-Flowers__P Parameter: Tissue Value: Immature Flowers vs. Aerial+
  misc_feature: MA Experiment ID: 20000535 Result: Up-regulated in Transcription
  misc_feature: MA Experiment 20000535 PARAMETER Experiment Name: Zm_Hybrid_Seed_Dev_P Parameter: DAP Value: 30 vs. 12
  misc_feature: MA Experiment 20000535 PARAMETER Experiment Name: Zm_Hybrid_Seed_Dev_P Parameter: Organism Value: Zea mays
  misc_feature: MA Experiment 20000535 PARAMETER Experiment Name: Zm_Hybrid_Seed_Dev_P Parameter: Plant Line Value: 35A19
  misc_feature: MA Experiment 20000535 PARAMETER Experiment Name: Zm_Hybrid_Seed_Dev_P Parameter: Tissue Value: Embryo vs. Unfert Floret
gaattcgggaggcaagtgcgattttgatcttgcagccacctttttttgttctgttgtgtatctagtagttggaggagatatgcagtttgcacttgcattggacacgaactcaggtcctcaccagataagatcttgtgagggtgatgggattgacaggttggaaaaattaagtattgggggcagaaagcaggagaaagctttgagaaataggtgctttggtggtagagttgctgcaactacacaatgtattcttacctcagatgcttgtcctgaaactcttcattctcaaacacagtcctctaggaaaaattatgctgatgcaaaccgtgtatctgcgatcattttgggcggaggcactggatctcagctctttcctctgacaagcacaagagctacgcctgctgtacctgttggaggatgttacaggcttattgatatccctatgagtaactgcttcaacagtggtataaataagatatttgtgatgagtcagttcaattctacttcgcttaaccgccatattcatcgtacataccttgaaggcgggatcaactttgctgatggatctgtacaggtattagcggctacacaaatgcctgaagagccagctggatggttccagggtacagcagactctatcagaaaatttatctgggtactcgaggattattacagtcacaaatccattgacaacattgtaatcttgagtggcgatcagctttatcggatgaattacatggaacttgtgcagaaacatgtcgaggacgatgctgatatcactatatcatgtgctcctgttgatgagagccgagcttctaaaaatgggctagtgaagattgatcatactggacgtgtacttcaattctttgaaaaaccaaagggtgctgatttgaattctatgagagttgagaccaacttcctgagctatgctatagatgatgcacagaaatatccataccttgcatcaatgggcatttatgtcttcaagaaagatgcacttttagaccttctcaagtcaaaatatactcaattacatgactttggatctgaaatcctcccaagagctgtactagatcatagtgtgcaggcatgcatttttacgggctattgggaggatgttggaacaatcaaatcattctttgatgcaaacttggccctcactgagcagccttccaagtttgatttttacgatccaaaaacacctttcttcactgcaccccgatgcttgcctccgacgcaattggacaagtgcaagatgaaatatgcatttatctcagatggttgcttactgagagaatgcaacatcgagcattctgtgattggagtctgctcacgtgtcagctctggatgtgaactcaaggactccgtgatgatgggagcggacatctatgaaactgaagaagaagcttcaaagctactgttagctgggaaggtcccgattggaataggaaggaacacaaagataaggaactgtatcattgacatgaatgctaggattgggaagaacgtggtgatcacaaacagtaagggcatccaagaggctgatcacccggaagaaggcgtcatatagatcggctgcgtttgcgtctacaaaacaagaacctacaatggtattgcatcgatggatcgtgtaaccttggtatggtaagagccgcttgacaggaagtcgagcttcgggcgaagatgctagtctggcatgctgttccttgaccatttgtgctgctagtatgtacctgttataagctgccctagaagttgcagcaaacctttttatgaacctttgtatttccattaccctgctttggatcaactatatctgtcagtcctatatattactaaatttttaaacaaaccagattccgg

SEQ ID NO: 14915 - protein, 522 aa, Zea mays subsp. mays
  peptide (1)..(522): Ceres Seq. ID no. 13635479
  misc_feature (111)..(389): Pfam Name: Nucleotidyl transferase Pfam Description: Nucleotidyl transferase
  misc_feature (111)..(389): Pfam Name: Nucleotidyl transferase Pfam Description: Nucleotidyl transferase
  misc_feature (1)..(522): Homolog of NCBI NO: 5705939 NR Description: endosperm ADP-glucose pyrophosphorylase subunit
  misc_feature (1)..(522): Homolog of NCBI NO: 322870 NR Description: glucose-1-phosphate adenylyltransferase (EC
  misc_feature (27)..(522): Homolog of NCBI NO: 1707924 NR Description: Glucose-1-phosphate adenylyltransferase large
  misc_feature (27)..(522): Homolog of NCBI NO: 7434892 NR Description: glucose-1-phosphate adenylyltransferase (EC
  misc_feature (27)..(522): Homolog of NCBI NO: 13540812 NR Description: ADP-glucose pyrophosphorylase large subunit
  misc_feature (27)..(522): Homolog of NCBI NO: 7434888 NR Description: glucose-1-phosphate adenylyltransferase (EC
  misc_feature (43)..(522): Homolog of NCBI NO: 7434891 NR Description: glucose-1-phosphate adenylyltransferase (EC
  misc_feature (27)..(522): Homolog of NCBI NO: 1707923 NR Description: Glucose-1-phosphate adenylyltransferase large
  misc_feature (27)..(522): Homolog of NCBI NO: 1707930 NR Description: Glucose-1-phosphate adenylyltransferase large
  misc_feature (27)..(522): Homolog of NCBI NO: 32812836 NR Description: ADP-glucose pyrophosphorylase large subunit
  misc_feature (1)..(522): Homolog of NCBI NO: 5705939 NR Description: endosperm ADP-glucose pyrophosphorylase subunit
  misc_feature (1)..(522): Homolog of NCBI NO: 322870 NR Description: glucose-1-phosphate adenylyltransferase (EC
  misc_feature (27)..(522): Homolog of NCBI NO: 1707924 NR Description: Glucose-1-phosphate adenylyltransferase large
  misc_feature (27)..(522): Homolog of NCBI NO: 7434892 NR Description: glucose-1-phosphate adenylyltransferase (EC
  misc_feature (27)..(522): Homolog of NCBI NO: 13540812 NR Description: ADP-glucose pyrophosphorylase large subunit
  misc_feature (27)..(522): Homolog of NCBI NO: 7434888 NR Description: glucose-1-phosphate adenylyltransferase (EC
  misc_feature (43)..(522): Homolog of NCBI NO: 7434891 NR Description: glucose-1-phosphate adenylyltransferase (EC
  misc_feature (27)..(522): Homolog of NCBI NO: 1707923 NR Description: Glucose-1-phosphate adenylyltransferase large
  misc_feature (27)..(522): Homolog of NCBI NO: 1707930 NR Description: Glucose-1-phosphate adenylyltransferase large
  misc_feature (27)..(522): Homolog of NCBI NO: 32812836 NR Description: ADP-glucose pyrophosphorylase large subunit
NSGGKCDFDLAATFFCSVVYLVVGGDMQFALALDTNSGPHQIRSCEGDGIDRLEKLSIGGRKQEKALRNRCFGGRVAATTQCILTSDACPETLHSQTQSSRKNYADANRVSAIILGGGTGSQLFPLTSTRATPAVPVGGCYRLIDIPMSNCFNSGINKIFVMSQFNSTSLNRHIHRTYLEGGINFADGSVQVLAATQMPEEPAGWFQGTADSIRKFIWVLEDYYSHKSIDNIVILSGDQLYRMNYMELVQKHVEDDADITISCAPVDESRASKNGLVKIDHTGRVLQFFEKPKGADLNSMRVETNFLSYAIDDAQKYPYLASMGIYVFKKDALLDLLKSKYTQLHDFGSEILPRAVLDHSVQACIFTGYWEDVGTIKSFFDANLALTEQPSKFDFYDPKTPFFTAPRCLPPTQLDKCKMKYAFISDGCLLRECNIEHSVIGVCSRVSSGCELKDSVMMGADIYETEEEASKLLLAGKVPIGIGRNTKIRNCIIDMNARIGKNVVITNSKGIQEADHPEEGVI

SEQ ID NO: 14916 - protein, 496 aa, Zea mays subsp. mays
  peptide (1)..(496): Ceres Seq. ID no. 13635480
  misc_feature (85)..(363): Pfam Name: Nucleotidyl transferase Pfam Description: Nucleotidyl transferase
  misc_feature (85)..(363): Pfam Name: Nucleotidyl transferase Pfam Description: Nucleotidyl transferase
  misc_feature (1)..(496): Homolog of NCBI NO: 5705939 NR Description: endosperm ADP-glucose pyrophosphorylase subunit
  misc_feature (1)..(496): Homolog of NCBI NO: 322870 NR Description: glucose-1-phosphate adenylyltransferase (EC
  misc_feature (1)..(496): Homolog of NCBI NO: 1707924 NR Description: Glucose-1-phosphate adenylyltransferase large
  misc_feature (1)..(496): Homolog of NCBI NO: 7434892 NR Description: glucose-1-phosphate adenylyltransferase (EC
  misc_feature (1)..(496): Homolog of NCBI NO: 13540812 NR Description: ADP-glucose pyrophosphorylase large subunit
  misc_feature (1)..(496): Homolog of NCBI NO: 322870 NR Description: glucose-1-phosphate adenylyltransferase (EC
  misc_feature (1)..(496): Homolog of NCBI NO: 7434892 NR Description: glucose-1-phosphate adenylyltransferase (EC
  misc_feature (1)..(496): Homolog of NCBI NO: 32812836 NR Description: ADP-glucose pyrophosphorylase large subunit
  misc_feature (1)..(496): Homolog of NCBI NO: 1707930 NR Description: Glucose-1-phosphate adenylyltransferase large
  misc_feature (1)..(496): Homolog of NCBI NO: 1707923 NR Description: Glucose-1-phosphate adenylyltransferase large
  misc_feature (17)..(496): Homolog of NCBI NO: 7434891 NR Description: glucose-1-phosphate adenylyltransferase (EC
  misc_feature (1)..(496): Homolog of NCBI NO: 7434888 NR Description: glucose-1-phosphate adenylyltransferase (EC
  misc_feature (1)..(496): Homolog of NCBI NO: 13540812 NR Description: ADP-glucose pyrophosphorylase large subunit
  misc_feature (1)..(496): Homolog of NCBI NO: 1707924 NR Description: Glucose-1-phosphate adenylyltransferase large
  misc_feature (1)..(496): Homolog of NCBI NO: 5705939 NR Description: endosperm ADP-glucose pyrophosphorylase subunit
  misc_feature (1)..(496): Homolog of NCBI NO: 7434888 NR Description: glucose-1-phosphate adenylyltransferase (EC
  misc_feature (17)..(496): Homolog of NCBI NO: 7434891 NR Description: glucose-1-phosphate adenylyltransferase (EC
  misc_feature (1)..(496): Homolog of NCBI NO: 1707923 NR Description: Glucose-1-phosphate adenylyltransferase large
  misc_feature (1)..(496): Homolog of NCBI NO: 1707930 NR Description: Glucose-1-phosphate adenylyltransferase large
  misc_feature (1)..(496): Homolog of NCBI NO: 32812836 NR Description: ADP-glucose pyrophosphorylase large subunit
MQFALALDTNSGPHQIRSCEGDGIDRLEKLSIGGRKQEKALRNRCFGGRVAATTQCILTSDACPETLHSQTQSSRKNYADANRVSAIILGGGTGSQLFPLTSTRATPAVPVGGCYRLIDIPMSNCFNSGINKIFVMSQFNSTSLNRHIHRTYLEGGINFADGSVQVLAATQMPEEPAGWFQGTADSIRKFIWVLEDYYSHKSIDNIVILSGDQLYRMNYMELVQKHVEDDADITISCAPVDESRASKNGLVKIDHTGRVLQFFEKPKGADLNSMRVETNFLSYAIDDAQKYPYLASMGIYVFKKDALLDLLKSKYTQLHDFGSEILPRAVLDHSVQACIFTGYWEDVGTIKSFFDANLALTEQPSKFDFYDPKTPFFTAPRCLPPTQLDKCKMKYAFISDGCLLRECNIEHSVIGVCSRVSSGCELKDSVMMGADIYETEEEASKLLLAGKVPIGIGRNTKIRNCIIDMNARIGKNVVITNSKGIQEADHPEEGVI

SEQ ID NO: 14917 - protein, 375 aa, Zea mays subsp. mays
  peptide (1)..(375): Ceres Seq. ID no. 13635481
  misc_feature (1)..(242): Pfam Name: Nucleotidyl transferase Pfam Description: Nucleotidyl transferase
  misc_feature (1)..(242): Pfam Name: Nucleotidyl transferase Pfam Description: Nucleotidyl transferase
  misc_feature (1)..(375): Homolog of NCBI NO: 5705939 NR Description: endosperm ADP-glucose pyrophosphorylase subunit
  misc_feature (1)..(375): Homolog of NCBI NO: 322870 NR Description: glucose-1-phosphate adenylyltransferase (EC
  misc_feature (1)..(375): Homolog of NCBI NO: 1707924 NR Description: Glucose-1-phosphate adenylyltransferase large
  misc_feature (1)..(375): Homolog of NCBI NO: 7434892 NR Description: glucose-1-phosphate adenylyltransferase (EC
  misc_feature (1)..(375): Homolog of NCBI NO: 13540812 NR Description: ADP-glucose pyrophosphorylase large subunit
  misc_feature (1)..(375): Homolog of NCBI NO: 322870 NR Description: glucose-1-phosphate adenylyltransferase (EC
  misc_feature (1)..(375): Homolog of NCBI NO: 7434892 NR Description: glucose-1-phosphate adenylyltransferase (EC
  misc_feature (1)..(375): Homolog of NCBI NO: 32812836 NR Description: ADP-glucose pyrophosphorylase large subunit
  misc_feature (1)..(375): Homolog of NCBI NO: 1707930 NR Description: Glucose-1-phosphate adenylyltransferase large
  misc_feature (1)..(375): Homolog of NCBI NO: 1707923 NR Description: Glucose-1-phosphate adenylyltransferase large
  misc_feature (1)..(375): Homolog of NCBI NO: 7434891 NR Description: glucose-1-phosphate adenylyltransferase (EC
  misc_feature (1)..(375): Homolog of NCBI NO: 7434888 NR Description: glucose-1-phosphate adenylyltransferase (EC
  misc_feature (1)..(375): Homolog of NCBI NO: 13540812 NR Description: ADP-glucose pyrophosphorylase large subunit
  misc_feature (1)..(375): Homolog of NCBI NO: 1707924 NR Description: Glucose-1-phosphate adenylyltransferase large
  misc_feature (1)..(375): Homolog of NCBI NO: 5705939 NR Description: endosperm ADP-glucose pyrophosphorylase subunit
  misc_feature (1)..(375): Homolog of NCBI NO: 7434888 NR Description: glucose-1-phosphate adenylyltransferase (EC
  misc_feature (1)..(375): Homolog of NCBI NO: 7434891 NR Description: glucose-1-phosphate adenylyltransferase (EC
  misc_feature (1)..(375): Homolog of NCBI NO: 1707923 NR Description: Glucose-1-phosphate adenylyltransferase large
  misc_feature (1)..(375): Homolog of NCBI NO: 1707930 NR Description: Glucose-1-phosphate adenylyltransferase large
  misc_feature (1)..(375): Homolog of NCBI NO: 32812836 NR Description: ADP-glucose pyrophosphorylase large subunit
MSNCFNSGINKIFVMSQFNSTSLNRHIHRTYLEGGINFADGSVQVLAATQMPEEPAGWFQGTADSIRKFIWVLEDYYSHKSIDNIVILSGDQLYRMNYMELVQKHVEDDADITISCAPVDESRASKNGLVKIDHTGRVLQFFEKPKGADLNSMRVETNFLSYAIDDAQKYPYLASMGIYVFKKDALLDLLKSKYTQLHDFGSEILPRAVLDHSVQACIFTGYWEDVGTIKSFFDANLALTEQPSKFDFYDPKTPFFTAPRCLPPTQLDKCKMKYAFISDGCLLRECNIEHSVIGVCSRVSSGCELKDSVMMGADIYETEEEASKLLLAGKVPIGIGRNTKIRNCIIDMNARIGKNVVITNSKGIQEADHPEEGVI

SEQ ID NO: 14918 - DNA, 1486 bp, Zea mays subsp. mays; identical to SEQ ID NO: 12596
  misc_feature (1)..(1486): Ceres Seq. ID no. 13573960
  misc_feature: MA Experiment ID: 108523 Result: Up-regulated in Transcription
  misc_feature: MA Experiment 108523 PARAMETER Experiment Name: Zm_42deg_Heat_P Parameter: Age (day) Value: 8
  misc_feature: MA Experiment 108523 PARAMETER Experiment Name: Zm_42deg_Heat_P Parameter: Organism Value: Zea mays
  misc_feature: MA Experiment 108523 PARAMETER Experiment Name: Zm_42deg_Heat_P Parameter: Plant Line Value: 35A19
  misc_feature: MA Experiment 108523 PARAMETER Experiment Name: Zm_42deg_Heat_P Parameter: Temperature (deg C) Value: 42 vs. 22
  misc_feature: MA Experiment 108523 PARAMETER Experiment Name: Zm_42deg_Heat_P Parameter: Timepoint (hr) Value: 6
  misc_feature: MA Experiment 108523 PARAMETER Experiment Name: Zm_42deg_Heat_P Parameter: Tissue Value: Aerial
  misc_feature: MA Experiment ID: 108528 Result: Down-regulated in Transcription
  misc_feature: MA Experiment 108528 PARAMETER Experiment Name: Zm_Imbibed_Seeds_P Parameter: Age (day) Value: 5 vs. 2
  misc_feature: MA Experiment 108528 PARAMETER Experiment Name: Zm_Imbibed_Seeds_P Parameter: Organism Value: Zea mays
  misc_feature: MA Experiment 108528 PARAMETER Experiment Name: Zm_Imbibed_Seeds_P Parameter: Plant Line Value: 35A19
  misc_feature: MA Experiment 108528 PARAMETER Experiment Name: Zm_Imbibed_Seeds_P Parameter: Tissue Value: Aerial vs. Embryo
  misc_feature: MA Experiment ID: 108529 Result: Down-regulated in Transcription
  misc_feature: MA Experiment 108529 PARAMETER Experiment Name: Zm_Imbibed_Seeds_P Parameter: Age (day) Value: 5 vs. 2
  misc_feature: MA Experiment 108529 PARAMETER Experiment Name: Zm_Imbibed_Seeds_P Parameter: Organism Value: Zea mays
  misc_feature: MA Experiment 108529 PARAMETER Experiment Name: Zm_Imbibed_Seeds_P Parameter: Plant Line Value: 35A19
  misc_feature: MA Experiment 108529 PARAMETER Experiment Name: Zm_Imbibed_Seeds_P Parameter: Tissue Value: Roots vs. Embryo
  misc_feature: MA Experiment ID: 108530 Result: Down-regulated in Transcription
  misc_feature: MA Experiment 108530 PARAMETER Experiment Name: Zm_Imbibed_Seeds_P Parameter: Age (day) Value: 6 vs. 2
  misc_feature: MA Experiment 108530 PARAMETER Experiment Name: Zm_Imbibed_Seeds_P Parameter: Organism Value: Zea mays
  misc_feature: MA Experiment 108530 PARAMETER Experiment Name: Zm_Imbibed_Seeds_P Parameter: Plant Line Value: 35A19
  misc_feature: MA Experiment 108530 PARAMETER Experiment Name: Zm_Imbibed_Seeds_P Parameter: Tissue Value: Aerial vs. Embryo
  misc_feature: MA Experiment ID: 108535 Result: Down-regulated in Transcription
  misc_feature: MA Experiment 108535 PARAMETER Experiment Name: Zm_Meristem_P Parameter: Age (day) Value: 8
  misc_feature: MA Experiment 108535 PARAMETER Experiment Name: Zm_Meristem_P Parameter: Organism Value: Zea mays
  misc_feature: MA Experiment 108535 PARAMETER Experiment Name: Zm_Meristem_P Parameter: Plant Line Value: 35A19
  misc_feature: MA Experiment 108535 PARAMETER Experiment Name: Zm_Meristem_P Parameter: Tissue Value: Root Meristem vs. Above Root Meristem
  misc_feature: MA Experiment ID: 108536 Result: Up-regulated in Transcription
  misc_feature: MA Experiment 108536 PARAMETER Experiment Name: Zm_Meristem_P Parameter: Age (day) Value: 8
  misc_feature: MA Experiment 108536 PARAMETER Experiment Name: Zm_Meristem_P Parameter: Organism Value: Zea mays
  misc_feature: MA Experiment 108536 PARAMETER Experiment Name: Zm_Meristem_P Parameter: Plant Line Value: 35A19
  misc_feature: MA Experiment 108536 PARAMETER Experiment Name: Zm_Meristem_P Parameter: Tissue Value: Shoot Meristem vs. Above Shoot Meristem
  misc_feature: MA Experiment ID: 108540 Result: Up-regulated in Transcription
  misc_feature: MA Experiment 108540 PARAMETER Experiment Name: Zm_20percent_PEG_P Parameter: Age (day) Value: 8
  misc_feature: MA Experiment 108540 PARAMETER Experiment Name: Zm_20percent_PEG_P Parameter: Organism Value: Zea mays
  misc_feature: MA Experiment 108540 PARAMETER Experiment Name: Zm_20percent_PEG_P Parameter: Plant Line Value: 35A19
  misc_feature: MA Experiment 108540 PARAMETER Experiment Name: Zm_20percent_PEG_P Parameter: Timepoint (hr) Value: 6
  misc_feature: MA Experiment 108540 PARAMETER Experiment Name: Zm_20percent_PEG_P Parameter: Tissue Value: Aerial
  misc_feature: MA Experiment 108540 PARAMETER Experiment Name: Zm_20percent_PEG_P Parameter: Treatment Value: 20percent PEG vs. No Treatment
  misc_feature: MA Experiment ID: 108544 Result: Up-regulated in Transcription
  misc_feature: MA Experiment ID: 108545 Result: Down-regulated in Transcription
  misc_feature: MA Experiment 108545 PARAMETER Experiment Name: Zm_Imbibed_Seeds_P Parameter: Age (day) Value: 3 vs. 2
  misc_feature: MA Experiment 108545 PARAMETER Experiment Name: Zm_Imbibed_Seeds_P Parameter: Organism Value: Zea mays
  misc_feature: MA Experiment 108545 PARAMETER Experiment Name: Zm_Imbibed_Seeds_P Parameter: Plant Line Value: 35A19
  misc_feature: MA Experiment 108545 PARAMETER Experiment Name: Zm_Imbibed_Seeds_P Parameter: Tissue Value: Aerial vs. Embryo
  misc_feature: MA Experiment ID: 108556 Result: Up-regulated in Transcription
  misc_feature: MA Experiment 108556 PARAMETER Experiment Name: Zm_Drought_P Parameter: Age (day) Value: 9
  misc_feature: MA Experiment 108556 PARAMETER Experiment Name: Zm_Drought_P Parameter: Organism Value: Zea mays
  misc_feature: MA Experiment 108556 PARAMETER Experiment Name: Zm_Drought_P Parameter: Plant Line Value: 35A19
  misc_feature: MA Experiment 108556 PARAMETER Experiment Name: Zm_Drought_P Parameter: Timepoint (hr) Value: 24
  misc_feature: MA Experiment 108556 PARAMETER Experiment Name: Zm_Drought_P Parameter: Tissue Value: Aerial
  misc_feature: MA Experiment 108556 PARAMETER Experiment Name: Zm_Drought_P Parameter: Treatment Value: Drought vs. No Drought
  misc_feature: MA Experiment ID: 20000477 Result: Up-regulated in Transcription
  misc_feature: MA Experiment 20000477 PARAMETER Experiment Name: Zm_5mM_SA_P Parameter: Age (day) Value: 10
  misc_feature: MA Experiment 20000477 PARAMETER Experiment Name: Zm_5mM_SA_P Parameter: Organism Value: Zea mays
  misc_feature: MA Experiment 20000477 PARAMETER Experiment Name: Zm_5mM_SA_P Parameter: Plant Line Value: 35A19
  misc_feature: MA Experiment 20000477 PARAMETER Experiment Name: Zm_5mM_SA_P Parameter: Timepoint (hr) Value: 48
  misc_feature: MA Experiment 20000477 PARAMETER Experiment Name: Zm_5mM_SA_P Parameter: Tissue Value: Aerial
  misc_feature: MA Experiment 20000477 PARAMETER Experiment Name: Zm_5mM_SA_P Parameter: Treatment Value: 5mM SA vs. No Treatment
  misc_feature: MA Experiment ID: 20000478 Result: Up-regulated in Transcription
  misc_feature: MA Experiment 20000478 PARAMETER Experiment Name: Zm_5mM_SA_P Parameter: Age (day) Value: 11
  misc_feature: MA Experiment 20000478 PARAMETER Experiment Name: Zm_5mM_SA_P Parameter: Organism Value: Zea mays
  misc_feature: MA Experiment 20000478 PARAMETER Experiment Name: Zm_5mM_SA_P Parameter: Plant Line Value: 35A19
  misc_feature: MA Experiment 20000478 PARAMETER Experiment Name: Zm_5mM_SA_P Parameter: Timepoint (hr) Value: 72
  misc_feature: MA Experiment 20000478 PARAMETER Experiment Name: Zm_5mM_SA_P Parameter: Tissue Value: Aerial
  misc_feature: MA Experiment 20000478 PARAMETER Experiment Name: Zm_5mM_SA_P Parameter: Treatment Value: 5mM SA vs. No Treatment
  misc_feature: MA Experiment ID: 20000480 Result: Up-regulated in Transcription
  misc_feature: MA Experiment 20000480 PARAMETER Experiment Name: Zm_Drought_P Parameter: Age (day) Value: 11
  misc_feature: MA Experiment 20000480 PARAMETER Experiment Name: Zm_Drought_P Parameter: Organism Value: Zea mays
  misc_feature: MA Experiment 20000480 PARAMETER Experiment Name: Zm_Drought_P Parameter: Plant Line Value: 35A19
  misc_feature: MA Experiment 20000480 PARAMETER Experiment Name: Zm_Drought_P Parameter: Timepoint (hr) Value: 72
  misc_feature: MA Experiment 20000480 PARAMETER Experiment Name: Zm_Drought_P Parameter: Tissue Value: Aerial
  misc_feature: MA Experiment 20000480 PARAMETER Experiment Name: Zm_Drought_P Parameter: Treatment Value: Drought vs. No Drought
  misc_feature: MA Experiment ID: 20000487 Result: Up-regulated in Transcription
  misc_feature: MA Experiment 20000487 PARAMETER Experiment Name: Zm_50mM_NH4NO3_L_to_H_P Parameter: Organism Value: Zea mays
  misc_feature: MA Experiment 20000487 PARAMETER Experiment Name: Zm_50mM_NH4NO3_L_to_H_P Parameter: Timepoint (hr) Value: 4
  misc_feature: MA Experiment 20000487 PARAMETER Experiment Name: Zm_50mM_NH4NO3_L_to_H_P Parameter: Tissue Value: Leaves
  misc_feature: MA Experiment 20000487 PARAMETER Experiment Name: Zm_50mM_NH4NO3_L_to_H_P Parameter: Treatment Value: 50mM NH4NO3 vs. 100mM Mannitol
  misc_feature: MA Experiment ID: 20000488 Result: Up-regulated in Transcription
  misc_feature: MA Experiment 20000488 PARAMETER Experiment Name: Zm_50mM_NH4NO3_L_to_H_P Parameter: Organism Value: Zea mays
  misc_feature: MA Experiment 20000488 PARAMETER Experiment Name: Zm_50mM_NH4NO3_L_to_H_P Parameter: Timepoint (hr) Value: 8
  misc_feature: MA Experiment 20000488 PARAMETER Experiment Name: Zm_50mM_NH4NO3_L_to_H_P Parameter: Tissue Value: Leaves
  misc_feature: MA Experiment 20000488 PARAMETER Experiment Name: Zm_50mM_NH4NO3_L_to_H_P Parameter: Treatment Value: 50mM NH4NO3 vs. 100mM Mannitol
  misc_feature: MA Experiment ID: 20000492 Result: Up-regulated in Transcription
  misc_feature: MA Experiment 20000492 PARAMETER Experiment Name: Zm_Hybrid_Seed_Dev_P Parameter: DAP Value: 12
  misc_feature: MA Experiment 20000492 PARAMETER Experiment Name: Zm_Hybrid_Seed_Dev_P Parameter: Organism Value: Zea mays
  misc_feature: MA Experiment 20000492 PARAMETER Experiment Name: Zm_Hybrid_Seed_Dev_P Parameter: Plant Line Value: 35A19
  misc_feature: MA Experiment 20000492 PARAMETER Experiment Name: Zm_Hybrid_Seed_Dev_P Parameter: Tissue Value: Fert Kernel vs. Unfert Floret
  misc_feature: MA Experiment ID: 20000629 Result: Down-regulated in Transcription
  misc_feature: MA Experiment 20000629 PARAMETER Experiment Name: Zm_Herbicide-Treatments_P Parameter: Timepoint (hr) Value: 12
  misc_feature: MA Experiment 20000629 PARAMETER Experiment Name: Zm_Herbicide-Treatments_P Parameter: Tissue Value: Aerial
  misc_feature: MA Experiment 20000629 PARAMETER Experiment Name: Zm_Herbicide-Treatments_P Parameter: Treatment Value: Trimec vs. No Treatment
  misc_feature: MA Experiment ID: 20001608 Result: Up-regulated in Transcription
  misc_feature: MA Experiment 20001608 PARAMETER Experiment Name: Zm_50ppm_KNO3_L-to-H_P Parameter: Age (day) Value: 21
  misc_feature: MA Experiment 20001608 PARAMETER Experiment Name: Zm_50ppm_KNO3_L-to-H_P Parameter: Organism Value: Zea mays
  misc_feature: MA Experiment 20001608 PARAMETER Experiment Name: Zm_50ppm_KNO3_L-to-H_P Parameter: Plant Line Value: 35A19
  misc_feature: MA Experiment 20001608 PARAMETER Experiment Name: Zm_50ppm_KNO3_L-to-H_P Parameter: Timepoint (hr) Value: 48
  misc_feature: MA Experiment 20001608 PARAMETER Experiment Name: Zm_50ppm_KNO3_L-to-H_P Parameter: Tissue Value: Shoots
  misc_feature: MA Experiment 20001608 PARAMETER Experiment Name: Zm_50ppm_KNO3_L-to-H_P Parameter: Treatment Value: 50ppm KNO3 vs. 50ppm KCl

SEQ ID NO: 14919 - protein, 404 aa, Zea mays subsp. mays; identical to SEQ ID NO: 12597
  peptide (1)..(404): Ceres Seq. ID no. 13573961
  misc_feature (139)..(390): Pfam Name: Glutamine synthetase, catalytic domain Pfam Description: Glutamine synthetase, catalytic domain
  misc_feature (139)..(390): Pfam Name: Glutamine synthetase, catalytic domain Pfam Description: Glutamine synthetase, catalytic domain
  misc_feature (37)..(404): Homolog of NCBI NO: 585202 NR Description: GLUTAMINE SYNTHETASE ROOT ISOZYME 2
  misc_feature (38)..(399): Homolog of NCBI NO: 13324800 NR Description: putative glutamine synthetase [Oryza sativa]
  misc_feature (37)..(391): Homolog of NCBI NO: 2213877 NR Description: glutamine synthetase [Hevea brasiliensis]
  misc_feature (37)..(391): Homolog of NCBI NO: 1084350 NR Description: glutamate-ammonia ligase (EC 6.3.1.2) - rape
  misc_feature (37)..(391): Homolog of NCBI NO: 1707959 NR Description: GLUTAMINE SYNTHETASE CYTOSOLIC ISOZYME 2
  misc_feature (38)..(399): Homolog of NCBI NO: 13324800 NR Description: putative glutamine synthetase [Oryza sativa]
  misc_feature (37)..(391): Homolog of NCBI NO: 1084350 NR Description: glutamate-ammonia ligase (EC 6.3.1.2) - rape
  misc_feature (37)..(391): Homolog of NCBI NO: 121349 NR Description: Glutamine synthetase shoot isozyme
  misc_feature (37)..(391): Homolog of NCBI NO: 1934756 NR Description: cytosolic glutamine synthetase [Brassica napus]
  misc_feature (37)..(391): Homolog of NCBI NO: 15240288 NR Description: glutamate--ammonia ligase [Arabidopsis thaliana] glutamine synthetase [Arabidopsis thaliana] AT5g37600/K12B20_50 [Arabidopsis thaliana]
  misc_feature (37)..(391): Homolog of NCBI NO: 1076474 NR Description: Gln 1.2 protein - radish
  misc_feature (37)..(391): Homolog of NCBI NO: 417060 NR Description: Glutamine synthetase nodule isozyme ligase) (GS) >gi|170637|gb|AAA34239.1| glutamine synthetase
  misc_feature (37)..(391): Homolog of NCBI NO: 1707959 NR Description: GLUTAMINE SYNTHETASE CYTOSOLIC ISOZYME 2
  misc_feature (37)..(391): Homolog of NCBI NO: 2213877 NR Description: glutamine synthetase [Hevea brasiliensis]
  misc_feature (37)..(404): Homolog of NCBI NO: 585202 NR Description: GLUTAMINE SYNTHETASE ROOT ISOZYME 2
  misc_feature (37)..(391): Homolog of NCBI NO: 417060 NR Description: Glutamine synthetase nodule isozyme ligase) (GS) >gi|170637|gb|AAA34239.1| glutamine synthetase
  misc_feature (37)..(391): Homolog of NCBI NO: 1076474 NR Description: Gln 1.2 protein - radish
  misc_feature (37)..(391): Homolog of NCBI NO: 15240288 NR Description: glutamate--ammonia ligase [Arabidopsis thaliana] glutamine synthetase [Arabidopsis thaliana] AT5g37600/K12B20_50 [Arabidopsis thaliana]
  misc_feature (37)..(391): Homolog of NCBI NO: 1934756 NR Description: cytosolic glutamine synthetase [Brassica napus]
  misc_feature (37)..(391): Homolog of NCBI NO: 121349 NR Description: Glutamine synthetase shoot isozyme

SEQ ID NO: 14920 - protein, 368 aa, Zea mays subsp. mays; identical to SEQ ID NO: 12598
  peptide (1)..(368): Ceres Seq. ID no. 13573962
  misc_feature (103)..(354): Pfam Name: Glutamine synthetase, catalytic domain Pfam Description: Glutamine synthetase, catalytic domain
  misc_feature (103)..(354): Pfam Name: Glutamine synthetase, catalytic domain Pfam Description: Glutamine synthetase, catalytic domain
  misc_feature (1)..(368): Homolog of NCBI NO: 585202 NR Description: GLUTAMINE SYNTHETASE ROOT ISOZYME 2
  misc_feature (2)..(363): Homolog of NCBI NO: 13324800 NR Description: putative glutamine synthetase [Oryza sativa]
  misc_feature (1)..(355): Homolog of NCBI NO: 2213877 NR Description: glutamine synthetase [Hevea brasiliensis]
  misc_feature (1)..(355): Homolog of NCBI NO: 1084350 NR Description: glutamate-ammonia ligase (EC 6.3.1.2) - rape
  misc_feature (1)..(355): Homolog of NCBI NO: 1707959 NR Description: GLUTAMINE SYNTHETASE CYTOSOLIC ISOZYME 2
  misc_feature (2)..(363): Homolog of NCBI NO: 13324800 NR Description: putative glutamine synthetase [Oryza sativa]
  misc_feature (1)..(355): Homolog of NCBI NO: 1084350 NR Description: glutamate-ammonia ligase (EC 6.3.1.2) - rape
  misc_feature (1)..(355): Homolog of NCBI NO: 121349 NR Description: Glutamine synthetase shoot isozyme
  misc_feature (1)..(355): Homolog of NCBI NO: 1934756 NR Description: cytosolic glutamine synthetase [Brassica napus]
  misc_feature (1)..(355): Homolog of NCBI NO: 15240288 NR Description: glutamate--ammonia ligase [Arabidopsis thaliana] glutamine synthetase [Arabidopsis thaliana] AT5g37600/K12B20_50 [Arabidopsis thaliana]
  misc_feature (1)..(355): Homolog of NCBI NO: 1076474 NR Description: Gln 1.2 protein - radish
  misc_feature (1)..(355): Homolog of NCBI NO: 417060 NR Description: Glutamine synthetase nodule isozyme ligase) (GS) >gi|170637|gb|AAA34239.1| glutamine synthetase
  misc_feature (1)..(355): Homolog of NCBI NO: 1707959 NR Description: GLUTAMINE SYNTHETASE CYTOSOLIC ISOZYME 2
  misc_feature (1)..(355): Homolog of NCBI NO: 2213877 NR Description: glutamine synthetase [Hevea brasiliensis]
  misc_feature (1)..(368): Homolog of NCBI NO: 585202 NR Description: GLUTAMINE SYNTHETASE ROOT ISOZYME 2
  misc_feature (1)..(355): Homolog of NCBI NO: 417060 NR Description: Glutamine synthetase nodule isozyme ligase) (GS) >gi|170637|gb|AAA34239.1| glutamine synthetase
  misc_feature (1)..(355): Homolog of NCBI NO: 1076474 NR Description: Gln 1.2 protein - radish
  misc_feature (1)..(355): Homolog of NCBI NO: 15240288 NR Description: glutamate--ammonia ligase [Arabidopsis thaliana] glutamine synthetase [Arabidopsis thaliana] AT5g37600/K12B20_50 [Arabidopsis thaliana]
  misc_feature (1)..(355): Homolog of NCBI NO: 1934756 NR Description: cytosolic glutamine synthetase [Brassica napus]
  misc_feature (1)..(355): Homolog of NCBI NO: 121349 NR Description: Glutamine synthetase shoot isozyme

SEQ ID NO: 14921 - protein, 338 aa, Zea mays subsp. mays; identical to SEQ ID NO: 12599
  peptide (1)..(338): Ceres Seq. ID no. 13573963
  misc_feature (73)..(324): Pfam Name: Glutamine synthetase, catalytic domain Pfam Description: Glutamine synthetase, catalytic domain
  misc_feature (73)..(324): Pfam Name: Glutamine synthetase, catalytic domain Pfam Description: Glutamine synthetase, catalytic domain
  misc_feature (1)..(338): Homolog of NCBI NO: 585202 NR Description: GLUTAMINE SYNTHETASE ROOT ISOZYME 2
  misc_feature (1)..(333): Homolog of NCBI NO: 13324800 NR Description: putative glutamine synthetase [Oryza sativa]
  misc_feature (1)..(325): Homolog of NCBI NO: 2213877 NR Description: glutamine synthetase [Hevea brasiliensis]
  misc_feature (1)..(325): Homolog of NCBI NO: 1084350 NR Description: glutamate-ammonia ligase (EC 6.3.1.2) - rape
  misc_feature (1)..(325): Homolog of NCBI NO: 1707959 NR Description: GLUTAMINE SYNTHETASE CYTOSOLIC ISOZYME 2
  misc_feature (1)..(325): Homolog of NCBI NO: 417060 NR Description: Glutamine synthetase nodule isozyme ligase) (GS) >gi|170637|gb|AAA34239.1| glutamine synthetase
  misc_feature (1)..(333): Homolog of NCBI NO: 13324800 NR Description: putative glutamine synthetase [Oryza sativa]
  misc_feature (1)..(325): Homolog of NCBI NO: 15240288 NR Description: glutamate--ammonia ligase [Arabidopsis thaliana] glutamine synthetase [Arabidopsis thaliana] AT5g37600/K12B20_50 [Arabidopsis thaliana]
  misc_feature (1)..(325): Homolog of NCBI NO: 1076474 NR Description: Gln 1.2 protein - radish
  misc_feature (1)..(325): Homolog of NCBI NO: 417060 NR Description: Glutamine synthetase nodule isozyme ligase) (GS) >gi|170637|gb|AAA34239.1| glutamine synthetase
  misc_feature (1)..(325): Homolog of NCBI NO: 1707959 NR Description: GLUTAMINE SYNTHETASE CYTOSOLIC ISOZYME 2
  misc_feature (1)..(325): Homolog of NCBI NO: 1084350 NR Description: glutamate-ammonia ligase (EC 6.3.1.2) - rape
  misc_feature (1)..(325): Homolog of NCBI NO: 2213877 NR Description: glutamine synthetase [Hevea brasiliensis]
  misc_feature (1)..(338): Homolog of NCBI NO: 585202 NR Description: GLUTAMINE SYNTHETASE ROOT ISOZYME 2
  misc_feature (1)..(325): Homolog of NCBI NO: 1076474 NR Description: Gln 1.2 protein - radish
  misc_feature (1)..(325): Homolog of NCBI NO: 15240288 NR Description: glutamate--ammonia ligase [Arabidopsis thaliana] glutamine synthetase [Arabidopsis thaliana] AT5g37600/K12B20_50 [Arabidopsis thaliana]
  misc_feature (1)..(325): Homolog of NCBI NO: 1934756 NR Description: cytosolic glutamine synthetase [Brassica napus]
  misc_feature (1)..(325): Homolog of NCBI NO: 121349 NR Description: Glutamine synthetase shoot isozyme
  misc_feature (1)..(325): Homolog of NCBI NO: 1934756 NR Description: cytosolic glutamine synthetase [Brassica napus]
  misc_feature (1)..(325): Homolog of NCBI NO: 121349 NR Description: Glutamine synthetase shoot isozyme

SEQ ID NO: 14922 - DNA, 503 bp, Zea mays subsp. mays
  misc_feature (1)..(503): Ceres Seq. ID no. 4486968
  misc_feature: MA Experiment ID: 108544 Result: Up-regulated in Transcription
  misc_feature: MA Experiment ID: 20000534 Result: Down-regulated in Transcription
  misc_feature: MA Experiment 20000534 PARAMETER Experiment Name: Zm_Hybrid_Pollen_P Parameter: Age (day) Value: 8
  misc_feature: MA Experiment 20000534 PARAMETER Experiment Name: Zm_Hybrid_Pollen_P Parameter: Organism Value: Zea mays
  misc_feature: MA Experiment 20000534 PARAMETER Experiment Name: Zm_Hybrid_Pollen_P Parameter: Plant Line Value: 35A19
  misc_feature: MA Experiment 20000534 PARAMETER Experiment Name: Zm_Hybrid_Pollen_P Parameter: Tissue Value: Pollen vs. Aerial
gactcaaagtttgatacatcatgtgtttaggaaactgtgttcttctatatgcactggtttttccttgacaatacctacatgttcttgtgtgyccaagcgtgaagtgaaaagattcgccgatctmagttctgatgagattagtgacttatgggttactgcaaaggaagttggtgcacgtcttgagcagtaccacaaagcatcgtcacttacctttgctatccaggatggtcctcaagctggccaaacagttgcacatgtccacatccacctcatcccaaggaagaaaggggattttgagaaaaatgatgaaatatatgatgcgattgatgtgaaggagaaagaattgaaggagaagcttgacctggacattgagaggaaagataggagcatggaagagatggctaatgaggccaatgagtaccgtgctctttttagttagtttctaagctgagctgactgtttgctagaaataaggtttgctacctgttcttcattgttgcagt

SEQ ID NO: 14923 - protein, 145 aa, Zea mays subsp. mays
  peptide (1)..(145): Ceres Seq. ID no. 4486969
  misc_feature (32)..(145): Homolog of NCBI NO: 27542770 NR Description: ATPase-like protein [Sorghum bicolor]
  misc_feature (32)..(144): Homolog of NCBI NO: 27808510 NR Description: At5g58240 [Arabidopsis thaliana]
  misc_feature (32)..(144): Homolog of NCBI NO: 8777325 NR Description: bis(5'-adenosyl)-triphosphatase-like protein
  misc_feature (32)..(144): Homolog of NCBI NO: 30697031 NR Description: bis(5'-adenosyl)-triphosphatase-related; also
  misc_feature (33)..(145): Homolog of NCBI NO: 37589828 NR Description: Unknown (protein for MGC:73176) [Danio rerio]
  misc_feature (33)..(144): Homolog of NCBI NO: 11120730 NR Description: fragile histidine triad protein [Rattus >gi|9587672|gb|AAF89328.1|AF170064_1 fragile histidine triad
  misc_feature (33)..(144): Homolog of NCBI NO: 4503719 NR Description: fragile histidine triad gene; bis(5'-adenosyl)-
  misc_feature (32)..(144): Homolog of NCBI NO: 28828402 NR Description: similar to diadenosine tetraphosphatase
  misc_feature (33)..(144): Homolog of NCBI NO: 15215093 NR Description: Similar to fragile histidine triad gene [Mus
  misc_feature (33)..(144): Homolog of NCBI NO: 3318791 NR Description: Substrate Analog (Ib2) Complex With The His 96
  misc_feature (31)..(31): Xaa is any aa, unknown or other
  misc_feature (41)..(41): Xaa is any aa, unknown or other
TQSLIHHVFRKLCSSICTGFSLTIPTCSCVXKREVKRFADXSSDEISDLWVTAKEVGARLEQYHKASSLTFAIQDGPQAGQTVAHVHIHLIPRKKGDFEKNDEIYDAIDVKEKELKEKLDLDIERKDRSMEEMANEANEYRALFS

SEQ ID NO: 14924 - DNA, 1047 bp, Zea mays subsp. mays
  misc_feature (1)..(1047): Ceres Seq. ID no. 12455278
  misc_feature: MA Experiment ID: 108535 Result: Down-regulated in Transcription
  misc_feature: MA Experiment 108535 PARAMETER Experiment Name: Zm_Meristem_P Parameter: Age (day) Value: 8
  misc_feature: MA Experiment 108535 PARAMETER Experiment Name: Zm_Meristem_P Parameter: Organism Value: Zea mays
  misc_feature: MA Experiment 108535 PARAMETER Experiment Name: Zm_Meristem_P Parameter: Plant Line Value: 35A19
  misc_feature: MA Experiment 108535 PARAMETER Experiment Name: Zm_Meristem_P Parameter: Tissue Value: Root Meristem vs. Above Root Meristem
  misc_feature: MA Experiment ID: 108543 Result: Down-regulated in Transcription
  misc_feature: MA Experiment ID: 20000492 Result: Up-regulated in Transcription
  misc_feature: MA Experiment 20000492 PARAMETER Experiment Name: Zm_Hybrid_Seed_Dev_P Parameter: DAP Value: 12
  misc_feature: MA Experiment 20000492 PARAMETER Experiment Name: Zm_Hybrid_Seed_Dev_P Parameter: Organism Value: Zea mays
  misc_feature: MA Experiment 20000492 PARAMETER Experiment Name: Zm_Hybrid_Seed_Dev_P Parameter: Plant Line Value: 35A19
  misc_feature: MA Experiment 20000492 PARAMETER Experiment Name: Zm_Hybrid_Seed_Dev_P Parameter: Tissue Value: Fert Kernel vs. Unfert Floret
  misc_feature: MA Experiment ID: 20000534 Result: Down-regulated in Transcription
  misc_feature: MA Experiment 20000534 PARAMETER Experiment Name: Zm_Hybrid_Pollen_P Parameter: Age (day) Value: 8
  misc_feature: MA Experiment 20000534 PARAMETER Experiment Name: Zm_Hybrid_Pollen_P Parameter: Organism Value: Zea mays
  misc_feature: MA Experiment 20000534 PARAMETER Experiment Name: Zm_Hybrid_Pollen_P Parameter: Plant Line Value: 35A19
  misc_feature: MA Experiment 20000534 PARAMETER Experiment Name: Zm_Hybrid_Pollen_P Parameter: Tissue Value: Pollen vs. Aerial
aaagaggggagaagaagccaaggatgtactggttccagttcaacctccctgagctgtgatgggaatcgcattccctctataattcctataaataggggccctcccgctcccatcacaatcacccatcactcgctctattcccattccaagtccccgctcttggattcccgacgacgagctcggagcttcttcttccctgctcggtgctcgtcgcaacagctgccgccatgtctgccgcgaaccagctcgccgctctggtcagcaacatgtacgccacgggtttgcttgacgatcagttccagcagctccagctgctccaggaccccagcgcccctgacttcgtctccgaggtcgtcacgctcttctgtcaggacggcgagcggatcatcgaagagctggccaaactgctggagaagcccaacgtggattttgacagggttgacgcctttgtgcatcagctcaagggaagcagtgcaaatattggtgctcagaaggttaagaacacttgcattcagttccgcgaattctgtcagcagaagagcagagatgggtgcctcaaggtactggagacaatgaggattaacttctatgagctgcgtggcaagtttcagaccatgcttcagctggagcgtcaggtcaatggctttccccccaacaagtaaaccagatggtggagtggaccttcatgttaggatgatgcttgcacctttcaagtttcagaacattctgaatgagctcctcaattggtttctgggaagtcttgtaatagcttagcagcaagattagcgttgacaccaccgtagcagtagtcattgtcgtcaagtagttgtcctaaatgtctgtgctgggttatggatctcctgcaagcagttgcaggcttgcagctgttctatttactctagtagtttattttggagtagtcgctctcaataaatctgtcctaggagtctattggtggattattagtcagtcagtttctgggattcctggtggtgaagcaaaacaatgttatggctatcggttaataataatagtttgctgtgtttg

SEQ ID NO: 14925 - protein, 191 aa, Zea mays subsp. mays
  peptide (1)..(191): Ceres Seq. ID no. 12455279
KEGRRSQGCTGSSSTSLSCDGNRIPSIIPINRGPPAPITITHHSLYSHSKSPLLDSRRRARSFFFPARCSSQQLPPCLPRTSSPLWSATCTPRVCLTISSSSSSCSRTPAPLTSSPRSSRSSVRTASGSSKSWPNCWRSPTWILTGLTPLCISSREAVQILVLRRLRTLAFSSANSVSRRAEMGASRYWRQ

SEQ ID NO: 14926 - protein, 144 aa, Zea mays subsp. mays
  peptide (1)..(144): Ceres Seq. ID no. 12455280
  misc_feature (1)..(144): Homolog of NCBI NO: 6009622 NR Description: histidine-containing phosphotransfer protein [Zea
  misc_feature (1)..(144): Homolog of NCBI NO: 22036126 NR Description: his-containing phosphotransfer protein [Zea mays]
  misc_feature (1)..(142): Homolog of NCBI NO: 33637786 NR Description: two-component phosphorelay mediator HP2 [Oryza
  misc_feature (1)..(144): Homolog of NCBI NO: 33637784 NR Description: two-component phosphorelay mediator HP1 [Oryza
  misc_feature (1)..(137): Homolog of NCBI NO: 5689238 NR Description: histidine-containing phosphotransfer protein [Zea
  misc_feature (13)..(137): Homolog of NCBI NO: 15233079 NR Description: two-component phosphorelay mediator, putative; id: At3g21510.1, supported by cDNA: 9813., supported by cDNA: supported by cDNA: gi_17104734, supported by cDNA:
  misc_feature (13)..(137): Homolog of NCBI NO: 13774348 NR Description: histidine-containing phosphotransfer protein
  misc_feature (1)..(137): Homolog of NCBI NO: 18379097 NR Description: putative AHP2; protein id: At1g03430.1, supported cDNA: 452., supported by cDNA: gi_7630188 [Arabidopsis thaliana]
  misc_feature (1)..(137): Homolog of NCBI NO: 21593802 NR Description: putative AHP2 [Arabidopsis thaliana]
  misc_feature (13)..(137): Homolog of NCBI NO: 15228686 NR Description: ATHP2, putative; protein id: At3g29350.1, by cDNA: 24559., supported by cDNA: gi_17381271, supported by gi_20453360, supported by cDNA: gi_4107100, supported by cDNA:
MSAANQLAALVSNMYATGLLDDQFQQLQLLQDPSAPDFVSEVVTLFCQDGERIIEELAKLLEKPNVDFDRVDAFVHQLKGSSANIGAQKVKNTCIQFREFCQQKSRDGCLKVLETMRINFYELRGKFQTMLQLERQVNGFPPNK

SEQ ID NO: 14927 - protein, 131 aa, Zea mays subsp. mays
  peptide (1)..(131): Ceres Seq. ID no. 12455281
  misc_feature (1)..(131): Homolog of NCBI NO: 6009622 NR Description: histidine-containing phosphotransfer protein [Zea
  misc_feature (1)..(131): Homolog of NCBI NO: 22036126 NR Description: his-containing phosphotransfer protein [Zea mays]
  misc_feature (1)..(129): Homolog of NCBI NO: 33637786 NR Description: two-component phosphorelay mediator HP2 [Oryza
  misc_feature (1)..(131): Homolog of NCBI NO: 33637784 NR Description: two-component phosphorelay mediator HP1 [Oryza
  misc_feature (1)..(124): Homolog of NCBI NO: 5689238 NR Description: histidine-containing phosphotransfer protein [Zea
  misc_feature (1)..(124): Homolog of NCBI NO: 15233079 NR Description: two-component phosphorelay mediator, putative; id: At3g21510.1, supported by cDNA: 9813., supported by cDNA: supported by cDNA: gi_17104734, supported by cDNA:
  misc_feature (1)..(124): Homolog of NCBI NO: 13774348 NR Description: histidine-containing phosphotransfer protein
  misc_feature (1)..(124): Homolog of NCBI NO: 18379097 NR Description: putative AHP2; protein id: At1g03430.1, supported cDNA: 452., supported by cDNA: gi_7630188 [Arabidopsis thaliana]
  misc_feature (1)..(124): Homolog of NCBI NO: 21593802 NR Description: putative AHP2 [Arabidopsis thaliana]
  misc_feature (1)..(124): Homolog of NCBI NO: 15228686 NR Description: ATHP2, putative; protein id: At3g29350.1, by cDNA: 24559., supported by cDNA: gi_17381271, supported by gi_20453360, supported by cDNA: gi_4107100, supported by cDNA:
MYATGLLDDQFQQLQLLQDPSAPDFVSEVVTLFCQDGERIIEELAKLLEKPNVDFDRVDAFVHQLKGSSANIGAQKVKNTCIQFREFCQQKSRDGCLKVLETMRINFYELRGKFQTMLQLERQVNGFPPNK

SEQ ID NO: 14928 - DNA, 925 bp, Zea mays subsp. mays
  misc_feature (1)..(925): Ceres Seq. ID no. 12469239
  misc_feature: MA Experiment ID: 108504 Result: Up-regulated in Transcription
  misc_feature: MA Experiment 108504 PARAMETER Experiment Name: Zm_Drought_P Parameter: Age (day) Value: 8
  misc_feature: MA Experiment 108504 PARAMETER Experiment Name: Zm_Drought_P Parameter: Organism Value: Zea mays
  misc_feature: MA Experiment 108504 PARAMETER Experiment Name: Zm_Drought_P Parameter: Plant Line Value: 35A19
  misc_feature: MA Experiment 108504 PARAMETER Experiment Name: Zm_Drought_P Parameter: Timepoint (hr) Value: 12
  misc_feature: MA Experiment 108504 PARAMETER Experiment Name: Zm_Drought_P Parameter: Tissue Value: Aerial
  misc_feature: MA Experiment 108504 PARAMETER Experiment Name: Zm_Drought_P Parameter: Treatment Value: Drought vs. No Drought
  misc_feature: MA Experiment ID: 108556 Result: Up-regulated in Transcription
  misc_feature: MA Experiment 108556 PARAMETER Experiment Name: Zm_Drought_P Parameter: Age (day) Value: 9
  misc_feature: MA Experiment 108556 PARAMETER Experiment Name: Zm_Drought_P Parameter: Organism Value: Zea mays
  misc_feature: MA Experiment 108556 PARAMETER Experiment Name: Zm_Drought_P Parameter: Plant Line Value: 35A19
  misc_feature: MA Experiment 108556 PARAMETER Experiment Name: Zm_Drought_P Parameter: Timepoint (hr) Value: 24
  misc_feature: MA Experiment 108556 PARAMETER Experiment Name: Zm_Drought_P Parameter: Tissue Value: Aerial
  misc_feature: MA Experiment 108556 PARAMETER Experiment Name: Zm_Drought_P Parameter: Treatment Value: Drought vs. No Drought
  misc_feature: MA Experiment ID: 108689 Result: Up-regulated in Transcription
  misc_feature: MA Experiment 108689 PARAMETER Experiment Name: Zm_Drought_Roots_P Parameter: Age (day) Value: 9
  misc_feature: MA Experiment 108689 PARAMETER Experiment Name: Zm_Drought_Roots_P Parameter: Organism Value: Zea mays
  misc_feature: MA Experiment 108689 PARAMETER Experiment Name: Zm_Drought_Roots_P Parameter: Plant Line Value: 35A19
  misc_feature: MA Experiment 108689 PARAMETER Experiment Name: Zm_Drought_Roots_P Parameter: Timepoint (hr) Value: 24
  misc_feature: MA Experiment 108689 PARAMETER Experiment Name: Zm_Drought_Roots_P Parameter: Tissue Value: Roots
  misc_feature: MA Experiment 108689 PARAMETER Experiment Name: Zm_Drought_Roots_P Parameter: Treatment Value: Drought vs. No Drought
  misc_feature: MA Experiment ID: 20000480 Result: Up-regulated in Transcription
  misc_feature: MA Experiment 20000480 PARAMETER Experiment Name: Zm_Drought_P Parameter: Age (day) Value: 11
  misc_feature: MA Experiment 20000480 PARAMETER Experiment Name: Zm_Drought_P Parameter: Organism Value: Zea mays
  misc_feature: MA Experiment 20000480 PARAMETER Experiment Name: Zm_Drought_P Parameter: Plant Line Value: 35A19
  misc_feature: MA Experiment 20000480 PARAMETER Experiment Name: Zm_Drought_P Parameter: Timepoint (hr) Value: 72
  misc_feature: MA Experiment 20000480 PARAMETER Experiment Name: Zm_Drought_P Parameter: Tissue Value: Aerial
  misc_feature: MA Experiment 20000480 PARAMETER Experiment Name: Zm_Drought_P Parameter: Treatment Value: Drought vs. No Drought
tcccccgtcacctcaaaaacctctccaaccccaccggtccaccaccgccagccacctctccctcgctctcactcaggtcccccgcaacacgacgagaggcagcaggaccggaaggcgccatggccaccacccgcgacgtctccgccgcctccgcggccgccatgttccacgtgtaccagcccatgccgatgccatccacggcggcggcccccgcgaaggcgggcaagaaggagggcggcaaggaccggcacagcaaggtgaacgggcgcgggcggcgcgtgcggatgccgatcgtgtgcgcggcgcgcgtgttccagctgacccgcgagctggggctcaagtcggacgggcagaccatcgagtggctgctccgccaggccgagccctccatcgtggccgccacgggctccggcaccaccccggccgtcttcgtctcctcctccgcgccgtccangtcctcctcctcccactcccactaccagcagcagcagcagcagcagcaggccnccgtcgtcgtcctgggcaagcgcccgcgcgaggagggcggcgacgccgcggcggcgtccgtgccggcgttntgggcggcggcgccgcggacgacggcagcagcggacgccagctggggcttctcgccgctggaggcccagcaggcggcggcggggtacgtgcccatggcacaggcgcagcagcagcagcaccaccaccaccacctcaacctgctcgccgcgctntccggtgccgcgaggcgcgccgaggcggcggaggagacccgatgactgctagcctagtagctacatgcatccgccactcgcgcgcatgcattggtcctttgttgtccgtgtgctcgctcttggcagcgtaaacgttcttgatttttgtttgtgtgtgtgcccttgtgatcttggctcgttagctagagtaatcc

SEQ ID NO: 14929 - protein, 286 aa, Zea mays subsp. mays
  peptide (1)..(286): Ceres Seq. ID no. 12469240
  misc_feature (35)..(252): Homolog of NCBI NO: 29247944 NR Description: GLP_26_54603_52153 [Giardia lamblia ATCC 50803]
  misc_feature (151)..(151): Xaa is any aa, unknown or other
  misc_feature (169)..(169): Xaa is any aa, unknown or other
  misc_feature (193)..(193): Xaa is any aa, unknown or other
  misc_feature (244)..(244): Xaa is any aa, unknown or other
PPSPQKPLQPHRSTTASHLSLALTQVPRNTTRGSRTGRRHGHHPRRLRRLRGRHVPRVPAHADAIHGGGPREGGQEGGRQGPAQQGERARAARADADRVRGARVPADPRAGAQVGRADHRVAAPPGRALHRGRHGLRHHPGRLRLLLRAVXVLLLPLPLPAAAAAAAGXRRRPGQAPARGGRRRRGGVRAGVXGGGAADDGSSGRQLGLLAAGGPAGGGGVRAHGTGAAAAAPPPPPQPARRAXRCREARRGGGGDPMTASLVATCIRHSRACIGPLLSVCSLLAA

SEQ ID NO: 14930 - protein, 257 aa, Zea mays subsp. mays
  peptide (1)..(257): Ceres Seq. ID no. 12469241
  misc_feature (70)..(234): Pfam Name: TCP family transcription factor Pfam Description: TCP family transcription factor
  misc_feature (44)..(184): Homolog of NCBI NO: 38344439 NR Description: OSJNBa0038O10.11 [Oryza sativa (japonica
  misc_feature (172)..(257): Homolog of NCBI NO: 38344439 NR Description: OSJNBa0038O10.11 [Oryza sativa (japonica
  misc_feature (70)..(234): Homolog of NCBI NO: 15237274 NR Description: unknown protein; protein id: At5g23280.1 thaliana] >gi|10177817|dbj|BAB11183.1| gene_id:MKD15.14~unknown
  misc_feature (70)..(234): Homolog of NCBI NO: 26452377 NR Description: unknown protein [Arabidopsis thaliana]
  misc_feature (70)..(152): Homolog of NCBI NO: 15241596 NR Description: putative protein; protein id: At5g08330.1, by cDNA: gi_15724267, supported by cDNA: gi_18252260 [Arabidopsis >gi|10178275|emb|CAC08333.1| putative protein [Arabidopsis
  misc_feature (67)..(172): Homolog of NCBI NO: 20975251 NR Description: transcription factor PCF3 [Oryza sativa (japonica
  misc_feature (2)..(156): Homolog of NCBI NO: 15232059 NR Description: unknown protein; protein id: At3g27010.1 thaliana] >gi|9279624|dbj|BAB01082.1| gene_id:MOJ10.8~unknown [Arabidopsis thaliana] >gi|11595501|emb|CAC18326.1| putative
  misc_feature (64)..(244): Homolog of NCBI NO: 5731257 NR Description: auxin-induced basic helix-loop-helix
  misc_feature (45)..(158): Homolog of NCBI NO: 18409345 NR Description: expressed protein; protein id: At1g69690.1, by cDNA: gi_15912212, supported by cDNA: gi_19547990 [Arabidopsis
  misc_feature (66)..(168): Homolog of NCBI NO: 15218305 NR Description: unknown protein; protein id: At1g72010.1, by cDNA: gi_19423971 [Arabidopsis thaliana]
  misc_feature (151)..(151): Xaa is any aa, unknown or other
  misc_feature (169)..(169): Xaa is any aa, unknown or other
  misc_feature (192)..(192): Xaa is any aa, unknown or other
  misc_feature (243)..(243): Xaa is any aa, unknown or other
PRHLKNLSNPTGPPPPATSPSLSLRSPATRREAAGPEGAMATTRDVSAASAAAMFHVYQPMPMPSTAAAPAKAGKKEGGKDRHSKVNGRGRRVRMPIVCAARVFQLTRELGLKSDGQTIEWLLRQAEPSIVAATGSGTTPAVFVSSSAPSXSSSSHSHYQQQQQQQQAXVVVLGKRPREEGGDAAAASVPAXWAAAPRTTAAADASWGFSPLEAQQAAAGYVPMAQAQQQQHHHHHLNLLAAXSGAARRAEAAEETR

SEQ ID NO: 14931 - protein, 218 aa, Zea mays subsp. mays
  peptide (1)..(218): Ceres Seq. ID no. 12469242
  misc_feature (31)..(195): Pfam Name: TCP family transcription factor Pfam Description: TCP family transcription factor
  misc_feature (5)..(145): Homolog of NCBI NO: 38344439 NR Description: OSJNBa0038O10.11 [Oryza sativa (japonica
  misc_feature (133)..(218): Homolog of NCBI NO: 38344439 NR Description: OSJNBa0038O10.11 [Oryza sativa (japonica
  misc_feature (31)..(195): Homolog of NCBI NO: 15237274 NR Description: unknown protein; protein id: At5g23280.1 thaliana] >gi|10177817|dbj|BAB11183.1| gene_id:MKD15.14~unknown
  misc_feature (31)..(195): Homolog of NCBI NO: 26452377 NR Description: unknown protein [Arabidopsis thaliana]
  misc_feature (31)..(113): Homolog of NCBI NO: 15241596 NR Description: putative protein; protein id: At5g08330.1, by cDNA: gi_15724267, supported by cDNA: gi_18252260 [Arabidopsis >gi|10178275|emb|CAC08333.1| putative protein [Arabidopsis
  misc_feature (28)..(133): Homolog of NCBI NO: 20975251 NR Description: transcription factor PCF3 [Oryza sativa (japonica
  misc_feature (1)..(117): Homolog of NCBI NO: 15232059 NR Description: unknown protein; protein id: At3g27010.1 thaliana] >gi|9279624|dbj|BAB01082.1| gene_id:MOJ10.8~unknown [Arabidopsis thaliana] >gi|11595501|emb|CAC18326.1| putative
  misc_feature (25)..(205): Homolog of NCBI NO: 5731257 NR Description: auxin-induced basic helix-loop-helix
  misc_feature (6)..(119): Homolog of NCBI NO: 18409345 NR Description: expressed protein; protein id: At1g69690.1, by cDNA: gi_15912212, supported by cDNA: gi_19547990 [Arabidopsis
  misc_feature (27)..(129): Homolog of NCBI NO: 15218305 NR Description: unknown protein; protein id: At1g72010.1, by cDNA: gi_19423971 [Arabidopsis thaliana]
  misc_feature (112)..(112): Xaa is any aa, unknown or other
  misc_feature (130)..(130): Xaa is any aa, unknown or other
  misc_feature (153)..(153): Xaa is any aa, unknown or other
  misc_feature (204)..(204): Xaa is any aa, unknown or other
MATTRDVSAASAAAMFHVYQPMPMPSTAAAPAKAGKKEGGKDRHSKVNGRGRRVRMPIVCAARVFQLTRELGLKSDGQTIEWLLRQAEPSIVAATGSGTTPAVFVSSSAPSXSSSSHSHYQQQQQQQQAXVVVLGKRPREEGGDAAAASVPAXWAAAPRTTAAADASWGFSPLEAQQAAAGYVPMAQAQQQQHHHHHLNLLAAXSGAARRAEAAEETR

SEQ ID NO: 14932 - DNA, 1617 bp, Zea mays subsp. mays
  misc_feature (1)..(1617): Ceres Seq. ID no. 13599123
  misc_feature: MA Experiment ID: 108535 Result: Up-regulated in Transcription
  misc_feature: MA Experiment 108535 PARAMETER Experiment Name: Zm_Meristem_P Parameter: Age (day) Value: 8
  misc_feature: MA Experiment 108535 PARAMETER Experiment Name: Zm_Meristem_P Parameter: Organism Value: Zea mays
  misc_feature: MA Experiment 108535 PARAMETER Experiment Name: Zm_Meristem_P Parameter: Plant Line Value: 35A19
  misc_feature: MA Experiment 108535 PARAMETER Experiment Name: Zm_Meristem_P Parameter: Tissue Value: Root Meristem vs. Above Root Meristem
catatggctcaatgctgaaaaatctgacatttgtcaagacttttgcctctggaatacttgttcccaaaagctatatctggcctgttacaccagataattacctgctgccttatacttcagtggttgatgatgctcacaaagcaggactagaaatctatgccgctgattttgcaaatgacttaaccatcagctataactacagctttgatccattagcggaatatcttttcttcattgataacggtgccttctctgttgatggtgtattgactgatttcccgattactccttcagaggcagttggttgctttagtaacctgaacaccagcaagattgatcatgctaaacctctagttatctcgcataatggtgctagtggtgactacccagactgcactgaccaagcttatgaaaaggcagttgccgatggtgcggatgtcattgactgtcctgttcaagtgactaaagatggcatactgatatgcatgagctctgttgacctaatggatgttactactgttgcaaaatcacaatttgcttcgcaagtaactaccatcaacagtctgaaggctgggtctggagtcttcaccttcaaccttacttgggatgatatttctaagaacctaaagcccatgatatcgaacccaatgagcacctataatctgtacagaaatcctagaaacaagaacgcaggaaacttcatgagattgtcagactttttgacctttgcaaatggaaaggatttgtcaggaatcatgataactgttgagcatgctgcattcatggcagaggagcttgggtttggtgtggtagatgcagtgatcaaagcacttgatgactctggttatagcaaacagactgcccagaatgttatgattcagtcaaccaacagctcagttctggtgaagttcaagcaggaaaccaagtacaaccttgtctacatgatcgaagaaagtgtccgagatgccgcaccttcctcccttgcggacattaagaagtttgctgatgctgtttctgttggcaccacatctgttttcccggaaacccattactatttgacgaaccagaccaataagcttgttccgacccttaagtctgccggcctccaagtttacgtttacgtgctcatgaatgagtttgcttcccagccaaatgacttcttcgcagacgccacttcacagatcaatgcttatgtgcaaagtgctaaggtggatggtgtcatcactgatttccctgggactgctcacagatacaaactgaactcctgcacgagcatgggaaagaacatgccactattcatgcagcctccgcaaccaggtggcctcctttcaaccattctcccagatgcacagccaccagcagcagcgccaatgccgctcttgacggacgctgacgtcgcagaaccagccctacctccggtcagcaacaccaccacggctgcatcgccttcgcatgccgccctcagaatgcgaacccatgtcttgagcatcgccacattgctgatgctatgtgcttccctcctcatctgaagatagtcttgcccaacatcatacgcggcgtggcgcattagagctgaggattttcacattgagctgctaatagcaattctttccacct

SEQ ID NO: 14933 - protein, 508 aa, Zea mays subsp. mays
  peptide (1)..(508): Ceres Seq. ID no. 13599124
  misc_feature (1)..(508): Homolog of NCBI NO: 7485338 NR Description: hypothetical protein F10M23.30 - Arabidopsis >gi|4455192|emb|CAB36515.1| putative protein [Arabidopsis >gi|7269521|emb|CAB79524.1| putative protein [Arabidopsis
  misc_feature (1)..(508): Homolog of NCBI NO: 18416801 NR Description: expressed protein [Arabidopsis thaliana]
  misc_feature (1)..(508): Homolog of NCBI NO: 34395734 NR Description: Probable glycerophosphoryl diester
  misc_feature (1)..(504): Homolog of NCBI NO: 15240520 NR Description: expressed protein [Arabidopsis thaliana] gene_id:MTE17.19~pir||T04792~similar to unknown protein
  misc_feature (1)..(486): Homolog of NCBI NO: 30697435 NR Description: expressed protein [Arabidopsis thaliana]
  misc_feature (1)..(486): Homolog of NCBI NO: 30794041 NR Description: unknown protein [Arabidopsis thaliana]
  misc_feature (1)..(507): Homolog of NCBI NO: 15219803 NR Description: kinase -related [Arabidopsis thaliana]
  misc_feature (1)..(507): Homolog of NCBI NO: 25404657 NR Description: hypothetical protein F1O19.6 [imported] - thaliana >gi|9755449|gb|AAF98210.1|AC007152_6 Unknown protein
  misc_feature (1)..(504): Homolog of NCBI NO: 38344811 NR Description: OSJNBb0022F23.4 [Oryza sativa (japonica
  misc_feature (4)..(430): Homolog of NCBI NO: 4104060 NR Description: S222 [Triticum aestivum]
YGSMLKNLTFVKTFASGILVPKSYIWPVTPDNYLLPYTSVVDDAHKAGLEIYAADFANDLTISYNYSFDPLAEYLFFIDNGAFSVDGVLTDFPITPSEAVGCFSNLNTSKIDHAKPLVISHNGASGDYPDCTDQAYEKAVADGADVIDCPVQVTKDGILICMSSVDLMDVTTVAKSQFASQVTTINSLKAGSGVFTFNLTWDDISKNLKPMISNPMSTYNLYRNPRNKNAGNFMRLSDFLTFANGKDLSGIMITVEHAAFMAEELGFGVVDAVIKALDDSGYSKQTAQNVMIQSTNSSVLVKFKQETKYNLVYMIEESVRDAAPSSLADIKKFADAVSVGTTSVFPETHYYLTNQTNKLVPTLKSAGLQVYVYVLMNEFASQPNDFFADATSQINAYVQSAKVDGVITDFPGTAHRYKLNSCTSMGKNMPLFMQPPQPGGLLSTILPDAQPPAAAPMPLLTDADVAEPALPPVSNTTTAASPSHAALRMRTHVLSIATLLMLCASLLI

SEQ ID NO: 14934 - protein, 505 aa, Zea mays subsp. mays
  peptide (1)..(505): Ceres Seq. ID no. 13599125
  misc_feature (1)..(501): Homolog of NCBI NO: 38344811 NR Description: OSJNBb0022F23.4 [Oryza sativa (japonica
  misc_feature (1)..(427): Homolog of NCBI NO: 4104060 NR Description: S222 [Triticum aestivum]
  misc_feature (1)..(505): Homolog of NCBI NO: 7485338 NR Description: hypothetical protein F10M23.30 - Arabidopsis >gi|4455192|emb|CAB36515.1| putative protein [Arabidopsis >gi|7269521|emb|CAB79524.1| putative protein [Arabidopsis
  misc_feature (1)..(505): Homolog of NCBI NO: 18416801 NR Description: expressed protein [Arabidopsis thaliana]
  misc_feature (1)..(505): Homolog of NCBI NO: 34395734 NR Description: Probable glycerophosphoryl diester
  misc_feature (1)..(501): Homolog of NCBI NO: 15240520 NR Description: expressed protein [Arabidopsis thaliana] gene_id:MTE17.19~pir||T04792~similar to unknown protein
  misc_feature (1)..(483): Homolog of NCBI NO: 30697435 NR Description: expressed protein [Arabidopsis thaliana]
  misc_feature (1)..(483): Homolog of NCBI NO: 30794041 NR Description: unknown protein [Arabidopsis thaliana]
  misc_feature (1)..(504): Homolog of NCBI NO: 15219803 NR Description: kinase -related [Arabidopsis thaliana]
  misc_feature (1)..(504): Homolog of NCBI NO: 25404657 NR Description: hypothetical protein F1O19.6 [imported] - thaliana >gi|9755449|gb|AAF98210.1|AC007152_6 Unknown protein
MLKNLTFVKTFASGILVPKSYIWPVTPDNYLLPYTSVVDDAHKAGLEIYAADFANDLTISYNYSFDPLAEYLFFIDNGAFSVDGVLTDFPITPSEAVGCFSNLNTSKIDHAKPLVISHNGASGDYPDCTDQAYEKAVADGADVIDCPVQVTKDGILICMSSVDLMDVTTVAKSQFASQVTTINSLKAGSGVFTFNLTWDDISKNLKPMISNPMSTYNLYRNPRNKNAGNFMRLSDFLTFANGKDLSGIMITVEHAAFMAEELGFGVVDAVIKALDDSGYSKQTAQNVMIQSTNSSVLVKFKQETKYNLVYMIEESVRDAAPSSLADIKKFADAVSVGTTSVFPETHYYLTNQTNKLVPTLKSAGLQVYVYVLMNEFASQPNDFFADATSQINAYVQSAKVDGVITDFPGTAHRYKLNSCTSMGKNMPLFMQPPQPGGLLSTILPDAQPPAAAPMPLLTDADVAEPALPPVSNTTTAASPSHAALRMRTHVLSIATLLMLCASLLI

SEQ ID NO: 14935 - protein, 347 aa, Zea mays subsp. mays
  peptide (1)..(347): Ceres Seq. ID no. 13599126
  misc_feature (1)..(343): Homolog of NCBI NO: 38344811 NR Description: OSJNBb0022F23.4 [Oryza sativa (japonica
  misc_feature (1)..(269): Homolog of NCBI NO: 4104060 NR Description: S222 [Triticum aestivum]
  misc_feature (1)..(347): Homolog of NCBI NO: 7485338 NR Description: hypothetical protein F10M23.30 - Arabidopsis >gi|4455192|emb|CAB36515.1| putative protein [Arabidopsis >gi|7269521|emb|CAB79524.1| putative protein [Arabidopsis
  misc_feature (1)..(347): Homolog of NCBI NO: 18416801 NR Description: expressed protein [Arabidopsis thaliana]
  misc_feature (1)..(347): Homolog of NCBI NO: 34395734 NR Description: Probable glycerophosphoryl diester
  misc_feature (1)..(343): Homolog of NCBI NO: 15240520 NR Description: expressed protein [Arabidopsis thaliana] gene_id:MTE17.19~pir||T04792~similar to unknown protein
  misc_feature (1)..(325): Homolog of NCBI NO: 30697435 NR Description: expressed protein [Arabidopsis thaliana]
  misc_feature (1)..(325): Homolog of NCBI NO: 30794041 NR Description: unknown protein [Arabidopsis thaliana]
  misc_feature (1)..(346): Homolog of NCBI NO: 15219803 NR Description: kinase -related [Arabidopsis thaliana]
  misc_feature (1)..(346): Homolog of NCBI NO: 25404657 NR Description: hypothetical protein F1O19.6 [imported] - thaliana >gi|9755449|gb|AAF98210.1|AC007152_6 Unknown protein
MSSVDLMDVTTVAKSQFASQVTTINSLKAGSGVFTFNLTWDDISKNLKPMISNPMSTYNLYRNPRNKNAGNFMRLSDFLTFANGKDLSGIMITVEHAAFMAEELGFGVVDAVIKALDDSGYSKQTAQNVMIQSTNSSVLVKFKQETKYNLVYMIEESVRDAAPSSLADIKKFADAVSVGTTSVFPETHYYLTNQTNKLVPTLKSAGLQVYVYVLMNEFASQPNDFFADATSQINAYVQSAKVDGVITDFPGTAHRYKLNSCTSMGKNMPLFMQPPQPGGLLSTILPDAQPPAAAPMPLLTDADVAEPALPPVSNTTTAASPSHAALRMRTHVLSIATLLMLCASLLI

SEQ ID NO: 14936 - DNA, 495 bp, Zea mays subsp. mays
  misc_feature (1)..(495): Ceres Seq. ID no. 4581901
  misc_feature: MA Experiment ID: 108597 Result: Up-regulated in Transcription
  misc_feature: MA Experiment 108597 PARAMETER Experiment Name: Zm_100uM_ABA_P Parameter: Age (day) Value: 9
  misc_feature: MA Experiment 108597 PARAMETER Experiment Name: Zm_100uM_ABA_P Parameter: Organism Value: Zea mays
  misc_feature: MA Experiment 108597 PARAMETER Experiment Name: Zm_100uM_ABA_P Parameter: Plant Line Value: 35A19
  misc_feature: MA Experiment 108597 PARAMETER Experiment Name: Zm_100uM_ABA_P Parameter: Timepoint (hr) Value: 24
  misc_feature: MA Experiment 108597 PARAMETER Experiment Name: Zm_100uM_ABA_P Parameter: Tissue Value: Aerial
  misc_feature: MA Experiment 108597 PARAMETER Experiment Name: Zm_100uM_ABA_P Parameter: Treatment Value: 100uM ABA vs. No Treatment
  misc_feature: MA Experiment ID: 20000479 Result: Up-regulated in Transcription
  misc_feature: MA Experiment 20000479 PARAMETER Experiment Name: Zm_Drought_P Parameter: Age (day) Value: 10
  misc_feature: MA Experiment 20000479 PARAMETER Experiment Name: Zm_Drought_P Parameter: Organism Value: Zea mays
  misc_feature: MA Experiment 20000479 PARAMETER Experiment Name: Zm_Drought_P Parameter: Plant Line Value: 35A19
  misc_feature: MA Experiment 20000479 PARAMETER Experiment Name: Zm_Drought_P Parameter: Timepoint (hr) Value: 48
  misc_feature: MA Experiment 20000479 PARAMETER Experiment Name: Zm_Drought_P Parameter: Tissue Value: Aerial
  misc_feature: MA Experiment 20000479 PARAMETER Experiment Name: Zm_Drought_P Parameter: Treatment Value: Drought vs. No Drought
  misc_feature: MA Experiment ID: 20000480 Result: Up-regulated in Transcription
  misc_feature: MA Experiment 20000480 PARAMETER Experiment Name: Zm_Drought_P Parameter: Age (day) Value: 11
  misc_feature: MA Experiment 20000480 PARAMETER Experiment Name: Zm_Drought_P Parameter: Organism Value: Zea mays
  misc_feature: MA Experiment 20000480 PARAMETER Experiment Name: Zm_Drought_P Parameter: Plant Line Value: 35A19
  misc_feature: MA Experiment 20000480 PARAMETER Experiment Name: Zm_Drought_P Parameter: Timepoint (hr) Value: 72
  misc_feature: MA Experiment 20000480 PARAMETER Experiment Name: Zm_Drought_P Parameter: Tissue Value: Aerial
  misc_feature: MA Experiment 20000480 PARAMETER Experiment Name: Zm_Drought_P Parameter: Treatment Value: Drought vs. No Drought
ttgaagatgggtgactgtgatctttcagatctnattgggtttttccaaacctccaaagcattgcaagaattcgccggtggtgccttttttgaagttggagagtacaccaagtacgaaaaggtcattttcccacctaggctatgcttcttagggggtcttaccttcatgggtaaaaacgagatgccagttatctttccgtattccacaatgcttaagaaactggacttgcagttcactttcctcaccactgaagaccactgtcagcttattgctaaatgccccaacctaagtgttctcgaggtgaggaatgtgattggggatagaggactagaagttgttgctgctacatgcaagaagctacgaaggctcagaattgagcgtggcgacgatgatcctggccaagaagagcagggaggagtctctcagataggtttgacagccgtagccgttggctgccgcgaactagagtacatagctgcctatgtatctgatatc

SEQ ID NO: 14937 - protein, 165 aa, Zea mays subsp. mays
  peptide (1)..(165): Ceres Seq. ID no. 4581902
  misc_feature (1)..(164): Homolog of NCBI NO: 34908378 NR Description: P0529E05.15 [Oryza sativa (japonica
  misc_feature (1)..(164): Homolog of NCBI NO: 34902000 NR Description: unknown protein [Oryza sativa (japonica
  misc_feature (1)..(164): Homolog of NCBI NO: 18405209 NR Description: coronatine-insensitive 1 (COI1), AtFBL2; protein At2g39940.1, supported by cDNA: gi_15010647, supported by cDNA:
  misc_feature (1)..(164): Homolog of NCBI NO: 40218003 NR Description: coronatine-insensitive 1 [Lycopersicon esculentum]
  misc_feature (47)..(158): Homolog of NCBI NO: 18423092 NR Description: transport inhibitor response 1 (TIR1), putative; id: At5g49980.1, supported by cDNA: gi_15912306 [Arabidopsis >gi|8777429|dbj|BAA97019.1| transport inhibitor response 1
  misc_feature (47)..(158): Homolog of NCBI NO: 13249030 NR Description: F-box containing protein TIR1 [Populus tremula x
  misc_feature (76)..(164): Homolog of NCBI NO: 7487322 NR Description: hypothetical protein T22A6.220 - Arabidopsis
  misc_feature (76)..(164): Homolog of NCBI NO: 30686516 NR Description: F-box protein family, AtFBX14 [Arabidopsis >gi|20147209|gb|AAM10320.1| AT4g24390/T22A6_220 [Arabidopsis >gi|30102460|gb|AAP21148.1| At4g24390/T22A6_220 [Arabidopsis
  misc_feature (61)..(158): Homolog of NCBI NO: 18391439 NR Description: transport inhibitor response 1 (TIR1), putative; id: At1g12820.1, supported by cDNA: gi_20466150 [Arabidopsis
  misc_feature (61)..(158): Homolog of NCBI NO: 18412567 NR Description: transport inhibitor response 1 (TIR1), AtFBL1; id: At3g62980.1, supported by cDNA: gi_11935208, supported by gi_2352493 [Arabidopsis thaliana] >gi|11282337|pir||T48087
  misc_feature (11)..(11): Xaa is any aa, unknown or other
LKMGDCDLSDXIGFFQTSKALQEFAGGAFFEVGEYTKYEKVIFPPRLCFLGGLTFMGKNEMPVIFPYSTMLKKLDLQFTFLTTEDHCQLIAKCPNLSVLEVRNVIGDRGLEVVAATCKKLRRLRIERGDDDPGQEEQGGVSQIGLTAVAVGCRELEYIAAYVSDI

SEQ ID NO: 14938 - protein, 163 aa, Zea mays subsp. mays
  peptide (1)..(163): Ceres Seq. ID no. 4581903
  misc_feature (1)..(162): Homolog of NCBI NO: 34908378 NR Description: P0529E05.15 [Oryza sativa (japonica
  misc_feature (1)..(162): Homolog of NCBI NO: 34902000 NR Description: unknown protein [Oryza sativa (japonica
  misc_feature (1)..(162): Homolog of NCBI NO: 18405209 NR Description: coronatine-insensitive 1 (COI1), AtFBL2; protein At2g39940.1, supported by cDNA: gi_15010647, supported by cDNA:
  misc_feature (1)..(162): Homolog of NCBI NO: 40218003 NR Description: coronatine-insensitive 1 [Lycopersicon esculentum]
  misc_feature (45)..(156): Homolog of NCBI NO: 18423092 NR Description: transport inhibitor response 1 (TIR1), putative; id: At5g49980.1, supported by cDNA: gi_15912306 [Arabidopsis >gi|8777429|dbj|BAA97019.1| transport inhibitor response 1
  misc_feature (45)..(156): Homolog of NCBI NO: 13249030 NR Description: F-box containing protein TIR1 [Populus tremula x
  misc_feature (74)..(162): Homolog of NCBI NO: 7487322 NR Description: hypothetical protein T22A6.220 - Arabidopsis
  misc_feature (74)..(162): Homolog of NCBI NO: 30686516 NR Description: F-box protein family, AtFBX14 [Arabidopsis >gi|20147209|gb|AAM10320.1| AT4g24390/T22A6_220 [Arabidopsis >gi|30102460|gb|AAP21148.1| At4g24390/T22A6_220 [Arabidopsis
  misc_feature (59)..(156): Homolog of NCBI NO: 18391439 NR Description: transport inhibitor response 1 (TIR1), putative; id: At1g12820.1, supported by cDNA: gi_20466150 [Arabidopsis
  misc_feature (59)..(156): Homolog of NCBI NO: 18412567 NR Description: transport inhibitor response 1 (TIR1), AtFBL1; id: At3g62980.1, supported by cDNA: gi_11935208, supported by gi_2352493 [Arabidopsis thaliana] >gi|11282337|pir||T48087
  misc_feature (9)..(9): Xaa is any aa, unknown or other
MGDCDLSDXIGFFQTSKALQEFAGGAFFEVGEYTKYEKVIFPPRLCFLGGLTFMGKNEMPVIFPYSTMLKKLDLQFTFLTTEDHCQLIAKCPNLSVLEVRNVIGDRGLEVVAATCKKLRRLRIERGDDDPGQEEQGGVSQIGLTAVAVGCRELEYIAAYVSDI

SEQ ID NO: 14939 - protein, 110 aa, Zea mays subsp. mays
  peptide (1)..(110): Ceres Seq. ID no. 4581904
  misc_feature (1)..(109): Homolog of NCBI NO: 34908378 NR Description: P0529E05.15 [Oryza sativa (japonica
  misc_feature (1)..(109): Homolog of NCBI NO: 34902000 NR Description: unknown protein [Oryza sativa (japonica
  misc_feature (1)..(109): Homolog of NCBI NO: 18405209 NR Description: coronatine-insensitive 1 (COI1), AtFBL2; protein At2g39940.1, supported by cDNA: gi_15010647, supported by cDNA:
  misc_feature (1)..(109): Homolog of NCBI NO: 40218003 NR Description: coronatine-insensitive 1 [Lycopersicon esculentum]
  misc_feature (1)..(103): Homolog of NCBI NO: 18423092 NR Description: transport inhibitor response 1 (TIR1), putative; id: At5g49980.1, supported by cDNA: gi_15912306 [Arabidopsis >gi|8777429|dbj|BAA97019.1| transport inhibitor response 1
  misc_feature (1)..(103): Homolog of NCBI NO: 13249030 NR Description: F-box containing protein TIR1 [Populus tremula x
  misc_feature (21)..(109): Homolog of NCBI NO: 7487322 NR Description: hypothetical protein T22A6.220 - Arabidopsis
  misc_feature (21)..(109): Homolog of NCBI NO: 30686516 NR Description: F-box protein family, AtFBX14 [Arabidopsis >gi|20147209|gb|AAM10320.1| AT4g24390/T22A6_220 [Arabidopsis >gi|30102460|gb|AAP21148.1| At4g24390/T22A6_220 [Arabidopsis
  misc_feature (6)..(103): Homolog of NCBI NO: 18391439 NR Description: transport inhibitor response 1 (TIR1), putative; id: At1g12820.1, supported by cDNA: gi_20466150 [Arabidopsis
  misc_feature (6)..(103): Homolog of NCBI NO: 18412567 NR Description: transport inhibitor response 1 (TIR1), AtFBL1; id: At3g62980.1, supported by cDNA: gi_11935208, supported by gi_2352493 [Arabidopsis thaliana] >gi|11282337|pir||T48087
MGKNEMPVIFPYSTMLKKLDLQFTFLTTEDHCQLIAKCPNLSVLEVRNVIGDRGLEVVAATCKKLRRLRIERGDDDPGQEEQGGVSQIGLTAVAVGCRELEYIAAYVSDI

SEQ ID NO: 14940 - DNA, 2065 bp, Zea mays subsp. mays
  misc_feature (1)..(2065): Ceres Seq. ID no. 13636855
  misc_feature: MA Experiment ID: 108504 Result: Down-regulated in Transcription
  misc_feature: MA Experiment 108504 PARAMETER Experiment Name: Zm_Drought_P Parameter: Age (day) Value: 8
  misc_feature: MA Experiment 108504 PARAMETER Experiment Name: Zm_Drought_P Parameter: Organism Value: Zea mays
  misc_feature: MA Experiment 108504 PARAMETER Experiment Name: Zm_Drought_P Parameter: Plant Line Value: 35A19
  misc_feature: MA Experiment 108504 PARAMETER Experiment Name: Zm_Drought_P Parameter: Timepoint (hr) Value: 12
  misc_feature: MA Experiment 108504 PARAMETER Experiment Name: Zm_Drought_P Parameter: Tissue Value: Aerial
  misc_feature: MA Experiment 108504 PARAMETER Experiment Name: Zm_Drought_P Parameter: Treatment Value: Drought vs. No Drought
  misc_feature: MA Experiment ID: 108527 Result: Down-regulated in Transcription
  misc_feature: MA Experiment 108527 PARAMETER Experiment Name: Zm_5mM_NO_P Parameter: Age (day) Value: 8
  misc_feature: MA Experiment 108527 PARAMETER Experiment Name: Zm_5mM_NO_P Parameter: Organism Value: Zea mays
  misc_feature: MA Experiment 108527 PARAMETER Experiment Name: Zm_5mM_NO_P Parameter: Plant Line Value: 35A19
  misc_feature: MA Experiment 108527 PARAMETER Experiment Name: Zm_5mM_NO_P Parameter: Timepoint (hr) Value: 6
  misc_feature: MA Experiment 108527 PARAMETER Experiment Name: Zm_5mM_NO_P Parameter: Tissue Value: Aerial
  misc_feature: MA Experiment 108527 PARAMETER Experiment Name: Zm_5mM_NO_P Parameter: Treatment Value: 5mM NO vs. No Treatment
  misc_feature: MA Experiment ID: 108536 Result: Up-regulated in Transcription
  misc_feature: MA Experiment 108536 PARAMETER Experiment Name: Zm_Meristem_P Parameter: Age (day) Value: 8
  misc_feature: MA Experiment 108536 PARAMETER Experiment Name: Zm_Meristem_P Parameter: Organism Value: Zea mays
  misc_feature: MA Experiment 108536 PARAMETER Experiment Name: Zm_Meristem_P Parameter: Plant Line Value: 35A19
  misc_feature: MA Experiment 108536 PARAMETER Experiment Name: Zm_Meristem_P Parameter: Tissue Value: Shoot Meristem vs. Above Shoot Meristem
  misc_feature: MA Experiment ID: 108543 Result: Up-regulated in Transcription
  misc_feature: MA Experiment ID: 20000492 Result: Down-regulated in Transcription
  misc_feature: MA Experiment 20000492 PARAMETER Experiment Name: Zm_Hybrid_Seed_Dev_P Parameter: DAP Value: 12
  misc_feature: MA Experiment 20000492 PARAMETER Experiment Name: Zm_Hybrid_Seed_Dev_P Parameter: Organism Value: Zea mays
  misc_feature: MA Experiment 20000492 PARAMETER Experiment Name: Zm_Hybrid_Seed_Dev_P Parameter: Plant Line Value: 35A19
  misc_feature: MA Experiment 20000492 PARAMETER Experiment Name: Zm_Hybrid_Seed_Dev_P Parameter: Tissue Value: Fert Kernel vs. Unfert Floret
ctttaaatgggacgcgcacctccgcctgggtctgtctgcgcagggacgcggacgcggcggcaccggcaagcaattgtctcatctgctccactccatctccatttaacgcactctccactccttcgcggcgggggtttaggcgcacggcggcaggccaattaacgccgctgcggcgagcgccgggggggaaatgggcggcgacggcacgagggcgctggaccagacgccgacgtgggccgtggccgccgtctgcgctgtcatcgtcgcggcgtccatactcctcgagggcttcctccaccacctcggtcagttgctcaacaagaagcggaagaaggcgctgtttgacgctctggagaaggttaaatcggagctgatgactctggggttcatatcgcctctgctgaccgtgacgggaaggtacatcgcgcgcatctgcatcccggagggagccgcaaacaccatgctgccctgccgcctgtccggtcactcggtggcggaagagcccaagggccatggccgacggcacctatctgaagatccaaccaaccttttttcctgccgcaaaggcatggtgtcgcttgtttcagccgacggcatgcatcagctgcacattttcgtgttcttcttggccgtcttccatgttaccttcagtttcttcacaatgtccttgggtagagcaaagactcgtatatggaaggtgtgggaaaaggaaacttgctcccctcagtataattatttaaatgacccctcaaagttcaggcttacgcaccaaacatcttttgtgaggcaacatgcaagttgttggagcaaaagcacaatcacgctctattttgtgagcttctttaggcagttcttcagatccgtccgtaagacagactactttactttgcgacatggattcatttcagctcatttatctccggggactaggttcaattttcgaaagtacattaaaaggtccttggaggatgatttcaagacagttgttggcattagtccaccactatgggcttctgctttggctgtcatgctgttcaatgttcatggatggcacaacttattctggttctctgcaattccccttgtagttattctagcagttggaacaaagctgcaggctataattgctatgatggctattgaaattgcagagaggcatacagttatccaaggcatgccggtggtaaaactaagtgatgatcatttctggttcgggaagcctcgtttggttctccacctcattcatttcgcatcatttcagaacgcatttgaaattacatatttcttttggatctggtacgaatttggcctgaggtcctgcttccatgacaactttgagtttatcattgcaagagtctgccttggggctatcgtccagtttatgtgcagctacatcacccttccactctatgcccttgtttctcagatgggttcagaaatgaagcgaacaattttcgacgagcagacagcgaaggccctgaagaaatggcacaaggccgtggtgaagaagaaacaccacaaggattcctcacacaattcttccgagactcctagcactgacacaacaggacctgcaggggaagcgggtgagtggcagcggctgcacgaggtgccggtccggcacctccaccggtacaagaccatcgcgcacgtcggcggcgtgaggagcccgttgtcggacccggactacagcgacacggacgacaccgagccgctgtcgttgcagactaggcacctgataccgccggcgaagcagcggagcctcgacaccgagcgcgcggaggtgcgcgtgaacgtcgtagagacagcggcggcgccaagcgacgtcctccaagacagcttctcgttcccaaggctgcttcctcctcgccatgtgccggacaagtaaagtggccagcagtctgcttagtactacagactgtcctatatagagatagtagaatagtagtttcaagttataagtcgatttggctagttatacaacttttgttatttatttagataaaggctatgtctatatagcaaaagttgtaaaactagaaaaatcaaaatgatttataatttg

SEQ ID NO: 14941 - protein, 565 aa, Zea mays subsp. mays
  peptide (1)..(565): Ceres Seq. ID no. 13636856
  misc_feature (4)..(488): Pfam Name: Mlo family Pfam Description: Mlo family
  misc_feature (4)..(488): Pfam Name: Mlo family Pfam Description: Mlo family
  misc_feature (1)..(565): Homolog of NCBI NO: 13784977 NR Description: seven transmembrane protein Mlo2 [Zea mays]
  misc_feature (1)..(561): Homolog of NCBI NO: 37536520 NR Description: putative Mlo (pathogen resistance) protein [Oryza
  misc_feature (108)..(455): Homolog of NCBI NO: 13784985 NR Description: seven transmembrane protein Mlo6 [Zea mays]
  misc_feature (1)..(110): Homolog of NCBI NO: 13784985 NR Description: seven transmembrane protein Mlo6 [Zea mays]
  misc_feature (1)..(443): Homolog of NCBI NO: 15217453 NR Description: seven transmembrane MLO protein family (MLO9)
  misc_feature (1)..(561): Homolog of NCBI NO: 37536520 NR Description: putative Mlo (pathogen resistance) protein [Oryza
  misc_feature (1)..(110): Homolog of NCBI NO: 13784985 NR Description: seven transmembrane protein Mlo6 [Zea mays]
  misc_feature (1)..(507): Homolog of NCBI NO: 33112635 NR Description: MLO-like protein 7 (AtMlo7)
  misc_feature (7)..(558): Homolog of NCBI NO: 18398444 NR Description: seven transmembrane MLO protein family (MLO8) thaliana] >gi|14091586|gb|AAK53801.1|AF369569_1 membrane protein [Arabidopsis thaliana] >gi|20198263|gb|AAD32905.2| similar to Mlo
  misc_feature (1)..(510): Homolog of NCBI NO: 15239213 NR Description: seven transmembrane MLO protein family (MLO10)
  misc_feature (1)..(440): Homolog of NCBI NO: 15226140 NR Description: seven transmembrane MLO protein family (MLO5)
  misc_feature (1)..(440): Homolog of NCBI NO: 14091580 NR Description: membrane protein Mlo5 [Arabidopsis thaliana]
  misc_feature (1)..(443): Homolog of NCBI NO: 15217453 NR Description: seven transmembrane MLO protein family (MLO9)
  misc_feature (108)..(455): Homolog of NCBI NO: 13784985 NR Description: seven transmembrane protein Mlo6 [Zea mays]
  misc_feature (1)..(565): Homolog of NCBI NO: 13784977 NR Description: seven transmembrane protein Mlo2 [Zea mays]
  misc_feature (1)..(440): Homolog of NCBI NO: 14091580 NR Description: membrane protein Mlo5 [Arabidopsis thaliana]
  misc_feature (1)..(440): Homolog of NCBI NO: 15226140 NR Description: seven transmembrane MLO protein family (MLO5)
  misc_feature (1)..(510): Homolog of NCBI NO: 15239213 NR Description: seven transmembrane MLO protein family (MLO10)
  misc_feature (7)..(558): Homolog of NCBI NO: 18398444 NR Description: seven transmembrane MLO protein family (MLO8) thaliana] >gi|14091586|gb|AAK53801.1|AF369569_1 membrane protein [Arabidopsis thaliana] >gi|20198263|gb|AAD32905.2| similar to Mlo
  misc_feature (1)..(507): Homolog of NCBI NO: 33112635 NR Description: MLO-like protein 7 (AtMlo7)
MGGDGTRALDQTPTWAVAAVCAVIVAASILLEGFLHHLGQLLNKKRKKALFDALEKVKSELMTLGFISPLLTVTGRYIARICIPEGAANTMLPCRLSGHSVAEEPKGHGRRHLSEDPTNLFSCRKGMVSLVSADGMHQLHIFVFFLAVFHVTFSFFTMSLGRAKTRIWKVWEKETCSPQYNYLNDPSKFRLTHQTSFVRQHASCWSKSTITLYFVSFFRQFFRSVRKTDYFTLRHGFISAHLSPGTRFNFRKYIKRSLEDDFKTVVGISPPLWASALAVMLFNVHGWHNLFWFSAIPLVVILAVGTKLQAIIAMMAIEIAERHTVIQGMPVVKLSDDHFWFGKPRLVLHLIHFASFQNAFEITYFFWIWYEFGLRSCFHDNFEFIIARVCLGAIVQFMCSYITLPLYALVSQMGSEMKRTIFDEQTAKALKKWHKAVVKKKHHKDSSHNSSETPSTDTTGPAGEAGEWQRLHEVPVRHLHRYKTIAHVGGVRSPLSDPDYSDTDDTEPLSLQTRHLIPPAKQRSLDTERAEVRVNVVETAAAPSDVLQDSFSFPRLLPPRHVPDK

SEQ ID NO: 14942 - protein, 504 aa, Zea mays subsp. mays
  peptide (1)..(504): Ceres Seq. ID no. 13636857
  misc_feature (1)..(427): Pfam Name: Mlo family Pfam Description: Mlo family
  misc_feature (1)..(427): Pfam Name: Mlo family Pfam Description: Mlo family
  misc_feature (1)..(504): Homolog of NCBI NO: 13784977 NR Description: seven transmembrane protein Mlo2 [Zea mays]
  misc_feature (1)..(500): Homolog of NCBI NO: 37536520 NR Description: putative Mlo (pathogen resistance) protein [Oryza
  misc_feature (47)..(394): Homolog of NCBI NO: 13784985 NR Description: seven transmembrane protein Mlo6 [Zea mays]
  misc_feature (1)..(49): Homolog of NCBI NO: 13784985 NR Description: seven transmembrane protein Mlo6 [Zea mays]
  misc_feature (1)..(382): Homolog of NCBI NO: 15217453 NR Description: seven transmembrane MLO protein family (MLO9)
  misc_feature (1)..(500): Homolog of NCBI NO: 37536520 NR Description: putative Mlo (pathogen resistance) protein [Oryza
  misc_feature (1)..(49): Homolog of NCBI NO: 13784985 NR Description: seven transmembrane protein Mlo6 [Zea mays]
  misc_feature (1)..(446): Homolog of NCBI NO: 33112635 NR Description: MLO-like protein 7 (AtMlo7)
  misc_feature (1)..(497): Homolog of NCBI NO: 18398444 NR Description: seven transmembrane MLO protein family (MLO8) thaliana] >gi|14091586|gb|AAK53801.1|AF369569_1 membrane protein [Arabidopsis thaliana] >gi|20198263|gb|AAD32905.2| similar to Mlo
  misc_feature (1)..(449): Homolog of NCBI NO: 15239213 NR Description: seven transmembrane MLO protein family (MLO10)
  misc_feature (1)..(379): Homolog of NCBI NO: 15226140 NR Description: seven transmembrane MLO protein family (MLO5)
  misc_feature (1)..(379): Homolog of NCBI NO: 14091580 NR Description: membrane protein Mlo5 [Arabidopsis thaliana]
  misc_feature (1)..(382): Homolog of NCBI NO: 15217453 NR Description: seven transmembrane MLO protein family (MLO9)
  misc_feature (47)..(394): Homolog of NCBI NO: 13784985 NR Description: seven transmembrane protein Mlo6 [Zea mays]
  misc_feature (1)..(504): Homolog of NCBI NO: 13784977 NR Description: seven transmembrane protein Mlo2 [Zea mays]
  misc_feature (1)..(379): Homolog of NCBI NO: 14091580 NR Description: membrane protein Mlo5 [Arabidopsis thaliana]
  misc_feature (1)..(379): Homolog of NCBI NO: 15226140 NR Description: seven transmembrane MLO protein family (MLO5)
  misc_feature (1)..(449): Homolog of NCBI NO: 15239213 NR Description: seven transmembrane MLO protein family (MLO10)
  misc_feature (1)..(497): Homolog of NCBI NO: 18398444 NR Description: seven transmembrane MLO protein family (MLO8) thaliana] >gi|14091586|gb|AAK53801.1|AF369569_1 membrane protein [Arabidopsis thaliana] >gi|20198263|gb|AAD32905.2| similar to Mlo
  misc_feature (1)..(446): Homolog of NCBI NO: 33112635 NR Description: MLO-like protein 7 (AtMlo7)
MTLGFISPLLTVTGRYIARICIPEGAANTMLPCRLSGHSVAEEPKGHGRRHLSEDPTNLFSCRKGMVSLVSADGMHQLHIFVFFLAVFHVTFSFFTMSLGRAKTRIWKVWEKETCSPQYNYLNDPSKFRLTHQTSFVRQHASCWSKSTITLYFVSFFRQFFRSVRKTDYFTLRHGFISAHLSPGTRFNFRKYIKRSLEDDFKTVVGISPPLWASALAVMLFNVHGWHNLFWFSAIPLVVILAVGTKLQAIIAMMAIEIAERHTVIQGMPVVKLSDDHFWFGKPRLVLHLIHFASFQNAFEITYFFWIWYEFGLRSCFHDNFEFIIARVCLGAIVQFMCSYITLPLYALVSQMGSEMKRTIFDEQTAKALKKWHKAVVKKKHHKDSSHNSSETPSTDTTGPAGEAGEWQRLHEVPVRHLHRYKTIAHVGGVRSPLSDPDYSDTDDTEPLSLQTRHLIPPAKQRSLDTERAEVRVNVVETAAAPSDVLQDSFSFPRLLPPRHVPDK

SEQ ID NO: 14943 - protein, 475 aa, Zea mays subsp. mays
  peptide (1)..(475): Ceres Seq. ID no. 13636858
  misc_feature (1)..(398): Pfam Name: Mlo family Pfam Description: Mlo family
  misc_feature (1)..(398): Pfam Name: Mlo family Pfam Description: Mlo family
  misc_feature (1)..(475): Homolog of NCBI NO: 13784977 NR Description: seven transmembrane protein Mlo2 [Zea mays]
  misc_feature (1)..(471): Homolog of NCBI NO: 37536520 NR Description: putative Mlo (pathogen resistance) protein [Oryza
  misc_feature (18)..(365): Homolog of NCBI NO: 13784985 NR Description: seven transmembrane protein Mlo6 [Zea mays]
  misc_feature (1)..(20): Homolog of NCBI NO: 13784985 NR Description: seven transmembrane protein Mlo6 [Zea mays]
  misc_feature (1)..(353): Homolog of NCBI NO: 15217453 NR Description: seven transmembrane MLO protein family (MLO9)
  misc_feature (1)..(471): Homolog of NCBI NO: 37536520 NR Description: putative Mlo (pathogen resistance) protein [Oryza
  misc_feature (1)..(20): Homolog of NCBI NO: 13784985 NR Description: seven transmembrane protein Mlo6 [Zea mays]
  misc_feature (1)..(417): Homolog of NCBI NO: 33112635 NR Description: MLO-like protein 7 (AtMlo7)
  misc_feature (1)..(468): Homolog of NCBI NO: 18398444 NR Description: seven transmembrane MLO protein family (MLO8) thaliana] >gi|14091586|gb|AAK53801.1|AF369569_1 membrane protein [Arabidopsis thaliana] >gi|20198263|gb|AAD32905.2| similar to Mlo
  misc_feature (1)..(420): Homolog of NCBI NO: 15239213 NR Description: seven transmembrane MLO protein family (MLO10)
  misc_feature (1)..(350): Homolog of NCBI NO: 15226140 NR Description: seven transmembrane MLO protein family (MLO5)
  misc_feature (1)..(350): Homolog of NCBI NO: 14091580 NR Description: membrane protein Mlo5 [Arabidopsis thaliana]
  misc_feature (1)..(353): Homolog of NCBI NO: 15217453 NR Description: seven transmembrane MLO protein family (MLO9)
  misc_feature (18)..(365): Homolog of NCBI NO: 13784985 NR Description: seven transmembrane protein Mlo6 [Zea mays]
  misc_feature (1)..(475): Homolog of NCBI NO: 13784977 NR Description: seven transmembrane protein Mlo2 [Zea mays]
  misc_feature (1)..(350): Homolog of NCBI NO: 14091580 NR Description: membrane protein Mlo5 [Arabidopsis thaliana]
  misc_feature (1)..(350): Homolog of NCBI NO: 15226140 NR Description: seven transmembrane MLO protein family (MLO5)
  misc_feature (1)..(420): Homolog of NCBI NO: 15239213 NR Description: seven transmembrane MLO protein family (MLO10)
  misc_feature (1)..(468): Homolog of NCBI NO: 18398444 NR Description: seven transmembrane MLO protein family (MLO8) thaliana] >gi|14091586|gb|AAK53801.1|AF369569_1 membrane protein [Arabidopsis thaliana] >gi|20198263|gb|AAD32905.2| similar to Mlo
  misc_feature (1)..(417): Homolog of NCBI NO: 33112635 NR Description: MLO-like protein 7 (AtMlo7)
MLPCRLSGHSVAEEPKGHGRRHLSEDPTNLFSCRKGMVSLVSADGMHQLHIFVFFLAVFHVTFSFFTMSLGRAKTRIWKVWEKETCSPQYNYLNDPSKFRLTHQTSFVRQHASCWSKSTITLYFVSFFRQFFRSVRKTDYFTLRHGFISAHLSPGTRFNFRKYIKRSLEDDFKTVVGISPPLWASALAVMLFNVHGWHNLFWFSAIPLVVILAVGTKLQAIIAMMAIEIAERHTVIQGMPVVKLSDDHFWFGKPRLVLHLIHFASFQNAFEITYFFWIWYEFGLRSCFHDNFEFIIARVCLGAIVQFMCSYITLPLYALVSQMGSEMKRTIFDEQTAKALKKWHKAVVKKKHHKDSSHNSSETPSTDTTGPAGEAGEWQRLHEVPVRHLHRYKTIAHVGGVRSPLSDPDYSDTDDTEPLSLQTRHLIPPAKQRSLDTERAEVRVNVVETAAAPSDVLQDSFSFPRLLPPRHVPDK

SEQ ID NO: 14944 - DNA, 702 bp, Zea mays subsp. mays
  misc_feature (1)..(702): Ceres Seq. ID no. 12469805
  misc_feature: MA Experiment ID: 20000535 Result: Up-regulated in Transcription
  misc_feature: MA Experiment 20000535 PARAMETER Experiment Name: Zm_Hybrid_Seed_Dev_P Parameter: DAP Value: 30 vs. 12
  misc_feature: MA Experiment 20000535 PARAMETER Experiment Name: Zm_Hybrid_Seed_Dev_P Parameter: Organism Value: Zea mays
  misc_feature: MA Experiment 20000535 PARAMETER Experiment Name: Zm_Hybrid_Seed_Dev_P Parameter: Plant Line Value: 35A19
  misc_feature: MA Experiment 20000535 PARAMETER Experiment Name: Zm_Hybrid_Seed_Dev_P Parameter: Tissue Value: Embryo vs. Unfert Floret
ctcctgctcgtcaccggtgaccacggcggcctcgccagcctacagccaccaccagacgacgttccaggcacctgcaccgccgccgtcatgcggcgcaatgacgatggcggccgctgcgccgcatgtgcagggcttccacgtcggcgacgacgacactaccaccgcgatggcgatgcaccgtcatcagcagatgatgcgcgagctggcggaggcgcctctgcaccaggaggcagacgacttcgaggacttcgtgacgcggctgcccaaggcggaggacttcggcctgcagggcttccaggaggtggcccccgaggtgttcgacgacgccgccggcatctgggaccacgcggccgcctgggagcccccccaccatgatgatcgactctggcgcccagccccagcagcagctcgtcgtccctctttgactcgctcgtcgatgacgccgcgcgccctgcaccagctactgcttcgttcccagctgcatcgaactggccggtgtacgtggcggagtgatacgacgcgcgcgccatgcatgacaccactgcacaggtggttcctgcatgtgttgcttacgcctcgagacgtacgtacataataccagtatgtatgtaccggatggttactntgatatgactgtatttctcctagttattcgtgagtttcatttggataatgtttcaggttttgtaaaatatatacttt

SEQ ID NO: 14945 - protein, 197 aa, Zea mays subsp. mays
  peptide (1)..(197): Ceres Seq. ID no. 12469806
  misc_feature (36)..(114): Homolog of NCBI NO: 28071316 NR Description: P0705A05.24 [Oryza sativa (japonica
SCSSPVTTAASPAYSHHQTTFQAPAPPPSCGAMTMAAAAPHVQGFHVGDDDTTTAMAMHRHQQMMRELAEAPLHQEADDFEDFVTRLPKAEDFGLQGFQEVAPEVFDDAAGIWDHAAAWEPPHHDDRLWRPAPAAARRPSLTRSSMTPRALHQLLLRSQLHRTGRCTWRSDTTRAPCMTPLHRWFLHVLLTPRDVRT

SEQ ID NO: 14946 - protein, 165 aa, Zea mays subsp. mays
  peptide (1)..(165): Ceres Seq. ID no. 12469807
  misc_feature (4)..(82): Homolog of NCBI NO: 28071316 NR Description: P0705A05.24 [Oryza sativa (japonica
MTMAAAAPHVQGFHVGDDDTTTAMAMHRHQQMMRELAEAPLHQEADDFEDFVTRLPKAEDFGLQGFQEVAPEVFDDAAGIWDHAAAWEPPHHDDRLWRPAPAAARRPSLTRSSMTPRALHQLLLRSQLHRTGRCTWRSDTTRAPCMTPLHRWFLHVLLTPRDVRT

SEQ ID NO: 14947 - protein, 163 aa, Zea mays subsp. mays
  peptide (1)..(163): Ceres Seq. ID no. 12469808
  misc_feature (2)..(80): Homolog of NCBI NO: 28071316 NR Description: P0705A05.24 [Oryza sativa (japonica
MAAAAPHVQGFHVGDDDTTTAMAMHRHQQMMRELAEAPLHQEADDFEDFVTRLPKAEDFGLQGFQEVAPEVFDDAAGIWDHAAAWEPPHHDDRLWRPAPAAARRPSLTRSSMTPRALHQLLLRSQLHRTGRCTWRSDTTRAPCMTPLHRWFLHVLLTPRDVRT

SEQ ID NO: 14948 - DNA, 989 bp, Zea mays subsp. mays
  misc_feature (1)..(989): Ceres Seq. ID no. 12469861
  misc_feature: MA Experiment ID: 108545 Result: Down-regulated in Transcription
  misc_feature: MA Experiment 108545 PARAMETER Experiment Name: Zm_Imbibed_Seeds_P Parameter: Age (day) Value: 3 vs. 2
  misc_feature: MA Experiment 108545 PARAMETER Experiment Name: Zm_Imbibed_Seeds_P Parameter: Organism Value: Zea mays
  misc_feature: MA Experiment 108545 PARAMETER Experiment Name: Zm_Imbibed_Seeds_P Parameter: Plant Line Value: 35A19
  misc_feature: MA Experiment 108545 PARAMETER Experiment Name: Zm_Imbibed_Seeds_P Parameter: Tissue Value: Aerial vs. Embryo
  misc_feature: MA Experiment ID: 20000535 Result: Up-regulated in Transcription
  misc_feature: MA Experiment 20000535 PARAMETER Experiment Name: Zm_Hybrid_Seed_Dev_P Parameter: DAP Value: 30 vs. 12
  misc_feature: MA Experiment 20000535 PARAMETER Experiment Name: Zm_Hybrid_Seed_Dev_P Parameter: Organism Value: Zea mays
  misc_feature: MA Experiment 20000535 PARAMETER Experiment Name: Zm_Hybrid_Seed_Dev_P Parameter: Plant Line Value: 35A19
  misc_feature: MA Experiment 20000535 PARAMETER Experiment Name: Zm_Hybrid_Seed_Dev_P Parameter: Tissue Value: Embryo vs. Unfert Floret
cagagctcctggactaggcttagtctgcagtgatattgtgaaaggagttcctgcaatttttggtcattttctgacctcactccctgcgatacactcgataattgtatttgtgtgtatcaggaatgtgccagttccggtggttcctcaaagtgaaaggttccttttccaacgtgtatgctcaaggggctatcacttgttccgctgtatagcgagatacgggtataaagacaagaagcaggagcaccatagcgtatttgagcgtcttctgattgaaggccttgagaaattcatacaaagagaggcagtagagctatccctacaaagcgaagacgacattgactcggacgaagagcctccaacccctgtgaagatcatcacagcaccaaatggcagcctgtactcgctcgacgtccctctcctggcagactatgtgccttcaacagagctcattcatgaagccagctgctccacgcctcaacacgatcctgtactggattatgcacagaaccttgaactggagctggcgttcatcgagcagtccaagcggtctggggtcatctacctcatcgataatcccatcatcaaggccaggaaggactcatggttcttcaagaagctgatgataaactatttcttcgcgttcctgaggaacaactgccgccgggcgatcatgttgatgagcatcccgcattcaaacatgatgcaggtgcgcatgacttcttatgtctgattgctggaactgcactggttctgttcatggatgtctgatacaaaccacactgacagtaaaagaatgaacgtggcaaatgcaaagaggatatcggcacttttgtttttgttcataatttgatgatggcttaggttgttgtcggaatctatctcccctgtagttgtacaatgccaaaatatagttggaagttttagctggtacaccattagggtgctgtattaaccttttttactcttgtgcagtaaagattctttttgtc

SEQ ID NO: 14949 - protein, 242 aa, Zea mays subsp. mays
  peptide (1)..(242): Ceres Seq. ID no. 12469862
  misc_feature (1)..(242): Pfam Name: K+ potassium transporter Pfam Description: K+ potassium transporter
  misc_feature (1)..(242): Homolog of NCBI NO: 18250714 NR Description: putative potasium transporter [Oryza sativa
  misc_feature (1)..(242): Homolog of NCBI NO: 38345796 NR Description: OSJNBa0085I10.13 [Oryza sativa (japonica
  misc_feature (1)..(242): Homolog of NCBI NO: 9955527 NR Description: potassium transport protein-like [Arabidopsis
  misc_feature (1)..(242): Homolog of NCBI NO: 22326688 NR Description: potassium transport protein-like; protein id:
  misc_feature (1)..(242): Homolog of NCBI NO: 7488157 NR Description: probable potassium transport protein KT5 - thaliana >gi|3859659|emb|CAA20566.1| putative potassium
  misc_feature (1)..(242): Homolog of NCBI NO: 22329125 NR Description: putative potassium transporter AtKT5p (AtKT5); id: At4g33530.1, supported by cDNA: gi_20466180 [Arabidopsis >gi|20466181|gb|AAM20408.1| putative potassium transporter AtKT5p
  misc_feature (1)..(242): Homolog of NCBI NO: 25345483 NR Description: probable potassium transporter AtKT5p (AtKT5) - Arabidopsis thaliana >gi|7270301|emb|CAB80070.1| putative
  misc_feature (1)..(242): Homolog of NCBI NO: 18138061 NR Description: putative potassium transporter [Vicia faba]
  misc_feature (1)..(242): Homolog of NCBI NO: 15219006 NR Description: potassium transporter, putative; protein id: [Arabidopsis thaliana] >gi|7488029|pir||T02268 potassium
  misc_feature (1)..(242): Homolog of NCBI NO: 38502862 NR Description: Putative potassium transporter 12 (AtPOT12)
RAPGLGLVCSDIVKGVPAIFGHFLTSLPAIHSIIVFVCIRNVPVPVVPQSERFLFQRVCSRGYHLFRCIARYGYKDKKQEHHSVFERLLIEGLEKFIQREAVELSLQSEDDIDSDEEPPTPVKIITAPNGSLYSLDVPLLADYVPSTELIHEASCSTPQHDPVLDYAQNLELELAFIEQSKRSGVIYLIDNPIIKARKDSWFFKKLMINYFFAFLRNNCRRAIMLMSIPHSNMMQVRMTSYV

SEQ ID NO: 14950 - DNA, 1159 bp, Zea mays subsp. mays
  misc_feature (1)..(1159): Ceres Seq. ID no. 13600661
  misc_feature: MA Experiment ID: 108559 Result: Up-regulated in Transcription
  misc_feature: MA Experiment 108559 PARAMETER Experiment Name: Zm_5mM_NO_P Parameter: Age (day) Value: 8
  misc_feature: MA Experiment 108559 PARAMETER Experiment Name: Zm_5mM_NO_P Parameter: Organism Value: Zea mays
  misc_feature: MA Experiment 108559 PARAMETER Experiment Name: Zm_5mM_NO_P Parameter: Plant Line Value: 35A19
  misc_feature: MA Experiment 108559 PARAMETER Experiment Name: Zm_5mM_NO_P Parameter: Timepoint (hr) Value: 12
  misc_feature: MA Experiment 108559 PARAMETER Experiment Name: Zm_5mM_NO_P Parameter: Tissue Value: Aerial
  misc_feature: MA Experiment 108559 PARAMETER Experiment Name: Zm_5mM_NO_P Parameter: Treatment Value: 5mM NO vs. No Treatment
tcttcttgagaaacactccgctctctctttcctcctgcgattctccatctctttccctgctccgtctcgtcgttgtcttcccctttttttcctcagccacctctctccctcgctagagcaaaaaccttgccacgaatcgccgacactccaacccggaagaggcaacgaggtgactccgcgcctcggtcatgggtgacagccaatactccttctcgcttaccactttcagcccgtcgggaaagcttgtgcagatagagcacgcgctcacggctgtcggatccgggcagacctccctagggatcaaagctgccaacggtgtagtgattgccactgagaagaaactgccttctattttggtggatgaaacatctgtgcaaaagattcaggcactaacaccaaatattggagttgtctatagtgggatgggtccagattttcgtgttctggtgagaaaaagtcgaaagcaggcacagcagtattatcggttgtacaaggagcatatacctgtaacacagcttgtgcgagagactgctgctgtgatgcaggagttcacacagtcaggtggtgtaagaccatttggagtatcgctgttgattgctgggtatgatgacaatggcccacagttgtatcaggttgatccctcaggatcatacttctcctggaaggcatcagccatgggaaaaaatgtgtcaaatgcaaagacatttcttgaaaagagatacacagaggatatggagcttgatgatgccatccacactgcaattttgactttgaaagaaggatatgaggggcaaatttcctccaacaacattgaaatcggaattattcgagctgaccgtgagttcaaagttctaagcccatcagagatcaaggatttcttggaagaggtggagtaagttgtctgttgatgatttactgtttcaaacaagaatagcagcatcacttatgagcagccagcctgaagcttgtcttggttttatcactctgtaaactgatttgctccagcgacatgtcttggttttatcactctgtaaactgatttgctccagcgacatgtggttcttacatttgaaaccctcctgagcgcatactgtagacaaatgagatacgtaagatggatgttgtatttgacagtctctgcagtttgtttatgtgatcc

SEQ ID NO: 14951 - protein, 235 aa, Zea mays subsp. mays
  peptide (1)..(235): Ceres Seq. ID no. 13600662
  misc_feature (1)..(234): Homolog of NCBI NO: 6093780 NR Description: Proteasome subunit alpha type 2
  misc_feature (1)..(234): Homolog of NCBI NO: 19168518 NR Description: PROSAg25 protein [Anopheles gambiae]
  misc_feature (1)..(234): Homolog of NCBI NO: 4506181 NR Description: proteasome alpha 2 subunit; proteasome subunit proteasome component C3; macropain subunit C3; multicatalytic complex subunit C3 [Homo sapiens] >gi|130850|sp|P25787|PSA2_HUMAN
  misc_feature (1)..(235): Homolog of NCBI NO: 12229921 NR Description: Proteasome subunit alpha type 2 (20S proteasome
  misc_feature (1)..(235): Homolog of NCBI NO: 15219257 NR Description: 20S proteasome alpha subunit B (PAB1) thaliana] >gi|6093778|sp|O23708|PSA2_ARATH Proteasome subunit type 2 (20S proteasome alpha subunit B) >gi|25290062|pir||T51968
  misc_feature (1)..(228): Homolog of NCBI NO: 7435868 NR Description: proteasome chain - rice
  misc_feature (1)..(235): Homolog of NCBI NO: 15219317 NR Description: 20S proteasome alpha subunit B, putative thaliana] >gi|20453128|gb|AAM19806.1| At1g79210/YUP8H12R_1 thaliana] >gi|21689609|gb|AAM67426.1| At1g79210/YUP8H12R_1
  misc_feature (1)..(198): Homolog of NCBI NO: 7435867 NR Description: hypothetical protein YUP8H12R.19 - Arabidopsis
  misc_feature (1)..(234): Homolog of NCBI NO: 31241267 NR Description: ENSANGP00000011336 [Anopheles gambiae]
  misc_feature (1)..(234): Homolog of NCBI NO: 130852 NR Description: Proteasome subunit alpha type 2 (Proteasome C3) (Macropain subunit C3) (Multicatalytic endopeptidase complex
MGDSQYSFSLTTFSPSGKLVQIEHALTAVGSGQTSLGIKAANGVVIATEKKLPSILVDETSVQKIQALTPNIGVVYSGMGPDFRVLVRKSRKQAQQYYRLYKEHIPVTQLVRETAAVMQEFTQSGGVRPFGVSLLIAGYDDNGPQLYQVDPSGSYFSWKASAMGKNVSNAKTFLEKRYTEDMELDDAIHTAILTLKEGYEGQISSNNIEIGIIRADREFKVLSPSEIKDFLEEVE

SEQ ID NO: 14952 - protein, 157 aa, Zea mays subsp. mays
  peptide (1)..(157): Ceres Seq. ID no. 13600663
  misc_feature (1)..(157): Homolog of NCBI NO: 12229921 NR Description: Proteasome subunit alpha type 2 (20S proteasome
  misc_feature (1)..(157): Homolog of NCBI NO: 15219257 NR Description: 20S proteasome alpha subunit B (PAB1) thaliana] >gi|6093778|sp|O23708|PSA2_ARATH Proteasome subunit type 2 (20S proteasome alpha subunit B) >gi|25290062|pir||T51968
  misc_feature (1)..(150): Homolog of NCBI NO: 7435868 NR Description: proteasome chain - rice
  misc_feature (1)..(157): Homolog of NCBI NO: 15219317 NR Description: 20S proteasome alpha subunit B, putative thaliana] >gi|20453128|gb|AAM19806.1| At1g79210/YUP8H12R_1 thaliana] >gi|21689609|gb|AAM67426.1| At1g79210/YUP8H12R_1
  misc_feature (1)..(120): Homolog of NCBI NO: 7435867 NR Description: hypothetical protein YUP8H12R.19 - Arabidopsis
  misc_feature (1)..(156): Homolog of NCBI NO: 31241267 NR Description: ENSANGP00000011336 [Anopheles gambiae]
  misc_feature (1)..(156): Homolog of NCBI NO: 130852 NR Description: Proteasome subunit alpha type 2 (Proteasome C3) (Macropain subunit C3) (Multicatalytic endopeptidase complex
  misc_feature (1)..(156): Homolog of NCBI NO: 6093780 NR Description: Proteasome subunit alpha type 2
  misc_feature (1)..(156): Homolog of NCBI NO: 19168518 NR Description: PROSAg25 protein [Anopheles gambiae]
  misc_feature (1)..(156): Homolog of NCBI NO: 4506181 NR Description: proteasome alpha 2 subunit; proteasome subunit proteasome component C3; macropain subunit C3; multicatalytic complex subunit C3 [Homo sapiens] >gi|130850|sp|P25787|PSA2_HUMAN
MGPDFRVLVRKSRKQAQQYYRLYKEHIPVTQLVRETAAVMQEFTQSGGVRPFGVSLLIAGYDDNGPQLYQVDPSGSYFSWKASAMGKNVSNAKTFLEKRYTEDMELDDAIHTAILTLKEGYEGQISSNNIEIGIIRADREFKVLSPSEIKDFLEEVE

SEQ ID NO: 14953 - protein, 118 aa, Zea mays subsp. mays
  peptide (1)..(118): Ceres Seq. ID no. 13600664
  misc_feature (1)..(118): Homolog of NCBI NO: 12229921 NR Description: Proteasome subunit alpha type 2 (20S proteasome
  misc_feature (1)..(118): Homolog of NCBI NO: 15219257 NR Description: 20S proteasome alpha subunit B (PAB1) thaliana] >gi|6093778|sp|O23708|PSA2_ARATH Proteasome subunit type 2 (20S proteasome alpha subunit B) >gi|25290062|pir||T51968
  misc_feature (1)..(111): Homolog of NCBI NO: 7435868 NR Description: proteasome chain - rice
  misc_feature (1)..(118): Homolog of NCBI NO: 15219317 NR Description: 20S proteasome alpha subunit B, putative thaliana] >gi|20453128|gb|AAM19806.1| At1g79210/YUP8H12R_1 thaliana] >gi|21689609|gb|AAM67426.1| At1g79210/YUP8H12R_1
  misc_feature (1)..(81): Homolog of NCBI NO: 7435867 NR Description: hypothetical protein YUP8H12R.19 - Arabidopsis
  misc_feature (1)..(117): Homolog of NCBI NO: 31241267 NR Description: ENSANGP00000011336 [Anopheles gambiae]
  misc_feature (1)..(117): Homolog of NCBI NO: 130852 NR Description: Proteasome subunit alpha type 2 (Proteasome C3) (Macropain subunit C3) (Multicatalytic endopeptidase complex
  misc_feature (1)..(117): Homolog of NCBI NO: 6093780 NR Description: Proteasome subunit alpha type 2
  misc_feature (1)..(117): Homolog of NCBI NO: 19168518 NR Description: PROSAg25 protein [Anopheles gambiae]
  misc_feature (1)..(117): Homolog of NCBI NO: 4506181 NR Description: proteasome alpha 2 subunit; proteasome subunit proteasome component C3; macropain subunit C3; multicatalytic complex subunit C3 [Homo sapiens] >gi|130850|sp|P25787|PSA2_HUMAN
MQEFTQSGGVRPFGVSLLIAGYDDNGPQLYQVDPSGSYFSWKASAMGKNVSNAKTFLEKRYTEDMELDDAIHTAILTLKEGYEGQISSNNIEIGIIRADREFKVLSPSEIKDFLEEVE

SEQ ID NO: 14954 - DNA, 916 bp, Zea mays subsp. mays; identical to SEQ ID NO: 5212
  misc_feature (1)..(916): Ceres Seq. ID no. 13625767
  misc_feature: MA Experiment ID: 108527 Result: Down-regulated in Transcription
  misc_feature: MA Experiment 108527 PARAMETER Experiment Name: Zm_5mM_NO_P Parameter: Age (day) Value: 8
  misc_feature: MA Experiment 108527 PARAMETER Experiment Name: Zm_5mM_NO_P Parameter: Organism Value: Zea mays
  misc_feature: MA Experiment 108527 PARAMETER Experiment Name: Zm_5mM_NO_P Parameter: Plant Line Value: 35A19
  misc_feature: MA Experiment 108527 PARAMETER Experiment Name: Zm_5mM_NO_P Parameter: Timepoint (hr) Value: 6
  misc_feature: MA Experiment 108527 PARAMETER Experiment Name: Zm_5mM_NO_P Parameter: Tissue Value: Aerial
  misc_feature: MA Experiment 108527 PARAMETER Experiment Name: Zm_5mM_NO_P Parameter: Treatment Value: 5mM NO vs. No Treatment
  misc_feature: MA Experiment ID: 108528 Result: Up-regulated in Transcription
  misc_feature: MA Experiment 108528 PARAMETER Experiment Name: Zm_Imbibed_Seeds_P Parameter: Age (day) Value: 5 vs. 2
  misc_feature: MA Experiment 108528 PARAMETER Experiment Name: Zm_Imbibed_Seeds_P Parameter: Organism Value: Zea mays
  misc_feature: MA Experiment 108528 PARAMETER Experiment Name: Zm_Imbibed_Seeds_P Parameter: Plant Line Value: 35A19
  misc_feature: MA Experiment 108528 PARAMETER Experiment Name: Zm_Imbibed_Seeds_P Parameter: Tissue Value: Aerial vs. Embryo
  misc_feature: MA Experiment ID: 108530 Result: Up-regulated in Transcription
  misc_feature: MA Experiment 108530 PARAMETER Experiment Name: Zm_Imbibed_Seeds_P Parameter: Age (day) Value: 6 vs. 2
  misc_feature: MA Experiment 108530 PARAMETER Experiment Name: Zm_Imbibed_Seeds_P Parameter: Organism Value: Zea mays
  misc_feature: MA Experiment 108530 PARAMETER Experiment Name: Zm_Imbibed_Seeds_P Parameter: Plant Line Value: 35A19
  misc_feature: MA Experiment 108530 PARAMETER Experiment Name: Zm_Imbibed_Seeds_P Parameter: Tissue Value: Aerial vs. Embryo
  misc_feature: MA Experiment ID: 108536 Result: Down-regulated in Transcription
  misc_feature: MA Experiment 108536 PARAMETER Experiment Name: Zm_Meristem_P Parameter: Age (day) Value: 8
  misc_feature: MA Experiment 108536 PARAMETER Experiment Name: Zm_Meristem_P Parameter: Organism Value: Zea mays
  misc_feature: MA Experiment 108536 PARAMETER Experiment Name: Zm_Meristem_P Parameter: Plant Line Value: 35A19
  misc_feature: MA Experiment 108536 PARAMETER Experiment Name: Zm_Meristem_P Parameter: Tissue Value: Shoot Meristem vs. Above Shoot Meristem
  misc_feature: MA Experiment ID: 108545 Result: Up-regulated in Transcription
  misc_feature: MA Experiment 108545 PARAMETER Experiment Name: Zm_Imbibed_Seeds_P Parameter: Age (day) Value: 3 vs. 2
  misc_feature: MA Experiment 108545 PARAMETER Experiment Name: Zm_Imbibed_Seeds_P Parameter: Organism Value: Zea mays
  misc_feature: MA Experiment 108545 PARAMETER Experiment Name: Zm_Imbibed_Seeds_P Parameter: Plant Line Value: 35A19
  misc_feature: MA Experiment 108545 PARAMETER Experiment Name: Zm_Imbibed_Seeds_P Parameter: Tissue Value: Aerial vs. Embryo
  misc_feature: MA Experiment ID: 108546 Result: Down-regulated in Transcription
  misc_feature: MA Experiment 108546 PARAMETER Experiment Name: Zm_Imbibed_Seeds_P Parameter: Age (day) Value: 3 vs. 2
  misc_feature: MA Experiment 108546 PARAMETER Experiment Name: Zm_Imbibed_Seeds_P Parameter: Organism Value: Zea mays
  misc_feature: MA Experiment 108546 PARAMETER Experiment Name: Zm_Imbibed_Seeds_P Parameter: Plant Line Value: 35A19
  misc_feature: MA Experiment 108546 PARAMETER Experiment Name: Zm_Imbibed_Seeds_P Parameter: Tissue Value: Roots vs. Embryo
  misc_feature: MA Experiment ID: 108547 Result: Up-regulated in Transcription
  misc_feature: MA Experiment 108547 PARAMETER Experiment Name: Zm_Imbibed_Seeds_P Parameter: Age (day) Value: 4 vs. 2
  misc_feature: MA Experiment 108547 PARAMETER Experiment Name: Zm_Imbibed_Seeds_P Parameter: Organism Value: Zea mays
  misc_feature: MA Experiment 108547 PARAMETER Experiment Name: Zm_Imbibed_Seeds_P Parameter: Plant Line Value: 35A19
  misc_feature: MA Experiment 108547 PARAMETER Experiment Name: Zm_Imbibed_Seeds_P Parameter: Tissue Value: Aerial vs. Embryo
  misc_feature: MA Experiment ID: 108687 Result: Down-regulated in Transcription
  misc_feature: MA Experiment 108687 PARAMETER Experiment Name: Zm_Embryos-Flowers__P Parameter: Tissue Value: Embryo vs. Aerial+
  misc_feature: MA Experiment ID: 20000479 Result: Down-regulated in Transcription
  misc_feature: MA Experiment 20000479 PARAMETER Experiment Name: Zm_Drought_P Parameter: Age (day) Value: 10
  misc_feature: MA Experiment 20000479 PARAMETER Experiment Name: Zm_Drought_P Parameter: Organism Value: Zea mays
  misc_feature: MA Experiment 20000479 PARAMETER Experiment Name: Zm_Drought_P Parameter: Plant Line Value: 35A19
  misc_feature: MA Experiment 20000479 PARAMETER Experiment Name: Zm_Drought_P Parameter: Timepoint (hr) Value: 48
  misc_feature: MA Experiment 20000479 PARAMETER Experiment Name: Zm_Drought_P Parameter: Tissue Value: Aerial
  misc_feature: MA Experiment 20000479 PARAMETER Experiment Name: Zm_Drought_P Parameter: Treatment Value: Drought vs. No Drought
  misc_feature: MA Experiment ID: 20000480 Result: Down-regulated in Transcription
  misc_feature: MA Experiment 20000480 PARAMETER Experiment Name: Zm_Drought_P Parameter: Age (day) Value: 11
  misc_feature: MA Experiment 20000480 PARAMETER Experiment Name: Zm_Drought_P Parameter: Organism Value: Zea mays
  misc_feature: MA Experiment 20000480 PARAMETER Experiment Name: Zm_Drought_P Parameter: Plant Line Value: 35A19
  misc_feature: MA Experiment 20000480 PARAMETER Experiment Name: Zm_Drought_P Parameter: Timepoint (hr) Value: 72
  misc_feature: MA Experiment 20000480 PARAMETER Experiment Name: Zm_Drought_P Parameter: Tissue Value: Aerial
  misc_feature: MA Experiment 20000480 PARAMETER Experiment Name: Zm_Drought_P Parameter: Treatment Value: Drought vs. No Drought
  misc_feature: MA Experiment ID: 20000534 Result: Down-regulated in Transcription
  misc_feature: MA Experiment 20000534 PARAMETER Experiment Name: Zm_Hybrid_Pollen_P Parameter: Age (day) Value: 8
  misc_feature: MA Experiment 20000534 PARAMETER Experiment Name: Zm_Hybrid_Pollen_P Parameter: Organism Value: Zea mays
  misc_feature: MA Experiment 20000534 PARAMETER Experiment Name: Zm_Hybrid_Pollen_P Parameter: Plant Line Value: 35A19
  misc_feature: MA Experiment 20000534 PARAMETER Experiment Name: Zm_Hybrid_Pollen_P Parameter: Tissue Value: Pollen vs. Aerial
  misc_feature: MA Experiment ID: 20000626 Result: Down-regulated in Transcription
  misc_feature: MA Experiment 20000626 PARAMETER Experiment Name: Zm_Herbicide-Treatments_P Parameter: Timepoint (hr) Value: 12
  misc_feature: MA Experiment 20000626 PARAMETER Experiment Name: Zm_Herbicide-Treatments_P Parameter: Tissue Value: Aerial
  misc_feature: MA Experiment 20000626 PARAMETER Experiment Name: Zm_Herbicide-Treatments_P Parameter: Treatment Value: Roundup vs. No Treatment

SEQ ID NO: 14955 - protein, 269 aa, Zea mays subsp. mays; identical to SEQ ID NO: 5213
  peptide (1)..(269): Ceres Seq. ID no. 13625768
  misc_feature (201)..(269): Pfam Name: Ribosomal protein L7/L12 C-terminal domain Pfam Description: Ribosomal protein L7/L12 C-terminal domain
  misc_feature (201)..(269): Pfam Name: Ribosomal protein L7/L12 C-terminal domain Pfam Description: Ribosomal protein L7/L12 C-terminal domain
  misc_feature (201)..(269): Pfam Name: Ribosomal protein L7/L12 C-terminal domain Pfam Description: Ribosomal protein L7/L12 C-terminal domain
  misc_feature (87)..(269): Homolog of NCBI NO: 34912074 NR Description: putative ribosomal protein L12 [Oryza sativa
  misc_feature (87)..(269): Homolog of NCBI NO: 464517 NR Description: 50S RIBOSOMAL PROTEIN L12-1, CHLOROPLAST
  misc_feature (87)..(269): Homolog of NCBI NO: 464518 NR Description: 50S RIBOSOMAL PROTEIN L12-2, CHLOROPLAST (CL12-2) >gi|288584|emb|CAA48414.1| ribosomal protein L12 [Secale
  misc_feature (73)..(260): Homolog of NCBI NO: 1345575 NR Description: ribosomal protein L12 [Secale cereale]
  misc_feature (85)..(269): Homolog of NCBI NO: 4176422 NR Description: ribosomal protein L12 [Oryza sativa (japonica
  misc_feature (87)..(269): Homolog of NCBI NO: 464517 NR Description: 50S RIBOSOMAL PROTEIN L12-1, CHLOROPLAST
  misc_feature (73)..(260): Homolog of NCBI NO: 1345575 NR Description: ribosomal protein L12 [Secale cereale]
  misc_feature (87)..(269): Homolog of NCBI NO: 464518 NR Description: 50S RIBOSOMAL PROTEIN L12-2, CHLOROPLAST (CL12-2) >gi|288584|emb|CAA48414.1| ribosomal protein L12 [Secale
  misc_feature (87)..(269): Homolog of NCBI NO: 464517 NR Description: 50S RIBOSOMAL PROTEIN L12-1, CHLOROPLAST
  misc_feature (87)..(269): Homolog of NCBI NO: 34912074 NR Description: putative ribosomal protein L12 [Oryza sativa
  misc_feature (87)..(268): Homolog of NCBI NO: 133085 NR Description: 50S RIBOSOMAL PROTEIN L12, CHLOROPLAST PRECURSOR
  misc_feature (87)..(269): Homolog of NCBI NO: 133088 NR Description: 50S RIBOSOMAL PROTEIN L12, CHLOROPLAST PRECURSOR
  misc_feature (87)..(269): Homolog of NCBI NO: 20020 NR Description: ribosomal protein L12-1a [Nicotiana tabacum]
  misc_feature (87)..(269): Homolog of NCBI NO: 548746 NR Description: 50S RIBOSOMAL PROTEIN L12, CHLOROPLAST PRECURSOR
  misc_feature (87)..(269): Homolog of NCBI NO: 418872 NR Description: ribosomal protein L12.1 precursor, chloroplast -
  misc_feature (85)..(269): Homolog of NCBI NO: 4176422 NR Description: ribosomal protein L12 [Oryza sativa (japonica
  misc_feature (87)..(268): Homolog of NCBI NO: 133085 NR Description: 50S RIBOSOMAL PROTEIN L12, CHLOROPLAST PRECURSOR
  misc_feature (87)..(269): Homolog of NCBI NO: 133088 NR Description: 50S RIBOSOMAL PROTEIN L12, CHLOROPLAST PRECURSOR
  misc_feature (87)..(269): Homolog of NCBI NO: 20020 NR Description: ribosomal protein L12-1a [Nicotiana tabacum]
  misc_feature (87)..(269): Homolog of NCBI NO: 548746 NR Description: 50S RIBOSOMAL PROTEIN L12, CHLOROPLAST PRECURSOR
  misc_feature (87)..(269): Homolog of NCBI NO: 418872 NR Description: ribosomal protein L12.1 precursor, chloroplast -
  misc_feature (85)..(269): Homolog of NCBI NO: 4176422 NR Description: ribosomal protein L12 [Oryza sativa (japonica
  misc_feature (73)..(260): Homolog of NCBI NO: 1345575 NR Description: ribosomal protein L12 [Secale cereale]
  misc_feature (87)..(269): Homolog of NCBI NO: 464518 NR Description: 50S RIBOSOMAL PROTEIN L12-2, CHLOROPLAST (CL12-2) >gi|288584|emb|CAA48414.1| ribosomal protein L12 [Secale
  misc_feature (87)..(269): Homolog of NCBI NO: 34912074 NR Description: putative ribosomal protein L12 [Oryza sativa
  misc_feature (87)..(269): Homolog of NCBI NO: 418872 NR Description: ribosomal protein L12.1 precursor, chloroplast -
  misc_feature (87)..(269): Homolog of NCBI NO: 548746 NR Description: 50S RIBOSOMAL PROTEIN L12, CHLOROPLAST PRECURSOR
  misc_feature (87)..(269): Homolog of NCBI NO: 20020 NR Description: ribosomal protein L12-1a [Nicotiana tabacum]
  misc_feature (87)..(269): Homolog of NCBI NO: 133088 NR Description: 50S RIBOSOMAL PROTEIN L12, CHLOROPLAST PRECURSOR
  misc_feature (87)..(268): Homolog of NCBI NO: 133085 NR Description: 50S RIBOSOMAL PROTEIN L12, CHLOROPLAST PRECURSOR
  misc_feature (42)..(42): Xaa is any aa, unknown or other

SEQ ID NO: 14956 - protein, 183 aa, Zea mays subsp. mays; identical to SEQ ID NO: 5214
  peptide (1)..(183): Ceres Seq. ID no. 13625769
  misc_feature (115)..(183): Pfam Name: Ribosomal protein L7/L12 C-terminal domain Pfam Description: Ribosomal protein L7/L12 C-terminal domain
  misc_feature (115)..(183): Pfam Name: Ribosomal protein L7/L12 C-terminal domain Pfam Description: Ribosomal protein L7/L12 C-terminal domain
  misc_feature (115)..(183): Pfam Name: Ribosomal protein L7/L12 C-terminal domain Pfam Description: Ribosomal protein L7/L12 C-terminal domain
  misc_feature (1)..(183): Homolog of NCBI NO: 34912074 NR Description: putative ribosomal protein L12 [Oryza sativa
  misc_feature (1)..(183): Homolog of NCBI NO: 464517 NR Description: 50S RIBOSOMAL PROTEIN L12-1, CHLOROPLAST
  misc_feature (1)..(183): Homolog of NCBI NO: 464518 NR Description: 50S RIBOSOMAL PROTEIN L12-2, CHLOROPLAST (CL12-2) >gi|288584|emb|CAA48414.1| ribosomal protein L12 [Secale
  misc_feature (1)..(174): Homolog of NCBI NO: 1345575 NR Description: ribosomal protein L12 [Secale cereale]
  misc_feature (1)..(183): Homolog of NCBI NO: 4176422 NR Description: ribosomal protein L12 [Oryza sativa (japonica
  misc_feature (1)..(183): Homolog of NCBI NO: 464517 NR Description: 50S RIBOSOMAL PROTEIN L12-1, CHLOROPLAST
  misc_feature (1)..(174): Homolog of NCBI NO: 1345575 NR Description: ribosomal protein L12 [Secale cereale]
  misc_feature (1)..(183): Homolog of NCBI NO: 464518 NR Description: 50S RIBOSOMAL PROTEIN L12-2, CHLOROPLAST (CL12-2) >gi|288584|emb|CAA48414.1| ribosomal protein L12 [Secale
  misc_feature (1)..(183): Homolog of NCBI NO: 464517 NR Description: 50S RIBOSOMAL PROTEIN L12-1, CHLOROPLAST
  misc_feature (1)..(183): Homolog of NCBI NO: 34912074 NR Description: putative ribosomal protein L12 [Oryza sativa
  misc_feature (1)..(182): Homolog of NCBI NO: 133085 NR Description: 50S RIBOSOMAL PROTEIN L12, CHLOROPLAST PRECURSOR
  misc_feature (1)..(183): Homolog of NCBI NO: 133088 NR Description: 50S RIBOSOMAL PROTEIN L12, CHLOROPLAST PRECURSOR
  misc_feature (1)..(183): Homolog of NCBI NO: 20020 NR Description: ribosomal protein L12-1a [Nicotiana tabacum]
  misc_feature (1)..(183): Homolog of NCBI NO: 548746 NR Description: 50S RIBOSOMAL PROTEIN L12, CHLOROPLAST PRECURSOR
  misc_feature (1)..(183): Homolog of NCBI NO: 418872 NR Description: ribosomal protein L12.1 precursor, chloroplast -
  misc_feature (1)..(183): Homolog of NCBI NO: 4176422 NR Description: ribosomal protein L12 [Oryza sativa (japonica
  misc_feature (1)..(182): Homolog of NCBI NO: 133085 NR Description: 50S RIBOSOMAL PROTEIN L12, CHLOROPLAST PRECURSOR
  misc_feature (1)..(183): Homolog of NCBI NO: 133088 NR Description: 50S RIBOSOMAL PROTEIN L12, CHLOROPLAST PRECURSOR
  misc_feature (1)..(183): Homolog of NCBI NO: 20020 NR Description: ribosomal protein L12-1a [Nicotiana tabacum]
  misc_feature (1)..(183): Homolog of NCBI NO: 548746 NR Description: 50S RIBOSOMAL PROTEIN L12, CHLOROPLAST PRECURSOR
  misc_feature (1)..(183): Homolog of NCBI NO: 418872 NR Description: ribosomal protein L12.1 precursor, chloroplast -
  misc_feature (1)..(183): Homolog of NCBI NO: 4176422 NR Description: ribosomal protein L12 [Oryza sativa (japonica
  misc_feature (1)..(174): Homolog of NCBI NO: 1345575 NR Description: ribosomal protein L12 [Secale cereale]
  misc_feature (1)..(183): Homolog of NCBI NO: 464518 NR Description: 50S RIBOSOMAL PROTEIN L12-2, CHLOROPLAST (CL12-2) >gi|288584|emb|CAA48414.1| ribosomal protein L12 [Secale
  misc_feature (1)..(183): Homolog of NCBI NO: 34912074 NR Description: putative ribosomal protein L12 [Oryza sativa
  misc_feature (1)..(183): Homolog of NCBI NO: 418872 NR Description: ribosomal protein L12.1 precursor, chloroplast -
  misc_feature (1)..(183): Homolog of NCBI NO: 548746 NR Description: 50S RIBOSOMAL PROTEIN L12, CHLOROPLAST PRECURSOR
  misc_feature (1)..(183): Homolog of NCBI NO: 20020 NR Description: ribosomal protein L12-1a [Nicotiana tabacum]
  misc_feature (1)..(183): Homolog of NCBI NO: 133088 NR Description: 50S RIBOSOMAL PROTEIN L12, CHLOROPLAST PRECURSOR
  misc_feature (1)..(182): Homolog of NCBI NO: 133085 NR Description: 50S RIBOSOMAL PROTEIN L12, CHLOROPLAST PRECURSOR

SEQ ID NO: 14957 - DNA, 846 bp, Zea mays subsp. mays
  misc_feature (1)..(846): Ceres Seq. ID no. 12634889
  misc_feature: MA Experiment ID: 20000487 Result: Up-regulated in Transcription
  misc_feature: MA Experiment 20000487 PARAMETER Experiment Name: Zm_50mM_NH4NO3_L_to_H_P Parameter: Organism Value: Zea mays
  misc_feature: MA Experiment 20000487 PARAMETER Experiment Name: Zm_50mM_NH4NO3_L_to_H_P Parameter: Timepoint (hr) Value: 4
  misc_feature: MA Experiment 20000487 PARAMETER Experiment Name: Zm_50mM_NH4NO3_L_to_H_P Parameter: Tissue Value: Leaves
  misc_feature: MA Experiment 20000487 PARAMETER Experiment Name: Zm_50mM_NH4NO3_L_to_H_P Parameter: Treatment Value: 50mM NH4NO3 vs. 100mM Mannitol
  misc_feature: MA Experiment ID: 20000488 Result: Up-regulated in Transcription
  misc_feature: MA Experiment 20000488 PARAMETER Experiment Name: Zm_50mM_NH4NO3_L_to_H_P Parameter: Organism Value: Zea mays
  misc_feature: MA Experiment 20000488 PARAMETER Experiment Name: Zm_50mM_NH4NO3_L_to_H_P Parameter: Timepoint (hr) Value: 8
  misc_feature: MA Experiment 20000488 PARAMETER Experiment Name: Zm_50mM_NH4NO3_L_to_H_P Parameter: Tissue Value: Leaves
  misc_feature: MA Experiment 20000488 PARAMETER Experiment Name: Zm_50mM_NH4NO3_L_to_H_P Parameter: Treatment Value: 50mM NH4NO3 vs. 100mM Mannitol
  misc_feature: MA Experiment ID: 20000626 Result: Up-regulated in Transcription
  misc_feature: MA Experiment 20000626 PARAMETER Experiment Name: Zm_Herbicide-Treatments_P Parameter: Timepoint (hr) Value: 12
  misc_feature: MA Experiment 20000626 PARAMETER Experiment Name: Zm_Herbicide-Treatments_P Parameter: Tissue Value: Aerial
  misc_feature: MA Experiment 20000626 PARAMETER Experiment Name: Zm_Herbicide-Treatments_P Parameter: Treatment Value: Roundup vs. No Treatment
  misc_feature: MA Experiment ID: 20001612 Result: Up-regulated in Transcription
  misc_feature: MA Experiment 20001612 PARAMETER Experiment Name: Zm_50ppm_KNO3_L-to-H_P Parameter: Age (day) Value: 19
  misc_feature: MA Experiment 20001612 PARAMETER Experiment Name: Zm_50ppm_KNO3_L-to-H_P Parameter: Organism Value: Zea mays
  misc_feature: MA Experiment 20001612 PARAMETER Experiment Name: Zm_50ppm_KNO3_L-to-H_P Parameter: Plant Line Value: 35A19
  misc_feature: MA Experiment 20001612 PARAMETER Experiment Name: Zm_50ppm_KNO3_L-to-H_P Parameter: Timepoint (hr) Value: 8
  misc_feature: MA Experiment 20001612 PARAMETER Experiment Name: Zm_50ppm_KNO3_L-to-H_P Parameter: Tissue Value: Roots
  misc_feature: MA Experiment 20001612 PARAMETER Experiment Name: Zm_50ppm_KNO3_L-to-H_P Parameter: Treatment Value: 50ppm KNO3 vs. 50ppm KCl
attaaaaaccatatacgaggccacccagggtacggcggcgctcggttccgtggcggggagtgttttccaggcggcggcgcggtagcgtgaaaccgggcgaccgagcaagcgacggccatggcgttctggcagacgcgcgattttctcttctgtggcatatgcggcaccctcctcaccttcgactccgtccgctccgcctcctgccctctatgcggcttcaagcgcgatgccaaagaaattgaagggaaagaaatacagtacacgatgaccgccgaggatattcgaagagggttaaagacacaaacggaggacgttgttgggcaaagaccagtgacaaataaagcctgtccaaaatgcgaccatccaaaagctgaattttacaacatacaggttagcaactaatccttcagcattggatgaccaatccttccaggttttacgtatccaattattgctcttgacaccggaaattgcagatgcgttcagcagatgagggagagacgacgttctacatgtgtaaaggatgcggctgtaatttcaaagacgaatgaggagttatcctaccacttctacggatatatggcattggtgccgaagaaatttccagcgttgacagactagtactccctccgccctttttttatttatcatcgtctagttcaaaaatgaacggccgataaatattcgagaattgcaatctactccttgacattgttacattacatggatgcgcagatccatgcgttgtgcaaactttcttttgatggaacctgttttgtattttattcgagtgtgtagatgtctacttgcaacctttttacatttattccaaactataagacgttt

SEQ ID NO: 14958 - protein, 94 aa, Zea mays subsp. mays
  peptide (1)..(94): Ceres Seq. ID no. 12634890
  misc_feature (1)..(92): Homolog of NCBI NO: 13324793 NR Description: putative RNA polymerase I subunit [Oryza sativa]
  misc_feature (8)..(84): Homolog of NCBI NO: 18404735 NR Description: expressed protein; protein id: At3g25940.1, by cDNA: 102455. [Arabidopsis thaliana]
  misc_feature (8)..(59): Homolog of NCBI NO: 26452990 NR Description: unknown protein [Arabidopsis thaliana]
  misc_feature (8)..(82): Homolog of NCBI NO: 25518086 NR Description: T20H2.16 protein - Arabidopsis thaliana
MAFWQTRDFLFCGICGTLLTFDSVRSASCPLCGFKRDAKEIEGKEIQYTMTAEDIRRGLKTQTEDVVGQRPVTNKACPKCDHPKAEFYNIQVSN

SEQ ID NO: 14959 - DNA, 484 bp, Zea mays subsp. mays
  misc_feature (1)..(484): Ceres Seq. ID no. 4579105
  misc_feature: MA Experiment ID: 108522 Result: Up-regulated in Transcription
  misc_feature: MA Experiment 108522 PARAMETER Experiment Name: Zm_42deg_Heat_P Parameter: Age (day) Value: 8
  misc_feature: MA Experiment 108522 PARAMETER Experiment Name: Zm_42deg_Heat_P Parameter: Organism Value: Zea mays
  misc_feature: MA Experiment 108522 PARAMETER Experiment Name: Zm_42deg_Heat_P Parameter: Plant Line Value: 35A19
  misc_feature: MA Experiment 108522 PARAMETER Experiment Name: Zm_42deg_Heat_P Parameter: Temperature (deg C) Value: 42 vs. 22
  misc_feature: MA Experiment 108522 PARAMETER Experiment Name: Zm_42deg_Heat_P Parameter: Timepoint (hr) Value: 1
  misc_feature: MA Experiment 108522 PARAMETER Experiment Name: Zm_42deg_Heat_P Parameter: Tissue Value: Aerial
  misc_feature: MA Experiment ID: 108687 Result: Up-regulated in Transcription
  misc_feature: MA Experiment 108687 PARAMETER Experiment Name: Zm_Embryos-Flowers__P Parameter: Tissue Value: Embryo vs. Aerial+
aagtaaataatgtgccctgccgttccccccacctccacccacctcaaccgcagggctgcgacgccgccgtcctgatcgcgtccaagaacaacgacgccgagaaggacgcgccggacaacgagtcgctcgccggcgacggcttcgacaccatcaaccgggtcaaggcggccgtcgagaagaggtgccccggcgtggtgtcctgcgccgacatcatcgcgctcgccgccagagacgtcgtctacctggcggatggcccctactggcgcgtcgagctcggccgtctggacgggctcgattccagggccagcgacgtcaaggggaagctgccggacccggacatgcacgtcaaggacctcacgccggtgttccagcggaacggcttcacggaggtggacatggtcgcgctctccggcgcgcacaccgtcggcttcgcgcactgcagctgcttcaccgacaggctctacagctacggcggcgcgcggac

SEQ ID NO: 14960 - protein, 160 aa, Zea mays subsp. mays
  peptide (1)..(160): Ceres Seq. ID no. 4579106
  misc_feature (17)..(156): Pfam Name: Peroxidase Pfam Description: Peroxidase
  misc_feature (17)..(156): Homolog of NCBI NO: 15241315 NR Description: peroxidase, putative; protein id: At5g14130.1, by cDNA: gi_16209688 [Arabidopsis thaliana] Peroxidase 55 precursor (Atperox P55) (ATP20a)
  misc_feature (17)..(156): Homolog of NCBI NO: 7433086 NR Description: peroxidase (EC 1.11.1.7) pxdD precursor - alfalfa
  misc_feature (17)..(156): Homolog of NCBI NO: 4138647 NR Description: peroxidase [Trifolium repens]
  misc_feature (17)..(153): Homolog of NCBI NO: 2117624 NR Description: peroxidase (EC 1.11.1.7) 2 precursor - alfalfa
  misc_feature (17)..(153): Homolog of NCBI NO: 13992528 NR Description: peroxidase2 [Medicago sativa]
  misc_feature (18)..(156): Homolog of NCBI NO: 7433082 NR Description: probable peroxidase (EC 1.11.1.7) (clone PC55) - (fragment) >gi|1781336|emb|CAA71495.1| peroxidase [Spinacia
  misc_feature (17)..(156): Homolog of NCBI NO: 28629828 NR Description: peroxidase 1 [Artemisia annua]
  misc_feature (18)..(156): Homolog of NCBI NO: 17027271 NR Description: putative peroxidase [Oryza sativa (japonica
  misc_feature (17)..(153): Homolog of NCBI NO: 17027274 NR Description: putative peroxidase [Oryza sativa (japonica
  misc_feature (17)..(156): Homolog of NCBI NO: 14485511 NR Description: putative peroxidase [Solanum tuberosum]
VNNVPCRSPHLHPPQPQGCDAAVLIASKNNDAEKDAPDNESLAGDGFDTINRVKAAVEKRCPGVVSCADIIALAARDVVYLADGPYWRVELGRLDGLDSRASDVKGKLPDPDMHVKDLTPVFQRNGFTEVDMVALSGAHTVGFAHCSCFTDRLYSYGGAR

SEQ ID NO: 14961 - DNA, 1071 bp, Zea mays subsp. mays
  misc_feature (1)..(1071): Ceres Seq. ID no. 13599122
  misc_feature: MA Experiment ID: 108515 Result: Up-regulated in Transcription
  misc_feature: MA Experiment 108515 PARAMETER Experiment Name: Zm_2mM_SA_P Parameter: Age (day) Value: 8
  misc_feature: MA Experiment 108515 PARAMETER Experiment Name: Zm_2mM_SA_P Parameter: Organism Value: Zea mays
  misc_feature: MA Experiment 108515 PARAMETER Experiment Name: Zm_2mM_SA_P Parameter: Plant Line Value: 35A19
  misc_feature: MA Experiment 108515 PARAMETER Experiment Name: Zm_2mM_SA_P Parameter: Timepoint (hr) Value: 12
  misc_feature: MA Experiment 108515 PARAMETER Experiment Name: Zm_2mM_SA_P Parameter: Tissue Value: Aerial
  misc_feature: MA Experiment 108515 PARAMETER Experiment Name: Zm_2mM_SA_P Parameter: Treatment Value: 2mM SA vs. No Treatment
  misc_feature: MA Experiment ID: 108522 Result: Up-regulated in Transcription
  misc_feature: MA Experiment 108522 PARAMETER Experiment Name: Zm_42deg_Heat_P Parameter: Age (day) Value: 8
  misc_feature: MA Experiment 108522 PARAMETER Experiment Name: Zm_42deg_Heat_P Parameter: Organism Value: Zea mays
  misc_feature: MA Experiment 108522 PARAMETER Experiment Name: Zm_42deg_Heat_P Parameter: Plant Line Value: 35A19
  misc_feature: MA Experiment 108522 PARAMETER Experiment Name: Zm_42deg_Heat_P Parameter: Temperature (deg C) Value: 42 vs. 22
  misc_feature: MA Experiment 108522 PARAMETER Experiment Name: Zm_42deg_Heat_P Parameter: Timepoint (hr) Value: 1
  misc_feature: MA Experiment 108522 PARAMETER Experiment Name: Zm_42deg_Heat_P Parameter: Tissue Value: Aerial
  misc_feature: MA Experiment ID: 108523 Result: Up-regulated in Transcription
  misc_feature: MA Experiment 108523 PARAMETER Experiment Name: Zm_42deg_Heat_P Parameter: Age (day) Value: 8
  misc_feature: MA Experiment 108523 PARAMETER Experiment Name: Zm_42deg_Heat_P Parameter: Organism Value: Zea mays
  misc_feature: MA Experiment 108523 PARAMETER Experiment Name: Zm_42deg_Heat_P Parameter: Plant Line Value: 35A19
  misc_feature: MA Experiment 108523 PARAMETER Experiment Name: Zm_42deg_Heat_P Parameter: Temperature (deg C) Value: 42 vs. 22
  misc_feature: MA Experiment 108523 PARAMETER Experiment Name: Zm_42deg_Heat_P Parameter: Timepoint (hr) Value: 6
  misc_feature: MA Experiment 108523 PARAMETER Experiment Name: Zm_42deg_Heat_P Parameter: Tissue Value: Aerial
  misc_feature: MA Experiment ID: 108527 Result: Up-regulated in Transcription
  misc_feature: MA Experiment 108527 PARAMETER Experiment Name: Zm_5mM_NO_P Parameter: Age (day) Value: 8
  misc_feature: MA Experiment 108527 PARAMETER Experiment Name: Zm_5mM_NO_P Parameter: Organism Value: Zea mays
  misc_feature: MA Experiment 108527 PARAMETER Experiment Name: Zm_5mM_NO_P Parameter: Plant Line Value: 35A19
  misc_feature: MA Experiment 108527 PARAMETER Experiment Name: Zm_5mM_NO_P Parameter: Timepoint (hr) Value: 6
  misc_feature: MA Experiment 108527 PARAMETER Experiment Name: Zm_5mM_NO_P Parameter: Tissue Value: Aerial
  misc_feature: MA Experiment 108527 PARAMETER Experiment Name: Zm_5mM_NO_P Parameter: Treatment Value: 5mM NO vs. No Treatment
  misc_feature: MA Experiment ID: 108528 Result: Down-regulated in Transcription
  misc_feature: MA Experiment 108528 PARAMETER Experiment Name: Zm_Imbibed_Seeds_P Parameter: Age (day) Value: 5 vs. 2
  misc_feature: MA Experiment 108528 PARAMETER Experiment Name: Zm_Imbibed_Seeds_P Parameter: Organism Value: Zea mays
  misc_feature: MA Experiment 108528 PARAMETER Experiment Name: Zm_Imbibed_Seeds_P Parameter: Plant Line Value: 35A19
  misc_feature: MA Experiment 108528 PARAMETER Experiment Name: Zm_Imbibed_Seeds_P Parameter: Tissue Value: Aerial vs. Embryo
  misc_feature: MA Experiment ID: 108529 Result: Down-regulated in Transcription
  misc_feature: MA Experiment 108529 PARAMETER Experiment Name: Zm_Imbibed_Seeds_P Parameter: Age (day) Value: 5 vs. 2
  misc_feature: MA Experiment 108529 PARAMETER Experiment Name: Zm_Imbibed_Seeds_P Parameter: Organism Value: Zea mays
  misc_feature: MA Experiment 108529 PARAMETER Experiment Name: Zm_Imbibed_Seeds_P Parameter: Plant Line Value: 35A19
  misc_feature: MA Experiment 108529 PARAMETER Experiment Name: Zm_Imbibed_Seeds_P Parameter: Tissue Value: Roots vs. Embryo
  misc_feature: MA Experiment ID: 108530 Result: Down-regulated in Transcription
  misc_feature: MA Experiment 108530 PARAMETER Experiment Name: Zm_Imbibed_Seeds_P Parameter: Age (day) Value: 6 vs. 2
  misc_feature: MA Experiment 108530 PARAMETER Experiment Name: Zm_Imbibed_Seeds_P Parameter: Organism Value: Zea mays
  misc_feature: MA Experiment 108530 PARAMETER Experiment Name: Zm_Imbibed_Seeds_P Parameter: Plant Line Value: 35A19
  misc_feature: MA Experiment 108530 PARAMETER Experiment Name: Zm_Imbibed_Seeds_P Parameter: Tissue Value: Aerial vs. Embryo
  misc_feature: MA Experiment ID: 108534 Result: Up-regulated in Transcription
  misc_feature: MA Experiment 108534 PARAMETER Experiment Name: Zm_4deg_Cold_P Parameter: Age (hr) Value: 8
  misc_feature: MA Experiment 108534 PARAMETER Experiment Name: Zm_4deg_Cold_P Parameter: Organism Value: Zea mays
  misc_feature: MA Experiment 108534 PARAMETER Experiment Name: Zm_4deg_Cold_P Parameter: Plant Line Value: 35A19
  misc_feature: MA Experiment 108534 PARAMETER Experiment Name: Zm_4deg_Cold_P Parameter: Temperature (deg C) Value: 4 vs. 22
  misc_feature: MA Experiment 108534 PARAMETER Experiment Name: Zm_4deg_Cold_P Parameter: Timepoint (hr) Value: 6
  misc_feature: MA Experiment 108534 PARAMETER Experiment Name: Zm_4deg_Cold_P Parameter: Tissue Value: Aerial
  misc_feature: MA Experiment ID: 108542 Result: Up-regulated in Transcription
  misc_feature: MA Experiment 108542 PARAMETER Experiment Name: Zm_150mM_NaCl_P Parameter: Age (day) Value: 8
  misc_feature: MA Experiment 108542 PARAMETER Experiment Name: Zm_150mM_NaCl_P Parameter: Organism Value: Zea mays
  misc_feature: MA Experiment 108542 PARAMETER Experiment Name: Zm_150mM_NaCl_P Parameter: Plant Line Value: 35A19
  misc_feature: MA Experiment 108542 PARAMETER Experiment Name: Zm_150mM_NaCl_P Parameter: Timepoint (hr) Value: 6
  misc_feature: MA Experiment 108542 PARAMETER Experiment Name: Zm_150mM_NaCl_P Parameter: Tissue Value: Aerial
  misc_feature: MA Experiment 108542 PARAMETER Experiment Name: Zm_150mM_NaCl_P Parameter: Treatment Value: 150mM NaCl vs. No Treatment
  misc_feature: MA Experiment ID: 108544 Result: Down-regulated in Transcription
  misc_feature: MA Experiment ID: 108545 Result: Down-regulated in Transcription
  misc_feature: MA Experiment 108545 PARAMETER Experiment Name: Zm_Imbibed_Seeds_P Parameter: Age (day) Value: 3 vs. 2
  misc_feature: MA Experiment 108545 PARAMETER Experiment Name: Zm_Imbibed_Seeds_P Parameter: Organism Value: Zea mays
  misc_feature: MA Experiment 108545 PARAMETER Experiment Name: Zm_Imbibed_Seeds_P Parameter: Plant Line Value: 35A19
  misc_feature: MA Experiment 108545 PARAMETER Experiment Name: Zm_Imbibed_Seeds_P Parameter: Tissue Value: Aerial vs. Embryo
  misc_feature: MA Experiment ID: 108546 Result: Down-regulated in Transcription
  misc_feature: MA Experiment 108546 PARAMETER Experiment Name: Zm_Imbibed_Seeds_P Parameter: Age (day) Value: 3 vs. 2
  misc_feature: MA Experiment 108546 PARAMETER Experiment Name: Zm_Imbibed_Seeds_P Parameter: Organism Value: Zea mays
  misc_feature: MA Experiment 108546 PARAMETER Experiment Name: Zm_Imbibed_Seeds_P Parameter: Plant Line Value: 35A19
  misc_feature: MA Experiment 108546 PARAMETER Experiment Name: Zm_Imbibed_Seeds_P Parameter: Tissue Value: Roots vs. Embryo
  misc_feature: MA Experiment ID: 108547 Result: Down-regulated in Transcription
  misc_feature: MA Experiment 108547 PARAMETER Experiment Name: Zm_Imbibed_Seeds_P Parameter: Age (day) Value: 4 vs. 2
  misc_feature: MA Experiment 108547 PARAMETER Experiment Name: Zm_Imbibed_Seeds_P Parameter: Organism Value: Zea mays
  misc_feature: MA Experiment 108547 PARAMETER Experiment Name: Zm_Imbibed_Seeds_P Parameter: Plant Line Value: 35A19
  misc_feature: MA Experiment 108547 PARAMETER Experiment Name: Zm_Imbibed_Seeds_P Parameter: Tissue Value: Aerial vs. Embryo
  misc_feature: MA Experiment ID: 108559 Result: Up-regulated in Transcription
  misc_feature: MA Experiment 108559 PARAMETER Experiment Name: Zm_5mM_NO_P Parameter: Age (day) Value: 8
  misc_feature: MA Experiment 108559 PARAMETER Experiment Name: Zm_5mM_NO_P Parameter: Organism Value: Zea mays
  misc_feature: MA Experiment 108559 PARAMETER Experiment Name: Zm_5mM_NO_P Parameter: Plant Line Value: 35A19
  misc_feature: MA Experiment 108559 PARAMETER Experiment Name: Zm_5mM_NO_P Parameter: Timepoint (hr) Value: 12
  misc_feature: MA Experiment 108559 PARAMETER Experiment Name: Zm_5mM_NO_P Parameter: Tissue Value: Aerial
  misc_feature: MA Experiment 108559 PARAMETER Experiment Name: Zm_5mM_NO_P Parameter: Treatment Value: 5mM NO vs. No Treatment
  misc_feature: MA Experiment ID: 20000477 Result: Up-regulated in Transcription
  misc_feature: MA Experiment 20000477 PARAMETER Experiment Name: Zm_5mM_SA_P Parameter: Age (day) Value: 10
  misc_feature: MA Experiment 20000477 PARAMETER Experiment Name: Zm_5mM_SA_P Parameter: Organism Value: Zea mays
  misc_feature: MA Experiment 20000477 PARAMETER Experiment Name: Zm_5mM_SA_P Parameter: Plant Line Value: 35A19
  misc_feature: MA Experiment 20000477 PARAMETER Experiment Name: Zm_5mM_SA_P Parameter: Timepoint (hr) Value: 48
  misc_feature: MA Experiment 20000477 PARAMETER Experiment Name: Zm_5mM_SA_P Parameter: Tissue Value: Aerial
  misc_feature: MA Experiment 20000477 PARAMETER Experiment Name: Zm_5mM_SA_P Parameter: Treatment Value: 5mM SA vs. No Treatment
  misc_feature: MA Experiment ID: 20000478 Result: Up-regulated in Transcription
  misc_feature: MA Experiment 20000478 PARAMETER Experiment Name: Zm_5mM_SA_P Parameter: Age (day) Value: 11
  misc_feature: MA Experiment 20000478 PARAMETER Experiment Name: Zm_5mM_SA_P Parameter: Organism Value: Zea mays
  misc_feature: MA Experiment 20000478 PARAMETER Experiment Name: Zm_5mM_SA_P Parameter: Plant Line Value: 35A19
  misc_feature: MA Experiment 20000478 PARAMETER Experiment Name: Zm_5mM_SA_P Parameter: Timepoint (hr) Value: 72
  misc_feature: MA Experiment 20000478 PARAMETER Experiment Name: Zm_5mM_SA_P Parameter: Tissue Value: Aerial
  misc_feature: MA Experiment 20000478 PARAMETER Experiment Name: Zm_5mM_SA_P Parameter: Treatment Value: 5mM SA vs. No Treatment
  misc_feature: MA Experiment ID: 20000492 Result: Up-regulated in Transcription
  misc_feature: MA Experiment 20000492 PARAMETER Experiment Name: Zm_Hybrid_Seed_Dev_P Parameter: DAP Value: 12
  misc_feature: MA Experiment 20000492 PARAMETER Experiment Name: Zm_Hybrid_Seed_Dev_P Parameter: Organism Value: Zea mays
  misc_feature: MA Experiment 20000492 PARAMETER Experiment Name: Zm_Hybrid_Seed_Dev_P Parameter: Plant Line Value: 35A19
  misc_feature: MA Experiment 20000492 PARAMETER Experiment Name: Zm_Hybrid_Seed_Dev_P Parameter: Tissue Value: Fert Kernel vs. Unfert Floret
  misc_feature: MA Experiment ID: 20000535 Result: Up-regulated in Transcription
  misc_feature: MA Experiment 20000535 PARAMETER Experiment Name: Zm_Hybrid_Seed_Dev_P Parameter: DAP Value: 30 vs. 12
  misc_feature: MA Experiment 20000535 PARAMETER Experiment Name: Zm_Hybrid_Seed_Dev_P Parameter: Organism Value: Zea mays
  misc_feature: MA Experiment 20000535 PARAMETER Experiment Name: Zm_Hybrid_Seed_Dev_P Parameter: Plant Line Value: 35A19
  misc_feature: MA Experiment 20000535 PARAMETER Experiment Name: Zm_Hybrid_Seed_Dev_P Parameter: Tissue Value: Embryo vs. Unfert Floret
  misc_feature: MA Experiment ID: 20000626 Result: Up-regulated in Transcription
  misc_feature: MA Experiment 20000626 PARAMETER Experiment Name: Zm_Herbicide-Treatments_P Parameter: Timepoint (hr) Value: 12
  misc_feature: MA Experiment 20000626 PARAMETER Experiment Name: Zm_Herbicide-Treatments_P Parameter: Tissue Value: Aerial
  misc_feature: MA Experiment 20000626 PARAMETER Experiment Name: Zm_Herbicide-Treatments_P Parameter: Treatment Value: Roundup vs. No Treatment
  misc_feature: MA Experiment ID: 20000629 Result: Up-regulated in Transcription
  misc_feature: MA Experiment 20000629 PARAMETER Experiment Name: Zm_Herbicide-Treatments_P Parameter: Timepoint (hr) Value: 12
  misc_feature: MA Experiment 20000629 PARAMETER Experiment Name: Zm_Herbicide-Treatments_P Parameter: Tissue Value: Aerial
  misc_feature: MA Experiment 20000629 PARAMETER Experiment Name: Zm_Herbicide-Treatments_P Parameter: Treatment Value: Trimec vs. No Treatment
  misc_feature: MA Experiment ID: 20001610 Result: Up-regulated in Transcription
  misc_feature: MA Experiment 20001610 PARAMETER Experiment Name: Zm_50ppm_KNO3_L-to-H_P Parameter: Age (day) Value: 19
  misc_feature: MA Experiment 20001610 PARAMETER Experiment Name: Zm_50ppm_KNO3_L-to-H_P Parameter: Organism Value: Zea mays
  misc_feature: MA Experiment 20001610 PARAMETER Experiment Name: Zm_50ppm_KNO3_L-to-H_P Parameter: Plant Line Value: 35A19
  misc_feature: MA Experiment 20001610 PARAMETER Experiment Name: Zm_50ppm_KNO3_L-to-H_P Parameter: Timepoint (hr) Value: 2
  misc_feature: MA Experiment 20001610 PARAMETER Experiment Name: Zm_50ppm_KNO3_L-to-H_P Parameter: Tissue Value: Roots
  misc_feature: MA Experiment 20001610 PARAMETER Experiment Name: Zm_50ppm_KNO3_L-to-H_P Parameter: Treatment Value: 50ppm KNO3 vs. 50ppm KCl
  misc_feature: MA Experiment ID: 20001614 Result: Up-regulated in Transcription
  misc_feature: MA Experiment 20001614 PARAMETER Experiment Name: Zm_50ppm_KNO3_L-to-H_P Parameter: Age (day) Value: 21
  misc_feature: MA Experiment 20001614 PARAMETER Experiment Name: Zm_50ppm_KNO3_L-to-H_P Parameter: Organism Value: Zea mays
  misc_feature: MA Experiment 20001614 PARAMETER Experiment Name: Zm_50ppm_KNO3_L-to-H_P Parameter: Plant Line Value: 35A19
  misc_feature: MA Experiment 20001614 PARAMETER Experiment Name: Zm_50ppm_KNO3_L-to-H_P Parameter: Timepoint (hr) Value: 48
  misc_feature: MA Experiment 20001614 PARAMETER Experiment Name: Zm_50ppm_KNO3_L-to-H_P Parameter: Tissue Value: Roots
  misc_feature: MA Experiment 20001614 PARAMETER Experiment Name: Zm_50ppm_KNO3_L-to-H_P Parameter: Treatment Value: 50ppm KNO3 vs. 50ppm KCl
ctaatcgaaaaaccgcaaggatccaccacaacagcgaaggagaaagcagaccaacctagccacccagggagaaagaggccaaaagggaggggagagtgtcgtcatggcttccattgtcgcttccaggagggccgttcctctagttcgcgctctggagaagctcatcgcagcgtcctccgctcccgggactggctccgccctcaggccggtggcagtcgccggcggcctccgcggctacaacaccggcgctccgctccgacgctacgagggggccgagtcggaagacgatagcgtccgcgagtacgatgggcggcacggcggccgggactacgctgtgcccagcctgttctcaggtagtcgtcatcttcgcttcatgccagacccatttgctttgctctctcaactctcaaatgagatggtggtgagactacatcgcttcgaaatggctgtgctgagtgctgacttcgtcttgttggtccctgtccagatattttccgtgatccgcttagtgcgccgcacagcattggccgcctgctgaaccttgtggacgacttggcggtggcggcgccaggtcgtgcggtgcgccgtggctggaacgcgaaggaggacgaggaggcgctgcacctgagggtggacatgccaggcctggggaaggagcacgtcaaggtgtgggcggagcagaacagcctggtgatcaagggcgagggcgagaaggaggatagcgaggacgaggccgccccgcctccgagatacagcggtcgcatcgagctcgcgccagaggtttacaggatggacaagatcaaggcggagatgaagaacggcgtgctcaaggtggtcgtgccgaaggtgaaggagcagcagcgcaaggacgtgttccaagtcaacgtcgagtagatgtttccaaatagaagcaagtgccggtacgggatggaggattggaggggcactgccaaactaggattcctctctctcaatctgatctggattctggaatcagatttctcttctttcatttttctcgtctatcttctatcagtatgaaataagcaacgtcgcttcagttttcgtgcc

SEQ ID NO: 14962 - protein, 144 aa, Zea mays subsp. mays
  peptide (1)..(144): Ceres Seq. ID no. 15222515
  misc_feature (1)..(83): Homolog of NCBI NO: 7441311 NR Description: heat shock protein hsp22 precursor, mitochondrial maize >gi|3015621|gb|AAC12279.1| low molecular weight heat shock
  misc_feature (1)..(83): Homolog of NCBI NO: 4138869 NR Description: small heat shock protein Hsp23.5 [Triticum
MASIVASRRAVPLVRALEKLIAASSAPGTGSALRPVAVAGGLRGYNTGAPLRRYEGAESEDDSVREYDGRHGGRDYAVPSLFSGSRHLRFMPDPFALLSQLSNEMVVRLHRFEMAVLSADFVLLVPVQIFSVIRLVRRTALAAC

SEQ ID NO: 14963 - protein, 96 aa, Zea mays subsp. mays
  peptide (1)..(96): Ceres Seq. ID no. 15222516
LIEKPQGSTTTAKEKADQPSHPGRKRPKGRGECRHGFHCRFQEGRSSSSRSGEAHRSVLRSRDWLRPQAGGSRRRPPRLQHRRSAPTLRGGRVGRR

SEQ ID NO: 14964 - protein, 85 aa, Zea mays subsp. mays
  peptide (1)..(85): Ceres Seq. ID no. 15222517
  misc_feature (1)..(85): Homolog of NCBI NO: 7441311 NR Description: heat shock protein hsp22 precursor, mitochondrial maize >gi|3015621|gb|AAC12279.1| low molecular weight heat shock
  misc_feature (1)..(85): Homolog of NCBI NO: 4138869 NR Description: small heat shock protein Hsp23.5 [Triticum
  misc_feature (1)..(85): Homolog of NCBI NO: 123564 NR Description: Small heat shock protein, chloroplast precursor
  misc_feature (1)..(85): Homolog of NCBI NO: 7441310 NR Description: heat shock protein MTSHP precursor, mitochondrial tomato >gi|3492854|dbj|BAA32547.1| mitochondrial small heat shock
  misc_feature (1)..(85): Homolog of NCBI NO: 21554988 NR Description: mitochondrial heat shock 22 kd protein-like
  misc_feature (1)..(85): Homolog of NCBI NO: 15242086 NR Description: heat shock protein, putative [Arabidopsis
  misc_feature (1)..(85): Homolog of NCBI NO: 1170368 NR Description: Heat shock 22 kDa protein, mitochondrial precursor
  misc_feature (1)..(85): Homolog of NCBI NO: 7441313 NR Description: heat shock protein HSP23.5, mitochondrial - white
  misc_feature (1)..(85): Homolog of NCBI NO: 21068482 NR Description: small heat-shock protein [Picea glauca]
  misc_feature (1)..(85): Homolog of NCBI NO: 4138871 NR Description: small heat shock protein Hsp23.6 [Triticum
MPGLGKEHVKVWAEQNSLVIKGEGEKEDSEDEAAPPPRYSGRIELAPEVYRMDKIKAEMKNGVLKVVVPKVKEQQRKDVFQVNVE

SEQ ID NO: 14965 - DNA, 896 bp, Zea mays subsp. mays
  misc_feature (1)..(896): Ceres Seq. ID no. 12469177
  misc_feature: MA Experiment ID: 108535 Result: Up-regulated in Transcription
  misc_feature: MA Experiment 108535 PARAMETER Experiment Name: Zm_Meristem_P Parameter: Age (day) Value: 8
  misc_feature: MA Experiment 108535 PARAMETER Experiment Name: Zm_Meristem_P Parameter: Organism Value: Zea mays
  misc_feature: MA Experiment 108535 PARAMETER Experiment Name: Zm_Meristem_P Parameter: Plant Line Value: 35A19
  misc_feature: MA Experiment 108535 PARAMETER Experiment Name: Zm_Meristem_P Parameter: Tissue Value: Root Meristem vs. Above Root Meristem
  misc_feature: MA Experiment ID: 108543 Result: Up-regulated in Transcription
  misc_feature: MA Experiment ID: 108544 Result: Down-regulated in Transcription
  misc_feature: MA Experiment ID: 20000479 Result: Up-regulated in Transcription
  misc_feature: MA Experiment 20000479 PARAMETER Experiment Name: Zm_Drought_P Parameter: Age (day) Value: 10
  misc_feature: MA Experiment 20000479 PARAMETER Experiment Name: Zm_Drought_P Parameter: Organism Value: Zea mays
  misc_feature: MA Experiment 20000479 PARAMETER Experiment Name: Zm_Drought_P Parameter: Plant Line Value: 35A19
  misc_feature: MA Experiment 20000479 PARAMETER Experiment Name: Zm_Drought_P Parameter: Timepoint (hr) Value: 48
  misc_feature: MA Experiment 20000479 PARAMETER Experiment Name: Zm_Drought_P Parameter: Tissue Value: Aerial
  misc_feature: MA Experiment 20000479 PARAMETER Experiment Name: Zm_Drought_P Parameter: Treatment Value: Drought vs. No Drought
  misc_feature: MA Experiment ID: 20000480 Result: Up-regulated in Transcription
  misc_feature: MA Experiment 20000480 PARAMETER Experiment Name: Zm_Drought_P Parameter: Age (day) Value: 11
  misc_feature: MA Experiment 20000480 PARAMETER Experiment Name: Zm_Drought_P Parameter: Organism Value: Zea mays
  misc_feature: MA Experiment 20000480 PARAMETER Experiment Name: Zm_Drought_P Parameter: Plant Line Value: 35A19
  misc_feature: MA Experiment 20000480 PARAMETER Experiment Name: Zm_Drought_P Parameter: Timepoint (hr) Value: 72
  misc_feature: MA Experiment 20000480 PARAMETER Experiment Name: Zm_Drought_P Parameter: Tissue Value: Aerial
  misc_feature: MA Experiment 20000480 PARAMETER Experiment Name: Zm_Drought_P Parameter: Treatment Value: Drought vs. No Drought
  misc_feature: MA Experiment ID: 20000535 Result: Up-regulated in Transcription
  misc_feature: MA Experiment 20000535 PARAMETER Experiment Name: Zm_Hybrid_Seed_Dev_P Parameter: DAP Value: 30 vs. 12
  misc_feature: MA Experiment 20000535 PARAMETER Experiment Name: Zm_Hybrid_Seed_Dev_P Parameter: Organism Value: Zea mays
  misc_feature: MA Experiment 20000535 PARAMETER Experiment Name: Zm_Hybrid_Seed_Dev_P Parameter: Plant Line Value: 35A19
  misc_feature: MA Experiment 20000535 PARAMETER Experiment Name: Zm_Hybrid_Seed_Dev_P Parameter: Tissue Value: Embryo vs. Unfert Floret
  misc_feature: MA Experiment ID: 20000632 Result: Down-regulated in Transcription
  misc_feature: MA Experiment 20000632 PARAMETER Experiment Name: Zm_Herbicide-Treatments_P Parameter: Timepoint (hr) Value: 4
  misc_feature: MA Experiment 20000632 PARAMETER Experiment Name: Zm_Herbicide-Treatments_P Parameter: Tissue Value: Aerial
  misc_feature: MA Experiment 20000632 PARAMETER Experiment Name: Zm_Herbicide-Treatments_P Parameter: Treatment Value: Glean vs. No Treatment
agcgcgacgaagcggcgccgccagctccccaaaacctccccagctgccacctcctctgcctccctgcgtcccccgagcaaagcagaacaaggggggaaaaagttgatatacgcttgcagcgatggcctttgccgcccgcgccgcgctcgtgcgcgtcctccctccgcgaccatcgccgacctcccaaccgaagcagctcaagcaaggtctaggcggccgcggcgggtcctcgctcgccgttcgggcgaaggactccgatgacttcggggcccttctgtcggagaagctcgatgcgcaggcgcctgagaagcgggatgggcgggatggttttgggagggaggcgagtagcgtggaggaggagaaggaggtgcagggcgagccggcttcgtggggtgtgctcaaccagatcggcgtcgagttggactctgacaaatcatattctgctctcatatatggcacatctgctcttgttgcaatttggatatcatcaattgtggtttctgcacttgattcagtccctttggttcctcaagtgatggaagttgttggtcttggcttcncaatttggttcacatcgagatacctgatatttaaggagaaccgtgatgaacttttcacgagagtcagctccatcaagaagcaaattttggggtntcatgagaactgagcgtctctcttacgttctgttctgttaactggtactgtgttttattgaanatgtttttttttggaataaacagtacatttttttgtttttcgcctgcatttttactaatcgaaaggtaagtgcactgtactcttttcgttgattccaactaattttaggtgagtgtagggctgcgatgacctaaagtgcgactttctttgcatgctttgcggggcccgctgaggcggct

SEQ ID NO: 14966 - protein, 181 aa, Zea mays subsp. mays
  peptide (1)..(181): Ceres Seq. ID no. 12469178
  misc_feature (62)..(177): Homolog of NCBI NO: 7485852 NR Description: hypothetical protein F20D10.220 - Arabidopsis >gi|4467116|emb|CAB37550.1| hypothetical protein [Arabidopsis >gi|7270793|emb|CAB80475.1| hypothetical protein [Arabidopsis
  misc_feature (62)..(177): Homolog of NCBI NO: 18420175 NR Description: expressed protein; protein id: At4g38100.1, by cDNA: 21. [Arabidopsis thaliana] >gi|21554198|gb|AAM63277.1|
  misc_feature (73)..(180): Homolog of NCBI NO: 38175474 NR Description: unknown protein [Oryza sativa (japonica
  misc_feature (73)..(177): Homolog of NCBI NO: 687677 NR Description: unknown
  misc_feature (73)..(177): Homolog of NCBI NO: 18411555 NR Description: expressed protein; protein id: At4g01150.1, by cDNA: gi_14488087, supported by cDNA: gi_20147122, supported cDNA: gi_687676 [Arabidopsis thaliana] >gi|7485223|pir||T01726
  misc_feature (73)..(177): Homolog of NCBI NO: 18407178 NR Description: expressed protein; protein id: At2g46820.1, by cDNA: 26967., supported by cDNA: gi_17473793 [Arabidopsis
  misc_feature (73)..(177): Homolog of NCBI NO: 21555057 NR Description: unknown [Arabidopsis thaliana]
  misc_feature (68)..(177): Homolog of NCBI NO: 34393236 NR Description: unknown protein [Oryza sativa (japonica
  misc_feature (93)..(176): Homolog of NCBI NO: 37536446 NR Description: hypothetical protein [Oryza sativa (japonica group)] >gi|18057096|gb|AAL58119.1| hypothetical protein [Oryza
  misc_feature (72)..(177): Homolog of NCBI NO: 18403896 NR Description: expressed protein; protein id: At1g52220.1, by cDNA: 21305., supported by cDNA: gi_15294155, supported by
  misc_feature (147)..(147): Xaa is any aa, unknown or other
  misc_feature (178)..(178): Xaa is any aa, unknown or other
MAFAARAALVRVLPPRPSPTSQPKQLKQGLGGRGGSSLAVRAKDSDDFGALLSEKLDAQAPEKRDGRDGFGREASSVEEEKEVQGEPASWGVLNQIGVELDSDKSYSALIYGTSALVAIWISSIVVSALDSVPLVPQVMEVVGLGFXIWFTSRYLIFKENRDELFTRVSSIKKQILGXHEN

SEQ ID NO: 14967 - protein, 92 aa, Zea mays subsp. mays
  peptide (1)..(92): Ceres Seq. ID no. 12469179
MTSGPFCRRSSMRRRLRSGMGGMVLGGRRVAWRRRRRCRASRLRGVCSTRSASSWTLTNHILLSYMAHLLLLQFGYHQLWFLHLIQSLWFLK

SEQ ID NO: 14968 - DNA, 828 bp, Zea mays subsp. mays
  misc_feature (1)..(828): Ceres Seq. ID no. 12455151
  misc_feature: MA Experiment ID: 20000535 Result: Up-regulated in Transcription
  misc_feature: MA Experiment 20000535 PARAMETER Experiment Name: Zm_Hybrid_Seed_Dev_P Parameter: DAP Value: 30 vs. 12
  misc_feature: MA Experiment 20000535 PARAMETER Experiment Name: Zm_Hybrid_Seed_Dev_P Parameter: Organism Value: Zea mays
  misc_feature: MA Experiment 20000535 PARAMETER Experiment Name: Zm_Hybrid_Seed_Dev_P Parameter: Plant Line Value: 35A19
  misc_feature: MA Experiment 20000535 PARAMETER Experiment Name: Zm_Hybrid_Seed_Dev_P Parameter: Tissue Value: Embryo vs. Unfert Floret
acacagacacagcgcggagccgccacttctcttctcagcgctcccaatctggcggcggcggcacgccggcacccacccgcagttgacatgattaagtcaagtatcgaagaagagcttgatagctacatatttgatggacaaggtcatgatgattctattgacacaagtgacttagaaaaatatttggcagatccaatactaaaggttggtaaaagtaatcaacacacttttgacatattagcatggtggaaagcacacaaagaagaatatcctgtcttgggccagcttgctcgtgatgtcttagctatgcaagtgtcaacagtagcttcagaatcttcttttagtgttggtggtcgtgtacttaatccatttcgtactcgccttgaccctaccatggtagaagcgcttgtctgcaccaaagattggatagctggagcaagaaaaggttccaaggctaagagtgttgctattcctaatatggtttgtgaaatggaggaacttgaggctcttgatagaaatctttcacttgaggatgaagacctagatgatgatcatgatgatggaccagaggcatcgttgtaagcttgttgatgaagacctagatgatgataatgcaacatgaatgctctgaatgttttcattgtacttgttgcgtaatgctttgtgatcttgcgaacttgggacttgtggacttgtggttgtgtactttgtgatctgtgtgatgaacttgttatattgtgaacttgtgatctgtgtgatccacttattatattgtgaacttgtgatcaacttgttatattgtgaacttgtgatctgtgtgatccactt

SEQ ID NO: 14969 - protein, 193 aa, Zea mays subsp. mays
  peptide (1)..(193): Ceres Seq. ID no. 12455152
  misc_feature (57)..(143): Pfam Name: hAT family dimerisation domain Pfam Description: hAT family dimerisation domain
  misc_feature (13)..(155): Homolog of NCBI NO: 1091678 NR Description: activator-like transposable element
  misc_feature (29)..(186): Homolog of NCBI NO: 136125 NR Description: PUTATIVE AC TRANSPOSASE (ORFA)
  misc_feature (29)..(149): Homolog of NCBI NO: 7489762 NR Description: hypothetical protein - maize transposable element
  misc_feature (29)..(149): Homolog of NCBI NO: 136140 NR Description: PUTATIVE AC9 TRANSPOSASE >gi|72973|pir||TQZMCA
  misc_feature (18)..(186): Homolog of NCBI NO: 37532356 NR Description: putative activator-like transposable element
  misc_feature (54)..(187): Homolog of NCBI NO: 38344876 NR Description: OSJNBa0020P07.19 [Oryza sativa (japonica
  misc_feature (13)..(192): Homolog of NCBI NO: 37532082 NR Description: putative transposase [Oryza sativa (japonica group)] >gi|22507085|gb|AAM97760.1| putative transposase [Oryza
  misc_feature (9)..(172): Homolog of NCBI NO: 15234487 NR Description: putative transposase; protein id: At4g12260.1
  misc_feature (56)..(176): Homolog of NCBI NO: 15228784 NR Description: putative protein; protein id: At3g62520.1
  misc_feature (45)..(178): Homolog of NCBI NO: 37530608 NR Description: putative Tam3-like transposon protein [Oryza
TQTQRGAATSLLSAPNLAAAARRHPPAVDMIKSSIEEELDSYIFDGQGHDDSIDTSDLEKYLADPILKVGKSNQHTFDILAWWKAHKEEYPVLGQLARDVLAMQVSTVASESSFSVGGRVLNPFRTRLDPTMVEALVCTKDWIAGARKGSKAKSVAIPNMVCEMEELEALDRNLSLEDEDLDDDHDDGPEASL

SEQ ID NO: 14970 - protein, 164 aa, Zea mays subsp. mays
  peptide (1)..(164): Ceres Seq. ID no. 12455153
  misc_feature (28)..(114): Pfam Name: hAT family dimerisation domain Pfam Description: hAT family dimerisation domain
  misc_feature (1)..(126): Homolog of NCBI NO: 1091678 NR Description: activator-like transposable element
  misc_feature (1)..(157): Homolog of NCBI NO: 136125 NR Description: PUTATIVE AC TRANSPOSASE (ORFA)
  misc_feature (1)..(120): Homolog of NCBI NO: 7489762 NR Description: hypothetical protein - maize transposable element
  misc_feature (1)..(120): Homolog of NCBI NO: 136140 NR Description: PUTATIVE AC9 TRANSPOSASE >gi|72973|pir||TQZMCA
  misc_feature (1)..(157): Homolog of NCBI NO: 37532356 NR Description: putative activator-like transposable element
  misc_feature (25)..(158): Homolog of NCBI NO: 38344876 NR Description: OSJNBa0020P07.19 [Oryza sativa (japonica
  misc_feature (1)..(163): Homolog of NCBI NO: 37532082 NR Description: putative transposase [Oryza sativa (japonica group)] >gi|22507085|gb|AAM97760.1| putative transposase [Oryza
  misc_feature (1)..(143): Homolog of NCBI NO: 15234487 NR Description: putative transposase; protein id: At4g12260.1
  misc_feature (27)..(147): Homolog of NCBI NO: 15228784 NR Description: putative protein; protein id: At3g62520.1
  misc_feature (16)..(149): Homolog of NCBI NO: 37530608 NR Description: putative Tam3-like transposon protein [Oryza
MIKSSIEEELDSYIFDGQGHDDSIDTSDLEKYLADPILKVGKSNQHTFDILAWWKAHKEEYPVLGQLARDVLAMQVSTVASESSFSVGGRVLNPFRTRLDPTMVEALVCTKDWIAGARKGSKAKSVAIPNMVCEMEELEALDRNLSLEDEDLDDDHDDGPEASL

SEQ ID NO: 14971 - DNA, 489 bp, Zea mays subsp. mays
  misc_feature (1)..(489): Ceres Seq. ID no. 13622994
  misc_feature: MA Experiment ID: 20000534 Result: Up-regulated in Transcription
  misc_feature: MA Experiment 20000534 PARAMETER Experiment Name: Zm_Hybrid_Pollen_P Parameter: Age (day) Value: 8
  misc_feature: MA Experiment 20000534 PARAMETER Experiment Name: Zm_Hybrid_Pollen_P Parameter: Organism Value: Zea mays
  misc_feature: MA Experiment 20000534 PARAMETER Experiment Name: Zm_Hybrid_Pollen_P Parameter: Plant Line Value: 35A19
  misc_feature: MA Experiment 20000534 PARAMETER Experiment Name: Zm_Hybrid_Pollen_P Parameter: Tissue Value: Pollen vs. Aerial
attccctactaactgctaactggcagcagcttctggatcgggccatcggggtcggtggatctcactgttttcttttcctgctgcttgctgcatttttcgcagggtgtgggagctgagttgggaggaggactgctgctgcagccatgaaggccctcattctcgtcggaggcttcggcacccgcctgcgcccgctcacgctcagcgtccccaagccgctcgtggatttcggcaacaagcccatgatcctgcaccagatcgaggctctgaaggaagttggtgttacagaggttgtcctggccatcaattaccagcctgaggtcatgctcaactttctcaaggacttcgagagcaagcttggcatcaagatcacctgctcgcaggagacggagcccctcgggaccgcaggcccgctggccctggcccgcgacaagctcgccgacggatccggcgaccctttcttcgtgctcaacagcgacgtgatcagcgagt

SEQ ID NO: 14972 - protein, 115 aa, Zea mays subsp. mays
  peptide (1)..(115): Ceres Seq. ID no. 13622995
  misc_feature (2)..(114): Pfam Name: Nucleotidyl transferase Pfam Description: Nucleotidyl transferase
  misc_feature (1)..(114): Homolog of NCBI NO: 34902046 NR Description: COG1208, GCD1, Nucleoside-diphosphate-sugar
  misc_feature (1)..(114): Homolog of NCBI NO: 40253523 NR Description: putative GDP-mannose pyrophosphorylase [Oryza
  misc_feature (1)..(114): Homolog of NCBI NO: 34908274 NR Description: putative GDP-mannose pyrophosphorylase [Oryza
  misc_feature (1)..(114): Homolog of NCBI NO: 13509287 NR Description: GDP-mannose pyrophosphorylase [Arabidopsis
  misc_feature (1)..(114): Homolog of NCBI NO: 15225553 NR Description: GDP-mannose pyrophosphorylase [Arabidopsis
  misc_feature (1)..(114): Homolog of NCBI NO: 4103324 NR Description: GDP-mannose pyrophosphorylase [Solanum tuberosum]
  misc_feature (1)..(114): Homolog of NCBI NO: 14971013 NR Description: GDP-D-mannose pyrophosphorylase [Nicotiana
  misc_feature (1)..(114): Homolog of NCBI NO: 25317396 NR Description: GDP-mannose pyrophosphorylase like protein
  misc_feature (1)..(114): Homolog of NCBI NO: 15233308 NR Description: GDP-mannose pyrophosphorylase, putative
  misc_feature (1)..(114): Homolog of NCBI NO: 7448161 NR Description: probable mannose-1-phosphate guanylyltransferase
MKALILVGGFGTRLRPLTLSVPKPLVDFGNKPMILHQIEALKEVGVTEVVLAINYQPEVMLNFLKDFESKLGIKITCSQETEPLGTAGPLALARDKLADGSGDPFFVLNSDVISE

SEQ ID NO: 14973 - protein, 83 aa, Zea mays subsp. mays
  peptide (1)..(83): Ceres Seq. ID no. 13622996
  misc_feature (1)..(82): Pfam Name: Nucleotidyl transferase Pfam Description: Nucleotidyl transferase
  misc_feature (1)..(82): Homolog of NCBI NO: 7448161 NR Description: probable mannose-1-phosphate guanylyltransferase
  misc_feature (1)..(82): Homolog of NCBI NO: 34902046 NR Description: COG1208, GCD1, Nucleoside-diphosphate-sugar
  misc_feature (1)..(82): Homolog of NCBI NO: 40253523 NR Description: putative GDP-mannose pyrophosphorylase [Oryza
  misc_feature (1)..(82): Homolog of NCBI NO: 34908274 NR Description: putative GDP-mannose pyrophosphorylase [Oryza
  misc_feature (1)..(82): Homolog of NCBI NO: 13509287 NR Description: GDP-mannose pyrophosphorylase [Arabidopsis
  misc_feature (1)..(82): Homolog of NCBI NO: 15225553 NR Description: GDP-mannose pyrophosphorylase [Arabidopsis
  misc_feature (1)..(82): Homolog of NCBI NO: 4103324 NR Description: GDP-mannose pyrophosphorylase [Solanum tuberosum]
  misc_feature (1)..(82): Homolog of NCBI NO: 14971013 NR Description: GDP-D-mannose pyrophosphorylase [Nicotiana
  misc_feature (1)..(82): Homolog of NCBI NO: 25317396 NR Description: GDP-mannose pyrophosphorylase like protein
  misc_feature (1)..(82): Homolog of NCBI NO: 15233308 NR Description: GDP-mannose pyrophosphorylase, putative
MILHQIEALKEVGVTEVVLAINYQPEVMLNFLKDFESKLGIKITCSQETEPLGTAGPLALARDKLADGSGDPFFVLNSDVISE

SEQ ID NO: 14974 - DNA, 772 bp, Zea mays subsp. mays; identical to SEQ ID NO: 11644
  misc_feature (1)..(772): Ceres Seq. ID no. 12379466
  misc_feature: MA Experiment ID: 108523 Result: Up-regulated in Transcription
  misc_feature: MA Experiment 108523 PARAMETER Experiment Name: Zm_42deg_Heat_P Parameter: Age (day) Value: 8
  misc_feature: MA Experiment 108523 PARAMETER Experiment Name: Zm_42deg_Heat_P Parameter: Organism Value: Zea mays
  misc_feature: MA Experiment 108523 PARAMETER Experiment Name: Zm_42deg_Heat_P Parameter: Plant Line Value: 35A19
  misc_feature: MA Experiment 108523 PARAMETER Experiment Name: Zm_42deg_Heat_P Parameter: Temperature (deg C) Value: 42 vs. 22
  misc_feature: MA Experiment 108523 PARAMETER Experiment Name: Zm_42deg_Heat_P Parameter: Timepoint (hr) Value: 6
  misc_feature: MA Experiment 108523 PARAMETER Experiment Name: Zm_42deg_Heat_P Parameter: Tissue Value: Aerial

SEQ ID NO: 14975 - protein, 185 aa, Zea mays subsp. mays; identical to SEQ ID NO: 11645
  peptide (1)..(185): Ceres Seq. ID no. 12379467
  misc_feature (83)..(153): Pfam Name: Zn-finger in ubiquitin-hydrolases and other protein Pfam Description: Zn-finger in ubiquitin-hydrolases and other
  misc_feature (83)..(153): Pfam Name: Zn-finger in ubiquitin-hydrolases and other protein Pfam Description: Zn-finger in ubiquitin-hydrolases and other
  misc_feature (34)..(169): Homolog of NCBI NO: 26984073 NR Description: hypothetical protein [Arabidopsis thaliana]
  misc_feature (1)..(165): Homolog of NCBI NO: 34933421 NR Description: histone deacetylase 6 [Rattus norvegicus]
  misc_feature (59)..(160): Homolog of NCBI NO: 27882614 NR Description: Similar to histone deacetylase 6 [Xenopus laevis]
  misc_feature (59)..(165): Homolog of NCBI NO: 11360193 NR Description: hypothetical protein DKFZp566E044.1 - human
  misc_feature (59)..(165): Homolog of NCBI NO: 15489272 NR Description: histone deacetylase 6 [Homo sapiens]
  misc_feature (1)..(165): Homolog of NCBI NO: 34933421 NR Description: histone deacetylase 6 [Rattus norvegicus]
  misc_feature (59)..(165): Homolog of NCBI NO: 11360193 NR Description: hypothetical protein DKFZp566E044.1 - human
  misc_feature (1)..(165): Homolog of NCBI NO: 7513783 NR Description: probable histone deacetylase (EC 3.5.1.-) HDA2 -
  misc_feature (59)..(165): Homolog of NCBI NO: 13128864 NR Description: histone deacetylase 6 [Homo sapiens]
  misc_feature (59)..(165): Homolog of NCBI NO: 10720024 NR Description: Histone deacetylase 6 (HD6)
  misc_feature (1)..(165): Homolog of NCBI NO: 27370650 NR Description: histone deacetylase 6 [Mus musculus]
  misc_feature (59)..(165): Homolog of NCBI NO: 7108921 NR Description: GR AF-1 specific histone deacetylase [Homo
  misc_feature (59)..(165): Homolog of NCBI NO: 15489272 NR Description: histone deacetylase 6 [Homo sapiens]
  misc_feature (59)..(160): Homolog of NCBI NO: 27882614 NR Description: Similar to histone deacetylase 6 [Xenopus laevis]
  misc_feature (34)..(169): Homolog of NCBI NO: 26984073 NR Description: hypothetical protein [Arabidopsis thaliana]
  misc_feature (59)..(165): Homolog of NCBI NO: 7108921 NR Description: GR AF-1 specific histone deacetylase [Homo
  misc_feature (1)..(165): Homolog of NCBI NO: 27370650 NR Description: histone deacetylase 6 [Mus musculus]
  misc_feature (59)..(165): Homolog of NCBI NO: 10720024 NR Description: Histone deacetylase 6 (HD6)
  misc_feature (59)..(165): Homolog of NCBI NO: 13128864 NR Description: histone deacetylase 6 [Homo sapiens]
  misc_feature (1)..(165): Homolog of NCBI NO: 7513783 NR Description: probable histone deacetylase (EC 3.5.1.-) HDA2 -

SEQ ID NO: 14976 - protein, 121 aa, Zea mays subsp. mays; identical to SEQ ID NO: 11646
  peptide (1)..(121): Ceres Seq. ID no. 12379468
  misc_feature (19)..(89): Pfam Name: Zn-finger in ubiquitin-hydrolases and other protein Pfam Description: Zn-finger in ubiquitin-hydrolases and other
  misc_feature (19)..(89): Pfam Name: Zn-finger in ubiquitin-hydrolases and other protein Pfam Description: Zn-finger in ubiquitin-hydrolases and other
  misc_feature (1)..(105): Homolog of NCBI NO: 26984073 NR Description: hypothetical protein [Arabidopsis thaliana]
  misc_feature (1)..(101): Homolog of NCBI NO: 34933421 NR Description: histone deacetylase 6 [Rattus norvegicus]
  misc_feature (1)..(96): Homolog of NCBI NO: 27882614 NR Description: Similar to histone deacetylase 6 [Xenopus laevis]
  misc_feature (1)..(101): Homolog of NCBI NO: 11360193 NR Description: hypothetical protein DKFZp566E044.1 - human
  misc_feature (1)..(101): Homolog of NCBI NO: 15489272 NR Description: histone deacetylase 6 [Homo sapiens]
  misc_feature (1)..(101): Homolog of NCBI NO: 34933421 NR Description: histone deacetylase 6 [Rattus norvegicus]
  misc_feature (1)..(101): Homolog of NCBI NO: 11360193 NR Description: hypothetical protein DKFZp566E044.1 - human
  misc_feature (1)..(101): Homolog of NCBI NO: 7513783 NR Description: probable histone deacetylase (EC 3.5.1.-) HDA2 -
  misc_feature (1)..(101): Homolog of NCBI NO: 13128864 NR Description: histone deacetylase 6 [Homo sapiens]
  misc_feature (1)..(101): Homolog of NCBI NO: 10720024 NR Description: Histone deacetylase 6 (HD6)
  misc_feature (1)..(101): Homolog of NCBI NO: 27370650 NR Description: histone deacetylase 6 [Mus musculus]
  misc_feature (1)..(101): Homolog of NCBI NO: 7108921 NR Description: GR AF-1 specific histone deacetylase [Homo
  misc_feature (1)..(101): Homolog of NCBI NO: 15489272 NR Description: histone deacetylase 6 [Homo sapiens]
  misc_feature (1)..(96): Homolog of NCBI NO: 27882614 NR Description: Similar to histone deacetylase 6 [Xenopus laevis]
  misc_feature (1)..(105): Homolog of NCBI NO: 26984073 NR Description: hypothetical protein [Arabidopsis thaliana]
  misc_feature (1)..(101): Homolog of NCBI NO: 7108921 NR Description: GR AF-1 specific histone deacetylase [Homo
  misc_feature (1)..(101): Homolog of NCBI NO: 27370650 NR Description: histone deacetylase 6 [Mus musculus]
  misc_feature (1)..(101): Homolog of NCBI NO: 10720024 NR Description: Histone deacetylase 6 (HD6)
  misc_feature (1)..(101): Homolog of NCBI NO: 13128864 NR Description: histone deacetylase 6 [Homo sapiens]
  misc_feature (1)..(101): Homolog of NCBI NO: 7513783 NR Description: probable histone deacetylase (EC 3.5.1.-) HDA2 -

SEQ ID NO: 14977 - DNA, 845 bp, Zea mays subsp. mays
  misc_feature (1)..(845): Ceres Seq. ID no. 12469751
  misc_feature: MA Experiment ID: 108535 Result: Up-regulated in Transcription
  misc_feature: MA Experiment 108535 PARAMETER Experiment Name: Zm_Meristem_P Parameter: Age (day) Value: 8
  misc_feature: MA Experiment 108535 PARAMETER Experiment Name: Zm_Meristem_P Parameter: Organism Value: Zea mays
  misc_feature: MA Experiment 108535 PARAMETER Experiment Name: Zm_Meristem_P Parameter: Plant Line Value: 35A19
  misc_feature: MA Experiment 108535 PARAMETER Experiment Name: Zm_Meristem_P Parameter: Tissue Value: Root Meristem vs. Above Root Meristem
cattatgaatattgtagggagggaaggttcgtgatgcactttttcagattcttgaaaacgaggatgatgtaaccataaaacatggaacacaatcgagggagagtcggcgtgaagctacacaaggaatgcactcatctaaattttgcctgcatcctgccggagatactccctcagcatgcagattatttgatgcacttgtcagtctgtgtgttcctgttatagccagtgattacattgaacttccattcgaagatattatagactacaataaaatatcaatatttgttgggacaagcaaagcagtacagcctggatacttaacttcaactcttcgaagaatcagttcagagaggattctggagtaccagagggaaataaaaaaggtcagacattactttgagtacgaggatccgaatggaccagtgaatgagatttggcgccaagtatcccttaaagcaccactgataaagttgttgactaaccgcgacaaacggttgcttgaaagaggcaccaatggaacagattgttcgtgcatctgctctacaactccaactgacataactgcggccagttaaacaagatggaactcatcggcctacaagctctgtgcctatttcctgtgatcacattgcctgaattttttaggttgtacagttccatgtaaaacgagattaccagccactatttttgaacagtaaatttactaattaccacaatccttgagtttttactagatttgtataggaggagcggatagtcaggaaccttacagtgccctttttgtattgtaagttacattagctattttttgttgtcggcagttcgctgccctagtttttcgacct

SEQ ID NO: 14978 - protein, 149 aa, Zea mays subsp. mays
  peptide (1)..(149): Ceres Seq. ID no. 12469752
  misc_feature (1)..(84): Pfam Name: Exostosin family Pfam Description: Exostosin family
  misc_feature (1)..(141): Homolog of NCBI NO: 34899802 NR Description: OJ1092_A07.9 [Oryza sativa (japonica
  misc_feature (1)..(147): Homolog of NCBI NO: 30686300 NR Description: Exostosin family [Arabidopsis thaliana]
  misc_feature (1)..(139): Homolog of NCBI NO: 15241619 NR Description: Exostosin family; protein id: At5g44930.1, by cDNA: gi_15081732 [Arabidopsis thaliana] gb|AAC61825.1~gene_id:K21C13.11~strong similarity to unknown
  misc_feature (1)..(85): Homolog of NCBI NO: 25408349 NR Description: hypothetical protein At2g35100 [imported] - thaliana >gi|3668093|gb|AAC61825.1| unknown protein [Arabidopsis
  misc_feature (1)..(124): Homolog of NCBI NO: 22330483 NR Description: Exostosin family; protein id: At1g67410.1
  misc_feature (1)..(124): Homolog of NCBI NO: 19386797 NR Description: OJ1485_B09.5 [Oryza sativa (japonica
  misc_feature (1)..(137): Homolog of NCBI NO: 18399194 NR Description: Exostosin family; protein id: At1g34270.1, by cDNA: gi_15450927, supported by cDNA: gi_20148710 [Arabidopsis
  misc_feature (1)..(123): Homolog of NCBI NO: 15230692 NR Description: Exostosin family; protein id: At3g45400.1
  misc_feature (1)..(110): Homolog of NCBI NO: 7487224 NR Description: hypothetical protein T1F15.13 - Arabidopsis
  misc_feature (1)..(138): Homolog of NCBI NO: 15237870 NR Description: Exostosin family; protein id: At5g16890.1
MHSSKFCLHPAGDTPSACRLFDALVSLCVPVIASDYIELPFEDIIDYNKISIFVGTSKAVQPGYLTSTLRRISSERILEYQREIKKVRHYFEYEDPNGPVNEIWRQVSLKAPLIKLLTNRDKRLLERGTNGTDCSCICSTTPTDITAAS

SEQ ID NO: 14979 - DNA, 927 bp, Zea mays subsp. mays
  misc_feature (1)..(927): Ceres Seq. ID no. 12469147
  misc_feature: MA Experiment ID: 108522 Result: Down-regulated in Transcription
  misc_feature: MA Experiment 108522 PARAMETER Experiment Name: Zm_42deg_Heat_P Parameter: Age (day) Value: 8
  misc_feature: MA Experiment 108522 PARAMETER Experiment Name: Zm_42deg_Heat_P Parameter: Organism Value: Zea mays
  misc_feature: MA Experiment 108522 PARAMETER Experiment Name: Zm_42deg_Heat_P Parameter: Plant Line Value: 35A19
  misc_feature: MA Experiment 108522 PARAMETER Experiment Name: Zm_42deg_Heat_P Parameter: Temperature (deg C) Value: 42 vs. 22
  misc_feature: MA Experiment 108522 PARAMETER Experiment Name: Zm_42deg_Heat_P Parameter: Timepoint (hr) Value: 1
  misc_feature: MA Experiment 108522 PARAMETER Experiment Name: Zm_42deg_Heat_P Parameter: Tissue Value: Aerial
  misc_feature: MA Experiment ID: 108535 Result: Up-regulated in Transcription
  misc_feature: MA Experiment 108535 PARAMETER Experiment Name: Zm_Meristem_P Parameter: Age (day) Value: 8
  misc_feature: MA Experiment 108535 PARAMETER Experiment Name: Zm_Meristem_P Parameter: Organism Value: Zea mays
  misc_feature: MA Experiment 108535 PARAMETER Experiment Name: Zm_Meristem_P Parameter: Plant Line Value: 35A19
  misc_feature: MA Experiment 108535 PARAMETER Experiment Name: Zm_Meristem_P Parameter: Tissue Value: Root Meristem vs. Above Root Meristem
tttcggtgaatgccagtgcacaattctgtggtgttgctgagatgattggaccagtggactttgagaaaagtgtggattactggcagcaagataagtggactggtcaattccctgtgaagtggcacatagtgaaggatgttcccaataatcttttccgacatataattcttgaaaacaacgacaataaacctgtaacaaacagcagagatacacaggaggtgaaactagagcaaggaatggagatgctgaagatctttaagaaccatgatgatgatgcatcaatccttgacgactttgagttttacgaggagcgtgagaaagcgctgcaggaaaataaggcacgcctgcatcagcaacatctacccagttctattgttattgagcccaagaaacccttgactgcacccagtgacctcgtgggccatatcaccaagagttttgctgaggctgtgcggcttggtgaggccaagactgtaagccatttgactgagaaggtttctgggggtgatccgtctattcctgtgaagcatgttgaagttaagcagagtggtttatcttaggaactcttgatcgatgtgaatgaactgtaccaaaaattcacccatacgcttcctgatcaaaatgtcgggaatgcatatgcagatggatgatgatgaaacccaagacatcggcaaaagcatgcatgcacactagggtaggtntttgccaaccttggaagcatagtttcttgaatagtttctctctttttttcttctttcttcctagtattttctccccttctcttcgcatcatatgatgattccttagtgtctagcctcaaggagagttgctgtttttgtgtaagcctctgtaagtttcctgttccatcacatatgagtaaggcctttttgtttctttttatttaagtaaaagatccatcttttatgt

SEQ ID NO: 14980 - protein, 185 aa, Zea mays subsp. mays
  peptide (1)..(185): Ceres Seq. ID no. 12469148
  misc_feature (1)..(88): Pfam Name: YT521-B-like family Pfam Description: YT521-B-like family
  misc_feature (1)..(182): Homolog of NCBI NO: 15795138 NR Description: gb|AAF35955.1~gene_id:MGH6.21~strong similarity
  misc_feature (1)..(182): Homolog of NCBI NO: 30682438 NR Description: expressed protein [Arabidopsis thaliana]
  misc_feature (1)..(169): Homolog of NCBI NO: 38636667 NR Description: putative Rubisco subunit binding-protein beta
  misc_feature (1)..(156): Homolog of NCBI NO: 38567895 NR Description: OSJNBa0060N03.15 [Oryza sativa (japonica
  misc_feature (1)..(114): Homolog of NCBI NO: 18087662 NR Description: putative RNA-binding protein [Oryza sativa]
  misc_feature (1)..(152): Homolog of NCBI NO: 15217778 NR Description: unknown protein; protein id: At1g27960.1
  misc_feature (1)..(175): Homolog of NCBI NO: 15912287 NR Description: AT5g61020/maf19_20 [Arabidopsis thaliana]
  misc_feature (1)..(175): Homolog of NCBI NO: 30697466 NR Description: expressed protein [Arabidopsis thaliana] contains similarity to unknown [Arabidopsis thaliana] >gi|17529254|gb|AAL38854.1| unknown
  misc_feature (1)..(175): Homolog of NCBI NO: 30697464 NR Description: expressed protein [Arabidopsis thaliana]
  misc_feature (1)..(114): Homolog of NCBI NO: 29725575 NR Description: putative RNA-binding protein [Avena sativa]
SVNASAQFCGVAEMIGPVDFEKSVDYWQQDKWTGQFPVKWHIVKDVPNNLFRHIILENNDNKPVTNSRDTQEVKLEQGMEMLKIFKNHDDDASILDDFEFYEEREKALQENKARLHQQHLPSSIVIEPKKPLTAPSDLVGHITKSFAEAVRLGEAKTVSHLTEKVSGGDPSIPVKHVEVKQSGLS

SEQ ID NO: 14981 - protein, 172 aa, Zea mays subsp. mays
  peptide (1)..(172): Ceres Seq. ID no. 12469149
  misc_feature (1)..(75): Pfam Name: YT521-B-like family Pfam Description: YT521-B-like family
  misc_feature (1)..(169): Homolog of NCBI NO: 15795138 NR Description: gb|AAF35955.1~gene_id:MGH6.21~strong similarity
  misc_feature (1)..(169): Homolog of NCBI NO: 30682438 NR Description: expressed protein [Arabidopsis thaliana]
  misc_feature (1)..(156): Homolog of NCBI NO: 38636667 NR Description: putative Rubisco subunit binding-protein beta
  misc_feature (1)..(143): Homolog of NCBI NO: 38567895 NR Description: OSJNBa0060N03.15 [Oryza sativa (japonica
  misc_feature (1)..(101): Homolog of NCBI NO: 18087662 NR Description: putative RNA-binding protein [Oryza sativa]
  misc_feature (1)..(139): Homolog of NCBI NO: 15217778 NR Description: unknown protein; protein id: At1g27960.1
  misc_feature (1)..(162): Homolog of NCBI NO: 15912287 NR Description: AT5g61020/maf19_20 [Arabidopsis thaliana]
  misc_feature (1)..(162): Homolog of NCBI NO: 30697466 NR Description: expressed protein [Arabidopsis thaliana] contains similarity to unknown [Arabidopsis thaliana] >gi|17529254|gb|AAL38854.1| unknown
  misc_feature (1)..(162): Homolog of NCBI NO: 30697464 NR Description: expressed protein [Arabidopsis thaliana]
  misc_feature (1)..(101): Homolog of NCBI NO: 29725575 NR Description: putative RNA-binding protein [Avena sativa]
MIGPVDFEKSVDYWQQDKWTGQFPVKWHIVKDVPNNLFRHIILENNDNKPVTNSRDTQEVKLEQGMEMLKIFKNHDDDASILDDFEFYEEREKALQENKARLHQQHLPSSIVIEPKKPLTAPSDLVGHITKSFAEAVRLGEAKTVSHLTEKVSGGDPSIPVKHVEVKQSGLS

SEQ ID NO: 14982 - protein, 107 aa, Zea mays subsp. mays
  peptide (1)..(107): Ceres Seq. ID no. 12469150
  misc_feature (1)..(104): Homolog of NCBI NO: 15795138 NR Description: gb|AAF35955.1~gene_id:MGH6.21~strong similarity
  misc_feature (1)..(104): Homolog of NCBI NO: 30682438 NR Description: expressed protein [Arabidopsis thaliana]
  misc_feature (1)..(91): Homolog of NCBI NO: 38636667 NR Description: putative Rubisco subunit binding-protein beta
  misc_feature (1)..(78): Homolog of NCBI NO: 38567895 NR Description: OSJNBa0060N03.15 [Oryza sativa (japonica
  misc_feature (1)..(36): Homolog of NCBI NO: 18087662 NR Description: putative RNA-binding protein [Oryza sativa]
  misc_feature (1)..(74): Homolog of NCBI NO: 15217778 NR Description: unknown protein; protein id: At1g27960.1
  misc_feature (1)..(97): Homolog of NCBI NO: 15912287 NR Description: AT5g61020/maf19_20 [Arabidopsis thaliana]
  misc_feature (1)..(97): Homolog of NCBI NO: 30697464 NR Description: expressed protein [Arabidopsis thaliana]
  misc_feature (1)..(97): Homolog of NCBI NO: 30697466 NR Description: expressed protein [Arabidopsis thaliana] contains similarity to unknown [Arabidopsis thaliana] >gi|17529254|gb|AAL38854.1| unknown
  misc_feature (1)..(36): Homolog of NCBI NO: 29725575 NR Description: putative RNA-binding protein [Avena sativa]
MEMLKIFKNHDDDASILDDFEFYEEREKALQENKARLHQQHLPSSIVIEPKKPLTAPSDLVGHITKSFAEAVRLGEAKTVSHLTEKVSGGDPSIPVKHVEVKQSGLS

SEQ ID NO: 14983 - DNA, 1493 bp, Zea mays subsp. mays; identical to SEQ ID NO: 3626
  misc_feature (1)..(1493): Ceres Seq. ID no. 12469735
  misc_feature: MA Experiment ID: 108544 Result: Down-regulated in Transcription
  misc_feature: MA Experiment ID: 20000492 Result: Up-regulated in Transcription
  misc_feature: MA Experiment 20000492 PARAMETER Experiment Name: Zm_Hybrid_Seed_Dev_P Parameter: DAP Value: 12
  misc_feature: MA Experiment 20000492 PARAMETER Experiment Name: Zm_Hybrid_Seed_Dev_P Parameter: Organism Value: Zea mays
  misc_feature: MA Experiment 20000492 PARAMETER Experiment Name: Zm_Hybrid_Seed_Dev_P Parameter: Plant Line Value: 35A19
  misc_feature: MA Experiment 20000492 PARAMETER Experiment Name: Zm_Hybrid_Seed_Dev_P Parameter: Tissue Value: Fert Kernel vs. Unfert Floret

SEQ ID NO: 14984 - protein, 362 aa, Zea mays subsp. mays; identical to SEQ ID NO: 3627
  peptide (1)..(362): Ceres Seq. ID no. 12469736
  misc_feature (74)..(208): Pfam Name: ATPase family associated with various cellular Pfam Description: ATPase family associated with various cellular
  misc_feature (1)..(361): Homolog of NCBI NO: 10798790 NR Description: replication factor C 36kDa subunit [Oryza sativa
  misc_feature (4)..(361): Homolog of NCBI NO: 15223967 NR Description: putative replication factor C; protein id: supported by cDNA: gi_17529331 [Arabidopsis thaliana]
  misc_feature (14)..(361): Homolog of NCBI NO: 20841441 NR Description: replication factor C (activator 1) 5 [Mus >gi|12847646|dbj|BAB27652.1| unnamed protein product [Mus
  misc_feature (37)..(361): Homolog of NCBI NO: 6677723 NR Description: replication factor C (activator 1) 5, 36.5kDa; factor C (activator 1) 5 (36.5kD) [Homo sapiens] Activator 1 36 kDa subunit (Replication factor C 36 kDa subunit)
  misc_feature (27)..(361): Homolog of NCBI NO: 27882432 NR Description: Similar to replication factor C (activator 1) 5
  misc_feature (47)..(361): Homolog of NCBI NO: 23271821 NR Description: Similar to replication factor C (activator 1) 5,
  misc_feature (10)..(340): Homolog of NCBI NO: 34872605 NR Description: similar to replication factor C 5 isoform 1; RFC, kD subunit; activator 1 36 kDa subunit; A1 36 kDa subunit [Rattus
  misc_feature (27)..(349): Homolog of NCBI NO: 13431787 NR Description: Activator 1 40 kDa subunit (Replication factor C kDa subunit) (Replication factor C3) >gi|11278371|pir||T43410
  misc_feature (40)..(350): Homolog of NCBI NO: 19921076 NR Description: CG5313-PA [Drosophila melanogaster] replication factor C subunit 3 [Drosophila melanogaster]
  misc_feature (27)..(347): Homolog of NCBI NO: 30913228 NR Description: Activator 1 subunit 3 (Replication factor C

SEQ ID NO: 14985 - protein, 353 aa, Zea mays subsp. mays; identical to SEQ ID NO: 3628
  peptide (1)..(353): Ceres Seq. ID no. 12469737
  misc_feature (65)..(199): Pfam Name: ATPase family associated with various cellular Pfam Description: ATPase family associated with various cellular
  misc_feature (1)..(352): Homolog of NCBI NO: 10798790 NR Description: replication factor C 36kDa subunit [Oryza sativa
  misc_feature (1)..(352): Homolog of NCBI NO: 15223967 NR Description: putative replication factor C; protein id: supported by cDNA: gi_17529331 [Arabidopsis thaliana]
  misc_feature (5)..(352): Homolog of NCBI NO: 20841441 NR Description: replication factor C (activator 1) 5 [Mus >gi|12847646|dbj|BAB27652.1| unnamed protein product [Mus
  misc_feature (28)..(352): Homolog of NCBI NO: 6677723 NR Description: replication factor C (activator 1) 5, 36.5kDa; factor C (activator 1) 5 (36.5kD) [Homo sapiens] Activator 1 36 kDa subunit (Replication factor C 36 kDa subunit)
  misc_feature (18)..(352): Homolog of NCBI NO: 27882432 NR Description: Similar to replication factor C (activator 1) 5
  misc_feature (38)..(352): Homolog of NCBI NO: 23271821 NR Description: Similar to replication factor C (activator 1) 5,
  misc_feature (1)..(331): Homolog of NCBI NO: 34872605 NR Description: similar to replication factor C 5 isoform 1; RFC, kD subunit; activator 1 36 kDa subunit; A1 36 kDa subunit [Rattus
  misc_feature (18)..(340): Homolog of NCBI NO: 13431787 NR Description: Activator 1 40 kDa subunit (Replication factor C kDa subunit) (Replication factor C3) >gi|11278371|pir||T43410
  misc_feature (31)..(341): Homolog of NCBI NO: 19921076 NR Description: CG5313-PA [Drosophila melanogaster] replication factor C subunit 3 [Drosophila melanogaster]
  misc_feature (18)..(338): Homolog of NCBI NO: 30913228 NR Description: Activator 1 subunit 3 (Replication factor C

SEQ ID NO: 14986 - protein, 259 aa, Zea mays subsp. mays; identical to SEQ ID NO: 3629
  peptide (1)..(259): Ceres Seq. ID no. 12469738
  misc_feature (1)..(105): Pfam Name: ATPase family associated with various cellular Pfam Description: ATPase family associated with various cellular
  misc_feature (1)..(258): Homolog of NCBI NO: 10798790 NR Description: replication factor C 36kDa subunit [Oryza sativa
  misc_feature (1)..(258): Homolog of NCBI NO: 15223967 NR Description: putative replication factor C; protein id: supported by cDNA: gi_17529331 [Arabidopsis thaliana]
  misc_feature (1)..(258): Homolog of NCBI NO: 20841441 NR Description: replication factor C (activator 1) 5 [Mus >gi|12847646|dbj|BAB27652.1| unnamed protein product [Mus
  misc_feature (1)..(258): Homolog of NCBI NO: 6677723 NR Description: replication factor C (activator 1) 5, 36.5kDa; factor C (activator 1) 5 (36.5kD) [Homo sapiens] Activator 1 36 kDa subunit (Replication factor C 36 kDa subunit)
  misc_feature (1)..(258): Homolog of NCBI NO: 27882432 NR Description: Similar to replication factor C (activator 1) 5
  misc_feature (1)..(258): Homolog of NCBI NO: 23271821 NR Description: Similar to replication factor C (activator 1) 5,
  misc_feature (1)..(237): Homolog of NCBI NO: 34872605 NR Description: similar to replication factor C 5 isoform 1; RFC, kD subunit; activator 1 36 kDa subunit; A1 36 kDa subunit [Rattus
  misc_feature (1)..(246): Homolog of NCBI NO: 13431787 NR Description: Activator 1 40 kDa subunit (Replication factor C kDa subunit) (Replication factor C3) >gi|11278371|pir||T43410
  misc_feature (1)..(247): Homolog of NCBI NO: 19921076 NR Description: CG5313-PA [Drosophila melanogaster] replication factor C subunit 3 [Drosophila melanogaster]
  misc_feature (1)..(244): Homolog of NCBI NO: 30913228 NR Description: Activator 1 subunit 3 (Replication factor C

SEQ ID NO: 14987 - DNA, 917 bp, Zea mays subsp. mays; identical to SEQ ID NO: 8100
  misc_feature (1)..(917): Ceres Seq. ID no. 13493285
  misc_feature: MA Experiment ID: 108530 Result: Down-regulated in Transcription
  misc_feature: MA Experiment 108530 PARAMETER Experiment Name: Zm_Imbibed_Seeds_P Parameter: Age (day) Value: 6 vs. 2
  misc_feature: MA Experiment 108530 PARAMETER Experiment Name: Zm_Imbibed_Seeds_P Parameter: Organism Value: Zea mays
  misc_feature: MA Experiment 108530 PARAMETER Experiment Name: Zm_Imbibed_Seeds_P Parameter: Plant Line Value: 35A19
  misc_feature: MA Experiment 108530 PARAMETER Experiment Name: Zm_Imbibed_Seeds_P Parameter: Tissue Value: Aerial vs. Embryo
  misc_feature: MA Experiment ID: 108535 Result: Up-regulated in Transcription
  misc_feature: MA Experiment 108535 PARAMETER Experiment Name: Zm_Meristem_P Parameter: Age (day) Value: 8
  misc_feature: MA Experiment 108535 PARAMETER Experiment Name: Zm_Meristem_P Parameter: Organism Value: Zea mays
  misc_feature: MA Experiment 108535 PARAMETER Experiment Name: Zm_Meristem_P Parameter: Plant Line Value: 35A19
  misc_feature: MA Experiment 108535 PARAMETER Experiment Name: Zm_Meristem_P Parameter: Tissue Value: Root Meristem vs. Above Root Meristem
  misc_feature: MA Experiment ID: 108544 Result: Down-regulated in Transcription
  misc_feature: MA Experiment ID: 20000478 Result: Down-regulated in Transcription
  misc_feature: MA Experiment 20000478 PARAMETER Experiment Name: Zm_5mM_SA_P Parameter: Age (day) Value: 11
  misc_feature: MA Experiment 20000478 PARAMETER Experiment Name: Zm_5mM_SA_P Parameter: Organism Value: Zea mays
  misc_feature: MA Experiment 20000478 PARAMETER Experiment Name: Zm_5mM_SA_P Parameter: Plant Line Value: 35A19
  misc_feature: MA Experiment 20000478 PARAMETER Experiment Name: Zm_5mM_SA_P Parameter: Timepoint (hr) Value: 72
  misc_feature: MA Experiment 20000478 PARAMETER Experiment Name: Zm_5mM_SA_P Parameter: Tissue Value: Aerial
  misc_feature: MA Experiment 20000478 PARAMETER Experiment Name: Zm_5mM_SA_P Parameter: Treatment Value: 5mM SA vs. No Treatment
  misc_feature: MA Experiment ID: 20000487 Result: Up-regulated in Transcription
  misc_feature: MA Experiment 20000487 PARAMETER Experiment Name: Zm_50mM_NH4NO3_L_to_H_P Parameter: Organism Value: Zea mays
  misc_feature: MA Experiment 20000487 PARAMETER Experiment Name: Zm_50mM_NH4NO3_L_to_H_P Parameter: Timepoint (hr) Value: 4
  misc_feature: MA Experiment 20000487 PARAMETER Experiment Name: Zm_50mM_NH4NO3_L_to_H_P Parameter: Tissue Value: Leaves
  misc_feature: MA Experiment 20000487 PARAMETER Experiment Name: Zm_50mM_NH4NO3_L_to_H_P Parameter: Treatment Value: 50mM NH4NO3 vs. 100mM Mannitol
  misc_feature: MA Experiment ID: 20001606 Result: Up-regulated in Transcription
  misc_feature: MA Experiment 20001606 PARAMETER Experiment Name: Zm_50ppm_KNO3_L-to-H_P Parameter: Age (day) Value: 19
  misc_feature: MA Experiment 20001606 PARAMETER Experiment Name: Zm_50ppm_KNO3_L-to-H_P Parameter: Organism Value: Zea mays
  misc_feature: MA Experiment 20001606 PARAMETER Experiment Name: Zm_50ppm_KNO3_L-to-H_P Parameter: Plant Line Value: 35A19
  misc_feature: MA Experiment 20001606 PARAMETER Experiment Name: Zm_50ppm_KNO3_L-to-H_P Parameter: Timepoint (hr) Value: 8
  misc_feature: MA Experiment 20001606 PARAMETER Experiment Name: Zm_50ppm_KNO3_L-to-H_P Parameter: Tissue Value: Shoots
  misc_feature: MA Experiment 20001606 PARAMETER Experiment Name: Zm_50ppm_KNO3_L-to-H_P Parameter: Treatment Value: 50ppm KNO3 vs. 50ppm KCl
  misc_feature: MA Experiment ID: 20001612 Result: Up-regulated in Transcription
  misc_feature: MA Experiment 20001612 PARAMETER Experiment Name: Zm_50ppm_KNO3_L-to-H_P Parameter: Age (day) Value: 19
  misc_feature: MA Experiment 20001612 PARAMETER Experiment Name: Zm_50ppm_KNO3_L-to-H_P Parameter: Organism Value: Zea mays
  misc_feature: MA Experiment 20001612 PARAMETER Experiment Name: Zm_50ppm_KNO3_L-to-H_P Parameter: Plant Line Value: 35A19
  misc_feature: MA Experiment 20001612 PARAMETER Experiment Name: Zm_50ppm_KNO3_L-to-H_P Parameter: Timepoint (hr) Value: 8
  misc_feature: MA Experiment 20001612 PARAMETER Experiment Name: Zm_50ppm_KNO3_L-to-H_P Parameter: Tissue Value: Roots
  misc_feature: MA Experiment 20001612 PARAMETER Experiment Name: Zm_50ppm_KNO3_L-to-H_P Parameter: Treatment Value: 50ppm KNO3 vs. 50ppm KCl

SEQ ID NO: 14988 - protein, 228 aa, Zea mays subsp. mays; identical to SEQ ID NO: 8101
  peptide (1)..(228): Ceres Seq. ID no. 13493286
  misc_feature (42)..(228): Homolog of NCBI NO: 34897628 NR Description: cytoplasmic ribosomal protein L18 [Oryza sativa]
  misc_feature (42)..(228): Homolog of NCBI NO: 34393858 NR Description: putative cytoplasmic ribosomal protein L18 [Oryza
  misc_feature (42)..(228): Homolog of NCBI NO: 606970 NR Description: cytoplasmic ribosomal protein L18
  misc_feature (42)..(228): Homolog of NCBI NO: 15241061 NR Description: 60S ribosomal protein L18 (RPL18C) [Arabidopsis >gi|15810153|gb|AAL07220.1| putative 60S ribosomal protein thaliana] >gi|21689771|gb|AAM67529.1| putative 60S ribosomal
  misc_feature (42)..(228): Homolog of NCBI NO: 15230011 NR Description: 60S ribosomal protein L18 (RPL18B) [Arabidopsis >gi|21431838|sp|P42791|RL18_ARATH 60S ribosomal protein L18 putative 60S ribosomal protein L18 [Arabidopsis thaliana]
  misc_feature (45)..(228): Homolog of NCBI NO: 6094021 NR Description: 60S RIBOSOMAL PROTEIN L18
  misc_feature (43)..(228): Homolog of NCBI NO: 7440855 NR Description: ribosomal protein L18, cytosolic - Arabidopsis
  misc_feature (42)..(204): Homolog of NCBI NO: 28798549 NR Description: 60S ribosomal protein [Medicago sativa]
  misc_feature (42)..(227): Homolog of NCBI NO: 28630356 NR Description: ribosomal protein L18 [Petromyzon marinus]
  misc_feature (42)..(227): Homolog of NCBI NO: 4506607 NR Description: ribosomal protein L18; 60S ribosomal protein L18 sapiens] >gi|548749|sp|Q07020|RL18_HUMAN 60S ribosomal protein
  misc_feature (42)..(228): Homolog of NCBI NO: 34897628 NR Description: cytoplasmic ribosomal protein L18 [Oryza sativa]
  misc_feature (42)..(228): Homolog of NCBI NO: 34393858 NR Description: putative cytoplasmic ribosomal protein L18 [Oryza
  misc_feature (42)..(228): Homolog of NCBI NO: 606970 NR Description: cytoplasmic ribosomal protein L18
  misc_feature (42)..(228): Homolog of NCBI NO: 15241061 NR Description: 60S ribosomal protein L18 (RPL18C) [Arabidopsis >gi|15810153|gb|AAL07220.1| putative 60S ribosomal protein thaliana] >gi|21689771|gb|AAM67529.1| putative 60S ribosomal
  misc_feature (42)..(228): Homolog of NCBI NO: 15230011 NR Description: 60S ribosomal protein L18 (RPL18B) [Arabidopsis >gi|21431838|sp|P42791|RL18_ARATH 60S ribosomal protein L18 putative 60S ribosomal protein L18 [Arabidopsis thaliana]
  misc_feature (45)..(228): Homolog of NCBI NO: 6094021 NR Description: 60S RIBOSOMAL PROTEIN L18
  misc_feature (43)..(228): Homolog of NCBI NO: 7440855 NR Description: ribosomal protein L18, cytosolic - Arabidopsis
  misc_feature (42)..(204): Homolog of NCBI NO: 28798549 NR Description: 60S ribosomal protein [Medicago sativa]
  misc_feature (42)..(227): Homolog of NCBI NO: 28630356 NR Description: ribosomal protein L18 [Petromyzon marinus]
  misc_feature (42)..(227): Homolog of NCBI NO: 4506607 NR Description: ribosomal protein L18; 60S ribosomal protein L18 sapiens] >gi|548749|sp|Q07020|RL18_HUMAN 60S ribosomal protein

SEQ ID NO: 14989 - protein, 187 aa, Zea mays subsp. mays; identical to SEQ ID NO: 8102
  peptide (1)..(187): Ceres Seq. ID no. 13493287
  misc_feature (1)..(187): Homolog of NCBI NO: 15230011 NR Description: 60S ribosomal protein L18 (RPL18B) [Arabidopsis >gi|21431838|sp|P42791|RL18_ARATH 60S ribosomal protein L18 putative 60S ribosomal protein L18 [Arabidopsis thaliana]
  misc_feature (4)..(187): Homolog of NCBI NO: 6094021 NR Description: 60S RIBOSOMAL PROTEIN L18
  misc_feature (2)..(187): Homolog of NCBI NO: 7440855 NR Description: ribosomal protein L18, cytosolic - Arabidopsis
  misc_feature (1)..(163): Homolog of NCBI NO: 28798549 NR Description: 60S ribosomal protein [Medicago sativa]
  misc_feature (1)..(186): Homolog of NCBI NO: 28630356 NR Description: ribosomal protein L18 [Petromyzon marinus]
  misc_feature (1)..(186): Homolog of NCBI NO: 4506607 NR Description: ribosomal protein L18; 60S ribosomal protein L18 sapiens] >gi|548749|sp|Q07020|RL18_HUMAN 60S ribosomal protein
  misc_feature (1)..(187): Homolog of NCBI NO: 34897628 NR Description: cytoplasmic ribosomal protein L18 [Oryza sativa]
  misc_feature (1)..(187): Homolog of NCBI NO: 34393858 NR Description: putative cytoplasmic ribosomal protein L18 [Oryza
  misc_feature (1)..(187): Homolog of NCBI NO: 606970 NR Description: cytoplasmic ribosomal protein L18
  misc_feature (1)..(187): Homolog of NCBI NO: 15241061 NR Description: 60S ribosomal protein L18 (RPL18C) [Arabidopsis >gi|15810153|gb|AAL07220.1| putative 60S ribosomal protein thaliana] >gi|21689771|gb|AAM67529.1| putative 60S ribosomal
  misc_feature (1)..(187): Homolog of NCBI NO: 34897628 NR Description: cytoplasmic ribosomal protein L18 [Oryza sativa]
  misc_feature (1)..(187): Homolog of NCBI NO: 34393858 NR Description: putative cytoplasmic ribosomal protein L18 [Oryza
  misc_feature (1)..(187): Homolog of NCBI NO: 606970 NR Description: cytoplasmic ribosomal protein L18
  misc_feature (1)..(187): Homolog of NCBI NO: 15241061 NR Description: 60S ribosomal protein L18 (RPL18C) [Arabidopsis >gi|15810153|gb|AAL07220.1| putative 60S ribosomal protein thaliana] >gi|21689771|gb|AAM67529.1| putative 60S ribosomal
  misc_feature (1)..(187): Homolog of NCBI NO: 15230011 NR Description: 60S ribosomal protein L18 (RPL18B) [Arabidopsis >gi|21431838|sp|P42791|RL18_ARATH 60S ribosomal protein L18 putative 60S ribosomal protein L18 [Arabidopsis thaliana]
  misc_feature (4)..(187): Homolog of NCBI NO: 6094021 NR Description: 60S RIBOSOMAL PROTEIN L18
  misc_feature (2)..(187): Homolog of NCBI NO: 7440855 NR Description: ribosomal protein L18, cytosolic - Arabidopsis
  misc_feature (1)..(163): Homolog of NCBI NO: 28798549 NR Description: 60S ribosomal protein [Medicago sativa]
  misc_feature (1)..(186): Homolog of NCBI NO: 28630356 NR Description: ribosomal protein L18 [Petromyzon marinus]
  misc_feature (1)..(186): Homolog of NCBI NO: 4506607 NR Description: ribosomal protein L18; 60S ribosomal protein L18 sapiens] >gi|548749|sp|Q07020|RL18_HUMAN 60S ribosomal protein

SEQ ID NO: 14990 - protein, 134 aa, Zea mays subsp. mays; identical to SEQ ID NO: 8103
  peptide (1)..(134): Ceres Seq. ID no. 13493288
  misc_feature (1)..(134): Homolog of NCBI NO: 34897628 NR Description: cytoplasmic ribosomal protein L18 [Oryza sativa]
  misc_feature (1)..(134): Homolog of NCBI NO: 34393858 NR Description: putative cytoplasmic ribosomal protein L18 [Oryza
  misc_feature (1)..(134): Homolog of NCBI NO: 606970 NR Description: cytoplasmic ribosomal protein L18
  misc_feature (1)..(134): Homolog of NCBI NO: 15241061 NR Description: 60S ribosomal protein L18 (RPL18C) [Arabidopsis >gi|15810153|gb|AAL07220.1| putative 60S ribosomal protein thaliana] >gi|21689771|gb|AAM67529.1| putative 60S ribosomal
  misc_feature (1)..(134): Homolog of NCBI NO: 15230011 NR Description: 60S ribosomal protein L18 (RPL18B) [Arabidopsis >gi|21431838|sp|P42791|RL18_ARATH 60S ribosomal protein L18 putative 60S ribosomal protein L18 [Arabidopsis thaliana]
  misc_feature (1)..(134): Homolog of NCBI NO: 6094021 NR Description: 60S RIBOSOMAL PROTEIN L18
  misc_feature (1)..(134): Homolog of NCBI NO: 7440855 NR Description: ribosomal protein L18, cytosolic - Arabidopsis
  misc_feature (1)..(110): Homolog of NCBI NO: 28798549 NR Description: 60S ribosomal protein [Medicago sativa]
  misc_feature (1)..(133): Homolog of NCBI NO: 28630356 NR Description: ribosomal protein L18 [Petromyzon marinus]
  misc_feature (1)..(133): Homolog of NCBI NO: 4506607 NR Description: ribosomal protein L18; 60S ribosomal protein L18 sapiens] >gi|548749|sp|Q07020|RL18_HUMAN 60S ribosomal protein
  misc_feature (1)..(134): Homolog of NCBI NO: 15230011 NR Description: 60S ribosomal protein L18 (RPL18B) [Arabidopsis >gi|21431838|sp|P42791|RL18_ARATH 60S ribosomal protein L18 putative 60S ribosomal protein L18 [Arabidopsis thaliana]
  misc_feature (1)..(134): Homolog of NCBI NO: 6094021 NR Description: 60S RIBOSOMAL PROTEIN L18
  misc_feature (1)..(134): Homolog of NCBI NO: 7440855 NR Description: ribosomal protein L18, cytosolic - Arabidopsis
  misc_feature (1)..(110): Homolog of NCBI NO: 28798549 NR Description: 60S ribosomal protein [Medicago sativa]
  misc_feature (1)..(133): Homolog of NCBI NO: 28630356 NR Description: ribosomal protein L18 [Petromyzon marinus]
  misc_feature (1)..(133): Homolog of NCBI NO: 4506607 NR Description: ribosomal protein L18; 60S ribosomal protein L18 sapiens] >gi|548749|sp|Q07020|RL18_HUMAN 60S ribosomal protein
  misc_feature (1)..(134): Homolog of NCBI NO: 34897628 NR Description: cytoplasmic ribosomal protein L18 [Oryza sativa]
  misc_feature (1)..(134): Homolog of NCBI NO: 34393858 NR Description: putative cytoplasmic ribosomal protein L18 [Oryza
  misc_feature (1)..(134): Homolog of NCBI NO: 606970 NR Description: cytoplasmic ribosomal protein L18
  misc_feature (1)..(134): Homolog of NCBI NO: 15241061 NR Description: 60S ribosomal protein L18 (RPL18C) [Arabidopsis >gi|15810153|gb|AAL07220.1| putative 60S ribosomal protein thaliana] >gi|21689771|gb|AAM67529.1| putative 60S ribosomal

SEQ ID NO: 14991 - DNA, 819 bp, Zea mays subsp. mays
  misc_feature (1)..(819): Ceres Seq. ID no. 12484054
  misc_feature: MA Experiment ID: 108547 Result: Up-regulated in Transcription
  misc_feature: MA Experiment 108547 PARAMETER Experiment Name: Zm_Imbibed_Seeds_P Parameter: Age (day) Value: 4 vs. 2
  misc_feature: MA Experiment 108547 PARAMETER Experiment Name: Zm_Imbibed_Seeds_P Parameter: Organism Value: Zea mays
  misc_feature: MA Experiment 108547 PARAMETER Experiment Name: Zm_Imbibed_Seeds_P Parameter: Plant Line Value: 35A19
  misc_feature: MA Experiment 108547 PARAMETER Experiment Name: Zm_Imbibed_Seeds_P Parameter: Tissue Value: Aerial vs. Embryo
  misc_feature: MA Experiment ID: 108556 Result: Down-regulated in Transcription
  misc_feature: MA Experiment 108556 PARAMETER Experiment Name: Zm_Drought_P Parameter: Age (day) Value: 9
  misc_feature: MA Experiment 108556 PARAMETER Experiment Name: Zm_Drought_P Parameter: Organism Value: Zea mays
  misc_feature: MA Experiment 108556 PARAMETER Experiment Name: Zm_Drought_P Parameter: Plant Line Value: 35A19
  misc_feature: MA Experiment 108556 PARAMETER Experiment Name: Zm_Drought_P Parameter: Timepoint (hr) Value: 24
  misc_feature: MA Experiment 108556 PARAMETER Experiment Name: Zm_Drought_P Parameter: Tissue Value: Aerial
  misc_feature: MA Experiment 108556 PARAMETER Experiment Name: Zm_Drought_P Parameter: Treatment Value: Drought vs. No Drought
  misc_feature: MA Experiment ID: 108689 Result: Down-regulated in Transcription
  misc_feature: MA Experiment 108689 PARAMETER Experiment Name: Zm_Drought_Roots_P Parameter: Age (day) Value: 9
  misc_feature: MA Experiment 108689 PARAMETER Experiment Name: Zm_Drought_Roots_P Parameter: Organism Value: Zea mays
  misc_feature: MA Experiment 108689 PARAMETER Experiment Name: Zm_Drought_Roots_P Parameter: Plant Line Value: 35A19
  misc_feature: MA Experiment 108689 PARAMETER Experiment Name: Zm_Drought_Roots_P Parameter: Timepoint (hr) Value: 24
  misc_feature: MA Experiment 108689 PARAMETER Experiment Name: Zm_Drought_Roots_P Parameter: Tissue Value: Roots
  misc_feature: MA Experiment 108689 PARAMETER Experiment Name: Zm_Drought_Roots_P Parameter: Treatment Value: Drought vs. No Drought
  misc_feature: MA Experiment ID: 20000488 Result: Up-regulated in Transcription
  misc_feature: MA Experiment 20000488 PARAMETER Experiment Name: Zm_50mM_NH4NO3_L_to_H_P Parameter: Organism Value: Zea mays
  misc_feature: MA Experiment 20000488 PARAMETER Experiment Name: Zm_50mM_NH4NO3_L_to_H_P Parameter: Timepoint (hr) Value: 8
  misc_feature: MA Experiment 20000488 PARAMETER Experiment Name: Zm_50mM_NH4NO3_L_to_H_P Parameter: Tissue Value: Leaves
  misc_feature: MA Experiment 20000488 PARAMETER Experiment Name: Zm_50mM_NH4NO3_L_to_H_P Parameter: Treatment Value: 50mM NH4NO3 vs. 100mM Mannitol
atgattcatgaatcgctcgtgtgctcagccacgctcacgtctcccgggcacgtctgcggcagcaccactccacacccacactccacccatcggctgccatggcgaccagggcggcggcggcagccacgctcacggcggctacgtcctctcttcttaggcgctctacctcgctgcggccgcagggactccgggtcccccaccgcgtgcctccccaaaggtttgtgcgccatattgcttcatcatcaaacgaggaagctgctgccagagcagccgccgccactgctgacgccggaggaccaaccattttcgacaagatcattgcgaaggaaatcccttcgagcatcgtatatgaagatgaaaatgtgctggcatttagagatattaatccacaagcccctgtgcacgttctagtcatcccaaaagcgagagatgggctaaccggattagacaaggctgagccaaggcatacagaaatcctgggccggcttctttacgcagcgaaagtagtggcagagaaggaaggtgtagcgagtgggtaccgtgttgtcatcaacaatggagctgaaggatgccaatctgtctatcatctgcacctgcatgtacttggtggaaggcagatgaagtggccccctggttaaaattactaagggtgacatgtttgatttcttgtacccctctctctgtgagttgagtttgctgcttgtatgactgttgttgcaaagggagaaagagtggttggtgtactagtatctgcccctgtgatgatggcccctttgagcactcatctctggaattactgagcttatgcagcattttgct

SEQ ID NO: 14992 - protein, 179 aa, Zea mays subsp. mays
  peptide (1)..(179): Ceres Seq. ID no. 12484055
  misc_feature (30)..(179): Homolog of NCBI NO: 15221629 NR Description: putative protein kinase C inhibitor (Zinc-binding protein id: At1g31160.1 [Arabidopsis thaliana] putative protein kinase C inhibitor [Arabidopsis thaliana]
  misc_feature (30)..(160): Homolog of NCBI NO: 25518144 NR Description: F28K20.9 protein - Arabidopsis thaliana Similar to gb|Z29643 protein kinase C inhibitor (PKCI) from Zea
  misc_feature (159)..(179): Homolog of NCBI NO: 25518144 NR Description: F28K20.9 protein - Arabidopsis thaliana Similar to gb|Z29643 protein kinase C inhibitor (PKCI) from Zea
  misc_feature (48)..(179): Homolog of NCBI NO: 629858 NR Description: protein kinase C inhibitor - maize
  misc_feature (44)..(179): Homolog of NCBI NO: 18410510 NR Description: protein kinase C inhibitor-like protein; protein At3g56490.1, supported by cDNA: 28847. [Arabidopsis thaliana]
  misc_feature (48)..(179): Homolog of NCBI NO: 1177047 NR Description: 14 KD ZINC-BINDING PROTEIN (PROTEIN KINASE C (PKCI) >gi|473187|emb|CAA82751.1| protein kinase C inhibitor [Zea
  misc_feature (48)..(179): Homolog of NCBI NO: 11260559 NR Description: protein kinase C inhibitor-like protein -
  misc_feature (68)..(179): Homolog of NCBI NO: 1177046 NR Description: 14 KD ZINC-BINDING PROTEIN (PROTEIN KINASE C (PKCI) >gi|493053|gb|AAA18397.1| putative protein kinase C
  misc_feature (49)..(179): Homolog of NCBI NO: 23612841 NR Description: protein kinase c inhibitor-like protein, putative falciparum 3D7] >gi|11559498|gb|AAG37984.1|AF056206_1 putative kinase C interacting protein 1 [Plasmodium falciparum] protein,
  misc_feature (72)..(179): Homolog of NCBI NO: 23480654 NR Description: putative protein kinase C interacting protein 1
MATRAAAAATLTAATSSLLRRSTSLRPQGLRVPHRVPPQRFVRHIASSSNEEAAARAAAATADAGGPTIFDKIIAKEIPSSIVYEDENVLAFRDINPQAPVHVLVIPKARDGLTGLDKAEPRHTEILGRLLYAAKVVAEKEGVASGYRVVINNGAEGCQSVYHLHLHVLGGRQMKWPPG

SEQ ID NO: 14993 - protein, 136 aa, Zea mays subsp. mays
  peptide (1)..(136): Ceres Seq. ID no. 12484056
MIHESLVCSATLTSPGHVCGSTTPHPHSTHRLPWRPGRRRQPRSRRLRPLFLGALPRCGRRDSGSPTACLPKGLCAILLHHQTRKLLPEQPPPLLTPEDQPFSTRSLRRKSLRASYMKMKMCWHLEILIHKPLCTF

SEQ ID NO: 14994 - DNA, 489 bp, Zea mays subsp. mays
  misc_feature (1)..(489): Ceres Seq. ID no. 4578406
  misc_feature: MA Experiment ID: 108547 Result: Down-regulated in Transcription
  misc_feature: MA Experiment 108547 PARAMETER Experiment Name: Zm_Imbibed_Seeds_P Parameter: Age (day) Value: 4 vs. 2
  misc_feature: MA Experiment 108547 PARAMETER Experiment Name: Zm_Imbibed_Seeds_P Parameter: Organism Value: Zea mays
  misc_feature: MA Experiment 108547 PARAMETER Experiment Name: Zm_Imbibed_Seeds_P Parameter: Plant Line Value: 35A19
  misc_feature: MA Experiment 108547 PARAMETER Experiment Name: Zm_Imbibed_Seeds_P Parameter: Tissue Value: Aerial vs. Embryo
ctctttccattagccatcctagccttcgccccctcgacgagaagaaccacctcaaaaccgaacagccgcaaaagaaagctgctagctactctatacatgataactagaacaggaccgtgaagtaatatatatataatgacgaagtcaggggcgctacaacttgctcggagcaccggagggtcgcttagcaaggaccaagtcaaatccgccgttgatcagtatgtgaagtaccacgacctccacggaggcgaacaagaatcaagaaagtcaaattacgctgatttggcaaacaagtactatgatcttgtcactggcttctacgaatatggatggggcgactcattccattttgctggcggtcccatactcccatgcttgtatttcagatatccgggtgaaacttcccgtgaagccattaagcggcaccagcattttatggcactacaattggggctcaagaagggtatgaaggttctggacgtgggatgt

SEQ ID NO: 14995 - protein, 118 aa, Zea mays subsp. mays
  peptide (1)..(118): Ceres Seq. ID no. 4578407
  misc_feature (1)..(117): Homolog of NCBI NO: 3560531 NR Description: cycloartenol-C24-methyltransferase [Oryza sativa
  misc_feature (1)..(117): Homolog of NCBI NO: 34393309 NR Description: cycloartenol-C24-methyltransferase [Oryza sativa
  misc_feature (1)..(117): Homolog of NCBI NO: 7443715 NR Description: sterol 24-C-methyltransferase (EC 2.1.1.41) -
  misc_feature (1)..(117): Homolog of NCBI NO: 7443716 NR Description: sterol 24-C-methyltransferase (EC 2.1.1.41)
  misc_feature (1)..(117): Homolog of NCBI NO: 3560474 NR Description: S-adenosyl-methionine-sterol-C- methyltransferase
  misc_feature (1)..(117): Homolog of NCBI NO: 7443719 NR Description: sterol 24-C-methyltransferase (EC 2.1.1.41) -
  misc_feature (1)..(117): Homolog of NCBI NO: 3603295 NR Description: S-adenosyl-methionine
  misc_feature (2)..(117): Homolog of NCBI NO: 7443720 NR Description: probable sterol 24-C-methyltransferase (EC
  misc_feature (7)..(117): Homolog of NCBI NO: 15240691 NR Description: 24-sterol C-methyltransferase; protein id: supported by cDNA: gi_11066104, supported by cDNA: gi_8745240
  misc_feature (7)..(117): Homolog of NCBI NO: 21434843 NR Description: cephalopod [Arabidopsis thaliana]
MTKSGALQLARSTGGSLSKDQVKSAVDQYVKYHDLHGGEQESRKSNYADLANKYYDLVTGFYEYGWGDSFHFAGGPILPCLYFRYPGETSREAIKRHQHFMALQLGLKKGMKVLDVGC

SEQ ID NO: 14996 - DNA, 657 bp, Zea mays subsp. mays
  misc_feature (1)..(657): Ceres Seq. ID no. 15170059
  misc_feature: MA Experiment ID: 108530 Result: Down-regulated in Transcription
  misc_feature: MA Experiment 108530 PARAMETER Experiment Name: Zm_Imbibed_Seeds_P Parameter: Age (day) Value: 6 vs. 2
  misc_feature: MA Experiment 108530 PARAMETER Experiment Name: Zm_Imbibed_Seeds_P Parameter: Organism Value: Zea mays
  misc_feature: MA Experiment 108530 PARAMETER Experiment Name: Zm_Imbibed_Seeds_P Parameter: Plant Line Value: 35A19
  misc_feature: MA Experiment 108530 PARAMETER Experiment Name: Zm_Imbibed_Seeds_P Parameter: Tissue Value: Aerial vs. Embryo
  misc_feature: MA Experiment ID: 108535 Result: Up-regulated in Transcription
  misc_feature: MA Experiment 108535 PARAMETER Experiment Name: Zm_Meristem_P Parameter: Age (day) Value: 8
  misc_feature: MA Experiment 108535 PARAMETER Experiment Name: Zm_Meristem_P Parameter: Organism Value: Zea mays
  misc_feature: MA Experiment 108535 PARAMETER Experiment Name: Zm_Meristem_P Parameter: Plant Line Value: 35A19
  misc_feature: MA Experiment 108535 PARAMETER Experiment Name: Zm_Meristem_P Parameter: Tissue Value: Root Meristem vs. Above Root Meristem
  misc_feature: MA Experiment ID: 108543 Result: Up-regulated in Transcription
  misc_feature: MA Experiment ID: 108544 Result: Down-regulated in Transcription
  misc_feature: MA Experiment ID: 108556 Result: Down-regulated in Transcription
  misc_feature: MA Experiment 108556 PARAMETER Experiment Name: Zm_Drought_P Parameter: Age (day) Value: 9
  misc_feature: MA Experiment 108556 PARAMETER Experiment Name: Zm_Drought_P Parameter: Organism Value: Zea mays
  misc_feature: MA Experiment 108556 PARAMETER Experiment Name: Zm_Drought_P Parameter: Plant Line Value: 35A19
  misc_feature: MA Experiment 108556 PARAMETER Experiment Name: Zm_Drought_P Parameter: Timepoint (hr) Value: 24
  misc_feature: MA Experiment 108556 PARAMETER Experiment Name: Zm_Drought_P Parameter: Tissue Value: Aerial
  misc_feature: MA Experiment 108556 PARAMETER Experiment Name: Zm_Drought_P Parameter: Treatment Value: Drought vs. No Drought
  misc_feature: MA Experiment ID: 108597 Result: Down-regulated in Transcription
  misc_feature: MA Experiment 108597 PARAMETER Experiment Name: Zm_100uM_ABA_P Parameter: Age (day) Value: 9
  misc_feature: MA Experiment 108597 PARAMETER Experiment Name: Zm_100uM_ABA_P Parameter: Organism Value: Zea mays
  misc_feature: MA Experiment 108597 PARAMETER Experiment Name: Zm_100uM_ABA_P Parameter: Plant Line Value: 35A19
  misc_feature: MA Experiment 108597 PARAMETER Experiment Name: Zm_100uM_ABA_P Parameter: Timepoint (hr) Value: 24
  misc_feature: MA Experiment 108597 PARAMETER Experiment Name: Zm_100uM_ABA_P Parameter: Tissue Value: Aerial
  misc_feature: MA Experiment 108597 PARAMETER Experiment Name: Zm_100uM_ABA_P Parameter: Treatment Value: 100uM ABA vs. No Treatment
  misc_feature: MA Experiment ID: 20000478 Result: Down-regulated in Transcription
  misc_feature: MA Experiment 20000478 PARAMETER Experiment Name: Zm_5mM_SA_P Parameter: Age (day) Value: 11
  misc_feature: MA Experiment 20000478 PARAMETER Experiment Name: Zm_5mM_SA_P Parameter: Organism Value: Zea mays
  misc_feature: MA Experiment 20000478 PARAMETER Experiment Name: Zm_5mM_SA_P Parameter: Plant Line Value: 35A19
  misc_feature: MA Experiment 20000478 PARAMETER Experiment Name: Zm_5mM_SA_P Parameter: Timepoint (hr) Value: 72
  misc_feature: MA Experiment 20000478 PARAMETER Experiment Name: Zm_5mM_SA_P Parameter: Tissue Value: Aerial
  misc_feature: MA Experiment 20000478 PARAMETER Experiment Name: Zm_5mM_SA_P Parameter: Treatment Value: 5mM SA vs. No Treatment
  misc_feature: MA Experiment ID: 20000492 Result: Up-regulated in Transcription
  misc_feature: MA Experiment 20000492 PARAMETER Experiment Name: Zm_Hybrid_Seed_Dev_P Parameter: DAP Value: 12
  misc_feature: MA Experiment 20000492 PARAMETER Experiment Name: Zm_Hybrid_Seed_Dev_P Parameter: Organism Value: Zea mays
  misc_feature: MA Experiment 20000492 PARAMETER Experiment Name: Zm_Hybrid_Seed_Dev_P Parameter: Plant Line Value: 35A19
  misc_feature: MA Experiment 20000492 PARAMETER Experiment Name: Zm_Hybrid_Seed_Dev_P Parameter: Tissue Value: Fert Kernel vs. Unfert Floret
  misc_feature: MA Experiment ID: 20000535 Result: Up-regulated in Transcription
  misc_feature: MA Experiment 20000535 PARAMETER Experiment Name: Zm_Hybrid_Seed_Dev_P Parameter: DAP Value: 30 vs. 12
  misc_feature: MA Experiment 20000535 PARAMETER Experiment Name: Zm_Hybrid_Seed_Dev_P Parameter: Organism Value: Zea mays
  misc_feature: MA Experiment 20000535 PARAMETER Experiment Name: Zm_Hybrid_Seed_Dev_P Parameter: Plant Line Value: 35A19
  misc_feature: MA Experiment 20000535 PARAMETER Experiment Name: Zm_Hybrid_Seed_Dev_P Parameter: Tissue Value: Embryo vs. Unfert Floret
  misc_feature: MA Experiment ID: 20001606 Result: Up-regulated in Transcription
  misc_feature: MA Experiment 20001606 PARAMETER Experiment Name: Zm_50ppm_KNO3_L-to-H_P Parameter: Age (day) Value: 19
  misc_feature: MA Experiment 20001606 PARAMETER Experiment Name: Zm_50ppm_KNO3_L-to-H_P Parameter: Organism Value: Zea mays
  misc_feature: MA Experiment 20001606 PARAMETER Experiment Name: Zm_50ppm_KNO3_L-to-H_P Parameter: Plant Line Value: 35A19
  misc_feature: MA Experiment 20001606 PARAMETER Experiment Name: Zm_50ppm_KNO3_L-to-H_P Parameter: Timepoint (hr) Value: 8
  misc_feature: MA Experiment 20001606 PARAMETER Experiment Name: Zm_50ppm_KNO3_L-to-H_P Parameter: Tissue Value: Shoots
  misc_feature: MA Experiment 20001606 PARAMETER Experiment Name: Zm_50ppm_KNO3_L-to-H_P Parameter: Treatment Value: 50ppm KNO3 vs. 50ppm KCl
  misc_feature: MA Experiment ID: 20001608 Result: Up-regulated in Transcription
  misc_feature: MA Experiment 20001608 PARAMETER Experiment Name: Zm_50ppm_KNO3_L-to-H_P Parameter: Age (day) Value: 21
  misc_feature: MA Experiment 20001608 PARAMETER Experiment Name: Zm_50ppm_KNO3_L-to-H_P Parameter: Organism Value: Zea mays
  misc_feature: MA Experiment 20001608 PARAMETER Experiment Name: Zm_50ppm_KNO3_L-to-H_P Parameter: Plant Line Value: 35A19
  misc_feature: MA Experiment 20001608 PARAMETER Experiment Name: Zm_50ppm_KNO3_L-to-H_P Parameter: Timepoint (hr) Value: 48
  misc_feature: MA Experiment 20001608 PARAMETER Experiment Name: Zm_50ppm_KNO3_L-to-H_P Parameter: Tissue Value: Shoots
  misc_feature: MA Experiment 20001608 PARAMETER Experiment Name: Zm_50ppm_KNO3_L-to-H_P Parameter: Treatment Value: 50ppm KNO3 vs. 50ppm KCl
aaaaaaccctaatcgcatctgcttccagagccccccgccgccgctgcgccctcctctcggtcctgccgtccgtcgaggtaaaaggacagcatggtgagggtcagcgtgctcaatgatgctctcaagtccatgtacaatgctgaaaagatagggaaacgtcaggtcatgatcaggccgtcatccaaggtgatcatcaagttcctgacggtcatgcagcgccatggctacattggcgagttcgagtacgtggatgaccacagagctgggaagatcgtggtggagctgaatggaagactgaataaatgtggtgttattagcccacgttttgatgtaggtgttaaggagatcgagggatggacggcgaggcttcttccatctcgccagtttggctacatcgtcctaacaacttctgctggaattatggaccatgaggaggcccgccgtaagaatgttggtggcaaggttctaggtttcttttattgaaaatgtgtttttttgagccacagatgcgtccaagaactcgtctgatgttttgaggtttgttaagactgggtgtccgagcctttgtggtttgttaagacagcgatgtgtcatgtatttcagaaattgggatttttatgagatgtacctgcgagagcncctgtctgtttcgatttt

SEQ ID NO: 14997 - protein, 130 aa, Zea mays subsp. mays
  peptide (1)..(130): Ceres Seq. ID no. 15170060
  misc_feature (5)..(130): Pfam Name: Ribosomal protein S8 Pfam Description: Ribosomal protein S8
  misc_feature (1)..(130): Homolog of NCBI NO: 15223001 NR Description: 40S ribosomal protein S15A (RPS15aA) [Arabidopsis >gi|15238544|ref|NP_200793.1| 40S ribosomal protein S15A [Arabidopsis thaliana] >gi|1173218|sp|P42798|RS1A_ARATH 40S
  misc_feature (1)..(130): Homolog of NCBI NO: 133793 NR Description: 40S RIBOSOMAL PROTEIN S15A (PPCB8)
  misc_feature (1)..(130): Homolog of NCBI NO: 6683481 NR Description: wrp15a [Citrullus lanatus]
  misc_feature (1)..(130): Homolog of NCBI NO: 15231316 NR Description: 40S ribosomal protein S15A (RPS15aD) [Arabidopsis
  misc_feature (1)..(130): Homolog of NCBI NO: 13560779 NR Description: cytoplasmic ribosomal protein S15a [Daucus carota]
  misc_feature (1)..(130): Homolog of NCBI NO: 28411802 NR Description: ribosomal protein S15 [Oryza sativa (japonica
  misc_feature (1)..(130): Homolog of NCBI NO: 2130985 NR Description: r-protein BnS15a [Brassica napus]
  misc_feature (1)..(130): Homolog of NCBI NO: 15225502 NR Description: 40S ribosomal protein S15A (RPS15aC) [Arabidopsis
  misc_feature (1)..(130): Homolog of NCBI NO: 6322271 NR Description: Homology to rat S15a; Rps22ap [Saccharomyces >gi|133884|sp|P04648|RS22_YEAST 40S ribosomal protein S22 (S24)
  misc_feature (1)..(130): Homolog of NCBI NO: 14326103 NR Description: ribosomal protein S22 [Candida albicans]
MVRVSVLNDALKSMYNAEKIGKRQVMIRPSSKVIIKFLTVMQRHGYIGEFEYVDDHRAGKIVVELNGRLNKCGVISPRFDVGVKEIEGWTARLLPSRQFGYIVLTTSAGIMDHEEARRKNVGGKVLGFFY

SEQ ID NO: 14998 - protein, 117 aa, Zea mays subsp. mays
  peptide (1)..(117): Ceres Seq. ID no. 15170061
  misc_feature (1)..(117): Pfam Name: Ribosomal protein S8 Pfam Description: Ribosomal protein S8
  misc_feature (1)..(117): Homolog of NCBI NO: 15223001 NR Description: 40S ribosomal protein S15A (RPS15aA) [Arabidopsis >gi|15238544|ref|NP_200793.1| 40S ribosomal protein S15A [Arabidopsis thaliana] >gi|1173218|sp|P42798|RS1A_ARATH 40S
  misc_feature (1)..(117): Homolog of NCBI NO: 133793 NR Description: 40S RIBOSOMAL PROTEIN S15A (PPCB8)
  misc_feature (1)..(117): Homolog of NCBI NO: 6683481 NR Description: wrp15a [Citrullus lanatus]
  misc_feature (1)..(117): Homolog of NCBI NO: 15231316 NR Description: 40S ribosomal protein S15A (RPS15aD) [Arabidopsis
  misc_feature (1)..(117): Homolog of NCBI NO: 13560779 NR Description: cytoplasmic ribosomal protein S15a [Daucus carota]
  misc_feature (1)..(117): Homolog of NCBI NO: 28411802 NR Description: ribosomal protein S15 [Oryza sativa (japonica
  misc_feature (1)..(117): Homolog of NCBI NO: 2130985 NR Description: r-protein BnS15a [Brassica napus]
  misc_feature (1)..(117): Homolog of NCBI NO: 15225502 NR Description: 40S ribosomal protein S15A (RPS15aC) [Arabidopsis
  misc_feature (1)..(117): Homolog of NCBI NO: 6322271 NR Description: Homology to rat S15a; Rps22ap [Saccharomyces >gi|133884|sp|P04648|RS22_YEAST 40S ribosomal protein S22 (S24)
  misc_feature (1)..(117): Homolog of NCBI NO: 14326103 NR Description: ribosomal protein S22 [Candida albicans]
MYNAEKIGKRQVMIRPSSKVIIKFLTVMQRHGYIGEFEYVDDHRAGKIVVELNGRLNKCGVISPRFDVGVKEIEGWTARLLPSRQFGYIVLTTSAGIMDHEEARRKNVGGKVLGFFY

SEQ ID NO: 14999 - protein, 105 aa, Zea mays subsp. mays
  peptide (1)..(105): Ceres Seq. ID no. 15170062
  misc_feature (1)..(105): Pfam Name: Ribosomal protein S8 Pfam Description: Ribosomal protein S8
  misc_feature (1)..(105): Homolog of NCBI NO: 15223001 NR Description: 40S ribosomal protein S15A (RPS15aA) [Arabidopsis >gi|15238544|ref|NP_200793.1| 40S ribosomal protein S15A [Arabidopsis thaliana] >gi|1173218|sp|P42798|RS1A_ARATH 40S
  misc_feature (1)..(105): Homolog of NCBI NO: 133793 NR Description: 40S RIBOSOMAL PROTEIN S15A (PPCB8)
  misc_feature (1)..(105): Homolog of NCBI NO: 6683481 NR Description: wrp15a [Citrullus lanatus]
  misc_feature (1)..(105): Homolog of NCBI NO: 15231316 NR Description: 40S ribosomal protein S15A (RPS15aD) [Arabidopsis
  misc_feature (1)..(105): Homolog of NCBI NO: 13560779 NR Description: cytoplasmic ribosomal protein S15a [Daucus carota]
  misc_feature (1)..(105): Homolog of NCBI NO: 28411802 NR Description: ribosomal protein S15 [Oryza sativa (japonica
  misc_feature (1)..(105): Homolog of NCBI NO: 2130985 NR Description: r-protein BnS15a [Brassica napus]
  misc_feature (1)..(105): Homolog of NCBI NO: 15225502 NR Description: 40S ribosomal protein S15A (RPS15aC) [Arabidopsis
  misc_feature (1)..(105): Homolog of NCBI NO: 6322271 NR Description: Homology to rat S15a; Rps22ap [Saccharomyces >gi|133884|sp|P04648|RS22_YEAST 40S ribosomal protein S22 (S24)
  misc_feature (1)..(105): Homolog of NCBI NO: 14326103 NR Description: ribosomal protein S22 [Candida albicans]
MIRPSSKVIIKFLTVMQRHGYIGEFEYVDDHRAGKIVVELNGRLNKCGVISPRFDVGVKEIEGWTARLLPSRQFGYIVLTTSAGIMDHEEARRKNVGGKVLGFFY

SEQ ID NO: 15000 - DNA, 959 bp, Zea mays subsp. mays
  misc_feature (1)..(959): Ceres Seq. ID no. 13502430
  misc_feature: MA Experiment ID: 108597 Result: Down-regulated in Transcription
  misc_feature: MA Experiment 108597 PARAMETER Experiment Name: Zm_100uM_ABA_P Parameter: Age (day) Value: 9
  misc_feature: MA Experiment 108597 PARAMETER Experiment Name: Zm_100uM_ABA_P Parameter: Organism Value: Zea mays
  misc_feature: MA Experiment 108597 PARAMETER Experiment Name: Zm_100uM_ABA_P Parameter: Plant Line Value: 35A19
  misc_feature: MA Experiment 108597 PARAMETER Experiment Name: Zm_100uM_ABA_P Parameter: Timepoint (hr) Value: 24
  misc_feature: MA Experiment 108597 PARAMETER Experiment Name: Zm_100uM_ABA_P Parameter: Tissue Value: Aerial
  misc_feature: MA Experiment 108597 PARAMETER Experiment Name: Zm_100uM_ABA_P Parameter: Treatment Value: 100uM ABA vs. No Treatment
gagcacactgatgttgctgtcctgctcgacaatgaggccatctatgacatctgccgccgctcccttgacattgagcgcccaacctacaccaacctgaacaggcttgtctcccaggtcatctcatccctgacggcttccctgaggttcgatggtgctctgaacgttgatgtgaacgagttccagaccaacctggtgccctacccgaggatccacttcatgctttcgtcctacgctccagtcatttctgctgagaaggcctaccacgagcagctgtccgtggccgaaatcaccaacagcgccttcgagccatcctccatgatggccaagtgcgacccccgccatggcaagtacatggcatgctgcctcatgtaccgtggtgatgtggttcccaaggacgtgaacgctgctgtggccacaatcaagaccaagcgcaccatccagttcgtggactggtgcccgactggcttcaagtgcggaatcaactaccagcctcccagcgtcgtccccggcggtgacctggccaaggtgcagcgtgccgtgtgcatgatctccaactccaccagtgttgtggaggtcttctcccgcattgaccacaagttcgacctcatgtacgccaagcgcgccttcgtgcactggtacgtcggtgagggtatggaggagggcgagttctccgaggctcgtgaggatctgcgtgcgctcgagaaggactacgaggaggtcggtgctgagtttgacgagggtgaggacggcgacgagggtgacgagtactagacgctctactggcgcggcgtcgtcgggcttgtgtgccactgctatcctgtgatctgccctgagtggctcctatcgtgttatgtttctgtcggttcttatctatctgtcgttgtgtggtttacaacttacgttgtaagactttattcccccgctttgctactgggttattaagtttggcgttattgttt

SEQ ID NO: 15001 - protein, 256 aa, Zea mays subsp. mays
  peptide (1)..(256): Ceres Seq. ID no. 13502431
  misc_feature (53)..(198): Pfam Name: Tubulin/FtsZ family, C-terminal domain Pfam Description: Tubulin/FtsZ family, C-terminal domain
  misc_feature (1)..(256): Homolog of NCBI NO: 542179 NR Description: tubulin alpha chain - maize (fragment)
  misc_feature (1)..(256): Homolog of NCBI NO: 8928432 NR Description: Tubulin alpha-3 chain >gi|4165488|emb|CAA10663.1|
  misc_feature (1)..(256): Homolog of NCBI NO: 135398 NR Description: Tubulin alpha-1 chain (Alpha-1 tubulin)
  misc_feature (1)..(256): Homolog of NCBI NO: 6094429 NR Description: Tubulin alpha-1 chain (Alpha-1 tubulin)
  misc_feature (1)..(256): Homolog of NCBI NO: 135411 NR Description: Tubulin alpha-2 chain (Alpha-2 tubulin)
  misc_feature (1)..(256): Homolog of NCBI NO: 8928408 NR Description: Tubulin alpha chain >gi|4098272|gb|AAD10486.1|
  misc_feature (1)..(256): Homolog of NCBI NO: 3163946 NR Description: alpha-tubulin 1 [Eleusine indica]
  misc_feature (1)..(256): Homolog of NCBI NO: 1556446 NR Description: alpha tubulin [Hordeum vulgare]
  misc_feature (1)..(256): Homolog of NCBI NO: 8928422 NR Description: Tubulin alpha-2 chain >gi|1619297|emb|CAA69724.1|
  misc_feature (1)..(256): Homolog of NCBI NO: 10441016 NR Description: alpha-tubulin [Oryza sativa]
EHTDVAVLLDNEAIYDICRRSLDIERPTYTNLNRLVSQVISSLTASLRFDGALNVDVNEFQTNLVPYPRIHFMLSSYAPVISAEKAYHEQLSVAEITNSAFEPSSMMAKCDPRHGKYMACCLMYRGDVVPKDVNAAVATIKTKRTIQFVDWCPTGFKCGINYQPPSVVPGGDLAKVQRAVCMISNSTSVVEVFSRIDHKFDLMYAKRAFVHWYVGEGMEEGEFSEAREDLRALEKDYEEVGAEFDEGEDGDEGDEY

SEQ ID NO: 15002 - protein, 184 aa, Zea mays subsp. mays
  peptide (1)..(184): Ceres Seq. ID no. 13502432
  misc_feature (1)..(126): Pfam Name: Tubulin/FtsZ family, C-terminal domain Pfam Description: Tubulin/FtsZ family, C-terminal domain
  misc_feature (1)..(184): Homolog of NCBI NO: 542179 NR Description: tubulin alpha chain - maize (fragment)
  misc_feature (1)..(184): Homolog of NCBI NO: 8928432 NR Description: Tubulin alpha-3 chain >gi|4165488|emb|CAA10663.1|
  misc_feature (1)..(184): Homolog of NCBI NO: 135398 NR Description: Tubulin alpha-1 chain (Alpha-1 tubulin)
  misc_feature (1)..(184): Homolog of NCBI NO: 6094429 NR Description: Tubulin alpha-1 chain (Alpha-1 tubulin)
  misc_feature (1)..(184): Homolog of NCBI NO: 135411 NR Description: Tubulin alpha-2 chain (Alpha-2 tubulin)
  misc_feature (1)..(184): Homolog of NCBI NO: 8928408 NR Description: Tubulin alpha chain >gi|4098272|gb|AAD10486.1|
  misc_feature (1)..(184): Homolog of NCBI NO: 3163946 NR Description: alpha-tubulin 1 [Eleusine indica]
  misc_feature (1)..(184): Homolog of NCBI NO: 1556446 NR Description: alpha tubulin [Hordeum vulgare]
  misc_feature (1)..(184): Homolog of NCBI NO: 8928422 NR Description: Tubulin alpha-2 chain >gi|1619297|emb|CAA69724.1|
  misc_feature (1)..(184): Homolog of NCBI NO: 10441016 NR Description: alpha-tubulin [Oryza sativa]
MLSSYAPVISAEKAYHEQLSVAEITNSAFEPSSMMAKCDPRHGKYMACCLMYRGDVVPKDVNAAVATIKTKRTIQFVDWCPTGFKCGINYQPPSVVPGGDLAKVQRAVCMISNSTSVVEVFSRIDHKFDLMYAKRAFVHWYVGEGMEEGEFSEAREDLRALEKDYEEVGAEFDEGEDGDEGDEY

SEQ ID NO: 15003 - protein, 151 aa, Zea mays subsp. mays
  peptide (1)..(151): Ceres Seq. ID no. 13502433
  misc_feature (1)..(93): Pfam Name: Tubulin/FtsZ family, C-terminal domain Pfam Description: Tubulin/FtsZ family, C-terminal domain
  misc_feature (1)..(151): Homolog of NCBI NO: 542179 NR Description: tubulin alpha chain - maize (fragment)
  misc_feature (1)..(151): Homolog of NCBI NO: 8928432 NR Description: Tubulin alpha-3 chain >gi|4165488|emb|CAA10663.1|
  misc_feature (1)..(151): Homolog of NCBI NO: 135398 NR Description: Tubulin alpha-1 chain (Alpha-1 tubulin)
  misc_feature (1)..(151): Homolog of NCBI NO: 6094429 NR Description: Tubulin alpha-1 chain (Alpha-1 tubulin)
  misc_feature (1)..(151): Homolog of NCBI NO: 135411 NR Description: Tubulin alpha-2 chain (Alpha-2 tubulin)
  misc_feature (1)..(151): Homolog of NCBI NO: 8928408 NR Description: Tubulin alpha chain >gi|4098272|gb|AAD10486.1|
  misc_feature (1)..(151): Homolog of NCBI NO: 3163946 NR Description: alpha-tubulin 1 [Eleusine indica]
  misc_feature (1)..(151): Homolog of NCBI NO: 1556446 NR Description: alpha tubulin [Hordeum vulgare]
  misc_feature (1)..(151): Homolog of NCBI NO: 8928422 NR Description: Tubulin alpha-2 chain >gi|1619297|emb|CAA69724.1|
  misc_feature (1)..(151): Homolog of NCBI NO: 10441016 NR Description: alpha-tubulin [Oryza sativa]
MMAKCDPRHGKYMACCLMYRGDVVPKDVNAAVATIKTKRTIQFVDWCPTGFKCGINYQPPSVVPGGDLAKVQRAVCMISNSTSVVEVFSRIDHKFDLMYAKRAFVHWYVGEGMEEGEFSEAREDLRALEKDYEEVGAEFDEGEDGDEGDEY

SEQ ID NO: 15004 - DNA, 1619 bp, Zea mays subsp. mays
  misc_feature (1)..(1619): Ceres Seq. ID no. 13587844
  misc_feature: MA Experiment ID: 108527 Result: Up-regulated in Transcription
  misc_feature: MA Experiment 108527 PARAMETER Experiment Name: Zm_5mM_NO_P Parameter: Age (day) Value: 8
  misc_feature: MA Experiment 108527 PARAMETER Experiment Name: Zm_5mM_NO_P Parameter: Organism Value: Zea mays
  misc_feature: MA Experiment 108527 PARAMETER Experiment Name: Zm_5mM_NO_P Parameter: Plant Line Value: 35A19
  misc_feature: MA Experiment 108527 PARAMETER Experiment Name: Zm_5mM_NO_P Parameter: Timepoint (hr) Value: 6
  misc_feature: MA Experiment 108527 PARAMETER Experiment Name: Zm_5mM_NO_P Parameter: Tissue Value: Aerial
  misc_feature: MA Experiment 108527 PARAMETER Experiment Name: Zm_5mM_NO_P Parameter: Treatment Value: 5mM NO vs. No Treatment
  misc_feature: MA Experiment ID: 108543 Result: Down-regulated in Transcription
  misc_feature: MA Experiment ID: 108544 Result: Down-regulated in Transcription
  misc_feature: MA Experiment ID: 108559 Result: Up-regulated in Transcription
  misc_feature: MA Experiment 108559 PARAMETER Experiment Name: Zm_5mM_NO_P Parameter: Age (day) Value: 8
  misc_feature: MA Experiment 108559 PARAMETER Experiment Name: Zm_5mM_NO_P Parameter: Organism Value: Zea mays
  misc_feature: MA Experiment 108559 PARAMETER Experiment Name: Zm_5mM_NO_P Parameter: Plant Line Value: 35A19
  misc_feature: MA Experiment 108559 PARAMETER Experiment Name: Zm_5mM_NO_P Parameter: Timepoint (hr) Value: 12
  misc_feature: MA Experiment 108559 PARAMETER Experiment Name: Zm_5mM_NO_P Parameter: Tissue Value: Aerial
  misc_feature: MA Experiment 108559 PARAMETER Experiment Name: Zm_5mM_NO_P Parameter: Treatment Value: 5mM NO vs. No Treatment
  misc_feature: MA Experiment ID: 20000477 Result: Up-regulated in Transcription
  misc_feature: MA Experiment 20000477 PARAMETER Experiment Name: Zm_5mM_SA_P Parameter: Age (day) Value: 10
  misc_feature: MA Experiment 20000477 PARAMETER Experiment Name: Zm_5mM_SA_P Parameter: Organism Value: Zea mays
  misc_feature: MA Experiment 20000477 PARAMETER Experiment Name: Zm_5mM_SA_P Parameter: Plant Line Value: 35A19
  misc_feature: MA Experiment 20000477 PARAMETER Experiment Name: Zm_5mM_SA_P Parameter: Timepoint (hr) Value: 48
  misc_feature: MA Experiment 20000477 PARAMETER Experiment Name: Zm_5mM_SA_P Parameter: Tissue Value: Aerial
  misc_feature: MA Experiment 20000477 PARAMETER Experiment Name: Zm_5mM_SA_P Parameter: Treatment Value: 5mM SA vs. No Treatment
  misc_feature: MA Experiment ID: 20000478 Result: Up-regulated in Transcription
  misc_feature: MA Experiment 20000478 PARAMETER Experiment Name: Zm_5mM_SA_P Parameter: Age (day) Value: 11
  misc_feature: MA Experiment 20000478 PARAMETER Experiment Name: Zm_5mM_SA_P Parameter: Organism Value: Zea mays
  misc_feature: MA Experiment 20000478 PARAMETER Experiment Name: Zm_5mM_SA_P Parameter: Plant Line Value: 35A19
  misc_feature: MA Experiment 20000478 PARAMETER Experiment Name: Zm_5mM_SA_P Parameter: Timepoint (hr) Value: 72
  misc_feature: MA Experiment 20000478 PARAMETER Experiment Name: Zm_5mM_SA_P Parameter: Tissue Value: Aerial
  misc_feature: MA Experiment 20000478 PARAMETER Experiment Name: Zm_5mM_SA_P Parameter: Treatment Value: 5mM SA vs. No Treatment
  misc_feature: MA Experiment ID: 20000492 Result: Up-regulated in Transcription
  misc_feature: MA Experiment 20000492 PARAMETER Experiment Name: Zm_Hybrid_Seed_Dev_P Parameter: DAP Value: 12
  misc_feature: MA Experiment 20000492 PARAMETER Experiment Name: Zm_Hybrid_Seed_Dev_P Parameter: Organism Value: Zea mays
  misc_feature: MA Experiment 20000492 PARAMETER Experiment Name: Zm_Hybrid_Seed_Dev_P Parameter: Plant Line Value: 35A19
  misc_feature: MA Experiment 20000492 PARAMETER Experiment Name: Zm_Hybrid_Seed_Dev_P Parameter: Tissue Value: Fert Kernel vs. Unfert Floret
  misc_feature: MA Experiment ID: 20000535 Result: Up-regulated in Transcription
  misc_feature: MA Experiment 20000535 PARAMETER Experiment Name: Zm_Hybrid_Seed_Dev_P Parameter: DAP Value: 30 vs. 12
  misc_feature: MA Experiment 20000535 PARAMETER Experiment Name: Zm_Hybrid_Seed_Dev_P Parameter: Organism Value: Zea mays
  misc_feature: MA Experiment 20000535 PARAMETER Experiment Name: Zm_Hybrid_Seed_Dev_P Parameter: Plant Line Value: 35A19
  misc_feature: MA Experiment 20000535 PARAMETER Experiment Name: Zm_Hybrid_Seed_Dev_P Parameter: Tissue Value: Embryo vs. Unfert Floret
  misc_feature: MA Experiment ID: 20000626 Result: Up-regulated in Transcription
  misc_feature: MA Experiment 20000626 PARAMETER Experiment Name: Zm_Herbicide-Treatments_P Parameter: Timepoint (hr) Value: 12
  misc_feature: MA Experiment 20000626 PARAMETER Experiment Name: Zm_Herbicide-Treatments_P Parameter: Tissue Value: Aerial
  misc_feature: MA Experiment 20000626 PARAMETER Experiment Name: Zm_Herbicide-Treatments_P Parameter: Treatment Value: Roundup vs. No Treatment
attcgcagccctacccgcgccgccgcaccaggacccgccgcgccggcccagcagcgcgcggttttgcgggtggcgtcgtccaggacctcctccgcccgcccccgaagggccgccgccgccgtggccgcggccgcaatgcagccggccaaggcggtcgccgcggaggcctcccccgccgcggtggagatggggaacggcgccgcggcgccggggctgcagaggcccgacgccatgggcaggttcgggaggttcggcggcaagtacgtccccgagacgctcatgcacgcgctcaccgagctcgagagcgccttccacgcgctcgccaccgacgacgagttccagaaagaactggacggtattctcaaggactacgttggacgtgagagccccctatacttcgcggagcgcctaacggagcactacaagcgcgccgatggcacaggcccgctcatctacctcaagagggaggaccttaaccacacgggtgcccacaagatcaacaatgccgtggcgcaggccttgcttgccaagcgacttgggaagcagcgcatcattgccgagacaggggctggtcagcacggcgtcgccaccgccaccgtgtgccgccgtttcgggctgcagtgcatcatctacatgggcgcacaggatatggagaggcaggcgctcaatgttttccggatgaggcttcttggtgcagaggtcagggcggtacattctgggacagcaaccctgaaggatgcaacttcagaggctatccgtgactgggtcacaaatgtggagaccacacactatatcttgggctctgttgccggtccgcacccgtacccgatgatggtgagggagttccataaggttattggcaaggaaacccggaggcaggccatggacaagtggggtggcaagccggacgtattggttgcctgcgtcggcggcggatcaaacgccatgggcttattccatgagtttgttgaggatcaagatgtgaggctggttggactggaggcagctggccatggcgtagacaccgacaagcatgcggcgactttgacaaagggccaagtcggagttctccatggatccatgagctatttgctgcaggatgatgacggacaagttatcgaaccccactccatcagtgctgggctcgattaccctggcgttggacccgagcacagtttcttgaaggacattggacgtgccgaatacgatagtgtgactgaccaggaggcactggatgctttcaagcgcgtgtctcggttggagggcatcatccctgccctggagacctcccacgcgctggcctaccttgagaagctctgcccgacactggcggacggcgtgagggtggtggtgaactgcagcgggcgaggagacaaggacgtgcacaccgccagcaagtacctggacgtctaaaacaccagcgaggaggctggtttccatgtcaagttttggagggttcagcagtaattaatttagcgctgttctttttggataaaagcacaaataacctggaagctggtattgttgttgtagccggtagtgcccccctgtttttttattttacaagtaatctgaatggctttggagtgcataatcaataatcaaataaatacaaagct

SEQ ID NO: 15005 - protein, 470 aa, Zea mays subsp. mays
  peptide (1)..(470): Ceres Seq. ID no. 13587845
  misc_feature (122)..(456): Pfam Name: Pyridoxal-phosphate dependent enzyme Pfam Description: Pyridoxal-phosphate dependent enzyme
  misc_feature (1)..(470): Homolog of NCBI NO: 18481702 NR Description: tryptophan synthase beta-subunit [Sorghum bicolor]
  misc_feature (50)..(470): Homolog of NCBI NO: 1174780 NR Description: Tryptophan synthase beta chain 2, chloroplast (Orange pericarp 2) >gi|320135|pir||PQ0450 tryptophan synthase
  misc_feature (1)..(470): Homolog of NCBI NO: 38636821 NR Description: putative tryptophan synthase beta-subunit [Oryza
  misc_feature (82)..(470): Homolog of NCBI NO: 1174778 NR Description: Tryptophan synthase beta chain 1 (Orange pericarp
  misc_feature (56)..(470): Homolog of NCBI NO: 15239755 NR Description: tryptophan synthase, beta subunit 1 (TSB1) thaliana] >gi|136251|sp|P14671|TRP1_ARATH Tryptophan synthase chain 1, chloroplast precursor >gi|99767|pir||A31393 tryptophan
  misc_feature (31)..(470): Homolog of NCBI NO: 81661 NR Description: tryptophan synthase (EC 4.2.1.20) beta-2 chain
  misc_feature (31)..(470): Homolog of NCBI NO: 15236977 NR Description: tryptophan synthase, beta subunit 2 (TSB2) thaliana] >gi|1174779|sp|P25269|TRP2_ARATH Tryptophan synthase
  misc_feature (7)..(470): Homolog of NCBI NO: 3915165 NR Description: Tryptophan synthase beta chain 2, chloroplast >gi|2792520|gb|AAB97087.1| tryptophan synthase beta subunit acuminata] >gi|2801771|gb|AAB97526.1| tryptophan synthase beta
  misc_feature (73)..(470): Homolog of NCBI NO: 7437014 NR Description: probable tryptophan synthase (EC 4.2.1.20) beta - rice >gi|2081609|dbj|BAA19928.1| tryptophan synthase B [Oryza
  misc_feature (72)..(468): Homolog of NCBI NO: 17231286 NR Description: tryptophan synthase beta subunit [Nostoc sp. PCC >gi|24212554|sp|Q8YQM6|TRB2_ANASP Tryptophan synthase beta chain >gi|25291917|pir||AC2280 tryptophan synthase beta chain
IRSPTRAAAPGPAAPAQQRAVLRVASSRTSSARPRRAAAAVAAAAMQPAKAVAAEASPAAVEMGNGAAAPGLQRPDAMGRFGRFGGKYVPETLMHALTELESAFHALATDDEFQKELDGILKDYVGRESPLYFAERLTEHYKRADGTGPLIYLKREDLNHTGAHKINNAVAQALLAKRLGKQRIIAETGAGQHGVATATVCRRFGLQCIIYMGAQDMERQALNVFRMRLLGAEVRAVHSGTATLKDATSEAIRDWVTNVETTHYILGSVAGPHPYPMMVREFHKVIGKETRRQAMDKWGGKPDVLVACVGGGSNAMGLFHEFVEDQDVRLVGLEAAGHGVDTDKHAATLTKGQVGVLHGSMSYLLQDDDGQVIEPHSISAGLDYPGVGPEHSFLKDIGRAEYDSVTDQEALDAFKRVSRLEGIIPALETSHALAYLEKLCPTLADGVRVVVNCSGRGDKDVHTASKYLDV

SEQ ID NO: 15006 - protein, 425 aa, Zea mays subsp. mays
  peptide (1)..(425): Ceres Seq. ID no. 13587846
  misc_feature (77)..(411): Pfam Name: Pyridoxal-phosphate dependent enzyme Pfam Description: Pyridoxal-phosphate dependent enzyme
  misc_feature (11)..(425): Homolog of NCBI NO: 15239755 NR Description: tryptophan synthase, beta subunit 1 (TSB1) thaliana] >gi|136251|sp|P14671|TRP1_ARATH Tryptophan synthase chain 1, chloroplast precursor >gi|99767|pir||A31393 tryptophan
  misc_feature (1)..(425): Homolog of NCBI NO: 81661 NR Description: tryptophan synthase (EC 4.2.1.20) beta-2 chain
  misc_feature (1)..(425): Homolog of NCBI NO: 15236977 NR Description: tryptophan synthase, beta subunit 2 (TSB2) thaliana] >gi|1174779|sp|P25269|TRP2_ARATH Tryptophan synthase
  misc_feature (1)..(425): Homolog of NCBI NO: 18481702 NR Description: tryptophan synthase beta-subunit [Sorghum bicolor]
  misc_feature (1)..(425): Homolog of NCBI NO: 38636821 NR Description: putative tryptophan synthase beta-subunit [Oryza
  misc_feature (37)..(425): Homolog of NCBI NO: 1174778 NR Description: Tryptophan synthase beta chain 1 (Orange pericarp
  misc_feature (5)..(425): Homolog of NCBI NO: 1174780 NR Description: Tryptophan synthase beta chain 2, chloroplast (Orange pericarp 2) >gi|320135|pir||PQ0450 tryptophan synthase
  misc_feature (1)..(425): Homolog of NCBI NO: 3915165 NR Description: Tryptophan synthase beta chain 2, chloroplast >gi|2792520|gb|AAB97087.1| tryptophan synthase beta subunit acuminata] >gi|2801771|gb|AAB97526.1| tryptophan synthase beta
  misc_feature (28)..(425): Homolog of NCBI NO: 7437014 NR Description: probable tryptophan synthase (EC 4.2.1.20) beta - rice >gi|2081609|dbj|BAA19928.1| tryptophan synthase B [Oryza
  misc_feature (27)..(423): Homolog of NCBI NO: 17231286 NR Description: tryptophan synthase beta subunit [Nostoc sp. PCC >gi|24212554|sp|Q8YQM6|TRB2_ANASP Tryptophan synthase beta chain >gi|25291917|pir||AC2280 tryptophan synthase beta chain
MQPAKAVAAEASPAAVEMGNGAAAPGLQRPDAMGRFGRFGGKYVPETLMHALTELESAFHALATDDEFQKELDGILKDYVGRESPLYFAERLTEHYKRADGTGPLIYLKREDLNHTGAHKINNAVAQALLAKRLGKQRIIAETGAGQHGVATATVCRRFGLQCIIYMGAQDMERQALNVFRMRLLGAEVRAVHSGTATLKDATSEAIRDWVTNVETTHYILGSVAGPHPYPMMVREFHKVIGKETRRQAMDKWGGKPDVLVACVGGGSNAMGLFHEFVEDQDVRLVGLEAAGHGVDTDKHAATLTKGQVGVLHGSMSYLLQDDDGQVIEPHSISAGLDYPGVGPEHSFLKDIGRAEYDSVTDQEALDAFKRVSRLEGIIPALETSHALAYLEKLCPTLADGVRVVVNCSGRGDKDVHTASKYLDV

SEQ ID NO: 15007 - protein, 408 aa, Zea mays subsp. mays
  peptide (1)..(408): Ceres Seq. ID no. 13587847
  misc_feature (60)..(394): Pfam Name: Pyridoxal-phosphate dependent enzyme Pfam Description: Pyridoxal-phosphate dependent enzyme
  misc_feature (1)..(408): Homolog of NCBI NO: 18481702 NR Description: tryptophan synthase beta-subunit [Sorghum bicolor]
  misc_feature (1)..(408): Homolog of NCBI NO: 1174780 NR Description: Tryptophan synthase beta chain 2, chloroplast (Orange pericarp 2) >gi|320135|pir||PQ0450 tryptophan synthase
  misc_feature (1)..(408): Homolog of NCBI NO: 38636821 NR Description: putative tryptophan synthase beta-subunit [Oryza
  misc_feature (20)..(408): Homolog of NCBI NO: 1174778 NR Description: Tryptophan synthase beta chain 1 (Orange pericarp
  misc_feature (1)..(408): Homolog of NCBI NO: 15239755 NR Description: tryptophan synthase, beta subunit 1 (TSB1) thaliana] >gi|136251|sp|P14671|TRP1_ARATH Tryptophan synthase chain 1, chloroplast precursor >gi|99767|pir||A31393 tryptophan
  misc_feature (1)..(408): Homolog of NCBI NO: 81661 NR Description: tryptophan synthase (EC 4.2.1.20) beta-2 chain
  misc_feature (1)..(408): Homolog of NCBI NO: 15236977 NR Description: tryptophan synthase, beta subunit 2 (TSB2) thaliana] >gi|1174779|sp|P25269|TRP2_ARATH Tryptophan synthase
  misc_feature (1)..(408): Homolog of NCBI NO: 3915165 NR Description: Tryptophan synthase beta chain 2, chloroplast >gi|2792520|gb|AAB97087.1| tryptophan synthase beta subunit acuminata] >gi|2801771|gb|AAB97526.1| tryptophan synthase beta
  misc_feature (11)..(408): Homolog of NCBI NO: 7437014 NR Description: probable tryptophan synthase (EC 4.2.1.20) beta - rice >gi|2081609|dbj|BAA19928.1| tryptophan synthase B [Oryza
  misc_feature (10)..(406): Homolog of NCBI NO: 17231286 NR Description: tryptophan synthase beta subunit [Nostoc sp. PCC >gi|24212554|sp|Q8YQM6|TRB2_ANASP Tryptophan synthase beta chain >gi|25291917|pir||AC2280 tryptophan synthase beta chain
MGNGAAAPGLQRPDAMGRFGRFGGKYVPETLMHALTELESAFHALATDDEFQKELDGILKDYVGRESPLYFAERLTEHYKRADGTGPLIYLKREDLNHTGAHKINNAVAQALLAKRLGKQRIIAETGAGQHGVATATVCRRFGLQCIIYMGAQDMERQALNVFRMRLLGAEVRAVHSGTATLKDATSEAIRDWVTNVETTHYILGSVAGPHPYPMMVREFHKVIGKETRRQAMDKWGGKPDVLVACVGGGSNAMGLFHEFVEDQDVRLVGLEAAGHGVDTDKHAATLTKGQVGVLHGSMSYLLQDDDGQVIEPHSISAGLDYPGVGPEHSFLKDIGRAEYDSVTDQEALDAFKRVSRLEGIIPALETSHALAYLEKLCPTLADGVRVVVNCSGRGDKDVHTASKYLDV

SEQ ID NO: 15008 - DNA, 986 bp, Zea mays subsp. mays
  misc_feature (1)..(986): Ceres Seq. ID no. 15178973
  misc_feature: MA Experiment ID: 108523 Result: Down-regulated in Transcription
  misc_feature: MA Experiment 108523 PARAMETER Experiment Name: Zm_42deg_Heat_P Parameter: Age (day) Value: 8
  misc_feature: MA Experiment 108523 PARAMETER Experiment Name: Zm_42deg_Heat_P Parameter: Organism Value: Zea mays
  misc_feature: MA Experiment 108523 PARAMETER Experiment Name: Zm_42deg_Heat_P Parameter: Plant Line Value: 35A19
  misc_feature: MA Experiment 108523 PARAMETER Experiment Name: Zm_42deg_Heat_P Parameter: Temperature (deg C) Value: 42 vs. 22
  misc_feature: MA Experiment 108523 PARAMETER Experiment Name: Zm_42deg_Heat_P Parameter: Timepoint (hr) Value: 6
  misc_feature: MA Experiment 108523 PARAMETER Experiment Name: Zm_42deg_Heat_P Parameter: Tissue Value: Aerial
  misc_feature: MA Experiment ID: 108528 Result: Up-regulated in Transcription
  misc_feature: MA Experiment 108528 PARAMETER Experiment Name: Zm_Imbibed_Seeds_P Parameter: Age (day) Value: 5 vs. 2
  misc_feature: MA Experiment 108528 PARAMETER Experiment Name: Zm_Imbibed_Seeds_P Parameter: Organism Value: Zea mays
  misc_feature: MA Experiment 108528 PARAMETER Experiment Name: Zm_Imbibed_Seeds_P Parameter: Plant Line Value: 35A19
  misc_feature: MA Experiment 108528 PARAMETER Experiment Name: Zm_Imbibed_Seeds_P Parameter: Tissue Value: Aerial vs. Embryo
  misc_feature: MA Experiment ID: 108530 Result: Up-regulated in Transcription
  misc_feature: MA Experiment 108530 PARAMETER Experiment Name: Zm_Imbibed_Seeds_P Parameter: Age (day) Value: 6 vs. 2
  misc_feature: MA Experiment 108530 PARAMETER Experiment Name: Zm_Imbibed_Seeds_P Parameter: Organism Value: Zea mays
  misc_feature: MA Experiment 108530 PARAMETER Experiment Name: Zm_Imbibed_Seeds_P Parameter: Plant Line Value: 35A19
  misc_feature: MA Experiment 108530 PARAMETER Experiment Name: Zm_Imbibed_Seeds_P Parameter: Tissue Value: Aerial vs. Embryo
  misc_feature: MA Experiment ID: 108534 Result: Down-regulated in Transcription
  misc_feature: MA Experiment 108534 PARAMETER Experiment Name: Zm_4deg_Cold_P Parameter: Age (hr) Value: 8
  misc_feature: MA Experiment 108534 PARAMETER Experiment Name: Zm_4deg_Cold_P Parameter: Organism Value: Zea mays
  misc_feature: MA Experiment 108534 PARAMETER Experiment Name: Zm_4deg_Cold_P Parameter: Plant Line Value: 35A19
  misc_feature: MA Experiment 108534 PARAMETER Experiment Name: Zm_4deg_Cold_P Parameter: Temperature (deg C) Value: 4 vs. 22
  misc_feature: MA Experiment 108534 PARAMETER Experiment Name: Zm_4deg_Cold_P Parameter: Timepoint (hr) Value: 6
  misc_feature: MA Experiment 108534 PARAMETER Experiment Name: Zm_4deg_Cold_P Parameter: Tissue Value: Aerial
  misc_feature: MA Experiment ID: 108547 Result: Up-regulated in Transcription
  misc_feature: MA Experiment 108547 PARAMETER Experiment Name: Zm_Imbibed_Seeds_P Parameter: Age (day) Value: 4 vs. 2
  misc_feature: MA Experiment 108547 PARAMETER Experiment Name: Zm_Imbibed_Seeds_P Parameter: Organism Value: Zea mays
  misc_feature: MA Experiment 108547 PARAMETER Experiment Name: Zm_Imbibed_Seeds_P Parameter: Plant Line Value: 35A19
  misc_feature: MA Experiment 108547 PARAMETER Experiment Name: Zm_Imbibed_Seeds_P Parameter: Tissue Value: Aerial vs. Embryo
  misc_feature: MA Experiment ID: 20000626 Result: Up-regulated in Transcription
  misc_feature: MA Experiment 20000626 PARAMETER Experiment Name: Zm_Herbicide-Treatments_P Parameter: Timepoint (hr) Value: 12
  misc_feature: MA Experiment 20000626 PARAMETER Experiment Name: Zm_Herbicide-Treatments_P Parameter: Tissue Value: Aerial
  misc_feature: MA Experiment 20000626 PARAMETER Experiment Name: Zm_Herbicide-Treatments_P Parameter: Treatment Value: Roundup vs. No Treatment
gaaatccgcagattcccgtcgctacttcggccacatggctgcagcggcggcgtggaccggcgccgcatcccccaactcgctgctgctctcgcgctcgcctccccacgccgccgtgctcgcgccttcgccggggagctccatgcggaggcggctcctgctcggcgtcggcaccccggccgtggcggcgctggcggccgcggcgccgccagcggtgctgcaggacggggcggtcactgtgctcatcaccgccggcgcctactctcttgtgcgcgtcttcgacgagctcaccgagcggcggctcatcgaaaagagcttgagcaggaaggttgtgcacgtgctatccggcgtcctgttcatgtcatcttggcccctgttcagggaattgctgagaggtccactctattatgtcctggtgctgctgttcagcgttttagtcttctggcgtgagtcccccatcgggatcgtctccttgtcgatgatgagcggtggcgatggttttgctgacattgttgggaggaggtatggctcagcgaagctgccattcaatcggaagaagagctgggccgggagcatctcgatgttcatttctggtttcctgctgtccgcgatgatgatgctctacttctcaagcctgggttacattgatgttatctgggaagaggcacttggtaagctggcgcttgttgcactagcagcgacagtagtggagtgcgttcctgtgaccgaagttgtagatgacaacatatctgttcctttggccaccatgctggtagcttttctcttgtttagctccaaccgcacaatagttaattaaaatactactagtgcattatttaagacatgtgatgagttcttcagtgatgagttgtgcttacttttgcttcctatgtgatctctagtacttgatggcgacggcctaacatctcccagtttttggtgtctccttgccttggctgttttggtggaaaagtattgctagcttgtct

SEQ ID NO: 15009 - protein, 270 aa, Zea mays subsp. mays
  peptide (1)..(270): Ceres Seq. ID no. 15178974
  misc_feature (127)..(262): Homolog of NCBI NO: 32488404 NR Description: OSJNBa0043A12.34 [Oryza sativa (japonica
  misc_feature (19)..(144): Homolog of NCBI NO: 32488404 NR Description: OSJNBa0043A12.34 [Oryza sativa (japonica
  misc_feature (127)..(262): Homolog of NCBI NO: 21537252 NR Description: unknown [Arabidopsis thaliana]
  misc_feature (64)..(125): Homolog of NCBI NO: 21537252 NR Description: unknown [Arabidopsis thaliana]
  misc_feature (127)..(262): Homolog of NCBI NO: 15238184 NR Description: expressed protein [Arabidopsis thaliana]
  misc_feature (64)..(125): Homolog of NCBI NO: 15238184 NR Description: expressed protein [Arabidopsis thaliana]
  misc_feature (127)..(262): Homolog of NCBI NO: 28393229 NR Description: unknown protein [Arabidopsis thaliana]
  misc_feature (64)..(125): Homolog of NCBI NO: 28393229 NR Description: unknown protein [Arabidopsis thaliana]
  misc_feature (126)..(262): Homolog of NCBI NO: 34907982 NR Description: P0446G04.23 [Oryza sativa (japonica
  misc_feature (21)..(125): Homolog of NCBI NO: 34907982 NR Description: P0446G04.23 [Oryza sativa (japonica
KSADSRRYFGHMAAAAAWTGAASPNSLLLSRSPPHAAVLAPSPGSSMRRRLLLGVGTPAVAALAAAAPPAVLQDGAVTVLITAGAYSLVRVFDELTERRLIEKSLSRKVVHVLSGVLFMSSWPLFRELLRGPLYYVLVLLFSVLVFWRESPIGIVSLSMMSGGDGFADIVGRRYGSAKLPFNRKKSWAGSISMFISGFLLSAMMMLYFSSLGYIDVIWEEALGKLALVALAATVVECVPVTEVVDDNISVPLATMLVAFLLFSSNRTIVN

SEQ ID NO: 15010 - protein, 259 aa, Zea mays subsp. mays
  peptide (1)..(259): Ceres Seq. ID no. 15178975
  misc_feature (116)..(251): Homolog of NCBI NO: 32488404 NR Description: OSJNBa0043A12.34 [Oryza sativa (japonica
  misc_feature (8)..(133): Homolog of NCBI NO: 32488404 NR Description: OSJNBa0043A12.34 [Oryza sativa (japonica
  misc_feature (116)..(251): Homolog of NCBI NO: 21537252 NR Description: unknown [Arabidopsis thaliana]
  misc_feature (53)..(114): Homolog of NCBI NO: 21537252 NR Description: unknown [Arabidopsis thaliana]
  misc_feature (116)..(251): Homolog of NCBI NO: 15238184 NR Description: expressed protein [Arabidopsis thaliana]
  misc_feature (53)..(114): Homolog of NCBI NO: 15238184 NR Description: expressed protein [Arabidopsis thaliana]
  misc_feature (116)..(251): Homolog of NCBI NO: 28393229 NR Description: unknown protein [Arabidopsis thaliana]
  misc_feature (53)..(114): Homolog of NCBI NO: 28393229 NR Description: unknown protein [Arabidopsis thaliana]
  misc_feature (115)..(251): Homolog of NCBI NO: 34907982 NR Description: P0446G04.23 [Oryza sativa (japonica
  misc_feature (10)..(114): Homolog of NCBI NO: 34907982 NR Description: P0446G04.23 [Oryza sativa (japonica
MAAAAAWTGAASPNSLLLSRSPPHAAVLAPSPGSSMRRRLLLGVGTPAVAALAAAAPPAVLQDGAVTVLITAGAYSLVRVFDELTERRLIEKSLSRKVVHVLSGVLFMSSWPLFRELLRGPLYYVLVLLFSVLVFWRESPIGIVSLSMMSGGDGFADIVGRRYGSAKLPFNRKKSWAGSISMFISGFLLSAMMMLYFSSLGYIDVIWEEALGKLALVALAATVVECVPVTEVVDDNISVPLATMLVAFLLFSSNRTIVN

SEQ ID NO: 15011 - protein, 224 aa, Zea mays subsp. mays
  peptide (1)..(224): Ceres Seq. ID no. 15178976
  misc_feature (81)..(216): Homolog of NCBI NO: 32488404 NR Description: OSJNBa0043A12.34 [Oryza sativa (japonica
  misc_feature (1)..(98): Homolog of NCBI NO: 32488404 NR Description: OSJNBa0043A12.34 [Oryza sativa (japonica
  misc_feature (81)..(216): Homolog of NCBI NO: 21537252 NR Description: unknown [Arabidopsis thaliana]
  misc_feature (18)..(79): Homolog of NCBI NO: 21537252 NR Description: unknown [Arabidopsis thaliana]
  misc_feature (81)..(216): Homolog of NCBI NO: 15238184 NR Description: expressed protein [Arabidopsis thaliana]
  misc_feature (18)..(79): Homolog of NCBI NO: 15238184 NR Description: expressed protein [Arabidopsis thaliana]
  misc_feature (81)..(216): Homolog of NCBI NO: 28393229 NR Description: unknown protein [Arabidopsis thaliana]
  misc_feature (18)..(79): Homolog of NCBI NO: 28393229 NR Description: unknown protein [Arabidopsis thaliana]
  misc_feature (80)..(216): Homolog of NCBI NO: 34907982 NR Description: P0446G04.23 [Oryza sativa (japonica
  misc_feature (1)..(79): Homolog of NCBI NO: 34907982 NR Description: P0446G04.23 [Oryza sativa (japonica
MRRRLLLGVGTPAVAALAAAAPPAVLQDGAVTVLITAGAYSLVRVFDELTERRLIEKSLSRKVVHVLSGVLFMSSWPLFRELLRGPLYYVLVLLFSVLVFWRESPIGIVSLSMMSGGDGFADIVGRRYGSAKLPFNRKKSWAGSISMFISGFLLSAMMMLYFSSLGYIDVIWEEALGKLALVALAATVVECVPVTEVVDDNISVPLATMLVAFLLFSSNRTIVN

SEQ ID NO: 15012 - DNA, 1140 bp, Zea mays subsp. mays
  misc_feature (1)..(1140): Ceres Seq. ID no. 13496508
  misc_feature: MA Experiment ID: 108504 Result: Up-regulated in Transcription
  misc_feature: MA Experiment 108504 PARAMETER Experiment Name: Zm_Drought_P Parameter: Age (day) Value: 8
  misc_feature: MA Experiment 108504 PARAMETER Experiment Name: Zm_Drought_P Parameter: Organism Value: Zea mays
  misc_feature: MA Experiment 108504 PARAMETER Experiment Name: Zm_Drought_P Parameter: Plant Line Value: 35A19
  misc_feature: MA Experiment 108504 PARAMETER Experiment Name: Zm_Drought_P Parameter: Timepoint (hr) Value: 12
  misc_feature: MA Experiment 108504 PARAMETER Experiment Name: Zm_Drought_P Parameter: Tissue Value: Aerial
  misc_feature: MA Experiment 108504 PARAMETER Experiment Name: Zm_Drought_P Parameter: Treatment Value: Drought vs. No Drought
  misc_feature: MA Experiment ID: 108522 Result: Up-regulated in Transcription
  misc_feature: MA Experiment 108522 PARAMETER Experiment Name: Zm_42deg_Heat_P Parameter: Age (day) Value: 8
  misc_feature: MA Experiment 108522 PARAMETER Experiment Name: Zm_42deg_Heat_P Parameter: Organism Value: Zea mays
  misc_feature: MA Experiment 108522 PARAMETER Experiment Name: Zm_42deg_Heat_P Parameter: Plant Line Value: 35A19
  misc_feature: MA Experiment 108522 PARAMETER Experiment Name: Zm_42deg_Heat_P Parameter: Temperature (deg C) Value: 42 vs. 22
  misc_feature: MA Experiment 108522 PARAMETER Experiment Name: Zm_42deg_Heat_P Parameter: Timepoint (hr) Value: 1
  misc_feature: MA Experiment 108522 PARAMETER Experiment Name: Zm_42deg_Heat_P Parameter: Tissue Value: Aerial
  misc_feature: MA Experiment ID: 108536 Result: Down-regulated in Transcription
  misc_feature: MA Experiment 108536 PARAMETER Experiment Name: Zm_Meristem_P Parameter: Age (day) Value: 8
  misc_feature: MA Experiment 108536 PARAMETER Experiment Name: Zm_Meristem_P Parameter: Organism Value: Zea mays
  misc_feature: MA Experiment 108536 PARAMETER Experiment Name: Zm_Meristem_P Parameter: Plant Line Value: 35A19
  misc_feature: MA Experiment 108536 PARAMETER Experiment Name: Zm_Meristem_P Parameter: Tissue Value: Shoot Meristem vs. Above Shoot Meristem
  misc_feature: MA Experiment ID: 108543 Result: Up-regulated in Transcription
  misc_feature: MA Experiment ID: 108559 Result: Up-regulated in Transcription
  misc_feature: MA Experiment 108559 PARAMETER Experiment Name: Zm_5mM_NO_P Parameter: Age (day) Value: 8
  misc_feature: MA Experiment 108559 PARAMETER Experiment Name: Zm_5mM_NO_P Parameter: Organism Value: Zea mays
  misc_feature: MA Experiment 108559 PARAMETER Experiment Name: Zm_5mM_NO_P Parameter: Plant Line Value: 35A19
  misc_feature: MA Experiment 108559 PARAMETER Experiment Name: Zm_5mM_NO_P Parameter: Timepoint (hr) Value: 12
  misc_feature: MA Experiment 108559 PARAMETER Experiment Name: Zm_5mM_NO_P Parameter: Tissue Value: Aerial
  misc_feature: MA Experiment 108559 PARAMETER Experiment Name: Zm_5mM_NO_P Parameter: Treatment Value: 5mM NO vs. No Treatment
  misc_feature: MA Experiment ID: 20000492 Result: Down-regulated in Transcription
  misc_feature: MA Experiment 20000492 PARAMETER Experiment Name: Zm_Hybrid_Seed_Dev_P Parameter: DAP Value: 12
  misc_feature: MA Experiment 20000492 PARAMETER Experiment Name: Zm_Hybrid_Seed_Dev_P Parameter: Organism Value: Zea mays
  misc_feature: MA Experiment 20000492 PARAMETER Experiment Name: Zm_Hybrid_Seed_Dev_P Parameter: Plant Line Value: 35A19
  misc_feature: MA Experiment 20000492 PARAMETER Experiment Name: Zm_Hybrid_Seed_Dev_P Parameter: Tissue Value: Fert Kernel vs. Unfert Floret
atataccacctccatggcacatctcttcctcaccaccgcatcccacaccccccgagctcagcttagctccagctccaatcacagtcgtgaccagagcgcgagagctagctagagggccgtgaaaatgccgatcaataggatcgccctggggagccaccaggaggtgtaccacccgggcgccctcaaggcggcgttcgctgagttcatctccaccctcatcttcgtcttcgccggccagggctccggcatggccttcagcaagctgaccggcggcggcccgacgaccccggcgggcctgatcgcggcggcggtggcgcacgcgttcgcgctgttcgtggcggtgtctgtgggcgcgaacatctccggcgggcacgtgaaccctgccgtgaccttcggcgccttcgtgggcggcaacatcaccctgttccgggggctcctgtactgggtggcgcagctgctggggtccaccgtggcgtgcttcctgctccgcttctcgacgggcgggcaggccacgggcaccttcgggctgacgggcgtgtcggtgtgggaggcgctggtgctggagatcgtgatgaccttcgggctggtgtacacggtgtacgccacggcggtggacccgaagaagggcagcctgggcaccatcgcccccattgccatcggcttcatcgtgggggccaacatcctggtgggcggcgccttcgacggcgcgtccatgaaccccgccgtgtccttcggccccgccctcgtcagctgggagtggggctaccagtgggtgtactgggtcgggcccctcatcggcggcggcctcgccggcgtcatctacgagctgctcttcatctcccacacccacgagcagctcccctccaccgactactaaaagccgaagccgaccgacctaggggtgcgcagcgcagctagcgcatccagctctctctccccgctcgccgccgtttagtttctctcgtgcacgtgcatgcatcgtcgactgtctcaggccgccgctgcgccggcgccgctcgcatcgtttgcttccttggaccagcagtcgtcgccgtcaggctgaactgcttgtaaccgtgaattccggacccgtttgcttctgtaagatttgtgcatttgcctgagtacacctcgatctgc

SEQ ID NO: 15013 - protein, 250 aa, Zea mays subsp. mays
  peptide (1)..(250): Ceres Seq. ID no. 13496509
  misc_feature (13)..(233): Pfam Name: Major intrinsic protein Pfam Description: Major intrinsic protein
  misc_feature (1)..(250): Homolog of NCBI NO: 3004950 NR Description: tonoplast intrinsic protein; ZmTIP1 [Zea mays]
  misc_feature (1)..(250): Homolog of NCBI NO: 1729971 NR Description: TONOPLAST INTRINSIC PROTEIN, GAMMA (GAMMA TIP)
  misc_feature (1)..(250): Homolog of NCBI NO: 629784 NR Description: tonoplast intrinsic protein gamma - barley
  misc_feature (1)..(250): Homolog of NCBI NO: 4099406 NR Description: gamma-type tonoplast intrinsic protein [Triticum
  misc_feature (1)..(250): Homolog of NCBI NO: 6478150 NR Description: putative gamma tonoplast intrinsic protein (TIP)
  misc_feature (1)..(250): Homolog of NCBI NO: 12006843 NR Description: putative gamma TIP [Nicotiana glauca]
  misc_feature (1)..(250): Homolog of NCBI NO: 4138262 NR Description: aquaporin 1 [Nicotiana tabacum]
  misc_feature (1)..(250): Homolog of NCBI NO: 17940748 NR Description: aquaporin-like protein [Petunia x hybrida]
  misc_feature (1)..(250): Homolog of NCBI NO: 8699604 NR Description: putative aquaporin TIP3 [Vitis berlandieri x
  misc_feature (1)..(250): Homolog of NCBI NO: 9988412 NR Description: gamma tonoplast intrinsic protein [Pyrus communis]
MPINRIALGSHQEVYHPGALKAAFAEFISTLIFVFAGQGSGMAFSKLTGGGPTTPAGLIAAAVAHAFALFVAVSVGANISGGHVNPAVTFGAFVGGNITLFRGLLYWVAQLLGSTVACFLLRFSTGGQATGTFGLTGVSVWEALVLEIVMTFGLVYTVYATAVDPKKGSLGTIAPIAIGFIVGANILVGGAFDGASMNPAVSFGPALVSWEWGYQWVYWVGPLIGGGLAGVIYELLFISHTHEQLPSTDY

SEQ ID NO: 15014 - protein, 209 aa, Zea mays subsp. mays
  peptide (1)..(209): Ceres Seq. ID no. 13496510
  misc_feature (1)..(192): Pfam Name: Major intrinsic protein Pfam Description: Major intrinsic protein
  misc_feature (1)..(209): Homolog of NCBI NO: 3004950 NR Description: tonoplast intrinsic protein; ZmTIP1 [Zea mays]
  misc_feature (1)..(209): Homolog of NCBI NO: 1729971 NR Description: TONOPLAST INTRINSIC PROTEIN, GAMMA (GAMMA TIP)
  misc_feature (1)..(209): Homolog of NCBI NO: 629784 NR Description: tonoplast intrinsic protein gamma - barley
  misc_feature (1)..(209): Homolog of NCBI NO: 4099406 NR Description: gamma-type tonoplast intrinsic protein [Triticum
  misc_feature (1)..(209): Homolog of NCBI NO: 6478150 NR Description: putative gamma tonoplast intrinsic protein (TIP)
  misc_feature (1)..(209): Homolog of NCBI NO: 12006843 NR Description: putative gamma TIP [Nicotiana glauca]
  misc_feature (1)..(209): Homolog of NCBI NO: 4138262 NR Description: aquaporin 1 [Nicotiana tabacum]
  misc_feature (1)..(209): Homolog of NCBI NO: 17940748 NR Description: aquaporin-like protein [Petunia x hybrida]
  misc_feature (1)..(209): Homolog of NCBI NO: 8699604 NR Description: putative aquaporin TIP3 [Vitis berlandieri x
  misc_feature (1)..(209): Homolog of NCBI NO: 9988412 NR Description: gamma tonoplast intrinsic protein [Pyrus communis]
MAFSKLTGGGPTTPAGLIAAAVAHAFALFVAVSVGANISGGHVNPAVTFGAFVGGNITLFRGLLYWVAQLLGSTVACFLLRFSTGGQATGTFGLTGVSVWEALVLEIVMTFGLVYTVYATAVDPKKGSLGTIAPIAIGFIVGANILVGGAFDGASMNPAVSFGPALVSWEWGYQWVYWVGPLIGGGLAGVIYELLFISHTHEQLPSTDY

SEQ ID NO: 15015 - DNA, 1863 bp, Zea mays subsp. mays; identical to SEQ ID NO: 14914
  misc_feature (1)..(1863): Ceres Seq. ID no. 13635478
  misc_feature: MA Experiment ID: 108527 Result: Down-regulated in Transcription
  misc_feature: MA Experiment 108527 PARAMETER Experiment Name: Zm_5mM_NO_P Parameter: Age (day) Value: 8
  misc_feature: MA Experiment 108527 PARAMETER Experiment Name: Zm_5mM_NO_P Parameter: Organism Value: Zea mays
  misc_feature: MA Experiment 108527 PARAMETER Experiment Name: Zm_5mM_NO_P Parameter: Plant Line Value: 35A19
  misc_feature: MA Experiment 108527 PARAMETER Experiment Name: Zm_5mM_NO_P Parameter: Timepoint (hr) Value: 6
  misc_feature: MA Experiment 108527 PARAMETER Experiment Name: Zm_5mM_NO_P Parameter: Tissue Value: Aerial
  misc_feature: MA Experiment 108527 PARAMETER Experiment Name: Zm_5mM_NO_P Parameter: Treatment Value: 5mM NO vs. No Treatment
  misc_feature: MA Experiment ID: 108559 Result: Down-regulated in Transcription
  misc_feature: MA Experiment 108559 PARAMETER Experiment Name: Zm_5mM_NO_P Parameter: Age (day) Value: 8
  misc_feature: MA Experiment 108559 PARAMETER Experiment Name: Zm_5mM_NO_P Parameter: Organism Value: Zea mays
  misc_feature: MA Experiment 108559 PARAMETER Experiment Name: Zm_5mM_NO_P Parameter: Plant Line Value: 35A19
  misc_feature: MA Experiment 108559 PARAMETER Experiment Name: Zm_5mM_NO_P Parameter: Timepoint (hr) Value: 12
  misc_feature: MA Experiment 108559 PARAMETER Experiment Name: Zm_5mM_NO_P Parameter: Tissue Value: Aerial
  misc_feature: MA Experiment 108559 PARAMETER Experiment Name: Zm_5mM_NO_P Parameter: Treatment Value: 5mM NO vs. No Treatment
  misc_feature: MA Experiment ID: 108688 Result: Down-regulated in Transcription
  misc_feature: MA Experiment 108688 PARAMETER Experiment Name: Zm_Embryos-Flowers__P Parameter: Tissue Value: Immature Flowers vs. Aerial+
  misc_feature: MA Experiment ID: 20000535 Result: Up-regulated in Transcription
  misc_feature: MA Experiment 20000535 PARAMETER Experiment Name: Zm_Hybrid_Seed_Dev_P Parameter: DAP Value: 30 vs. 12
  misc_feature: MA Experiment 20000535 PARAMETER Experiment Name: Zm_Hybrid_Seed_Dev_P Parameter: Organism Value: Zea mays
  misc_feature: MA Experiment 20000535 PARAMETER Experiment Name: Zm_Hybrid_Seed_Dev_P Parameter: Plant Line Value: 35A19
  misc_feature: MA Experiment 20000535 PARAMETER Experiment Name: Zm_Hybrid_Seed_Dev_P Parameter: Tissue Value: Embryo vs. Unfert Floret

SEQ ID NO: 15016 - protein, 522 aa, Zea mays subsp. mays; identical to SEQ ID NO: 14915
  peptide (1)..(522): Ceres Seq. ID no. 13635479
  misc_feature (111)..(389): Pfam Name: Nucleotidyl transferase Pfam Description: Nucleotidyl transferase
  misc_feature (111)..(389): Pfam Name: Nucleotidyl transferase Pfam Description: Nucleotidyl transferase
  misc_feature (1)..(522): Homolog of NCBI NO: 5705939 NR Description: endosperm ADP-glucose pyrophosphorylase subunit
  misc_feature (1)..(522): Homolog of NCBI NO: 322870 NR Description: glucose-1-phosphate adenylyltransferase (EC
  misc_feature (27)..(522): Homolog of NCBI NO: 1707924 NR Description: Glucose-1-phosphate adenylyltransferase large
  misc_feature (27)..(522): Homolog of NCBI NO: 7434892 NR Description: glucose-1-phosphate adenylyltransferase (EC
  misc_feature (27)..(522): Homolog of NCBI NO: 13540812 NR Description: ADP-glucose pyrophosphorylase large subunit
  misc_feature (27)..(522): Homolog of NCBI NO: 7434888 NR Description: glucose-1-phosphate adenylyltransferase (EC
  misc_feature (43)..(522): Homolog of NCBI NO: 7434891 NR Description: glucose-1-phosphate adenylyltransferase (EC
  misc_feature (27)..(522): Homolog of NCBI NO: 1707923 NR Description: Glucose-1-phosphate adenylyltransferase large
  misc_feature (27)..(522): Homolog of NCBI NO: 1707930 NR Description: Glucose-1-phosphate adenylyltransferase large
  misc_feature (27)..(522): Homolog of NCBI NO: 32812836 NR Description: ADP-glucose pyrophosphorylase large subunit
  misc_feature (1)..(522): Homolog of NCBI NO: 5705939 NR Description: endosperm ADP-glucose pyrophosphorylase subunit
  misc_feature (1)..(522): Homolog of NCBI NO: 322870 NR Description: glucose-1-phosphate adenylyltransferase (EC
  misc_feature (27)..(522): Homolog of NCBI NO: 1707924 NR Description: Glucose-1-phosphate adenylyltransferase large
  misc_feature (27)..(522): Homolog of NCBI NO: 7434892 NR Description: glucose-1-phosphate adenylyltransferase (EC
  misc_feature (27)..(522): Homolog of NCBI NO: 13540812 NR Description: ADP-glucose pyrophosphorylase large subunit
  misc_feature (27)..(522): Homolog of NCBI NO: 7434888 NR Description: glucose-1-phosphate adenylyltransferase (EC
  misc_feature (43)..(522): Homolog of NCBI NO: 7434891 NR Description: glucose-1-phosphate adenylyltransferase (EC
  misc_feature (27)..(522): Homolog of NCBI NO: 1707923 NR Description: Glucose-1-phosphate adenylyltransferase large
  misc_feature (27)..(522): Homolog of NCBI NO: 1707930 NR Description: Glucose-1-phosphate adenylyltransferase large
  misc_feature (27)..(522): Homolog of NCBI NO: 32812836 NR Description: ADP-glucose pyrophosphorylase large subunit

SEQ ID NO: 15017 - protein, 496 aa, Zea mays subsp. mays; identical to SEQ ID NO: 14916
  peptide (1)..(496): Ceres Seq. ID no. 13635480
  misc_feature (85)..(363): Pfam Name: Nucleotidyl transferase Pfam Description: Nucleotidyl transferase
  misc_feature (85)..(363): Pfam Name: Nucleotidyl transferase Pfam Description: Nucleotidyl transferase
  misc_feature (1)..(496): Homolog of NCBI NO: 5705939 NR Description: endosperm ADP-glucose pyrophosphorylase subunit
  misc_feature (1)..(496): Homolog of NCBI NO: 322870 NR Description: glucose-1-phosphate adenylyltransferase (EC
  misc_feature (1)..(496): Homolog of NCBI NO: 1707924 NR Description: Glucose-1-phosphate adenylyltransferase large
  misc_feature (1)..(496): Homolog of NCBI NO: 7434892 NR Description: glucose-1-phosphate adenylyltransferase (EC
  misc_feature (1)..(496): Homolog of NCBI NO: 13540812 NR Description: ADP-glucose pyrophosphorylase large subunit
  misc_feature (1)..(496): Homolog of NCBI NO: 322870 NR Description: glucose-1-phosphate adenylyltransferase (EC
  misc_feature (1)..(496): Homolog of NCBI NO: 7434892 NR Description: glucose-1-phosphate adenylyltransferase (EC
  misc_feature (1)..(496): Homolog of NCBI NO: 32812836 NR Description: ADP-glucose pyrophosphorylase large subunit
  misc_feature (1)..(496): Homolog of NCBI NO: 1707930 NR Description: Glucose-1-phosphate adenylyltransferase large
  misc_feature (1)..(496): Homolog of NCBI NO: 1707923 NR Description: Glucose-1-phosphate adenylyltransferase large
  misc_feature (17)..(496): Homolog of NCBI NO: 7434891 NR Description: glucose-1-phosphate adenylyltransferase (EC
  misc_feature (1)..(496): Homolog of NCBI NO: 7434888 NR Description: glucose-1-phosphate adenylyltransferase (EC
  misc_feature (1)..(496): Homolog of NCBI NO: 13540812 NR Description: ADP-glucose pyrophosphorylase large subunit
  misc_feature (1)..(496): Homolog of NCBI NO: 1707924 NR Description: Glucose-1-phosphate adenylyltransferase large
  misc_feature (1)..(496): Homolog of NCBI NO: 5705939 NR Description: endosperm ADP-glucose pyrophosphorylase subunit
  misc_feature (1)..(496): Homolog of NCBI NO: 7434888 NR Description: glucose-1-phosphate adenylyltransferase (EC
  misc_feature (17)..(496): Homolog of NCBI NO: 7434891 NR Description: glucose-1-phosphate adenylyltransferase (EC
  misc_feature (1)..(496): Homolog of NCBI NO: 1707923 NR Description: Glucose-1-phosphate adenylyltransferase large
  misc_feature (1)..(496): Homolog of NCBI NO: 1707930 NR Description: Glucose-1-phosphate adenylyltransferase large
  misc_feature (1)..(496): Homolog of NCBI NO: 32812836 NR Description: ADP-glucose pyrophosphorylase large subunit

SEQ ID NO: 15018 - protein, 375 aa, Zea mays subsp. mays; identical to SEQ ID NO: 14917
  peptide (1)..(375): Ceres Seq. ID no. 13635481
  misc_feature (1)..(242): Pfam Name: Nucleotidyl transferase Pfam Description: Nucleotidyl transferase
  misc_feature (1)..(242): Pfam Name: Nucleotidyl transferase Pfam Description: Nucleotidyl transferase
  misc_feature (1)..(375): Homolog of NCBI NO: 5705939 NR Description: endosperm ADP-glucose pyrophosphorylase subunit
  misc_feature (1)..(375): Homolog of NCBI NO: 322870 NR Description: glucose-1-phosphate adenylyltransferase (EC
  misc_feature (1)..(375): Homolog of NCBI NO: 1707924 NR Description: Glucose-1-phosphate adenylyltransferase large
  misc_feature (1)..(375): Homolog of NCBI NO: 7434892 NR Description: glucose-1-phosphate adenylyltransferase (EC
  misc_feature (1)..(375): Homolog of NCBI NO: 13540812 NR Description: ADP-glucose pyrophosphorylase large subunit
  misc_feature (1)..(375): Homolog of NCBI NO: 322870 NR Description: glucose-1-phosphate adenylyltransferase (EC
  misc_feature (1)..(375): Homolog of NCBI NO: 7434892 NR Description: glucose-1-phosphate adenylyltransferase (EC
  misc_feature (1)..(375): Homolog of NCBI NO: 32812836 NR Description: ADP-glucose pyrophosphorylase large subunit
  misc_feature (1)..(375): Homolog of NCBI NO: 1707930 NR Description: Glucose-1-phosphate adenylyltransferase large
  misc_feature (1)..(375): Homolog of NCBI NO: 1707923 NR Description: Glucose-1-phosphate adenylyltransferase large
  misc_feature (1)..(375): Homolog of NCBI NO: 7434891 NR Description: glucose-1-phosphate adenylyltransferase (EC
  misc_feature (1)..(375): Homolog of NCBI NO: 7434888 NR Description: glucose-1-phosphate adenylyltransferase (EC
  misc_feature (1)..(375): Homolog of NCBI NO: 13540812 NR Description: ADP-glucose pyrophosphorylase large subunit
  misc_feature (1)..(375): Homolog of NCBI NO: 1707924 NR Description: Glucose-1-phosphate adenylyltransferase large
  misc_feature (1)..(375): Homolog of NCBI NO: 5705939 NR Description: endosperm ADP-glucose pyrophosphorylase subunit
  misc_feature (1)..(375): Homolog of NCBI NO: 7434888 NR Description: glucose-1-phosphate adenylyltransferase (EC
  misc_feature (1)..(375): Homolog of NCBI NO: 7434891 NR Description: glucose-1-phosphate adenylyltransferase (EC
  misc_feature (1)..(375): Homolog of NCBI NO: 1707923 NR Description: Glucose-1-phosphate adenylyltransferase large
  misc_feature (1)..(375): Homolog of NCBI NO: 1707930 NR Description: Glucose-1-phosphate adenylyltransferase large
  misc_feature (1)..(375): Homolog of NCBI NO: 32812836 NR Description: ADP-glucose pyrophosphorylase large subunit

SEQ ID NO: 15019 - DNA, 549 bp, Zea mays subsp. mays
  misc_feature (1)..(549): Ceres Seq. ID no. 13573207
  misc_feature: MA Experiment ID: 108522 Result: Up-regulated in Transcription
  misc_feature: MA Experiment 108522 PARAMETER Experiment Name: Zm_42deg_Heat_P Parameter: Age (day) Value: 8
  misc_feature: MA Experiment 108522 PARAMETER Experiment Name: Zm_42deg_Heat_P Parameter: Organism Value: Zea mays
  misc_feature: MA Experiment 108522 PARAMETER Experiment Name: Zm_42deg_Heat_P Parameter: Plant Line Value: 35A19
  misc_feature: MA Experiment 108522 PARAMETER Experiment Name: Zm_42deg_Heat_P Parameter: Temperature (deg C) Value: 42 vs. 22
  misc_feature: MA Experiment 108522 PARAMETER Experiment Name: Zm_42deg_Heat_P Parameter: Timepoint (hr) Value: 1
  misc_feature: MA Experiment 108522 PARAMETER Experiment Name: Zm_42deg_Heat_P Parameter: Tissue Value: Aerial
  misc_feature: MA Experiment ID: 108523 Result: Up-regulated in Transcription
  misc_feature: MA Experiment 108523 PARAMETER Experiment Name: Zm_42deg_Heat_P Parameter: Age (day) Value: 8
  misc_feature: MA Experiment 108523 PARAMETER Experiment Name: Zm_42deg_Heat_P Parameter: Organism Value: Zea mays
  misc_feature: MA Experiment 108523 PARAMETER Experiment Name: Zm_42deg_Heat_P Parameter: Plant Line Value: 35A19
  misc_feature: MA Experiment 108523 PARAMETER Experiment Name: Zm_42deg_Heat_P Parameter: Temperature (deg C) Value: 42 vs. 22
  misc_feature: MA Experiment 108523 PARAMETER Experiment Name: Zm_42deg_Heat_P Parameter: Timepoint (hr) Value: 6
  misc_feature: MA Experiment 108523 PARAMETER Experiment Name: Zm_42deg_Heat_P Parameter: Tissue Value: Aerial
  misc_feature: MA Experiment ID: 108527 Result: Up-regulated in Transcription
  misc_feature: MA Experiment 108527 PARAMETER Experiment Name: Zm_5mM_NO_P Parameter: Age (day) Value: 8
  misc_feature: MA Experiment 108527 PARAMETER Experiment Name: Zm_5mM_NO_P Parameter: Organism Value: Zea mays
  misc_feature: MA Experiment 108527 PARAMETER Experiment Name: Zm_5mM_NO_P Parameter: Plant Line Value: 35A19
  misc_feature: MA Experiment 108527 PARAMETER Experiment Name: Zm_5mM_NO_P Parameter: Timepoint (hr) Value: 6
  misc_feature: MA Experiment 108527 PARAMETER Experiment Name: Zm_5mM_NO_P Parameter: Tissue Value: Aerial
  misc_feature: MA Experiment 108527 PARAMETER Experiment Name: Zm_5mM_NO_P Parameter: Treatment Value: 5mM NO vs. No Treatment
  misc_feature: MA Experiment ID: 20000478 Result: Up-regulated in Transcription
  misc_feature: MA Experiment 20000478 PARAMETER Experiment Name: Zm_5mM_SA_P Parameter: Age (day) Value: 11
  misc_feature: MA Experiment 20000478 PARAMETER Experiment Name: Zm_5mM_SA_P Parameter: Organism Value: Zea mays
  misc_feature: MA Experiment 20000478 PARAMETER Experiment Name: Zm_5mM_SA_P Parameter: Plant Line Value: 35A19
  misc_feature: MA Experiment 20000478 PARAMETER Experiment Name: Zm_5mM_SA_P Parameter: Timepoint (hr) Value: 72
  misc_feature: MA Experiment 20000478 PARAMETER Experiment Name: Zm_5mM_SA_P Parameter: Tissue Value: Aerial
  misc_feature: MA Experiment 20000478 PARAMETER Experiment Name: Zm_5mM_SA_P Parameter: Treatment Value: 5mM SA vs. No Treatment
  misc_feature: MA Experiment ID: 20000626 Result: Up-regulated in Transcription
  misc_feature: MA Experiment 20000626 PARAMETER Experiment Name: Zm_Herbicide-Treatments_P Parameter: Timepoint (hr) Value: 12
  misc_feature: MA Experiment 20000626 PARAMETER Experiment Name: Zm_Herbicide-Treatments_P Parameter: Tissue Value: Aerial
  misc_feature: MA Experiment 20000626 PARAMETER Experiment Name: Zm_Herbicide-Treatments_P Parameter: Treatment Value: Roundup vs. No Treatment
  misc_feature: Pfam Name: MIP Pfam Description: Major intrinsic protein
accaccgcatcccacaacccccgagctcagcttagctccactccagctccaatcgcagtcgtgaccagagcgcgagagctagctagagggccgtgaaaatgccgatcaataggatcgccctggggagccaccaggaggtgtaccacccgggcgccctcaaggcggcgttcgctgagttcatctccaccctcatcttcgtcttcgccggccagggctccggcatggccttcagtgagtcctccgctgtccgctcctacccatgcatgcaacacaggctcgatagcctgtacacggcacgccccaccaacagcttcacgacttcttctaagctgttctttaaacatcttgtttaaaacaggctctagtatctctttgagctcagcttggtctgtcatgctctagcctctagcagtagcacaaggtcatggccggctcttttgagttcgacaccgaatgactgaaacgaaggggcagaaaaaaaagaatgtccttttcgtcctactagctagtaccaggctttcggtaggtatttctttaatacaaggccag

SEQ ID NO: 15020 - protein, 84 aa, Zea mays subsp. mays
  peptide (1)..(84): Ceres Seq. ID no. 13573208
  misc_feature: Pfam Name: MIP Pfam Description: Major intrinsic protein
  misc_feature (1)..(46): Homolog of NCBI NO: 3004950 NR Description: tonoplast intrinsic protein; ZmTIP1 [Zea mays]
  misc_feature (1)..(46): Homolog of NCBI NO: 1729971 NR Description: TONOPLAST INTRINSIC PROTEIN, GAMMA (GAMMA TIP)
  misc_feature (1)..(48): Homolog of NCBI NO: 629784 NR Description: tonoplast intrinsic protein gamma - barley
  misc_feature (1)..(48): Homolog of NCBI NO: 4099406 NR Description: gamma-type tonoplast intrinsic protein [Triticum
  misc_feature (1)..(49): Homolog of NCBI NO: 17940748 NR Description: aquaporin-like protein [Petunia x hybrida]
  misc_feature (1)..(49): Homolog of NCBI NO: 12006843 NR Description: putative gamma TIP [Nicotiana glauca]
  misc_feature (1)..(48): Homolog of NCBI NO: 6478150 NR Description: putative gamma tonoplast intrinsic protein (TIP)
  misc_feature (1)..(49): Homolog of NCBI NO: 4138262 NR Description: aquaporin 1 [Nicotiana tabacum]
  misc_feature (1)..(46): Homolog of NCBI NO: 9988412 NR Description: gamma tonoplast intrinsic protein [Pyrus communis]
  misc_feature (1)..(48): Homolog of NCBI NO: 1200161 NR Description: tonoplast intrinsic protein [Tulipa gesneriana]
MPINRIALGSHQEVYHPGALKAAFAEFISTLIFVFAGQGSGMAFSESSAVRSYPCMQHRLDSLYTARPTNSFTTSSKLFFKHLV

SEQ ID NO: 15021 - protein, 43 aa, Zea mays subsp. mays
  peptide (1)..(43): Ceres Seq. ID no. 13573209
  misc_feature: Pfam Name: MIP Pfam Description: Major intrinsic protein
MAFSESSAVRSYPCMQHRLDSLYTARPTNSFTTSSKLFFKHLV

SEQ ID NO: 15022 - DNA, 676 bp, Zea mays subsp. mays
  misc_feature (1)..(676): Ceres Seq. ID no. 12635492
  misc_feature: MA Experiment ID: 108527 Result: Up-regulated in Transcription
  misc_feature: MA Experiment 108527 PARAMETER Experiment Name: Zm_5mM_NO_P Parameter: Age (day) Value: 8
  misc_feature: MA Experiment 108527 PARAMETER Experiment Name: Zm_5mM_NO_P Parameter: Organism Value: Zea mays
  misc_feature: MA Experiment 108527 PARAMETER Experiment Name: Zm_5mM_NO_P Parameter: Plant Line Value: 35A19
  misc_feature: MA Experiment 108527 PARAMETER Experiment Name: Zm_5mM_NO_P Parameter: Timepoint (hr) Value: 6
  misc_feature: MA Experiment 108527 PARAMETER Experiment Name: Zm_5mM_NO_P Parameter: Tissue Value: Aerial
  misc_feature: MA Experiment 108527 PARAMETER Experiment Name: Zm_5mM_NO_P Parameter: Treatment Value: 5mM NO vs. No Treatment
tttttcaaatggcctccgccgtcgtctccgctgcgttgcgactcccgctcgctacccgccgattctccaactcctcgccgcggattagcttgcaacattccacgatctggattcgtcatctccgtagcatcacaacagcttcctccatgagccaactaaccagcgaaaccgatgcctcccgtactaacgacgagaactcggctgagaaaccagacgacgtaccagacgacgtcgtggttcaatacgtggtgcttagacgagatctgatcgattcgtggccactcgggagcgtcgtaacccagggatgccacgcgtcggttgcggcgatatggtcgttcaaagacgatcccgttacgcttcagtactgtgatccacagcacattgactctatgcacaaggtcactctggaagttaaaggagaaactcagatgttgaatttgtcagagaagttgaagtcaggaggaatctctcataaggtgtggatggagcagccggagaatattccgacttgtattgctacaaagccttatctcaaatctcaagtctctcctttcttcaagaagctcaaactttgcaagtgattcttctccattttatattaaaaaatctcatttataaagggacactcttttgaatgttaagtttttgcatatagagtaaagaaaagaagcagatg

SEQ ID NO: 15023 - protein, 192 aa, Zea mays subsp. mays
  peptide (1)..(192): Ceres Seq. ID no. 12635493
  misc_feature (3)..(192): Homolog of NCBI NO: 15238224 NR Description: putative protein; protein id: At5g10700.1 thaliana] >gi|10129648|emb|CAC08244.1| putative protein
  misc_feature (12)..(192): Homolog of NCBI NO: 38346909 NR Description: OSJNBb0015N08.9 [Oryza sativa (japonica
  misc_feature (78)..(192): Homolog of NCBI NO: 24647481 NR Description: CG14903-PA [Drosophila melanogaster]
  misc_feature (75)..(192): Homolog of NCBI NO: 23479593 NR Description: Drosophila melanogaster CG14903 gene product
  misc_feature (75)..(192): Homolog of NCBI NO: 23612187 NR Description: hypothetical protein [Plasmodium falciparum 3D7]
  misc_feature (77)..(192): Homolog of NCBI NO: 37546977 NR Description: similar to ENSANGP00000018456 [Homo sapiens]
  misc_feature (73)..(192): Homolog of NCBI NO: 27716785 NR Description: similar to CG14903-PA [Drosophila melanogaster]
  misc_feature (79)..(190): Homolog of NCBI NO: 25148624 NR Description: Low molecular weight phosphotyrosine protein [Caenorhabditis elegans] >gi|16604246|gb|AAF60890.3| Hypothetical
  misc_feature (79)..(190): Homolog of NCBI NO: 39585949 NR Description: Hypothetical protein CBG13912 [Caenorhabditis
  misc_feature (77)..(192): Homolog of NCBI NO: 29248553 NR Description: GLP_162_41645_41277 [Giardia lamblia ATCC 50803]
FQMASAVVSAALRLPLATRRFSNSSPRISLQHSTIWIRHLRSITTASSMSQLTSETDASRTNDENSAEKPDDVPDDVVVQYVVLRRDLIDSWPLGSVVTQGCHASVAAIWSFKDDPVTLQYCDPQHIDSMHKVTLEVKGETQMLNLSEKLKSGGISHKVWMEQPENIPTCIATKPYLKSQVSPFFKKLKLCK

SEQ ID NO: 15024 - protein, 190 aa, Zea mays subsp. mays
  peptide (1)..(190): Ceres Seq. ID no. 12635494
  misc_feature (1)..(190): Homolog of NCBI NO: 15238224 NR Description: putative protein; protein id: At5g10700.1 thaliana] >gi|10129648|emb|CAC08244.1| putative protein
  misc_feature (10)..(190): Homolog of NCBI NO: 38346909 NR Description: OSJNBb0015N08.9 [Oryza sativa (japonica
  misc_feature (76)..(190): Homolog of NCBI NO: 24647481 NR Description: CG14903-PA [Drosophila melanogaster]
  misc_feature (73)..(190): Homolog of NCBI NO: 23479593 NR Description: Drosophila melanogaster CG14903 gene product
  misc_feature (73)..(190): Homolog of NCBI NO: 23612187 NR Description: hypothetical protein [Plasmodium falciparum 3D7]
  misc_feature (75)..(190): Homolog of NCBI NO: 37546977 NR Description: similar to ENSANGP00000018456 [Homo sapiens]
  misc_feature (71)..(190): Homolog of NCBI NO: 27716785 NR Description: similar to CG14903-PA [Drosophila melanogaster]
  misc_feature (77)..(188): Homolog of NCBI NO: 25148624 NR Description: Low molecular weight phosphotyrosine protein [Caenorhabditis elegans] >gi|16604246|gb|AAF60890.3| Hypothetical
  misc_feature (77)..(188): Homolog of NCBI NO: 39585949 NR Description: Hypothetical protein CBG13912 [Caenorhabditis
  misc_feature (75)..(190): Homolog of NCBI NO: 29248553 NR Description: GLP_162_41645_41277 [Giardia lamblia ATCC 50803]
MASAVVSAALRLPLATRRFSNSSPRISLQHSTIWIRHLRSITTASSMSQLTSETDASRTNDENSAEKPDDVPDDVVVQYVVLRRDLIDSWPLGSVVTQGCHASVAAIWSFKDDPVTLQYCDPQHIDSMHKVTLEVKGETQMLNLSEKLKSGGISHKVWMEQPENIPTCIATKPYLKSQVSPFFKKLKLCK

SEQ ID NO: 15025 - protein, 144 aa, Zea mays subsp. mays
  peptide (1)..(144): Ceres Seq. ID no. 12635495
  misc_feature (29)..(144): Homolog of NCBI NO: 37546977 NR Description: similar to ENSANGP00000018456 [Homo sapiens]
  misc_feature (25)..(144): Homolog of NCBI NO: 27716785 NR Description: similar to CG14903-PA [Drosophila melanogaster]
  misc_feature (31)..(142): Homolog of NCBI NO: 25148624 NR Description: Low molecular weight phosphotyrosine protein [Caenorhabditis elegans] >gi|16604246|gb|AAF60890.3| Hypothetical
  misc_feature (31)..(142): Homolog of NCBI NO: 39585949 NR Description: Hypothetical protein CBG13912 [Caenorhabditis
  misc_feature (29)..(144): Homolog of NCBI NO: 29248553 NR Description: GLP_162_41645_41277 [Giardia lamblia ATCC 50803]
  misc_feature (1)..(144): Homolog of NCBI NO: 15238224 NR Description: putative protein; protein id: At5g10700.1 thaliana] >gi|10129648|emb|CAC08244.1| putative protein
  misc_feature (1)..(144): Homolog of NCBI NO: 38346909 NR Description: OSJNBb0015N08.9 [Oryza sativa (japonica
  misc_feature (30)..(144): Homolog of NCBI NO: 24647481 NR Description: CG14903-PA [Drosophila melanogaster]
  misc_feature (27)..(144): Homolog of NCBI NO: 23479593 NR Description: Drosophila melanogaster CG14903 gene product
  misc_feature (27)..(144): Homolog of NCBI NO: 23612187 NR Description: hypothetical protein [Plasmodium falciparum 3D7]
MSQLTSETDASRTNDENSAEKPDDVPDDVVVQYVVLRRDLIDSWPLGSVVTQGCHASVAAIWSFKDDPVTLQYCDPQHIDSMHKVTLEVKGETQMLNLSEKLKSGGISHKVWMEQPENIPTCIATKPYLKSQVSPFFKKLKLCK

SEQ ID NO: 15026 - DNA, 683 bp, Zea mays subsp. mays
  misc_feature (1)..(683): Ceres Seq. ID no. 13599266
  misc_feature: MA Experiment ID: 108689 Result: Up-regulated in Transcription
  misc_feature: MA Experiment 108689 PARAMETER Experiment Name: Zm_Drought_Roots_P Parameter: Age (day) Value: 9
  misc_feature: MA Experiment 108689 PARAMETER Experiment Name: Zm_Drought_Roots_P Parameter: Organism Value: Zea mays
  misc_feature: MA Experiment 108689 PARAMETER Experiment Name: Zm_Drought_Roots_P Parameter: Plant Line Value: 35A19
  misc_feature: MA Experiment 108689 PARAMETER Experiment Name: Zm_Drought_Roots_P Parameter: Timepoint (hr) Value: 24
  misc_feature: MA Experiment 108689 PARAMETER Experiment Name: Zm_Drought_Roots_P Parameter: Tissue Value: Roots
  misc_feature: MA Experiment 108689 PARAMETER Experiment Name: Zm_Drought_Roots_P Parameter: Treatment Value: Drought vs. No Drought
agtttatctctctctctgttgcaatgtcgaagagcggaagatattgcttaggatcaatggaagacatccgagcagtattccagcgcttcgacaaaaacggagacgggaaaatctccatcgacgagctcaaagacgtgatcggagctctcagtcccacggcgtcgccggaagaaacgacgttgatgatgaaagagttcgatctcgacggtaacggatacatcgacatggacgagttcgttgctctgttccaaaccgaagacggtggcgatattcgagatctgaaggaagcgtttgatctgtacgatttggatggaaacggacggatctctgtgaacgagcttcactcggtgatgaagaatctcggcgagaagtgttcggttgaggattgcaagaggatcattagcaaagttgatgctgacggtgacggttgtgttaactttgaagagtttaagaagatgatgatgaacggcagagctactgcttgacttaacggcgaggaatcgtttccttttttttttttttgtatatattcaatttttagttttaggttttatcgattaaactggattaatctttgtttttcctttggttttttaatcttatggattaattagggatttttatttcttaattgtaaggtttaatcgatttttttattttaataattatttattagtatggtt

SEQ ID NO: 15027 - protein, 160 aa, Zea mays subsp. mays
  peptide (1)..(160): Ceres Seq. ID no. 13599267
  misc_feature (128)..(156): Pfam Name: EF hand Pfam Description: EF hand
  misc_feature (8)..(158): Homolog of NCBI NO: 21618074 NR Description: calmodulin-related protein [Arabidopsis thaliana]
  misc_feature (9)..(156): Homolog of NCBI NO: 15240340 NR Description: calmodulin-related protein 2, touch-induced (TCH2)
  misc_feature (8)..(158): Homolog of NCBI NO: 18408502 NR Description: calmodulin-related protein, putative [Arabidopsis
  misc_feature (25)..(153): Homolog of NCBI NO: 13397927 NR Description: putative calmodulin-related protein [Medicago
  misc_feature (19)..(158): Homolog of NCBI NO: 14589311 NR Description: calcium binding protein [Sesbania rostrata]
  misc_feature (16)..(153): Homolog of NCBI NO: 15221030 NR Description: calcium-binding protein, putative [Arabidopsis
  misc_feature (9)..(155): Homolog of NCBI NO: 6901654 NR Description: calcium-binding protein [Olea europaea]
  misc_feature (9)..(155): Homolog of NCBI NO: 14423648 NR Description: Calcium-binding allergen Ole e 8 (PCA18/PCA23)
  misc_feature (21)..(158): Homolog of NCBI NO: 34895640 NR Description: OSJNBa0083M16.33 [Oryza sativa (japonica
  misc_feature (19)..(156): Homolog of NCBI NO: 15221781 NR Description: polcalcin (calcium-binding pollen allergen),
FISLSVAMSKSGRYCLGSMEDIRAVFQRFDKNGDGKISIDELKDVIGALSPTASPEETTLMMKEFDLDGNGYIDMDEFVALFQTEDGGDIRDLKEAFDLYDLDGNGRISVNELHSVMKNLGEKCSVEDCKRIISKVDADGDGCVNFEEFKKMMMNGRATA

SEQ ID NO: 15028 - protein, 153 aa, Zea mays subsp. mays
  peptide (1)..(153): Ceres Seq. ID no. 13599268
  misc_feature (121)..(149): Pfam Name: EF hand Pfam Description: EF hand
  misc_feature (1)..(151): Homolog of NCBI NO: 21618074 NR Description: calmodulin-related protein [Arabidopsis thaliana]
  misc_feature (2)..(149): Homolog of NCBI NO: 15240340 NR Description: calmodulin-related protein 2, touch-induced (TCH2)
  misc_feature (1)..(151): Homolog of NCBI NO: 18408502 NR Description: calmodulin-related protein, putative [Arabidopsis
  misc_feature (18)..(146): Homolog of NCBI NO: 13397927 NR Description: putative calmodulin-related protein [Medicago
  misc_feature (12)..(151): Homolog of NCBI NO: 14589311 NR Description: calcium binding protein [Sesbania rostrata]
  misc_feature (9)..(146): Homolog of NCBI NO: 15221030 NR Description: calcium-binding protein, putative [Arabidopsis
  misc_feature (2)..(148): Homolog of NCBI NO: 6901654 NR Description: calcium-binding protein [Olea europaea]
  misc_feature (2)..(148): Homolog of NCBI NO: 14423648 NR Description: Calcium-binding allergen Ole e 8 (PCA18/PCA23)
  misc_feature (14)..(151): Homolog of NCBI NO: 34895640 NR Description: OSJNBa0083M16.33 [Oryza sativa (japonica
  misc_feature (12)..(149): Homolog of NCBI NO: 15221781 NR Description: polcalcin (calcium-binding pollen allergen),
MSKSGRYCLGSMEDIRAVFQRFDKNGDGKISIDELKDVIGALSPTASPEETTLMMKEFDLDGNGYIDMDEFVALFQTEDGGDIRDLKEAFDLYDLDGNGRISVNELHSVMKNLGEKCSVEDCKRIISKVDADGDGCVNFEEFKKMMMNGRATA

SEQ ID NO: 15029 - protein, 142 aa, Zea mays subsp. mays
  peptide (1)..(142): Ceres Seq. ID no. 13599269
  misc_feature (110)..(138): Pfam Name: EF hand Pfam Description: EF hand
  misc_feature (1)..(140): Homolog of NCBI NO: 21618074 NR Description: calmodulin-related protein [Arabidopsis thaliana]
  misc_feature (1)..(138): Homolog of NCBI NO: 15240340 NR Description: calmodulin-related protein 2, touch-induced (TCH2)
  misc_feature (1)..(140): Homolog of NCBI NO: 18408502 NR Description: calmodulin-related protein, putative [Arabidopsis
  misc_feature (7)..(135): Homolog of NCBI NO: 13397927 NR Description: putative calmodulin-related protein [Medicago
  misc_feature (1)..(140): Homolog of NCBI NO: 14589311 NR Description: calcium binding protein [Sesbania rostrata]
  misc_feature (1)..(135): Homolog of NCBI NO: 15221030 NR Description: calcium-binding protein, putative [Arabidopsis
  misc_feature (1)..(137): Homolog of NCBI NO: 6901654 NR Description: calcium-binding protein [Olea europaea]
  misc_feature (1)..(137): Homolog of NCBI NO: 14423648 NR Description: Calcium-binding allergen Ole e 8 (PCA18/PCA23)
  misc_feature (3)..(140): Homolog of NCBI NO: 34895640 NR Description: OSJNBa0083M16.33 [Oryza sativa (japonica
  misc_feature (1)..(138): Homolog of NCBI NO: 15221781 NR Description: polcalcin (calcium-binding pollen allergen),
MEDIRAVFQRFDKNGDGKISIDELKDVIGALSPTASPEETTLMMKEFDLDGNGYIDMDEFVALFQTEDGGDIRDLKEAFDLYDLDGNGRISVNELHSVMKNLGEKCSVEDCKRIISKVDADGDGCVNFEEFKKMMMNGRATA

SEQ ID NO: 15030 - DNA, 1059 bp, Zea mays subsp. mays
  misc_feature (1)..(1059): Ceres Seq. ID no. 13623013
  misc_feature: MA Experiment ID: 108515 Result: Up-regulated in Transcription
  misc_feature: MA Experiment 108515 PARAMETER Experiment Name: Zm_2mM_SA_P Parameter: Age (day) Value: 8
  misc_feature: MA Experiment 108515 PARAMETER Experiment Name: Zm_2mM_SA_P Parameter: Organism Value: Zea mays
  misc_feature: MA Experiment 108515 PARAMETER Experiment Name: Zm_2mM_SA_P Parameter: Plant Line Value: 35A19
  misc_feature: MA Experiment 108515 PARAMETER Experiment Name: Zm_2mM_SA_P Parameter: Timepoint (hr) Value: 12
  misc_feature: MA Experiment 108515 PARAMETER Experiment Name: Zm_2mM_SA_P Parameter: Tissue Value: Aerial
  misc_feature: MA Experiment 108515 PARAMETER Experiment Name: Zm_2mM_SA_P Parameter: Treatment Value: 2mM SA vs. No Treatment
  misc_feature: MA Experiment ID: 108527 Result: Up-regulated in Transcription
  misc_feature: MA Experiment 108527 PARAMETER Experiment Name: Zm_5mM_NO_P Parameter: Age (day) Value: 8
  misc_feature: MA Experiment 108527 PARAMETER Experiment Name: Zm_5mM_NO_P Parameter: Organism Value: Zea mays
  misc_feature: MA Experiment 108527 PARAMETER Experiment Name: Zm_5mM_NO_P Parameter: Plant Line Value: 35A19
  misc_feature: MA Experiment 108527 PARAMETER Experiment Name: Zm_5mM_NO_P Parameter: Timepoint (hr) Value: 6
  misc_feature: MA Experiment 108527 PARAMETER Experiment Name: Zm_5mM_NO_P Parameter: Tissue Value: Aerial
  misc_feature: MA Experiment 108527 PARAMETER Experiment Name: Zm_5mM_NO_P Parameter: Treatment Value: 5mM NO vs. No Treatment
  misc_feature: MA Experiment ID: 108528 Result: Down-regulated in Transcription
  misc_feature: MA Experiment 108528 PARAMETER Experiment Name: Zm_Imbibed_Seeds_P Parameter: Age (day) Value: 5 vs. 2
  misc_feature: MA Experiment 108528 PARAMETER Experiment Name: Zm_Imbibed_Seeds_P Parameter: Organism Value: Zea mays
  misc_feature: MA Experiment 108528 PARAMETER Experiment Name: Zm_Imbibed_Seeds_P Parameter: Plant Line Value: 35A19
  misc_feature: MA Experiment 108528 PARAMETER Experiment Name: Zm_Imbibed_Seeds_P Parameter: Tissue Value: Aerial vs. Embryo
  misc_feature: MA Experiment ID: 108530 Result: Down-regulated in Transcription
  misc_feature: MA Experiment 108530 PARAMETER Experiment Name: Zm_Imbibed_Seeds_P Parameter: Age (day) Value: 6 vs. 2
  misc_feature: MA Experiment 108530 PARAMETER Experiment Name: Zm_Imbibed_Seeds_P Parameter: Organism Value: Zea mays
  misc_feature: MA Experiment 108530 PARAMETER Experiment Name: Zm_Imbibed_Seeds_P Parameter: Plant Line Value: 35A19
  misc_feature: MA Experiment 108530 PARAMETER Experiment Name: Zm_Imbibed_Seeds_P Parameter: Tissue Value: Aerial vs. Embryo
  misc_feature: MA Experiment ID: 108534 Result: Up-regulated in Transcription
  misc_feature: MA Experiment 108534 PARAMETER Experiment Name: Zm_4deg_Cold_P Parameter: Age (hr) Value: 8
  misc_feature: MA Experiment 108534 PARAMETER Experiment Name: Zm_4deg_Cold_P Parameter: Organism Value: Zea mays
  misc_feature: MA Experiment 108534 PARAMETER Experiment Name: Zm_4deg_Cold_P Parameter: Plant Line Value: 35A19
  misc_feature: MA Experiment 108534 PARAMETER Experiment Name: Zm_4deg_Cold_P Parameter: Temperature (deg C) Value: 4 vs. 22
  misc_feature: MA Experiment 108534 PARAMETER Experiment Name: Zm_4deg_Cold_P Parameter: Timepoint (hr) Value: 6
  misc_feature: MA Experiment 108534 PARAMETER Experiment Name: Zm_4deg_Cold_P Parameter: Tissue Value: Aerial
  misc_feature: MA Experiment ID: 108535 Result: Down-regulated in Transcription
  misc_feature: MA Experiment 108535 PARAMETER Experiment Name: Zm_Meristem_P Parameter: Age (day) Value: 8
  misc_feature: MA Experiment 108535 PARAMETER Experiment Name: Zm_Meristem_P Parameter: Organism Value: Zea mays
  misc_feature: MA Experiment 108535 PARAMETER Experiment Name: Zm_Meristem_P Parameter: Plant Line Value: 35A19
  misc_feature: MA Experiment 108535 PARAMETER Experiment Name: Zm_Meristem_P Parameter: Tissue Value: Root Meristem vs. Above Root Meristem
  misc_feature: MA Experiment ID: 108543 Result: Down-regulated in Transcription
  misc_feature: MA Experiment ID: 108545 Result: Down-regulated in Transcription
  misc_feature: MA Experiment 108545 PARAMETER Experiment Name: Zm_Imbibed_Seeds_P Parameter: Age (day) Value: 3 vs. 2
  misc_feature: MA Experiment 108545 PARAMETER Experiment Name: Zm_Imbibed_Seeds_P Parameter: Organism Value: Zea mays
  misc_feature: MA Experiment 108545 PARAMETER Experiment Name: Zm_Imbibed_Seeds_P Parameter: Plant Line Value: 35A19
  misc_feature: MA Experiment 108545 PARAMETER Experiment Name: Zm_Imbibed_Seeds_P Parameter: Tissue Value: Aerial vs. Embryo
  misc_feature: MA Experiment ID: 108547 Result: Down-regulated in Transcription
  misc_feature: MA Experiment 108547 PARAMETER Experiment Name: Zm_Imbibed_Seeds_P Parameter: Age (day) Value: 4 vs. 2
  misc_feature: MA Experiment 108547 PARAMETER Experiment Name: Zm_Imbibed_Seeds_P Parameter: Organism Value: Zea mays
  misc_feature: MA Experiment 108547 PARAMETER Experiment Name: Zm_Imbibed_Seeds_P Parameter: Plant Line Value: 35A19
  misc_feature: MA Experiment 108547 PARAMETER Experiment Name: Zm_Imbibed_Seeds_P Parameter: Tissue Value: Aerial vs. Embryo
  misc_feature: MA Experiment ID: 108559 Result: Up-regulated in Transcription
  misc_feature: MA Experiment 108559 PARAMETER Experiment Name: Zm_5mM_NO_P Parameter: Age (day) Value: 8
  misc_feature: MA Experiment 108559 PARAMETER Experiment Name: Zm_5mM_NO_P Parameter: Organism Value: Zea mays
  misc_feature: MA Experiment 108559 PARAMETER Experiment Name: Zm_5mM_NO_P Parameter: Plant Line Value: 35A19
  misc_feature: MA Experiment 108559 PARAMETER Experiment Name: Zm_5mM_NO_P Parameter: Timepoint (hr) Value: 12
  misc_feature: MA Experiment 108559 PARAMETER Experiment Name: Zm_5mM_NO_P Parameter: Tissue Value: Aerial
  misc_feature: MA Experiment 108559 PARAMETER Experiment Name: Zm_5mM_NO_P Parameter: Treatment Value: 5mM NO vs. No Treatment
  misc_feature: MA Experiment ID: 108597 Result: Up-regulated in Transcription
  misc_feature: MA Experiment 108597 PARAMETER Experiment Name: Zm_100uM_ABA_P Parameter: Age (day) Value: 9
  misc_feature: MA Experiment 108597 PARAMETER Experiment Name: Zm_100uM_ABA_P Parameter: Organism Value: Zea mays
  misc_feature: MA Experiment 108597 PARAMETER Experiment Name: Zm_100uM_ABA_P Parameter: Plant Line Value: 35A19
  misc_feature: MA Experiment 108597 PARAMETER Experiment Name: Zm_100uM_ABA_P Parameter: Timepoint (hr) Value: 24
  misc_feature: MA Experiment 108597 PARAMETER Experiment Name: Zm_100uM_ABA_P Parameter: Tissue Value: Aerial
  misc_feature: MA Experiment 108597 PARAMETER Experiment Name: Zm_100uM_ABA_P Parameter: Treatment Value: 100uM ABA vs. No Treatment
  misc_feature: MA Experiment ID: 20000108 Result: Down-regulated in Transcription
  misc_feature: MA Experiment 20000108 PARAMETER Experiment Name: Zm_Root-Tips_P Parameter: Age (day) Value: 12
  misc_feature: MA Experiment 20000108 PARAMETER Experiment Name: Zm_Root-Tips_P Parameter: Organism Value: Zea mays
  misc_feature: MA Experiment 20000108 PARAMETER Experiment Name: Zm_Root-Tips_P Parameter: Tissue Value: Root tips vs. Root mid region    35
  misc_feature: MA Experiment 20000108 PARAMETER Experiment Name: Zm_Root-Tips_P Parameter: Tissue Value: Root tips vs. Root mid region   Sequence Listing-Misc Features (4)
  misc_feature: MA Experiment ID: 20000477 Result: Up-regulated in Transcription
  misc_feature: MA Experiment 20000477 PARAMETER Experiment Name: Zm_5mM_SA_P Parameter: Age (day) Value: 10
  misc_feature: MA Experiment 20000477 PARAMETER Experiment Name: Zm_5mM_SA_P Parameter: Organism Value: Zea mays
  misc_feature: MA Experiment 20000477 PARAMETER Experiment Name: Zm_5mM_SA_P Parameter: Plant Line Value: 35A19
  misc_feature: MA Experiment 20000477 PARAMETER Experiment Name: Zm_5mM_SA_P Parameter: Timepoint (hr) Value: 48
  misc_feature: MA Experiment 20000477 PARAMETER Experiment Name: Zm_5mM_SA_P Parameter: Tissue Value: Aerial
  misc_feature: MA Experiment 20000477 PARAMETER Experiment Name: Zm_5mM_SA_P Parameter: Treatment Value: 5mM SA vs. No Treatment
  misc_feature: MA Experiment ID: 20000478 Result: Up-regulated in Transcription
  misc_feature: MA Experiment 20000478 PARAMETER Experiment Name: Zm_5mM_SA_P Parameter: Age (day) Value: 11
  misc_feature: MA Experiment 20000478 PARAMETER Experiment Name: Zm_5mM_SA_P Parameter: Organism Value: Zea mays
  misc_feature: MA Experiment 20000478 PARAMETER Experiment Name: Zm_5mM_SA_P Parameter: Plant Line Value: 35A19
  misc_feature: MA Experiment 20000478 PARAMETER Experiment Name: Zm_5mM_SA_P Parameter: Timepoint (hr) Value: 72
  misc_feature: MA Experiment 20000478 PARAMETER Experiment Name: Zm_5mM_SA_P Parameter: Tissue Value: Aerial
  misc_feature: MA Experiment 20000478 PARAMETER Experiment Name: Zm_5mM_SA_P Parameter: Treatment Value: 5mM SA vs. No Treatment
  misc_feature: MA Experiment ID: 20000487 Result: Up-regulated in Transcription
  misc_feature: MA Experiment 20000487 PARAMETER Experiment Name: Zm_50mM_NH4NO3_L_to_H_P Parameter: Organism Value: Zea mays
  misc_feature: MA Experiment 20000487 PARAMETER Experiment Name: Zm_50mM_NH4NO3_L_to_H_P Parameter: Timepoint (hr) Value: 4
  misc_feature: MA Experiment 20000487 PARAMETER Experiment Name: Zm_50mM_NH4NO3_L_to_H_P Parameter: Tissue Value: Leaves
  misc_feature: MA Experiment 20000487 PARAMETER Experiment Name: Zm_50mM_NH4NO3_L_to_H_P Parameter: Treatment Value: 50mM NH4NO3 vs. 100mM Mannitol
  misc_feature: MA Experiment ID: 20000535 Result: Up-regulated in Transcription
  misc_feature: MA Experiment 20000535 PARAMETER Experiment Name: Zm_Hybrid_Seed_Dev_P Parameter: DAP Value: 30 vs. 12
  misc_feature: MA Experiment 20000535 PARAMETER Experiment Name: Zm_Hybrid_Seed_Dev_P Parameter: Organism Value: Zea mays
  misc_feature: MA Experiment 20000535 PARAMETER Experiment Name: Zm_Hybrid_Seed_Dev_P Parameter: Plant Line Value: 35A19
  misc_feature: MA Experiment 20000535 PARAMETER Experiment Name: Zm_Hybrid_Seed_Dev_P Parameter: Tissue Value: Embryo vs. Unfert Floret
  misc_feature: MA Experiment ID: 20000626 Result: Up-regulated in Transcription
  misc_feature: MA Experiment 20000626 PARAMETER Experiment Name: Zm_Herbicide-Treatments_P Parameter: Timepoint (hr) Value: 12
  misc_feature: MA Experiment 20000626 PARAMETER Experiment Name: Zm_Herbicide-Treatments_P Parameter: Tissue Value: Aerial
  misc_feature: MA Experiment 20000626 PARAMETER Experiment Name: Zm_Herbicide-Treatments_P Parameter: Treatment Value: Roundup vs. No Treatment
  misc_feature: MA Experiment ID: 20000629 Result: Up-regulated in Transcription
  misc_feature: MA Experiment 20000629 PARAMETER Experiment Name: Zm_Herbicide-Treatments_P Parameter: Timepoint (hr) Value: 12
  misc_feature: MA Experiment 20000629 PARAMETER Experiment Name: Zm_Herbicide-Treatments_P Parameter: Tissue Value: Aerial
  misc_feature: MA Experiment 20000629 PARAMETER Experiment Name: Zm_Herbicide-Treatments_P Parameter: Treatment Value: Trimec vs. No Treatment
  misc_feature: MA Experiment ID: 20000633 Result: Up-regulated in Transcription
  misc_feature: MA Experiment 20000633 PARAMETER Experiment Name: Zm_Herbicide-Treatments_P Parameter: Timepoint (hr) Value: 4
  misc_feature: MA Experiment 20000633 PARAMETER Experiment Name: Zm_Herbicide-Treatments_P Parameter: Tissue Value: Aerial
  misc_feature: MA Experiment 20000633 PARAMETER Experiment Name: Zm_Herbicide-Treatments_P Parameter: Treatment Value: Trimec vs. No Treatment
  misc_feature: MA Experiment ID: 20001608 Result: Down-regulated in Transcription
  misc_feature: MA Experiment 20001608 PARAMETER Experiment Name: Zm_50ppm_KNO3_L-to-H_P Parameter: Age (day) Value: 21
  misc_feature: MA Experiment 20001608 PARAMETER Experiment Name: Zm_50ppm_KNO3_L-to-H_P Parameter: Organism Value: Zea mays
  misc_feature: MA Experiment 20001608 PARAMETER Experiment Name: Zm_50ppm_KNO3_L-to-H_P Parameter: Plant Line Value: 35A19
  misc_feature: MA Experiment 20001608 PARAMETER Experiment Name: Zm_50ppm_KNO3_L-to-H_P Parameter: Timepoint (hr) Value: 48
  misc_feature: MA Experiment 20001608 PARAMETER Experiment Name: Zm_50ppm_KNO3_L-to-H_P Parameter: Tissue Value: Shoots
  misc_feature: MA Experiment 20001608 PARAMETER Experiment Name: Zm_50ppm_KNO3_L-to-H_P Parameter: Treatment Value: 50ppm KNO3 vs. 50ppm KCl
gaacagaaccgaaacctcagacactctgcatatatcctctgcgcgtgtatctcgtcgaacagagccgaaagctggagcttccaatggcgggaggcaacgacctgaaggtgctcggcgtgtggacgagcccgttcgtgatccgggtccgcatcgtgctcaacctgaagggcctggcgtacgagtacgtggaggaggacctcggcaacaagagcgcgctcctcctgggatccaacccggtgcacaagagcgtgccggtgctcctccacgccggccgcgccataaacgagtcccaggtcatcctgcagtacatcgacgaggtgtgggcggggacggggccggccgtgcttccggccgacccctacgagcgcgcggtggcgcggttctggggcgcgtacatcgacgacaaggtggagtcggcgtggctggggatgctgttcaggtgcgcgaacgaggaggagagggcggcggcggtggcgcgcgcccgcgaggcgctcgacgcgctggagggcgcgttccgggactgctccagggggaggccgttcttcggcggcgacgacatcgggttcgtggacgccgttctcggcgggtacctcggctggttcggggccgtcggcaggatcatcgggagcaggctcatcgacccggcccggacgccgctgctggccgcgtgggaggaccggttccgcgccgccgacgtggccaagggcgtcgtgcccgacgacctcgacaagatgctcgcgttcctgcagaccctgcgcgctatgaactacgccaagtgagagtgtttcgtcgcatgaacgtgtgccgtgccgtgcacgacctatgatcagttcatgtcgatacgtctatcactcagttttgcttcttccgtcaataatcggtgtgctgaatacatgtacaacagctgcctataattttgcttctttcttctaatacctccgtttttaatttgatagttcaactttataataacaaatgtcaaatttaaaaaaaaaatcggaaggagtatttttttaatacatccaagtccatccaataaaagtgctcgtggggctttct

SEQ ID NO: 15031 - protein, 274 aa, Zea mays subsp. mays
  peptide (1)..(274): Ceres Seq. ID no. 13623014
  misc_feature (170)..(240): Homolog of NCBI NO: 15430719 NR Description: putative glutathione S-transferase OsGSTU11
  misc_feature (92)..(214): Homolog of NCBI NO: 729206 NR Description: PROBABLE GLUTATHIONE S-TRANSFERASE (28 KD PROTEIN) >gi|287399|dbj|BAA01632.1| chilling tolerance related
  misc_feature (25)..(240): Homolog of NCBI NO: 29829093 NR Description: putative translation initiation factor IF-2
  misc_feature (7)..(262): Homolog of NCBI NO: 29830954 NR Description: putative GntR-family transcriptional regulator
  misc_feature (13)..(253): Homolog of NCBI NO: 25989121 NR Description: putative PHA synthase [Streptomyces aureofaciens]
NRTETSDTLHISSARVSRRTEPKAGASNGGRQRPEGARRVDEPVRDPGPHRAQPEGPGVRVRGGGPRQQERAPPGIQPGAQERAGAPPRRPRHKRVPGHPAVHRRGVGGDGAGRASGRPLRARGGAVLGRVHRRQGGVGVAGDAVQVRERGGEGGGGGARPRGARRAGGRVPGLLQGEAVLRRRRHRVRGRRSRRVPRLVRGRRQDHREQAHRPGPDAAAGRVGGPVPRRRRGQGRRARRPRQDARVPADPARYELRQVRVFRRMNVCRAVHDL

SEQ ID NO: 15032 - protein, 258 aa, Zea mays subsp. mays
  peptide (1)..(258): Ceres Seq. ID no. 13623015
  misc_feature (115)..(231): Pfam Name: Glutathione S-transferase, C-terminal domain Pfam Description: Glutathione S-transferase, C-terminal domain
  misc_feature (28)..(258): Homolog of NCBI NO: 11385511 NR Description: glutathione S-transferase GST 30 [Zea mays]
  misc_feature (30)..(258): Homolog of NCBI NO: 11385501 NR Description: glutathione S-transferase GST 25 [Zea mays]
  misc_feature (28)..(253): Homolog of NCBI NO: 20067421 NR Description: glutathione transferase [Triticum aestivum]
  misc_feature (28)..(258): Homolog of NCBI NO: 37536360 NR Description: putative glutathione S-transferase [Oryza sativa
  misc_feature (28)..(258): Homolog of NCBI NO: 37536368 NR Description: putative glutathione S-transferase [Oryza sativa
  misc_feature (30)..(249): Homolog of NCBI NO: 11385527 NR Description: glutathione S-transferase GST 38 [Zea mays]
  misc_feature (30)..(249): Homolog of NCBI NO: 37536358 NR Description: putative glutathione S-transferase [Oryza sativa
  misc_feature (28)..(253): Homolog of NCBI NO: 11385535 NR Description: glutathione S-transferase GST 42 [Zea mays]
  misc_feature (27)..(252): Homolog of NCBI NO: 11177837 NR Description: putative glutathione S-transferase OsGSTU2 [Oryza
  misc_feature (23)..(252): Homolog of NCBI NO: 6856103 NR Description: glutathione S-transferase [Gossypium hirsutum]
TEPKPQTLCIYPLRVYLVEQSRKLELPMAGGNDLKVLGVWTSPFVIRVRIVLNLKGLAYEYVEEDLGNKSALLLGSNPVHKSVPVLLHAGRAINESQVILQYIDEVWAGTGPAVLPADPYERAVARFWGAYIDDKVESAWLGMLFRCANEEERAAAVARAREALDALEGAFRDCSRGRPFFGGDDIGFVDAVLGGYLGWFGAVGRIIGSRLIDPARTPLLAAWEDRFRAADVAKGVVPDDLDKMLAFLQTLRAMNYAK

SEQ ID NO: 15033 - protein, 231 aa, Zea mays subsp. mays
  peptide (1)..(231): Ceres Seq. ID no. 13623016
  misc_feature (88)..(204): Pfam Name: Glutathione S-transferase, C-terminal domain Pfam Description: Glutathione S-transferase, C-terminal domain
  misc_feature (1)..(231): Homolog of NCBI NO: 11385511 NR Description: glutathione S-transferase GST 30 [Zea mays]
  misc_feature (3)..(231): Homolog of NCBI NO: 11385501 NR Description: glutathione S-transferase GST 25 [Zea mays]
  misc_feature (1)..(226): Homolog of NCBI NO: 20067421 NR Description: glutathione transferase [Triticum aestivum]
  misc_feature (1)..(231): Homolog of NCBI NO: 37536360 NR Description: putative glutathione S-transferase [Oryza sativa
  misc_feature (1)..(231): Homolog of NCBI NO: 37536368 NR Description: putative glutathione S-transferase [Oryza sativa
  misc_feature (3)..(222): Homolog of NCBI NO: 11385527 NR Description: glutathione S-transferase GST 38 [Zea mays]
  misc_feature (3)..(222): Homolog of NCBI NO: 37536358 NR Description: putative glutathione S-transferase [Oryza sativa
  misc_feature (1)..(226): Homolog of NCBI NO: 11385535 NR Description: glutathione S-transferase GST 42 [Zea mays]
  misc_feature (1)..(225): Homolog of NCBI NO: 11177837 NR Description: putative glutathione S-transferase OsGSTU2 [Oryza
  misc_feature (1)..(225): Homolog of NCBI NO: 6856103 NR Description: glutathione S-transferase [Gossypium hirsutum]
MAGGNDLKVLGVWTSPFVIRVRIVLNLKGLAYEYVEEDLGNKSALLLGSNPVHKSVPVLLHAGRAINESQVILQYIDEVWAGTGPAVLPADPYERAVARFWGAYIDDKVESAWLGMLFRCANEEERAAAVARAREALDALEGAFRDCSRGRPFFGGDDIGFVDAVLGGYLGWFGAVGRIIGSRLIDPARTPLLAAWEDRFRAADVAKGVVPDDLDKMLAFLQTLRAMNYAK

SEQ ID NO: 15034 - DNA, 502 bp, Zea mays subsp. mays
  misc_feature (1)..(502): Ceres Seq. ID no. 5008167
  misc_feature: MA Experiment ID: 108522 Result: Up-regulated in Transcription
  misc_feature: MA Experiment 108522 PARAMETER Experiment Name: Zm_42deg_Heat_P Parameter: Age (day) Value: 8
  misc_feature: MA Experiment 108522 PARAMETER Experiment Name: Zm_42deg_Heat_P Parameter: Organism Value: Zea mays
  misc_feature: MA Experiment 108522 PARAMETER Experiment Name: Zm_42deg_Heat_P Parameter: Plant Line Value: 35A19
  misc_feature: MA Experiment 108522 PARAMETER Experiment Name: Zm_42deg_Heat_P Parameter: Temperature (deg C) Value: 42 vs. 22
  misc_feature: MA Experiment 108522 PARAMETER Experiment Name: Zm_42deg_Heat_P Parameter: Timepoint (hr) Value: 1
  misc_feature: MA Experiment 108522 PARAMETER Experiment Name: Zm_42deg_Heat_P Parameter: Tissue Value: Aerial
  misc_feature: MA Experiment ID: 108523 Result: Up-regulated in Transcription
  misc_feature: MA Experiment 108523 PARAMETER Experiment Name: Zm_42deg_Heat_P Parameter: Age (day) Value: 8
  misc_feature: MA Experiment 108523 PARAMETER Experiment Name: Zm_42deg_Heat_P Parameter: Organism Value: Zea mays
  misc_feature: MA Experiment 108523 PARAMETER Experiment Name: Zm_42deg_Heat_P Parameter: Plant Line Value: 35A19
  misc_feature: MA Experiment 108523 PARAMETER Experiment Name: Zm_42deg_Heat_P Parameter: Temperature (deg C) Value: 42 vs. 22
  misc_feature: MA Experiment 108523 PARAMETER Experiment Name: Zm_42deg_Heat_P Parameter: Timepoint (hr) Value: 6
  misc_feature: MA Experiment 108523 PARAMETER Experiment Name: Zm_42deg_Heat_P Parameter: Tissue Value: Aerial
atcagaagctagaagcctagagcagccaagaaaagcacatacccgagtcgccgaaacaacaacaatcccaatcccccctcgtcactcaaaactcgagctcgagcaacaatgtcgctgattcgccgtggaagcgcattcgaccccttctccctcgacctctgggaccccttccagggcttatttcccttcggctctggaagcagcagcagcagcagcctgttcccctcgttcggaggcaccaccaccagctcggagacggccgccttcgccggcgctcgcgtcgactggaaggagacgccggaggcgcacgtgttcaagaccgacgtgccggggctgaagaaggaggaggtgaaggtggagctggaggacggcaacgtgctccagatcagcggcgagcgctgcaaggagcaggaggagaagacggacacctggcaccgcgtggagcgcagcagcggcaagttcctgcgcaggttccgcctgacggagaacgccaggacggagc

SEQ ID NO: 15035 - protein, 131 aa, Zea mays subsp. mays
  peptide (1)..(131): Ceres Seq. ID no. 5008168
  misc_feature (1)..(130): Homolog of NCBI NO: 34902026 NR Description: unknown protein [Oryza sativa (japonica
  misc_feature (1)..(130): Homolog of NCBI NO: 7441293 NR Description: heat shock protein 17.9 - pearl millet
  misc_feature (1)..(130): Homolog of NCBI NO: 34902016 NR Description: putative class I low-molecular-weight heat shock
  misc_feature (1)..(130): Homolog of NCBI NO: 2119194 NR Description: low-molecular-weight heat-shock protein - rice
  misc_feature (1)..(130): Homolog of NCBI NO: 34902028 NR Description: shock protein, low molecular weight [Oryza sativa
  misc_feature (1)..(130): Homolog of NCBI NO: 1213073 NR Description: heat shock protein 17.8 [Oryza sativa]
  misc_feature (1)..(130): Homolog of NCBI NO: 34902024 NR Description: unknown protein [Oryza sativa (japonica >gi|1815660|gb|AAC78392.1| low molecular mass heat shock protein [Oryza sativa] >gi|29893628|gb|AAP06882.1| unknown protein [Oryza
  misc_feature (1)..(130): Homolog of NCBI NO: 399937 NR Description: 17.4 KD CLASS I HEAT SHOCK PROTEIN
  misc_feature (1)..(130): Homolog of NCBI NO: 422000 NR Description: heat shock protein, low molecular weight (clone - rice >gi|169801|gb|AAB46378.1| LMW heat shock protein [Oryza
  misc_feature (1)..(130): Homolog of NCBI NO: 25044839 NR Description: class-1 LMW heat shock protein [Ananas comosus]
MSLIRRGSAFDPFSLDLWDPFQGLFPFGSGSSSSSSLFPSFGGTTTSSETAAFAGARVDWKETPEAHVFKTDVPGLKKEEVKVELEDGNVLQISGERCKEQEEKTDTWHRVERSSGKFLRRFRLTENARTE

SEQ ID NO: 15036 - DNA, 1050 bp, Zea mays subsp. mays
  misc_feature (1)..(1050): Ceres Seq. ID no. 13505058
  misc_feature: MA Experiment ID: 108527 Result: Up-regulated in Transcription
  misc_feature: MA Experiment 108527 PARAMETER Experiment Name: Zm_5mM_NO_P Parameter: Age (day) Value: 8
  misc_feature: MA Experiment 108527 PARAMETER Experiment Name: Zm_5mM_NO_P Parameter: Organism Value: Zea mays
  misc_feature: MA Experiment 108527 PARAMETER Experiment Name: Zm_5mM_NO_P Parameter: Plant Line Value: 35A19
  misc_feature: MA Experiment 108527 PARAMETER Experiment Name: Zm_5mM_NO_P Parameter: Timepoint (hr) Value: 6
  misc_feature: MA Experiment 108527 PARAMETER Experiment Name: Zm_5mM_NO_P Parameter: Tissue Value: Aerial
  misc_feature: MA Experiment 108527 PARAMETER Experiment Name: Zm_5mM_NO_P Parameter: Treatment Value: 5mM NO vs. No Treatment
  misc_feature: MA Experiment ID: 108687 Result: Up-regulated in Transcription
  misc_feature: MA Experiment 108687 PARAMETER Experiment Name: Zm_Embryos-Flowers__P Parameter: Tissue Value: Embryo vs. Aerial+
  misc_feature: MA Experiment ID: 20000535 Result: Up-regulated in Transcription
  misc_feature: MA Experiment 20000535 PARAMETER Experiment Name: Zm_Hybrid_Seed_Dev_P Parameter: DAP Value: 30 vs. 12
  misc_feature: MA Experiment 20000535 PARAMETER Experiment Name: Zm_Hybrid_Seed_Dev_P Parameter: Organism Value: Zea mays
  misc_feature: MA Experiment 20000535 PARAMETER Experiment Name: Zm_Hybrid_Seed_Dev_P Parameter: Plant Line Value: 35A19
  misc_feature: MA Experiment 20000535 PARAMETER Experiment Name: Zm_Hybrid_Seed_Dev_P Parameter: Tissue Value: Embryo vs. Unfert Floret
acctcctgactactgcacactcgtctccgcagtttgaaacgaagcccgcggctactgcaagctactccgtctccgtagctaaaggagaggtaggtttttatttggcgacgacatgagcacgggcgtgcgaccggggcggcggttcacggtggggcggagcgaggacgccacgcacccggacaccatccgcgccgccatctccgagttcatcgccaccgccatcttcgtcttcgccgccgagggatccgtcctctcgctcgggaagatgtaccacgacatgagcacggcgggcggcctggtggctgtggcgctggcgcacgcgctggccctggccgtggccgtggcagtggccgtcaacatctcgggcgggcacgtgaacccggcggtcaccttcggcgcgctcgtcggcggccgcgtctccctcgtccgcgcggtcttgtactgggtcgcgcagctgctgggcgccgtcgccgccacgctgctcctgcggctcgccacggggggcatgcggccgccggggttcgcgctcgcgtccggggtcggggactggcacgccgtgctgctggaggccgtcatgacgttcggcctcatgtacgcctactacgccacggtgatcgacccgaagcgggggcacgtgggcaccatcgcgccgctggccgtgggcttcctgctcggcgccaacgtgctggcgggagggcccttcgacggcgcagggatgaacccggcgcgggtcttcggcccggcgctcgtcgggtggcggtggaggcaccactgggtgtactggctgggccctttcctcggcgccgggcttgcagggctggtgtacgagtacctggttatcccgtccgccgacgccgccgtgccccacgcgcaccagccgctcgcgccagaggactactagcttgaaaattgtattgtggggtcgtgtaagtggttaataaggggggcataggtacgtacttgtctgtcgccccagcgtgtgttggagacggtgaatcaggtgatgtgtacatgctgcttcactgtagtgtatgtgtatgtgtatgtagt

SEQ ID NO: 15037 - protein, 262 aa, Zea mays subsp. mays
  peptide (1)..(262): Ceres Seq. ID no. 13505059
  misc_feature (18)..(238): Pfam Name: Major intrinsic protein Pfam Description: Major intrinsic protein
  misc_feature (1)..(262): Homolog of NCBI NO: 13447827 NR Description: tonoplast membrane integral protein ZmTIP3-1 [Zea
  misc_feature (2)..(262): Homolog of NCBI NO: 13448043 NR Description: tonoplast membrane integral protein ZmTIP3-2 [Zea
  misc_feature (1)..(262): Homolog of NCBI NO: 37535634 NR Description: putative beta-tonoplast intrinsic protein [Oryza
  misc_feature (1)..(262): Homolog of NCBI NO: 15220848 NR Description: major intrinsic protein (MIP) family [Arabidopsis
  misc_feature (1)..(262): Homolog of NCBI NO: 15219403 NR Description: tonoplast intrinsic protein, alpha (alpha-TIP) thaliana] >gi|135858|sp|P26587|TIPA_ARATH Tonoplast intrinsic
  misc_feature (59)..(262): Homolog of NCBI NO: 7441287 NR Description: membrane protein MP23 precursor - cucurbit
  misc_feature (7)..(53): Homolog of NCBI NO: 7441287 NR Description: membrane protein MP23 precursor - cucurbit
  misc_feature (7)..(262): Homolog of NCBI NO: 4539145 NR Description: major intrinsic protein [Picea abies]
  misc_feature (7)..(262): Homolog of NCBI NO: 7441288 NR Description: membrane protein MP28 - cucurbit
  misc_feature (9)..(262): Homolog of NCBI NO: 81886 NR Description: tonoplast intrinsic protein alpha - kidney bean
MSTGVRPGRRFTVGRSEDATHPDTIRAAISEFIATAIFVFAAEGSVLSLGKMYHDMSTAGGLVAVALAHALALAVAVAVAVNISGGHVNPAVTFGALVGGRVSLVRAVLYWVAQLLGAVAATLLLRLATGGMRPPGFALASGVGDWHAVLLEAVMTFGLMYAYYATVIDPKRGHVGTIAPLAVGFLLGANVLAGGPFDGAGMNPARVFGPALVGWRWRHHWVYWLGPFLGAGLAGLVYEYLVIPSADAAVPHAHQPLAPEDY

SEQ ID NO: 15038 - protein, 211 aa, Zea mays subsp. mays
  peptide (1)..(211): Ceres Seq. ID no. 13505060
  misc_feature (1)..(187): Pfam Name: Major intrinsic protein Pfam Description: Major intrinsic protein
  misc_feature (1)..(211): Homolog of NCBI NO: 13447827 NR Description: tonoplast membrane integral protein ZmTIP3-1 [Zea
  misc_feature (1)..(211): Homolog of NCBI NO: 13448043 NR Description: tonoplast membrane integral protein ZmTIP3-2 [Zea
  misc_feature (1)..(211): Homolog of NCBI NO: 37535634 NR Description: putative beta-tonoplast intrinsic protein [Oryza
  misc_feature (1)..(211): Homolog of NCBI NO: 15220848 NR Description: major intrinsic protein (MIP) family [Arabidopsis
  misc_feature (1)..(211): Homolog of NCBI NO: 15219403 NR Description: tonoplast intrinsic protein, alpha (alpha-TIP) thaliana] >gi|135858|sp|P26587|TIPA_ARATH Tonoplast intrinsic
  misc_feature (8)..(211): Homolog of NCBI NO: 7441287 NR Description: membrane protein MP23 precursor - cucurbit
  misc_feature (1)..(211): Homolog of NCBI NO: 4539145 NR Description: major intrinsic protein [Picea abies]
  misc_feature (1)..(211): Homolog of NCBI NO: 7441288 NR Description: membrane protein MP28 - cucurbit
  misc_feature (1)..(211): Homolog of NCBI NO: 81886 NR Description: tonoplast intrinsic protein alpha - kidney bean
  misc_feature (1)..(211): Homolog of NCBI NO: 135859 NR Description: TONOPLAST INTRINSIC PROTEIN, ALPHA (ALPHA TIP)
MYHDMSTAGGLVAVALAHALALAVAVAVAVNISGGHVNPAVTFGALVGGRVSLVRAVLYWVAQLLGAVAATLLLRLATGGMRPPGFALASGVGDWHAVLLEAVMTFGLMYAYYATVIDPKRGHVGTIAPLAVGFLLGANVLAGGPFDGAGMNPARVFGPALVGWRWRHHWVYWLGPFLGAGLAGLVYEYLVIPSADAAVPHAHQPLAPEDY

SEQ ID NO: 15039 - protein, 207 aa, Zea mays subsp. mays
  peptide (1)..(207): Ceres Seq. ID no. 13505061
  misc_feature (1)..(183): Pfam Name: Major intrinsic protein Pfam Description: Major intrinsic protein
  misc_feature (1)..(207): Homolog of NCBI NO: 13447827 NR Description: tonoplast membrane integral protein ZmTIP3-1 [Zea
  misc_feature (1)..(207): Homolog of NCBI NO: 13448043 NR Description: tonoplast membrane integral protein ZmTIP3-2 [Zea
  misc_feature (1)..(207): Homolog of NCBI NO: 37535634 NR Description: putative beta-tonoplast intrinsic protein [Oryza
  misc_feature (1)..(207): Homolog of NCBI NO: 15220848 NR Description: major intrinsic protein (MIP) family [Arabidopsis
  misc_feature (1)..(207): Homolog of NCBI NO: 15219403 NR Description: tonoplast intrinsic protein, alpha (alpha-TIP) thaliana] >gi|135858|sp|P26587|TIPA_ARATH Tonoplast intrinsic
  misc_feature (4)..(207): Homolog of NCBI NO: 7441287 NR Description: membrane protein MP23 precursor - cucurbit
  misc_feature (1)..(207): Homolog of NCBI NO: 4539145 NR Description: major intrinsic protein [Picea abies]
  misc_feature (1)..(207): Homolog of NCBI NO: 7441288 NR Description: membrane protein MP28 - cucurbit
  misc_feature (1)..(207): Homolog of NCBI NO: 81886 NR Description: tonoplast intrinsic protein alpha - kidney bean
  misc_feature (1)..(207): Homolog of NCBI NO: 135859 NR Description: TONOPLAST INTRINSIC PROTEIN, ALPHA (ALPHA TIP)
MSTAGGLVAVALAHALALAVAVAVAVNISGGHVNPAVTFGALVGGRVSLVRAVLYWVAQLLGAVAATLLLRLATGGMRPPGFALASGVGDWHAVLLEAVMTFGLMYAYYATVIDPKRGHVGTIAPLAVGFLLGANVLAGGPFDGAGMNPARVFGPALVGWRWRHHWVYWLGPFLGAGLAGLVYEYLVIPSADAAVPHAHQPLAPEDY

SEQ ID NO: 15040 - DNA, 475 bp, Zea mays subsp. mays
  misc_feature (1)..(475): Ceres Seq. ID no. 4648388
  misc_feature: MA Experiment ID: 20000534 Result: Up-regulated in Transcription
  misc_feature: MA Experiment 20000534 PARAMETER Experiment Name: Zm_Hybrid_Pollen_P Parameter: Age (day) Value: 8
  misc_feature: MA Experiment 20000534 PARAMETER Experiment Name: Zm_Hybrid_Pollen_P Parameter: Organism Value: Zea mays
  misc_feature: MA Experiment 20000534 PARAMETER Experiment Name: Zm_Hybrid_Pollen_P Parameter: Plant Line Value: 35A19
  misc_feature: MA Experiment 20000534 PARAMETER Experiment Name: Zm_Hybrid_Pollen_P Parameter: Tissue Value: Pollen vs. Aerial
  misc_feature: MA Experiment ID: 20000535 Result: Up-regulated in Transcription
  misc_feature: MA Experiment 20000535 PARAMETER Experiment Name: Zm_Hybrid_Seed_Dev_P Parameter: DAP Value: 30 vs. 12
  misc_feature: MA Experiment 20000535 PARAMETER Experiment Name: Zm_Hybrid_Seed_Dev_P Parameter: Organism Value: Zea mays
  misc_feature: MA Experiment 20000535 PARAMETER Experiment Name: Zm_Hybrid_Seed_Dev_P Parameter: Plant Line Value: 35A19
  misc_feature: MA Experiment 20000535 PARAMETER Experiment Name: Zm_Hybrid_Seed_Dev_P Parameter: Tissue Value: Embryo vs. Unfert Floret
gaggagctcctccacgccattcctgcacgccttcctctccaccacctcctcctcccctacgcccccctcctccctccagctccggcgagccttctccgacggccacctcccttcgctcaacccctcctcctccggcgacgacgacagcaagaccaccggcctctacaccgagctctccttctccatctacaacacctycagcaaggccaagctggagccccaccaggagcaggagatggaggaggagcaggagcagcaggcggcgcagccggagctgccgctgttcctggcgaggggcatggggatcgaccgcctcgcctccggcctcttcaccgccggcatgggctccgaggctgccctggctaggatggccagcggggtggaccagaaggccgtgctggcgctggacgcccagtacaaggagatggtggacgagcagcccggcaacgccctgttcctgcgcaactacgcgcag

SEQ ID NO: 15041 - protein, 158 aa, Zea mays subsp. mays
  peptide (1)..(158): Ceres Seq. ID no. 4648389
  misc_feature (1)..(157): Homolog of NCBI NO: 32488305 NR Description: OSJNBb0065L13.14 [Oryza sativa (japonica
  misc_feature (66)..(66): Xaa is any aa, unknown or other
RSSSTPFLHAFLSTTSSSPTPPSSLQLRRAFSDGHLPSLNPSSSGDDDSKTTGLYTELSFSIYNTXSKAKLEPHQEQEMEEEQEQQAAQPELPLFLARGMGIDRLASGLFTAGMGSEAALARMASGVDQKAVLALDAQYKEMVDEQPGNALFLRNYAQ

SEQ ID NO: 15042 - protein, 157 aa, Zea mays subsp. mays
  peptide (1)..(157): Ceres Seq. ID no. 4648390
  misc_feature (1)..(93): Pfam Name: 7 transmembrane receptor (rhodopsin family) Pfam Description: 7 transmembrane receptor (rhodopsin family)
  misc_feature (3)..(90): Homolog of NCBI NO: 21219450 NR Description: putative secreted proline-rich protein
  misc_feature (3)..(82): Homolog of NCBI NO: 29833843 NR Description: putative proline-rich protein [Streptomyces
  misc_feature (1)..(78): Homolog of NCBI NO: 32141270 NR Description: probable translational initiation factor coelicolor A3(2)] >gi|24413891|emb|CAD55362.1| probable
  misc_feature (2)..(155): Homolog of NCBI NO: 27375632 NR Description: blr0521 [Bradyrhizobium japonicum]
  misc_feature (1)..(69): Homolog of NCBI NO: 7441828 NR Description: extensin-like cell wall protein - sea-island
  misc_feature (2)..(112): Homolog of NCBI NO: 32422095 NR Description: predicted protein [Neurospora crassa]
  misc_feature (3)..(138): Homolog of NCBI NO: 119714 NR Description: Extensin precursor (Cell wall hydroxyproline-rich
  misc_feature (10)..(38): Homolog of NCBI NO: 465445 NR Description: PROBABLE NUCLEAR ANTIGEN >gi|418708|pir||B45344
  misc_feature (3)..(119): Homolog of NCBI NO: 6523547 NR Description: hydroxyproline-rich glycoprotein DZ-HRGP [Volvox
  misc_feature (2)..(77): Homolog of NCBI NO: 81286 NR Description: extensin - Volvox carteri (fragment)
  misc_feature (66)..(66): Xaa is any aa, unknown or other
GAPPRHSCTPSSPPPPPPLRPPPPSSSGEPSPTATSLRSTPPPPATTTARPPASTPSSPSPSTTPXARPSWSPTRSRRWRRSRSSRRRSRSCRCSWRGAWGSTASPPASSPPAWAPRLPWLGWPAGWTRRPCWRWTPSTRRWWTSSPATPCSCATTR

SEQ ID NO: 15043 - protein, 121 aa, Zea mays subsp. mays
  peptide (1)..(121): Ceres Seq. ID no. 4648391
  misc_feature (74)..(121): Pfam Name: Collagen triple helix repeat (20 copies) Pfam Description: Collagen triple helix repeat (20 copies)
  misc_feature (69)..(121): Homolog of NCBI NO: 32141270 NR Description: probable translational initiation factor coelicolor A3(2)] >gi|24413891|emb|CAD55362.1| probable
  misc_feature (69)..(121): Homolog of NCBI NO: 465445 NR Description: PROBABLE NUCLEAR ANTIGEN >gi|418708|pir||B45344
  misc_feature (69)..(121): Homolog of NCBI NO: 93144 NR Description: hypothetical protein - suid herpesvirus 1 (strain
  misc_feature (66)..(66): Xaa is any aa, unknown or other
EELLHAIPARLPLHHLLLPYAPLLPPAPASLLRRPPPFAQPLLLRRRRQQDHRPLHRALLLHLQHXQQGQAGAPPGAGDGGGAGAAGGAAGAAAVPGEGHGDRPPRLRPLHRRHGLRGCPG

SEQ ID NO: 15044 - DNA, 438 bp, Zea mays subsp. mays
  misc_feature (1)..(438): Ceres Seq. ID no. 4648385
  misc_feature: MA Experiment ID: 20000487 Result: Up-regulated in Transcription
  misc_feature: MA Experiment 20000487 PARAMETER Experiment Name: Zm_50mM_NH4NO3_L_to_H_P Parameter: Organism Value: Zea mays
  misc_feature: MA Experiment 20000487 PARAMETER Experiment Name: Zm_50mM_NH4NO3_L_to_H_P Parameter: Timepoint (hr) Value: 4
  misc_feature: MA Experiment 20000487 PARAMETER Experiment Name: Zm_50mM_NH4NO3_L_to_H_P Parameter: Tissue Value: Leaves
  misc_feature: MA Experiment 20000487 PARAMETER Experiment Name: Zm_50mM_NH4NO3_L_to_H_P Parameter: Treatment Value: 50mM NH4NO3 vs. 100mM Mannitol
cctagcacccgtcccgccgccgccgctgctgctgccgccctgaccctcgccgcctgcagcagccaccaccgcgcaaccatgggtatcgacctcgtcgccggcggccgcaacaagaggaccaagcgcacggcgcccaaatccgacgatgtgtacctcaagctgctcgtcaagctctaccgcttcctggtgcggaggaccaagagccagttcaacgccgtgatcctcaagcgtctcttcatgagcaagaccaaccgcccgccgctctcgatgcgccgcctcgtcaggttcatggaggggaaggcggacaagatcgccgtgatcgtgggcaccatcaccgatgaccagagggtctacgagataccggcaatgaaggtggccgcgctcaggttcaccgagacggcgagggccaggatcgtcaatgctggtggcgagtgcctt

SEQ ID NO: 15045 - protein, 146 aa, Zea mays subsp. mays
  peptide (1)..(146): Ceres Seq. ID no. 4648386
  misc_feature (27)..(145): Homolog of NCBI NO: 34393858 NR Description: putative cytoplasmic ribosomal protein L18 [Oryza
  misc_feature (27)..(145): Homolog of NCBI NO: 34897628 NR Description: cytoplasmic ribosomal protein L18 [Oryza sativa]
  misc_feature (27)..(145): Homolog of NCBI NO: 606970 NR Description: cytoplasmic ribosomal protein L18
  misc_feature (27)..(145): Homolog of NCBI NO: 15241061 NR Description: 60S ribosomal protein - like; protein id: supported by cDNA: gi_15810152 [Arabidopsis thaliana] putative 60S ribosomal protein [Arabidopsis thaliana]
  misc_feature (27)..(145): Homolog of NCBI NO: 15230011 NR Description: putative 60S ribosomal protein L18; protein id: supported by cDNA: gi_14335089, supported by cDNA: gi_16974508, by cDNA: gi_606969 [Arabidopsis thaliana]
  misc_feature (27)..(145): Homolog of NCBI NO: 28798549 NR Description: 60S ribosomal protein [Medicago sativa]
  misc_feature (30)..(145): Homolog of NCBI NO: 6094021 NR Description: 60S RIBOSOMAL PROTEIN L18
  misc_feature (28)..(145): Homolog of NCBI NO: 7440855 NR Description: ribosomal protein L18, cytosolic - Arabidopsis
  misc_feature (27)..(145): Homolog of NCBI NO: 28630354 NR Description: ribosomal protein L18 [Branchiostoma lanceolatum]
  misc_feature (27)..(145): Homolog of NCBI NO: 28630356 NR Description: ribosomal protein L18 [Petromyzon marinus]
PSTRPAAAAAAAALTLAACSSHHRATMGIDLVAGGRNKRTKRTAPKSDDVYLKLLVKLYRFLVRRTKSQFNAVILKRLFMSKTNRPPLSMRRLVRFMEGKADKIAVIVGTITDDQRVYEIPAMKVAALRFTETARARIVNAGGECL

SEQ ID NO: 15046 - protein, 120 aa, Zea mays subsp. mays
  peptide (1)..(120): Ceres Seq. ID no. 4648387
  misc_feature (1)..(119): Homolog of NCBI NO: 15230011 NR Description: putative 60S ribosomal protein L18; protein id: supported by cDNA: gi_14335089, supported by cDNA: gi_16974508, by cDNA: gi_606969 [Arabidopsis thaliana]
  misc_feature (1)..(119): Homolog of NCBI NO: 28798549 NR Description: 60S ribosomal protein [Medicago sativa]
  misc_feature (4)..(119): Homolog of NCBI NO: 6094021 NR Description: 60S RIBOSOMAL PROTEIN L18
  misc_feature (2)..(119): Homolog of NCBI NO: 7440855 NR Description: ribosomal protein L18, cytosolic - Arabidopsis
  misc_feature (1)..(119): Homolog of NCBI NO: 28630354 NR Description: ribosomal protein L18 [Branchiostoma lanceolatum]
  misc_feature (1)..(119): Homolog of NCBI NO: 28630356 NR Description: ribosomal protein L18 [Petromyzon marinus]
  misc_feature (1)..(119): Homolog of NCBI NO: 34393858 NR Description: putative cytoplasmic ribosomal protein L18 [Oryza
  misc_feature (1)..(119): Homolog of NCBI NO: 34897628 NR Description: cytoplasmic ribosomal protein L18 [Oryza sativa]
  misc_feature (1)..(119): Homolog of NCBI NO: 606970 NR Description: cytoplasmic ribosomal protein L18
  misc_feature (1)..(119): Homolog of NCBI NO: 15241061 NR Description: 60S ribosomal protein - like; protein id: supported by cDNA: gi_15810152 [Arabidopsis thaliana] putative 60S ribosomal protein [Arabidopsis thaliana]
MGIDLVAGGRNKRTKRTAPKSDDVYLKLLVKLYRFLVRRTKSQFNAVILKRLFMSKTNRPPLSMRRLVRFMEGKADKIAVIVGTITDDQRVYEIPAMKVAALRFTETARARIVNAGGECL

SEQ ID NO: 15047 - DNA, 1623 bp, Zea mays subsp. mays
  misc_feature (1)..(1623): Ceres Seq. ID no. 13587067
  misc_feature: MA Experiment ID: 108515 Result: Up-regulated in Transcription
  misc_feature: MA Experiment 108515 PARAMETER Experiment Name: Zm_2mM_SA_P Parameter: Age (day) Value: 8
  misc_feature: MA Experiment 108515 PARAMETER Experiment Name: Zm_2mM_SA_P Parameter: Organism Value: Zea mays
  misc_feature: MA Experiment 108515 PARAMETER Experiment Name: Zm_2mM_SA_P Parameter: Plant Line Value: 35A19
  misc_feature: MA Experiment 108515 PARAMETER Experiment Name: Zm_2mM_SA_P Parameter: Timepoint (hr) Value: 12
  misc_feature: MA Experiment 108515 PARAMETER Experiment Name: Zm_2mM_SA_P Parameter: Tissue Value: Aerial
  misc_feature: MA Experiment 108515 PARAMETER Experiment Name: Zm_2mM_SA_P Parameter: Treatment Value: 2mM SA vs. No Treatment
  misc_feature: MA Experiment ID: 108527 Result: Up-regulated in Transcription
  misc_feature: MA Experiment 108527 PARAMETER Experiment Name: Zm_5mM_NO_P Parameter: Age (day) Value: 8
  misc_feature: MA Experiment 108527 PARAMETER Experiment Name: Zm_5mM_NO_P Parameter: Organism Value: Zea mays
  misc_feature: MA Experiment 108527 PARAMETER Experiment Name: Zm_5mM_NO_P Parameter: Plant Line Value: 35A19
  misc_feature: MA Experiment 108527 PARAMETER Experiment Name: Zm_5mM_NO_P Parameter: Timepoint (hr) Value: 6
  misc_feature: MA Experiment 108527 PARAMETER Experiment Name: Zm_5mM_NO_P Parameter: Tissue Value: Aerial
  misc_feature: MA Experiment 108527 PARAMETER Experiment Name: Zm_5mM_NO_P Parameter: Treatment Value: 5mM NO vs. No Treatment
  misc_feature: MA Experiment ID: 108535 Result: Up-regulated in Transcription
  misc_feature: MA Experiment 108535 PARAMETER Experiment Name: Zm_Meristem_P Parameter: Age (day) Value: 8
  misc_feature: MA Experiment 108535 PARAMETER Experiment Name: Zm_Meristem_P Parameter: Organism Value: Zea mays
  misc_feature: MA Experiment 108535 PARAMETER Experiment Name: Zm_Meristem_P Parameter: Plant Line Value: 35A19
  misc_feature: MA Experiment 108535 PARAMETER Experiment Name: Zm_Meristem_P Parameter: Tissue Value: Root Meristem vs. Above Root Meristem
  misc_feature: MA Experiment ID: 108544 Result: Down-regulated in Transcription
  misc_feature: MA Experiment ID: 108559 Result: Up-regulated in Transcription
  misc_feature: MA Experiment 108559 PARAMETER Experiment Name: Zm_5mM_NO_P Parameter: Age (day) Value: 8
  misc_feature: MA Experiment 108559 PARAMETER Experiment Name: Zm_5mM_NO_P Parameter: Organism Value: Zea mays
  misc_feature: MA Experiment 108559 PARAMETER Experiment Name: Zm_5mM_NO_P Parameter: Plant Line Value: 35A19
  misc_feature: MA Experiment 108559 PARAMETER Experiment Name: Zm_5mM_NO_P Parameter: Timepoint (hr) Value: 12
  misc_feature: MA Experiment 108559 PARAMETER Experiment Name: Zm_5mM_NO_P Parameter: Tissue Value: Aerial
  misc_feature: MA Experiment 108559 PARAMETER Experiment Name: Zm_5mM_NO_P Parameter: Treatment Value: 5mM NO vs. No Treatment
  misc_feature: MA Experiment ID: 20000626 Result: Up-regulated in Transcription
  misc_feature: MA Experiment 20000626 PARAMETER Experiment Name: Zm_Herbicide-Treatments_P Parameter: Timepoint (hr) Value: 12
  misc_feature: MA Experiment 20000626 PARAMETER Experiment Name: Zm_Herbicide-Treatments_P Parameter: Tissue Value: Aerial
  misc_feature: MA Experiment 20000626 PARAMETER Experiment Name: Zm_Herbicide-Treatments_P Parameter: Treatment Value: Roundup vs. No Treatment
cccgttcccccaagtctatcagccaaagcatcgcccgccgatggcgtctccgccccactcagtcgaggtccggacccccggcgactcgccgcggcccaccgccgctctcctctccccctccgtggccgcaccccagccctccaacgcctcccgcctcctgctcctcctcaccgcggccgtcgccgccgctacggccttcgtcctgctccgcccgcccatcaccgtcgtgaccgcggcgtccgccaccgcgcggccgctctccaagctctccaagcccgtggtgctgctcatttcctcggacggcttccgcttcgggtaccagtacaaggcccccctcccgcacatccgccgcctcttcgccaatggcacatccgccgccgagggcctgatccccgtcttccccacgctcaccttccccaaccactactccatcgtcaccggcctctacccctcctcccacggcatcatcaacaactacttccccgatcccatctcgggggactacttcaccatgaaaaaccacgatcccaagtggtggctcggggagccgctctgggccaccgctgccgcccagggggtcctgtctgccacattcttctggccgggttcggaggttacgaagggttcctggaactgccccgacaagtactgccgccactacaatggctcggtgccgtttgaggagagggtcgacaccatccttggctattttgatctcccgcctaaccaaatgccacagttcatgacgctgtactttgaggatcctgatcaccaggggcaccaggtgggtcctgacgatccctcaatcaccgatgcggtcgtacatatagatgagatgctcgggaggctcattgctggtttggaggctaggggaatgtttgaggatgtgaacattatattggtaggtgaccatggtatggttgggacctgcgataggaagcttgtgtttctcgaagagttggctccatggatcgagttgaagtcagattgggttctgtcagtgacgccattgctggcaatcaggccgccagatggtgtgtcgccagctgaggttgtggccaagatgaatgaggggcttggatctgggaaggtgaagaatggggaatatttgaaaatgtacttaaaagaggagttgcctactcgcctgcattattcagagagttacaggatcccaccaatcatcgggctggttggggaagggtataagatcgagatgaagcgctccaagagaaatgagtgtggaggagcccatgggtacgacaatgccttcttctcaatgaggaccatatttgccgcacatggacctcgttttcagggtggtagaactgtgccctcatttgagaatgcggagatatacaatgtcatggcttccattctcaatttgaagcctgctccaaacaatggttcagcttctttccctggcacgattctgttgccgaacaaatgatcatggattggttttgtaggagtaagggcacatggatgtatgatggtgttctcatttggttattgtattgtacctcttaaattagacttctgccacatcactgtatctgagcaaaaatgctgctagtagagagttgcttctctctagtgacaacatttggaaacatgtttcacatc

SEQ ID NO: 15048 - protein, 481 aa, Zea mays subsp. mays
  peptide (1)..(481): Ceres Seq. ID no. 13587068
  misc_feature (15)..(481): Homolog of NCBI NO: 34903578 NR Description: nucleotide pyrophosphatase homolog [Oryza sativa
  misc_feature (13)..(480): Homolog of NCBI NO: 12081942 NR Description: nucleotide pyrophosphatase-like protein [Spinacia
  misc_feature (52)..(479): Homolog of NCBI NO: 15233659 NR Description: nucleotide pyrophosphatase - like protein thaliana] >gi|7487979|pir||T09931 probable phosphodiesterase I
  misc_feature (84)..(479): Homolog of NCBI NO: 15233662 NR Description: nucleotide pyrophosphatase - like protein thaliana] >gi|7487980|pir||T09932 probable phosphodiesterase I
  misc_feature (84)..(479): Homolog of NCBI NO: 27808612 NR Description: At4g29690 [Arabidopsis thaliana]
  misc_feature (52)..(480): Homolog of NCBI NO: 15233665 NR Description: nucleotide pyrophosphatase -related protein thaliana] >gi|7487981|pir||T09933 probable phosphodiesterase I
  misc_feature (248)..(479): Homolog of NCBI NO: 13877571 NR Description: nucleotide pyrophosphatase-like protein
  misc_feature (92)..(469): Homolog of NCBI NO: 9453796 NR Description: dJ131F15.2 (phosphodiesterase I/nucleotide
  misc_feature (92)..(469): Homolog of NCBI NO: 13324677 NR Description: ectonucleotide pyrophosphatase/phosphodiesterase
  misc_feature (92)..(469): Homolog of NCBI NO: 23503088 NR Description: Ectonucleotide pyrophosphatase/phosphodiesterase
PFPQVYQPKHRPPMASPPHSVEVRTPGDSPRPTAALLSPSVAAPQPSNASRLLLLLTAAVAAATAFVLLRPPITVVTAASATARPLSKLSKPVVLLISSDGFRFGYQYKAPLPHIRRLFANGTSAAEGLIPVFPTLTFPNHYSIVTGLYPSSHGIINNYFPDPISGDYFTMKNHDPKWWLGEPLWATAAAQGVLSATFFWPGSEVTKGSWNCPDKYCRHYNGSVPFEERVDTILGYFDLPPNQMPQFMTLYFEDPDHQGHQVGPDDPSITDAVVHIDEMLGRLIAGLEARGMFEDVNIILVGDHGMVGTCDRKLVFLEELAPWIELKSDWVLSVTPLLAIRPPDGVSPAEVVAKMNEGLGSGKVKNGEYLKMYLKEELPTRLHYSESYRIPPIIGLVGEGYKIEMKRSKRNECGGAHGYDNAFFSMRTIFAAHGPRFQGGRTVPSFENAEIYNVMASILNLKPAPNNGSASFPGTILLPNK

SEQ ID NO: 15049 - protein, 468 aa, Zea mays subsp. mays
  peptide (1)..(468): Ceres Seq. ID no. 13587069
  misc_feature (2)..(468): Homolog of NCBI NO: 34903578 NR Description: nucleotide pyrophosphatase homolog [Oryza sativa
  misc_feature (1)..(467): Homolog of NCBI NO: 12081942 NR Description: nucleotide pyrophosphatase-like protein [Spinacia
  misc_feature (39)..(466): Homolog of NCBI NO: 15233659 NR Description: nucleotide pyrophosphatase - like protein thaliana] >gi|7487979|pir||T09931 probable phosphodiesterase I
  misc_feature (71)..(466): Homolog of NCBI NO: 15233662 NR Description: nucleotide pyrophosphatase - like protein thaliana] >gi|7487980|pir||T09932 probable phosphodiesterase I
  misc_feature (71)..(466): Homolog of NCBI NO: 27808612 NR Description: At4g29690 [Arabidopsis thaliana]
  misc_feature (39)..(467): Homolog of NCBI NO: 15233665 NR Description: nucleotide pyrophosphatase -related protein thaliana] >gi|7487981|pir||T09933 probable phosphodiesterase I
  misc_feature (235)..(466): Homolog of NCBI NO: 13877571 NR Description: nucleotide pyrophosphatase-like protein
  misc_feature (79)..(456): Homolog of NCBI NO: 9453796 NR Description: dJ131F15.2 (phosphodiesterase I/nucleotide
  misc_feature (79)..(456): Homolog of NCBI NO: 23503088 NR Description: Ectonucleotide pyrophosphatase/phosphodiesterase
  misc_feature (79)..(456): Homolog of NCBI NO: 13324677 NR Description: ectonucleotide pyrophosphatase/phosphodiesterase
MASPPHSVEVRTPGDSPRPTAALLSPSVAAPQPSNASRLLLLLTAAVAAATAFVLLRPPITVVTAASATARPLSKLSKPVVLLISSDGFRFGYQYKAPLPHIRRLFANGTSAAEGLIPVFPTLTFPNHYSIVTGLYPSSHGIINNYFPDPISGDYFTMKNHDPKWWLGEPLWATAAAQGVLSATFFWPGSEVTKGSWNCPDKYCRHYNGSVPFEERVDTILGYFDLPPNQMPQFMTLYFEDPDHQGHQVGPDDPSITDAVVHIDEMLGRLIAGLEARGMFEDVNIILVGDHGMVGTCDRKLVFLEELAPWIELKSDWVLSVTPLLAIRPPDGVSPAEVVAKMNEGLGSGKVKNGEYLKMYLKEELPTRLHYSESYRIPPIIGLVGEGYKIEMKRSKRNECGGAHGYDNAFFSMRTIFAAHGPRFQGGRTVPSFENAEIYNVMASILNLKPAPNNGSASFPGTILLPNK

SEQ ID NO: 15050 - protein, 311 aa, Zea mays subsp. mays
  peptide (1)..(311): Ceres Seq. ID no. 13587070
  misc_feature (1)..(311): Homolog of NCBI NO: 34903578 NR Description: nucleotide pyrophosphatase homolog [Oryza sativa
  misc_feature (1)..(310): Homolog of NCBI NO: 12081942 NR Description: nucleotide pyrophosphatase-like protein [Spinacia
  misc_feature (1)..(309): Homolog of NCBI NO: 15233659 NR Description: nucleotide pyrophosphatase - like protein thaliana] >gi|7487979|pir||T09931 probable phosphodiesterase I
  misc_feature (1)..(309): Homolog of NCBI NO: 15233662 NR Description: nucleotide pyrophosphatase - like protein thaliana] >gi|7487980|pir||T09932 probable phosphodiesterase I
  misc_feature (1)..(309): Homolog of NCBI NO: 27808612 NR Description: At4g29690 [Arabidopsis thaliana]
  misc_feature (1)..(310): Homolog of NCBI NO: 15233665 NR Description: nucleotide pyrophosphatase -related protein thaliana] >gi|7487981|pir||T09933 probable phosphodiesterase I
  misc_feature (78)..(309): Homolog of NCBI NO: 13877571 NR Description: nucleotide pyrophosphatase-like protein
  misc_feature (1)..(299): Homolog of NCBI NO: 9453796 NR Description: dJ131F15.2 (phosphodiesterase I/nucleotide
  misc_feature (1)..(299): Homolog of NCBI NO: 23503088 NR Description: Ectonucleotide pyrophosphatase/phosphodiesterase
  misc_feature (1)..(299): Homolog of NCBI NO: 13324677 NR Description: ectonucleotide pyrophosphatase/phosphodiesterase
MKNHDPKWWLGEPLWATAAAQGVLSATFFWPGSEVTKGSWNCPDKYCRHYNGSVPFEERVDTILGYFDLPPNQMPQFMTLYFEDPDHQGHQVGPDDPSITDAVVHIDEMLGRLIAGLEARGMFEDVNIILVGDHGMVGTCDRKLVFLEELAPWIELKSDWVLSVTPLLAIRPPDGVSPAEVVAKMNEGLGSGKVKNGEYLKMYLKEELPTRLHYSESYRIPPIIGLVGEGYKIEMKRSKRNECGGAHGYDNAFFSMRTIFAAHGPRFQGGRTVPSFENAEIYNVMASILNLKPAPNNGSASFPGTILLPNK

SEQ ID NO: 15051 - DNA, 857 bp, Zea mays subsp. mays
  misc_feature (1)..(857): Ceres Seq. ID no. 13599298
  misc_feature: MA Experiment ID: 108522 Result: Up-regulated in Transcription
  misc_feature: MA Experiment 108522 PARAMETER Experiment Name: Zm_42deg_Heat_P Parameter: Age (day) Value: 8
  misc_feature: MA Experiment 108522 PARAMETER Experiment Name: Zm_42deg_Heat_P Parameter: Organism Value: Zea mays
  misc_feature: MA Experiment 108522 PARAMETER Experiment Name: Zm_42deg_Heat_P Parameter: Plant Line Value: 35A19
  misc_feature: MA Experiment 108522 PARAMETER Experiment Name: Zm_42deg_Heat_P Parameter: Temperature (deg C) Value: 42 vs. 22
  misc_feature: MA Experiment 108522 PARAMETER Experiment Name: Zm_42deg_Heat_P Parameter: Timepoint (hr) Value: 1
  misc_feature: MA Experiment 108522 PARAMETER Experiment Name: Zm_42deg_Heat_P Parameter: Tissue Value: Aerial
atacatagtggatatagccagagagaaagtaggacgtgttcttaaccttggagctattgaaggaggtgctaatgcttggaaaaacatggacgttcttgtcttcaattcttggcattggtggactcacaaaggcaattctcaagggtgggattacattagagatgggtcgtctttggtgagagacatgaaccgtcttgatgctttctacaaaggacttagcacttggggtcgatgggttgaccaaaacgtcgataccaccaaaaccaaagttttcttccaaggcatttctcccactcactacgagggaagggaatggaacgagccgagaaaaagttgtactgggcaaatgcagccgttgggtggatcaaattacccaagtggccagcctgcatctgcaggagttgtgtccaaagtgttgggagcgatgaaaacgcgtgtgtccttgcttgatatcaccacgctatctcagctgagaaaagatgctcatccttctacttatggtggcgatggaggaaatgattgcagccactggtgccttcccgggttgccagatacttggaaccaacttctctacgcagctttgttcatgtgaatttgaacaatacatctttacaaagaaagtgcaaacacacctttgttctgtaattacattcttggaggtgcaaagaagctgacagttttactttgggggtggtctttaagtgaagactaggagcataaggaagatggattgtaaagcgccttttatttatattgttttcgtatgggatgaaaacaataatctaaaaatttgtctaattaaatattgtgtgatgttatagaaagaaattaataaacaaaggagacattctaagtct

SEQ ID NO: 15052 - protein, 196 aa, Zea mays subsp. mays
  peptide (1)..(196): Ceres Seq. ID no. 13599299
  misc_feature (1)..(196): Homolog of NCBI NO: 18396930 NR Description: expressed protein [Arabidopsis thaliana] unknown protein [Arabidopsis thaliana]
  misc_feature (1)..(196): Homolog of NCBI NO: 25366741 NR Description: F28N24.24 protein - Arabidopsis thaliana
  misc_feature (1)..(196): Homolog of NCBI NO: 18403435 NR Description: expressed protein [Arabidopsis thaliana] expressed protein [Arabidopsis thaliana]
  misc_feature (1)..(195): Homolog of NCBI NO: 18406003 NR Description: expressed protein [Arabidopsis thaliana]
  misc_feature (1)..(194): Homolog of NCBI NO: 21593142 NR Description: unknown [Arabidopsis thaliana]
  misc_feature (1)..(194): Homolog of NCBI NO: 28393769 NR Description: unknown protein [Arabidopsis thaliana]
  misc_feature (30)..(196): Homolog of NCBI NO: 25408325 NR Description: hypothetical protein At2g34070 [imported] -
  misc_feature (1)..(194): Homolog of NCBI NO: 34911864 NR Description: OSJNBb0032K15.9 [Oryza sativa (japonica
  misc_feature (1)..(191): Homolog of NCBI NO: 22331091 NR Description: expressed protein [Arabidopsis thaliana] Unknown protein [Arabidopsis thaliana]
  misc_feature (29)..(194): Homolog of NCBI NO: 15224614 NR Description: expressed protein [Arabidopsis thaliana]
YIVDIAREKVGRVLNLGAIEGGANAWKNMDVLVFNSWHWWTHKGNSQGWDYIRDGSSLVRDMNRLDAFYKGLSTWGRWVDQNVDTTKTKVFFQGISPTHYEGREWNEPRKSCTGQMQPLGGSNYPSGQPASAGVVSKVLGAMKTRVSLLDITTLSQLRKDAHPSTYGGDGGNDCSHWCLPGLPDTWNQLLYAALFM

SEQ ID NO: 15053 - protein, 168 aa, Zea mays subsp. mays
  peptide (1)..(168): Ceres Seq. ID no. 13599300
  misc_feature (1)..(168): Homolog of NCBI NO: 18396930 NR Description: expressed protein [Arabidopsis thaliana] unknown protein [Arabidopsis thaliana]
  misc_feature (1)..(168): Homolog of NCBI NO: 25366741 NR Description: F28N24.24 protein - Arabidopsis thaliana
  misc_feature (1)..(168): Homolog of NCBI NO: 18403435 NR Description: expressed protein [Arabidopsis thaliana] expressed protein [Arabidopsis thaliana]
  misc_feature (1)..(167): Homolog of NCBI NO: 18406003 NR Description: expressed protein [Arabidopsis thaliana]
  misc_feature (1)..(166): Homolog of NCBI NO: 21593142 NR Description: unknown [Arabidopsis thaliana]
  misc_feature (1)..(166): Homolog of NCBI NO: 28393769 NR Description: unknown protein [Arabidopsis thaliana]
  misc_feature (2)..(168): Homolog of NCBI NO: 25408325 NR Description: hypothetical protein At2g34070 [imported] -
  misc_feature (1)..(166): Homolog of NCBI NO: 34911864 NR Description: OSJNBb0032K15.9 [Oryza sativa (japonica
  misc_feature (1)..(163): Homolog of NCBI NO: 22331091 NR Description: expressed protein [Arabidopsis thaliana] Unknown protein [Arabidopsis thaliana]
  misc_feature (1)..(166): Homolog of NCBI NO: 15224614 NR Description: expressed protein [Arabidopsis thaliana]
MDVLVFNSWHWWTHKGNSQGWDYIRDGSSLVRDMNRLDAFYKGLSTWGRWVDQNVDTTKTKVFFQGISPTHYEGREWNEPRKSCTGQMQPLGGSNYPSGQPASAGVVSKVLGAMKTRVSLLDITTLSQLRKDAHPSTYGGDGGNDCSHWCLPGLPDTWNQLLYAALFM

SEQ ID NO: 15054 - protein, 135 aa, Zea mays subsp. mays
  peptide (1)..(135): Ceres Seq. ID no. 13599301
  misc_feature (1)..(135): Homolog of NCBI NO: 18396930 NR Description: expressed protein [Arabidopsis thaliana] unknown protein [Arabidopsis thaliana]
  misc_feature (1)..(135): Homolog of NCBI NO: 25366741 NR Description: F28N24.24 protein - Arabidopsis thaliana
  misc_feature (1)..(135): Homolog of NCBI NO: 18403435 NR Description: expressed protein [Arabidopsis thaliana] expressed protein [Arabidopsis thaliana]
  misc_feature (1)..(134): Homolog of NCBI NO: 18406003 NR Description: expressed protein [Arabidopsis thaliana]
  misc_feature (1)..(133): Homolog of NCBI NO: 21593142 NR Description: unknown [Arabidopsis thaliana]
  misc_feature (1)..(133): Homolog of NCBI NO: 28393769 NR Description: unknown protein [Arabidopsis thaliana]
  misc_feature (1)..(135): Homolog of NCBI NO: 25408325 NR Description: hypothetical protein At2g34070 [imported] -
  misc_feature (1)..(133): Homolog of NCBI NO: 34911864 NR Description: OSJNBb0032K15.9 [Oryza sativa (japonica
  misc_feature (1)..(130): Homolog of NCBI NO: 22331091 NR Description: expressed protein [Arabidopsis thaliana] Unknown protein [Arabidopsis thaliana]
  misc_feature (1)..(133): Homolog of NCBI NO: 15224614 NR Description: expressed protein [Arabidopsis thaliana]
MNRLDAFYKGLSTWGRWVDQNVDTTKTKVFFQGISPTHYEGREWNEPRKSCTGQMQPLGGSNYPSGQPASAGVVSKVLGAMKTRVSLLDITTLSQLRKDAHPSTYGGDGGNDCSHWCLPGLPDTWNQLLYAALFM

SEQ ID NO: 15055 - DNA, 484 bp, Zea mays subsp. mays
  misc_feature (1)..(484): Ceres Seq. ID no. 4648301
  misc_feature: MA Experiment ID: 108530 Result: Down-regulated in Transcription
  misc_feature: MA Experiment 108530 PARAMETER Experiment Name: Zm_Imbibed_Seeds_P Parameter: Age (day) Value: 6 vs. 2
  misc_feature: MA Experiment 108530 PARAMETER Experiment Name: Zm_Imbibed_Seeds_P Parameter: Organism Value: Zea mays
  misc_feature: MA Experiment 108530 PARAMETER Experiment Name: Zm_Imbibed_Seeds_P Parameter: Plant Line Value: 35A19
  misc_feature: MA Experiment 108530 PARAMETER Experiment Name: Zm_Imbibed_Seeds_P Parameter: Tissue Value: Aerial vs. Embryo
  misc_feature: MA Experiment ID: 108535 Result: Up-regulated in Transcription
  misc_feature: MA Experiment 108535 PARAMETER Experiment Name: Zm_Meristem_P Parameter: Age (day) Value: 8
  misc_feature: MA Experiment 108535 PARAMETER Experiment Name: Zm_Meristem_P Parameter: Organism Value: Zea mays
  misc_feature: MA Experiment 108535 PARAMETER Experiment Name: Zm_Meristem_P Parameter: Plant Line Value: 35A19
  misc_feature: MA Experiment 108535 PARAMETER Experiment Name: Zm_Meristem_P Parameter: Tissue Value: Root Meristem vs. Above Root Meristem
  misc_feature: MA Experiment ID: 108556 Result: Down-regulated in Transcription
  misc_feature: MA Experiment 108556 PARAMETER Experiment Name: Zm_Drought_P Parameter: Age (day) Value: 9
  misc_feature: MA Experiment 108556 PARAMETER Experiment Name: Zm_Drought_P Parameter: Organism Value: Zea mays
  misc_feature: MA Experiment 108556 PARAMETER Experiment Name: Zm_Drought_P Parameter: Plant Line Value: 35A19
  misc_feature: MA Experiment 108556 PARAMETER Experiment Name: Zm_Drought_P Parameter: Timepoint (hr) Value: 24
  misc_feature: MA Experiment 108556 PARAMETER Experiment Name: Zm_Drought_P Parameter: Tissue Value: Aerial
  misc_feature: MA Experiment 108556 PARAMETER Experiment Name: Zm_Drought_P Parameter: Treatment Value: Drought vs. No Drought
  misc_feature: MA Experiment ID: 20000108 Result: Up-regulated in Transcription
  misc_feature: MA Experiment 20000108 PARAMETER Experiment Name: Zm_Root-Tips_P Parameter: Age (day) Value: 12
  misc_feature: MA Experiment 20000108 PARAMETER Experiment Name: Zm_Root-Tips_P Parameter: Organism Value: Zea mays
  misc_feature: MA Experiment 20000108 PARAMETER Experiment Name: Zm_Root-Tips_P Parameter: Tissue Value: Root tips vs. Root mid region    35
  misc_feature: MA Experiment 20000108 PARAMETER Experiment Name: Zm_Root-Tips_P Parameter: Tissue Value: Root tips vs. Root mid region   Sequence Listing-Misc Features (4)
  misc_feature: MA Experiment ID: 20000492 Result: Up-regulated in Transcription
  misc_feature: MA Experiment 20000492 PARAMETER Experiment Name: Zm_Hybrid_Seed_Dev_P Parameter: DAP Value: 12
  misc_feature: MA Experiment 20000492 PARAMETER Experiment Name: Zm_Hybrid_Seed_Dev_P Parameter: Organism Value: Zea mays
  misc_feature: MA Experiment 20000492 PARAMETER Experiment Name: Zm_Hybrid_Seed_Dev_P Parameter: Plant Line Value: 35A19
  misc_feature: MA Experiment 20000492 PARAMETER Experiment Name: Zm_Hybrid_Seed_Dev_P Parameter: Tissue Value: Fert Kernel vs. Unfert Floret
  misc_feature: MA Experiment ID: 20001606 Result: Up-regulated in Transcription
  misc_feature: MA Experiment 20001606 PARAMETER Experiment Name: Zm_50ppm_KNO3_L-to-H_P Parameter: Age (day) Value: 19
  misc_feature: MA Experiment 20001606 PARAMETER Experiment Name: Zm_50ppm_KNO3_L-to-H_P Parameter: Organism Value: Zea mays
  misc_feature: MA Experiment 20001606 PARAMETER Experiment Name: Zm_50ppm_KNO3_L-to-H_P Parameter: Plant Line Value: 35A19
  misc_feature: MA Experiment 20001606 PARAMETER Experiment Name: Zm_50ppm_KNO3_L-to-H_P Parameter: Timepoint (hr) Value: 8
  misc_feature: MA Experiment 20001606 PARAMETER Experiment Name: Zm_50ppm_KNO3_L-to-H_P Parameter: Tissue Value: Shoots
  misc_feature: MA Experiment 20001606 PARAMETER Experiment Name: Zm_50ppm_KNO3_L-to-H_P Parameter: Treatment Value: 50ppm KNO3 vs. 50ppm KCl
ctagcctccagctctctctcttcctctgtctcgcctcctccctccccctgcaggaagctcgtcgagatgtcgtccgaggcggcgaagatggtggtgccggagtcggtgctcctcaagaggaagcgggaggagctctgggccgccgagaagaagaccaaggccgtcgaggagaagaagaaatccagcgagaacatcaaggtcatctacgcccgcgccaagcagtacgccgaggagtacgatgcccaggacaaggagttggttcagcttaagcgtgaggcccggatgaagggtgggttttatgtcagtcctgaggccaagctgctgtttgttgtcagaatcagaggtatcaatgccatgcacccaaagaccaagaagatcttgcagctgttgcgtttgaggcagatattcaatggagtgttcctgaaggttaacaaggccaccatcaacatgctccgcaggatcgagccatatgttgcatatgggt

SEQ ID NO: 15056 - protein, 161 aa, Zea mays subsp. mays
  peptide (1)..(161): Ceres Seq. ID no. 4648302
  misc_feature (106)..(158): Pfam Name: Ribosomal protein L30p/L7e Pfam Description: Ribosomal protein L30p/L7e
  misc_feature (23)..(160): Homolog of NCBI NO: 38346542 NR Description: OSJNBa0035M09.3 [Oryza sativa (japonica
  misc_feature (23)..(160): Homolog of NCBI NO: 38637548 NR Description: putative 60S ribosomal protein L7 [Oryza sativa
  misc_feature (28)..(160): Homolog of NCBI NO: 15226212 NR Description: putative ribosomal protein L7; protein id: supported by cDNA: 13298., supported by cDNA: gi_13877566, by cDNA: gi_15028382, supported by cDNA: gi_19310656, supported
  misc_feature (23)..(160): Homolog of NCBI NO: 15231288 NR Description: ribosomal protein, putative; protein id: supported by cDNA: gi_14532551, supported by cDNA: gi_15810195, by cDNA: gi_18655394 [Arabidopsis thaliana]
  misc_feature (30)..(160): Homolog of NCBI NO: 445613 NR Description: ribosomal protein L7
  misc_feature (28)..(160): Homolog of NCBI NO: 27311547 NR Description: Unknown protein [Arabidopsis thaliana]
  misc_feature (28)..(160): Homolog of NCBI NO: 30689617 NR Description: 60S ribosomal protein L7 (RPL7C) [Arabidopsis >gi|15450713|gb|AAK96628.1| At2g44120/F6E13.25 [Arabidopsis >gi|17386142|gb|AAL38617.1|AF446884_1 At2g44120/F6E13.25
  misc_feature (28)..(160): Homolog of NCBI NO: 30689623 NR Description: 60S ribosomal protein L7 (RPL7C) [Arabidopsis >gi|6174958|sp|Q42208|RL7_ARATH 60S ribosomal protein L7
  misc_feature (32)..(160): Homolog of NCBI NO: 28630259 NR Description: ribosomal protein L7 [Branchiostoma lanceolatum]
  misc_feature (32)..(160): Homolog of NCBI NO: 32169292 NR Description: ribosomal protein L7 [Crassostrea gigas]
LASSSLSSSVSPPPSPCRKLVEMSSEAAKMVVPESVLLKRKREELWAAEKKTKAVEEKKKSSENIKVIYARAKQYAEEYDAQDKELVQLKREARMKGGFYVSPEAKLLFVVRIRGINAMHPKTKKILQLLRLRQIFNGVFLKVNKATINMLRRIEPYVAYG

SEQ ID NO: 15057 - protein, 139 aa, Zea mays subsp. mays
  peptide (1)..(139): Ceres Seq. ID no. 4648303
  misc_feature (84)..(136): Pfam Name: Ribosomal protein L30p/L7e Pfam Description: Ribosomal protein L30p/L7e
  misc_feature (1)..(138): Homolog of NCBI NO: 38346542 NR Description: OSJNBa0035M09.3 [Oryza sativa (japonica
  misc_feature (1)..(138): Homolog of NCBI NO: 38637548 NR Description: putative 60S ribosomal protein L7 [Oryza sativa
  misc_feature (6)..(138): Homolog of NCBI NO: 15226212 NR Description: putative ribosomal protein L7; protein id: supported by cDNA: 13298., supported by cDNA: gi_13877566, by cDNA: gi_15028382, supported by cDNA: gi_19310656, supported
  misc_feature (1)..(138): Homolog of NCBI NO: 15231288 NR Description: ribosomal protein, putative; protein id: supported by cDNA: gi_14532551, supported by cDNA: gi_15810195, by cDNA: gi_18655394 [Arabidopsis thaliana]
  misc_feature (8)..(138): Homolog of NCBI NO: 445613 NR Description: ribosomal protein L7
  misc_feature (6)..(138): Homolog of NCBI NO: 27311547 NR Description: Unknown protein [Arabidopsis thaliana]
  misc_feature (6)..(138): Homolog of NCBI NO: 30689617 NR Description: 60S ribosomal protein L7 (RPL7C) [Arabidopsis >gi|15450713|gb|AAK96628.1| At2g44120/F6E13.25 [Arabidopsis >gi|17386142|gb|AAL38617.1|AF446884_1 At2g44120/F6E13.25
  misc_feature (6)..(138): Homolog of NCBI NO: 30689623 NR Description: 60S ribosomal protein L7 (RPL7C) [Arabidopsis >gi|6174958|sp|Q42208|RL7_ARATH 60S ribosomal protein L7
  misc_feature (10)..(138): Homolog of NCBI NO: 28630259 NR Description: ribosomal protein L7 [Branchiostoma lanceolatum]
  misc_feature (10)..(138): Homolog of NCBI NO: 32169292 NR Description: ribosomal protein L7 [Crassostrea gigas]
MSSEAAKMVVPESVLLKRKREELWAAEKKTKAVEEKKKSSENIKVIYARAKQYAEEYDAQDKELVQLKREARMKGGFYVSPEAKLLFVVRIRGINAMHPKTKKILQLLRLRQIFNGVFLKVNKATINMLRRIEPYVAYG

SEQ ID NO: 15058 - protein, 132 aa, Zea mays subsp. mays
  peptide (1)..(132): Ceres Seq. ID no. 4648304
  misc_feature (77)..(129): Pfam Name: Ribosomal protein L30p/L7e Pfam Description: Ribosomal protein L30p/L7e
  misc_feature (1)..(131): Homolog of NCBI NO: 38346542 NR Description: OSJNBa0035M09.3 [Oryza sativa (japonica
  misc_feature (1)..(131): Homolog of NCBI NO: 38637548 NR Description: putative 60S ribosomal protein L7 [Oryza sativa
  misc_feature (1)..(131): Homolog of NCBI NO: 15226212 NR Description: putative ribosomal protein L7; protein id: supported by cDNA: 13298., supported by cDNA: gi_13877566, by cDNA: gi_15028382, supported by cDNA: gi_19310656, supported
  misc_feature (1)..(131): Homolog of NCBI NO: 15231288 NR Description: ribosomal protein, putative; protein id: supported by cDNA: gi_14532551, supported by cDNA: gi_15810195, by cDNA: gi_18655394 [Arabidopsis thaliana]
  misc_feature (1)..(131): Homolog of NCBI NO: 445613 NR Description: ribosomal protein L7
  misc_feature (1)..(131): Homolog of NCBI NO: 27311547 NR Description: Unknown protein [Arabidopsis thaliana]
  misc_feature (1)..(131): Homolog of NCBI NO: 30689617 NR Description: 60S ribosomal protein L7 (RPL7C) [Arabidopsis >gi|15450713|gb|AAK96628.1| At2g44120/F6E13.25 [Arabidopsis >gi|17386142|gb|AAL38617.1|AF446884_1 At2g44120/F6E13.25
  misc_feature (1)..(131): Homolog of NCBI NO: 30689623 NR Description: 60S ribosomal protein L7 (RPL7C) [Arabidopsis >gi|6174958|sp|Q42208|RL7_ARATH 60S ribosomal protein L7
  misc_feature (3)..(131): Homolog of NCBI NO: 28630259 NR Description: ribosomal protein L7 [Branchiostoma lanceolatum]
  misc_feature (3)..(131): Homolog of NCBI NO: 32169292 NR Description: ribosomal protein L7 [Crassostrea gigas]
MVVPESVLLKRKREELWAAEKKTKAVEEKKKSSENIKVIYARAKQYAEEYDAQDKELVQLKREARMKGGFYVSPEAKLLFVVRIRGINAMHPKTKKILQLLRLRQIFNGVFLKVNKATINMLRRIEPYVAYG

SEQ ID NO: 15059 - DNA, 394 bp, Zea mays subsp. mays
  misc_feature (1)..(394): Ceres Seq. ID no. 4648285
  misc_feature: MA Experiment ID: 108515 Result: Down-regulated in Transcription
  misc_feature: MA Experiment 108515 PARAMETER Experiment Name: Zm_2mM_SA_P Parameter: Age (day) Value: 8
  misc_feature: MA Experiment 108515 PARAMETER Experiment Name: Zm_2mM_SA_P Parameter: Organism Value: Zea mays
  misc_feature: MA Experiment 108515 PARAMETER Experiment Name: Zm_2mM_SA_P Parameter: Plant Line Value: 35A19
  misc_feature: MA Experiment 108515 PARAMETER Experiment Name: Zm_2mM_SA_P Parameter: Timepoint (hr) Value: 12
  misc_feature: MA Experiment 108515 PARAMETER Experiment Name: Zm_2mM_SA_P Parameter: Tissue Value: Aerial
  misc_feature: MA Experiment 108515 PARAMETER Experiment Name: Zm_2mM_SA_P Parameter: Treatment Value: 2mM SA vs. No Treatment
  misc_feature: MA Experiment ID: 108523 Result: Down-regulated in Transcription
  misc_feature: MA Experiment 108523 PARAMETER Experiment Name: Zm_42deg_Heat_P Parameter: Age (day) Value: 8
  misc_feature: MA Experiment 108523 PARAMETER Experiment Name: Zm_42deg_Heat_P Parameter: Organism Value: Zea mays
  misc_feature: MA Experiment 108523 PARAMETER Experiment Name: Zm_42deg_Heat_P Parameter: Plant Line Value: 35A19
  misc_feature: MA Experiment 108523 PARAMETER Experiment Name: Zm_42deg_Heat_P Parameter: Temperature (deg C) Value: 42 vs. 22
  misc_feature: MA Experiment 108523 PARAMETER Experiment Name: Zm_42deg_Heat_P Parameter: Timepoint (hr) Value: 6
  misc_feature: MA Experiment 108523 PARAMETER Experiment Name: Zm_42deg_Heat_P Parameter: Tissue Value: Aerial
  misc_feature: MA Experiment ID: 108535 Result: Up-regulated in Transcription
  misc_feature: MA Experiment 108535 PARAMETER Experiment Name: Zm_Meristem_P Parameter: Age (day) Value: 8
  misc_feature: MA Experiment 108535 PARAMETER Experiment Name: Zm_Meristem_P Parameter: Organism Value: Zea mays
  misc_feature: MA Experiment 108535 PARAMETER Experiment Name: Zm_Meristem_P Parameter: Plant Line Value: 35A19
  misc_feature: MA Experiment 108535 PARAMETER Experiment Name: Zm_Meristem_P Parameter: Tissue Value: Root Meristem vs. Above Root Meristem
  misc_feature: MA Experiment ID: 108544 Result: Down-regulated in Transcription
  misc_feature: MA Experiment ID: 108597 Result: Down-regulated in Transcription
  misc_feature: MA Experiment 108597 PARAMETER Experiment Name: Zm_100uM_ABA_P Parameter: Age (day) Value: 9
  misc_feature: MA Experiment 108597 PARAMETER Experiment Name: Zm_100uM_ABA_P Parameter: Organism Value: Zea mays
  misc_feature: MA Experiment 108597 PARAMETER Experiment Name: Zm_100uM_ABA_P Parameter: Plant Line Value: 35A19
  misc_feature: MA Experiment 108597 PARAMETER Experiment Name: Zm_100uM_ABA_P Parameter: Timepoint (hr) Value: 24
  misc_feature: MA Experiment 108597 PARAMETER Experiment Name: Zm_100uM_ABA_P Parameter: Tissue Value: Aerial
  misc_feature: MA Experiment 108597 PARAMETER Experiment Name: Zm_100uM_ABA_P Parameter: Treatment Value: 100uM ABA vs. No Treatment
  misc_feature: MA Experiment ID: 20000477 Result: Down-regulated in Transcription
  misc_feature: MA Experiment 20000477 PARAMETER Experiment Name: Zm_5mM_SA_P Parameter: Age (day) Value: 10
  misc_feature: MA Experiment 20000477 PARAMETER Experiment Name: Zm_5mM_SA_P Parameter: Organism Value: Zea mays
  misc_feature: MA Experiment 20000477 PARAMETER Experiment Name: Zm_5mM_SA_P Parameter: Plant Line Value: 35A19
  misc_feature: MA Experiment 20000477 PARAMETER Experiment Name: Zm_5mM_SA_P Parameter: Timepoint (hr) Value: 48
  misc_feature: MA Experiment 20000477 PARAMETER Experiment Name: Zm_5mM_SA_P Parameter: Tissue Value: Aerial
  misc_feature: MA Experiment 20000477 PARAMETER Experiment Name: Zm_5mM_SA_P Parameter: Treatment Value: 5mM SA vs. No Treatment
  misc_feature: MA Experiment ID: 20000478 Result: Down-regulated in Transcription
  misc_feature: MA Experiment 20000478 PARAMETER Experiment Name: Zm_5mM_SA_P Parameter: Age (day) Value: 11
  misc_feature: MA Experiment 20000478 PARAMETER Experiment Name: Zm_5mM_SA_P Parameter: Organism Value: Zea mays
  misc_feature: MA Experiment 20000478 PARAMETER Experiment Name: Zm_5mM_SA_P Parameter: Plant Line Value: 35A19
  misc_feature: MA Experiment 20000478 PARAMETER Experiment Name: Zm_5mM_SA_P Parameter: Timepoint (hr) Value: 72
  misc_feature: MA Experiment 20000478 PARAMETER Experiment Name: Zm_5mM_SA_P Parameter: Tissue Value: Aerial
  misc_feature: MA Experiment 20000478 PARAMETER Experiment Name: Zm_5mM_SA_P Parameter: Treatment Value: 5mM SA vs. No Treatment
  misc_feature: MA Experiment ID: 20000479 Result: Down-regulated in Transcription
  misc_feature: MA Experiment 20000479 PARAMETER Experiment Name: Zm_Drought_P Parameter: Age (day) Value: 10
  misc_feature: MA Experiment 20000479 PARAMETER Experiment Name: Zm_Drought_P Parameter: Organism Value: Zea mays
  misc_feature: MA Experiment 20000479 PARAMETER Experiment Name: Zm_Drought_P Parameter: Plant Line Value: 35A19
  misc_feature: MA Experiment 20000479 PARAMETER Experiment Name: Zm_Drought_P Parameter: Timepoint (hr) Value: 48
  misc_feature: MA Experiment 20000479 PARAMETER Experiment Name: Zm_Drought_P Parameter: Tissue Value: Aerial
  misc_feature: MA Experiment 20000479 PARAMETER Experiment Name: Zm_Drought_P Parameter: Treatment Value: Drought vs. No Drought
  misc_feature: MA Experiment ID: 20000632 Result: Down-regulated in Transcription
  misc_feature: MA Experiment 20000632 PARAMETER Experiment Name: Zm_Herbicide-Treatments_P Parameter: Timepoint (hr) Value: 4
  misc_feature: MA Experiment 20000632 PARAMETER Experiment Name: Zm_Herbicide-Treatments_P Parameter: Tissue Value: Aerial
  misc_feature: MA Experiment 20000632 PARAMETER Experiment Name: Zm_Herbicide-Treatments_P Parameter: Treatment Value: Glean vs. No Treatment
  misc_feature: MA Experiment ID: 20000633 Result: Down-regulated in Transcription
  misc_feature: MA Experiment 20000633 PARAMETER Experiment Name: Zm_Herbicide-Treatments_P Parameter: Timepoint (hr) Value: 4
  misc_feature: MA Experiment 20000633 PARAMETER Experiment Name: Zm_Herbicide-Treatments_P Parameter: Tissue Value: Aerial
  misc_feature: MA Experiment 20000633 PARAMETER Experiment Name: Zm_Herbicide-Treatments_P Parameter: Treatment Value: Trimec vs. No Treatment
acaccaaagaaaagtctccctcgcaacaactcgcccatttccctccacaccagcccgacacctcaagctccatcccgatcgatggcgcccaaggccgagaagaagcccgcggagaagaagccggccgccgaggtcgccgagaaggccgagaagacccccgccggcaagaagcccaaggcggagaagcggctgccggcgtccaagtccgccaaggagggcggcgacaagaagggccgcaagaagaacaagaagagcgtcgagacctacaagatctacatcttcaaggtgctcaagcaggtgcacccggacatcggcatctcctccaaggccatgtccatcatgaactccttcatcaacgacatcttcgagaagctcgccggcgaggcggccaagc

SEQ ID NO: 15060 - protein, 131 aa, Zea mays subsp. mays
  peptide (1)..(131): Ceres Seq. ID no. 4648286
  misc_feature (49)..(130): Pfam Name: Core histone H2A/H2B/H3/H4 Pfam Description: Core histone H2A/H2B/H3/H4
  misc_feature (28)..(130): Homolog of NCBI NO: 122022 NR Description: Histone H2B >gi|283025|pir||S22323 histone H2B -
  misc_feature (28)..(130): Homolog of NCBI NO: 1708107 NR Description: Histone H2B >gi|7439752|pir||T02077 histone H2B -
  misc_feature (28)..(130): Homolog of NCBI NO: 3913804 NR Description: Histone H2B.3 >gi|577825|emb|CAA49584.1| H2B
  misc_feature (28)..(130): Homolog of NCBI NO: 34895900 NR Description: putative histone H2B [Oryza sativa (japonica group)] >gi|9663989|dbj|BAB03630.1| putative histone H2B [Oryza
  misc_feature (28)..(130): Homolog of NCBI NO: 34895832 NR Description: putative histone H2B [Oryza sativa (japonica group)] >gi|13872898|dbj|BAB44005.1| putative histone H2B [Oryza
  misc_feature (28)..(130): Homolog of NCBI NO: 34895838 NR Description: putative histone H2B [Oryza sativa (japonica group)] >gi|13872901|dbj|BAB44008.1| putative histone H2B [Oryza
  misc_feature (28)..(130): Homolog of NCBI NO: 399853 NR Description: Histone H2B.1 >gi|283041|pir||S28048 histone H2B
  misc_feature (28)..(130): Homolog of NCBI NO: 399854 NR Description: Histone H2B.2 >gi|283042|pir||S28049 histone H2B
  misc_feature (58)..(130): Homolog of NCBI NO: 15030224 NR Description: Similar to H2B histone family, member D [Homo
  misc_feature (12)..(130): Homolog of NCBI NO: 15223150 NR Description: histone H2B, putative; protein id: At1g08170.1 thaliana] >gi|6579213|gb|AAF18256.1|AC011438_18 T23G18.3 thaliana] >gi|8778831|gb|AAF79830.1|AC026875_10 T6D22.26
TPKKSLPRNNSPISLHTSPTPQAPSRSMAPKAEKKPAEKKPAAEVAEKAEKTPAGKKPKAEKRLPASKSAKEGGDKKGRKKNKKSVETYKIYIFKVLKQVHPDIGISSKAMSIMNSFINDIFEKLAGEAAK

SEQ ID NO: 15061 - protein, 130 aa, Zea mays subsp. mays
  peptide (1)..(130): Ceres Seq. ID no. 4648287
  misc_feature (3)..(129): Pfam Name: High molecular weight glutenin subunit Pfam Description: High molecular weight glutenin subunit
  misc_feature (73)..(128): Homolog of NCBI NO: 17505204 NR Description: histone 1, H2bc; H2B histone family, member S musculus] >gi|12837582|dbj|BAB23873.1| unnamed protein product
TKEKSPSQQLAHFPPHQPDTSSSIPIDGAQGREEARGEEAGRRGRREGREDPRRQEAQGGEAAAGVQVRQGGRRQEGPQEEQEERRDLQDLHLQGAQAGAPGHRHLLQGHVHHELLHQRHLREARRRGGQ

SEQ ID NO: 15062 - protein, 113 aa, Zea mays subsp. mays
  peptide (1)..(113): Ceres Seq. ID no. 4648288
  misc_feature (27)..(107): Pfam Name: TT viral orf 1 Pfam Description: TT viral orf 1
  misc_feature (15)..(109): Homolog of NCBI NO: 11068023 NR Description: PxORF20 peptide [Plutella xylostella >gi|11036815|gb|AAG27318.1|AF270937_20 PxORF20 peptide [Plutella
  misc_feature (9)..(113): Homolog of NCBI NO: 11360318 NR Description: probable mucin DKFZp434C196.1 - human (fragment)
  misc_feature (25)..(113): Homolog of NCBI NO: 7949115 NR Description: Ser/Arg-related nuclear matrix protein;
  misc_feature (25)..(113): Homolog of NCBI NO: 23274133 NR Description: Similar to serine/arginine repetitive matrix 1
  misc_feature (27)..(113): Homolog of NCBI NO: 29250446 NR Description: GLP_39_87477_88058 [Giardia lamblia ATCC 50803]
  misc_feature (31)..(113): Homolog of NCBI NO: 5032119 NR Description: Ser/Arg-related nuclear matrix protein (plenty of
  misc_feature (25)..(113): Homolog of NCBI NO: 17553520 NR Description: Putative nuclear protein, with a coiled coil of bilaterial origin (52.8 kD) [Caenorhabditis elegans]
  misc_feature (14)..(113): Homolog of NCBI NO: 15027957 NR Description: putative arginine/serine-rich protein
  misc_feature (3)..(113): Homolog of NCBI NO: 28972568 NR Description: mKIAA1019 protein [Mus musculus]
  misc_feature (14)..(113): Homolog of NCBI NO: 15219287 NR Description: arginine/serine-rich protein, putative; protein At1g16610.1, supported by cDNA: gi_15027956, supported by cDNA:
HQRKVSLATTRPFPSTPARHLKLHPDRWRPRPRRSPRRRSRPPRSPRRPRRPPPARSPRRRSGCRRPSPPRRAATRRAARRTRRASRPTRSTSSRCSSRCTRTSASPPRPCPS

SEQ ID NO: 15063 - protein, 104 aa, Zea mays subsp. mays
  peptide (1)..(104): Ceres Seq. ID no. 4648289
  misc_feature (22)..(103): Pfam Name: Core histone H2A/H2B/H3/H4 Pfam Description: Core histone H2A/H2B/H3/H4
  misc_feature (1)..(103): Homolog of NCBI NO: 122022 NR Description: Histone H2B >gi|283025|pir||S22323 histone H2B -
  misc_feature (1)..(103): Homolog of NCBI NO: 1708107 NR Description: Histone H2B >gi|7439752|pir||T02077 histone H2B -
  misc_feature (1)..(103): Homolog of NCBI NO: 3913804 NR Description: Histone H2B.3 >gi|577825|emb|CAA49584.1| H2B
  misc_feature (1)..(103): Homolog of NCBI NO: 34895900 NR Description: putative histone H2B [Oryza sativa (japonica group)] >gi|9663989|dbj|BAB03630.1| putative histone H2B [Oryza
  misc_feature (1)..(103): Homolog of NCBI NO: 34895832 NR Description: putative histone H2B [Oryza sativa (japonica group)] >gi|13872898|dbj|BAB44005.1| putative histone H2B [Oryza
  misc_feature (1)..(103): Homolog of NCBI NO: 34895838 NR Description: putative histone H2B [Oryza sativa (japonica group)] >gi|13872901|dbj|BAB44008.1| putative histone H2B [Oryza
  misc_feature (1)..(103): Homolog of NCBI NO: 399853 NR Description: Histone H2B.1 >gi|283041|pir||S28048 histone H2B
  misc_feature (1)..(103): Homolog of NCBI NO: 399854 NR Description: Histone H2B.2 >gi|283042|pir||S28049 histone H2B
  misc_feature (31)..(103): Homolog of NCBI NO: 15030224 NR Description: Similar to H2B histone family, member D [Homo
  misc_feature (1)..(103): Homolog of NCBI NO: 15223150 NR Description: histone H2B, putative; protein id: At1g08170.1 thaliana] >gi|6579213|gb|AAF18256.1|AC011438_18 T23G18.3 thaliana] >gi|8778831|gb|AAF79830.1|AC026875_10 T6D22.26
MAPKAEKKPAEKKPAAEVAEKAEKTPAGKKPKAEKRLPASKSAKEGGDKKGRKKNKKSVETYKIYIFKVLKQVHPDIGISSKAMSIMNSFINDIFEKLAGEAAK

SEQ ID NO: 15064 - DNA, 776 bp, Zea mays subsp. mays
  misc_feature (1)..(776): Ceres Seq. ID no. 12465542
  misc_feature: MA Experiment ID: 108543 Result: Down-regulated in Transcription
gtggccgaagatttacacaagaatcaaaactgagagctcatatcagggcacaacatgagaaagctgttggcttgcagaatccaggtgcgtcatcaatgaaccacagtgcaattggaggtccgcaccagccccctaggccagcgaaggtctcagcagcacctccagctccctcagctgagcgcccttacgtctgcccctacgatggttgtgacaaggcatacatccatgagtacaagttgaacctccatgaaaaaagagcatcccaaccactaccaggatggtggtccaaatggtgctgccgccccttcaaagcgcagcatctcgaagagttcccacaggagcaagctggacatcacctctaggatgccaccggccaacatccccaagcacagagggtatgcaacaccattgccanctgtggtgagcctccctgaggagcagcagttgntaaggaaagtggtgtncgaggatgacagcgagnagactnaagaagagggggataacaatggcgaggncanatggaantacaananagntgctancagngncnncnaggaaaccgnagncgaagaatgagntgctagcagggattcatttttttttcttctgtagctgtgcatataccataatctatagactggtggttatagatttcaatacatgtacatttttaaaatacggctggcctatagtagacaagaggttgttgctgccatgccccttntcaactacacaggccatgagttcagaaacgataatggatcattgctcccgtc

SEQ ID NO: 15065 - protein, 119 aa, Zea mays subsp. mays
  peptide (1)..(119): Ceres Seq. ID no. 12465543
  misc_feature (62)..(85): Pfam Name: Zinc finger, C2H2 type Pfam Description: Zinc finger, C2H2 type
  misc_feature (1)..(85): Homolog of NCBI NO: 4927259 NR Description: putative transcription repressor maize TRM
  misc_feature (1)..(82): Homolog of NCBI NO: 4519673 NR Description: WREBP-2 [Nicotiana tabacum]
  misc_feature (2)..(85): Homolog of NCBI NO: 30680251 NR Description: expressed protein [Arabidopsis thaliana]
  misc_feature (1)..(85): Homolog of NCBI NO: 18149203 NR Description: unknown protein [Arabidopsis thaliana]
GRRFTQESKLRAHIRAQHEKAVGLQNPGASSMNHSAIGGPHQPPRPAKVSAAPPAPSAERPYVCPYDGCDKAYIHEYKLNLHEKRASQPLPGWWSKWCCRPFKAQHLEEFPQEQAGHHL

SEQ ID NO: 15066 - protein, 109 aa, Zea mays subsp. mays
  peptide (1)..(109): Ceres Seq. ID no. 12465544
  misc_feature (1)..(70): Homolog of NCBI NO: 4927259 NR Description: putative transcription repressor maize TRM
  misc_feature (11)..(94): Homolog of NCBI NO: 4519673 NR Description: WREBP-2 [Nicotiana tabacum]
  misc_feature (57)..(57): Xaa is any aa, unknown or other
  misc_feature (68)..(68): Xaa is any aa, unknown or other
  misc_feature (73)..(73): Xaa is any aa, unknown or other
  misc_feature (79)..(79): Xaa is any aa, unknown or other
  misc_feature (81)..(81): Xaa is any aa, unknown or other
  misc_feature (90)..(90): Xaa is any aa, unknown or other
  misc_feature (91)..(91): Xaa is any aa, unknown or other
  misc_feature (93)..(93): Xaa is any aa, unknown or other
  misc_feature (95)..(95): Xaa is any aa, unknown or other
  misc_feature (96)..(96): Xaa is any aa, unknown or other
  misc_feature (97)..(97): Xaa is any aa, unknown or other
  misc_feature (99)..(99): Xaa is any aa, unknown or other
  misc_feature (100)..(100): Xaa is any aa, unknown or other
  misc_feature (101)..(101): Xaa is any aa, unknown or other
  misc_feature (102)..(102): Xaa is any aa, unknown or other
  misc_feature (103)..(103): Xaa is any aa, unknown or other
  misc_feature (106)..(106): Xaa is any aa, unknown or other
  misc_feature (107)..(107): Xaa is any aa, unknown or other
MKKEHPNHYQDGGPNGAAAPSKRSISKSSHRSKLDITSRMPPANIPKHRGYATPLPXVVSLPEEQQLXRKVVXEDDSEXTXEEGDNNGEXXWXYXXXAXXXXXETXXEE

SEQ ID NO: 15067 - protein, 102 aa, Zea mays subsp. mays
  peptide (1)..(102): Ceres Seq. ID no. 12465545
  misc_feature (4)..(4): Xaa is any aa, unknown or other
  misc_feature (6)..(6): Xaa is any aa, unknown or other
  misc_feature (16)..(16): Xaa is any aa, unknown or other
  misc_feature (17)..(17): Xaa is any aa, unknown or other
  misc_feature (19)..(19): Xaa is any aa, unknown or other
  misc_feature (21)..(21): Xaa is any aa, unknown or other
  misc_feature (22)..(22): Xaa is any aa, unknown or other
  misc_feature (23)..(23): Xaa is any aa, unknown or other
  misc_feature (25)..(25): Xaa is any aa, unknown or other
  misc_feature (26)..(26): Xaa is any aa, unknown or other
  misc_feature (27)..(27): Xaa is any aa, unknown or other
  misc_feature (28)..(28): Xaa is any aa, unknown or other
  misc_feature (32)..(32): Xaa is any aa, unknown or other
  misc_feature (33)..(33): Xaa is any aa, unknown or other
  misc_feature (37)..(37): Xaa is any aa, unknown or other
  misc_feature (85)..(85): Xaa is any aa, unknown or other
MTAXRXKKRGITMARXXGXTXXXLXXXXRKPXXKNEXLAGIHFFFFCSCAYTIIYRLVVIDFNTCTFLKYGWPIVDKRLLLPCPXSTTQAMSSETIMDHCSR

SEQ ID NO: 15068 - DNA, 442 bp, Zea mays subsp. mays
  misc_feature (1)..(442): Ceres Seq. ID no. 12465538
  misc_feature: MA Experiment ID: 108543 Result: Up-regulated in Transcription
aagatgaatataactgtatgaatgaccctagtcctactgttcatggactgccaaccagtagctytgcccgaacaagccccgctcactcaatgsgatccagacgaacaggtggcacatgggcaagaccycgtggctctgatgatggatattcaagtgattctgtgttgaagcmtgcctccagtgacttcaggaaacttggtcagcgtatatttgtttttgtaataggcggtgctactcgatcagagttacgtgctkcacacaagctttcatccaagctgaagcgagacatcatccttggttcatytagccttgatgatcctccccagttcatcacaaaattnaagttkatgtcagtagaagaattganacttgatgaccttcmgctgtraatggtgtccgcccacacggagtgtaaccttttatnttctcygytctgtcagct

SEQ ID NO: 15069 - protein, 128 aa, Zea mays subsp. mays
  peptide (1)..(128): Ceres Seq. ID no. 12465539
  misc_feature (1)..(128): Homolog of NCBI NO: 38345989 NR Description: OSJNBa0032B23.7 [Oryza sativa (japonica
  misc_feature (1)..(128): Homolog of NCBI NO: 18391384 NR Description: expressed protein; protein id: At1g12360.1,
  misc_feature (1)..(128): Homolog of NCBI NO: 28201820 NR Description: SNARE-interacting protein KEULE
  misc_feature (2)..(128): Homolog of NCBI NO: 18413751 NR Description: putative protein; protein id: At4g12120.1,
  misc_feature (2)..(128): Homolog of NCBI NO: 28201893 NR Description: Protein transport Sec1b (AtSec1b)
  misc_feature (1)..(93): Homolog of NCBI NO: 25402721 NR Description: protein F5O11.8 [imported] - Arabidopsis thaliana
  misc_feature (2)..(111): Homolog of NCBI NO: 7485573 NR Description: hypothetical protein F16J13.190 - Arabidopsis >gi|4586117|emb|CAB40953.1| putative protein [Arabidopsis >gi|7267913|emb|CAB78255.1| putative protein [Arabidopsis
  misc_feature (17)..(111): Homolog of NCBI NO: 13195580 NR Description: AtSec1a [Arabidopsis thaliana]
  misc_feature (17)..(111): Homolog of NCBI NO: 28201892 NR Description: Protein transport Sec1a (AtSec1a)
  misc_feature (51)..(121): Homolog of NCBI NO: 18378910 NR Description: hypothetical protein; protein id: At1g02010.1
  misc_feature (21)..(21): Xaa is any aa, unknown or other
  misc_feature (31)..(31): Xaa is any aa, unknown or other
  misc_feature (42)..(42): Xaa is any aa, unknown or other
  misc_feature (57)..(57): Xaa is any aa, unknown or other
  misc_feature (85)..(85): Xaa is any aa, unknown or other
  misc_feature (101)..(101): Xaa is any aa, unknown or other
  misc_feature (113)..(113): Xaa is any aa, unknown or other
  misc_feature (115)..(115): Xaa is any aa, unknown or other
  misc_feature (122)..(122): Xaa is any aa, unknown or other
  misc_feature (127)..(127): Xaa is any aa, unknown or other
DEYNCMNDPSPTVHGLPTSSXARTSPAHSMXSRRTGGTWARXRGSDDGYSSDSVLKXASSDFRKLGQRIFVFVIGGATRSELRAXHKLSSKLKRDIILGSXSLDDPPQFITKXKXMSVEELXLDDLXL

SEQ ID NO: 15070 - protein, 123 aa, Zea mays subsp. mays
  peptide (1)..(123): Ceres Seq. ID no. 12465540
  misc_feature (1)..(123): Homolog of NCBI NO: 38345989 NR Description: OSJNBa0032B23.7 [Oryza sativa (japonica
  misc_feature (1)..(123): Homolog of NCBI NO: 18391384 NR Description: expressed protein; protein id: At1g12360.1,
  misc_feature (1)..(123): Homolog of NCBI NO: 28201820 NR Description: SNARE-interacting protein KEULE
  misc_feature (1)..(123): Homolog of NCBI NO: 18413751 NR Description: putative protein; protein id: At4g12120.1,
  misc_feature (1)..(123): Homolog of NCBI NO: 28201893 NR Description: Protein transport Sec1b (AtSec1b)
  misc_feature (1)..(88): Homolog of NCBI NO: 25402721 NR Description: protein F5O11.8 [imported] - Arabidopsis thaliana
  misc_feature (1)..(106): Homolog of NCBI NO: 7485573 NR Description: hypothetical protein F16J13.190 - Arabidopsis >gi|4586117|emb|CAB40953.1| putative protein [Arabidopsis >gi|7267913|emb|CAB78255.1| putative protein [Arabidopsis
  misc_feature (12)..(106): Homolog of NCBI NO: 13195580 NR Description: AtSec1a [Arabidopsis thaliana]
  misc_feature (12)..(106): Homolog of NCBI NO: 28201892 NR Description: Protein transport Sec1a (AtSec1a)
  misc_feature (46)..(116): Homolog of NCBI NO: 18378910 NR Description: hypothetical protein; protein id: At1g02010.1
  misc_feature (16)..(16): Xaa is any aa, unknown or other
  misc_feature (26)..(26): Xaa is any aa, unknown or other
  misc_feature (37)..(37): Xaa is any aa, unknown or other
  misc_feature (52)..(52): Xaa is any aa, unknown or other
  misc_feature (80)..(80): Xaa is any aa, unknown or other
  misc_feature (96)..(96): Xaa is any aa, unknown or other
  misc_feature (108)..(108): Xaa is any aa, unknown or other
  misc_feature (110)..(110): Xaa is any aa, unknown or other
  misc_feature (117)..(117): Xaa is any aa, unknown or other
  misc_feature (122)..(122): Xaa is any aa, unknown or other
MNDPSPTVHGLPTSSXARTSPAHSMXSRRTGGTWARXRGSDDGYSSDSVLKXASSDFRKLGQRIFVFVIGGATRSELRAXHKLSSKLKRDIILGSXSLDDPPQFITKXKXMSVEELXLDDLXL

SEQ ID NO: 15071 - protein, 99 aa, Zea mays subsp. mays
  peptide (1)..(99): Ceres Seq. ID no. 12465541
  misc_feature (1)..(99): Homolog of NCBI NO: 38345989 NR Description: OSJNBa0032B23.7 [Oryza sativa (japonica
  misc_feature (1)..(99): Homolog of NCBI NO: 18391384 NR Description: expressed protein; protein id: At1g12360.1,
  misc_feature (1)..(99): Homolog of NCBI NO: 28201820 NR Description: SNARE-interacting protein KEULE
  misc_feature (1)..(99): Homolog of NCBI NO: 18413751 NR Description: putative protein; protein id: At4g12120.1,
  misc_feature (1)..(99): Homolog of NCBI NO: 28201893 NR Description: Protein transport Sec1b (AtSec1b)
  misc_feature (1)..(64): Homolog of NCBI NO: 25402721 NR Description: protein F5O11.8 [imported] - Arabidopsis thaliana
  misc_feature (1)..(82): Homolog of NCBI NO: 7485573 NR Description: hypothetical protein F16J13.190 - Arabidopsis >gi|4586117|emb|CAB40953.1| putative protein [Arabidopsis >gi|7267913|emb|CAB78255.1| putative protein [Arabidopsis
  misc_feature (1)..(82): Homolog of NCBI NO: 13195580 NR Description: AtSec1a [Arabidopsis thaliana]
  misc_feature (1)..(82): Homolog of NCBI NO: 28201892 NR Description: Protein transport Sec1a (AtSec1a)
  misc_feature (22)..(92): Homolog of NCBI NO: 18378910 NR Description: hypothetical protein; protein id: At1g02010.1
  misc_feature (2)..(2): Xaa is any aa, unknown or other
  misc_feature (13)..(13): Xaa is any aa, unknown or other
  misc_feature (28)..(28): Xaa is any aa, unknown or other
  misc_feature (56)..(56): Xaa is any aa, unknown or other
  misc_feature (72)..(72): Xaa is any aa, unknown or other
  misc_feature (84)..(84): Xaa is any aa, unknown or other
  misc_feature (86)..(86): Xaa is any aa, unknown or other
  misc_feature (93)..(93): Xaa is any aa, unknown or other
  misc_feature (98)..(98): Xaa is any aa, unknown or other
MXSRRTGGTWARXRGSDDGYSSDSVLKXASSDFRKLGQRIFVFVIGGATRSELRAXHKLSSKLKRDIILGSXSLDDPPQFITKXKXMSVEELXLDDLXL

SEQ ID NO: 15072 - DNA, 461 bp, Zea mays subsp. mays
  misc_feature (1)..(461): Ceres Seq. ID no. 4648918
  misc_feature: MA Experiment ID: 20000487 Result: Up-regulated in Transcription
  misc_feature: MA Experiment 20000487 PARAMETER Experiment Name: Zm_50mM_NH4NO3_L_to_H_P Parameter: Organism Value: Zea mays
  misc_feature: MA Experiment 20000487 PARAMETER Experiment Name: Zm_50mM_NH4NO3_L_to_H_P Parameter: Timepoint (hr) Value: 4
  misc_feature: MA Experiment 20000487 PARAMETER Experiment Name: Zm_50mM_NH4NO3_L_to_H_P Parameter: Tissue Value: Leaves
  misc_feature: MA Experiment 20000487 PARAMETER Experiment Name: Zm_50mM_NH4NO3_L_to_H_P Parameter: Treatment Value: 50mM NH4NO3 vs. 100mM Mannitol
  misc_feature: Pfam Name: Ribosomal_L18e Pfam Description: Eukaryotic ribosomal protein L18
aaaaccctagcaccagtcccgccgccgccgctgccgccctgaccctcgccgctgctgcagcctccaccgcgcaaccatgggtatcgacctcgtcgccggcggccgcaacaagaggaccaagcgcacggcgcccaaatcggacgatgtgtacctcaagctgctcgtcaagctctaccgcttcctggtccggaggaccaagagccagttcaacgccgtgatcctgaagcgcctcttcatgagcaagaccaaccgccccccgctctcgatgcgccgcctcgtcaggttcatggaggggaaggaggacaagatcgctgtgatagtgggcaccatcaccgatgaccagagggtctacgagataccggcaatgaaggtggccgcgctcaggttcaccgagacggcgagggccaggattgtcaatgccggtggcgagtgccttacctttgaccagctcgcgctccgtg

SEQ ID NO: 15073 - protein, 128 aa, Zea mays subsp. mays
  peptide (1)..(128): Ceres Seq. ID no. 4648919
  misc_feature: Pfam Name: Ribosomal_L18e Pfam Description: Eukaryotic ribosomal protein L18
  misc_feature (1)..(127): Homolog of NCBI NO: 34393858 NR Description: putative cytoplasmic ribosomal protein L18 [Oryza
  misc_feature (1)..(127): Homolog of NCBI NO: 34897628 NR Description: cytoplasmic ribosomal protein L18 [Oryza sativa]
  misc_feature (1)..(127): Homolog of NCBI NO: 606970 NR Description: cytoplasmic ribosomal protein L18
  misc_feature (1)..(127): Homolog of NCBI NO: 15241061 NR Description: 60S ribosomal protein - like; protein id: supported by cDNA: gi_15810152 [Arabidopsis thaliana] putative 60S ribosomal protein [Arabidopsis thaliana]
  misc_feature (1)..(127): Homolog of NCBI NO: 15230011 NR Description: putative 60S ribosomal protein L18; protein id: supported by cDNA: gi_14335089, supported by cDNA: gi_16974508, by cDNA: gi_606969 [Arabidopsis thaliana]
  misc_feature (1)..(127): Homolog of NCBI NO: 28798549 NR Description: 60S ribosomal protein [Medicago sativa]
  misc_feature (4)..(127): Homolog of NCBI NO: 6094021 NR Description: 60S RIBOSOMAL PROTEIN L18
  misc_feature (2)..(127): Homolog of NCBI NO: 7440855 NR Description: ribosomal protein L18, cytosolic - Arabidopsis
  misc_feature (1)..(127): Homolog of NCBI NO: 28630354 NR Description: ribosomal protein L18 [Branchiostoma lanceolatum]
  misc_feature (1)..(127): Homolog of NCBI NO: 4506607 NR Description: ribosomal protein L18; 60S ribosomal protein L18 sapiens] >gi|548749|sp|Q07020|RL18_HUMAN 60S ribosomal protein
MGIDLVAGGRNKRTKRTAPKSDDVYLKLLVKLYRFLVRRTKSQFNAVILKRLFMSKTNRPPLSMRRLVRFMEGKEDKIAVIVGTITDDQRVYEIPAMKVAALRFTETARARIVNAGGECLTFDQLALR

SEQ ID NO: 15074 - protein, 75 aa, Zea mays subsp. mays
  peptide (1)..(75): Ceres Seq. ID no. 4648920
  misc_feature: Pfam Name: Ribosomal_L18e Pfam Description: Eukaryotic ribosomal protein L18
  misc_feature (1)..(74): Homolog of NCBI NO: 34393858 NR Description: putative cytoplasmic ribosomal protein L18 [Oryza
  misc_feature (1)..(74): Homolog of NCBI NO: 34897628 NR Description: cytoplasmic ribosomal protein L18 [Oryza sativa]
  misc_feature (1)..(74): Homolog of NCBI NO: 606970 NR Description: cytoplasmic ribosomal protein L18
  misc_feature (1)..(74): Homolog of NCBI NO: 15241061 NR Description: 60S ribosomal protein - like; protein id: supported by cDNA: gi_15810152 [Arabidopsis thaliana] putative 60S ribosomal protein [Arabidopsis thaliana]
  misc_feature (1)..(74): Homolog of NCBI NO: 15230011 NR Description: putative 60S ribosomal protein L18; protein id: supported by cDNA: gi_14335089, supported by cDNA: gi_16974508, by cDNA: gi_606969 [Arabidopsis thaliana]
  misc_feature (1)..(74): Homolog of NCBI NO: 28798549 NR Description: 60S ribosomal protein [Medicago sativa]
  misc_feature (1)..(74): Homolog of NCBI NO: 6094021 NR Description: 60S RIBOSOMAL PROTEIN L18
  misc_feature (1)..(74): Homolog of NCBI NO: 7440855 NR Description: ribosomal protein L18, cytosolic - Arabidopsis
  misc_feature (1)..(74): Homolog of NCBI NO: 28630354 NR Description: ribosomal protein L18 [Branchiostoma lanceolatum]
  misc_feature (1)..(74): Homolog of NCBI NO: 4506607 NR Description: ribosomal protein L18; 60S ribosomal protein L18 sapiens] >gi|548749|sp|Q07020|RL18_HUMAN 60S ribosomal protein
MSKTNRPPLSMRRLVRFMEGKEDKIAVIVGTITDDQRVYEIPAMKVAALRFTETARARIVNAGGECLTFDQLALR

SEQ ID NO: 15075 - protein, 71 aa, Zea mays subsp. mays
  peptide (1)..(71): Ceres Seq. ID no. 4648921
  misc_feature: Pfam Name: Ribosomal_L18e Pfam Description: Eukaryotic ribosomal protein L18
  misc_feature (3)..(71): Homolog of NCBI NO: 32699068 NR Description: hypothetical protein FLJ35107 [Homo sapiens]
NPSTSPAAAAAALTLAAAAASTAQPWVSTSSPAAATRGPSARRPNRTMCTSSCSSSSTASWSGGPRASSTP

SEQ ID NO: 15076 - DNA, 480 bp, Zea mays subsp. mays
  misc_feature (1)..(480): Ceres Seq. ID no. 4647995
  misc_feature: MA Experiment ID: 108528 Result: Down-regulated in Transcription
  misc_feature: MA Experiment 108528 PARAMETER Experiment Name: Zm_Imbibed_Seeds_P Parameter: Age (day) Value: 5 vs. 2
  misc_feature: MA Experiment 108528 PARAMETER Experiment Name: Zm_Imbibed_Seeds_P Parameter: Organism Value: Zea mays
  misc_feature: MA Experiment 108528 PARAMETER Experiment Name: Zm_Imbibed_Seeds_P Parameter: Plant Line Value: 35A19
  misc_feature: MA Experiment 108528 PARAMETER Experiment Name: Zm_Imbibed_Seeds_P Parameter: Tissue Value: Aerial vs. Embryo
  misc_feature: MA Experiment ID: 108530 Result: Down-regulated in Transcription
  misc_feature: MA Experiment 108530 PARAMETER Experiment Name: Zm_Imbibed_Seeds_P Parameter: Age (day) Value: 6 vs. 2
  misc_feature: MA Experiment 108530 PARAMETER Experiment Name: Zm_Imbibed_Seeds_P Parameter: Organism Value: Zea mays
  misc_feature: MA Experiment 108530 PARAMETER Experiment Name: Zm_Imbibed_Seeds_P Parameter: Plant Line Value: 35A19
  misc_feature: MA Experiment 108530 PARAMETER Experiment Name: Zm_Imbibed_Seeds_P Parameter: Tissue Value: Aerial vs. Embryo
  misc_feature: MA Experiment ID: 108535 Result: Up-regulated in Transcription
  misc_feature: MA Experiment 108535 PARAMETER Experiment Name: Zm_Meristem_P Parameter: Age (day) Value: 8
  misc_feature: MA Experiment 108535 PARAMETER Experiment Name: Zm_Meristem_P Parameter: Organism Value: Zea mays
  misc_feature: MA Experiment 108535 PARAMETER Experiment Name: Zm_Meristem_P Parameter: Plant Line Value: 35A19
  misc_feature: MA Experiment 108535 PARAMETER Experiment Name: Zm_Meristem_P Parameter: Tissue Value: Root Meristem vs. Above Root Meristem
  misc_feature: MA Experiment ID: 108536 Result: Up-regulated in Transcription
  misc_feature: MA Experiment 108536 PARAMETER Experiment Name: Zm_Meristem_P Parameter: Age (day) Value: 8
  misc_feature: MA Experiment 108536 PARAMETER Experiment Name: Zm_Meristem_P Parameter: Organism Value: Zea mays
  misc_feature: MA Experiment 108536 PARAMETER Experiment Name: Zm_Meristem_P Parameter: Plant Line Value: 35A19
  misc_feature: MA Experiment 108536 PARAMETER Experiment Name: Zm_Meristem_P Parameter: Tissue Value: Shoot Meristem vs. Above Shoot Meristem
  misc_feature: MA Experiment ID: 108543 Result: Up-regulated in Transcription
  misc_feature: MA Experiment ID: 108544 Result: Down-regulated in Transcription
  misc_feature: MA Experiment ID: 108545 Result: Down-regulated in Transcription
  misc_feature: MA Experiment 108545 PARAMETER Experiment Name: Zm_Imbibed_Seeds_P Parameter: Age (day) Value: 3 vs. 2
  misc_feature: MA Experiment 108545 PARAMETER Experiment Name: Zm_Imbibed_Seeds_P Parameter: Organism Value: Zea mays
  misc_feature: MA Experiment 108545 PARAMETER Experiment Name: Zm_Imbibed_Seeds_P Parameter: Plant Line Value: 35A19
  misc_feature: MA Experiment 108545 PARAMETER Experiment Name: Zm_Imbibed_Seeds_P Parameter: Tissue Value: Aerial vs. Embryo
  misc_feature: MA Experiment ID: 108547 Result: Down-regulated in Transcription
  misc_feature: MA Experiment 108547 PARAMETER Experiment Name: Zm_Imbibed_Seeds_P Parameter: Age (day) Value: 4 vs. 2
  misc_feature: MA Experiment 108547 PARAMETER Experiment Name: Zm_Imbibed_Seeds_P Parameter: Organism Value: Zea mays
  misc_feature: MA Experiment 108547 PARAMETER Experiment Name: Zm_Imbibed_Seeds_P Parameter: Plant Line Value: 35A19
  misc_feature: MA Experiment 108547 PARAMETER Experiment Name: Zm_Imbibed_Seeds_P Parameter: Tissue Value: Aerial vs. Embryo
  misc_feature: MA Experiment ID: 108687 Result: Up-regulated in Transcription
  misc_feature: MA Experiment 108687 PARAMETER Experiment Name: Zm_Embryos-Flowers__P Parameter: Tissue Value: Embryo vs. Aerial+
  misc_feature: MA Experiment ID: 20000108 Result: Up-regulated in Transcription
  misc_feature: MA Experiment 20000108 PARAMETER Experiment Name: Zm_Root-Tips_P Parameter: Age (day) Value: 12
  misc_feature: MA Experiment 20000108 PARAMETER Experiment Name: Zm_Root-Tips_P Parameter: Organism Value: Zea mays
  misc_feature: MA Experiment 20000108 PARAMETER Experiment Name: Zm_Root-Tips_P Parameter: Tissue Value: Root tips vs. Root mid region    35
  misc_feature: MA Experiment 20000108 PARAMETER Experiment Name: Zm_Root-Tips_P Parameter: Tissue Value: Root tips vs. Root mid region   Sequence Listing-Misc Features (4)
  misc_feature: MA Experiment ID: 20001613 Result: Up-regulated in Transcription
  misc_feature: MA Experiment 20001613 PARAMETER Experiment Name: Zm_50ppm_KNO3_L-to-H_P Parameter: Age (day) Value: 20
  misc_feature: MA Experiment 20001613 PARAMETER Experiment Name: Zm_50ppm_KNO3_L-to-H_P Parameter: Organism Value: Zea mays
  misc_feature: MA Experiment 20001613 PARAMETER Experiment Name: Zm_50ppm_KNO3_L-to-H_P Parameter: Plant Line Value: 35A19
  misc_feature: MA Experiment 20001613 PARAMETER Experiment Name: Zm_50ppm_KNO3_L-to-H_P Parameter: Timepoint (hr) Value: 24
  misc_feature: MA Experiment 20001613 PARAMETER Experiment Name: Zm_50ppm_KNO3_L-to-H_P Parameter: Tissue Value: Roots
  misc_feature: MA Experiment 20001613 PARAMETER Experiment Name: Zm_50ppm_KNO3_L-to-H_P Parameter: Treatment Value: 50ppm KNO3 vs. 50ppm KCl
acgtttgatttgagatttgaccagaccatcgcctccgcctcgtccctcccgccgagcccgatcgacctcccttccgccgcacgccggcctccatcctcctccgcgccccgaggccgcagacgcgttggcaagggcgagggtgtgagtggtgtggcactcgcaccatcgtccaacggctactacaatggcggtgccgccgatgctaccggtggcggttccggcgccggcggtggacatggtggtggcgcagccggagctccaagctatggaaccggaggcggcctcggcggaggcaagggtgaggccggcagcgatggatcgtgggggtcaggttatgctcagggaatcggtgctggcacaggcggcggtggcggcggcggatcccaaggcggctctggtggcggtggaggctctgggtccggatccggcagcggtggaatccactgagcttgcacttcagtagctagagcctakagcccc

SEQ ID NO: 15077 - protein, 148 aa, Zea mays subsp. mays
  peptide (1)..(148): Ceres Seq. ID no. 4647996
  misc_feature (12)..(139): Pfam Name: Herpesvirus large structural phosphoprotein UL32 Pfam Description: Herpesvirus large structural phosphoprotein UL32
  misc_feature (42)..(148): Homolog of NCBI NO: 7442081 NR Description: glycine-rich protein grp3 - maize
  misc_feature (42)..(148): Homolog of NCBI NO: 37534936 NR Description: putative glycine-rich protein [Oryza sativa
  misc_feature (43)..(146): Homolog of NCBI NO: 72320 NR Description: glycine-rich cell wall protein precursor - thaliana >gi|16293|emb|CAA41249.1| glycine rich protein
  misc_feature (43)..(146): Homolog of NCBI NO: 15228946 NR Description: unknown protein; protein id: At3g17050.1
  misc_feature (26)..(146): Homolog of NCBI NO: 37534934 NR Description: putative glycine-rich protein [Oryza sativa
  misc_feature (43)..(146): Homolog of NCBI NO: 72320 NR Description: glycine-rich cell wall protein precursor - thaliana >gi|16293|emb|CAA41249.1| glycine rich protein
  misc_feature (43)..(146): Homolog of NCBI NO: 15228946 NR Description: unknown protein; protein id: At3g17050.1
  misc_feature (43)..(145): Homolog of NCBI NO: 81623 NR Description: glycine-rich protein 1 - Arabidopsis thaliana
  misc_feature (43)..(145): Homolog of NCBI NO: 15234690 NR Description: glycine-rich protein; protein id: At4g22020.1
  misc_feature (32)..(146): Homolog of NCBI NO: 37534934 NR Description: putative glycine-rich protein [Oryza sativa
TFDLRFDQTIASASSLPPSPIDLPSAARRPPSSSAPRGRRRVGKGEGVSGVALAPSSNGYYNGGAADATGGGSGAGGGHGGGAAGAPSYGTGGGLGGGKGEAGSDGSWGSGYAQGIGAGTGGGGGGGSQGGSGGGGGSGSGSGSGGIH

SEQ ID NO: 15078 - protein, 92 aa, Zea mays subsp. mays
  peptide (1)..(92): Ceres Seq. ID no. 4647997
MAVPPMLPVAVPAPAVDMVVAQPELQAMEPEAASAEARVRPAAMDRGGQVMLRESVLAQAAVAAADPKAALVAVEALGPDPAAVESTELALQ

SEQ ID NO: 15079 - protein, 87 aa, Zea mays subsp. mays
  peptide (1)..(87): Ceres Seq. ID no. 4647998
MLPVAVPAPAVDMVVAQPELQAMEPEAASAEARVRPAAMDRGGQVMLRESVLAQAAVAAADPKAALVAVEALGPDPAAVESTELALQ

SEQ ID NO: 15080 - DNA, 390 bp, Zea mays subsp. mays
  misc_feature (1)..(390): Ceres Seq. ID no. 5008164
  misc_feature: MA Experiment ID: 108522 Result: Down-regulated in Transcription
  misc_feature: MA Experiment 108522 PARAMETER Experiment Name: Zm_42deg_Heat_P Parameter: Age (day) Value: 8
  misc_feature: MA Experiment 108522 PARAMETER Experiment Name: Zm_42deg_Heat_P Parameter: Organism Value: Zea mays
  misc_feature: MA Experiment 108522 PARAMETER Experiment Name: Zm_42deg_Heat_P Parameter: Plant Line Value: 35A19
  misc_feature: MA Experiment 108522 PARAMETER Experiment Name: Zm_42deg_Heat_P Parameter: Temperature (deg C) Value: 42 vs. 22
  misc_feature: MA Experiment 108522 PARAMETER Experiment Name: Zm_42deg_Heat_P Parameter: Timepoint (hr) Value: 1
  misc_feature: MA Experiment 108522 PARAMETER Experiment Name: Zm_42deg_Heat_P Parameter: Tissue Value: Aerial
  misc_feature: MA Experiment ID: 108535 Result: Down-regulated in Transcription
  misc_feature: MA Experiment 108535 PARAMETER Experiment Name: Zm_Meristem_P Parameter: Age (day) Value: 8
  misc_feature: MA Experiment 108535 PARAMETER Experiment Name: Zm_Meristem_P Parameter: Organism Value: Zea mays
  misc_feature: MA Experiment 108535 PARAMETER Experiment Name: Zm_Meristem_P Parameter: Plant Line Value: 35A19
  misc_feature: MA Experiment 108535 PARAMETER Experiment Name: Zm_Meristem_P Parameter: Tissue Value: Root Meristem vs. Above Root Meristem
  misc_feature: MA Experiment ID: 20000478 Result: Up-regulated in Transcription
  misc_feature: MA Experiment 20000478 PARAMETER Experiment Name: Zm_5mM_SA_P Parameter: Age (day) Value: 11
  misc_feature: MA Experiment 20000478 PARAMETER Experiment Name: Zm_5mM_SA_P Parameter: Organism Value: Zea mays
  misc_feature: MA Experiment 20000478 PARAMETER Experiment Name: Zm_5mM_SA_P Parameter: Plant Line Value: 35A19
  misc_feature: MA Experiment 20000478 PARAMETER Experiment Name: Zm_5mM_SA_P Parameter: Timepoint (hr) Value: 72
  misc_feature: MA Experiment 20000478 PARAMETER Experiment Name: Zm_5mM_SA_P Parameter: Tissue Value: Aerial
  misc_feature: MA Experiment 20000478 PARAMETER Experiment Name: Zm_5mM_SA_P Parameter: Treatment Value: 5mM SA vs. No Treatment
  misc_feature: MA Experiment ID: 20000487 Result: Up-regulated in Transcription
  misc_feature: MA Experiment 20000487 PARAMETER Experiment Name: Zm_50mM_NH4NO3_L_to_H_P Parameter: Organism Value: Zea mays
  misc_feature: MA Experiment 20000487 PARAMETER Experiment Name: Zm_50mM_NH4NO3_L_to_H_P Parameter: Timepoint (hr) Value: 4
  misc_feature: MA Experiment 20000487 PARAMETER Experiment Name: Zm_50mM_NH4NO3_L_to_H_P Parameter: Tissue Value: Leaves
  misc_feature: MA Experiment 20000487 PARAMETER Experiment Name: Zm_50mM_NH4NO3_L_to_H_P Parameter: Treatment Value: 50mM NH4NO3 vs. 100mM Mannitol
  misc_feature: MA Experiment ID: 20001610 Result: Up-regulated in Transcription
  misc_feature: MA Experiment 20001610 PARAMETER Experiment Name: Zm_50ppm_KNO3_L-to-H_P Parameter: Age (day) Value: 19
  misc_feature: MA Experiment 20001610 PARAMETER Experiment Name: Zm_50ppm_KNO3_L-to-H_P Parameter: Organism Value: Zea mays
  misc_feature: MA Experiment 20001610 PARAMETER Experiment Name: Zm_50ppm_KNO3_L-to-H_P Parameter: Plant Line Value: 35A19
  misc_feature: MA Experiment 20001610 PARAMETER Experiment Name: Zm_50ppm_KNO3_L-to-H_P Parameter: Timepoint (hr) Value: 2
  misc_feature: MA Experiment 20001610 PARAMETER Experiment Name: Zm_50ppm_KNO3_L-to-H_P Parameter: Tissue Value: Roots
  misc_feature: MA Experiment 20001610 PARAMETER Experiment Name: Zm_50ppm_KNO3_L-to-H_P Parameter: Treatment Value: 50ppm KNO3 vs. 50ppm KCl
  misc_feature: MA Experiment ID: 20001612 Result: Up-regulated in Transcription
  misc_feature: MA Experiment 20001612 PARAMETER Experiment Name: Zm_50ppm_KNO3_L-to-H_P Parameter: Age (day) Value: 19
  misc_feature: MA Experiment 20001612 PARAMETER Experiment Name: Zm_50ppm_KNO3_L-to-H_P Parameter: Organism Value: Zea mays
  misc_feature: MA Experiment 20001612 PARAMETER Experiment Name: Zm_50ppm_KNO3_L-to-H_P Parameter: Plant Line Value: 35A19
  misc_feature: MA Experiment 20001612 PARAMETER Experiment Name: Zm_50ppm_KNO3_L-to-H_P Parameter: Timepoint (hr) Value: 8
  misc_feature: MA Experiment 20001612 PARAMETER Experiment Name: Zm_50ppm_KNO3_L-to-H_P Parameter: Tissue Value: Roots
  misc_feature: MA Experiment 20001612 PARAMETER Experiment Name: Zm_50ppm_KNO3_L-to-H_P Parameter: Treatment Value: 50ppm KNO3 vs. 50ppm KCl
  misc_feature: MA Experiment ID: 20001613 Result: Up-regulated in Transcription
  misc_feature: MA Experiment 20001613 PARAMETER Experiment Name: Zm_50ppm_KNO3_L-to-H_P Parameter: Age (day) Value: 20
  misc_feature: MA Experiment 20001613 PARAMETER Experiment Name: Zm_50ppm_KNO3_L-to-H_P Parameter: Organism Value: Zea mays
  misc_feature: MA Experiment 20001613 PARAMETER Experiment Name: Zm_50ppm_KNO3_L-to-H_P Parameter: Plant Line Value: 35A19
  misc_feature: MA Experiment 20001613 PARAMETER Experiment Name: Zm_50ppm_KNO3_L-to-H_P Parameter: Timepoint (hr) Value: 24
  misc_feature: MA Experiment 20001613 PARAMETER Experiment Name: Zm_50ppm_KNO3_L-to-H_P Parameter: Tissue Value: Roots
  misc_feature: MA Experiment 20001613 PARAMETER Experiment Name: Zm_50ppm_KNO3_L-to-H_P Parameter: Treatment Value: 50ppm KNO3 vs. 50ppm KCl
agtacaggtcgcaacaaccccccaccgtgagggacgcgaccaaacacacgcccctcttcgcacctcccaccaaccccgacgagcggcgatgaccggcacggtgtccaagctggcggcgccccgtccggcggcaccgccgctccggccggcgtccctccgcaccgccgccctcgccttcgccccttccccgcgccgagtccgcgtttccgtcgccgggcgagccaggagccccatcattgcgmtggcttcggccaaggaaggaagcggtgcaccgaccaagaggactgcgcttcatgatctctacgagctccagggcctgtccccgtgcgtacgacaacctaygccgccctgtcacagacttgctgcccattatcgccagcggcgtcctgt

SEQ ID NO: 15081 - protein, 129 aa, Zea mays subsp. mays
  peptide (1)..(129): Ceres Seq. ID no. 5008165
  misc_feature (30)..(84): Homolog of NCBI NO: 34907042 NR Description: putative transaldolase [Oryza sativa (japonica group)] >gi|20160725|dbj|BAB89667.1| putative transaldolase
  misc_feature (80)..(108): Homolog of NCBI NO: 34907042 NR Description: putative transaldolase [Oryza sativa (japonica group)] >gi|20160725|dbj|BAB89667.1| putative transaldolase
  misc_feature (41)..(108): Homolog of NCBI NO: 10441272 NR Description: transaldolase [Lycopersicon esculentum]
  misc_feature (81)..(81): Xaa is any aa, unknown or other
  misc_feature (114)..(114): Xaa is any aa, unknown or other
VQVATTPHREGRDQTHAPLRTSHQPRRAAMTGTVSKLAAPRPAAPPLRPASLRTAALAFAPSPRRVRVSVAGRARSPIIAXASAKEGSGAPTKRTALHDLYELQGLSPCVRQPXPPCHRLAAHYRQRRP

SEQ ID NO: 15082 - protein, 100 aa, Zea mays subsp. mays
  peptide (1)..(100): Ceres Seq. ID no. 5008166
  misc_feature (1)..(55): Homolog of NCBI NO: 34907042 NR Description: putative transaldolase [Oryza sativa (japonica group)] >gi|20160725|dbj|BAB89667.1| putative transaldolase
  misc_feature (51)..(79): Homolog of NCBI NO: 34907042 NR Description: putative transaldolase [Oryza sativa (japonica group)] >gi|20160725|dbj|BAB89667.1| putative transaldolase
  misc_feature (12)..(79): Homolog of NCBI NO: 10441272 NR Description: transaldolase [Lycopersicon esculentum]
  misc_feature (52)..(52): Xaa is any aa, unknown or other
  misc_feature (85)..(85): Xaa is any aa, unknown or other
MTGTVSKLAAPRPAAPPLRPASLRTAALAFAPSPRRVRVSVAGRARSPIIAXASAKEGSGAPTKRTALHDLYELQGLSPCVRQPXPPCHRLAAHYRQRRP

SEQ ID NO: 15083 - DNA, 434 bp, Zea mays subsp. mays
  misc_feature (1)..(434): Ceres Seq. ID no. 4647884
  misc_feature: MA Experiment ID: 108528 Result: Down-regulated in Transcription
  misc_feature: MA Experiment 108528 PARAMETER Experiment Name: Zm_Imbibed_Seeds_P Parameter: Age (day) Value: 5 vs. 2
  misc_feature: MA Experiment 108528 PARAMETER Experiment Name: Zm_Imbibed_Seeds_P Parameter: Organism Value: Zea mays
  misc_feature: MA Experiment 108528 PARAMETER Experiment Name: Zm_Imbibed_Seeds_P Parameter: Plant Line Value: 35A19
  misc_feature: MA Experiment 108528 PARAMETER Experiment Name: Zm_Imbibed_Seeds_P Parameter: Tissue Value: Aerial vs. Embryo
  misc_feature: MA Experiment ID: 108529 Result: Down-regulated in Transcription
  misc_feature: MA Experiment 108529 PARAMETER Experiment Name: Zm_Imbibed_Seeds_P Parameter: Age (day) Value: 5 vs. 2
  misc_feature: MA Experiment 108529 PARAMETER Experiment Name: Zm_Imbibed_Seeds_P Parameter: Organism Value: Zea mays
  misc_feature: MA Experiment 108529 PARAMETER Experiment Name: Zm_Imbibed_Seeds_P Parameter: Plant Line Value: 35A19
  misc_feature: MA Experiment 108529 PARAMETER Experiment Name: Zm_Imbibed_Seeds_P Parameter: Tissue Value: Roots vs. Embryo
  misc_feature: MA Experiment ID: 108530 Result: Down-regulated in Transcription
  misc_feature: MA Experiment 108530 PARAMETER Experiment Name: Zm_Imbibed_Seeds_P Parameter: Age (day) Value: 6 vs. 2
  misc_feature: MA Experiment 108530 PARAMETER Experiment Name: Zm_Imbibed_Seeds_P Parameter: Organism Value: Zea mays
  misc_feature: MA Experiment 108530 PARAMETER Experiment Name: Zm_Imbibed_Seeds_P Parameter: Plant Line Value: 35A19
  misc_feature: MA Experiment 108530 PARAMETER Experiment Name: Zm_Imbibed_Seeds_P Parameter: Tissue Value: Aerial vs. Embryo
  misc_feature: MA Experiment ID: 108535 Result: Up-regulated in Transcription
  misc_feature: MA Experiment 108535 PARAMETER Experiment Name: Zm_Meristem_P Parameter: Age (day) Value: 8
  misc_feature: MA Experiment 108535 PARAMETER Experiment Name: Zm_Meristem_P Parameter: Organism Value: Zea mays
  misc_feature: MA Experiment 108535 PARAMETER Experiment Name: Zm_Meristem_P Parameter: Plant Line Value: 35A19
  misc_feature: MA Experiment 108535 PARAMETER Experiment Name: Zm_Meristem_P Parameter: Tissue Value: Root Meristem vs. Above Root Meristem
  misc_feature: MA Experiment ID: 108544 Result: Down-regulated in Transcription
  misc_feature: MA Experiment ID: 20000108 Result: Up-regulated in Transcription
  misc_feature: MA Experiment 20000108 PARAMETER Experiment Name: Zm_Root-Tips_P Parameter: Age (day) Value: 12
  misc_feature: MA Experiment 20000108 PARAMETER Experiment Name: Zm_Root-Tips_P Parameter: Organism Value: Zea mays
  misc_feature: MA Experiment 20000108 PARAMETER Experiment Name: Zm_Root-Tips_P Parameter: Tissue Value: Root tips vs. Root mid region    35
  misc_feature: MA Experiment 20000108 PARAMETER Experiment Name: Zm_Root-Tips_P Parameter: Tissue Value: Root tips vs. Root mid region   Sequence Listing-Misc Features (4)
  misc_feature: MA Experiment ID: 20000535 Result: Up-regulated in Transcription
  misc_feature: MA Experiment 20000535 PARAMETER Experiment Name: Zm_Hybrid_Seed_Dev_P Parameter: DAP Value: 30 vs. 12
  misc_feature: MA Experiment 20000535 PARAMETER Experiment Name: Zm_Hybrid_Seed_Dev_P Parameter: Organism Value: Zea mays
  misc_feature: MA Experiment 20000535 PARAMETER Experiment Name: Zm_Hybrid_Seed_Dev_P Parameter: Plant Line Value: 35A19
  misc_feature: MA Experiment 20000535 PARAMETER Experiment Name: Zm_Hybrid_Seed_Dev_P Parameter: Tissue Value: Embryo vs. Unfert Floret
ttccgcagccaccaccaccccaacccaccggagcagacgaaggcggcgccgcggcgacctcatctccggccaagggaaatgactaccgttccggggtctctggtgtgggagctcgtgaagaaaaacaactgcttcttgatcaagcagttcggcaacagcaacgccaaggtgcagttcagcaaggagccaaacaacctctacaatgtccactcctacaagttctctggcttggcgaacagcaagaccgtggcggtccagccatcagcgggagaggacaaggctgtcgtcctgtccacgaccaagaccaagaagcagaacacccctgccaagctccagcacaagactctgatgcgcaaggagttccgcaagatggccaagtccgtcaagaaccaggtctgcgacaactactacaggcctgatctgaccaagccggc

SEQ ID NO: 15084 - protein, 144 aa, Zea mays subsp. mays
  peptide (1)..(144): Ceres Seq. ID no. 4647885
  misc_feature (31)..(143): Pfam Name: Ribosomal L28e protein family Pfam Description: Ribosomal L28e protein family
  misc_feature (27)..(143): Homolog of NCBI NO: 34910390 NR Description: ribosomal protein L28-like [Oryza sativa
  misc_feature (27)..(143): Homolog of NCBI NO: 15224835 NR Description: putative ribosomal protein L28; protein id: supported by cDNA: gi_15292670, supported by cDNA: gi_19310756
  misc_feature (27)..(143): Homolog of NCBI NO: 15233567 NR Description: putative protein; protein id: At4g29410.1, by cDNA: 5426., supported by cDNA: gi_18252204 [Arabidopsis >gi|25295482|pir||B85343 hypothetical protein AT4g29410
  misc_feature (27)..(143): Homolog of NCBI NO: 32411169 NR Description: predicted protein [Neurospora crassa]
  misc_feature (25)..(143): Homolog of NCBI NO: 20976820 NR Description: GH04183p [Drosophila melanogaster]
  misc_feature (29)..(143): Homolog of NCBI NO: 19114036 NR Description: 60s ribosomal protein L28/L44 pombe] >gi|3219966|sp|O14069|YFF6_SCHPO Probable 60S ribosomal
  misc_feature (34)..(143): Homolog of NCBI NO: 24418650 NR Description: 60S ribosomal protein L28
  misc_feature (34)..(143): Homolog of NCBI NO: 24656625 NR Description: CG12740-PA [Drosophila melanogaster]
  misc_feature (34)..(143): Homolog of NCBI NO: 24656637 NR Description: CG12740-PC [Drosophila melanogaster]
  misc_feature (26)..(141): Homolog of NCBI NO: 31212979 NR Description: ENSANGP00000014265 [Anopheles gambiae]
FRSHHHPNPPEQTKAAPRRPHLRPREMTTVPGSLVWELVKKNNCFLIKQFGNSNAKVQFSKEPNNLYNVHSYKFSGLANSKTVAVQPSAGEDKAVVLSTTKTKKQNTPAKLQHKTLMRKEFRKMAKSVKNQVCDNYYRPDLTKP

SEQ ID NO: 15085 - protein, 138 aa, Zea mays subsp. mays
  peptide (1)..(138): Ceres Seq. ID no. 4647886
PQPPPPQPTGADEGGAAATSSPAKGNDYRSGVSGVGAREEKQLLLDQAVRQQQRQGAVQQGAKQPLQCPLLQVLWLGEQQDRGGPAISGRGQGCRPVHDQDQEAEHPCQAPAQDSDAQGVPQDGQVRQEPGLRQLLQA

SEQ ID NO: 15086 - protein, 118 aa, Zea mays subsp. mays
  peptide (1)..(118): Ceres Seq. ID no. 4647887
  misc_feature (5)..(117): Pfam Name: Ribosomal L28e protein family Pfam Description: Ribosomal L28e protein family
  misc_feature (8)..(117): Homolog of NCBI NO: 24418650 NR Description: 60S ribosomal protein L28
  misc_feature (8)..(117): Homolog of NCBI NO: 24656625 NR Description: CG12740-PA [Drosophila melanogaster]
  misc_feature (1)..(117): Homolog of NCBI NO: 34910390 NR Description: ribosomal protein L28-like [Oryza sativa
  misc_feature (1)..(117): Homolog of NCBI NO: 15233567 NR Description: putative protein; protein id: At4g29410.1, by cDNA: 5426., supported by cDNA: gi_18252204 [Arabidopsis >gi|25295482|pir||B85343 hypothetical protein AT4g29410
  misc_feature (1)..(117): Homolog of NCBI NO: 20976820 NR Description: GH04183p [Drosophila melanogaster]
  misc_feature (3)..(117): Homolog of NCBI NO: 19114036 NR Description: 60s ribosomal protein L28/L44 pombe] >gi|3219966|sp|O14069|YFF6_SCHPO Probable 60S ribosomal
  misc_feature (1)..(117): Homolog of NCBI NO: 32411169 NR Description: predicted protein [Neurospora crassa]
  misc_feature (1)..(117): Homolog of NCBI NO: 15224835 NR Description: putative ribosomal protein L28; protein id: supported by cDNA: gi_15292670, supported by cDNA: gi_19310756
  misc_feature (8)..(117): Homolog of NCBI NO: 24656637 NR Description: CG12740-PC [Drosophila melanogaster]
  misc_feature (1)..(115): Homolog of NCBI NO: 31212979 NR Description: ENSANGP00000014265 [Anopheles gambiae]
MTTVPGSLVWELVKKNNCFLIKQFGNSNAKVQFSKEPNNLYNVHSYKFSGLANSKTVAVQPSAGEDKAVVLSTTKTKKQNTPAKLQHKTLMRKEFRKMAKSVKNQVCDNYYRPDLTKP

SEQ ID NO: 15087 - DNA, 473 bp, Zea mays subsp. mays
  misc_feature (1)..(473): Ceres Seq. ID no. 4647721
  misc_feature: MA Experiment ID: 20000534 Result: Up-regulated in Transcription
  misc_feature: MA Experiment 20000534 PARAMETER Experiment Name: Zm_Hybrid_Pollen_P Parameter: Age (day) Value: 8
  misc_feature: MA Experiment 20000534 PARAMETER Experiment Name: Zm_Hybrid_Pollen_P Parameter: Organism Value: Zea mays
  misc_feature: MA Experiment 20000534 PARAMETER Experiment Name: Zm_Hybrid_Pollen_P Parameter: Plant Line Value: 35A19
  misc_feature: MA Experiment 20000534 PARAMETER Experiment Name: Zm_Hybrid_Pollen_P Parameter: Tissue Value: Pollen vs. Aerial
attccaatttccagtcacaagatctaaacaatcatagaaacacgacagcaagccaagaatcaagaggctcggggaagatgcaggcggcgaaggagaaggtgaaggacggggtgagcgcggtgaaggccaagaccaagatcgcgcaggccaaggcgtcggagaaggcggaggcggccacggcgaggtcgcacgccgagcgggagctggcgcacgagcgcggcaaggccaaggtcgccgccgccaagatggagctgcaccaggacaaggtcctacaccgggaggaggccatcgagcaccgcatccacaagcacggcggccacggccaccaccaccacaagcacggcgtcggcatcgtggccgcgcccgcgccggcgcccggggcaggggcgtactactctactgctgcacgtcaccactactagcgctagctagacgggcacattcgccgactgtgcaatatgatcccgctagct

SEQ ID NO: 15088 - protein, 139 aa, Zea mays subsp. mays
  peptide (1)..(139): Ceres Seq. ID no. 4647722
  misc_feature (26)..(98): Pfam Name: Late embryogenesis abundant (LEA) group 1 Pfam Description: Late embryogenesis abundant (LEA) group 1
  misc_feature (26)..(131): Homolog of NCBI NO: 34897842 NR Description: P0514G12.41 [Oryza sativa (japonica
  misc_feature (26)..(120): Homolog of NCBI NO: 18652404 NR Description: unknown [Hordeum vulgare]
  misc_feature (26)..(89): Homolog of NCBI NO: 18652403 NR Description: unknown [Hordeum vulgare]
  misc_feature (26)..(128): Homolog of NCBI NO: 15223243 NR Description: late-embryogenesis abundant protein, putative; id: At1g32560.1, supported by cDNA: gi_17380703, supported by gi_20465320 [Arabidopsis thaliana] >gi|2129633|pir||S71249
SNFQSQDLNNHRNTTASQESRGSGKMQAAKEKVKDGVSAVKAKTKIAQAKASEKAEAATARSHAERELAHERGKAKVAAAKMELHQDKVLHREEAIEHRIHKHGGHGHHHHKHGVGIVAAPAPAPGAGAYYSTAARHHY

SEQ ID NO: 15089 - protein, 114 aa, Zea mays subsp. mays
  peptide (1)..(114): Ceres Seq. ID no. 4647723
  misc_feature (1)..(73): Pfam Name: Late embryogenesis abundant (LEA) group 1 Pfam Description: Late embryogenesis abundant (LEA) group 1
  misc_feature (1)..(106): Homolog of NCBI NO: 34897842 NR Description: P0514G12.41 [Oryza sativa (japonica
  misc_feature (1)..(95): Homolog of NCBI NO: 18652404 NR Description: unknown [Hordeum vulgare]
  misc_feature (1)..(64): Homolog of NCBI NO: 18652403 NR Description: unknown [Hordeum vulgare]
  misc_feature (1)..(103): Homolog of NCBI NO: 15223243 NR Description: late-embryogenesis abundant protein, putative; id: At1g32560.1, supported by cDNA: gi_17380703, supported by gi_20465320 [Arabidopsis thaliana] >gi|2129633|pir||S71249
MQAAKEKVKDGVSAVKAKTKIAQAKASEKAEAATARSHAERELAHERGKAKVAAAKMELHQDKVLHREEAIEHRIHKHGGHGHHHHKHGVGIVAAPAPAPGAGAYYSTAARHHY

SEQ ID NO: 15090 - DNA, 808 bp, Zea mays subsp. mays
  misc_feature (1)..(808): Ceres Seq. ID no. 13599228
  misc_feature: MA Experiment ID: 20000535 Result: Up-regulated in Transcription
  misc_feature: MA Experiment 20000535 PARAMETER Experiment Name: Zm_Hybrid_Seed_Dev_P Parameter: DAP Value: 30 vs. 12
  misc_feature: MA Experiment 20000535 PARAMETER Experiment Name: Zm_Hybrid_Seed_Dev_P Parameter: Organism Value: Zea mays
  misc_feature: MA Experiment 20000535 PARAMETER Experiment Name: Zm_Hybrid_Seed_Dev_P Parameter: Plant Line Value: 35A19
  misc_feature: MA Experiment 20000535 PARAMETER Experiment Name: Zm_Hybrid_Seed_Dev_P Parameter: Tissue Value: Embryo vs. Unfert Floret
ctctctcgccgtccgccgctactcccctgcctcccccagagctcgttagggttttctcttttttcgggggagaaatctcaagaggcggcaccatgctcgtgtaccaggacaagctttccggcgacgagcttctgtcggattcgttcccttacagggagctggagaacggcgtgctctgggaagtcgatggccattgggtcgttcaaggagcagttgatgtggacattggagccaatccctctgctgagggtggtggtgatgatgagggtgttgatgaccaggccgtgaaggtggttgacattgttgacaccttccgtcttcaggagcaacctgcttttgacaagaagcagtttatctctcacatgaagcgctacatcaagaacctctctgccaagcttgaaggggatgacctagatgctttcaagaagaatgttgagtccgccacaaagtatcttcttagcaagctcaaggaccttcagttctttgttggcgagagcatgcatgatgatggcggcgtggtgttcgcctactacaaggagggagctgctgatccaactttcctgtactttgcacatgggctgaaagaggtcaagtgctaatcgcactgtatgctaaaatctatgctgtcttcagtatttttgctcttatctatggttgtcagtcgactctccaatgttggtgtcagtaactgtcagatgttgagtgtcttgaaaactttctgataattgtgggatttgctttgtaatggtaatcgtgaaattggtgtggttgtgttttggttgaatcaagagattctgccctgttattc

SEQ ID NO: 15091 - protein, 198 aa, Zea mays subsp. mays
  peptide (1)..(198): Ceres Seq. ID no. 13599229
  misc_feature (31)..(195): Pfam Name: Translationally controlled tumour protein Pfam Description: Translationally controlled tumour protein
  misc_feature (31)..(198): Homolog of NCBI NO: 21070379 NR Description: translationally controlled tumor protein
  misc_feature (31)..(198): Homolog of NCBI NO: 20140865 NR Description: Translationally controlled tumor protein homolog
  misc_feature (31)..(198): Homolog of NCBI NO: 549063 NR Description: Translationally controlled tumor protein homolog
  misc_feature (31)..(198): Homolog of NCBI NO: 1174626 NR Description: TRANSLATIONALLY CONTROLLED TUMOR PROTEIN HOMOLOG
  misc_feature (31)..(198): Homolog of NCBI NO: 9979196 NR Description: Translationally controlled tumor protein homolog >gi|4193388|gb|AAD10032.1| translationally controlled tumor
  misc_feature (31)..(174): Homolog of NCBI NO: 7407154 NR Description: human tumor protein-like protein [Hordeum vulgare]
LSPSAATPLPPPELVRVFSFFGGEISRGGTMLVYQDKLSGDELLSDSFPYRELENGVLWEVDGHWVVQGAVDVDIGANPSAEGGGDDEGVDDQAVKVVDIVDTFRLQEQPAFDKKQFISHMKRYIKNLSAKLEGDDLDAFKKNVESATKYLLSKLKDLQFFVGESMHDDGGVVFAYYKEGAADPTFLYFAHGLKEVKC

SEQ ID NO: 15092 - protein, 168 aa, Zea mays subsp. mays
  peptide (1)..(168): Ceres Seq. ID no. 13599230
  misc_feature (1)..(165): Pfam Name: Translationally controlled tumour protein Pfam Description: Translationally controlled tumour protein
  misc_feature (1)..(168): Homolog of NCBI NO: 21070379 NR Description: translationally controlled tumor protein
  misc_feature (1)..(168): Homolog of NCBI NO: 20140865 NR Description: Translationally controlled tumor protein homolog
  misc_feature (1)..(168): Homolog of NCBI NO: 549063 NR Description: Translationally controlled tumor protein homolog
  misc_feature (1)..(168): Homolog of NCBI NO: 1174626 NR Description: TRANSLATIONALLY CONTROLLED TUMOR PROTEIN HOMOLOG
  misc_feature (1)..(168): Homolog of NCBI NO: 9979196 NR Description: Translationally controlled tumor protein homolog >gi|4193388|gb|AAD10032.1| translationally controlled tumor
  misc_feature (1)..(144): Homolog of NCBI NO: 7407154 NR Description: human tumor protein-like protein [Hordeum vulgare]
MLVYQDKLSGDELLSDSFPYRELENGVLWEVDGHWVVQGAVDVDIGANPSAEGGGDDEGVDDQAVKVVDIVDTFRLQEQPAFDKKQFISHMKRYIKNLSAKLEGDDLDAFKKNVESATKYLLSKLKDLQFFVGESMHDDGGVVFAYYKEGAADPTFLYFAHGLKEVKC

SEQ ID NO: 15093 - DNA, 481 bp, Zea mays subsp. mays
  misc_feature (1)..(481): Ceres Seq. ID no. 4647364
  misc_feature: MA Experiment ID: 20000627 Result: Down-regulated in Transcription
  misc_feature: MA Experiment 20000627 PARAMETER Experiment Name: Zm_Herbicide-Treatments_P Parameter: Timepoint (hr) Value: 12
  misc_feature: MA Experiment 20000627 PARAMETER Experiment Name: Zm_Herbicide-Treatments_P Parameter: Tissue Value: Aerial
  misc_feature: MA Experiment 20000627 PARAMETER Experiment Name: Zm_Herbicide-Treatments_P Parameter: Treatment Value: Finale vs. No Treatment
aaacaaaccttctgagatttcgccggcgagagaagagtgagagagagagatccaacggctgagatgttccttcgtgcaatcggacggccgttattggccaaagtgaagcagacgacggggatcgtggggctcgacgtcgtaccgaacgcgagggcggtgctgatcgatctctacagcaaaaccctaaaggagatccaagccgtgccggaggacgaaggataccgtaaagcggtggaatcgttcacgcgccaccgtctcaatgtgtgcaaggaagaggaagactgggaggcgatcgagaagcgtcttggctgcggtcaagtcgaggagctcatcgaggaggcgcaagatgagctcacactcattgcgaagatgatcgaatgggacccttggggtgttccagatgactacgagtgtgaagtaattgagaacgatgcanccattcccaagcacgttcctcagcatcgacctggtcctcttcctg

SEQ ID NO: 15094 - protein, 139 aa, Zea mays subsp. mays
  peptide (1)..(139): Ceres Seq. ID no. 4647365
  misc_feature (27)..(83): Pfam Name: ETC complex I subunit conserved region Pfam Description: ETC complex I subunit conserved region
  misc_feature (1)..(138): Homolog of NCBI NO: 18423437 NR Description: expressed protein; protein id: At5g52840.1, by cDNA: gi_15809965, supported by cDNA: gi_18958051 [Arabidopsis
  misc_feature (15)..(138): Homolog of NCBI NO: 16930745 NR Description: NADH-ubiquinone oxidoreductase [Retama raetam]
  misc_feature (65)..(138): Homolog of NCBI NO: 22328992 NR Description: hypothetical protein; protein id: At4g28005.1
  misc_feature (1)..(27): Homolog of NCBI NO: 22328992 NR Description: hypothetical protein; protein id: At4g28005.1
  misc_feature (11)..(109): Homolog of NCBI NO: 24662306 NR Description: CG6463-PA [Drosophila melanogaster]
  misc_feature (14)..(120): Homolog of NCBI NO: 28829489 NR Description: similar to NADH-ubiquinone oxidoreductase 13 KD-B
  misc_feature (14)..(109): Homolog of NCBI NO: 31213375 NR Description: ENSANGP00000017869 [Anopheles gambiae]
  misc_feature (14)..(109): Homolog of NCBI NO: 233598 NR Description: 13 kDa-B polypeptide of iron-sulfur protein of NADH:ubiquinone oxidoreductase [cattle, heart, Peptide
  misc_feature (14)..(109): Homolog of NCBI NO: 28461281 NR Description: NADH dehydrogenase (ubiquinone) 1 alpha
  misc_feature (14)..(109): Homolog of NCBI NO: 12844779 NR Description: unnamed protein product [Mus musculus]
  misc_feature (125)..(125): Xaa is any aa, unknown or other
MFLRAIGRPLLAKVKQTTGIVGLDVVPNARAVLIDLYSKTLKEIQAVPEDEGYRKAVESFTRHRLNVCKEEEDWEAIEKRLGCGQVEELIEEAQDELTLIAKMIEWDPWGVPDDYECEVIENDAXIPKHVPQHRPGPLP

SEQ ID NO: 15095 - DNA, 504 bp, Zea mays subsp. mays
  misc_feature (1)..(504): Ceres Seq. ID no. 5008183
  misc_feature: MA Experiment ID: 20000487 Result: Up-regulated in Transcription
  misc_feature: MA Experiment 20000487 PARAMETER Experiment Name: Zm_50mM_NH4NO3_L_to_H_P Parameter: Organism Value: Zea mays
  misc_feature: MA Experiment 20000487 PARAMETER Experiment Name: Zm_50mM_NH4NO3_L_to_H_P Parameter: Timepoint (hr) Value: 4
  misc_feature: MA Experiment 20000487 PARAMETER Experiment Name: Zm_50mM_NH4NO3_L_to_H_P Parameter: Tissue Value: Leaves
  misc_feature: MA Experiment 20000487 PARAMETER Experiment Name: Zm_50mM_NH4NO3_L_to_H_P Parameter: Treatment Value: 50mM NH4NO3 vs. 100mM Mannitol
  misc_feature: MA Experiment ID: 20000488 Result: Up-regulated in Transcription
  misc_feature: MA Experiment 20000488 PARAMETER Experiment Name: Zm_50mM_NH4NO3_L_to_H_P Parameter: Organism Value: Zea mays
  misc_feature: MA Experiment 20000488 PARAMETER Experiment Name: Zm_50mM_NH4NO3_L_to_H_P Parameter: Timepoint (hr) Value: 8
  misc_feature: MA Experiment 20000488 PARAMETER Experiment Name: Zm_50mM_NH4NO3_L_to_H_P Parameter: Tissue Value: Leaves
  misc_feature: MA Experiment 20000488 PARAMETER Experiment Name: Zm_50mM_NH4NO3_L_to_H_P Parameter: Treatment Value: 50mM NH4NO3 vs. 100mM Mannitol
  misc_feature: MA Experiment ID: 20000626 Result: Up-regulated in Transcription
  misc_feature: MA Experiment 20000626 PARAMETER Experiment Name: Zm_Herbicide-Treatments_P Parameter: Timepoint (hr) Value: 12
  misc_feature: MA Experiment 20000626 PARAMETER Experiment Name: Zm_Herbicide-Treatments_P Parameter: Tissue Value: Aerial
  misc_feature: MA Experiment 20000626 PARAMETER Experiment Name: Zm_Herbicide-Treatments_P Parameter: Treatment Value: Roundup vs. No Treatment
  misc_feature: MA Experiment ID: 20001612 Result: Up-regulated in Transcription
  misc_feature: MA Experiment 20001612 PARAMETER Experiment Name: Zm_50ppm_KNO3_L-to-H_P Parameter: Age (day) Value: 19
  misc_feature: MA Experiment 20001612 PARAMETER Experiment Name: Zm_50ppm_KNO3_L-to-H_P Parameter: Organism Value: Zea mays
  misc_feature: MA Experiment 20001612 PARAMETER Experiment Name: Zm_50ppm_KNO3_L-to-H_P Parameter: Plant Line Value: 35A19
  misc_feature: MA Experiment 20001612 PARAMETER Experiment Name: Zm_50ppm_KNO3_L-to-H_P Parameter: Timepoint (hr) Value: 8
  misc_feature: MA Experiment 20001612 PARAMETER Experiment Name: Zm_50ppm_KNO3_L-to-H_P Parameter: Tissue Value: Roots
  misc_feature: MA Experiment 20001612 PARAMETER Experiment Name: Zm_50ppm_KNO3_L-to-H_P Parameter: Treatment Value: 50ppm KNO3 vs. 50ppm KCl
ggttccgtggcggggagtgttttccaggcggcggcgcggtagcgtgaaaccgggcgaccgagcaagcgacggccatggcgttctggcagacgcgcgattttctcttctgtggcatatgcggcaccctcctcaccttcgactccgtccgctccgcctcctgccctctatgcggcttcaagcgcgatgccaaagaaattgaagggaaagaaatacagtacacgatgaccgccgaggatattcgaagagggttaaagacacaaacggaggacgttgttgggcaaagaccagtgacaaataaagcctgtccaaaatgcgaccatccaaaagctgaattttacaacatacagatgcgttcagcagatgagggagagacgacgttctacatgtgtaaaggatgcggctgtaatttcaaagacgaatgaggagttatcctaccacttctacggatatatggcattggtgccgaagawattccagcgttgacagactagtactccctccgcc

SEQ ID NO: 15096 - protein, 115 aa, Zea mays subsp. mays
  peptide (1)..(115): Ceres Seq. ID no. 5008184
  misc_feature (75)..(112): Pfam Name: Transcription factor S-II (TFIIS) Pfam Description: Transcription factor S-II (TFIIS)
  misc_feature (1)..(114): Homolog of NCBI NO: 13324793 NR Description: putative RNA polymerase I subunit [Oryza sativa]
  misc_feature (8)..(114): Homolog of NCBI NO: 18404735 NR Description: expressed protein; protein id: At3g25940.1, by cDNA: 102455. [Arabidopsis thaliana]
  misc_feature (8)..(115): Homolog of NCBI NO: 7657709 NR Description: zinc ribbon domain containing, 1; zinc ribbon protein; RNA polymerase I small specific subunit [Homo sapiens] >gi|25777707|ref|NP_740753.1| zinc ribbon domain
  misc_feature (8)..(108): Homolog of NCBI NO: 34852033 NR Description: similar to nuclear RNA polymerase I small
  misc_feature (8)..(115): Homolog of NCBI NO: 12963545 NR Description: nuclear RNA polymerase I small specific subunit musculus] >gi|12275852|gb|AAG50161.1|AF230339_1 nuclear RNA I small specific subunit Rpa12 [Mus musculus]
  misc_feature (6)..(108): Homolog of NCBI NO: 31207229 NR Description: ENSANGP00000015033 [Anopheles gambiae]
  misc_feature (11)..(114): Homolog of NCBI NO: 15669335 NR Description: transcription-associated protein ('TFIIS')
  misc_feature (10)..(114): Homolog of NCBI NO: 13541573 NR Description: DNA-directed RNA polymerase subunit M
  misc_feature (10)..(114): Homolog of NCBI NO: 14324969 NR Description: transcription factor [TFIIS/RPB9] [Thermoplasma
  misc_feature (8)..(59): Homolog of NCBI NO: 26452990 NR Description: unknown protein [Arabidopsis thaliana]
MAFWQTRDFLFCGICGTLLTFDSVRSASCPLCGFKRDAKEIEGKEIQYTMTAEDIRRGLKTQTEDVVGQRPVTNKACPKCDHPKAEFYNIQMRSADEGETTFYMCKGCGCNFKDE

SEQ ID NO: 15097 - protein, 66 aa, Zea mays subsp. mays
  peptide (1)..(66): Ceres Seq. ID no. 5008185
  misc_feature (26)..(63): Pfam Name: Transcription factor S-II (TFIIS) Pfam Description: Transcription factor S-II (TFIIS)
  misc_feature (1)..(65): Homolog of NCBI NO: 13324793 NR Description: putative RNA polymerase I subunit [Oryza sativa]
  misc_feature (1)..(65): Homolog of NCBI NO: 18404735 NR Description: expressed protein; protein id: At3g25940.1, by cDNA: 102455. [Arabidopsis thaliana]
  misc_feature (1)..(66): Homolog of NCBI NO: 7657709 NR Description: zinc ribbon domain containing, 1; zinc ribbon protein; RNA polymerase I small specific subunit [Homo sapiens] >gi|25777707|ref|NP_740753.1| zinc ribbon domain
  misc_feature (1)..(59): Homolog of NCBI NO: 34852033 NR Description: similar to nuclear RNA polymerase I small
  misc_feature (1)..(66): Homolog of NCBI NO: 12963545 NR Description: nuclear RNA polymerase I small specific subunit musculus] >gi|12275852|gb|AAG50161.1|AF230339_1 nuclear RNA I small specific subunit Rpa12 [Mus musculus]
  misc_feature (1)..(59): Homolog of NCBI NO: 31207229 NR Description: ENSANGP00000015033 [Anopheles gambiae]
  misc_feature (1)..(65): Homolog of NCBI NO: 15669335 NR Description: transcription-associated protein ('TFIIS')
  misc_feature (1)..(65): Homolog of NCBI NO: 13541573 NR Description: DNA-directed RNA polymerase subunit M
  misc_feature (1)..(65): Homolog of NCBI NO: 14324969 NR Description: transcription factor [TFIIS/RPB9] [Thermoplasma
  misc_feature (1)..(66): Homolog of NCBI NO: 21553769 NR Description: putative DNA-directed RNA polymerase subunit
MTAEDIRRGLKTQTEDVVGQRPVTNKACPKCDHPKAEFYNIQMRSADEGETTFYMCKGCGCNFKDE

SEQ ID NO: 15098 - protein, 65 aa, Zea mays subsp. mays
  peptide (1)..(65): Ceres Seq. ID no. 5008186
VPWRGVFSRRRRGSVKPGDRASDGHGVLADARFSLLWHMRHPPHLRLRPLRLLPSMRLQARCQRN

SEQ ID NO: 15099 - DNA, 715 bp, Zea mays subsp. mays
  misc_feature (1)..(715): Ceres Seq. ID no. 12484099
  misc_feature: MA Experiment ID: 108522 Result: Up-regulated in Transcription
  misc_feature: MA Experiment 108522 PARAMETER Experiment Name: Zm_42deg_Heat_P Parameter: Age (day) Value: 8
  misc_feature: MA Experiment 108522 PARAMETER Experiment Name: Zm_42deg_Heat_P Parameter: Organism Value: Zea mays
  misc_feature: MA Experiment 108522 PARAMETER Experiment Name: Zm_42deg_Heat_P Parameter: Plant Line Value: 35A19
  misc_feature: MA Experiment 108522 PARAMETER Experiment Name: Zm_42deg_Heat_P Parameter: Temperature (deg C) Value: 42 vs. 22
  misc_feature: MA Experiment 108522 PARAMETER Experiment Name: Zm_42deg_Heat_P Parameter: Timepoint (hr) Value: 1
  misc_feature: MA Experiment 108522 PARAMETER Experiment Name: Zm_42deg_Heat_P Parameter: Tissue Value: Aerial
  misc_feature: MA Experiment ID: 108527 Result: Up-regulated in Transcription
  misc_feature: MA Experiment 108527 PARAMETER Experiment Name: Zm_5mM_NO_P Parameter: Age (day) Value: 8
  misc_feature: MA Experiment 108527 PARAMETER Experiment Name: Zm_5mM_NO_P Parameter: Organism Value: Zea mays
  misc_feature: MA Experiment 108527 PARAMETER Experiment Name: Zm_5mM_NO_P Parameter: Plant Line Value: 35A19
  misc_feature: MA Experiment 108527 PARAMETER Experiment Name: Zm_5mM_NO_P Parameter: Timepoint (hr) Value: 6
  misc_feature: MA Experiment 108527 PARAMETER Experiment Name: Zm_5mM_NO_P Parameter: Tissue Value: Aerial
  misc_feature: MA Experiment 108527 PARAMETER Experiment Name: Zm_5mM_NO_P Parameter: Treatment Value: 5mM NO vs. No Treatment
  misc_feature: MA Experiment ID: 108532 Result: Down-regulated in Transcription
  misc_feature: MA Experiment 108532 PARAMETER Experiment Name: Zm_20uM_KNO3_H-to-L_P Parameter: Age (day) Value: 11
  misc_feature: MA Experiment 108532 PARAMETER Experiment Name: Zm_20uM_KNO3_H-to-L_P Parameter: Organism Value: Zea mays
  misc_feature: MA Experiment 108532 PARAMETER Experiment Name: Zm_20uM_KNO3_H-to-L_P Parameter: Plant Line Value: 35A19
  misc_feature: MA Experiment 108532 PARAMETER Experiment Name: Zm_20uM_KNO3_H-to-L_P Parameter: Timepoint (hr) Value: 16
  misc_feature: MA Experiment 108532 PARAMETER Experiment Name: Zm_20uM_KNO3_H-to-L_P Parameter: Tissue Value: Roots
  misc_feature: MA Experiment 108532 PARAMETER Experiment Name: Zm_20uM_KNO3_H-to-L_P Parameter: Treatment Value: 20uM KNO3 vs. 60mM KNO3
  misc_feature: MA Experiment ID: 108535 Result: Down-regulated in Transcription
  misc_feature: MA Experiment 108535 PARAMETER Experiment Name: Zm_Meristem_P Parameter: Age (day) Value: 8
  misc_feature: MA Experiment 108535 PARAMETER Experiment Name: Zm_Meristem_P Parameter: Organism Value: Zea mays
  misc_feature: MA Experiment 108535 PARAMETER Experiment Name: Zm_Meristem_P Parameter: Plant Line Value: 35A19
  misc_feature: MA Experiment 108535 PARAMETER Experiment Name: Zm_Meristem_P Parameter: Tissue Value: Root Meristem vs. Above Root Meristem
  misc_feature: MA Experiment ID: 108542 Result: Up-regulated in Transcription
  misc_feature: MA Experiment 108542 PARAMETER Experiment Name: Zm_150mM_NaCl_P Parameter: Age (day) Value: 8
  misc_feature: MA Experiment 108542 PARAMETER Experiment Name: Zm_150mM_NaCl_P Parameter: Organism Value: Zea mays
  misc_feature: MA Experiment 108542 PARAMETER Experiment Name: Zm_150mM_NaCl_P Parameter: Plant Line Value: 35A19
  misc_feature: MA Experiment 108542 PARAMETER Experiment Name: Zm_150mM_NaCl_P Parameter: Timepoint (hr) Value: 6
  misc_feature: MA Experiment 108542 PARAMETER Experiment Name: Zm_150mM_NaCl_P Parameter: Tissue Value: Aerial
  misc_feature: MA Experiment 108542 PARAMETER Experiment Name: Zm_150mM_NaCl_P Parameter: Treatment Value: 150mM NaCl vs. No Treatment
  misc_feature: MA Experiment ID: 108689 Result: Up-regulated in Transcription
  misc_feature: MA Experiment 108689 PARAMETER Experiment Name: Zm_Drought_Roots_P Parameter: Age (day) Value: 9
  misc_feature: MA Experiment 108689 PARAMETER Experiment Name: Zm_Drought_Roots_P Parameter: Organism Value: Zea mays
  misc_feature: MA Experiment 108689 PARAMETER Experiment Name: Zm_Drought_Roots_P Parameter: Plant Line Value: 35A19
  misc_feature: MA Experiment 108689 PARAMETER Experiment Name: Zm_Drought_Roots_P Parameter: Timepoint (hr) Value: 24
  misc_feature: MA Experiment 108689 PARAMETER Experiment Name: Zm_Drought_Roots_P Parameter: Tissue Value: Roots
  misc_feature: MA Experiment 108689 PARAMETER Experiment Name: Zm_Drought_Roots_P Parameter: Treatment Value: Drought vs. No Drought
  misc_feature: MA Experiment ID: 20000488 Result: Down-regulated in Transcription
  misc_feature: MA Experiment 20000488 PARAMETER Experiment Name: Zm_50mM_NH4NO3_L_to_H_P Parameter: Organism Value: Zea mays
  misc_feature: MA Experiment 20000488 PARAMETER Experiment Name: Zm_50mM_NH4NO3_L_to_H_P Parameter: Timepoint (hr) Value: 8
  misc_feature: MA Experiment 20000488 PARAMETER Experiment Name: Zm_50mM_NH4NO3_L_to_H_P Parameter: Tissue Value: Leaves
  misc_feature: MA Experiment 20000488 PARAMETER Experiment Name: Zm_50mM_NH4NO3_L_to_H_P Parameter: Treatment Value: 50mM NH4NO3 vs. 100mM Mannitol
tccttcccaatgcagctgagccgataaactacctggtgtcgcgctggggctcggacgagaacacgcttggttcgtacacgttcgatggggtgaacaaaccccgtgacctgtacgagaagctgcgcatccccgtggacaacctgttcttcgcgggagaggccacgagcgtcaagtacacgggcacggtgcacggcgccttctccacgggtgtcatggcggccgaggagtgcaagatgcgggttctggagcggttcagggagctcgacatgctggagatgtgccaccctgccatgggcgaggacagccctgtgtctgtcccgctgctcatctctcggctctaaaagcagacgagtagtagttgtgtatgggatggatcggcacctgagagtaggctgggacatcccactgattgccggagggaagcagggaggaagaagctcccctcccctcgcttcgcttntcctcggcatgaggcatgtgcctggcgttacttgtggcgtgccaagtgccatatttccctaaacttattntgngtgggaaccctctattatgtatgtatactgtgaatttgtgactctgtgttcaggtaacacgagttatcgtgacatcttcgtagagaaagataccgtatgtatgatgtatgtatgatatacatatgatattatgatcaacaattgtagtagtagtaataataaataatacatatatgtgactc

SEQ ID NO: 15100 - protein, 112 aa, Zea mays subsp. mays
  peptide (1)..(112): Ceres Seq. ID no. 12484100
  misc_feature (1)..(77): Pfam Name: Flavin containing amine oxidoreductase Pfam Description: Flavin containing amine oxidoreductase
  misc_feature (1)..(112): Homolog of NCBI NO: 38344167 NR Description: OSJNBa0053K19.6 [Oryza sativa (japonica
  misc_feature (1)..(112): Homolog of NCBI NO: 15224204 NR Description: putative amine oxidase; protein id: At2g43020.1, by cDNA: gi_18650597 [Arabidopsis thaliana]
  misc_feature (1)..(112): Homolog of NCBI NO: 18650598 NR Description: At2g43020/MFL8.12 [Arabidopsis thaliana]
  misc_feature (1)..(112): Homolog of NCBI NO: 15231622 NR Description: putative protein; protein id: At3g59050.1, by cDNA: 16421., supported by cDNA: gi_18086417 [Arabidopsis
  misc_feature (1)..(112): Homolog of NCBI NO: 21553762 NR Description: putative amine oxidase [Arabidopsis thaliana]
  misc_feature (2)..(112): Homolog of NCBI NO: 13877615 NR Description: putative protein kinase gb|AAD22129 [Arabidopsis
  misc_feature (2)..(112): Homolog of NCBI NO: 15218830 NR Description: polyamine oxidase, putative; protein id: supported by cDNA: gi_13877614 [Arabidopsis thaliana] putative protein kinase gb|AAD22129 [Arabidopsis thaliana]
  misc_feature (10)..(112): Homolog of NCBI NO: 25404949 NR Description: protein F1E22.18 [imported] - Arabidopsis >gi|6686400|gb|AAF23834.1|AC007234_6 F1E22.18 [Arabidopsis
  misc_feature (6)..(75): Homolog of NCBI NO: 38505628 NR Description: slr5093 [Synechocystis sp. PCC 6803]
LPNAAEPINYLVSRWGSDENTLGSYTFDGVNKPRDLYEKLRIPVDNLFFAGEATSVKYTGTVHGAFSTGVMAAEECKMRVLERFRELDMLEMCHPAMGEDSPVSVPLLISRL

SEQ ID NO: 15101 - DNA, 510 bp, Zea mays subsp. mays
  misc_feature (1)..(510): Ceres Seq. ID no. 5008125
  misc_feature: MA Experiment ID: 108522 Result: Up-regulated in Transcription
  misc_feature: MA Experiment 108522 PARAMETER Experiment Name: Zm_42deg_Heat_P Parameter: Age (day) Value: 8
  misc_feature: MA Experiment 108522 PARAMETER Experiment Name: Zm_42deg_Heat_P Parameter: Organism Value: Zea mays
  misc_feature: MA Experiment 108522 PARAMETER Experiment Name: Zm_42deg_Heat_P Parameter: Plant Line Value: 35A19
  misc_feature: MA Experiment 108522 PARAMETER Experiment Name: Zm_42deg_Heat_P Parameter: Temperature (deg C) Value: 42 vs. 22
  misc_feature: MA Experiment 108522 PARAMETER Experiment Name: Zm_42deg_Heat_P Parameter: Timepoint (hr) Value: 1
  misc_feature: MA Experiment 108522 PARAMETER Experiment Name: Zm_42deg_Heat_P Parameter: Tissue Value: Aerial
  misc_feature: MA Experiment ID: 108523 Result: Up-regulated in Transcription
  misc_feature: MA Experiment 108523 PARAMETER Experiment Name: Zm_42deg_Heat_P Parameter: Age (day) Value: 8
  misc_feature: MA Experiment 108523 PARAMETER Experiment Name: Zm_42deg_Heat_P Parameter: Organism Value: Zea mays
  misc_feature: MA Experiment 108523 PARAMETER Experiment Name: Zm_42deg_Heat_P Parameter: Plant Line Value: 35A19
  misc_feature: MA Experiment 108523 PARAMETER Experiment Name: Zm_42deg_Heat_P Parameter: Temperature (deg C) Value: 42 vs. 22
  misc_feature: MA Experiment 108523 PARAMETER Experiment Name: Zm_42deg_Heat_P Parameter: Timepoint (hr) Value: 6
  misc_feature: MA Experiment 108523 PARAMETER Experiment Name: Zm_42deg_Heat_P Parameter: Tissue Value: Aerial
atcagaagctagaagcctagagcagccaagaaaagcacatacccgagtcgccgaaacaacaacaatcccaatcccccctcgtcactcaaaactcgaccaacaatgtcgctgattcgccgtggaagcgcattcgaccccttctcccttgacctctgggaccccttccagggctttcccttcggctctggaagcagcagcagcagcagcctgttcccctcgttcggaggcaccaccagctctgagacggccgccttcgccggcgctcgcgtcgactggaaggagacgccggaggcgcacgtgttcaagaccgacgtgccggggctgaagaaggaggaggtgaaggtggagctggaggacggcaacgtgctccagatcagcggcgagcgcagcaaggagcaggaggagaagacggacacctggcaccgcgtggagcgcmscagcggcaagttcctgcgcaggttccgcctgccggagaacgccaggacggagcagatcagtgcgtccatggag

SEQ ID NO: 15102 - protein, 136 aa, Zea mays subsp. mays
  peptide (1)..(136): Ceres Seq. ID no. 5008126
  misc_feature (1)..(135): Homolog of NCBI NO: 34902026 NR Description: unknown protein [Oryza sativa (japonica
  misc_feature (1)..(135): Homolog of NCBI NO: 34902016 NR Description: putative class I low-molecular-weight heat shock
  misc_feature (1)..(135): Homolog of NCBI NO: 7441293 NR Description: heat shock protein 17.9 - pearl millet
  misc_feature (1)..(135): Homolog of NCBI NO: 2119194 NR Description: low-molecular-weight heat-shock protein - rice
  misc_feature (1)..(135): Homolog of NCBI NO: 1213073 NR Description: heat shock protein 17.8 [Oryza sativa]
  misc_feature (1)..(135): Homolog of NCBI NO: 34902028 NR Description: shock protein, low molecular weight [Oryza sativa
  misc_feature (1)..(135): Homolog of NCBI NO: 34902024 NR Description: unknown protein [Oryza sativa (japonica >gi|1815660|gb|AAC78392.1| low molecular mass heat shock protein [Oryza sativa] >gi|29893628|gb|AAP06882.1| unknown protein [Oryza
  misc_feature (1)..(135): Homolog of NCBI NO: 399937 NR Description: 17.4 KD CLASS I HEAT SHOCK PROTEIN
  misc_feature (1)..(135): Homolog of NCBI NO: 422000 NR Description: heat shock protein, low molecular weight (clone - rice >gi|169801|gb|AAB46378.1| LMW heat shock protein [Oryza
  misc_feature (1)..(135): Homolog of NCBI NO: 25044839 NR Description: class-1 LMW heat shock protein [Ananas comosus]
  misc_feature (112)..(112): Xaa is any aa, unknown or other
MSLIRRGSAFDPFSLDLWDPFQGFPFGSGSSSSSSLFPSFGGTTSSETAAFAGARVDWKETPEAHVFKTDVPGLKKEEVKVELEDGNVLQISGERSKEQEEKTDTWHRVERXSGKFLRRFRLPENARTEQISASME

SEQ ID NO: 15103 - DNA, 467 bp, Zea mays subsp. mays
  misc_feature (1)..(467): Ceres Seq. ID no. 4777895
  misc_feature: MA Experiment ID: 20000478 Result: Up-regulated in Transcription
  misc_feature: MA Experiment 20000478 PARAMETER Experiment Name: Zm_5mM_SA_P Parameter: Age (day) Value: 11
  misc_feature: MA Experiment 20000478 PARAMETER Experiment Name: Zm_5mM_SA_P Parameter: Organism Value: Zea mays
  misc_feature: MA Experiment 20000478 PARAMETER Experiment Name: Zm_5mM_SA_P Parameter: Plant Line Value: 35A19
  misc_feature: MA Experiment 20000478 PARAMETER Experiment Name: Zm_5mM_SA_P Parameter: Timepoint (hr) Value: 72
  misc_feature: MA Experiment 20000478 PARAMETER Experiment Name: Zm_5mM_SA_P Parameter: Tissue Value: Aerial
  misc_feature: MA Experiment 20000478 PARAMETER Experiment Name: Zm_5mM_SA_P Parameter: Treatment Value: 5mM SA vs. No Treatment
  misc_feature: MA Experiment ID: 20000480 Result: Up-regulated in Transcription
  misc_feature: MA Experiment 20000480 PARAMETER Experiment Name: Zm_Drought_P Parameter: Age (day) Value: 11
  misc_feature: MA Experiment 20000480 PARAMETER Experiment Name: Zm_Drought_P Parameter: Organism Value: Zea mays
  misc_feature: MA Experiment 20000480 PARAMETER Experiment Name: Zm_Drought_P Parameter: Plant Line Value: 35A19
  misc_feature: MA Experiment 20000480 PARAMETER Experiment Name: Zm_Drought_P Parameter: Timepoint (hr) Value: 72
  misc_feature: MA Experiment 20000480 PARAMETER Experiment Name: Zm_Drought_P Parameter: Tissue Value: Aerial
  misc_feature: MA Experiment 20000480 PARAMETER Experiment Name: Zm_Drought_P Parameter: Treatment Value: Drought vs. No Drought
gattagcgaacggaacggaaggaagaccgtggaagcaaaggcgcgcaggcgcaagggagcagagcacacggcacaccacaagagaacaaatacacctcaggtggccttcctaagatcgccgactgaatctacctcgcttcgcgcctccagttccgcaccgggactgccgaatctgtgctcgggatcgtctcttccagcggcaatgggggccgattctgaggacgccgtcaagcagctcagcctcctcatggagcaagtggaggccccgctgaagagatcatttcagaatatgcaccagggctatcccaaagaaacactggtgcgtttccttaaggctagagagtggaacgtaccaaaggctcataaaatgattgttgattctttggattggaggattgaaaatgaaattgatagtgtgctagagagacctatagtcccagtagatttatacagatcaatacgtgatt

SEQ ID NO: 15104 - protein, 155 aa, Zea mays subsp. mays
  peptide (1)..(155): Ceres Seq. ID no. 4777896
  misc_feature (69)..(136): Pfam Name: CRAL/TRIO, N-terminus Pfam Description: CRAL/TRIO, N-terminus
ISERNGRKTVEAKARRRKGAEHTAHHKRTNTPQVAFLRSPTESTSLRASSSAPGLPNLCSGSSLPAAMGADSEDAVKQLSLLMEQVEAPLKRSFQNMHQGYPKETLVRFLKAREWNVPKAHKMIVDSLDWRIENEIDSVLERPIVPVDLYRSIRD

SEQ ID NO: 15105 - protein, 88 aa, Zea mays subsp. mays
  peptide (1)..(88): Ceres Seq. ID no. 4777897
  misc_feature (2)..(69): Pfam Name: CRAL/TRIO, N-terminus Pfam Description: CRAL/TRIO, N-terminus
MGADSEDAVKQLSLLMEQVEAPLKRSFQNMHQGYPKETLVRFLKAREWNVPKAHKMIVDSLDWRIENEIDSVLERPIVPVDLYRSIRD

SEQ ID NO: 15106 - DNA, 535 bp, Zea mays subsp. mays
  misc_feature (1)..(535): Ceres Seq. ID no. 4777621
  misc_feature: MA Experiment ID: 108535 Result: Down-regulated in Transcription
  misc_feature: MA Experiment 108535 PARAMETER Experiment Name: Zm_Meristem_P Parameter: Age (day) Value: 8
  misc_feature: MA Experiment 108535 PARAMETER Experiment Name: Zm_Meristem_P Parameter: Organism Value: Zea mays
  misc_feature: MA Experiment 108535 PARAMETER Experiment Name: Zm_Meristem_P Parameter: Plant Line Value: 35A19
  misc_feature: MA Experiment 108535 PARAMETER Experiment Name: Zm_Meristem_P Parameter: Tissue Value: Root Meristem vs. Above Root Meristem
  misc_feature: MA Experiment ID: 108687 Result: Up-regulated in Transcription
  misc_feature: MA Experiment 108687 PARAMETER Experiment Name: Zm_Embryos-Flowers__P Parameter: Tissue Value: Embryo vs. Aerial+
  misc_feature: MA Experiment ID: 20000535 Result: Up-regulated in Transcription
  misc_feature: MA Experiment 20000535 PARAMETER Experiment Name: Zm_Hybrid_Seed_Dev_P Parameter: DAP Value: 30 vs. 12
  misc_feature: MA Experiment 20000535 PARAMETER Experiment Name: Zm_Hybrid_Seed_Dev_P Parameter: Organism Value: Zea mays
  misc_feature: MA Experiment 20000535 PARAMETER Experiment Name: Zm_Hybrid_Seed_Dev_P Parameter: Plant Line Value: 35A19
  misc_feature: MA Experiment 20000535 PARAMETER Experiment Name: Zm_Hybrid_Seed_Dev_P Parameter: Tissue Value: Embryo vs. Unfert Floret
gtccgccgacgacaaattcatccggcaggtgacgacgcaaggtacccgcgccggcgcgggcccgggtctgctcccggaggcgcagttcgcagcgttcgtgaggcggcacgggcggcggtactccgggcccaaggagtatgcgcgtcggctgcgcgtgttcgcggccaacctggcccgcgcggcggcgcaccaggcgctggacccgacggcgcgccacggggtcacgcccttctccgacctcacgcgggaggagttcgaggcgcgcctcacgggcctgcgcgccggcggggacgtccagcggctcatgagtggcgtgccggccgccccgccggcctcgcaggaggaggtggcccggctgccggccagcttcgactggcgcgacaagggcgccgtcacgggcgtcaagacgcagggtgcgtgcgggtcgtgctgggcgttcagcacgacgggcgcggtggagggcgccaacttcctcgccacgggggagctcgtcgacctcagcgagcagcagctggtcgactgcgaccacacgtgc

SEQ ID NO: 15107 - protein, 178 aa, Zea mays subsp. mays
  peptide (1)..(178): Ceres Seq. ID no. 4777622
  misc_feature (8)..(131): Pfam Name: Herpesvirus leader protein Pfam Description: Herpesvirus leader protein
  misc_feature (13)..(176): Homolog of NCBI NO: 29830954 NR Description: putative GntR-family transcriptional regulator
VRRRQIHPAGDDARYPRRRGPGSAPGGAVRSVREAARAAVLRAQGVCASAARVRGQPGPRGGAPGAGPDGAPRGHALLRPHAGGVRGAPHGPARRRGRPAAHEWRAGRPAGLAGGGGPAAGQLRLARQGRRHGRQDAGCVRVVLGVQHDGRGGGRQLPRHGGARRPQRAAAGRLRPHV

SEQ ID NO: 15108 - protein, 178 aa, Zea mays subsp. mays
  peptide (1)..(178): Ceres Seq. ID no. 4777623
  misc_feature (119)..(177): Pfam Name: Papain family cysteine protease Pfam Description: Papain family cysteine protease
  misc_feature (3)..(177): Homolog of NCBI NO: 34901734 NR Description: putative cysteine proteinase [Oryza sativa
SADDKFIRQVTTQGTRAGAGPGLLPEAQFAAFVRRHGRRYSGPKEYARRLRVFAANLARAAAHQALDPTARHGVTPFSDLTREEFEARLTGLRAGGDVQRLMSGVPAAPPASQEEVARLPASFDWRDKGAVTGVKTQGACGSCWAFSTTGAVEGANFLATGELVDLSEQQLVDCDHTC

SEQ ID NO: 15109 - DNA, 576 bp, Zea mays subsp. mays
  misc_feature (1)..(576): Ceres Seq. ID no. 13599379
  misc_feature: MA Experiment ID: 20000108 Result: Down-regulated in Transcription
  misc_feature: MA Experiment 20000108 PARAMETER Experiment Name: Zm_Root-Tips_P Parameter: Age (day) Value: 12
  misc_feature: MA Experiment 20000108 PARAMETER Experiment Name: Zm_Root-Tips_P Parameter: Organism Value: Zea mays
  misc_feature: MA Experiment 20000108 PARAMETER Experiment Name: Zm_Root-Tips_P Parameter: Tissue Value: Root tips vs. Root mid region    35
  misc_feature: MA Experiment 20000108 PARAMETER Experiment Name: Zm_Root-Tips_P Parameter: Tissue Value: Root tips vs. Root mid region   Sequence Listing-Misc Features (4)
ttttttagtttctctccgacgagatttgagatggcactaagaggagtatggcagctccagaagctggtagtgagctactgtaattggggtggcagcagcagaggcataagagcctttatggaatcagagttacctgctctgatcgagaagaatccgcagctcgaagtggtaacggagctctcaaggggacaacatccttacctcaagggcatttacaggaatagaaatgaaagagtggtgtgtgttaagaacatggatcctgatcaagtgcttttgaatgcaacgaggcttaggaactctcttggaaggaaagtggtgaagctgcggactaggcatgtgaccaaacatcccagtgttcaaggcacttggacaaccgctgtcaagttctgacaacctttgcgggtcttttgttcttcttcttattcgttgctgtaatgttgcaatatcaggattcttcctttgttaccaatatttgcaataccaagttgtttccactacttgttctctctggttcgttcctttttttcttacaacaatgttctgtcttgttttggatccggttaatgtctgggaaac

SEQ ID NO: 15110 - protein, 129 aa, Zea mays subsp. mays
  peptide (1)..(129): Ceres Seq. ID no. 13599380
  misc_feature (12)..(102): Pfam Name: Mitochondrial ribosomal protein L51 / S25 / Pfam Description: Mitochondrial ribosomal protein L51 / S25 /
  misc_feature (11)..(129): Homolog of NCBI NO: 15231727 NR Description: expressed protein [Arabidopsis thaliana]
  misc_feature (11)..(128): Homolog of NCBI NO: 26006491 NR Description: Unknown protein [Oryza sativa (japonica
  misc_feature (16)..(124): Homolog of NCBI NO: 40739113 NR Description: hypothetical protein AN6904.2 [Aspergillus
  misc_feature (16)..(124): Homolog of NCBI NO: 32414711 NR Description: hypothetical protein [Neurospora crassa]
  misc_feature (20)..(124): Homolog of NCBI NO: 19112489 NR Description: hypothetical protein [Schizosaccharomyces pombe]
  misc_feature (18)..(124): Homolog of NCBI NO: 17505717 NR Description: NADH-ubiquinone oxidoreductase B8 [Caenorhabditis
  misc_feature (16)..(124): Homolog of NCBI NO: 6325356 NR Description: Mitochondrial Ribosome Protein, Large Subunit; [Saccharomyces cerevisiae] >gi|2132281|pir||S59765 hypothetical
  misc_feature (18)..(124): Homolog of NCBI NO: 39589613 NR Description: Hypothetical protein CBG12220 [Caenorhabditis
  misc_feature (14)..(124): Homolog of NCBI NO: 17647665 NR Description: mitochondrial ribosomal protein L-CI-B8 CG5479-PA
  misc_feature (14)..(124): Homolog of NCBI NO: 31195767 NR Description: ENSANGP00000000132 [Anopheles gambiae]
FFSFSPTRFEMALRGVWQLQKLVVSYCNWGGSSRGIRAFMESELPALIEKNPQLEVVTELSRGQHPYLKGIYRNRNERVVCVKNMDPDQVLLNATRLRNSLGRKVVKLRTRHVTKHPSVQGTWTTAVKF

SEQ ID NO: 15111 - protein, 119 aa, Zea mays subsp. mays
  peptide (1)..(119): Ceres Seq. ID no. 13599381
  misc_feature (2)..(92): Pfam Name: Mitochondrial ribosomal protein L51 / S25 / Pfam Description: Mitochondrial ribosomal protein L51 / S25 /
  misc_feature (1)..(119): Homolog of NCBI NO: 15231727 NR Description: expressed protein [Arabidopsis thaliana]
  misc_feature (1)..(118): Homolog of NCBI NO: 26006491 NR Description: Unknown protein [Oryza sativa (japonica
  misc_feature (6)..(114): Homolog of NCBI NO: 40739113 NR Description: hypothetical protein AN6904.2 [Aspergillus
  misc_feature (6)..(114): Homolog of NCBI NO: 32414711 NR Description: hypothetical protein [Neurospora crassa]
  misc_feature (10)..(114): Homolog of NCBI NO: 19112489 NR Description: hypothetical protein [Schizosaccharomyces pombe]
  misc_feature (8)..(114): Homolog of NCBI NO: 17505717 NR Description: NADH-ubiquinone oxidoreductase B8 [Caenorhabditis
  misc_feature (6)..(114): Homolog of NCBI NO: 6325356 NR Description: Mitochondrial Ribosome Protein, Large Subunit; [Saccharomyces cerevisiae] >gi|2132281|pir||S59765 hypothetical
  misc_feature (8)..(114): Homolog of NCBI NO: 39589613 NR Description: Hypothetical protein CBG12220 [Caenorhabditis
  misc_feature (4)..(114): Homolog of NCBI NO: 17647665 NR Description: mitochondrial ribosomal protein L-CI-B8 CG5479-PA
  misc_feature (4)..(114): Homolog of NCBI NO: 31195767 NR Description: ENSANGP00000000132 [Anopheles gambiae]
MALRGVWQLQKLVVSYCNWGGSSRGIRAFMESELPALIEKNPQLEVVTELSRGQHPYLKGIYRNRNERVVCVKNMDPDQVLLNATRLRNSLGRKVVKLRTRHVTKHPSVQGTWTTAVKF

SEQ ID NO: 15112 - protein, 90 aa, Zea mays subsp. mays
  peptide (1)..(90): Ceres Seq. ID no. 13599382
  misc_feature (1)..(63): Pfam Name: Mitochondrial ribosomal protein L51 / S25 / Pfam Description: Mitochondrial ribosomal protein L51 / S25 /
  misc_feature (1)..(90): Homolog of NCBI NO: 15231727 NR Description: expressed protein [Arabidopsis thaliana]
  misc_feature (1)..(89): Homolog of NCBI NO: 26006491 NR Description: Unknown protein [Oryza sativa (japonica
  misc_feature (1)..(85): Homolog of NCBI NO: 40739113 NR Description: hypothetical protein AN6904.2 [Aspergillus
  misc_feature (1)..(85): Homolog of NCBI NO: 32414711 NR Description: hypothetical protein [Neurospora crassa]
  misc_feature (1)..(85): Homolog of NCBI NO: 19112489 NR Description: hypothetical protein [Schizosaccharomyces pombe]
  misc_feature (1)..(85): Homolog of NCBI NO: 17505717 NR Description: NADH-ubiquinone oxidoreductase B8 [Caenorhabditis
  misc_feature (1)..(85): Homolog of NCBI NO: 6325356 NR Description: Mitochondrial Ribosome Protein, Large Subunit; [Saccharomyces cerevisiae] >gi|2132281|pir||S59765 hypothetical
  misc_feature (1)..(85): Homolog of NCBI NO: 39589613 NR Description: Hypothetical protein CBG12220 [Caenorhabditis
  misc_feature (1)..(85): Homolog of NCBI NO: 17647665 NR Description: mitochondrial ribosomal protein L-CI-B8 CG5479-PA
  misc_feature (1)..(85): Homolog of NCBI NO: 31195767 NR Description: ENSANGP00000000132 [Anopheles gambiae]
MESELPALIEKNPQLEVVTELSRGQHPYLKGIYRNRNERVVCVKNMDPDQVLLNATRLRNSLGRKVVKLRTRHVTKHPSVQGTWTTAVKF

SEQ ID NO: 15113 - DNA, 955 bp, Zea mays subsp. mays
  misc_feature (1)..(955): Ceres Seq. ID no. 12635356
  misc_feature: MA Experiment ID: 20000534 Result: Up-regulated in Transcription
  misc_feature: MA Experiment 20000534 PARAMETER Experiment Name: Zm_Hybrid_Pollen_P Parameter: Age (day) Value: 8
  misc_feature: MA Experiment 20000534 PARAMETER Experiment Name: Zm_Hybrid_Pollen_P Parameter: Organism Value: Zea mays
  misc_feature: MA Experiment 20000534 PARAMETER Experiment Name: Zm_Hybrid_Pollen_P Parameter: Plant Line Value: 35A19
  misc_feature: MA Experiment 20000534 PARAMETER Experiment Name: Zm_Hybrid_Pollen_P Parameter: Tissue Value: Pollen vs. Aerial
ataggtaatcataccacaacccgagcattctacaaccactttcatcaacgccatacacgtctcctaccctcacagttcgttgctccgcacatcagcaggacttgcaatggcgggagacggcgagctgaagctgctgggcgtgtggacgagcccgttcgtcatcagggtgcgcgtggtgctcaacctcaagtctctgccgtacgagtacgtggaggagaacctgggcagcaagagcgcgctcctcctgggctccaacccggtgcaccagagcgtgcccgtcctcctccacggcggccgccccgtgaacgagtcccaggtcatcgtgcagtacatcgacgaggtctgggcgggggccggcccgtccgtgctcccggccgacccctacgagcgcgccacggcgcgcttctgggcggcgtacgtcgacgacaaggtcgggtcggcgtggacggggatgctcttctcgtgcaagacggaggaggagagggcggaggccgtgtcccgggccgtggcggcgctggagacgctggagggcgcgttcgcggagtgctccaaggggaaggcgttcttcggcggcgacgccatcgggttcgtcgacgtcgtgctcggcggctacctcgggtggttcggggcgatcgacaagatcatcgggcgccggctgatcgacccggcgaggacgccgctgctggccaggtgggaggagcagttccgcgcggcggacgcggccaagggcgtcgtgccggacgacgccgacaagatgctcgagttcttgcccaccgtgctcgcttgggtcgccgccaaagcgaagtgaactgtgagcccgtgacatcgccagctcgtgacatgtgtgtttgtgtgtgtgcgtgtctgagtccgtccagtgtgtgctgaataaatgcaccgcatgtcgtgtgttgtaccaagggcaaacgatgctgaataattttgatgtttgtgg

SEQ ID NO: 15114 - protein, 295 aa, Zea mays subsp. mays
  peptide (1)..(295): Ceres Seq. ID no. 12635357
  misc_feature (9)..(292): Pfam Name: DivIVA protein Pfam Description: DivIVA protein
  misc_feature (37)..(181): Homolog of NCBI NO: 2388805 NR Description: attachment region binding protein [Gallus gallus]
  misc_feature (101)..(220): Homolog of NCBI NO: 729206 NR Description: PROBABLE GLUTATHIONE S-TRANSFERASE (28 KD PROTEIN) >gi|287399|dbj|BAA01632.1| chilling tolerance related
IGNHTTTRAFYNHFHQRHTRLLPSQFVAPHISRTCNGGRRRAEAAGRVDEPVRHQGARGAQPQVSAVRVRGGEPGQQERAPPGLQPGAPERARPPPRRPPRERVPGHRAVHRRGLGGGRPVRAPGRPLRARHGALLGGVRRRQGRVGVDGDALLVQDGGGEGGGRVPGRGGAGDAGGRVRGVLQGEGVLRRRRHRVRRRRARRLPRVVRGDRQDHRAPADRPGEDAAAGQVGGAVPRGGRGQGRRAGRRRQDARVLAHRARLGRRQSEVNCEPVTSPARDMCVCVCACLSPSSVC

SEQ ID NO: 15115 - protein, 233 aa, Zea mays subsp. mays
  peptide (1)..(233): Ceres Seq. ID no. 12635358
  misc_feature (88)..(204): Pfam Name: Glutathione S-transferase, C-terminal domain Pfam Description: Glutathione S-transferase, C-terminal domain
  misc_feature (1)..(233): Homolog of NCBI NO: 20067421 NR Description: glutathione transferase [Triticum aestivum]
  misc_feature (1)..(233): Homolog of NCBI NO: 37536360 NR Description: putative glutathione S-transferase [Oryza sativa
  misc_feature (1)..(231): Homolog of NCBI NO: 11385511 NR Description: glutathione S-transferase GST 30 [Zea mays]
  misc_feature (1)..(231): Homolog of NCBI NO: 37536368 NR Description: putative glutathione S-transferase [Oryza sativa
  misc_feature (3)..(226): Homolog of NCBI NO: 11385501 NR Description: glutathione S-transferase GST 25 [Zea mays]
  misc_feature (1)..(225): Homolog of NCBI NO: 11385527 NR Description: glutathione S-transferase GST 38 [Zea mays]
  misc_feature (2)..(225): Homolog of NCBI NO: 37536358 NR Description: putative glutathione S-transferase [Oryza sativa
  misc_feature (1)..(230): Homolog of NCBI NO: 11385535 NR Description: glutathione S-transferase GST 42 [Zea mays]
  misc_feature (6)..(220): Homolog of NCBI NO: 11385495 NR Description: glutathione S-transferase GST 22 [Zea mays]
  misc_feature (1)..(212): Homolog of NCBI NO: 37536280 NR Description: putative glutathione S-transferase [Oryza sativa
MAGDGELKLLGVWTSPFVIRVRVVLNLKSLPYEYVEENLGSKSALLLGSNPVHQSVPVLLHGGRPVNESQVIVQYIDEVWAGAGPSVLPADPYERATARFWAAYVDDKVGSAWTGMLFSCKTEEERAEAVSRAVAALETLEGAFAECSKGKAFFGGDAIGFVDVVLGGYLGWFGAIDKIIGRRLIDPARTPLLARWEEQFRAADAAKGVVPDDADKMLEFLPTVLAWVAAKAK

SEQ ID NO: 15116 - DNA, 413 bp, Zea mays subsp. mays
  misc_feature (1)..(413): Ceres Seq. ID no. 12638286
  misc_feature: MA Experiment ID: 20000492 Result: Up-regulated in Transcription
  misc_feature: MA Experiment 20000492 PARAMETER Experiment Name: Zm_Hybrid_Seed_Dev_P Parameter: DAP Value: 12
  misc_feature: MA Experiment 20000492 PARAMETER Experiment Name: Zm_Hybrid_Seed_Dev_P Parameter: Organism Value: Zea mays
  misc_feature: MA Experiment 20000492 PARAMETER Experiment Name: Zm_Hybrid_Seed_Dev_P Parameter: Plant Line Value: 35A19
  misc_feature: MA Experiment 20000492 PARAMETER Experiment Name: Zm_Hybrid_Seed_Dev_P Parameter: Tissue Value: Fert Kernel vs. Unfert Floret
aaccaggtgctcgaggaggtcgatcgatggcgtcggagaaagacgcggcgctcgcccccgtgcccaacgacaaccccaccatatttgacaagatcatcaaaaaggagataccttctacggtggtgtatgaggatgagaaggtcctcgctttcagagacataaatcctcaagctccgacccacattgtaatcattcccaaagtcaaggatggattaaccggcctttcaaaggcagaagagaggcatgtagagatacttggctgcctcctctacgctgcaaaagttatcgctaagcaggaaggacttgaagatggctaccgtattgtcatcaatgatggccctagtggatgtcaatctgtttaccacatccatgtccatctccttggagggaggcagatgaactggcccccaggc

SEQ ID NO: 15117 - protein, 137 aa, Zea mays subsp. mays
  peptide (1)..(137): Ceres Seq. ID no. 13624616
  misc_feature (9)..(136): Homolog of NCBI NO: 629858 NR Description: protein kinase C inhibitor - maize
  misc_feature (9)..(136): Homolog of NCBI NO: 1177047 NR Description: 14 KD ZINC-BINDING PROTEIN (PROTEIN KINASE C (PKCI) >gi|473187|emb|CAA82751.1| protein kinase C inhibitor [Zea
  misc_feature (9)..(136): Homolog of NCBI NO: 11260559 NR Description: protein kinase C inhibitor-like protein -
  misc_feature (9)..(136): Homolog of NCBI NO: 18410510 NR Description: protein kinase C inhibitor-like protein; protein At3g56490.1, supported by cDNA: 28847. [Arabidopsis thaliana]
  misc_feature (26)..(136): Homolog of NCBI NO: 1177046 NR Description: 14 KD ZINC-BINDING PROTEIN (PROTEIN KINASE C (PKCI) >gi|493053|gb|AAA18397.1| putative protein kinase C
  misc_feature (4)..(136): Homolog of NCBI NO: 15221629 NR Description: putative protein kinase C inhibitor (Zinc-binding protein id: At1g31160.1 [Arabidopsis thaliana] putative protein kinase C inhibitor [Arabidopsis thaliana]
  misc_feature (4)..(126): Homolog of NCBI NO: 25518144 NR Description: F28K20.9 protein - Arabidopsis thaliana Similar to gb|Z29643 protein kinase C inhibitor (PKCI) from Zea
  misc_feature (114)..(136): Homolog of NCBI NO: 25518144 NR Description: F28K20.9 protein - Arabidopsis thaliana Similar to gb|Z29643 protein kinase C inhibitor (PKCI) from Zea
  misc_feature (30)..(136): Homolog of NCBI NO: 23480654 NR Description: putative protein kinase C interacting protein 1
  misc_feature (9)..(136): Homolog of NCBI NO: 23612841 NR Description: protein kinase c inhibitor-like protein, putative falciparum 3D7] >gi|11559498|gb|AAG37984.1|AF056206_1 putative kinase C interacting protein 1 [Plasmodium falciparum] protein,
PGARGGRSMASEKDAALAPVPNDNPTIFDKIIKKEIPSTVVYEDEKVLAFRDINPQAPTHIVIIPKVKDGLTGLSKAEERHVEILGCLLYAAKVIAKQEGLEDGYRIVINDGPSGCQSVYHIHVHLLGGRQMNWPPG

SEQ ID NO: 15118 - protein, 129 aa, Zea mays subsp. mays
  peptide (1)..(129): Ceres Seq. ID no. 13624617
  misc_feature (1)..(128): Homolog of NCBI NO: 629858 NR Description: protein kinase C inhibitor - maize
  misc_feature (1)..(128): Homolog of NCBI NO: 1177047 NR Description: 14 KD ZINC-BINDING PROTEIN (PROTEIN KINASE C (PKCI) >gi|473187|emb|CAA82751.1| protein kinase C inhibitor [Zea
  misc_feature (1)..(128): Homolog of NCBI NO: 11260559 NR Description: protein kinase C inhibitor-like protein -
  misc_feature (1)..(128): Homolog of NCBI NO: 18410510 NR Description: protein kinase C inhibitor-like protein; protein At3g56490.1, supported by cDNA: 28847. [Arabidopsis thaliana]
  misc_feature (18)..(128): Homolog of NCBI NO: 1177046 NR Description: 14 KD ZINC-BINDING PROTEIN (PROTEIN KINASE C (PKCI) >gi|493053|gb|AAA18397.1| putative protein kinase C
  misc_feature (1)..(128): Homolog of NCBI NO: 15221629 NR Description: putative protein kinase C inhibitor (Zinc-binding protein id: At1g31160.1 [Arabidopsis thaliana] putative protein kinase C inhibitor [Arabidopsis thaliana]
  misc_feature (1)..(118): Homolog of NCBI NO: 25518144 NR Description: F28K20.9 protein - Arabidopsis thaliana Similar to gb|Z29643 protein kinase C inhibitor (PKCI) from Zea
  misc_feature (106)..(128): Homolog of NCBI NO: 25518144 NR Description: F28K20.9 protein - Arabidopsis thaliana Similar to gb|Z29643 protein kinase C inhibitor (PKCI) from Zea
  misc_feature (22)..(128): Homolog of NCBI NO: 23480654 NR Description: putative protein kinase C interacting protein 1
  misc_feature (1)..(128): Homolog of NCBI NO: 23612841 NR Description: protein kinase c inhibitor-like protein, putative falciparum 3D7] >gi|11559498|gb|AAG37984.1|AF056206_1 putative kinase C interacting protein 1 [Plasmodium falciparum] protein,
MASEKDAALAPVPNDNPTIFDKIIKKEIPSTVVYEDEKVLAFRDINPQAPTHIVIIPKVKDGLTGLSKAEERHVEILGCLLYAAKVIAKQEGLEDGYRIVINDGPSGCQSVYHIHVHLLGGRQMNWPPG

SEQ ID NO: 15119 - DNA, 445 bp, Zea mays subsp. mays
  misc_feature (1)..(445): Ceres Seq. ID no. 4777260
  misc_feature: MA Experiment ID: 108597 Result: Up-regulated in Transcription
  misc_feature: MA Experiment 108597 PARAMETER Experiment Name: Zm_100uM_ABA_P Parameter: Age (day) Value: 9
  misc_feature: MA Experiment 108597 PARAMETER Experiment Name: Zm_100uM_ABA_P Parameter: Organism Value: Zea mays
  misc_feature: MA Experiment 108597 PARAMETER Experiment Name: Zm_100uM_ABA_P Parameter: Plant Line Value: 35A19
  misc_feature: MA Experiment 108597 PARAMETER Experiment Name: Zm_100uM_ABA_P Parameter: Timepoint (hr) Value: 24
  misc_feature: MA Experiment 108597 PARAMETER Experiment Name: Zm_100uM_ABA_P Parameter: Tissue Value: Aerial
  misc_feature: MA Experiment 108597 PARAMETER Experiment Name: Zm_100uM_ABA_P Parameter: Treatment Value: 100uM ABA vs. No Treatment
ttgtacacatgcctgatgtatggataaatctggctcatacatattttgctcaaggtcattttcaacaagcagttaaattgtatcaaaattgtttgcggaagttcttccacaatacagatgcaaccatcctattataccttgctcggacacactatgaggctgagcgatggcaagactgcaggaaaactttgcttagagctatacatttggctccatcaaattacttgttacggtttaatgtaggagtgtcaatgcagaaattctcagcttcaaccctgcaaaagacaaaacaaacagttgatgaggttcgcgccacagtcactgaacttcagaatgccattagagttttcagtctgttatctgttgcatcaacgtaccactcccatggttttgatgagaggaaaatagaaactcatgttgagtactgtaaacatttacttgatgc

SEQ ID NO: 15120 - protein, 147 aa, Zea mays subsp. mays
  peptide (1)..(147): Ceres Seq. ID no. 4777261
  misc_feature (40)..(73): Pfam Name: TPR Domain Pfam Description: TPR Domain
  misc_feature (1)..(146): Homolog of NCBI NO: 23095913 NR Description: putative TPR-containing nuclear phosphoprotein
  misc_feature (1)..(146): Homolog of NCBI NO: 25411225 NR Description: probable TPR repeat nuclear phosphoprotein - Arabidopsis thaliana >gi|20197768|gb|AAM15237.1| putative TPR
  misc_feature (27)..(86): Homolog of NCBI NO: 34901616 NR Description: putative TPR-containing nuclear phosphoprotein
  misc_feature (102)..(146): Homolog of NCBI NO: 34901616 NR Description: putative TPR-containing nuclear phosphoprotein
  misc_feature (5)..(146): Homolog of NCBI NO: 7661950 NR Description: KIAA0155 gene product; likely ortholog of mouse
  misc_feature (5)..(146): Homolog of NCBI NO: 40788884 NR Description: KIAA0155 [Homo sapiens]
  misc_feature (5)..(146): Homolog of NCBI NO: 31753133 NR Description: Unknown (protein for IMAGE:30058591) [Mus
  misc_feature (5)..(146): Homolog of NCBI NO: 6678441 NR Description: TPR-containing, SH2-binding phosphoprotein [Mus
  misc_feature (5)..(146): Homolog of NCBI NO: 34858978 NR Description: similar to phosphoprotein [Rattus norvegicus]
  misc_feature (5)..(92): Homolog of NCBI NO: 26333645 NR Description: unnamed protein product [Mus musculus]
VHMPDVWINLAHTYFAQGHFQQAVKLYQNCLRKFFHNTDATILLYLARTHYEAERWQDCRKTLLRAIHLAPSNYLLRFNVGVSMQKFSASTLQKTKQTVDEVRATVTELQNAIRVFSLLSVASTYHSHGFDERKIETHVEYCKHLLD

SEQ ID NO: 15121 - protein, 145 aa, Zea mays subsp. mays
  peptide (1)..(145): Ceres Seq. ID no. 4777262
  misc_feature (38)..(71): Pfam Name: TPR Domain Pfam Description: TPR Domain
  misc_feature (1)..(144): Homolog of NCBI NO: 23095913 NR Description: putative TPR-containing nuclear phosphoprotein
  misc_feature (1)..(144): Homolog of NCBI NO: 25411225 NR Description: probable TPR repeat nuclear phosphoprotein - Arabidopsis thaliana >gi|20197768|gb|AAM15237.1| putative TPR
  misc_feature (25)..(84): Homolog of NCBI NO: 34901616 NR Description: putative TPR-containing nuclear phosphoprotein
  misc_feature (100)..(144): Homolog of NCBI NO: 34901616 NR Description: putative TPR-containing nuclear phosphoprotein
  misc_feature (3)..(144): Homolog of NCBI NO: 7661950 NR Description: KIAA0155 gene product; likely ortholog of mouse
  misc_feature (3)..(144): Homolog of NCBI NO: 40788884 NR Description: KIAA0155 [Homo sapiens]
  misc_feature (3)..(144): Homolog of NCBI NO: 31753133 NR Description: Unknown (protein for IMAGE:30058591) [Mus
  misc_feature (3)..(144): Homolog of NCBI NO: 6678441 NR Description: TPR-containing, SH2-binding phosphoprotein [Mus
  misc_feature (3)..(144): Homolog of NCBI NO: 34858978 NR Description: similar to phosphoprotein [Rattus norvegicus]
  misc_feature (3)..(90): Homolog of NCBI NO: 26333645 NR Description: unnamed protein product [Mus musculus]
MPDVWINLAHTYFAQGHFQQAVKLYQNCLRKFFHNTDATILLYLARTHYEAERWQDCRKTLLRAIHLAPSNYLLRFNVGVSMQKFSASTLQKTKQTVDEVRATVTELQNAIRVFSLLSVASTYHSHGFDERKIETHVEYCKHLLD

SEQ ID NO: 15122 - DNA, 703 bp, Zea mays subsp. mays
  misc_feature (1)..(703): Ceres Seq. ID no. 13580129
  misc_feature: MA Experiment ID: 108522 Result: Up-regulated in Transcription
  misc_feature: MA Experiment 108522 PARAMETER Experiment Name: Zm_42deg_Heat_P Parameter: Age (day) Value: 8
  misc_feature: MA Experiment 108522 PARAMETER Experiment Name: Zm_42deg_Heat_P Parameter: Organism Value: Zea mays
  misc_feature: MA Experiment 108522 PARAMETER Experiment Name: Zm_42deg_Heat_P Parameter: Plant Line Value: 35A19
  misc_feature: MA Experiment 108522 PARAMETER Experiment Name: Zm_42deg_Heat_P Parameter: Temperature (deg C) Value: 42 vs. 22
  misc_feature: MA Experiment 108522 PARAMETER Experiment Name: Zm_42deg_Heat_P Parameter: Timepoint (hr) Value: 1
  misc_feature: MA Experiment 108522 PARAMETER Experiment Name: Zm_42deg_Heat_P Parameter: Tissue Value: Aerial
  misc_feature: MA Experiment ID: 108689 Result: Up-regulated in Transcription
  misc_feature: MA Experiment 108689 PARAMETER Experiment Name: Zm_Drought_Roots_P Parameter: Age (day) Value: 9
  misc_feature: MA Experiment 108689 PARAMETER Experiment Name: Zm_Drought_Roots_P Parameter: Organism Value: Zea mays
  misc_feature: MA Experiment 108689 PARAMETER Experiment Name: Zm_Drought_Roots_P Parameter: Plant Line Value: 35A19
  misc_feature: MA Experiment 108689 PARAMETER Experiment Name: Zm_Drought_Roots_P Parameter: Timepoint (hr) Value: 24
  misc_feature: MA Experiment 108689 PARAMETER Experiment Name: Zm_Drought_Roots_P Parameter: Tissue Value: Roots
  misc_feature: MA Experiment 108689 PARAMETER Experiment Name: Zm_Drought_Roots_P Parameter: Treatment Value: Drought vs. No Drought
  misc_feature: MA Experiment ID: 20000480 Result: Up-regulated in Transcription
  misc_feature: MA Experiment 20000480 PARAMETER Experiment Name: Zm_Drought_P Parameter: Age (day) Value: 11
  misc_feature: MA Experiment 20000480 PARAMETER Experiment Name: Zm_Drought_P Parameter: Organism Value: Zea mays
  misc_feature: MA Experiment 20000480 PARAMETER Experiment Name: Zm_Drought_P Parameter: Plant Line Value: 35A19
  misc_feature: MA Experiment 20000480 PARAMETER Experiment Name: Zm_Drought_P Parameter: Timepoint (hr) Value: 72
  misc_feature: MA Experiment 20000480 PARAMETER Experiment Name: Zm_Drought_P Parameter: Tissue Value: Aerial
  misc_feature: MA Experiment 20000480 PARAMETER Experiment Name: Zm_Drought_P Parameter: Treatment Value: Drought vs. No Drought
atcagaaccgatccttacagagagacacacccagcgcgcgagatatctacatcgatcatcatcaccagcgagcgagccggccgagcagcaccgatggnggcgtacatgcgcgtgacgcaccgcgacgaggaaggcaagaaggtgacggagaagatgccggtcccggagacgcggcgcccggacacggccaagcacttcgagcgcaagctggaggagcagggcctccaccgcttcgagcggcacccggcgaacgcgccccggggcgtgggcatcggcgccccnccgcccaagtccgggcgcggcggcaagtacacctgggagggccccggcagcgtcgtcgaggaccagctngacccggcgccgcccgccatcgaccccaacgaccccaactacgaggaggcggaggacgacgaggcggccagggaggtggtcgtcggggaggtggaggtcgctaaggtcgccgagggcagggacggcgtcgccagggtngacgtcgcgccgggcctgctccaggaccagaagcagtaaaaagacttgtcttttctggatacgtntagagtntagatcgactcggtgtgtgtcagtgtgttcgagtttattccgtgcagagagtgcacgtcaactccgctttaattaatctgcttttgttaatatttctactgatcagtaatatgaaccagtggttgatatttggatggncctt

SEQ ID NO: 15123 - protein, 175 aa, Zea mays subsp. mays
  peptide (1)..(175): Ceres Seq. ID no. 13580130
  misc_feature (36)..(170): Homolog of NCBI NO: 18398726 NR Description: expressed protein [Arabidopsis thaliana] unknown protein [Arabidopsis thaliana] AT3g10020/T22K18_16 [Arabidopsis thaliana]
  misc_feature (33)..(33): Xaa is any aa, unknown or other
  misc_feature (94)..(94): Xaa is any aa, unknown or other
  misc_feature (117)..(117): Xaa is any aa, unknown or other
  misc_feature (163)..(163): Xaa is any aa, unknown or other
IRTDPYRETHPAREISTSIIITSERAGRAAPMXAYMRVTHRDEEGKKVTEKMPVPETRRPDTAKHFERKLEEQGLHRFERHPANAPRGVGIGAXPPKSGRGGKYTWEGPGSVVEDQXDPAPPAIDPNDPNYEEAEDDEAAREVVVGEVEVAKVAEGRDGVARXDVAPGLLQDQKQ

SEQ ID NO: 15124 - protein, 150 aa, Zea mays subsp. mays
  peptide (1)..(150): Ceres Seq. ID no. 13580131
  misc_feature (26)..(150): Homolog of NCBI NO: 23105951 NR Description: hypothetical protein [Azotobacter vinelandii]
  misc_feature (47)..(150): Homolog of NCBI NO: 7494125 NR Description: myosin-IA - Acanthamoeba castellanii
  misc_feature (32)..(150): Homolog of NCBI NO: 34393960 NR Description: hypothetical protein [Oryza sativa (japonica
  misc_feature (24)..(145): Homolog of NCBI NO: 7441832 NR Description: hypothetical protein APE1912 - Aeropyrum pernix K1) >gi|5105604|dbj|BAA80917.1| 152aa long hypothetical protein
  misc_feature (32)..(150): Homolog of NCBI NO: 29830954 NR Description: putative GntR-family transcriptional regulator
  misc_feature (25)..(150): Homolog of NCBI NO: 34910974 NR Description: P0014E08.18 [Oryza sativa (japonica
  misc_feature (32)..(32): Xaa is any aa, unknown or other
  misc_feature (94)..(94): Xaa is any aa, unknown or other
  misc_feature (117)..(117): Xaa is any aa, unknown or other
QNRSLQRDTPSARDIYIDHHHQRASRPSSTDXGVHARDAPRRGRQEGDGEDAGPGDAAPGHGQALRAQAGGAGPPPLRAAPGERAPGRGHRRPXAQVRARRQVHLGGPRQRRRGPAXPGAARHRPQRPQLRGGGGRRGGQGGGRRGGGGR

SEQ ID NO: 15125 - protein, 144 aa, Zea mays subsp. mays
  peptide (1)..(144): Ceres Seq. ID no. 13580132
  misc_feature (5)..(139): Homolog of NCBI NO: 18398726 NR Description: expressed protein [Arabidopsis thaliana] unknown protein [Arabidopsis thaliana] AT3g10020/T22K18_16 [Arabidopsis thaliana]
  misc_feature (2)..(2): Xaa is any aa, unknown or other
  misc_feature (63)..(63): Xaa is any aa, unknown or other
  misc_feature (86)..(86): Xaa is any aa, unknown or other
  misc_feature (132)..(132): Xaa is any aa, unknown or other
MXAYMRVTHRDEEGKKVTEKMPVPETRRPDTAKHFERKLEEQGLHRFERHPANAPRGVGIGAXPPKSGRGGKYTWEGPGSVVEDQXDPAPPAIDPNDPNYEEAEDDEAAREVVVGEVEVAKVAEGRDGVARXDVAPGLLQDQKQ

SEQ ID NO: 15126 - DNA, 2375 bp, Zea mays subsp. mays
  misc_feature (1)..(2375): Ceres Seq. ID no. 13587079
  misc_feature: MA Experiment ID: 20000534 Result: Up-regulated in Transcription
  misc_feature: MA Experiment 20000534 PARAMETER Experiment Name: Zm_Hybrid_Pollen_P Parameter: Age (day) Value: 8
  misc_feature: MA Experiment 20000534 PARAMETER Experiment Name: Zm_Hybrid_Pollen_P Parameter: Organism Value: Zea mays
  misc_feature: MA Experiment 20000534 PARAMETER Experiment Name: Zm_Hybrid_Pollen_P Parameter: Plant Line Value: 35A19
  misc_feature: MA Experiment 20000534 PARAMETER Experiment Name: Zm_Hybrid_Pollen_P Parameter: Tissue Value: Pollen vs. Aerial
ctacttcccggtatcctaaaccctagccgacatgcgccgcccgcagcgccgcgtcgcggcgaagcagactcgcctgcgggaggtcgacgagatacgcctcctcaacgaatggatcgacgccggcaagcccctcccgcgcaccaaacttctgcccccgtcgaaatcagctggaccggttccgaccgccggggagcacccggagtacggcgcgtgcacactgttcgacgagctgccgctgtcgcagaagaccaaggacgggctgcggaaggcggggttcactgagatgagtgagatccagcgcgccgctctgccccacgcgctgtgtggccgcgacatcctcggcgcggccaagaccggctccggcaagacccttgcctttgtcatcccgcttattgagaagctgtatagagagagatggggtccagaggatggtgtgggctgcattattctctccccgacaaatgatttggctgggcagatttttgaggtgatcaagaaagtggggcagttccataactttagtggtggcgtcattgttgctgttggtgcttgacgaggcagatcaaattcttgatcacggattcagaaaccaggttgatgctatcatttctcagattcccaaagttagacaaactttactgttttctgctacacaaacgaagtcagttaaggaccttgcaagggttagcttaagggatcctgaatatataagtgtgcacgaggaggccagaacagccacaccggatacccttgagcagtatgccatgattgtacctcttgagcagaagttaaatatgctctggagcttcattaaaaggcatctaaattcaaagacgatagtcttcttatctagtgtcaagcaggtcaaatttgtttatgaaatttttaagaaacttcgtcctggtattcctttgaaatgtatgcatggacggatgaaacatgtggtacagcaggccatagttgcagatttcaatgaagctacctcagttcttttctcaactgatataacatctcgaggactagatataaagaatgtggattgggtggtgcaggttgattgcccagaaaacattgataattacatccacagagttggccgtacagctcgttacaataagaaaggaaaatcacttatattcctttgtcctgaagaagaagcaatgcttgaaaaattgaaggcaaccgaaagtaaaatacctatacatattcgaaagccaaaggcagaacaactggagcagatatcgcagagtatagcctcagtgctggttaaatttcccaatcttcaggaattgggtaaaagggcttttgttacctatcttaaggcagtatacctccagaaagacaaaaaagtgttcaacctgagcaggttctctgcagagcagtttgctgcatatgctgcttcgcttggtctgcctgttacccccaagatccgcttcataagccacaagaagaatgtgtcgaagaaggatatggaggacattgatatgaaacagatgaaatccagtttggaacatgaagttaccatcactccaaagatcaacattgatttaactttgtgtgatggagatgatgatatcctttatcccaagaagcccactgcagatgctaatatggatgacagacttgatgatgtccttcatcccaaggagtctgccacagatacaaatgtgactggacttgaaagacccttcaaaaagaagaaactgaagataaacgtgaacaggccatcaggaacaagggtcaagtatgatgatgagggcaacgccatcccacctcttgcatctgtcgctgaagaagtatctttagaacctgtggttcacaaggataaaatttcccagcggtatgcagagatgttgagagaaatgcagaaacacgacaaggaggacaagcttgaacacaagaagaccttgcgggagaagaagctgcagaagaagatgaagcttaagcgcaagaggcaggaagacactggagcagggtcagaggaggatagtggatctgaatcagacagaggccaagacacagccaacaaaggtaaaaagaggtacttcaatagcgacgatgaagacaatgacgcagcaaaggacggtgatgttctcgcccagcaggaggcgttggcactgaagctcctgagtaatatgcacagttagctttgggatctgatggtataggttacccttgaatgggggtttgcctattagcgctccagccaggaaggggctgaaattttgaacgtgtcgcggttttttttttctgataaccgggagttaattcccactttcaggcatacgttcatggatgtatgagaaatcagtgtggccgtattaccccaagaaatcggacttagatgaggttttaagtaaaatgcctttgatttt

SEQ ID NO: 15127 - protein, 460 aa, Zea mays subsp. mays
  peptide (1)..(460): Ceres Seq. ID no. 13587080
  misc_feature (43)..(116): Pfam Name: Helicase conserved C-terminal domain Pfam Description: Helicase conserved C-terminal domain
  misc_feature (1)..(460): Homolog of NCBI NO: 34901886 NR Description: putative RNA helicase [Oryza sativa (japonica
  misc_feature (1)..(460): Homolog of NCBI NO: 34395216 NR Description: putative RNA helicase [Oryza sativa (japonica
  misc_feature (1)..(456): Homolog of NCBI NO: 15240418 NR Description: DEAD/DEAH box helicase, putative [Arabidopsis
  misc_feature (1)..(434): Homolog of NCBI NO: 21627812 NR Description: probable ATP-dependent RNA helicase [Aspergillus
  misc_feature (1)..(455): Homolog of NCBI NO: 19115564 NR Description: probable ATP-dependent RNA helicase
  misc_feature (1)..(233): Homolog of NCBI NO: 40747532 NR Description: hypothetical protein AN0589.2 [Aspergillus
  misc_feature (227)..(426): Homolog of NCBI NO: 40747532 NR Description: hypothetical protein AN0589.2 [Aspergillus
  misc_feature (1)..(436): Homolog of NCBI NO: 6322427 NR Description: putative RNA helicase; Hca4p [Saccharomyces
  misc_feature (1)..(436): Homolog of NCBI NO: 1619952 NR Description: putative RNA helicase [Saccharomyces cerevisiae]
  misc_feature (1)..(452): Homolog of NCBI NO: 39595354 NR Description: Hypothetical protein CBG03992 [Caenorhabditis
MIVPLEQKLNMLWSFIKRHLNSKTIVFLSSVKQVKFVYEIFKKLRPGIPLKCMHGRMKHVVQQAIVADFNEATSVLFSTDITSRGLDIKNVDWVVQVDCPENIDNYIHRVGRTARYNKKGKSLIFLCPEEEAMLEKLKATESKIPIHIRKPKAEQLEQISQSIASVLVKFPNLQELGKRAFVTYLKAVYLQKDKKVFNLSRFSAEQFAAYAASLGLPVTPKIRFISHKKNVSKKDMEDIDMKQMKSSLEHEVTITPKINIDLTLCDGDDDILYPKKPTADANMDDRLDDVLHPKESATDTNVTGLERPFKKKKLKINVNRPSGTRVKYDDEGNAIPPLASVAEEVSLEPVVHKDKISQRYAEMLREMQKHDKEDKLEHKKTLREKKLQKKMKLKRKRQEDTGAGSEEDSGSESDRGQDTANKGKKRYFNSDDEDNDAAKDGDVLAQQEALALKLLSNMHS

SEQ ID NO: 15128 - protein, 450 aa, Zea mays subsp. mays
  peptide (1)..(450): Ceres Seq. ID no. 13587081
  misc_feature (33)..(106): Pfam Name: Helicase conserved C-terminal domain Pfam Description: Helicase conserved C-terminal domain
  misc_feature (1)..(450): Homolog of NCBI NO: 34901886 NR Description: putative RNA helicase [Oryza sativa (japonica
  misc_feature (1)..(450): Homolog of NCBI NO: 34395216 NR Description: putative RNA helicase [Oryza sativa (japonica
  misc_feature (1)..(446): Homolog of NCBI NO: 15240418 NR Description: DEAD/DEAH box helicase, putative [Arabidopsis
  misc_feature (1)..(424): Homolog of NCBI NO: 21627812 NR Description: probable ATP-dependent RNA helicase [Aspergillus
  misc_feature (1)..(445): Homolog of NCBI NO: 19115564 NR Description: probable ATP-dependent RNA helicase
  misc_feature (1)..(223): Homolog of NCBI NO: 40747532 NR Description: hypothetical protein AN0589.2 [Aspergillus
  misc_feature (217)..(416): Homolog of NCBI NO: 40747532 NR Description: hypothetical protein AN0589.2 [Aspergillus
  misc_feature (1)..(426): Homolog of NCBI NO: 6322427 NR Description: putative RNA helicase; Hca4p [Saccharomyces
  misc_feature (1)..(426): Homolog of NCBI NO: 1619952 NR Description: putative RNA helicase [Saccharomyces cerevisiae]
  misc_feature (1)..(442): Homolog of NCBI NO: 39595354 NR Description: Hypothetical protein CBG03992 [Caenorhabditis
MLWSFIKRHLNSKTIVFLSSVKQVKFVYEIFKKLRPGIPLKCMHGRMKHVVQQAIVADFNEATSVLFSTDITSRGLDIKNVDWVVQVDCPENIDNYIHRVGRTARYNKKGKSLIFLCPEEEAMLEKLKATESKIPIHIRKPKAEQLEQISQSIASVLVKFPNLQELGKRAFVTYLKAVYLQKDKKVFNLSRFSAEQFAAYAASLGLPVTPKIRFISHKKNVSKKDMEDIDMKQMKSSLEHEVTITPKINIDLTLCDGDDDILYPKKPTADANMDDRLDDVLHPKESATDTNVTGLERPFKKKKLKINVNRPSGTRVKYDDEGNAIPPLASVAEEVSLEPVVHKDKISQRYAEMLREMQKHDKEDKLEHKKTLREKKLQKKMKLKRKRQEDTGAGSEEDSGSESDRGQDTANKGKKRYFNSDDEDNDAAKDGDVLAQQEALALKLLSNMHS

SEQ ID NO: 15129 - protein, 408 aa, Zea mays subsp. mays
  peptide (1)..(408): Ceres Seq. ID no. 13587082
  misc_feature (1)..(64): Pfam Name: Helicase conserved C-terminal domain Pfam Description: Helicase conserved C-terminal domain
  misc_feature (1)..(408): Homolog of NCBI NO: 34901886 NR Description: putative RNA helicase [Oryza sativa (japonica
  misc_feature (1)..(408): Homolog of NCBI NO: 34395216 NR Description: putative RNA helicase [Oryza sativa (japonica
  misc_feature (1)..(404): Homolog of NCBI NO: 15240418 NR Description: DEAD/DEAH box helicase, putative [Arabidopsis
  misc_feature (1)..(382): Homolog of NCBI NO: 21627812 NR Description: probable ATP-dependent RNA helicase [Aspergillus
  misc_feature (1)..(403): Homolog of NCBI NO: 19115564 NR Description: probable ATP-dependent RNA helicase
  misc_feature (1)..(181): Homolog of NCBI NO: 40747532 NR Description: hypothetical protein AN0589.2 [Aspergillus
  misc_feature (175)..(374): Homolog of NCBI NO: 40747532 NR Description: hypothetical protein AN0589.2 [Aspergillus
  misc_feature (1)..(384): Homolog of NCBI NO: 6322427 NR Description: putative RNA helicase; Hca4p [Saccharomyces
  misc_feature (1)..(384): Homolog of NCBI NO: 1619952 NR Description: putative RNA helicase [Saccharomyces cerevisiae]
  misc_feature (1)..(400): Homolog of NCBI NO: 39595354 NR Description: Hypothetical protein CBG03992 [Caenorhabditis
MHGRMKHVVQQAIVADFNEATSVLFSTDITSRGLDIKNVDWVVQVDCPENIDNYIHRVGRTARYNKKGKSLIFLCPEEEAMLEKLKATESKIPIHIRKPKAEQLEQISQSIASVLVKFPNLQELGKRAFVTYLKAVYLQKDKKVFNLSRFSAEQFAAYAASLGLPVTPKIRFISHKKNVSKKDMEDIDMKQMKSSLEHEVTITPKINIDLTLCDGDDDILYPKKPTADANMDDRLDDVLHPKESATDTNVTGLERPFKKKKLKINVNRPSGTRVKYDDEGNAIPPLASVAEEVSLEPVVHKDKISQRYAEMLREMQKHDKEDKLEHKKTLREKKLQKKMKLKRKRQEDTGAGSEEDSGSESDRGQDTANKGKKRYFNSDDEDNDAAKDGDVLAQQEALALKLLSNMHS

SEQ ID NO: 15130 - DNA, 438 bp, Zea mays subsp. mays
  misc_feature (1)..(438): Ceres Seq. ID no. 4776856
  misc_feature: MA Experiment ID: 20000534 Result: Up-regulated in Transcription
  misc_feature: MA Experiment 20000534 PARAMETER Experiment Name: Zm_Hybrid_Pollen_P Parameter: Age (day) Value: 8
  misc_feature: MA Experiment 20000534 PARAMETER Experiment Name: Zm_Hybrid_Pollen_P Parameter: Organism Value: Zea mays
  misc_feature: MA Experiment 20000534 PARAMETER Experiment Name: Zm_Hybrid_Pollen_P Parameter: Plant Line Value: 35A19
  misc_feature: MA Experiment 20000534 PARAMETER Experiment Name: Zm_Hybrid_Pollen_P Parameter: Tissue Value: Pollen vs. Aerial
tcatctctagcctgcgccgccgcctccaccgcaccccccaaaaccctagcgctcgcttcgccccgccccaccaccatggccggcgcgcaggagtccctcgtctacgccggtgtgatgcgcggccacaacgacgtggtcacggccatcgcgacgcccatcgacaactcgcccttcatcgtctcctcttcccgcgacaagtcgctgctcgtctgggacctcaccaaccccatccaggccacccaggactccagctccgagtacggcgtccccttccgccgcctcaccggccacggccactttgtccaggacgtcgtcctcagctccgacggccagttcgcgctctccggatcctgggacggcgagctccgcctctgggacctctccaccggggtcaccacccgccgcttcgtcggccacgagaaggacgtcctctccgtc

SEQ ID NO: 15131 - protein, 146 aa, Zea mays subsp. mays
  peptide (1)..(146): Ceres Seq. ID no. 4776857
  misc_feature (26)..(145): Homolog of NCBI NO: 34911282 NR Description: guanine nucleotide-binding protein beta
  misc_feature (29)..(145): Homolog of NCBI NO: 4589836 NR Description: LeArcA2 protein [Lycopersicon esculentum]
  misc_feature (29)..(145): Homolog of NCBI NO: 7446126 NR Description: GTP-binding protein beta chain homolog -
  misc_feature (29)..(145): Homolog of NCBI NO: 4589834 NR Description: LeArcA1 protein [Lycopersicon esculentum]
  misc_feature (29)..(145): Homolog of NCBI NO: 3023851 NR Description: Guanine nucleotide-binding protein beta
  misc_feature (31)..(145): Homolog of NCBI NO: 15229589 NR Description: protein kinase C-receptor/G-protein, putative; id: At3g18130.1, supported by cDNA: gi_15215619, supported by gi_20856143 [Arabidopsis thaliana] >gi|9294068|dbj|BAB02025.1|
  misc_feature (29)..(145): Homolog of NCBI NO: 1346110 NR Description: GUANINE NUCLEOTIDE-BINDING PROTEIN BETA
  misc_feature (31)..(145): Homolog of NCBI NO: 3023847 NR Description: GUANINE NUCLEOTIDE-BINDING PROTEIN BETA
  misc_feature (31)..(145): Homolog of NCBI NO: 3023857 NR Description: GUANINE NUCLEOTIDE-BINDING PROTEIN BETA
SSLACAAASTAPPKTLALASPRPTTMAGAQESLVYAGVMRGHNDVVTAIATPIDNSPFIVSSSRDKSLLVWDLTNPIQATQDSSSEYGVPFRRLTGHGHFVQDVVLSSDGQFALSGSWDGELRLWDLSTGVTTRRFVGHEKDVLSV

SEQ ID NO: 15132 - protein, 145 aa, Zea mays subsp. mays
  peptide (1)..(145): Ceres Seq. ID no. 4776858
ISSLRRRLHRTPQNPSARFAPPHHHGRRAGVPRLRRCDARPQRRGHGHRDAHRQLALHRLLFPRQVAARLGPHQPHPGHPGLQLRVRRPLPPPHRPRPLCPGRRPQLRRPVRALRILGRRAPPLGPLHRGHHPPLRRPREGRPLR

SEQ ID NO: 15133 - protein, 121 aa, Zea mays subsp. mays
  peptide (1)..(121): Ceres Seq. ID no. 4776859
  misc_feature (1)..(120): Homolog of NCBI NO: 34911282 NR Description: guanine nucleotide-binding protein beta
  misc_feature (4)..(120): Homolog of NCBI NO: 4589836 NR Description: LeArcA2 protein [Lycopersicon esculentum]
  misc_feature (4)..(120): Homolog of NCBI NO: 7446126 NR Description: GTP-binding protein beta chain homolog -
  misc_feature (4)..(120): Homolog of NCBI NO: 4589834 NR Description: LeArcA1 protein [Lycopersicon esculentum]
  misc_feature (4)..(120): Homolog of NCBI NO: 3023851 NR Description: Guanine nucleotide-binding protein beta
  misc_feature (6)..(120): Homolog of NCBI NO: 15229589 NR Description: protein kinase C-receptor/G-protein, putative; id: At3g18130.1, supported by cDNA: gi_15215619, supported by gi_20856143 [Arabidopsis thaliana] >gi|9294068|dbj|BAB02025.1|
  misc_feature (4)..(120): Homolog of NCBI NO: 1346110 NR Description: GUANINE NUCLEOTIDE-BINDING PROTEIN BETA
  misc_feature (6)..(120): Homolog of NCBI NO: 3023847 NR Description: GUANINE NUCLEOTIDE-BINDING PROTEIN BETA
  misc_feature (6)..(120): Homolog of NCBI NO: 3023857 NR Description: GUANINE NUCLEOTIDE-BINDING PROTEIN BETA
MAGAQESLVYAGVMRGHNDVVTAIATPIDNSPFIVSSSRDKSLLVWDLTNPIQATQDSSSEYGVPFRRLTGHGHFVQDVVLSSDGQFALSGSWDGELRLWDLSTGVTTRRFVGHEKDVLSV

SEQ ID NO: 15134 - DNA, 432 bp, Zea mays subsp. mays
  misc_feature (1)..(432): Ceres Seq. ID no. 4776740
  misc_feature: MA Experiment ID: 108522 Result: Up-regulated in Transcription
  misc_feature: MA Experiment 108522 PARAMETER Experiment Name: Zm_42deg_Heat_P Parameter: Age (day) Value: 8
  misc_feature: MA Experiment 108522 PARAMETER Experiment Name: Zm_42deg_Heat_P Parameter: Organism Value: Zea mays
  misc_feature: MA Experiment 108522 PARAMETER Experiment Name: Zm_42deg_Heat_P Parameter: Plant Line Value: 35A19
  misc_feature: MA Experiment 108522 PARAMETER Experiment Name: Zm_42deg_Heat_P Parameter: Temperature (deg C) Value: 42 vs. 22
  misc_feature: MA Experiment 108522 PARAMETER Experiment Name: Zm_42deg_Heat_P Parameter: Timepoint (hr) Value: 1
  misc_feature: MA Experiment 108522 PARAMETER Experiment Name: Zm_42deg_Heat_P Parameter: Tissue Value: Aerial
attttctttcgatcgtctcgcatcgacttttattagggttttcgtttcctgagagatcaatcaatcaatcgatatggcttccctagattccgacgtaaacatgatccctgctggtgaatcctccagctccgttgccgcttcttcgtcgagcaagaaggccaagagattcgaagttaagaagtggagcgccgtggctctctgggcttgggatatcgttgttgacaattgcgccatctgcagaaaccacatcatggatctctgtattgaatgtcaggctaatcaggccagcgctacgagtgaggaatgcactgttgcttggggggtttgcaatcacgccttccactttcactgcatcagcagatggttaaagactcgtcaagtttgcccattggataacagtgagtgggagttccagaaatatggtcactaaat

SEQ ID NO: 15135 - protein, 118 aa, Zea mays subsp. mays
  peptide (1)..(118): Ceres Seq. ID no. 4776741
  misc_feature (85)..(106): Pfam Name: Zinc finger, C3HC4 type (RING finger) Pfam Description: Zinc finger, C3HC4 type (RING finger)
  misc_feature (1)..(118): Homolog of NCBI NO: 18420256 NR Description: ring-box protein - like; protein id: At5g20570.1, by cDNA: 29408., supported by cDNA: gi_16186264, supported by
  misc_feature (4)..(118): Homolog of NCBI NO: 31747517 NR Description: ring box protein [Populus tomentosa]
  misc_feature (1)..(118): Homolog of NCBI NO: 15229164 NR Description: ring-box protein Roc1/Rbx1/Hrt1, putative;
  misc_feature (21)..(118): Homolog of NCBI NO: 19387246 NR Description: putative ring box-1 protein [Oryza sativa
  misc_feature (8)..(118): Homolog of NCBI NO: 19067884 NR Description: hyperosmotic protein 21 [Salmo salar]
  misc_feature (9)..(118): Homolog of NCBI NO: 31210271 NR Description: ENSANGP00000010437 [Anopheles gambiae]
  misc_feature (15)..(118): Homolog of NCBI NO: 18543187 NR Description: CG16982-PA [Drosophila melanogaster]
  misc_feature (21)..(118): Homolog of NCBI NO: 37537963 NR Description: RING-box protein 1 (Rbx1) (Hyperosmotic protein
  misc_feature (8)..(118): Homolog of NCBI NO: 32425477 NR Description: RBX1 protein [Homo sapiens]
  misc_feature (21)..(118): Homolog of NCBI NO: 7657508 NR Description: ring-box 1; RING box protein 1; regulator of
MASLDSDVNMIPAGESSSSVAASSSSKKAKRFEVKKWSAVALWAWDIVVDNCAICRNHIMDLCIECQANQASATSEECTVAWGVCNHAFHFHCISRWLKTRQVCPLDNSEWEFQKYGH

SEQ ID NO: 15136 - protein, 109 aa, Zea mays subsp. mays
  peptide (1)..(109): Ceres Seq. ID no. 4776742
  misc_feature (76)..(97): Pfam Name: Zinc finger, C3HC4 type (RING finger) Pfam Description: Zinc finger, C3HC4 type (RING finger)
  misc_feature (1)..(109): Homolog of NCBI NO: 31747517 NR Description: ring box protein [Populus tomentosa]
  misc_feature (1)..(109): Homolog of NCBI NO: 15229164 NR Description: ring-box protein Roc1/Rbx1/Hrt1, putative;
  misc_feature (12)..(109): Homolog of NCBI NO: 19387246 NR Description: putative ring box-1 protein [Oryza sativa
  misc_feature (1)..(109): Homolog of NCBI NO: 19067884 NR Description: hyperosmotic protein 21 [Salmo salar]
  misc_feature (1)..(109): Homolog of NCBI NO: 31210271 NR Description: ENSANGP00000010437 [Anopheles gambiae]
  misc_feature (1)..(109): Homolog of NCBI NO: 18420256 NR Description: ring-box protein - like; protein id: At5g20570.1, by cDNA: 29408., supported by cDNA: gi_16186264, supported by
  misc_feature (6)..(109): Homolog of NCBI NO: 18543187 NR Description: CG16982-PA [Drosophila melanogaster]
  misc_feature (12)..(109): Homolog of NCBI NO: 37537963 NR Description: RING-box protein 1 (Rbx1) (Hyperosmotic protein
  misc_feature (1)..(109): Homolog of NCBI NO: 32425477 NR Description: RBX1 protein [Homo sapiens]
  misc_feature (12)..(109): Homolog of NCBI NO: 7657508 NR Description: ring-box 1; RING box protein 1; regulator of
MIPAGESSSSVAASSSSKKAKRFEVKKWSAVALWAWDIVVDNCAICRNHIMDLCIECQANQASATSEECTVAWGVCNHAFHFHCISRWLKTRQVCPLDNSEWEFQKYGH

SEQ ID NO: 15137 - protein, 59 aa, Zea mays subsp. mays
  peptide (1)..(59): Ceres Seq. ID no. 4776743
  misc_feature (26)..(47): Pfam Name: Zinc finger, C3HC4 type (RING finger) Pfam Description: Zinc finger, C3HC4 type (RING finger)
  misc_feature (1)..(59): Homolog of NCBI NO: 18420256 NR Description: ring-box protein - like; protein id: At5g20570.1, by cDNA: 29408., supported by cDNA: gi_16186264, supported by
  misc_feature (1)..(59): Homolog of NCBI NO: 31747517 NR Description: ring box protein [Populus tomentosa]
  misc_feature (1)..(59): Homolog of NCBI NO: 15229164 NR Description: ring-box protein Roc1/Rbx1/Hrt1, putative;
  misc_feature (1)..(59): Homolog of NCBI NO: 19387246 NR Description: putative ring box-1 protein [Oryza sativa
  misc_feature (1)..(59): Homolog of NCBI NO: 19067884 NR Description: hyperosmotic protein 21 [Salmo salar]
  misc_feature (1)..(59): Homolog of NCBI NO: 31210271 NR Description: ENSANGP00000010437 [Anopheles gambiae]
  misc_feature (1)..(59): Homolog of NCBI NO: 18543187 NR Description: CG16982-PA [Drosophila melanogaster]
  misc_feature (1)..(59): Homolog of NCBI NO: 37537963 NR Description: RING-box protein 1 (Rbx1) (Hyperosmotic protein
  misc_feature (1)..(59): Homolog of NCBI NO: 32425477 NR Description: RBX1 protein [Homo sapiens]
  misc_feature (1)..(59): Homolog of NCBI NO: 7657508 NR Description: ring-box 1; RING box protein 1; regulator of
MDLCIECQANQASATSEECTVAWGVCNHAFHFHCISRWLKTRQVCPLDNSEWEFQKYGH

SEQ ID NO: 15138 - DNA, 469 bp, Zea mays subsp. mays
  misc_feature (1)..(469): Ceres Seq. ID no. 4776593
  misc_feature: MA Experiment ID: 20000534 Result: Up-regulated in Transcription
  misc_feature: MA Experiment 20000534 PARAMETER Experiment Name: Zm_Hybrid_Pollen_P Parameter: Age (day) Value: 8
  misc_feature: MA Experiment 20000534 PARAMETER Experiment Name: Zm_Hybrid_Pollen_P Parameter: Organism Value: Zea mays
  misc_feature: MA Experiment 20000534 PARAMETER Experiment Name: Zm_Hybrid_Pollen_P Parameter: Plant Line Value: 35A19
  misc_feature: MA Experiment 20000534 PARAMETER Experiment Name: Zm_Hybrid_Pollen_P Parameter: Tissue Value: Pollen vs. Aerial
  misc_feature: Pfam Name: Histone Pfam Description: Core histone H2A/H2B/H3/H4
atcaatctcatcacccaccaccaaacacaatccaagccaatcccaccggagagaagagaagatgtcgggccgcggcaagggaggcaaggggctgggcaagggcggcgccaagcgccaccggaaggtgctgcgcgacaacatccagggcatcaccaagccggcgatccgccgtcttgcgcggcgtggcggcgtgaagcgcatctcggggctcatctacgaggagacccgcggcgtgctcaagatcttcctcgagaacgtcatccgcgacgccgtcacctacaccgagcacgcccgccgcaagaccgtcaccgccatggacgtcgtctacgcgctcaagcgccagggccgcaccctctacggattcggcggctaggccgagggcccagccagctcgcgacgcngccgtccggcagagtagtggtatctatctagttgctgtctagggttcgtggttctccttgtatgtcgc

SEQ ID NO: 15139 - protein, 143 aa, Zea mays subsp. mays
  peptide (1)..(143): Ceres Seq. ID no. 4776594
  misc_feature: Pfam Name: Histone Pfam Description: Core histone H2A/H2B/H3/H4
  misc_feature (134)..(134): Xaa is any aa, unknown or other
INLITHHQTQSKPIPPERREDVGPRQGRQGAGQGRRQAPPEGAARQHPGHHQAGDPPSCAAWRREAHLGAHLRGDPRRAQDLPRERHPRRRHLHRARPPQDRHRHGRRLRAQAPGPHPLRIRRLGRGPSQLATXPSGRVVVSI

SEQ ID NO: 15140 - protein, 123 aa, Zea mays subsp. mays
  peptide (1)..(123): Ceres Seq. ID no. 4776595
  misc_feature: Pfam Name: Histone Pfam Description: Core histone H2A/H2B/H3/H4
  misc_feature (6)..(123): Homolog of NCBI NO: 34858262 NR Description: similar to germinal histone H4 gene [Rattus
  misc_feature (14)..(123): Homolog of NCBI NO: 34876368 NR Description: similar to germinal histone H4 gene [Rattus
  misc_feature (21)..(123): Homolog of NCBI NO: 15226944 NR Description: histone H4; protein id: At2g28740.1, supported by
  misc_feature (10)..(123): Homolog of NCBI NO: 31195755 NR Description: ENSANGP00000000125 [Anopheles gambiae] ENSANGP00000018626 [Anopheles gambiae] ENSANGP00000018626 [Anopheles gambiae str. PEST]
  misc_feature (21)..(123): Homolog of NCBI NO: 462243 NR Description: Histone H4 >gi|421921|pir||S32769 histone H4 - >gi|297150|emb|CAA48923.1| histone H4 [Lycopersicon esculentum] histone H4 [Lycopersicon esculentum] >gi|2746721|gb|AAB94924.1|
  misc_feature (21)..(123): Homolog of NCBI NO: 1806283 NR Description: Histone H4 homologue [Sesbania rostrata]
  misc_feature (21)..(123): Homolog of NCBI NO: 4504301 NR Description: H4 histone family, member A [Homo sapiens] H4 histone family, member B [Homo sapiens] H4 histone family, member C [Homo sapiens]
  misc_feature (21)..(123): Homolog of NCBI NO: 27692935 NR Description: Similar to germinal histone H4 gene [Mus musculus]
  misc_feature (21)..(123): Homolog of NCBI NO: 27692960 NR Description: Similar to germinal histone H4 gene [Mus musculus]
  misc_feature (21)..(123): Homolog of NCBI NO: 37590121 NR Description: Hist1h4h protein [Mus musculus]
SISSPTTKHNPSQSHRREEKMSGRGKGGKGLGKGGAKRHRKVLRDNIQGITKPAIRRLARRGGVKRISGLIYEETRGVLKIFLENVIRDAVTYTEHARRKTVTAMDVVYALKRQGRTLYGFGG

SEQ ID NO: 15141 - protein, 103 aa, Zea mays subsp. mays; identical to SEQ ID NO: 7737
  peptide (1)..(103): Ceres Seq. ID no. 4776596
  misc_feature: Pfam Name: Histone Pfam Description: Core histone H2A/H2B/H3/H4
  misc_feature (1)..(103): Homolog of NCBI NO: 34858262 NR Description: similar to germinal histone H4 gene [Rattus
  misc_feature (1)..(103): Homolog of NCBI NO: 34876368 NR Description: similar to germinal histone H4 gene [Rattus
  misc_feature (1)..(103): Homolog of NCBI NO: 15226944 NR Description: histone H4; protein id: At2g28740.1, supported by
  misc_feature (1)..(103): Homolog of NCBI NO: 31195755 NR Description: ENSANGP00000000125 [Anopheles gambiae] ENSANGP00000018626 [Anopheles gambiae] ENSANGP00000018626 [Anopheles gambiae str. PEST]
  misc_feature (1)..(103): Homolog of NCBI NO: 462243 NR Description: Histone H4 >gi|421921|pir||S32769 histone H4 - >gi|297150|emb|CAA48923.1| histone H4 [Lycopersicon esculentum] histone H4 [Lycopersicon esculentum] >gi|2746721|gb|AAB94924.1|
  misc_feature (1)..(103): Homolog of NCBI NO: 1806283 NR Description: Histone H4 homologue [Sesbania rostrata]
  misc_feature (1)..(103): Homolog of NCBI NO: 4504301 NR Description: H4 histone family, member A [Homo sapiens] H4 histone family, member B [Homo sapiens] H4 histone family, member C [Homo sapiens]
  misc_feature (1)..(103): Homolog of NCBI NO: 27692935 NR Description: Similar to germinal histone H4 gene [Mus musculus]
  misc_feature (1)..(103): Homolog of NCBI NO: 27692960 NR Description: Similar to germinal histone H4 gene [Mus musculus]
  misc_feature (1)..(103): Homolog of NCBI NO: 37590121 NR Description: Hist1h4h protein [Mus musculus]

SEQ ID NO: 15142 - DNA, 1592 bp, Zea mays subsp. mays
  misc_feature (1)..(1592): Ceres Seq. ID no. 13587253
  misc_feature: MA Experiment ID: 108504 Result: Up-regulated in Transcription
  misc_feature: MA Experiment 108504 PARAMETER Experiment Name: Zm_Drought_P Parameter: Age (day) Value: 8
  misc_feature: MA Experiment 108504 PARAMETER Experiment Name: Zm_Drought_P Parameter: Organism Value: Zea mays
  misc_feature: MA Experiment 108504 PARAMETER Experiment Name: Zm_Drought_P Parameter: Plant Line Value: 35A19
  misc_feature: MA Experiment 108504 PARAMETER Experiment Name: Zm_Drought_P Parameter: Timepoint (hr) Value: 12
  misc_feature: MA Experiment 108504 PARAMETER Experiment Name: Zm_Drought_P Parameter: Tissue Value: Aerial
  misc_feature: MA Experiment 108504 PARAMETER Experiment Name: Zm_Drought_P Parameter: Treatment Value: Drought vs. No Drought
  misc_feature: MA Experiment ID: 108528 Result: Up-regulated in Transcription
  misc_feature: MA Experiment 108528 PARAMETER Experiment Name: Zm_Imbibed_Seeds_P Parameter: Age (day) Value: 5 vs. 2
  misc_feature: MA Experiment 108528 PARAMETER Experiment Name: Zm_Imbibed_Seeds_P Parameter: Organism Value: Zea mays
  misc_feature: MA Experiment 108528 PARAMETER Experiment Name: Zm_Imbibed_Seeds_P Parameter: Plant Line Value: 35A19
  misc_feature: MA Experiment 108528 PARAMETER Experiment Name: Zm_Imbibed_Seeds_P Parameter: Tissue Value: Aerial vs. Embryo
  misc_feature: MA Experiment ID: 108529 Result: Down-regulated in Transcription
  misc_feature: MA Experiment 108529 PARAMETER Experiment Name: Zm_Imbibed_Seeds_P Parameter: Age (day) Value: 5 vs. 2
  misc_feature: MA Experiment 108529 PARAMETER Experiment Name: Zm_Imbibed_Seeds_P Parameter: Organism Value: Zea mays
  misc_feature: MA Experiment 108529 PARAMETER Experiment Name: Zm_Imbibed_Seeds_P Parameter: Plant Line Value: 35A19
  misc_feature: MA Experiment 108529 PARAMETER Experiment Name: Zm_Imbibed_Seeds_P Parameter: Tissue Value: Roots vs. Embryo
  misc_feature: MA Experiment ID: 108530 Result: Up-regulated in Transcription
  misc_feature: MA Experiment 108530 PARAMETER Experiment Name: Zm_Imbibed_Seeds_P Parameter: Age (day) Value: 6 vs. 2
  misc_feature: MA Experiment 108530 PARAMETER Experiment Name: Zm_Imbibed_Seeds_P Parameter: Organism Value: Zea mays
  misc_feature: MA Experiment 108530 PARAMETER Experiment Name: Zm_Imbibed_Seeds_P Parameter: Plant Line Value: 35A19
  misc_feature: MA Experiment 108530 PARAMETER Experiment Name: Zm_Imbibed_Seeds_P Parameter: Tissue Value: Aerial vs. Embryo
  misc_feature: MA Experiment ID: 108536 Result: Down-regulated in Transcription
  misc_feature: MA Experiment 108536 PARAMETER Experiment Name: Zm_Meristem_P Parameter: Age (day) Value: 8
  misc_feature: MA Experiment 108536 PARAMETER Experiment Name: Zm_Meristem_P Parameter: Organism Value: Zea mays
  misc_feature: MA Experiment 108536 PARAMETER Experiment Name: Zm_Meristem_P Parameter: Plant Line Value: 35A19
  misc_feature: MA Experiment 108536 PARAMETER Experiment Name: Zm_Meristem_P Parameter: Tissue Value: Shoot Meristem vs. Above Shoot Meristem
  misc_feature: MA Experiment ID: 108543 Result: Up-regulated in Transcription
  misc_feature: MA Experiment ID: 108545 Result: Up-regulated in Transcription
  misc_feature: MA Experiment 108545 PARAMETER Experiment Name: Zm_Imbibed_Seeds_P Parameter: Age (day) Value: 3 vs. 2
  misc_feature: MA Experiment 108545 PARAMETER Experiment Name: Zm_Imbibed_Seeds_P Parameter: Organism Value: Zea mays
  misc_feature: MA Experiment 108545 PARAMETER Experiment Name: Zm_Imbibed_Seeds_P Parameter: Plant Line Value: 35A19
  misc_feature: MA Experiment 108545 PARAMETER Experiment Name: Zm_Imbibed_Seeds_P Parameter: Tissue Value: Aerial vs. Embryo
  misc_feature: MA Experiment ID: 108547 Result: Up-regulated in Transcription
  misc_feature: MA Experiment 108547 PARAMETER Experiment Name: Zm_Imbibed_Seeds_P Parameter: Age (day) Value: 4 vs. 2
  misc_feature: MA Experiment 108547 PARAMETER Experiment Name: Zm_Imbibed_Seeds_P Parameter: Organism Value: Zea mays
  misc_feature: MA Experiment 108547 PARAMETER Experiment Name: Zm_Imbibed_Seeds_P Parameter: Plant Line Value: 35A19
  misc_feature: MA Experiment 108547 PARAMETER Experiment Name: Zm_Imbibed_Seeds_P Parameter: Tissue Value: Aerial vs. Embryo
  misc_feature: MA Experiment ID: 108556 Result: Up-regulated in Transcription
  misc_feature: MA Experiment 108556 PARAMETER Experiment Name: Zm_Drought_P Parameter: Age (day) Value: 9
  misc_feature: MA Experiment 108556 PARAMETER Experiment Name: Zm_Drought_P Parameter: Organism Value: Zea mays
  misc_feature: MA Experiment 108556 PARAMETER Experiment Name: Zm_Drought_P Parameter: Plant Line Value: 35A19
  misc_feature: MA Experiment 108556 PARAMETER Experiment Name: Zm_Drought_P Parameter: Timepoint (hr) Value: 24
  misc_feature: MA Experiment 108556 PARAMETER Experiment Name: Zm_Drought_P Parameter: Tissue Value: Aerial
  misc_feature: MA Experiment 108556 PARAMETER Experiment Name: Zm_Drought_P Parameter: Treatment Value: Drought vs. No Drought
  misc_feature: MA Experiment ID: 108597 Result: Up-regulated in Transcription
  misc_feature: MA Experiment 108597 PARAMETER Experiment Name: Zm_100uM_ABA_P Parameter: Age (day) Value: 9
  misc_feature: MA Experiment 108597 PARAMETER Experiment Name: Zm_100uM_ABA_P Parameter: Organism Value: Zea mays
  misc_feature: MA Experiment 108597 PARAMETER Experiment Name: Zm_100uM_ABA_P Parameter: Plant Line Value: 35A19
  misc_feature: MA Experiment 108597 PARAMETER Experiment Name: Zm_100uM_ABA_P Parameter: Timepoint (hr) Value: 24
  misc_feature: MA Experiment 108597 PARAMETER Experiment Name: Zm_100uM_ABA_P Parameter: Tissue Value: Aerial
  misc_feature: MA Experiment 108597 PARAMETER Experiment Name: Zm_100uM_ABA_P Parameter: Treatment Value: 100uM ABA vs. No Treatment
  misc_feature: MA Experiment ID: 108689 Result: Up-regulated in Transcription
  misc_feature: MA Experiment 108689 PARAMETER Experiment Name: Zm_Drought_Roots_P Parameter: Age (day) Value: 9
  misc_feature: MA Experiment 108689 PARAMETER Experiment Name: Zm_Drought_Roots_P Parameter: Organism Value: Zea mays
  misc_feature: MA Experiment 108689 PARAMETER Experiment Name: Zm_Drought_Roots_P Parameter: Plant Line Value: 35A19
  misc_feature: MA Experiment 108689 PARAMETER Experiment Name: Zm_Drought_Roots_P Parameter: Timepoint (hr) Value: 24
  misc_feature: MA Experiment 108689 PARAMETER Experiment Name: Zm_Drought_Roots_P Parameter: Tissue Value: Roots
  misc_feature: MA Experiment 108689 PARAMETER Experiment Name: Zm_Drought_Roots_P Parameter: Treatment Value: Drought vs. No Drought
  misc_feature: MA Experiment ID: 20000479 Result: Up-regulated in Transcription
  misc_feature: MA Experiment 20000479 PARAMETER Experiment Name: Zm_Drought_P Parameter: Age (day) Value: 10
  misc_feature: MA Experiment 20000479 PARAMETER Experiment Name: Zm_Drought_P Parameter: Organism Value: Zea mays
  misc_feature: MA Experiment 20000479 PARAMETER Experiment Name: Zm_Drought_P Parameter: Plant Line Value: 35A19
  misc_feature: MA Experiment 20000479 PARAMETER Experiment Name: Zm_Drought_P Parameter: Timepoint (hr) Value: 48
  misc_feature: MA Experiment 20000479 PARAMETER Experiment Name: Zm_Drought_P Parameter: Tissue Value: Aerial
  misc_feature: MA Experiment 20000479 PARAMETER Experiment Name: Zm_Drought_P Parameter: Treatment Value: Drought vs. No Drought
aatgataattattggagcaagaaaaaagatacttatctactaaggtgaacataaaaacatttttcttccatgtcatctatatttaggtgaaaatacaagtcaattaaccatgcttagtagaacctatcagcaagcagccgcgcagagattatgattatccataatctattgaggtcaatgatgctggatccttccagttagatagctatcatcttcagtctttttcatctcactatagtattttgagggtccagttgctcgcttaactcaattccaaggtgtcaaaaatctattattttccaaattttactgaaacttgtaattttttgcatatgccaggaggagctagtggcattggtctggagacatcaagagtcttccgctgagaggagcccatgtggtcatcgctgctagaaacacagaagctgcatcagaagcaagaaagaccatcatggagaagaacccaacggcacgtattgatgttctgaagctagacctcagctccctcaagtctgtcagggcttttgtggaccagttcaactcgatcaaactccctctgaacatcctgatgtaaccctattcacctcttgttcatgcttgttttttattttcatatatatgaaagtttcctttgatttcgttgaatctatctccagcatatacgtattattacttttagcgcttgttttttttcattcatatatatgaaagtttcctttgcttgttttttctttcatatatatgaaagtttccgcctattttagcgctttcctctttgcactggatcaaggcttgagggaatccttttctgttccacagaaataatgcaggcgtcatgttttgcccttttcagctgtctaaagacggggtcgagatgcagtttgcgacaaatcatctaggtattctctcactgacagcatgacttgcttgaaattgtttttttatcaggacactttctgcttaccaatctcctccttgataccatgaaggccactgccaagtctacgggtattgagggccgcattgtgaatttgtcatcagtcgcccaccaccatacgtatccgaagggaattgacttcgataacctcaatgatgagaaaatgtatgtgcgtttatggttctgctttgtaggaattgtctgttgattgaactgcaagtaatgatcttttattaacttgcagatacaacgacaaaatggcttatggacagtctaagctggcgaacttgctgcatgcgaaggagctctctagaaggctgaaggtatttttttcagggtatcctaatagtattatccatgtctgttactctttcgggaagggtagaaacctgaagagaaacaatttgtccatcatggccctaatgctctgtcctgcttcactgtcatgacgcactaactatataaggggcacccagtaagcaatggccattgcgaactttgggatttagataacttcggaacctttgggatcttgatacatatcagtgtgacttgcagagatgatatgatctcgttcccttttacctatgtatgaaaatccatggttctgatgcatgcctacactggttaaaactctgaaacctactcctggttc

SEQ ID NO: 15143 - protein, 63 aa, Zea mays subsp. mays
  peptide (1)..(63): Ceres Seq. ID no. 13587254
  misc_feature (1)..(22): Homolog of NCBI NO: 34895876 NR Description: P0009G03.18 [Oryza sativa (japonica
  misc_feature (1)..(22): Homolog of NCBI NO: 15224306 NR Description: short-chain dehydrogenase/reductase family [Arabidopsis thaliana] >gi|7485438|pir||T02520 probable
  misc_feature (1)..(22): Homolog of NCBI NO: 11250521 NR Description: hypothetical protein T22P11.130 - Arabidopsis >gi|7413643|emb|CAB85991.1| putative protein [Arabidopsis
  misc_feature (1)..(22): Homolog of NCBI NO: 629592 NR Description: hypothetical protein - rape
  misc_feature (1)..(22): Homolog of NCBI NO: 18413950 NR Description: short-chain dehydrogenase/reductase family
  misc_feature (1)..(22): Homolog of NCBI NO: 20260302 NR Description: putative protein [Arabidopsis thaliana]
  misc_feature (1)..(22): Homolog of NCBI NO: 21554820 NR Description: putativepod-specific dehydrogenase SAC25
  misc_feature (1)..(22): Homolog of NCBI NO: 24762219 NR Description: unknown protein [Arabidopsis thaliana]
  misc_feature (1)..(22): Homolog of NCBI NO: 7485551 NR Description: hypothetical protein F16G20.130 - Arabidopsis >gi|3451068|emb|CAA20464.1| putative protein [Arabidopsis >gi|7269191|emb|CAB79298.1| putative protein [Arabidopsis
  misc_feature (1)..(22): Homolog of NCBI NO: 30686197 NR Description: short-chain dehydrogenase/reductase family
MAYGQSKLANLLHAKELSRRLKVFFSGYPNSIIHVCYSFGKGRNLKRNNLSIMALMLCPASLS

SEQ ID NO: 15144 - protein, 53 aa, Zea mays subsp. mays
  peptide (1)..(53): Ceres Seq. ID no. 13587255
  misc_feature (1)..(41): Homolog of NCBI NO: 34895876 NR Description: P0009G03.18 [Oryza sativa (japonica
  misc_feature (1)..(41): Homolog of NCBI NO: 15224306 NR Description: short-chain dehydrogenase/reductase family [Arabidopsis thaliana] >gi|7485438|pir||T02520 probable
  misc_feature (1)..(37): Homolog of NCBI NO: 11250521 NR Description: hypothetical protein T22P11.130 - Arabidopsis >gi|7413643|emb|CAB85991.1| putative protein [Arabidopsis
  misc_feature (1)..(41): Homolog of NCBI NO: 629592 NR Description: hypothetical protein - rape
  misc_feature (1)..(37): Homolog of NCBI NO: 18413950 NR Description: short-chain dehydrogenase/reductase family
  misc_feature (1)..(37): Homolog of NCBI NO: 21554820 NR Description: putativepod-specific dehydrogenase SAC25
  misc_feature (1)..(37): Homolog of NCBI NO: 20260302 NR Description: putative protein [Arabidopsis thaliana]
  misc_feature (1)..(41): Homolog of NCBI NO: 24762219 NR Description: unknown protein [Arabidopsis thaliana]
  misc_feature (1)..(41): Homolog of NCBI NO: 7485551 NR Description: hypothetical protein F16G20.130 - Arabidopsis >gi|3451068|emb|CAA20464.1| putative protein [Arabidopsis >gi|7269191|emb|CAB79298.1| putative protein [Arabidopsis
  misc_feature (1)..(41): Homolog of NCBI NO: 30686197 NR Description: short-chain dehydrogenase/reductase family
MKATAKSTGIEGRIVNLSSVAHHHTYPKGIDFDNLNDEKMYVRLWFCFVGIVC

SEQ ID NO: 15145 - protein, 40 aa, Zea mays subsp. mays
  peptide (1)..(40): Ceres Seq. ID no. 13587256
  misc_feature (1)..(40): Homolog of NCBI NO: 34895876 NR Description: P0009G03.18 [Oryza sativa (japonica
  misc_feature (1)..(40): Homolog of NCBI NO: 15224306 NR Description: short-chain dehydrogenase/reductase family [Arabidopsis thaliana] >gi|7485438|pir||T02520 probable
  misc_feature (1)..(40): Homolog of NCBI NO: 11250521 NR Description: hypothetical protein T22P11.130 - Arabidopsis >gi|7413643|emb|CAB85991.1| putative protein [Arabidopsis
  misc_feature (1)..(40): Homolog of NCBI NO: 629592 NR Description: hypothetical protein - rape
  misc_feature (1)..(40): Homolog of NCBI NO: 18413950 NR Description: short-chain dehydrogenase/reductase family
  misc_feature (1)..(40): Homolog of NCBI NO: 21554820 NR Description: putativepod-specific dehydrogenase SAC25
  misc_feature (1)..(40): Homolog of NCBI NO: 20260302 NR Description: putative protein [Arabidopsis thaliana]
  misc_feature (1)..(40): Homolog of NCBI NO: 24762219 NR Description: unknown protein [Arabidopsis thaliana]
  misc_feature (1)..(40): Homolog of NCBI NO: 7485551 NR Description: hypothetical protein F16G20.130 - Arabidopsis >gi|3451068|emb|CAA20464.1| putative protein [Arabidopsis >gi|7269191|emb|CAB79298.1| putative protein [Arabidopsis
  misc_feature (1)..(40): Homolog of NCBI NO: 30686197 NR Description: short-chain dehydrogenase/reductase family
MEKNPTARIDVLKLDLSSLKSVRAFVDQFNSIKLPLNILM

SEQ ID NO: 15146 - DNA, 474 bp, Zea mays subsp. mays
  misc_feature (1)..(474): Ceres Seq. ID no. 4776511
  misc_feature: MA Experiment ID: 108530 Result: Down-regulated in Transcription
  misc_feature: MA Experiment 108530 PARAMETER Experiment Name: Zm_Imbibed_Seeds_P Parameter: Age (day) Value: 6 vs. 2
  misc_feature: MA Experiment 108530 PARAMETER Experiment Name: Zm_Imbibed_Seeds_P Parameter: Organism Value: Zea mays
  misc_feature: MA Experiment 108530 PARAMETER Experiment Name: Zm_Imbibed_Seeds_P Parameter: Plant Line Value: 35A19
  misc_feature: MA Experiment 108530 PARAMETER Experiment Name: Zm_Imbibed_Seeds_P Parameter: Tissue Value: Aerial vs. Embryo
  misc_feature: MA Experiment ID: 108535 Result: Up-regulated in Transcription
  misc_feature: MA Experiment 108535 PARAMETER Experiment Name: Zm_Meristem_P Parameter: Age (day) Value: 8
  misc_feature: MA Experiment 108535 PARAMETER Experiment Name: Zm_Meristem_P Parameter: Organism Value: Zea mays
  misc_feature: MA Experiment 108535 PARAMETER Experiment Name: Zm_Meristem_P Parameter: Plant Line Value: 35A19
  misc_feature: MA Experiment 108535 PARAMETER Experiment Name: Zm_Meristem_P Parameter: Tissue Value: Root Meristem vs. Above Root Meristem
  misc_feature: MA Experiment ID: 108556 Result: Down-regulated in Transcription
  misc_feature: MA Experiment 108556 PARAMETER Experiment Name: Zm_Drought_P Parameter: Age (day) Value: 9
  misc_feature: MA Experiment 108556 PARAMETER Experiment Name: Zm_Drought_P Parameter: Organism Value: Zea mays
  misc_feature: MA Experiment 108556 PARAMETER Experiment Name: Zm_Drought_P Parameter: Plant Line Value: 35A19
  misc_feature: MA Experiment 108556 PARAMETER Experiment Name: Zm_Drought_P Parameter: Timepoint (hr) Value: 24
  misc_feature: MA Experiment 108556 PARAMETER Experiment Name: Zm_Drought_P Parameter: Tissue Value: Aerial
  misc_feature: MA Experiment 108556 PARAMETER Experiment Name: Zm_Drought_P Parameter: Treatment Value: Drought vs. No Drought
  misc_feature: MA Experiment ID: 20000108 Result: Up-regulated in Transcription
  misc_feature: MA Experiment 20000108 PARAMETER Experiment Name: Zm_Root-Tips_P Parameter: Age (day) Value: 12
  misc_feature: MA Experiment 20000108 PARAMETER Experiment Name: Zm_Root-Tips_P Parameter: Organism Value: Zea mays
  misc_feature: MA Experiment 20000108 PARAMETER Experiment Name: Zm_Root-Tips_P Parameter: Tissue Value: Root tips vs. Root mid region    35
  misc_feature: MA Experiment 20000108 PARAMETER Experiment Name: Zm_Root-Tips_P Parameter: Tissue Value: Root tips vs. Root mid region   Sequence Listing-Misc Features (4)
  misc_feature: MA Experiment ID: 20000492 Result: Up-regulated in Transcription
  misc_feature: MA Experiment 20000492 PARAMETER Experiment Name: Zm_Hybrid_Seed_Dev_P Parameter: DAP Value: 12
  misc_feature: MA Experiment 20000492 PARAMETER Experiment Name: Zm_Hybrid_Seed_Dev_P Parameter: Organism Value: Zea mays
  misc_feature: MA Experiment 20000492 PARAMETER Experiment Name: Zm_Hybrid_Seed_Dev_P Parameter: Plant Line Value: 35A19
  misc_feature: MA Experiment 20000492 PARAMETER Experiment Name: Zm_Hybrid_Seed_Dev_P Parameter: Tissue Value: Fert Kernel vs. Unfert Floret
  misc_feature: MA Experiment ID: 20001606 Result: Up-regulated in Transcription
  misc_feature: MA Experiment 20001606 PARAMETER Experiment Name: Zm_50ppm_KNO3_L-to-H_P Parameter: Age (day) Value: 19
  misc_feature: MA Experiment 20001606 PARAMETER Experiment Name: Zm_50ppm_KNO3_L-to-H_P Parameter: Organism Value: Zea mays
  misc_feature: MA Experiment 20001606 PARAMETER Experiment Name: Zm_50ppm_KNO3_L-to-H_P Parameter: Plant Line Value: 35A19
  misc_feature: MA Experiment 20001606 PARAMETER Experiment Name: Zm_50ppm_KNO3_L-to-H_P Parameter: Timepoint (hr) Value: 8
  misc_feature: MA Experiment 20001606 PARAMETER Experiment Name: Zm_50ppm_KNO3_L-to-H_P Parameter: Tissue Value: Shoots
  misc_feature: MA Experiment 20001606 PARAMETER Experiment Name: Zm_50ppm_KNO3_L-to-H_P Parameter: Treatment Value: 50ppm KNO3 vs. 50ppm KCl
agcctccatctctctctccctctctctcgcgcctcctcctcccccctgcaggaagctcgtcgggatgtcgtccgaggcggcgaaggtggtggtgccggagtcggtgctcctcaagaggaagcgggaggagctctgggccgccgagaagaagaccaaggccgtcgaggagaagaagaagtccagcgagaacgtcaaggtcatctacgcccgcgccaagcagtacgccgaggagtacgatgcccaggacaaggagttggttcagcttaagcgtgaggcccggatgaagggtgggttctatgtcagtcctgaggctaagctgctgtttgttgtcagaatcagaggtatcaatgccatgcacccaaagaccaagaagatcttgcagctgttgcgtttgagacagatattcaatggagtgttcctgaaggttaacaaggccaccatcaacatgctccgcagggtcgagccatatgttgc

SEQ ID NO: 15147 - protein, 157 aa, Zea mays subsp. mays
  peptide (1)..(157): Ceres Seq. ID no. 4776512
  misc_feature (105)..(156): Pfam Name: Ribosomal protein L30p/L7e Pfam Description: Ribosomal protein L30p/L7e
  misc_feature (22)..(156): Homolog of NCBI NO: 38346542 NR Description: OSJNBa0035M09.3 [Oryza sativa (japonica
  misc_feature (22)..(156): Homolog of NCBI NO: 38637548 NR Description: putative 60S ribosomal protein L7 [Oryza sativa
  misc_feature (27)..(156): Homolog of NCBI NO: 15226212 NR Description: putative ribosomal protein L7; protein id: supported by cDNA: 13298., supported by cDNA: gi_13877566, by cDNA: gi_15028382, supported by cDNA: gi_19310656, supported
  misc_feature (20)..(156): Homolog of NCBI NO: 30689623 NR Description: 60S ribosomal protein L7 (RPL7C) [Arabidopsis >gi|6174958|sp|Q42208|RL7_ARATH 60S ribosomal protein L7
  misc_feature (29)..(156): Homolog of NCBI NO: 445613 NR Description: ribosomal protein L7
  misc_feature (22)..(156): Homolog of NCBI NO: 15231288 NR Description: ribosomal protein, putative; protein id: supported by cDNA: gi_14532551, supported by cDNA: gi_15810195, by cDNA: gi_18655394 [Arabidopsis thaliana]
  misc_feature (27)..(156): Homolog of NCBI NO: 27311547 NR Description: Unknown protein [Arabidopsis thaliana]
  misc_feature (27)..(156): Homolog of NCBI NO: 30689617 NR Description: 60S ribosomal protein L7 (RPL7C) [Arabidopsis >gi|15450713|gb|AAK96628.1| At2g44120/F6E13.25 [Arabidopsis >gi|17386142|gb|AAL38617.1|AF446884_1 At2g44120/F6E13.25
  misc_feature (31)..(156): Homolog of NCBI NO: 28630259 NR Description: ribosomal protein L7 [Branchiostoma lanceolatum]
  misc_feature (21)..(156): Homolog of NCBI NO: 22758864 NR Description: ribosomal protein L7 [Argopecten irradians]
ASISLSLSLAPPPPPCRKLVGMSSEAAKVVVPESVLLKRKREELWAAEKKTKAVEEKKKSSENVKVIYARAKQYAEEYDAQDKELVQLKREARMKGGFYVSPEAKLLFVVRIRGINAMHPKTKKILQLLRLRQIFNGVFLKVNKATINMLRRVEPYV

SEQ ID NO: 15148 - protein, 136 aa, Zea mays subsp. mays
  peptide (1)..(136): Ceres Seq. ID no. 4776513
  misc_feature (84)..(135): Pfam Name: Ribosomal protein L30p/L7e Pfam Description: Ribosomal protein L30p/L7e
  misc_feature (1)..(135): Homolog of NCBI NO: 38346542 NR Description: OSJNBa0035M09.3 [Oryza sativa (japonica
  misc_feature (1)..(135): Homolog of NCBI NO: 38637548 NR Description: putative 60S ribosomal protein L7 [Oryza sativa
  misc_feature (6)..(135): Homolog of NCBI NO: 15226212 NR Description: putative ribosomal protein L7; protein id: supported by cDNA: 13298., supported by cDNA: gi_13877566, by cDNA: gi_15028382, supported by cDNA: gi_19310656, supported
  misc_feature (1)..(135): Homolog of NCBI NO: 30689623 NR Description: 60S ribosomal protein L7 (RPL7C) [Arabidopsis >gi|6174958|sp|Q42208|RL7_ARATH 60S ribosomal protein L7
  misc_feature (8)..(135): Homolog of NCBI NO: 445613 NR Description: ribosomal protein L7
  misc_feature (1)..(135): Homolog of NCBI NO: 15231288 NR Description: ribosomal protein, putative; protein id: supported by cDNA: gi_14532551, supported by cDNA: gi_15810195, by cDNA: gi_18655394 [Arabidopsis thaliana]
  misc_feature (6)..(135): Homolog of NCBI NO: 27311547 NR Description: Unknown protein [Arabidopsis thaliana]
  misc_feature (6)..(135): Homolog of NCBI NO: 30689617 NR Description: 60S ribosomal protein L7 (RPL7C) [Arabidopsis >gi|15450713|gb|AAK96628.1| At2g44120/F6E13.25 [Arabidopsis >gi|17386142|gb|AAL38617.1|AF446884_1 At2g44120/F6E13.25
  misc_feature (10)..(135): Homolog of NCBI NO: 28630259 NR Description: ribosomal protein L7 [Branchiostoma lanceolatum]
  misc_feature (1)..(135): Homolog of NCBI NO: 22758864 NR Description: ribosomal protein L7 [Argopecten irradians]
MSSEAAKVVVPESVLLKRKREELWAAEKKTKAVEEKKKSSENVKVIYARAKQYAEEYDAQDKELVQLKREARMKGGFYVSPEAKLLFVVRIRGINAMHPKTKKILQLLRLRQIFNGVFLKVNKATINMLRRVEPYV

SEQ ID NO: 15149 - protein, 93 aa, Zea mays subsp. mays
  peptide (1)..(93): Ceres Seq. ID no. 4776514
PPSLSPSLSRLLLPPAGSSSGCRPRRRRWWCRSRCSSRGSGRSSGPPRRRPRPSRRRRSPARTSRSSTPAPSSTPRSTMPRTRSWFSLSVRPG

SEQ ID NO: 15150 - DNA, 481 bp, Zea mays subsp. mays
  misc_feature (1)..(481): Ceres Seq. ID no. 13587099
  misc_feature: MA Experiment ID: 108543 Result: Up-regulated in Transcription
accgcggcagtcgcctcccctcctacaaataacccccgaccctccacgaggacgggagtaccttctgcagcaagtagtgaccaggagcgagcagccaaggaaaggagtcaagcaatggagaaggccgtcgacaggcagcgggtcctgctgcggcacctgaaccccgccgcggcggccagccccgccccgcacgccatctccgcaagcgcgtgcgcggcgggggacagcgcggcgtaccaccggaggccggccttcgccgacgacgtcgtcatcgtcgctgcttacaggacggcaatttgcaaggccaagagagggggttnnnnggatacctttgctgaggacctcttggttcctgtcttcaaggctttggtagacaagacgaagctggacccaagtgaagttggcgacattgttgttggtactggcttagctcctggttcccagagggcaatcaaatgcagaatggctgcactgtatgctg

SEQ ID NO: 15151 - protein, 160 aa, Zea mays subsp. mays
  peptide (1)..(160): Ceres Seq. ID no. 13587100
  misc_feature (86)..(159): Pfam Name: Thiolase, N-terminal domain Pfam Description: Thiolase, N-terminal domain
  misc_feature (39)..(159): Homolog of NCBI NO: 37535022 NR Description: putative thiolase [Oryza sativa (japonica
  misc_feature (39)..(159): Homolog of NCBI NO: 393707 NR Description: 3-ketoacyl-CoA thiolase; acetyl-CoA
  misc_feature (39)..(159): Homolog of NCBI NO: 1129145 NR Description: 3-ketoacyl-CoA thiolase B; acetyl-CoA
  misc_feature (39)..(159): Homolog of NCBI NO: 7433645 NR Description: acetyl-CoA C-acyltransferase (EC 2.3.1.16) B
  misc_feature (39)..(159): Homolog of NCBI NO: 29367431 NR Description: 3-ketoacyl-CoA thiolase-like protein [Oryza
  misc_feature (39)..(159): Homolog of NCBI NO: 7433647 NR Description: acetyl-CoA C-acyltransferase (EC 2.3.1.16)
  misc_feature (39)..(159): Homolog of NCBI NO: 15225798 NR Description: acetyl-CoA C-acyltransferase (3-ketoacyl-CoA
  misc_feature (39)..(159): Homolog of NCBI NO: 16648799 NR Description: At2g33150/F25I18.11 [Arabidopsis thaliana]
  misc_feature (39)..(159): Homolog of NCBI NO: 421810 NR Description: acetyl-CoA C-acyltransferase (EC 2.3.1.16)
  misc_feature (39)..(159): Homolog of NCBI NO: 7433644 NR Description: acetyl-CoA C-acyltransferase (EC 2.3.1.16)
  misc_feature (107)..(107): Xaa is any aa, unknown or other
  misc_feature (108)..(108): Xaa is any aa, unknown or other
TAAVASPPTNNPRPSTRTGVPSAASSDQERAAKERSQAMEKAVDRQRVLLRHLNPAAAASPAPHAISASACAAGDSAAYHRRPAFADDVVIVAAYRTAICKAKRGGXXDTFAEDLLVPVFKALVDKTKLDPSEVGDIVVGTGLAPGSQRAIKCRMAALYA

SEQ ID NO: 15152 - protein, 122 aa, Zea mays subsp. mays
  peptide (1)..(122): Ceres Seq. ID no. 13587101
  misc_feature (48)..(121): Pfam Name: Thiolase, N-terminal domain Pfam Description: Thiolase, N-terminal domain
  misc_feature (1)..(121): Homolog of NCBI NO: 37535022 NR Description: putative thiolase [Oryza sativa (japonica
  misc_feature (1)..(121): Homolog of NCBI NO: 393707 NR Description: 3-ketoacyl-CoA thiolase; acetyl-CoA
  misc_feature (1)..(121): Homolog of NCBI NO: 1129145 NR Description: 3-ketoacyl-CoA thiolase B; acetyl-CoA
  misc_feature (1)..(121): Homolog of NCBI NO: 7433645 NR Description: acetyl-CoA C-acyltransferase (EC 2.3.1.16) B
  misc_feature (1)..(121): Homolog of NCBI NO: 29367431 NR Description: 3-ketoacyl-CoA thiolase-like protein [Oryza
  misc_feature (1)..(121): Homolog of NCBI NO: 7433647 NR Description: acetyl-CoA C-acyltransferase (EC 2.3.1.16)
  misc_feature (1)..(121): Homolog of NCBI NO: 15225798 NR Description: acetyl-CoA C-acyltransferase (3-ketoacyl-CoA
  misc_feature (1)..(121): Homolog of NCBI NO: 16648799 NR Description: At2g33150/F25I18.11 [Arabidopsis thaliana]
  misc_feature (1)..(121): Homolog of NCBI NO: 421810 NR Description: acetyl-CoA C-acyltransferase (EC 2.3.1.16)
  misc_feature (1)..(121): Homolog of NCBI NO: 7433644 NR Description: acetyl-CoA C-acyltransferase (EC 2.3.1.16)
  misc_feature (69)..(69): Xaa is any aa, unknown or other
  misc_feature (70)..(70): Xaa is any aa, unknown or other
MEKAVDRQRVLLRHLNPAAAASPAPHAISASACAAGDSAAYHRRPAFADDVVIVAAYRTAICKAKRGGXXDTFAEDLLVPVFKALVDKTKLDPSEVGDIVVGTGLAPGSQRAIKCRMAALYA

SEQ ID NO: 15153 - DNA, 2512 bp, Zea mays subsp. mays; identical to SEQ ID NO: 1286
  misc_feature (1)..(2512): Ceres Seq. ID no. 13623192
  misc_feature: MA Experiment ID: 108527 Result: Up-regulated in Transcription
  misc_feature: MA Experiment 108527 PARAMETER Experiment Name: Zm_5mM_NO_P Parameter: Age (day) Value: 8
  misc_feature: MA Experiment 108527 PARAMETER Experiment Name: Zm_5mM_NO_P Parameter: Organism Value: Zea mays
  misc_feature: MA Experiment 108527 PARAMETER Experiment Name: Zm_5mM_NO_P Parameter: Plant Line Value: 35A19
  misc_feature: MA Experiment 108527 PARAMETER Experiment Name: Zm_5mM_NO_P Parameter: Timepoint (hr) Value: 6
  misc_feature: MA Experiment 108527 PARAMETER Experiment Name: Zm_5mM_NO_P Parameter: Tissue Value: Aerial
  misc_feature: MA Experiment 108527 PARAMETER Experiment Name: Zm_5mM_NO_P Parameter: Treatment Value: 5mM NO vs. No Treatment
  misc_feature: MA Experiment ID: 108535 Result: Up-regulated in Transcription
  misc_feature: MA Experiment 108535 PARAMETER Experiment Name: Zm_Meristem_P Parameter: Age (day) Value: 8
  misc_feature: MA Experiment 108535 PARAMETER Experiment Name: Zm_Meristem_P Parameter: Organism Value: Zea mays
  misc_feature: MA Experiment 108535 PARAMETER Experiment Name: Zm_Meristem_P Parameter: Plant Line Value: 35A19
  misc_feature: MA Experiment 108535 PARAMETER Experiment Name: Zm_Meristem_P Parameter: Tissue Value: Root Meristem vs. Above Root Meristem
  misc_feature: MA Experiment ID: 108559 Result: Up-regulated in Transcription
  misc_feature: MA Experiment 108559 PARAMETER Experiment Name: Zm_5mM_NO_P Parameter: Age (day) Value: 8
  misc_feature: MA Experiment 108559 PARAMETER Experiment Name: Zm_5mM_NO_P Parameter: Organism Value: Zea mays
  misc_feature: MA Experiment 108559 PARAMETER Experiment Name: Zm_5mM_NO_P Parameter: Plant Line Value: 35A19
  misc_feature: MA Experiment 108559 PARAMETER Experiment Name: Zm_5mM_NO_P Parameter: Timepoint (hr) Value: 12
  misc_feature: MA Experiment 108559 PARAMETER Experiment Name: Zm_5mM_NO_P Parameter: Tissue Value: Aerial
  misc_feature: MA Experiment 108559 PARAMETER Experiment Name: Zm_5mM_NO_P Parameter: Treatment Value: 5mM NO vs. No Treatment
  misc_feature: MA Experiment ID: 20000478 Result: Up-regulated in Transcription
  misc_feature: MA Experiment 20000478 PARAMETER Experiment Name: Zm_5mM_SA_P Parameter: Age (day) Value: 11
  misc_feature: MA Experiment 20000478 PARAMETER Experiment Name: Zm_5mM_SA_P Parameter: Organism Value: Zea mays
  misc_feature: MA Experiment 20000478 PARAMETER Experiment Name: Zm_5mM_SA_P Parameter: Plant Line Value: 35A19
  misc_feature: MA Experiment 20000478 PARAMETER Experiment Name: Zm_5mM_SA_P Parameter: Timepoint (hr) Value: 72
  misc_feature: MA Experiment 20000478 PARAMETER Experiment Name: Zm_5mM_SA_P Parameter: Tissue Value: Aerial
  misc_feature: MA Experiment 20000478 PARAMETER Experiment Name: Zm_5mM_SA_P Parameter: Treatment Value: 5mM SA vs. No Treatment
  misc_feature: MA Experiment ID: 20000479 Result: Up-regulated in Transcription
  misc_feature: MA Experiment 20000479 PARAMETER Experiment Name: Zm_Drought_P Parameter: Age (day) Value: 10
  misc_feature: MA Experiment 20000479 PARAMETER Experiment Name: Zm_Drought_P Parameter: Organism Value: Zea mays
  misc_feature: MA Experiment 20000479 PARAMETER Experiment Name: Zm_Drought_P Parameter: Plant Line Value: 35A19
  misc_feature: MA Experiment 20000479 PARAMETER Experiment Name: Zm_Drought_P Parameter: Timepoint (hr) Value: 48
  misc_feature: MA Experiment 20000479 PARAMETER Experiment Name: Zm_Drought_P Parameter: Tissue Value: Aerial
  misc_feature: MA Experiment 20000479 PARAMETER Experiment Name: Zm_Drought_P Parameter: Treatment Value: Drought vs. No Drought
  misc_feature: MA Experiment ID: 20000480 Result: Up-regulated in Transcription
  misc_feature: MA Experiment 20000480 PARAMETER Experiment Name: Zm_Drought_P Parameter: Age (day) Value: 11
  misc_feature: MA Experiment 20000480 PARAMETER Experiment Name: Zm_Drought_P Parameter: Organism Value: Zea mays
  misc_feature: MA Experiment 20000480 PARAMETER Experiment Name: Zm_Drought_P Parameter: Plant Line Value: 35A19
  misc_feature: MA Experiment 20000480 PARAMETER Experiment Name: Zm_Drought_P Parameter: Timepoint (hr) Value: 72
  misc_feature: MA Experiment 20000480 PARAMETER Experiment Name: Zm_Drought_P Parameter: Tissue Value: Aerial
  misc_feature: MA Experiment 20000480 PARAMETER Experiment Name: Zm_Drought_P Parameter: Treatment Value: Drought vs. No Drought

SEQ ID NO: 15154 - protein, 471 aa, Zea mays subsp. mays; identical to SEQ ID NO: 1287
  peptide (1)..(471): Ceres Seq. ID no. 13623193
  misc_feature (1)..(161): Pfam Name: ABC transporter Pfam Description: ABC transporter
  misc_feature (1)..(161): Pfam Name: ABC transporter Pfam Description: ABC transporter
  misc_feature (1)..(466): Homolog of NCBI NO: 10947137 NR Description: ATP-binding cassette, sub-family F, member 2 b; ABC- type transport protein; Iron inhibited ABC transporter 2
  misc_feature (1)..(466): Homolog of NCBI NO: 10179834 NR Description: iron inhibited ABC transporter 2 [Homo sapiens]
  misc_feature (1)..(471): Homolog of NCBI NO: 28071305 NR Description: putative ABC transporter [Oryza sativa (japonica
  misc_feature (1)..(422): Homolog of NCBI NO: 7573600 NR Description: ABC transporter homolog [Populus nigra]
  misc_feature (1)..(466): Homolog of NCBI NO: 27707592 NR Description: similar to ATP-binding cassette, sub-family F,
  misc_feature (1)..(466): Homolog of NCBI NO: 10947137 NR Description: ATP-binding cassette, sub-family F, member 2 b; ABC- type transport protein; Iron inhibited ABC transporter 2
  misc_feature (1)..(466): Homolog of NCBI NO: 27881506 NR Description: ATP-binding cassette, sub-family F, member 2 a; ABC- type transport protein; Iron inhibited ABC transporter 2
  misc_feature (1)..(466): Homolog of NCBI NO: 3005931 NR Description: ABC transporter [Homo sapiens]
  misc_feature (1)..(466): Homolog of NCBI NO: 27707592 NR Description: similar to ATP-binding cassette, sub-family F,
  misc_feature (1)..(468): Homolog of NCBI NO: 28436765 NR Description: Similar to ATP-binding cassette, sub-family F
  misc_feature (1)..(422): Homolog of NCBI NO: 7573600 NR Description: ABC transporter homolog [Populus nigra]
  misc_feature (1)..(471): Homolog of NCBI NO: 15239436 NR Description: ABC transporter family protein [Arabidopsis >gi|10176907|dbj|BAB10100.1| ABC transporter [Arabidopsis
  misc_feature (1)..(471): Homolog of NCBI NO: 28071305 NR Description: putative ABC transporter [Oryza sativa (japonica
  misc_feature (1)..(466): Homolog of NCBI NO: 23956078 NR Description: ATP-binding cassette, sub-family F (GCN20),
  misc_feature (1)..(466): Homolog of NCBI NO: 10179834 NR Description: iron inhibited ABC transporter 2 [Homo sapiens]
  misc_feature (1)..(466): Homolog of NCBI NO: 3005931 NR Description: ABC transporter [Homo sapiens]
  misc_feature (1)..(468): Homolog of NCBI NO: 28436765 NR Description: Similar to ATP-binding cassette, sub-family F
  misc_feature (1)..(471): Homolog of NCBI NO: 15239436 NR Description: ABC transporter family protein [Arabidopsis >gi|10176907|dbj|BAB10100.1| ABC transporter [Arabidopsis
  misc_feature (1)..(466): Homolog of NCBI NO: 27881506 NR Description: ATP-binding cassette, sub-family F, member 2 a; ABC- type transport protein; Iron inhibited ABC transporter 2
  misc_feature (1)..(466): Homolog of NCBI NO: 23956078 NR Description: ATP-binding cassette, sub-family F (GCN20),

SEQ ID NO: 15155 - protein, 457 aa, Zea mays subsp. mays; identical to SEQ ID NO: 1288
  peptide (1)..(457): Ceres Seq. ID no. 13623194
  misc_feature (1)..(147): Pfam Name: ABC transporter Pfam Description: ABC transporter
  misc_feature (1)..(147): Pfam Name: ABC transporter Pfam Description: ABC transporter
  misc_feature (1)..(457): Homolog of NCBI NO: 28071305 NR Description: putative ABC transporter [Oryza sativa (japonica
  misc_feature (1)..(457): Homolog of NCBI NO: 15239436 NR Description: ABC transporter family protein [Arabidopsis >gi|10176907|dbj|BAB10100.1| ABC transporter [Arabidopsis
  misc_feature (1)..(408): Homolog of NCBI NO: 7573600 NR Description: ABC transporter homolog [Populus nigra]
  misc_feature (1)..(454): Homolog of NCBI NO: 28436765 NR Description: Similar to ATP-binding cassette, sub-family F
  misc_feature (1)..(452): Homolog of NCBI NO: 27707592 NR Description: similar to ATP-binding cassette, sub-family F,
  misc_feature (1)..(457): Homolog of NCBI NO: 15239436 NR Description: ABC transporter family protein [Arabidopsis >gi|10176907|dbj|BAB10100.1| ABC transporter [Arabidopsis
  misc_feature (1)..(454): Homolog of NCBI NO: 28436765 NR Description: Similar to ATP-binding cassette, sub-family F
  misc_feature (1)..(452): Homolog of NCBI NO: 23956078 NR Description: ATP-binding cassette, sub-family F (GCN20),
  misc_feature (1)..(452): Homolog of NCBI NO: 10179834 NR Description: iron inhibited ABC transporter 2 [Homo sapiens]
  misc_feature (1)..(452): Homolog of NCBI NO: 27881506 NR Description: ATP-binding cassette, sub-family F, member 2 a; ABC- type transport protein; Iron inhibited ABC transporter 2
  misc_feature (1)..(452): Homolog of NCBI NO: 10947137 NR Description: ATP-binding cassette, sub-family F, member 2 b; ABC- type transport protein; Iron inhibited ABC transporter 2
  misc_feature (1)..(452): Homolog of NCBI NO: 3005931 NR Description: ABC transporter [Homo sapiens]
  misc_feature (1)..(452): Homolog of NCBI NO: 27707592 NR Description: similar to ATP-binding cassette, sub-family F,
  misc_feature (1)..(408): Homolog of NCBI NO: 7573600 NR Description: ABC transporter homolog [Populus nigra]
  misc_feature (1)..(457): Homolog of NCBI NO: 28071305 NR Description: putative ABC transporter [Oryza sativa (japonica
  misc_feature (1)..(452): Homolog of NCBI NO: 3005931 NR Description: ABC transporter [Homo sapiens]
  misc_feature (1)..(452): Homolog of NCBI NO: 10947137 NR Description: ATP-binding cassette, sub-family F, member 2 b; ABC- type transport protein; Iron inhibited ABC transporter 2
  misc_feature (1)..(452): Homolog of NCBI NO: 27881506 NR Description: ATP-binding cassette, sub-family F, member 2 a; ABC- type transport protein; Iron inhibited ABC transporter 2
  misc_feature (1)..(452): Homolog of NCBI NO: 10179834 NR Description: iron inhibited ABC transporter 2 [Homo sapiens]
  misc_feature (1)..(452): Homolog of NCBI NO: 23956078 NR Description: ATP-binding cassette, sub-family F (GCN20),

SEQ ID NO: 15156 - protein, 413 aa, Zea mays subsp. mays; identical to SEQ ID NO: 1289
  peptide (1)..(413): Ceres Seq. ID no. 13623195
  misc_feature (1)..(103): Pfam Name: ABC transporter Pfam Description: ABC transporter
  misc_feature (1)..(103): Pfam Name: ABC transporter Pfam Description: ABC transporter
  misc_feature (1)..(413): Homolog of NCBI NO: 15239436 NR Description: ABC transporter family protein [Arabidopsis >gi|10176907|dbj|BAB10100.1| ABC transporter [Arabidopsis
  misc_feature (1)..(364): Homolog of NCBI NO: 7573600 NR Description: ABC transporter homolog [Populus nigra]
  misc_feature (1)..(410): Homolog of NCBI NO: 28436765 NR Description: Similar to ATP-binding cassette, sub-family F
  misc_feature (1)..(408): Homolog of NCBI NO: 27707592 NR Description: similar to ATP-binding cassette, sub-family F,
  misc_feature (1)..(408): Homolog of NCBI NO: 3005931 NR Description: ABC transporter [Homo sapiens]
  misc_feature (1)..(413): Homolog of NCBI NO: 15239436 NR Description: ABC transporter family protein [Arabidopsis >gi|10176907|dbj|BAB10100.1| ABC transporter [Arabidopsis
  misc_feature (1)..(410): Homolog of NCBI NO: 28436765 NR Description: Similar to ATP-binding cassette, sub-family F
  misc_feature (1)..(408): Homolog of NCBI NO: 3005931 NR Description: ABC transporter [Homo sapiens]
  misc_feature (1)..(413): Homolog of NCBI NO: 28071305 NR Description: putative ABC transporter [Oryza sativa (japonica
  misc_feature (1)..(408): Homolog of NCBI NO: 23956078 NR Description: ATP-binding cassette, sub-family F (GCN20),
  misc_feature (1)..(408): Homolog of NCBI NO: 10947137 NR Description: ATP-binding cassette, sub-family F, member 2 b; ABC- type transport protein; Iron inhibited ABC transporter 2
  misc_feature (1)..(408): Homolog of NCBI NO: 27881506 NR Description: ATP-binding cassette, sub-family F, member 2 a; ABC- type transport protein; Iron inhibited ABC transporter 2
  misc_feature (1)..(408): Homolog of NCBI NO: 10179834 NR Description: iron inhibited ABC transporter 2 [Homo sapiens]
  misc_feature (1)..(408): Homolog of NCBI NO: 27707592 NR Description: similar to ATP-binding cassette, sub-family F,
  misc_feature (1)..(364): Homolog of NCBI NO: 7573600 NR Description: ABC transporter homolog [Populus nigra]
  misc_feature (1)..(413): Homolog of NCBI NO: 28071305 NR Description: putative ABC transporter [Oryza sativa (japonica
  misc_feature (1)..(408): Homolog of NCBI NO: 10179834 NR Description: iron inhibited ABC transporter 2 [Homo sapiens]
  misc_feature (1)..(408): Homolog of NCBI NO: 27881506 NR Description: ATP-binding cassette, sub-family F, member 2 a; ABC- type transport protein; Iron inhibited ABC transporter 2
  misc_feature (1)..(408): Homolog of NCBI NO: 10947137 NR Description: ATP-binding cassette, sub-family F, member 2 b; ABC- type transport protein; Iron inhibited ABC transporter 2
  misc_feature (1)..(408): Homolog of NCBI NO: 23956078 NR Description: ATP-binding cassette, sub-family F (GCN20),

SEQ ID NO: 15157 - DNA, 1802 bp, Zea mays subsp. mays
  misc_feature (1)..(1802): Ceres Seq. ID no. 13574390
  misc_feature: MA Experiment ID: 108535 Result: Up-regulated in Transcription
  misc_feature: MA Experiment 108535 PARAMETER Experiment Name: Zm_Meristem_P Parameter: Age (day) Value: 8
  misc_feature: MA Experiment 108535 PARAMETER Experiment Name: Zm_Meristem_P Parameter: Organism Value: Zea mays
  misc_feature: MA Experiment 108535 PARAMETER Experiment Name: Zm_Meristem_P Parameter: Plant Line Value: 35A19
  misc_feature: MA Experiment 108535 PARAMETER Experiment Name: Zm_Meristem_P Parameter: Tissue Value: Root Meristem vs. Above Root Meristem
  misc_feature: MA Experiment ID: 108544 Result: Down-regulated in Transcription
gaaaaaaaggcaaaaaacatttaccttttttctatctgtatattatctgaataaatcaagaggaggaagaggggagggagcgagggagggggaggagtagcaaatccagactccatagcaaccagctcgcgagaaggggaaaagggggaggaagagcttcgcttgtgtattgattgctcgctgctccagtccctgcattcgtgccgtttttggcaagtaggtggcgtggcaagcatggtgccgggctatgactgcgccgcctccgtgctgctgtgcgcggaggacaacgctgctattctcggcctggacgacgatggggaggagtcctcctgggcggccgccgctacgccgccacgtgacaccgtcgccgccgccgccgccaccggggtcgccgtcgatgggattttgacggagttccccttgctctcggatgactgcgttgcgacgctcgtggagaaggaggtggagcacatgcccgcggaggggtacctccagaagctgcagcgacggcatggggacctggatttggccgccgtcaggaaggacgccatcgattggatttggaaggtcattgagcattacaatttcgcaccgttgactgccgttttgtctgtgaactacctcgatagattcctctccacgtatgagttccctgaaggcagagcttggatgactcagctcttggcagtggcttgcttgtctttggcttcgaaaatcgaagagacttttgtgccactccccttggatttgcaggtagcggaggcaaagtttgtttttgagggaaggaccataaaaaggatggagcttctggtgctaagcaccttaaagtggaggatgcatgctgttactgcttgctcatttgttgaatactttcttcataaattgagtgatcatggtgcaccctccttgcttgcacgctctcgctcttcggaccttgtcttgagcaccgctaaaggtgctgaattcgtggtattcagaccctccgagattgctgccagtgttgcacttgctgctatcggcgaatgcaggagttctgtaattgagagagctgctagtagctgcaaatatttggacaaggagagggttttaagatgccatgaaatgattcaagagaagattactgcgggaagcattgtcctaaagtctgctggatcatcaatctcctctgtgccacaaagcccaataggtgtcctggacgctgcagcctgtctgagtcaacaaagcgatgacgctactgtcgggtctcctgcagtatgttaccatagttcttccacaagcaagaggagaaggatcactagacgtctactctaattgtggtacgcttcaggtgtgctcctcaccgctctaggagtttttgattggttcaaacatcttaaatttagtttggccgctggaggattatggtttagtcaagtagttgctgaatggaacaacaaaacacgcacactacttggtccataaagacaagaaaataactggcagcgtcccgcgagccagcgctgcaatccagttcatgcaagaccctagagtccagggggggtgctggtgtaggtagagagggaacaaggcattcacatacgccgtagagatgagagagcctctcgtatgttttgtacttttgctccttcagtttgcaatgaactatataaacaaggattgccttggggcagtgaacatttgtcggatgaaaagaatcaaaaaggatgggggtcggcagaggaatagaacaatttgatatatttccataaactacagatatgtttcctttttcataatgatgagctatcatttttgttgatggt

SEQ ID NO: 15158 - protein, 358 aa, Zea mays subsp. mays
  peptide (1)..(358): Ceres Seq. ID no. 13574391
  misc_feature (67)..(202): Pfam Name: Cyclin, N-terminal domain Pfam Description: Cyclin, N-terminal domain
  misc_feature (1)..(358): Homolog of NCBI NO: 19070611 NR Description: D-type cyclin [Zea mays]
  misc_feature (5)..(355): Homolog of NCBI NO: 18916916 NR Description: cyclin [Oryza sativa (japonica cultivar-group)]
  misc_feature (1)..(337): Homolog of NCBI NO: 19070615 NR Description: D-type cyclin [Zea mays]
  misc_feature (5)..(357): Homolog of NCBI NO: 4160298 NR Description: cyclin D2.1 protein [Nicotiana tabacum]
  misc_feature (8)..(353): Homolog of NCBI NO: 34906810 NR Description: D-type cyclin-like protein [Oryza sativa
  misc_feature (12)..(358): Homolog of NCBI NO: 22091622 NR Description: cyclin D2 [Daucus carota]
  misc_feature (55)..(355): Homolog of NCBI NO: 7484663 NR Description: cyclin D-like protein - red goosefoot
  misc_feature (64)..(348): Homolog of NCBI NO: 1076312 NR Description: cyclin delta-2 - Arabidopsis thaliana
  misc_feature (64)..(348): Homolog of NCBI NO: 15227224 NR Description: cyclin delta-2 (CYCD2) [Arabidopsis thaliana]
  misc_feature (65)..(334): Homolog of NCBI NO: 15238462 NR Description: cyclin, putative [Arabidopsis thaliana]
MVPGYDCAASVLLCAEDNAAILGLDDDGEESSWAAAATPPRDTVAAAAATGVAVDGILTEFPLLSDDCVATLVEKEVEHMPAEGYLQKLQRRHGDLDLAAVRKDAIDWIWKVIEHYNFAPLTAVLSVNYLDRFLSTYEFPEGRAWMTQLLAVACLSLASKIEETFVPLPLDLQVAEAKFVFEGRTIKRMELLVLSTLKWRMHAVTACSFVEYFLHKLSDHGAPSLLARSRSSDLVLSTAKGAEFVVFRPSEIAASVALAAIGECRSSVIERAASSCKYLDKERVLRCHEMIQEKITAGSIVLKSAGSSISSVPQSPIGVLDAAACLSQQSDDATVGSPAVCYHSSSTSKRRRITRRLL

SEQ ID NO: 15159 - protein, 279 aa, Zea mays subsp. mays
  peptide (1)..(279): Ceres Seq. ID no. 13574392
  misc_feature (1)..(123): Pfam Name: Cyclin, N-terminal domain Pfam Description: Cyclin, N-terminal domain
  misc_feature (1)..(279): Homolog of NCBI NO: 19070611 NR Description: D-type cyclin [Zea mays]
  misc_feature (1)..(276): Homolog of NCBI NO: 18916916 NR Description: cyclin [Oryza sativa (japonica cultivar-group)]
  misc_feature (1)..(258): Homolog of NCBI NO: 19070615 NR Description: D-type cyclin [Zea mays]
  misc_feature (1)..(278): Homolog of NCBI NO: 4160298 NR Description: cyclin D2.1 protein [Nicotiana tabacum]
  misc_feature (1)..(274): Homolog of NCBI NO: 34906810 NR Description: D-type cyclin-like protein [Oryza sativa
  misc_feature (1)..(279): Homolog of NCBI NO: 22091622 NR Description: cyclin D2 [Daucus carota]
  misc_feature (1)..(276): Homolog of NCBI NO: 7484663 NR Description: cyclin D-like protein - red goosefoot
  misc_feature (1)..(269): Homolog of NCBI NO: 1076312 NR Description: cyclin delta-2 - Arabidopsis thaliana
  misc_feature (1)..(269): Homolog of NCBI NO: 15227224 NR Description: cyclin delta-2 (CYCD2) [Arabidopsis thaliana]
  misc_feature (1)..(255): Homolog of NCBI NO: 15238462 NR Description: cyclin, putative [Arabidopsis thaliana]
MPAEGYLQKLQRRHGDLDLAAVRKDAIDWIWKVIEHYNFAPLTAVLSVNYLDRFLSTYEFPEGRAWMTQLLAVACLSLASKIEETFVPLPLDLQVAEAKFVFEGRTIKRMELLVLSTLKWRMHAVTACSFVEYFLHKLSDHGAPSLLARSRSSDLVLSTAKGAEFVVFRPSEIAASVALAAIGECRSSVIERAASSCKYLDKERVLRCHEMIQEKITAGSIVLKSAGSSISSVPQSPIGVLDAAACLSQQSDDATVGSPAVCYHSSSTSKRRRITRRLL

SEQ ID NO: 15160 - protein, 213 aa, Zea mays subsp. mays
  peptide (1)..(213): Ceres Seq. ID no. 13574393
  misc_feature (1)..(57): Pfam Name: Cyclin, N-terminal domain Pfam Description: Cyclin, N-terminal domain
  misc_feature (1)..(213): Homolog of NCBI NO: 19070611 NR Description: D-type cyclin [Zea mays]
  misc_feature (1)..(210): Homolog of NCBI NO: 18916916 NR Description: cyclin [Oryza sativa (japonica cultivar-group)]
  misc_feature (1)..(192): Homolog of NCBI NO: 19070615 NR Description: D-type cyclin [Zea mays]
  misc_feature (1)..(212): Homolog of NCBI NO: 4160298 NR Description: cyclin D2.1 protein [Nicotiana tabacum]
  misc_feature (1)..(208): Homolog of NCBI NO: 34906810 NR Description: D-type cyclin-like protein [Oryza sativa
  misc_feature (1)..(213): Homolog of NCBI NO: 22091622 NR Description: cyclin D2 [Daucus carota]
  misc_feature (1)..(210): Homolog of NCBI NO: 7484663 NR Description: cyclin D-like protein - red goosefoot
  misc_feature (1)..(203): Homolog of NCBI NO: 1076312 NR Description: cyclin delta-2 - Arabidopsis thaliana
  misc_feature (1)..(203): Homolog of NCBI NO: 15227224 NR Description: cyclin delta-2 (CYCD2) [Arabidopsis thaliana]
  misc_feature (1)..(189): Homolog of NCBI NO: 15238462 NR Description: cyclin, putative [Arabidopsis thaliana]
MTQLLAVACLSLASKIEETFVPLPLDLQVAEAKFVFEGRTIKRMELLVLSTLKWRMHAVTACSFVEYFLHKLSDHGAPSLLARSRSSDLVLSTAKGAEFVVFRPSEIAASVALAAIGECRSSVIERAASSCKYLDKERVLRCHEMIQEKITAGSIVLKSAGSSISSVPQSPIGVLDAAACLSQQSDDATVGSPAVCYHSSSTSKRRRITRRLL

SEQ ID NO: 15161 - DNA, 1842 bp, Zea mays subsp. mays; identical to SEQ ID NO: 14646
  misc_feature (1)..(1842): Ceres Seq. ID no. 13574386
  misc_feature: MA Experiment ID: 108535 Result: Up-regulated in Transcription
  misc_feature: MA Experiment 108535 PARAMETER Experiment Name: Zm_Meristem_P Parameter: Age (day) Value: 8
  misc_feature: MA Experiment 108535 PARAMETER Experiment Name: Zm_Meristem_P Parameter: Organism Value: Zea mays
  misc_feature: MA Experiment 108535 PARAMETER Experiment Name: Zm_Meristem_P Parameter: Plant Line Value: 35A19
  misc_feature: MA Experiment 108535 PARAMETER Experiment Name: Zm_Meristem_P Parameter: Tissue Value: Root Meristem vs. Above Root Meristem
  misc_feature: MA Experiment ID: 20000492 Result: Up-regulated in Transcription
  misc_feature: MA Experiment 20000492 PARAMETER Experiment Name: Zm_Hybrid_Seed_Dev_P Parameter: DAP Value: 12
  misc_feature: MA Experiment 20000492 PARAMETER Experiment Name: Zm_Hybrid_Seed_Dev_P Parameter: Organism Value: Zea mays
  misc_feature: MA Experiment 20000492 PARAMETER Experiment Name: Zm_Hybrid_Seed_Dev_P Parameter: Plant Line Value: 35A19
  misc_feature: MA Experiment 20000492 PARAMETER Experiment Name: Zm_Hybrid_Seed_Dev_P Parameter: Tissue Value: Fert Kernel vs. Unfert Floret
  misc_feature: MA Experiment ID: 20000535 Result: Up-regulated in Transcription
  misc_feature: MA Experiment 20000535 PARAMETER Experiment Name: Zm_Hybrid_Seed_Dev_P Parameter: DAP Value: 30 vs. 12
  misc_feature: MA Experiment 20000535 PARAMETER Experiment Name: Zm_Hybrid_Seed_Dev_P Parameter: Organism Value: Zea mays
  misc_feature: MA Experiment 20000535 PARAMETER Experiment Name: Zm_Hybrid_Seed_Dev_P Parameter: Plant Line Value: 35A19
  misc_feature: MA Experiment 20000535 PARAMETER Experiment Name: Zm_Hybrid_Seed_Dev_P Parameter: Tissue Value: Embryo vs. Unfert Floret

SEQ ID NO: 15162 - protein, 531 aa, Zea mays subsp. mays; identical to SEQ ID NO: 14647
  peptide (1)..(531): Ceres Seq. ID no. 13574387
  misc_feature (19)..(531): Homolog of NCBI NO: 1709619 NR Description: Protein disulfide isomerase precursor (PDI)
  misc_feature (19)..(531): Homolog of NCBI NO: 13925728 NR Description: protein disulfide isomerase 3 precursor [Triticum
  misc_feature (19)..(531): Homolog of NCBI NO: 13925726 NR Description: protein disulfide isomerase 2 precursor [Triticum
  misc_feature (19)..(531): Homolog of NCBI NO: 12056115 NR Description: protein disulfide isomerase [Triticum turgidum durum] >gi|12056119|emb|CAC21230.1| protein disulfide isomerase
  misc_feature (19)..(531): Homolog of NCBI NO: 1709620 NR Description: Protein disulfide isomerase precursor (PDI)
  misc_feature (19)..(531): Homolog of NCBI NO: 1709617 NR Description: Protein disulfide isomerase precursor (PDI)
  misc_feature (22)..(531): Homolog of NCBI NO: 266743 NR Description: Protein disulfide isomerase precursor (PDI)
  misc_feature (22)..(531): Homolog of NCBI NO: 99992 NR Description: protein disulfide-isomerase (EC 5.3.4.1) - alfalfa (clone B2) >gi|166418|gb|AAA32662.1| putative
  misc_feature (20)..(506): Homolog of NCBI NO: 11133775 NR Description: Protein disulfide isomerase precursor (PDI)
  misc_feature (29)..(506): Homolog of NCBI NO: 11133818 NR Description: Protein disulfide isomerase precursor (PDI)
  misc_feature (19)..(531): Homolog of NCBI NO: 1709619 NR Description: Protein disulfide isomerase precursor (PDI)
  misc_feature (19)..(531): Homolog of NCBI NO: 13925728 NR Description: protein disulfide isomerase 3 precursor [Triticum
  misc_feature (19)..(531): Homolog of NCBI NO: 13925726 NR Description: protein disulfide isomerase 2 precursor [Triticum
  misc_feature (19)..(531): Homolog of NCBI NO: 12056115 NR Description: protein disulfide isomerase [Triticum turgidum durum] >gi|12056119|emb|CAC21230.1| protein disulfide isomerase
  misc_feature (19)..(531): Homolog of NCBI NO: 1709620 NR Description: Protein disulfide isomerase precursor (PDI)
  misc_feature (19)..(531): Homolog of NCBI NO: 1709617 NR Description: Protein disulfide isomerase precursor (PDI)
  misc_feature (22)..(531): Homolog of NCBI NO: 266743 NR Description: Protein disulfide isomerase precursor (PDI)
  misc_feature (22)..(531): Homolog of NCBI NO: 99992 NR Description: protein disulfide-isomerase (EC 5.3.4.1) - alfalfa (clone B2) >gi|166418|gb|AAA32662.1| putative
  misc_feature (20)..(506): Homolog of NCBI NO: 11133775 NR Description: Protein disulfide isomerase precursor (PDI)
  misc_feature (29)..(506): Homolog of NCBI NO: 11133818 NR Description: Protein disulfide isomerase precursor (PDI)

SEQ ID NO: 15163 - protein, 513 aa, Zea mays subsp. mays; identical to SEQ ID NO: 14648
  peptide (1)..(513): Ceres Seq. ID no. 13574388
  misc_feature (1)..(513): Homolog of NCBI NO: 1709619 NR Description: Protein disulfide isomerase precursor (PDI)
  misc_feature (1)..(513): Homolog of NCBI NO: 13925728 NR Description: protein disulfide isomerase 3 precursor [Triticum
  misc_feature (1)..(513): Homolog of NCBI NO: 13925726 NR Description: protein disulfide isomerase 2 precursor [Triticum
  misc_feature (1)..(513): Homolog of NCBI NO: 12056115 NR Description: protein disulfide isomerase [Triticum turgidum durum] >gi|12056119|emb|CAC21230.1| protein disulfide isomerase
  misc_feature (1)..(513): Homolog of NCBI NO: 1709620 NR Description: Protein disulfide isomerase precursor (PDI)
  misc_feature (1)..(513): Homolog of NCBI NO: 1709617 NR Description: Protein disulfide isomerase precursor (PDI)
  misc_feature (4)..(513): Homolog of NCBI NO: 266743 NR Description: Protein disulfide isomerase precursor (PDI)
  misc_feature (4)..(513): Homolog of NCBI NO: 99992 NR Description: protein disulfide-isomerase (EC 5.3.4.1) - alfalfa (clone B2) >gi|166418|gb|AAA32662.1| putative
  misc_feature (2)..(488): Homolog of NCBI NO: 11133775 NR Description: Protein disulfide isomerase precursor (PDI)
  misc_feature (11)..(488): Homolog of NCBI NO: 11133818 NR Description: Protein disulfide isomerase precursor (PDI)
  misc_feature (1)..(513): Homolog of NCBI NO: 1709619 NR Description: Protein disulfide isomerase precursor (PDI)
  misc_feature (1)..(513): Homolog of NCBI NO: 13925728 NR Description: protein disulfide isomerase 3 precursor [Triticum
  misc_feature (1)..(513): Homolog of NCBI NO: 13925726 NR Description: protein disulfide isomerase 2 precursor [Triticum
  misc_feature (1)..(513): Homolog of NCBI NO: 12056115 NR Description: protein disulfide isomerase [Triticum turgidum durum] >gi|12056119|emb|CAC21230.1| protein disulfide isomerase
  misc_feature (1)..(513): Homolog of NCBI NO: 1709620 NR Description: Protein disulfide isomerase precursor (PDI)
  misc_feature (1)..(513): Homolog of NCBI NO: 1709617 NR Description: Protein disulfide isomerase precursor (PDI)
  misc_feature (4)..(513): Homolog of NCBI NO: 266743 NR Description: Protein disulfide isomerase precursor (PDI)
  misc_feature (4)..(513): Homolog of NCBI NO: 99992 NR Description: protein disulfide-isomerase (EC 5.3.4.1) - alfalfa (clone B2) >gi|166418|gb|AAA32662.1| putative
  misc_feature (2)..(488): Homolog of NCBI NO: 11133775 NR Description: Protein disulfide isomerase precursor (PDI)
  misc_feature (11)..(488): Homolog of NCBI NO: 11133818 NR Description: Protein disulfide isomerase precursor (PDI)

SEQ ID NO: 15164 - protein, 460 aa, Zea mays subsp. mays; identical to SEQ ID NO: 14649
  peptide (1)..(460): Ceres Seq. ID no. 13574389
  misc_feature (1)..(460): Homolog of NCBI NO: 1709619 NR Description: Protein disulfide isomerase precursor (PDI)
  misc_feature (1)..(460): Homolog of NCBI NO: 13925728 NR Description: protein disulfide isomerase 3 precursor [Triticum
  misc_feature (1)..(460): Homolog of NCBI NO: 13925726 NR Description: protein disulfide isomerase 2 precursor [Triticum
  misc_feature (1)..(460): Homolog of NCBI NO: 12056115 NR Description: protein disulfide isomerase [Triticum turgidum durum] >gi|12056119|emb|CAC21230.1| protein disulfide isomerase
  misc_feature (1)..(460): Homolog of NCBI NO: 1709620 NR Description: Protein disulfide isomerase precursor (PDI)
  misc_feature (1)..(460): Homolog of NCBI NO: 1709617 NR Description: Protein disulfide isomerase precursor (PDI)
  misc_feature (1)..(460): Homolog of NCBI NO: 266743 NR Description: Protein disulfide isomerase precursor (PDI)
  misc_feature (1)..(460): Homolog of NCBI NO: 99992 NR Description: protein disulfide-isomerase (EC 5.3.4.1) - alfalfa (clone B2) >gi|166418|gb|AAA32662.1| putative
  misc_feature (1)..(435): Homolog of NCBI NO: 11133775 NR Description: Protein disulfide isomerase precursor (PDI)
  misc_feature (1)..(435): Homolog of NCBI NO: 11133818 NR Description: Protein disulfide isomerase precursor (PDI)
  misc_feature (1)..(460): Homolog of NCBI NO: 1709619 NR Description: Protein disulfide isomerase precursor (PDI)
  misc_feature (1)..(460): Homolog of NCBI NO: 13925728 NR Description: protein disulfide isomerase 3 precursor [Triticum
  misc_feature (1)..(460): Homolog of NCBI NO: 13925726 NR Description: protein disulfide isomerase 2 precursor [Triticum
  misc_feature (1)..(460): Homolog of NCBI NO: 12056115 NR Description: protein disulfide isomerase [Triticum turgidum durum] >gi|12056119|emb|CAC21230.1| protein disulfide isomerase
  misc_feature (1)..(460): Homolog of NCBI NO: 1709620 NR Description: Protein disulfide isomerase precursor (PDI)
  misc_feature (1)..(460): Homolog of NCBI NO: 1709617 NR Description: Protein disulfide isomerase precursor (PDI)
  misc_feature (1)..(460): Homolog of NCBI NO: 266743 NR Description: Protein disulfide isomerase precursor (PDI)
  misc_feature (1)..(460): Homolog of NCBI NO: 99992 NR Description: protein disulfide-isomerase (EC 5.3.4.1) - alfalfa (clone B2) >gi|166418|gb|AAA32662.1| putative
  misc_feature (1)..(435): Homolog of NCBI NO: 11133775 NR Description: Protein disulfide isomerase precursor (PDI)
  misc_feature (1)..(435): Homolog of NCBI NO: 11133818 NR Description: Protein disulfide isomerase precursor (PDI)

SEQ ID NO: 15165 - DNA, 2498 bp, Zea mays subsp. mays
  misc_feature (1)..(2498): Ceres Seq. ID no. 13574538
  misc_feature: MA Experiment ID: 108527 Result: Down-regulated in Transcription
  misc_feature: MA Experiment 108527 PARAMETER Experiment Name: Zm_5mM_NO_P Parameter: Age (day) Value: 8
  misc_feature: MA Experiment 108527 PARAMETER Experiment Name: Zm_5mM_NO_P Parameter: Organism Value: Zea mays
  misc_feature: MA Experiment 108527 PARAMETER Experiment Name: Zm_5mM_NO_P Parameter: Plant Line Value: 35A19
  misc_feature: MA Experiment 108527 PARAMETER Experiment Name: Zm_5mM_NO_P Parameter: Timepoint (hr) Value: 6
  misc_feature: MA Experiment 108527 PARAMETER Experiment Name: Zm_5mM_NO_P Parameter: Tissue Value: Aerial
  misc_feature: MA Experiment 108527 PARAMETER Experiment Name: Zm_5mM_NO_P Parameter: Treatment Value: 5mM NO vs. No Treatment
agactggtgagagcaagaggatggatcaggagcttgagccccaggaggggagcagtttgagcggatgcccaccaggaacaatgtttcctagatcacgatgtttgggccacttttggaagaggtcagggatgacatgttttcaagcttggaggacatcaccaacgcaacatatgcagatctgctctctattaattcaatgaggaaaggaaaggggtcatagaaattagtcttggcagatggaggggaacgtctcaatgactgaggcacatttttactaaattatccctaaaacatttgtattttttaaaataacatgtaatcttgttgatctggtttacttaagctgcatcgagtttgtacttggagaagaatcctggagttattttacttgtttccttgatttgtagagacatgccagtgaggagcagtttagtcggyycyyscyttatgaagtggnngcaattagaaagacgtacgagcgggccaacatctcgcggtggctcgccttgggcaatcggacctgcccgaccacgatgcaggagctctaggacgacgccctcacccccaacgccactctccgacaactcatcgccgcctggttctcccgcctggttctgcattttgttttcttatctgtcaatcatgtttttccatattactgcaggtgggtctgattaattatttaaatgtagtttatcttagatattgtttgaacgtatgggatgttggaggacagaagacaatcatgtcttactggagaaattactttgagcagactaatgggttagtttggtttgctgatagttcagacataaggaggcttgatgattgccgtgctgaactccacaacctcttgaaagaagaggataaaggtttacctatctaggcagtgttctattgttgatttttgcaaataagcaagacatgcaaggagctctaaaaccaactgaaatcgtgaaggtaagcgaacttcagtcatttattatatgcattagagacatgttttcctgtctatgacatcatttttaacttgtactgtgtttttccggtcctcatggttgccaagattttacttagttcgatgtgggagcaaaaggatatgccaaattgaatgtagtttcatcagttatgctctattatggatgttcagaggcatccaatttcagtgtgtactgcaatacttgggtccacctgcacgtggtagatgttctgcattttgttttcttataaattagatttggcttccattatgttgttctcttttggaacagagtcactctccgacagctcatcgccgcttggttctcccgtcggtacacaaggtttaagaagcgctacgcggacttccacggccgcgctgccgatctcgtccatggcctccggggcacggcgatgcccaggagacaggccctcgaggaagagcaatgtacagaagagaaaggtatctcgactattccaaagcacaagtatgcatccaaagcctgttccccaaaaggaacctttatctgcagctctctctacgcttactcttgttgtgcaatttaatgggtggctatcatttttcctcttgctttattataaacttcctctgcggccagaaactcacaagacatactatgaatacactggcttgtggcacatctatgggctccttgccatgaattcatggttctggagtgccatatatcacagttgtgacacaatttggacagaaaaagctatatttttcatcagatgctgcctttctagggtattccctcattttgatgatagttggtgagcatgtagtagcaagtttcatgggctctggtagattaactgacctttgtgtgttccattagcctgtgaagttcgaaactggtcatattgctaagaattctaggaggttactattagggcccagagtaaatgactacatgctgatgaaaatctgttcagattaatcattctggaacttgtactaacaattgaagcaagtggaggcatagcaccaattgtgtcagtgctgcagctctggatgtcagtagacaagaggtgtatcagagagaagcacttcaaggttaatttgagcaaattggagatgctggattttgtattttggttgctcatgggtggtgaatgatctgacgacttcagaagaggatagatctgagattacctttcatgcatgtcaaggaagttaagtagctgatgccatcaaagcaatggagaaacgtcaggtgaaccgcgagcagaattctgtggcgcatttgttagcgcagttagttaggactctgttcatacaactgttcgattaagccaaatacctaatttagttttatattggttgttgtcaaagaatttgtgaaatattgaggttgataatatatgtggcgttcgtttttatgtaatcattgttcactaatattttgtcgaatattttatattatatagacattactwaggaaaaaaaaaaaaaaaaaaaaaaaaaaaaaaaaaacctcgggggggggcccggt

SEQ ID NO: 15166 - protein, 191 aa, Zea mays subsp. mays
  peptide (1)..(191): Ceres Seq. ID no. 15222595
  misc_feature (97)..(174): Pfam Name: Per1-like Pfam Description: Per1-like
  misc_feature (97)..(174): Homolog of NCBI NO: 37536224 NR Description: unknown protein [Oryza sativa (japonica
  misc_feature (97)..(171): Homolog of NCBI NO: 15219283 NR Description: expressed protein [Arabidopsis thaliana]
  misc_feature (97)..(163): Homolog of NCBI NO: 20260110 NR Description: unknown protein [Arabidopsis thaliana]
  misc_feature (97)..(171): Homolog of NCBI NO: 10176931 NR Description: gene_id:MTG10.16~unknown protein [Arabidopsis
  misc_feature (97)..(171): Homolog of NCBI NO: 18424554 NR Description: expressed protein [Arabidopsis thaliana] AT5g62130/mtg10_150 [Arabidopsis thaliana]
MFCILFSYKLDLASIMLFSFGTESLSDSSSPLGSPVGTQGLRSATRTSTAALPISSMASGARRCPGDRPSRKSNVQKRKVSRLFQSTSMHPKPVPQKEPLSAALSTLTLVVQFNGWLSFFLLLYYKLPLRPETHKTYYEYTGLWHIYGLLAMNSWFWSAIYHSCDTIWTEKAIFFIRCCLSRVFPHFDDSW

SEQ ID NO: 15167 - protein, 176 aa, Zea mays subsp. mays
  peptide (1)..(176): Ceres Seq. ID no. 15222596
  misc_feature (82)..(159): Pfam Name: Per1-like Pfam Description: Per1-like
  misc_feature (82)..(159): Homolog of NCBI NO: 37536224 NR Description: unknown protein [Oryza sativa (japonica
  misc_feature (82)..(156): Homolog of NCBI NO: 15219283 NR Description: expressed protein [Arabidopsis thaliana]
  misc_feature (82)..(148): Homolog of NCBI NO: 20260110 NR Description: unknown protein [Arabidopsis thaliana]
  misc_feature (82)..(156): Homolog of NCBI NO: 10176931 NR Description: gene_id:MTG10.16~unknown protein [Arabidopsis
  misc_feature (82)..(156): Homolog of NCBI NO: 18424554 NR Description: expressed protein [Arabidopsis thaliana] AT5g62130/mtg10_150 [Arabidopsis thaliana]
MLFSFGTESLSDSSSPLGSPVGTQGLRSATRTSTAALPISSMASGARRCPGDRPSRKSNVQKRKVSRLFQSTSMHPKPVPQKEPLSAALSTLTLVVQFNGWLSFFLLLYYKLPLRPETHKTYYEYTGLWHIYGLLAMNSWFWSAIYHSCDTIWTEKAIFFIRCCLSRVFPHFDDSW

SEQ ID NO: 15168 - protein, 135 aa, Zea mays subsp. mays
  peptide (1)..(135): Ceres Seq. ID no. 15222597
  misc_feature (41)..(118): Pfam Name: Per1-like Pfam Description: Per1-like
  misc_feature (41)..(118): Homolog of NCBI NO: 37536224 NR Description: unknown protein [Oryza sativa (japonica
  misc_feature (41)..(115): Homolog of NCBI NO: 15219283 NR Description: expressed protein [Arabidopsis thaliana]
  misc_feature (41)..(107): Homolog of NCBI NO: 20260110 NR Description: unknown protein [Arabidopsis thaliana]
  misc_feature (41)..(115): Homolog of NCBI NO: 10176931 NR Description: gene_id:MTG10.16~unknown protein [Arabidopsis
  misc_feature (41)..(115): Homolog of NCBI NO: 18424554 NR Description: expressed protein [Arabidopsis thaliana] AT5g62130/mtg10_150 [Arabidopsis thaliana]
MASGARRCPGDRPSRKSNVQKRKVSRLFQSTSMHPKPVPQKEPLSAALSTLTLVVQFNGWLSFFLLLYYKLPLRPETHKTYYEYTGLWHIYGLLAMNSWFWSAIYHSCDTIWTEKAIFFIRCCLSRVFPHFDDSW

SEQ ID NO: 15169 - DNA, 2512 bp, Zea mays subsp. mays; identical to SEQ ID NO: 1286
  misc_feature (1)..(2512): Ceres Seq. ID no. 13623192
  misc_feature: MA Experiment ID: 108527 Result: Up-regulated in Transcription
  misc_feature: MA Experiment 108527 PARAMETER Experiment Name: Zm_5mM_NO_P Parameter: Age (day) Value: 8
  misc_feature: MA Experiment 108527 PARAMETER Experiment Name: Zm_5mM_NO_P Parameter: Organism Value: Zea mays
  misc_feature: MA Experiment 108527 PARAMETER Experiment Name: Zm_5mM_NO_P Parameter: Plant Line Value: 35A19
  misc_feature: MA Experiment 108527 PARAMETER Experiment Name: Zm_5mM_NO_P Parameter: Timepoint (hr) Value: 6
  misc_feature: MA Experiment 108527 PARAMETER Experiment Name: Zm_5mM_NO_P Parameter: Tissue Value: Aerial
  misc_feature: MA Experiment 108527 PARAMETER Experiment Name: Zm_5mM_NO_P Parameter: Treatment Value: 5mM NO vs. No Treatment
  misc_feature: MA Experiment ID: 108535 Result: Up-regulated in Transcription
  misc_feature: MA Experiment 108535 PARAMETER Experiment Name: Zm_Meristem_P Parameter: Age (day) Value: 8
  misc_feature: MA Experiment 108535 PARAMETER Experiment Name: Zm_Meristem_P Parameter: Organism Value: Zea mays
  misc_feature: MA Experiment 108535 PARAMETER Experiment Name: Zm_Meristem_P Parameter: Plant Line Value: 35A19
  misc_feature: MA Experiment 108535 PARAMETER Experiment Name: Zm_Meristem_P Parameter: Tissue Value: Root Meristem vs. Above Root Meristem
  misc_feature: MA Experiment ID: 108559 Result: Up-regulated in Transcription
  misc_feature: MA Experiment 108559 PARAMETER Experiment Name: Zm_5mM_NO_P Parameter: Age (day) Value: 8
  misc_feature: MA Experiment 108559 PARAMETER Experiment Name: Zm_5mM_NO_P Parameter: Organism Value: Zea mays
  misc_feature: MA Experiment 108559 PARAMETER Experiment Name: Zm_5mM_NO_P Parameter: Plant Line Value: 35A19
  misc_feature: MA Experiment 108559 PARAMETER Experiment Name: Zm_5mM_NO_P Parameter: Timepoint (hr) Value: 12
  misc_feature: MA Experiment 108559 PARAMETER Experiment Name: Zm_5mM_NO_P Parameter: Tissue Value: Aerial
  misc_feature: MA Experiment 108559 PARAMETER Experiment Name: Zm_5mM_NO_P Parameter: Treatment Value: 5mM NO vs. No Treatment
  misc_feature: MA Experiment ID: 20000478 Result: Up-regulated in Transcription
  misc_feature: MA Experiment 20000478 PARAMETER Experiment Name: Zm_5mM_SA_P Parameter: Age (day) Value: 11
  misc_feature: MA Experiment 20000478 PARAMETER Experiment Name: Zm_5mM_SA_P Parameter: Organism Value: Zea mays
  misc_feature: MA Experiment 20000478 PARAMETER Experiment Name: Zm_5mM_SA_P Parameter: Plant Line Value: 35A19
  misc_feature: MA Experiment 20000478 PARAMETER Experiment Name: Zm_5mM_SA_P Parameter: Timepoint (hr) Value: 72
  misc_feature: MA Experiment 20000478 PARAMETER Experiment Name: Zm_5mM_SA_P Parameter: Tissue Value: Aerial
  misc_feature: MA Experiment 20000478 PARAMETER Experiment Name: Zm_5mM_SA_P Parameter: Treatment Value: 5mM SA vs. No Treatment
  misc_feature: MA Experiment ID: 20000479 Result: Up-regulated in Transcription
  misc_feature: MA Experiment 20000479 PARAMETER Experiment Name: Zm_Drought_P Parameter: Age (day) Value: 10
  misc_feature: MA Experiment 20000479 PARAMETER Experiment Name: Zm_Drought_P Parameter: Organism Value: Zea mays
  misc_feature: MA Experiment 20000479 PARAMETER Experiment Name: Zm_Drought_P Parameter: Plant Line Value: 35A19
  misc_feature: MA Experiment 20000479 PARAMETER Experiment Name: Zm_Drought_P Parameter: Timepoint (hr) Value: 48
  misc_feature: MA Experiment 20000479 PARAMETER Experiment Name: Zm_Drought_P Parameter: Tissue Value: Aerial
  misc_feature: MA Experiment 20000479 PARAMETER Experiment Name: Zm_Drought_P Parameter: Treatment Value: Drought vs. No Drought
  misc_feature: MA Experiment ID: 20000480 Result: Up-regulated in Transcription
  misc_feature: MA Experiment 20000480 PARAMETER Experiment Name: Zm_Drought_P Parameter: Age (day) Value: 11
  misc_feature: MA Experiment 20000480 PARAMETER Experiment Name: Zm_Drought_P Parameter: Organism Value: Zea mays
  misc_feature: MA Experiment 20000480 PARAMETER Experiment Name: Zm_Drought_P Parameter: Plant Line Value: 35A19
  misc_feature: MA Experiment 20000480 PARAMETER Experiment Name: Zm_Drought_P Parameter: Timepoint (hr) Value: 72
  misc_feature: MA Experiment 20000480 PARAMETER Experiment Name: Zm_Drought_P Parameter: Tissue Value: Aerial
  misc_feature: MA Experiment 20000480 PARAMETER Experiment Name: Zm_Drought_P Parameter: Treatment Value: Drought vs. No Drought

SEQ ID NO: 15170 - protein, 471 aa, Zea mays subsp. mays; identical to SEQ ID NO: 1287
  peptide (1)..(471): Ceres Seq. ID no. 13623193
  misc_feature (1)..(161): Pfam Name: ABC transporter Pfam Description: ABC transporter
  misc_feature (1)..(161): Pfam Name: ABC transporter Pfam Description: ABC transporter
  misc_feature (1)..(466): Homolog of NCBI NO: 10947137 NR Description: ATP-binding cassette, sub-family F, member 2 b; ABC- type transport protein; Iron inhibited ABC transporter 2
  misc_feature (1)..(466): Homolog of NCBI NO: 10179834 NR Description: iron inhibited ABC transporter 2 [Homo sapiens]
  misc_feature (1)..(471): Homolog of NCBI NO: 28071305 NR Description: putative ABC transporter [Oryza sativa (japonica
  misc_feature (1)..(422): Homolog of NCBI NO: 7573600 NR Description: ABC transporter homolog [Populus nigra]
  misc_feature (1)..(466): Homolog of NCBI NO: 27707592 NR Description: similar to ATP-binding cassette, sub-family F,
  misc_feature (1)..(466): Homolog of NCBI NO: 10947137 NR Description: ATP-binding cassette, sub-family F, member 2 b; ABC- type transport protein; Iron inhibited ABC transporter 2
  misc_feature (1)..(466): Homolog of NCBI NO: 27881506 NR Description: ATP-binding cassette, sub-family F, member 2 a; ABC- type transport protein; Iron inhibited ABC transporter 2
  misc_feature (1)..(466): Homolog of NCBI NO: 3005931 NR Description: ABC transporter [Homo sapiens]
  misc_feature (1)..(466): Homolog of NCBI NO: 27707592 NR Description: similar to ATP-binding cassette, sub-family F,
  misc_feature (1)..(468): Homolog of NCBI NO: 28436765 NR Description: Similar to ATP-binding cassette, sub-family F
  misc_feature (1)..(422): Homolog of NCBI NO: 7573600 NR Description: ABC transporter homolog [Populus nigra]
  misc_feature (1)..(471): Homolog of NCBI NO: 15239436 NR Description: ABC transporter family protein [Arabidopsis >gi|10176907|dbj|BAB10100.1| ABC transporter [Arabidopsis
  misc_feature (1)..(471): Homolog of NCBI NO: 28071305 NR Description: putative ABC transporter [Oryza sativa (japonica
  misc_feature (1)..(466): Homolog of NCBI NO: 23956078 NR Description: ATP-binding cassette, sub-family F (GCN20),
  misc_feature (1)..(466): Homolog of NCBI NO: 10179834 NR Description: iron inhibited ABC transporter 2 [Homo sapiens]
  misc_feature (1)..(466): Homolog of NCBI NO: 3005931 NR Description: ABC transporter [Homo sapiens]
  misc_feature (1)..(468): Homolog of NCBI NO: 28436765 NR Description: Similar to ATP-binding cassette, sub-family F
  misc_feature (1)..(471): Homolog of NCBI NO: 15239436 NR Description: ABC transporter family protein [Arabidopsis >gi|10176907|dbj|BAB10100.1| ABC transporter [Arabidopsis
  misc_feature (1)..(466): Homolog of NCBI NO: 27881506 NR Description: ATP-binding cassette, sub-family F, member 2 a; ABC- type transport protein; Iron inhibited ABC transporter 2
  misc_feature (1)..(466): Homolog of NCBI NO: 23956078 NR Description: ATP-binding cassette, sub-family F (GCN20),

SEQ ID NO: 15171 - protein, 457 aa, Zea mays subsp. mays; identical to SEQ ID NO: 1288
  peptide (1)..(457): Ceres Seq. ID no. 13623194
  misc_feature (1)..(147): Pfam Name: ABC transporter Pfam Description: ABC transporter
  misc_feature (1)..(147): Pfam Name: ABC transporter Pfam Description: ABC transporter
  misc_feature (1)..(457): Homolog of NCBI NO: 28071305 NR Description: putative ABC transporter [Oryza sativa (japonica
  misc_feature (1)..(457): Homolog of NCBI NO: 15239436 NR Description: ABC transporter family protein [Arabidopsis >gi|10176907|dbj|BAB10100.1| ABC transporter [Arabidopsis
  misc_feature (1)..(408): Homolog of NCBI NO: 7573600 NR Description: ABC transporter homolog [Populus nigra]
  misc_feature (1)..(454): Homolog of NCBI NO: 28436765 NR Description: Similar to ATP-binding cassette, sub-family F
  misc_feature (1)..(452): Homolog of NCBI NO: 27707592 NR Description: similar to ATP-binding cassette, sub-family F,
  misc_feature (1)..(457): Homolog of NCBI NO: 15239436 NR Description: ABC transporter family protein [Arabidopsis >gi|10176907|dbj|BAB10100.1| ABC transporter [Arabidopsis
  misc_feature (1)..(454): Homolog of NCBI NO: 28436765 NR Description: Similar to ATP-binding cassette, sub-family F
  misc_feature (1)..(452): Homolog of NCBI NO: 23956078 NR Description: ATP-binding cassette, sub-family F (GCN20),
  misc_feature (1)..(452): Homolog of NCBI NO: 10179834 NR Description: iron inhibited ABC transporter 2 [Homo sapiens]
  misc_feature (1)..(452): Homolog of NCBI NO: 27881506 NR Description: ATP-binding cassette, sub-family F, member 2 a; ABC- type transport protein; Iron inhibited ABC transporter 2
  misc_feature (1)..(452): Homolog of NCBI NO: 10947137 NR Description: ATP-binding cassette, sub-family F, member 2 b; ABC- type transport protein; Iron inhibited ABC transporter 2
  misc_feature (1)..(452): Homolog of NCBI NO: 3005931 NR Description: ABC transporter [Homo sapiens]
  misc_feature (1)..(452): Homolog of NCBI NO: 27707592 NR Description: similar to ATP-binding cassette, sub-family F,
  misc_feature (1)..(408): Homolog of NCBI NO: 7573600 NR Description: ABC transporter homolog [Populus nigra]
  misc_feature (1)..(457): Homolog of NCBI NO: 28071305 NR Description: putative ABC transporter [Oryza sativa (japonica
  misc_feature (1)..(452): Homolog of NCBI NO: 3005931 NR Description: ABC transporter [Homo sapiens]
  misc_feature (1)..(452): Homolog of NCBI NO: 10947137 NR Description: ATP-binding cassette, sub-family F, member 2 b; ABC- type transport protein; Iron inhibited ABC transporter 2
  misc_feature (1)..(452): Homolog of NCBI NO: 27881506 NR Description: ATP-binding cassette, sub-family F, member 2 a; ABC- type transport protein; Iron inhibited ABC transporter 2
  misc_feature (1)..(452): Homolog of NCBI NO: 10179834 NR Description: iron inhibited ABC transporter 2 [Homo sapiens]
  misc_feature (1)..(452): Homolog of NCBI NO: 23956078 NR Description: ATP-binding cassette, sub-family F (GCN20),

SEQ ID NO: 15172 - protein, 413 aa, Zea mays subsp. mays; identical to SEQ ID NO: 1289
  peptide (1)..(413): Ceres Seq. ID no. 13623195
  misc_feature (1)..(103): Pfam Name: ABC transporter Pfam Description: ABC transporter
  misc_feature (1)..(103): Pfam Name: ABC transporter Pfam Description: ABC transporter
  misc_feature (1)..(413): Homolog of NCBI NO: 15239436 NR Description: ABC transporter family protein [Arabidopsis >gi|10176907|dbj|BAB10100.1| ABC transporter [Arabidopsis
  misc_feature (1)..(364): Homolog of NCBI NO: 7573600 NR Description: ABC transporter homolog [Populus nigra]
  misc_feature (1)..(410): Homolog of NCBI NO: 28436765 NR Description: Similar to ATP-binding cassette, sub-family F
  misc_feature (1)..(408): Homolog of NCBI NO: 27707592 NR Description: similar to ATP-binding cassette, sub-family F,
  misc_feature (1)..(408): Homolog of NCBI NO: 3005931 NR Description: ABC transporter [Homo sapiens]
  misc_feature (1)..(413): Homolog of NCBI NO: 15239436 NR Description: ABC transporter family protein [Arabidopsis >gi|10176907|dbj|BAB10100.1| ABC transporter [Arabidopsis
  misc_feature (1)..(410): Homolog of NCBI NO: 28436765 NR Description: Similar to ATP-binding cassette, sub-family F
  misc_feature (1)..(408): Homolog of NCBI NO: 3005931 NR Description: ABC transporter [Homo sapiens]
  misc_feature (1)..(413): Homolog of NCBI NO: 28071305 NR Description: putative ABC transporter [Oryza sativa (japonica
  misc_feature (1)..(408): Homolog of NCBI NO: 23956078 NR Description: ATP-binding cassette, sub-family F (GCN20),
  misc_feature (1)..(408): Homolog of NCBI NO: 10947137 NR Description: ATP-binding cassette, sub-family F, member 2 b; ABC- type transport protein; Iron inhibited ABC transporter 2
  misc_feature (1)..(408): Homolog of NCBI NO: 27881506 NR Description: ATP-binding cassette, sub-family F, member 2 a; ABC- type transport protein; Iron inhibited ABC transporter 2
  misc_feature (1)..(408): Homolog of NCBI NO: 10179834 NR Description: iron inhibited ABC transporter 2 [Homo sapiens]
  misc_feature (1)..(408): Homolog of NCBI NO: 27707592 NR Description: similar to ATP-binding cassette, sub-family F,
  misc_feature (1)..(364): Homolog of NCBI NO: 7573600 NR Description: ABC transporter homolog [Populus nigra]
  misc_feature (1)..(413): Homolog of NCBI NO: 28071305 NR Description: putative ABC transporter [Oryza sativa (japonica
  misc_feature (1)..(408): Homolog of NCBI NO: 10179834 NR Description: iron inhibited ABC transporter 2 [Homo sapiens]
  misc_feature (1)..(408): Homolog of NCBI NO: 27881506 NR Description: ATP-binding cassette, sub-family F, member 2 a; ABC- type transport protein; Iron inhibited ABC transporter 2
  misc_feature (1)..(408): Homolog of NCBI NO: 10947137 NR Description: ATP-binding cassette, sub-family F, member 2 b; ABC- type transport protein; Iron inhibited ABC transporter 2
  misc_feature (1)..(408): Homolog of NCBI NO: 23956078 NR Description: ATP-binding cassette, sub-family F (GCN20),

SEQ ID NO: 15173 - DNA, 1604 bp, Zea mays subsp. mays
  misc_feature (1)..(1604): Ceres Seq. ID no. 13623434
  misc_feature: MA Experiment ID: 20000535 Result: Up-regulated in Transcription
  misc_feature: MA Experiment 20000535 PARAMETER Experiment Name: Zm_Hybrid_Seed_Dev_P Parameter: DAP Value: 30 vs. 12
  misc_feature: MA Experiment 20000535 PARAMETER Experiment Name: Zm_Hybrid_Seed_Dev_P Parameter: Organism Value: Zea mays
  misc_feature: MA Experiment 20000535 PARAMETER Experiment Name: Zm_Hybrid_Seed_Dev_P Parameter: Plant Line Value: 35A19
  misc_feature: MA Experiment 20000535 PARAMETER Experiment Name: Zm_Hybrid_Seed_Dev_P Parameter: Tissue Value: Embryo vs. Unfert Floret
atttgttttgtagggacttgtttacagactatgctgacttctgttttaagacctacggcgatcgcgtaaagcactggtttacattcaatgagccaaggatagtagcgctacttggctatgacacagggtcaaatcctcctcaaaggtgcaccagatgcgctgctggtgggaattcagcaaccgaaccttacatagttgctcataattttctcttggcacatgctactgcagttgcaagataccgtacgaaatatcaggtatttccatcttgagaacctcagaagttcctctgaaaaataacatcactctagcactcctaggagtggtaaactgatgttattttattcaatgaagtgtgtggtccaggattttatttttaaatgaaatgtgggcagggtctatatatgcttggaagttggaacaatggtcagcatactttcacattaataactctactgttcatgaaatgcattagcttgttctcctaaacgattggacatgtgcctgtcgaatttcattagtttcttggactgaaaactgctgatggaagagtgacatgatgttttaaaaacataggctgctcagaagggtaaggtcggaatagtcctggacttcaactggtacgaggctcttacaaactcacctgatgaccaagcagcagcccaaagagccagggacttccacattggctggtttgttgatccattgataaacggacactatccacagataatgcaagatctcgtgaaggagaggctgcccaggttcactcctgagcaggctaaactggtgaagggctcggcagactacatcggtatcaacgagtacacatccagctacatgaaggggcagaagctggtccagctggcgcccagtagctactctgccgattggcaggttcaatatgtttgtgagtttaatttcttgtgctttaaactcgatatttcgaataaatatgtatttgccttggatatatatttttttcaccaaacctaaacatccgtcccataaattctgtagttgcacgcaatggcaaaccgattggaccacaggcgaattctaagtggctctacatcgccccgacggggatgtacgggtgcgtgaactacctcaaggagaagtatgggaatccaacgatctacataacggagaacggaatggaccagcctggaaacttgacccgagaccagtacctgcgcgacgccacgagggtgcggttctacaggagctacatcggccagctgaagaaggccatagaccagggagcgaacgtggctggctacttcgcctggtctctcctcgacaacttcgagtggctggcagggtactcgtccaagttcggcatcgtctacgtggacttcaacacgctcgaacgccacccgaaggcgtcggcctactggttcagggacatgcttcagaagcattgagatctccagagccgagcctgagcacggaaggtaccattttgttcagcttcgcctagtgtttgggatggcccaatggttcaaatccggctcagtgcctggctaccaaaatgggaacaaaggacagctaccccgatcaattgtgatgttgtgtgtttgtgggtatgttctctctggagt

SEQ ID NO: 15174 - protein, 112 aa, Zea mays subsp. mays
  peptide (1)..(112): Ceres Seq. ID no. 13623435
  misc_feature (1)..(112): Pfam Name: Glycosyl hydrolase family 1 Pfam Description: Glycosyl hydrolase family 1
  misc_feature (1)..(112): Homolog of NCBI NO: 7489456 NR Description: beta-glucosidase (EC 3.2.1.21), chloroplast - rice
  misc_feature (1)..(112): Homolog of NCBI NO: 18875458 NR Description: beta-glucosidase [Oryza sativa]
  misc_feature (1)..(109): Homolog of NCBI NO: 34914546 NR Description: putative beta-glucosidase [Oryza sativa (japonica
  misc_feature (1)..(111): Homolog of NCBI NO: 1362162 NR Description: beta-glucosidase BGQ60 precursor - barley
  misc_feature (1)..(112): Homolog of NCBI NO: 17226270 NR Description: beta-mannosidase enzyme [Lycopersicon esculentum]
  misc_feature (1)..(109): Homolog of NCBI NO: 34899014 NR Description: putative non-cyanogenic beta-glucosidase
  misc_feature (1)..(112): Homolog of NCBI NO: 15229584 NR Description: glycosyl hydrolase family 1 [Arabidopsis thaliana]
  misc_feature (1)..(111): Homolog of NCBI NO: 9294062 NR Description: beta-glucosidase [Arabidopsis thaliana]
  misc_feature (1)..(111): Homolog of NCBI NO: 22331147 NR Description: glycosyl hydrolase family 1 [Arabidopsis thaliana]
  misc_feature (1)..(111): Homolog of NCBI NO: 38344470 NR Description: OSJNBa0022H21.5 [Oryza sativa (japonica
MYGCVNYLKEKYGNPTIYITENGMDQPGNLTRDQYLRDATRVRFYRSYIGQLKKAIDQGANVAGYFAWSLLDNFEWLAGYSSKFGIVYVDFNTLERHPKASAYWFRDMLQKH

SEQ ID NO: 15175 - protein, 89 aa, Zea mays subsp. mays
  peptide (1)..(89): Ceres Seq. ID no. 13623436
  misc_feature (1)..(89): Pfam Name: Glycosyl hydrolase family 1 Pfam Description: Glycosyl hydrolase family 1
  misc_feature (1)..(89): Homolog of NCBI NO: 7489456 NR Description: beta-glucosidase (EC 3.2.1.21), chloroplast - rice
  misc_feature (1)..(89): Homolog of NCBI NO: 18875458 NR Description: beta-glucosidase [Oryza sativa]
  misc_feature (1)..(86): Homolog of NCBI NO: 34914546 NR Description: putative beta-glucosidase [Oryza sativa (japonica
  misc_feature (1)..(88): Homolog of NCBI NO: 1362162 NR Description: beta-glucosidase BGQ60 precursor - barley
  misc_feature (1)..(89): Homolog of NCBI NO: 17226270 NR Description: beta-mannosidase enzyme [Lycopersicon esculentum]
  misc_feature (1)..(86): Homolog of NCBI NO: 34899014 NR Description: putative non-cyanogenic beta-glucosidase
  misc_feature (1)..(89): Homolog of NCBI NO: 15229584 NR Description: glycosyl hydrolase family 1 [Arabidopsis thaliana]
  misc_feature (1)..(88): Homolog of NCBI NO: 9294062 NR Description: beta-glucosidase [Arabidopsis thaliana]
  misc_feature (1)..(88): Homolog of NCBI NO: 22331147 NR Description: glycosyl hydrolase family 1 [Arabidopsis thaliana]
  misc_feature (1)..(88): Homolog of NCBI NO: 38344470 NR Description: OSJNBa0022H21.5 [Oryza sativa (japonica
MDQPGNLTRDQYLRDATRVRFYRSYIGQLKKAIDQGANVAGYFAWSLLDNFEWLAGYSSKFGIVYVDFNTLERHPKASAYWFRDMLQKH

SEQ ID NO: 15176 - protein, 89 aa, Zea mays subsp. mays
  peptide (1)..(89): Ceres Seq. ID no. 13623437
  misc_feature (5)..(85): Pfam Name: Glycosyl hydrolase family 1 Pfam Description: Glycosyl hydrolase family 1
  misc_feature (5)..(85): Homolog of NCBI NO: 7489456 NR Description: beta-glucosidase (EC 3.2.1.21), chloroplast - rice
  misc_feature (5)..(85): Homolog of NCBI NO: 18875458 NR Description: beta-glucosidase [Oryza sativa]
  misc_feature (5)..(85): Homolog of NCBI NO: 34914546 NR Description: putative beta-glucosidase [Oryza sativa (japonica
  misc_feature (7)..(85): Homolog of NCBI NO: 1362162 NR Description: beta-glucosidase BGQ60 precursor - barley
  misc_feature (7)..(85): Homolog of NCBI NO: 17226270 NR Description: beta-mannosidase enzyme [Lycopersicon esculentum]
  misc_feature (5)..(87): Homolog of NCBI NO: 34899014 NR Description: putative non-cyanogenic beta-glucosidase
  misc_feature (7)..(85): Homolog of NCBI NO: 15229584 NR Description: glycosyl hydrolase family 1 [Arabidopsis thaliana]
  misc_feature (15)..(85): Homolog of NCBI NO: 9294062 NR Description: beta-glucosidase [Arabidopsis thaliana]
  misc_feature (15)..(85): Homolog of NCBI NO: 22331147 NR Description: glycosyl hydrolase family 1 [Arabidopsis thaliana]
  misc_feature (7)..(86): Homolog of NCBI NO: 38344470 NR Description: OSJNBa0022H21.5 [Oryza sativa (japonica
LFCRDLFTDYADFCFKTYGDRVKHWFTFNEPRIVALLGYDTGSNPPQRCTRCAAGGNSATEPYIVAHNFLLAHATAVARYRTKYQVFPS

SEQ ID NO: 15177 - DNA, 2207 bp, Zea mays subsp. mays
  misc_feature (1)..(2207): Ceres Seq. ID no. 13600680
  misc_feature: MA Experiment ID: 108689 Result: Down-regulated in Transcription
  misc_feature: MA Experiment 108689 PARAMETER Experiment Name: Zm_Drought_Roots_P Parameter: Age (day) Value: 9
  misc_feature: MA Experiment 108689 PARAMETER Experiment Name: Zm_Drought_Roots_P Parameter: Organism Value: Zea mays
  misc_feature: MA Experiment 108689 PARAMETER Experiment Name: Zm_Drought_Roots_P Parameter: Plant Line Value: 35A19
  misc_feature: MA Experiment 108689 PARAMETER Experiment Name: Zm_Drought_Roots_P Parameter: Timepoint (hr) Value: 24
  misc_feature: MA Experiment 108689 PARAMETER Experiment Name: Zm_Drought_Roots_P Parameter: Tissue Value: Roots
  misc_feature: MA Experiment 108689 PARAMETER Experiment Name: Zm_Drought_Roots_P Parameter: Treatment Value: Drought vs. No Drought
  misc_feature: MA Experiment ID: 20000627 Result: Up-regulated in Transcription
  misc_feature: MA Experiment 20000627 PARAMETER Experiment Name: Zm_Herbicide-Treatments_P Parameter: Timepoint (hr) Value: 12
  misc_feature: MA Experiment 20000627 PARAMETER Experiment Name: Zm_Herbicide-Treatments_P Parameter: Tissue Value: Aerial
  misc_feature: MA Experiment 20000627 PARAMETER Experiment Name: Zm_Herbicide-Treatments_P Parameter: Treatment Value: Finale vs. No Treatment
ccccgccctctccgccccgctctcccactcgtaggtgttctccccgtctccgcccgcactcgctcgtccgcgcgcaggaaggttgacctgtcgagggccggcgaacccggtaagtaagagtgaaaatggatggaagtagtaaagggagtgggcattctgaagcattaaggaactacaacctgggaagaactttaggtatcggtacatttggaagtgaagattgcagagcataagcttactggacatagggttgctataaagatcatcaactgccgccaaatgagaaatatggaaatggaagagaaagcaaagagagaattcaagatattgaagttgttcattcacccccatatcattcggctttatgaggtcatatacacacctacagatatatatgttgtgatggaatattgtaagtatggcgagttatttgattacattgttgagaaaggcagattacaggaagatgaagctcgtcgaatcttccagcaggtatttatcacttttcttggctggttacttctagtaacatgctttttttgagtcacaataggtagttatcaaagaacggttttatcttgttgctttgaattttgatatttatggatagtgcattcatattcttcatttgtttctgttgtgtttaatgtgctctcattaagtatctggattagttttgccttgccttatttttatcttctgatctgccaccattttgacttgcaagcatgatgtggtaattgctttgtcttagggtatcactattgcatgtagttcagaatttcaaatcatgatttaaacattacatctttccatggaggatacgacaattaaaatattcctttttcttttatatctaaattccaggtttgttttattagttgttttttcacattggaaaaattcatgaacagatcatatctggcgtcgaatactgccatagaaacatggttgtccaccgtgacctaaagccggaaaacttgttacttgattcaaagtataatgtaaaacttgcggattttggtctgagcaatgtcatgcatgatggccattttctgaagactagctgtgggagtccgaactatgctgctccagaggtaatatctggtaaactatatgctggacctgaggtcgatgtatggagttgtggggtgattctttatgctcttctttgtggaactcttccatttgatgatgagaatattcccaatctgttcaaaaaaaattaagggaggtatctacacagttccaagtcatttgtctgctttggccagggatttgatcccacgaatgcttgttgttgagcctatgaagagaatcacaattagggaaattcgggagcatcaatggttccagattcgccttccacgttacttggcagtgcctccaccagatacgacacaacaagccaaaatgattgatgaagatacacttcgagatgttgttaatatgggatttaacaagaaccatgtgtgtgaatcactgtgcagcagacttcaaaatgaggcaactgttgcatattatttactattggacaatcggtttagagcaactagtggctatcttggggcagattatcaagaatcaatggacaggaatttaaatcagctggcgtcatctgaatcatctagttctggtacgaggaattatgttccaggaagcagtgatcctcatagcagtggtttgcggccatattatcctgttgaaagaaaatgggcgcttggacttcagtctcgggcccaccctcgtgaaataatggttgaggtcttaaaagcacttcaagaattaaacgtcagatggaagaagaatgggcactacaacgtgaaatgcagatggtgcccagggtttcctgaagttaatgacacgttagatgccagcaacagctttcttggtgactctaccatcatggataatgatgatgctaatgggaggctacctactgtgatcaagtttgaattccagctttacaagacgaaggacgacaagtacctcttagatatgcagagagttactggacctcagctgctcttccttgacttctgtgcggccttccttaccaagcttagggttctatagtggtctaccatgtgcaaattttcactgtggtgatgaataaccgaaagcatgtaaataggaaccttgttctcgtcttttggacaacgaaaaaaaaaaaaaaaaaaaaactcgagggggggcccggtacccaa

SEQ ID NO: 15178 - protein, 304 aa, Zea mays subsp. mays
  peptide (1)..(304): Ceres Seq. ID no. 15219000
  misc_feature (255)..(303): Pfam Name: Kinase associated domain 1 Pfam Description: Kinase associated domain 1
  misc_feature (16)..(304): Homolog of NCBI NO: 4107001 NR Description: OSK4 [Oryza sativa] >gi|28201242|dbj|BAC56589.1|
  misc_feature (16)..(304): Homolog of NCBI NO: 4107003 NR Description: OSK5 [Oryza sativa] >gi|4107007|dbj|BAA36297.1| [Oryza sativa] >gi|28201244|dbj|BAC56590.1| SnRK1b protein kinase
  misc_feature (16)..(304): Homolog of NCBI NO: 7434356 NR Description: serine/threonine protein kinase homolog - rice
  misc_feature (16)..(304): Homolog of NCBI NO: 3341452 NR Description: SnRK1-type protein kinase [Hordeum vulgare subsp.
  misc_feature (16)..(304): Homolog of NCBI NO: 2130049 NR Description: serine/threonine-specific protein kinase (EC
  misc_feature (16)..(304): Homolog of NCBI NO: 18934 NR Description: protein kinase [Hordeum vulgare subsp. vulgare]
  misc_feature (16)..(304): Homolog of NCBI NO: 2146812 NR Description: serine/threonine-specific protein kinase (EC
  misc_feature (16)..(304): Homolog of NCBI NO: 400982 NR Description: Carbon catabolite derepressing protein kinase
  misc_feature (16)..(304): Homolog of NCBI NO: 30678280 NR Description: Snf1-related protein kinase KIN10 (AKIN10)
  misc_feature (16)..(304): Homolog of NCBI NO: 18395701 NR Description: Snf1-related protein kinase KIN10 (AKIN10)
MLFFVELFHLMMRIFPICSKKIKGGIYTVPSHLSALARDLIPRMLVVEPMKRITIREIREHQWFQIRLPRYLAVPPPDTTQQAKMIDEDTLRDVVNMGFNKNHVCESLCSRLQNEATVAYYLLLDNRFRATSGYLGADYQESMDRNLNQLASSESSSSGTRNYVPGSSDPHSSGLRPYYPVERKWALGLQSRAHPREIMVEVLKALQELNVRWKKNGHYNVKCRWCPGFPEVNDTLDASNSFLGDSTIMDNDDANGRLPTVIKFEFQLYKTKDDKYLLDMQRVTGPQLLFLDFCAAFLTKLRVL

SEQ ID NO: 15179 - protein, 294 aa, Zea mays subsp. mays
  peptide (1)..(294): Ceres Seq. ID no. 15219001
  misc_feature (245)..(293): Pfam Name: Kinase associated domain 1 Pfam Description: Kinase associated domain 1
  misc_feature (6)..(294): Homolog of NCBI NO: 4107001 NR Description: OSK4 [Oryza sativa] >gi|28201242|dbj|BAC56589.1|
  misc_feature (6)..(294): Homolog of NCBI NO: 4107003 NR Description: OSK5 [Oryza sativa] >gi|4107007|dbj|BAA36297.1| [Oryza sativa] >gi|28201244|dbj|BAC56590.1| SnRK1b protein kinase
  misc_feature (6)..(294): Homolog of NCBI NO: 7434356 NR Description: serine/threonine protein kinase homolog - rice
  misc_feature (6)..(294): Homolog of NCBI NO: 3341452 NR Description: SnRK1-type protein kinase [Hordeum vulgare subsp.
  misc_feature (6)..(294): Homolog of NCBI NO: 2130049 NR Description: serine/threonine-specific protein kinase (EC
  misc_feature (6)..(294): Homolog of NCBI NO: 18934 NR Description: protein kinase [Hordeum vulgare subsp. vulgare]
  misc_feature (6)..(294): Homolog of NCBI NO: 2146812 NR Description: serine/threonine-specific protein kinase (EC
  misc_feature (6)..(294): Homolog of NCBI NO: 400982 NR Description: Carbon catabolite derepressing protein kinase
  misc_feature (6)..(294): Homolog of NCBI NO: 30678280 NR Description: Snf1-related protein kinase KIN10 (AKIN10)
  misc_feature (6)..(294): Homolog of NCBI NO: 18395701 NR Description: Snf1-related protein kinase KIN10 (AKIN10)
MMRIFPICSKKIKGGIYTVPSHLSALARDLIPRMLVVEPMKRITIREIREHQWFQIRLPRYLAVPPPDTTQQAKMIDEDTLRDVVNMGFNKNHVCESLCSRLQNEATVAYYLLLDNRFRATSGYLGADYQESMDRNLNQLASSESSSSGTRNYVPGSSDPHSSGLRPYYPVERKWALGLQSRAHPREIMVEVLKALQELNVRWKKNGHYNVKCRWCPGFPEVNDTLDASNSFLGDSTIMDNDDANGRLPTVIKFEFQLYKTKDDKYLLDMQRVTGPQLLFLDFCAAFLTKLRVL

SEQ ID NO: 15180 - protein, 293 aa, Zea mays subsp. mays
  peptide (1)..(293): Ceres Seq. ID no. 15219002
  misc_feature (244)..(292): Pfam Name: Kinase associated domain 1 Pfam Description: Kinase associated domain 1
  misc_feature (5)..(293): Homolog of NCBI NO: 4107001 NR Description: OSK4 [Oryza sativa] >gi|28201242|dbj|BAC56589.1|
  misc_feature (5)..(293): Homolog of NCBI NO: 4107003 NR Description: OSK5 [Oryza sativa] >gi|4107007|dbj|BAA36297.1| [Oryza sativa] >gi|28201244|dbj|BAC56590.1| SnRK1b protein kinase
  misc_feature (5)..(293): Homolog of NCBI NO: 7434356 NR Description: serine/threonine protein kinase homolog - rice
  misc_feature (5)..(293): Homolog of NCBI NO: 3341452 NR Description: SnRK1-type protein kinase [Hordeum vulgare subsp.
  misc_feature (5)..(293): Homolog of NCBI NO: 2130049 NR Description: serine/threonine-specific protein kinase (EC
  misc_feature (5)..(293): Homolog of NCBI NO: 18934 NR Description: protein kinase [Hordeum vulgare subsp. vulgare]
  misc_feature (5)..(293): Homolog of NCBI NO: 2146812 NR Description: serine/threonine-specific protein kinase (EC
  misc_feature (5)..(293): Homolog of NCBI NO: 400982 NR Description: Carbon catabolite derepressing protein kinase
  misc_feature (5)..(293): Homolog of NCBI NO: 30678280 NR Description: Snf1-related protein kinase KIN10 (AKIN10)
  misc_feature (5)..(293): Homolog of NCBI NO: 18395701 NR Description: Snf1-related protein kinase KIN10 (AKIN10)
MRIFPICSKKIKGGIYTVPSHLSALARDLIPRMLVVEPMKRITIREIREHQWFQIRLPRYLAVPPPDTTQQAKMIDEDTLRDVVNMGFNKNHVCESLCSRLQNEATVAYYLLLDNRFRATSGYLGADYQESMDRNLNQLASSESSSSGTRNYVPGSSDPHSSGLRPYYPVERKWALGLQSRAHPREIMVEVLKALQELNVRWKKNGHYNVKCRWCPGFPEVNDTLDASNSFLGDSTIMDNDDANGRLPTVIKFEFQLYKTKDDKYLLDMQRVTGPQLLFLDFCAAFLTKLRVL

SEQ ID NO: 15181 - DNA, 1445 bp, Zea mays subsp. mays
  misc_feature (1)..(1445): Ceres Seq. ID no. 12556598
  misc_feature: MA Experiment ID: 108529 Result: Up-regulated in Transcription
  misc_feature: MA Experiment 108529 PARAMETER Experiment Name: Zm_Imbibed_Seeds_P Parameter: Age (day) Value: 5 vs. 2
  misc_feature: MA Experiment 108529 PARAMETER Experiment Name: Zm_Imbibed_Seeds_P Parameter: Organism Value: Zea mays
  misc_feature: MA Experiment 108529 PARAMETER Experiment Name: Zm_Imbibed_Seeds_P Parameter: Plant Line Value: 35A19
  misc_feature: MA Experiment 108529 PARAMETER Experiment Name: Zm_Imbibed_Seeds_P Parameter: Tissue Value: Roots vs. Embryo
  misc_feature: MA Experiment ID: 108543 Result: Up-regulated in Transcription
  misc_feature: MA Experiment ID: 108545 Result: Down-regulated in Transcription
  misc_feature: MA Experiment 108545 PARAMETER Experiment Name: Zm_Imbibed_Seeds_P Parameter: Age (day) Value: 3 vs. 2
  misc_feature: MA Experiment 108545 PARAMETER Experiment Name: Zm_Imbibed_Seeds_P Parameter: Organism Value: Zea mays
  misc_feature: MA Experiment 108545 PARAMETER Experiment Name: Zm_Imbibed_Seeds_P Parameter: Plant Line Value: 35A19
  misc_feature: MA Experiment 108545 PARAMETER Experiment Name: Zm_Imbibed_Seeds_P Parameter: Tissue Value: Aerial vs. Embryo
  misc_feature: MA Experiment ID: 108546 Result: Up-regulated in Transcription
  misc_feature: MA Experiment 108546 PARAMETER Experiment Name: Zm_Imbibed_Seeds_P Parameter: Age (day) Value: 3 vs. 2
  misc_feature: MA Experiment 108546 PARAMETER Experiment Name: Zm_Imbibed_Seeds_P Parameter: Organism Value: Zea mays
  misc_feature: MA Experiment 108546 PARAMETER Experiment Name: Zm_Imbibed_Seeds_P Parameter: Plant Line Value: 35A19
  misc_feature: MA Experiment 108546 PARAMETER Experiment Name: Zm_Imbibed_Seeds_P Parameter: Tissue Value: Roots vs. Embryo
  misc_feature: MA Experiment ID: 108547 Result: Down-regulated in Transcription
  misc_feature: MA Experiment 108547 PARAMETER Experiment Name: Zm_Imbibed_Seeds_P Parameter: Age (day) Value: 4 vs. 2
  misc_feature: MA Experiment 108547 PARAMETER Experiment Name: Zm_Imbibed_Seeds_P Parameter: Organism Value: Zea mays
  misc_feature: MA Experiment 108547 PARAMETER Experiment Name: Zm_Imbibed_Seeds_P Parameter: Plant Line Value: 35A19
  misc_feature: MA Experiment 108547 PARAMETER Experiment Name: Zm_Imbibed_Seeds_P Parameter: Tissue Value: Aerial vs. Embryo
tgagatgcatggggtagccaatcgggtgtcgccgtgcgcgcgcgcgcgcgtctggcctcctccttccctttccttgctaaataaagcaagtagcagataggggaaagtctgctcgcaagttgcatccgccctgcgccaagaaaagccatcgttcttcccacaaacgcacacatagaagcatcattcccctctcggctagcttcctcctctctccctcctcttcgtcttcctctttccttctcccttgggaaacctgctgcctttgagctttcttcttcgagtgctcccaccagatctcctcctccttaccttctttggcacgttcggcggcgcgcgcggagatagatagatcccgccatcgtcgtcgccgtccttgcttccgatcggagggccacaaccacaacctctcgctccttagcgtgcgcgcgcgagccagggtcaagaagagagctagctataggccggagatcgatggggaggggaaagatcgtgatccgcaggatcgataactccacgagccggcaggtgaccttctccaagcgccggaacgggatcttcaagaaggccaaggagctcgccatcctctgcgatgcggaggtcggcctcgtcatcttctccagcaccggccgcctctacgagtactctagcaccagcatgaaatcagttatagatcggtacggcaaggccaaggaagagcagcaagtcgtcgcaaatcccaactcggagcttaagttttggcaaagggaggcagcaagcttgagacaacaactgcacaacttgcaagaaaattatcggcagttgacgggagatgatctttctgggctgaatgtcaaagaactgcagtccctggagaatcaattggaaacaagcctgcgtggtgtccgcgcaaagaaggaccatctcttgatagatgagattcacgatttgaatcgaaaggcaagtttatttcaccaagaaaatacagacttgtacaataagatcaacctgattcgccaagaaaatgatgagttacataaaaagatctatgagactgaaggaccaagtggagttaatcgggagtcaccgactccattcaactttgcagtagtagaaaccagagatgttccagtgcaacttgaactcagcacactgccacaacaaaataacattgagccatctactgctcctaagctaggattgcaattaattccatgaagaagagtaaaactgccgtcttatgatgctgaaggaaactatttattgtgaagagatgatactcagagaaagacatatttgtggcagggagatttgagatatgaacttataaatgtaatgcaaataattttcagactggaatggggtcgtggaattcagaggatgattgctttctagttgcatttgatgtttgatgagacttttctcatgtgaaacgtttattaaaacttcaaaatggtgcagatgttgct

SEQ ID NO: 15182 - protein, 240 aa, Zea mays subsp. mays
  peptide (1)..(240): Ceres Seq. ID no. 12556599
  misc_feature (73)..(172): Pfam Name: K-box region Pfam Description: K-box region
  misc_feature (1)..(240): Homolog of NCBI NO: 9964296 NR Description: MADS box protein 2 [Zea mays]
  misc_feature (1)..(240): Homolog of NCBI NO: 29611976 NR Description: MADS-box transcription factor MADS2 [Zea mays]
  misc_feature (1)..(240): Homolog of NCBI NO: 30313677 NR Description: transcription factor MADS27 [Oryza sativa
  misc_feature (1)..(235): Homolog of NCBI NO: 38344968 NR Description: OSJNBa0072F16.13 [Oryza sativa (japonica
  misc_feature (1)..(231): Homolog of NCBI NO: 7489303 NR Description: MADS-box transcription factor DEFH125 - garden
  misc_feature (1)..(238): Homolog of NCBI NO: 30313689 NR Description: transcription factor MADS57 [Oryza sativa
  misc_feature (1)..(238): Homolog of NCBI NO: 29367491 NR Description: MADS box protein-like protein [Oryza sativa
  misc_feature (1)..(234): Homolog of NCBI NO: 30694601 NR Description: MADS-box protein [Arabidopsis thaliana]
  misc_feature (1)..(238): Homolog of NCBI NO: 34452085 NR Description: MADS-box protein 14 [Petunia x hybrida]
  misc_feature (1)..(233): Homolog of NCBI NO: 15235748 NR Description: MADS-box protein; protein id: At4g37940.1, by cDNA: gi_18478602 [Arabidopsis thaliana]
MGRGKIVIRRIDNSTSRQVTFSKRRNGIFKKAKELAILCDAEVGLVIFSSTGRLYEYSSTSMKSVIDRYGKAKEEQQVVANPNSELKFWQREAASLRQQLHNLQENYRQLTGDDLSGLNVKELQSLENQLETSLRGVRAKKDHLLIDEIHDLNRKASLFHQENTDLYNKINLIRQENDELHKKIYETEGPSGVNRESPTPFNFAVVETRDVPVQLELSTLPQQNNIEPSTAPKLGLQLIP

SEQ ID NO: 15183 - protein, 179 aa, Zea mays subsp. mays
  peptide (1)..(179): Ceres Seq. ID no. 12556600
  misc_feature (12)..(111): Pfam Name: K-box region Pfam Description: K-box region
  misc_feature (1)..(179): Homolog of NCBI NO: 9964296 NR Description: MADS box protein 2 [Zea mays]
  misc_feature (1)..(179): Homolog of NCBI NO: 29611976 NR Description: MADS-box transcription factor MADS2 [Zea mays]
  misc_feature (1)..(179): Homolog of NCBI NO: 30313677 NR Description: transcription factor MADS27 [Oryza sativa
  misc_feature (1)..(174): Homolog of NCBI NO: 38344968 NR Description: OSJNBa0072F16.13 [Oryza sativa (japonica
  misc_feature (1)..(170): Homolog of NCBI NO: 7489303 NR Description: MADS-box transcription factor DEFH125 - garden
  misc_feature (1)..(177): Homolog of NCBI NO: 30313689 NR Description: transcription factor MADS57 [Oryza sativa
  misc_feature (1)..(177): Homolog of NCBI NO: 29367491 NR Description: MADS box protein-like protein [Oryza sativa
  misc_feature (1)..(173): Homolog of NCBI NO: 30694601 NR Description: MADS-box protein [Arabidopsis thaliana]
  misc_feature (1)..(177): Homolog of NCBI NO: 34452085 NR Description: MADS-box protein 14 [Petunia x hybrida]
  misc_feature (1)..(172): Homolog of NCBI NO: 15235748 NR Description: MADS-box protein; protein id: At4g37940.1, by cDNA: gi_18478602 [Arabidopsis thaliana]
MKSVIDRYGKAKEEQQVVANPNSELKFWQREAASLRQQLHNLQENYRQLTGDDLSGLNVKELQSLENQLETSLRGVRAKKDHLLIDEIHDLNRKASLFHQENTDLYNKINLIRQENDELHKKIYETEGPSGVNRESPTPFNFAVVETRDVPVQLELSTLPQQNNIEPSTAPKLGLQLIP

SEQ ID NO: 15184 - DNA, 842 bp, Zea mays subsp. mays
  misc_feature (1)..(842): Ceres Seq. ID no. 13589145
  misc_feature: MA Experiment ID: 20000108 Result: Up-regulated in Transcription
  misc_feature: MA Experiment 20000108 PARAMETER Experiment Name: Zm_Root-Tips_P Parameter: Age (day) Value: 12
  misc_feature: MA Experiment 20000108 PARAMETER Experiment Name: Zm_Root-Tips_P Parameter: Organism Value: Zea mays
  misc_feature: MA Experiment 20000108 PARAMETER Experiment Name: Zm_Root-Tips_P Parameter: Tissue Value: Root tips vs. Root mid region    35
  misc_feature: MA Experiment 20000108 PARAMETER Experiment Name: Zm_Root-Tips_P Parameter: Tissue Value: Root tips vs. Root mid region   Sequence Listing-Misc Features (4)
atcggggaccgtatttgcctgggatctgcggcagccacaggagctgataccaatctctgttctaggtcttaatgaaacagctgagcctgtgtgtgaaagtgaggtttgggaggttcttttcgacacttacactaagtcttccgatatcatctcatctgcatctgcaagaatattgccagtgatgatgtgttcagaggatgggatccttgcagtcgtcgaacaagataagagaccccttgaattgcttgctgaatcttgtgccatcaactccttcgacatagatcctcagaacccctctgatgttgtttgcgcattagaatgggaatcggtcggtgtcctaactcgtggtagagatgcaatgtcagaagaatgaaaattttcatcacccagggatctcaatcagatttttttccaaggtggatgaaactgctatcagaaagaatcttctgaattctgagggcttccatattcagtcaccattctaatgcccgtgaccatgggcaacggtagaaggaataaagcgtgcatgacgaatgccttttcctgtctttgcatactaaccaacactgtcttgtaccgttggaagttttactctgttgtcatgggtagttgcagattgcagaaaccttttctgggctagcttcaagatgtgtaattgctcttggatgccaactgctgacagtttgaaggagtggtcacaaacaattcaatccttttagctgggggctgatgaactgaagctataattagtttcataatgtttgcttgtggtattaaattggctcctgaacaatatggactccgatacatattttatttatctggcttaccatttagattcc

SEQ ID NO: 15185 - protein, 123 aa, Zea mays subsp. mays
  peptide (1)..(123): Ceres Seq. ID no. 13589146
  misc_feature (1)..(115): Homolog of NCBI NO: 18417678 NR Description: WD-40 repeat protein family [Arabidopsis thaliana]
  misc_feature (1)..(115): Homolog of NCBI NO: 21554881 NR Description: unknown [Arabidopsis thaliana]
  misc_feature (1)..(98): Homolog of NCBI NO: 25372649 NR Description: hypothetical protein AT4g30840 [imported] - thaliana >gi|2980782|emb|CAA18209.1| hypothetical protein thaliana] >gi|7269985|emb|CAB79802.1| hypothetical protein
SGTVFAWDLRQPQELIPISVLGLNETAEPVCESEVWEVLFDTYTKSSDIISSASARILPVMMCSEDGILAVVEQDKRPLELLAESCAINSFDIDPQNPSDVVCALEWESVGVLTRGRDAMSEE

SEQ ID NO: 15186 - protein, 63 aa, Zea mays subsp. mays
  peptide (1)..(63): Ceres Seq. ID no. 13589147
  misc_feature (1)..(55): Homolog of NCBI NO: 18417678 NR Description: WD-40 repeat protein family [Arabidopsis thaliana]
  misc_feature (1)..(55): Homolog of NCBI NO: 21554881 NR Description: unknown [Arabidopsis thaliana]
  misc_feature (1)..(38): Homolog of NCBI NO: 25372649 NR Description: hypothetical protein AT4g30840 [imported] - thaliana >gi|2980782|emb|CAA18209.1| hypothetical protein thaliana] >gi|7269985|emb|CAB79802.1| hypothetical protein
MMCSEDGILAVVEQDKRPLELLAESCAINSFDIDPQNPSDVVCALEWESVGVLTRGRDAMSEE

SEQ ID NO: 15187 - protein, 62 aa, Zea mays subsp. mays
  peptide (1)..(62): Ceres Seq. ID no. 13589148
  misc_feature (1)..(54): Homolog of NCBI NO: 18417678 NR Description: WD-40 repeat protein family [Arabidopsis thaliana]
  misc_feature (1)..(54): Homolog of NCBI NO: 21554881 NR Description: unknown [Arabidopsis thaliana]
  misc_feature (1)..(37): Homolog of NCBI NO: 25372649 NR Description: hypothetical protein AT4g30840 [imported] - thaliana >gi|2980782|emb|CAA18209.1| hypothetical protein thaliana] >gi|7269985|emb|CAB79802.1| hypothetical protein
MCSEDGILAVVEQDKRPLELLAESCAINSFDIDPQNPSDVVCALEWESVGVLTRGRDAMSEE

SEQ ID NO: 15188 - DNA, 2190 bp, Zea mays subsp. mays
  misc_feature (1)..(2190): Ceres Seq. ID no. 13599724
  misc_feature: MA Experiment ID: 108528 Result: Down-regulated in Transcription
  misc_feature: MA Experiment 108528 PARAMETER Experiment Name: Zm_Imbibed_Seeds_P Parameter: Age (day) Value: 5 vs. 2
  misc_feature: MA Experiment 108528 PARAMETER Experiment Name: Zm_Imbibed_Seeds_P Parameter: Organism Value: Zea mays
  misc_feature: MA Experiment 108528 PARAMETER Experiment Name: Zm_Imbibed_Seeds_P Parameter: Plant Line Value: 35A19
  misc_feature: MA Experiment 108528 PARAMETER Experiment Name: Zm_Imbibed_Seeds_P Parameter: Tissue Value: Aerial vs. Embryo
  misc_feature: MA Experiment ID: 108530 Result: Down-regulated in Transcription
  misc_feature: MA Experiment 108530 PARAMETER Experiment Name: Zm_Imbibed_Seeds_P Parameter: Age (day) Value: 6 vs. 2
  misc_feature: MA Experiment 108530 PARAMETER Experiment Name: Zm_Imbibed_Seeds_P Parameter: Organism Value: Zea mays
  misc_feature: MA Experiment 108530 PARAMETER Experiment Name: Zm_Imbibed_Seeds_P Parameter: Plant Line Value: 35A19
  misc_feature: MA Experiment 108530 PARAMETER Experiment Name: Zm_Imbibed_Seeds_P Parameter: Tissue Value: Aerial vs. Embryo
  misc_feature: MA Experiment ID: 20000108 Result: Up-regulated in Transcription
  misc_feature: MA Experiment 20000108 PARAMETER Experiment Name: Zm_Root-Tips_P Parameter: Age (day) Value: 12
  misc_feature: MA Experiment 20000108 PARAMETER Experiment Name: Zm_Root-Tips_P Parameter: Organism Value: Zea mays
  misc_feature: MA Experiment 20000108 PARAMETER Experiment Name: Zm_Root-Tips_P Parameter: Tissue Value: Root tips vs. Root mid region    35
  misc_feature: MA Experiment 20000108 PARAMETER Experiment Name: Zm_Root-Tips_P Parameter: Tissue Value: Root tips vs. Root mid region   Sequence Listing-Misc Features (4)
tgctactcaatttgatcaaccgccatccattctcctcctccgttgcagctgcggcatccatccagtagtccgaccaatccatggcttcagcgttcgggaccgcctccacttgcggcattaaacatgcacctgccggcgttgcgcttgctgcgcccatgaagcacctttccctcgtctcgccctcgctggtttcgcttccgcgcaagatgaggccgcgaaggaagtacaacttcagggtaaacgctgcaaaggagctgcatttcaacaaggatggctcggctatcaggaaaatgcaaaatggggtcaacaagcttgcagatctcgtcggggttactcttggaccaaaggggcgaaatgtagtcctcgaaagcaagtatggctcacctaaaattgtcaatgatggtgtcactgtggcaaaggaggttgaacttgaggaccctgttgaaaatattggtgctaaattggtccgccaagctgctgctaaaacaaatgacttggctggtgatgggacaaccacttcggttgtccttgctcaagggatgattactgagggtgtaaaggttgtagctgctggtgctaatccagtgcagatcacccgtggtattgagaaaacagccaaagcactagtcagtgaactccaaaagatgtccaaggaggttgaggacagtgagcttgctgatgttgctgcagttagtgcgggaaataactatgaaattgggaatatgatagctgaggctatgaaaaaggttgggcggcagggagtggtcacacttgaagaaggaaagagtgctgaaaataacctctattctgttgagggaatgcagtttgaccgtggctatatttctccctactttgtgactgacagtgaaaaaatgacagtcgagtatgagaactgcaagcttctccttgtggacaagaaaattaacaatgccagagatcttatcactatcctggaggatgctattagaagtggatatccaattctaatagtggcagaggacattgagcaggaagctcttgcaacccttgtggttaataggcttagaggtgcattgaagattgctgctattaaggcccctggttttggagagcgcaaaagtcaatatcttgatgacattgctactctcactggaggcactgtcatcagagaagaagttggattatccttagacaaggcagacaatgcggtcctaggaactgctgctaaggttgtagttaccaaggattcaacaacaatagtgggagatggcactacacaggaggaagtgaacaaaagggtgacacaaatcaagaaccagattgaggctactgaacaagaatatgagagagaaaaactaaacgagaggatagctaaactctctggtggtgttgctgtcattcaggtaggagcacagacagaaactgagctcaaggaaaagaaattgagggttgaggatgccctgaatgctacaaaggcagcagtcgaggaaggtatcgtaggtggtggctgtacccttttgaggcttgcatcaaaagttgatgcaattatagagacccttgagaacgatgaacagaaggttggggctgaaattgtaaggaagtccttgagctatccacttaaattgattgcaaaaaatgcaggcgttaatggcagtgtggttactgagaaggttcttgccaatgagaacttcaggtatgggtacaatgcggctacaggggagtatgaggacttgatggctgctggtatcattgatcccaccaaggttgtgaggtgctgcttggagcatgctgcatcggtggcgaaaaccttcatcacctctgatgccgttgttgttgacgccaaggtggctgagcaagcaccatcatctcctgcaaacccaatggcaatgggtggtggctcaggttttgggttctaaattgttcagctgcccttcgttccatcgcagcgacagaatcttagtttcgagatataataataaattggatgatgttagtttcgagatattagttggatgttgttattgttgtctcaaattataaaaaatcaagtgcaagtaaccaagacagctgaaaaaaatagttttgatgagatgctgcttcgtttttcttttctactaaaaaaaaaaaaaaaaaaaaaaaaaaaaaaaaaaaaaaaaaaaaaactcgagggggggcccggaacccaattcgcccaaaagggagtcgaataac

SEQ ID NO: 15189 - protein, 604 aa, Zea mays subsp. mays
  peptide (1)..(604): Ceres Seq. ID no. 13599725
  misc_feature (78)..(581): Pfam Name: TCP-1/cpn60 chaperonin family Pfam Description: TCP-1/cpn60 chaperonin family
  misc_feature (1)..(604): Homolog of NCBI NO: 34897924 NR Description: ESTs C99033(E4350),C99032(E4350),D46006(S10372), correspond to a region of the predicted gene.~Similar to thaliana chromosome I BAC T5A14 genomic sequence; 60 KD
  misc_feature (1)..(603): Homolog of NCBI NO: 2506277 NR Description: RuBisCO subunit binding-protein beta subunit,
  misc_feature (1)..(604): Homolog of NCBI NO: 15231255 NR Description: chaperonin, putative [Arabidopsis thaliana]
  misc_feature (1)..(604): Homolog of NCBI NO: 15222729 NR Description: RuBisCo subunit binding-protein beta subunit/60 chaperonin beta subunit [Arabidopsis thaliana]
  misc_feature (1)..(604): Homolog of NCBI NO: 7443855 NR Description: probable chaperonin 60 beta chain precursor,
  misc_feature (1)..(604): Homolog of NCBI NO: 81601 NR Description: chaperonin 60 beta precursor - Arabidopsis
  misc_feature (1)..(604): Homolog of NCBI NO: 30696748 NR Description: chaperonin, putative [Arabidopsis thaliana]
  misc_feature (1)..(587): Homolog of NCBI NO: 134104 NR Description: RuBisCO subunit binding-protein beta subunit,
  misc_feature (102)..(604): Homolog of NCBI NO: 2493650 NR Description: RUBISCO SUBUNIT BINDING-PROTEIN BETA SUBUNIT (60
  misc_feature (50)..(593): Homolog of NCBI NO: 15222666 NR Description: chaperonin, putative [Arabidopsis thaliana]
MASAFGTASTCGIKHAPAGVALAAPMKHLSLVSPSLVSLPRKMRPRRKYNFRVNAAKELHFNKDGSAIRKMQNGVNKLADLVGVTLGPKGRNVVLESKYGSPKIVNDGVTVAKEVELEDPVENIGAKLVRQAAAKTNDLAGDGTTTSVVLAQGMITEGVKVVAAGANPVQITRGIEKTAKALVSELQKMSKEVEDSELADVAAVSAGNNYEIGNMIAEAMKKVGRQGVVTLEEGKSAENNLYSVEGMQFDRGYISPYFVTDSEKMTVEYENCKLLLVDKKINNARDLITILEDAIRSGYPILIVAEDIEQEALATLVVNRLRGALKIAAIKAPGFGERKSQYLDDIATLTGGTVIREEVGLSLDKADNAVLGTAAKVVVTKDSTTIVGDGTTQEEVNKRVTQIKNQIEATEQEYEREKLNERIAKLSGGVAVIQVGAQTETELKEKKLRVEDALNATKAAVEEGIVGGGCTLLRLASKVDAIIETLENDEQKVGAEIVRKSLSYPLKLIAKNAGVNGSVVTEKVLANENFRYGYNAATGEYEDLMAAGIIDPTKVVRCCLEHAASVAKTFITSDAVVVDAKVAEQAPSSPANPMAMGGGSGFGF

SEQ ID NO: 15190 - protein, 579 aa, Zea mays subsp. mays
  peptide (1)..(579): Ceres Seq. ID no. 13599726
  misc_feature (53)..(556): Pfam Name: TCP-1/cpn60 chaperonin family Pfam Description: TCP-1/cpn60 chaperonin family
  misc_feature (1)..(579): Homolog of NCBI NO: 34897924 NR Description: ESTs C99033(E4350),C99032(E4350),D46006(S10372), correspond to a region of the predicted gene.~Similar to thaliana chromosome I BAC T5A14 genomic sequence; 60 KD
  misc_feature (1)..(578): Homolog of NCBI NO: 2506277 NR Description: RuBisCO subunit binding-protein beta subunit,
  misc_feature (1)..(579): Homolog of NCBI NO: 15231255 NR Description: chaperonin, putative [Arabidopsis thaliana]
  misc_feature (1)..(579): Homolog of NCBI NO: 15222729 NR Description: RuBisCo subunit binding-protein beta subunit/60 chaperonin beta subunit [Arabidopsis thaliana]
  misc_feature (1)..(579): Homolog of NCBI NO: 7443855 NR Description: probable chaperonin 60 beta chain precursor,
  misc_feature (1)..(579): Homolog of NCBI NO: 81601 NR Description: chaperonin 60 beta precursor - Arabidopsis
  misc_feature (1)..(579): Homolog of NCBI NO: 30696748 NR Description: chaperonin, putative [Arabidopsis thaliana]
  misc_feature (1)..(562): Homolog of NCBI NO: 134104 NR Description: RuBisCO subunit binding-protein beta subunit,
  misc_feature (77)..(579): Homolog of NCBI NO: 2493650 NR Description: RUBISCO SUBUNIT BINDING-PROTEIN BETA SUBUNIT (60
  misc_feature (25)..(568): Homolog of NCBI NO: 15222666 NR Description: chaperonin, putative [Arabidopsis thaliana]
MKHLSLVSPSLVSLPRKMRPRRKYNFRVNAAKELHFNKDGSAIRKMQNGVNKLADLVGVTLGPKGRNVVLESKYGSPKIVNDGVTVAKEVELEDPVENIGAKLVRQAAAKTNDLAGDGTTTSVVLAQGMITEGVKVVAAGANPVQITRGIEKTAKALVSELQKMSKEVEDSELADVAAVSAGNNYEIGNMIAEAMKKVGRQGVVTLEEGKSAENNLYSVEGMQFDRGYISPYFVTDSEKMTVEYENCKLLLVDKKINNARDLITILEDAIRSGYPILIVAEDIEQEALATLVVNRLRGALKIAAIKAPGFGERKSQYLDDIATLTGGTVIREEVGLSLDKADNAVLGTAAKVVVTKDSTTIVGDGTTQEEVNKRVTQIKNQIEATEQEYEREKLNERIAKLSGGVAVIQVGAQTETELKEKKLRVEDALNATKAAVEEGIVGGGCTLLRLASKVDAIIETLENDEQKVGAEIVRKSLSYPLKLIAKNAGVNGSVVTEKVLANENFRYGYNAATGEYEDLMAAGIIDPTKVVRCCLEHAASVAKTFITSDAVVVDAKVAEQAPSSPANPMAMGGGSGFGF

SEQ ID NO: 15191 - protein, 562 aa, Zea mays subsp. mays
  peptide (1)..(562): Ceres Seq. ID no. 13599727
  misc_feature (36)..(539): Pfam Name: TCP-1/cpn60 chaperonin family Pfam Description: TCP-1/cpn60 chaperonin family
  misc_feature (1)..(562): Homolog of NCBI NO: 34897924 NR Description: ESTs C99033(E4350),C99032(E4350),D46006(S10372), correspond to a region of the predicted gene.~Similar to thaliana chromosome I BAC T5A14 genomic sequence; 60 KD
  misc_feature (1)..(561): Homolog of NCBI NO: 2506277 NR Description: RuBisCO subunit binding-protein beta subunit,
  misc_feature (1)..(562): Homolog of NCBI NO: 15231255 NR Description: chaperonin, putative [Arabidopsis thaliana]
  misc_feature (1)..(562): Homolog of NCBI NO: 15222729 NR Description: RuBisCo subunit binding-protein beta subunit/60 chaperonin beta subunit [Arabidopsis thaliana]
  misc_feature (1)..(562): Homolog of NCBI NO: 7443855 NR Description: probable chaperonin 60 beta chain precursor,
  misc_feature (1)..(562): Homolog of NCBI NO: 81601 NR Description: chaperonin 60 beta precursor - Arabidopsis
  misc_feature (1)..(562): Homolog of NCBI NO: 30696748 NR Description: chaperonin, putative [Arabidopsis thaliana]
  misc_feature (1)..(545): Homolog of NCBI NO: 134104 NR Description: RuBisCO subunit binding-protein beta subunit,
  misc_feature (60)..(562): Homolog of NCBI NO: 2493650 NR Description: RUBISCO SUBUNIT BINDING-PROTEIN BETA SUBUNIT (60
  misc_feature (8)..(551): Homolog of NCBI NO: 15222666 NR Description: chaperonin, putative [Arabidopsis thaliana]
MRPRRKYNFRVNAAKELHFNKDGSAIRKMQNGVNKLADLVGVTLGPKGRNVVLESKYGSPKIVNDGVTVAKEVELEDPVENIGAKLVRQAAAKTNDLAGDGTTTSVVLAQGMITEGVKVVAAGANPVQITRGIEKTAKALVSELQKMSKEVEDSELADVAAVSAGNNYEIGNMIAEAMKKVGRQGVVTLEEGKSAENNLYSVEGMQFDRGYISPYFVTDSEKMTVEYENCKLLLVDKKINNARDLITILEDAIRSGYPILIVAEDIEQEALATLVVNRLRGALKIAAIKAPGFGERKSQYLDDIATLTGGTVIREEVGLSLDKADNAVLGTAAKVVVTKDSTTIVGDGTTQEEVNKRVTQIKNQIEATEQEYEREKLNERIAKLSGGVAVIQVGAQTETELKEKKLRVEDALNATKAAVEEGIVGGGCTLLRLASKVDAIIETLENDEQKVGAEIVRKSLSYPLKLIAKNAGVNGSVVTEKVLANENFRYGYNAATGEYEDLMAAGIIDPTKVVRCCLEHAASVAKTFITSDAVVVDAKVAEQAPSSPANPMAMGGGSGFGF

SEQ ID NO: 15192 - DNA, 2345 bp, Zea mays subsp. mays
  misc_feature (1)..(2345): Ceres Seq. ID no. 13599868
  misc_feature: MA Experiment ID: 108522 Result: Up-regulated in Transcription
  misc_feature: MA Experiment 108522 PARAMETER Experiment Name: Zm_42deg_Heat_P Parameter: Age (day) Value: 8
  misc_feature: MA Experiment 108522 PARAMETER Experiment Name: Zm_42deg_Heat_P Parameter: Organism Value: Zea mays
  misc_feature: MA Experiment 108522 PARAMETER Experiment Name: Zm_42deg_Heat_P Parameter: Plant Line Value: 35A19
  misc_feature: MA Experiment 108522 PARAMETER Experiment Name: Zm_42deg_Heat_P Parameter: Temperature (deg C) Value: 42 vs. 22
  misc_feature: MA Experiment 108522 PARAMETER Experiment Name: Zm_42deg_Heat_P Parameter: Timepoint (hr) Value: 1
  misc_feature: MA Experiment 108522 PARAMETER Experiment Name: Zm_42deg_Heat_P Parameter: Tissue Value: Aerial
taactccatgcacaaaactactccctgcgcaaaacacagagtagaatagaggctcaattaaccaatctttattaactccctgcgcaaaacacacggaatagaatacatgctcaattaatcaattaaccatttttttattaactccctgcacaaaactagcctaagcagtgatttttacagtaattttgataccttggcaccacgcttatattttgataaatcgtaccatatctatgatttatcttttgttaaatcatagatccctaacacttatattttgttgttatggacagtttgcatgaacacttgattgtacacctatatatcaattctacatgattgttgtttgcttgagattatttccccaaatattgatatgattccagattcatcatgacatgccatatgtttttttggatttgatgcttacatgtagatggataagaagaccaaggttatagtttgtgttgctgctgcacatatattactgtcatgtcaatgatggctatgattattcattctagaaaaagaaaacgaaatgcaaggaggactgggattacctatgcaccaatgcatgaaagggatagaactagaattgaatatctcaacacaaagatttggagggatgacacaacatgtataaacatgattagaatgaaaagggcttgtttctttcacctaactaaacattttagagagcgtggtttacttcaggacactatccatatgtgtgttgaacaacaagtggccatgtttctaaatacagttgggcataaccttagaaataggttgattggcatgaattttggtagatctggggaaacagttagtcgatgtttcaataaagttcttcgtgcaattggtgagctacgtggggaactaattaggccaccttcattggacactccaaccaaaatagcagggaactacagatgggatccgtattttaaggattgtattggagctattgatggtacacatgtaagagccactattcctagagatatggagcatgcctttcgtggtaggaagtcctatgcgactcaaaatgtaatggcggctgtagattttgatctacgcttcacttatgtgttggctggttgggagggaacatctcatgatgctaatgtattacgggatgctttagaacgtgtgaatggccttcgcgttccacaagctttggtaattggtcgtatagtccctcatcatcggaatggtggggtcacttatctttcactcacctaatgtggatccgaaggcagagaatcctaatgagatggttacagctggtgtgctttcaagccttcagaatttcctacgcaagtgcctcatagctatcctctcatatggcccaatgccgaagcacattgcatttattatggatggcaatcgtcgatatgctaaattcagaagcatgcaagaaggagctggtcacaggatgggtttctctacccttattgcaagtctgatgtactgctatgaaatgggtgtgaagtacatcactgtctacgcattcagcatcgacaattttaaaagggacccaagtgaggtggaatccttgatgcagttaatggaggaaaaaatcaacgaactcttagagaaccaaagtgtaatcaacaagattaactgtaagatcaacttttggggtaacttggacttgttatatgagccggtgcggttggcggctgagaagctgatggcgagcacagctgggaacacagggctggtcttttctatctgcatgccatacaactcgacttctgagattgtcaatgctgtcagtcaagtctgtgcggaaaggatggaaatgtttcagagcgaacatattggcgaatgcaatggtcatgctgcaaataacggtgtgcgatcagagatttcagtggcggatttggatcgccacatgtatagtgccgaatgcccagatcctgatattgtcatccggacttcgggcgagactcgattgagcaatttcctcctttggcagacaacgtttagtcacttgcagaatccagatcctctgtggcccgagttctcttttaggcaccttgtttgggctatcttgcagtatcagagagtttaccctgctctggagcataacagaaagttggctaagaagcagttgtgattccatgttatttgcaaggaggtatcatgaagggctattaacatcaaacttttccttctcaatttcccggtaatgggaaatgcaaagaacatactagcatataacattatgaatagatcaccatgtaacttaagtgtgattgctaccataaccatgtaacttatttgagctcgtacaaatgctgtgattcctaaatatatatatatagagtgcccggggt

SEQ ID NO: 15193 - protein, 303 aa, Zea mays subsp. mays; identical to SEQ ID NO: 1768
  peptide (1)..(303): Ceres Seq. ID no. 13599869
  misc_feature (55)..(293): Pfam Name: Putative undecaprenyl diphosphate synthase Pfam Description: Putative undecaprenyl diphosphate synthase
  misc_feature (1)..(303): Homolog of NCBI NO: 34898408 NR Description: ESTs C72761(E2193),AU056875(S20945), correspond to a region of the predicted gene.~Similar to Thermus gene for homocitrate synthase, homoaconitate hydratase, and
  misc_feature (27)..(297): Homolog of NCBI NO: 23491567 NR Description: cis-prenyltransferase [Periploca sepium]
  misc_feature (27)..(297): Homolog of NCBI NO: 18398467 NR Description: undecaprenyl pyrophosphate synthetase (UPP family [Arabidopsis thaliana] >gi|20198261|gb|AAD32914.2|
  misc_feature (27)..(297): Homolog of NCBI NO: 20336659 NR Description: hypothetical protein [Arabidopsis thaliana]
  misc_feature (46)..(297): Homolog of NCBI NO: 25314045 NR Description: hypothetical protein At2g17570 [imported] -
  misc_feature (27)..(300): Homolog of NCBI NO: 16751461 NR Description: cis-prenyltransferase [Hevea brasiliensis]
  misc_feature (27)..(300): Homolog of NCBI NO: 22213587 NR Description: cis-prenyltransferase 2 [Hevea brasiliensis]
  misc_feature (27)..(300): Homolog of NCBI NO: 16751459 NR Description: cis-prenyltransferase [Hevea brasiliensis]
  misc_feature (27)..(300): Homolog of NCBI NO: 22213585 NR Description: cis-prenyltransferase 1 [Hevea brasiliensis]
  misc_feature (27)..(300): Homolog of NCBI NO: 20563022 NR Description: cis-prenyltransferase2 [Hevea brasiliensis]

SEQ ID NO: 15194 - protein, 282 aa, Zea mays subsp. mays; identical to SEQ ID NO: 1769
  peptide (1)..(282): Ceres Seq. ID no. 13599870
  misc_feature (34)..(272): Pfam Name: Putative undecaprenyl diphosphate synthase Pfam Description: Putative undecaprenyl diphosphate synthase
  misc_feature (1)..(282): Homolog of NCBI NO: 34898408 NR Description: ESTs C72761(E2193),AU056875(S20945), correspond to a region of the predicted gene.~Similar to Thermus gene for homocitrate synthase, homoaconitate hydratase, and
  misc_feature (6)..(276): Homolog of NCBI NO: 23491567 NR Description: cis-prenyltransferase [Periploca sepium]
  misc_feature (6)..(276): Homolog of NCBI NO: 18398467 NR Description: undecaprenyl pyrophosphate synthetase (UPP family [Arabidopsis thaliana] >gi|20198261|gb|AAD32914.2|
  misc_feature (6)..(276): Homolog of NCBI NO: 20336659 NR Description: hypothetical protein [Arabidopsis thaliana]
  misc_feature (25)..(276): Homolog of NCBI NO: 25314045 NR Description: hypothetical protein At2g17570 [imported] -
  misc_feature (6)..(279): Homolog of NCBI NO: 16751461 NR Description: cis-prenyltransferase [Hevea brasiliensis]
  misc_feature (6)..(279): Homolog of NCBI NO: 22213587 NR Description: cis-prenyltransferase 2 [Hevea brasiliensis]
  misc_feature (6)..(279): Homolog of NCBI NO: 16751459 NR Description: cis-prenyltransferase [Hevea brasiliensis]
  misc_feature (6)..(279): Homolog of NCBI NO: 22213585 NR Description: cis-prenyltransferase 1 [Hevea brasiliensis]
  misc_feature (6)..(279): Homolog of NCBI NO: 20563022 NR Description: cis-prenyltransferase2 [Hevea brasiliensis]

SEQ ID NO: 15195 - protein, 256 aa, Zea mays subsp. mays; identical to SEQ ID NO: 1770
  peptide (1)..(256): Ceres Seq. ID no. 13599871
  misc_feature (8)..(246): Pfam Name: Putative undecaprenyl diphosphate synthase Pfam Description: Putative undecaprenyl diphosphate synthase
  misc_feature (1)..(256): Homolog of NCBI NO: 34898408 NR Description: ESTs C72761(E2193),AU056875(S20945), correspond to a region of the predicted gene.~Similar to Thermus gene for homocitrate synthase, homoaconitate hydratase, and
  misc_feature (1)..(250): Homolog of NCBI NO: 23491567 NR Description: cis-prenyltransferase [Periploca sepium]
  misc_feature (1)..(250): Homolog of NCBI NO: 18398467 NR Description: undecaprenyl pyrophosphate synthetase (UPP family [Arabidopsis thaliana] >gi|20198261|gb|AAD32914.2|
  misc_feature (1)..(250): Homolog of NCBI NO: 20336659 NR Description: hypothetical protein [Arabidopsis thaliana]
  misc_feature (1)..(250): Homolog of NCBI NO: 25314045 NR Description: hypothetical protein At2g17570 [imported] -
  misc_feature (1)..(253): Homolog of NCBI NO: 16751461 NR Description: cis-prenyltransferase [Hevea brasiliensis]
  misc_feature (1)..(253): Homolog of NCBI NO: 22213587 NR Description: cis-prenyltransferase 2 [Hevea brasiliensis]
  misc_feature (1)..(253): Homolog of NCBI NO: 16751459 NR Description: cis-prenyltransferase [Hevea brasiliensis]
  misc_feature (1)..(253): Homolog of NCBI NO: 22213585 NR Description: cis-prenyltransferase 1 [Hevea brasiliensis]
  misc_feature (1)..(253): Homolog of NCBI NO: 20563022 NR Description: cis-prenyltransferase2 [Hevea brasiliensis]

SEQ ID NO: 15196 - DNA, 706 bp, Zea mays subsp. mays
  misc_feature (1)..(706): Ceres Seq. ID no. 13589561
  misc_feature: MA Experiment ID: 108535 Result: Up-regulated in Transcription
  misc_feature: MA Experiment 108535 PARAMETER Experiment Name: Zm_Meristem_P Parameter: Age (day) Value: 8
  misc_feature: MA Experiment 108535 PARAMETER Experiment Name: Zm_Meristem_P Parameter: Organism Value: Zea mays
  misc_feature: MA Experiment 108535 PARAMETER Experiment Name: Zm_Meristem_P Parameter: Plant Line Value: 35A19
  misc_feature: MA Experiment 108535 PARAMETER Experiment Name: Zm_Meristem_P Parameter: Tissue Value: Root Meristem vs. Above Root Meristem
  misc_feature: MA Experiment ID: 20000534 Result: Down-regulated in Transcription
  misc_feature: MA Experiment 20000534 PARAMETER Experiment Name: Zm_Hybrid_Pollen_P Parameter: Age (day) Value: 8
  misc_feature: MA Experiment 20000534 PARAMETER Experiment Name: Zm_Hybrid_Pollen_P Parameter: Organism Value: Zea mays
  misc_feature: MA Experiment 20000534 PARAMETER Experiment Name: Zm_Hybrid_Pollen_P Parameter: Plant Line Value: 35A19
  misc_feature: MA Experiment 20000534 PARAMETER Experiment Name: Zm_Hybrid_Pollen_P Parameter: Tissue Value: Pollen vs. Aerial
gttggtgatgctgtaatggaaaattcatttctacgacctcttggccatttggagttggacctgccagatgccccagaaaaagccccacgtcctcctgcacaagctgttgacccattctcaaaatttgggccaaaggcagagatatcacatatattccgcgcaccagagaagaggccacccaaggagctctcgctcgcgttcacgggtctcacgcttctgccatctattggattcttgatagggctcgttcgtcttggagtgaacttgaagaacttcccgtccttgccaggaccggccgcatttgcctcacttttccatgctgggataggagcagtcctgatgctctacgttctcttctggatcaagttggaccttttcacaactctcaagtacctcggcttccttggcatcttccttgtgtttgtgggccatagggctctatcctacctttcctcggtgtcgacaaaacagaagacggcatgagtggacagagttttttccaaccatccatttcttgaggggggggccattgcaggcccttgggtgtcttatgagggagggctcggtttatttcagttggctttgcagaatactgataactagaaaaagtagtaggacctcaccttcgtgtattatgatgatgcacatacaattttctgagtagaatggatgttgaatcatagaactaatgaataatatgaacact

SEQ ID NO: 15197 - protein, 160 aa, Zea mays subsp. mays
  peptide (1)..(160): Ceres Seq. ID no. 13589562
  misc_feature (1)..(160): Homolog of NCBI NO: 34906860 NR Description: P0470A12.7 [Oryza sativa (japonica
  misc_feature (1)..(160): Homolog of NCBI NO: 22328844 NR Description: expressed protein [Arabidopsis thaliana] AT4g21150/F7J7_90 [Arabidopsis thaliana]
  misc_feature (1)..(132): Homolog of NCBI NO: 7486600 NR Description: hypothetical protein F7J7.90 - Arabidopsis >gi|2911072|emb|CAA17534.1| putative protein [Arabidopsis >gi|7268912|emb|CAB79115.1| putative protein [Arabidopsis
  misc_feature (1)..(158): Homolog of NCBI NO: 39598219 NR Description: Hypothetical protein CBG14887 [Caenorhabditis
  misc_feature (1)..(159): Homolog of NCBI NO: 17508279 NR Description: Ribophorin II (31.1 kD) [Caenorhabditis elegans]
  misc_feature (18)..(160): Homolog of NCBI NO: 29841329 NR Description: similar to GenBank Accession Number AK004968
  misc_feature (1)..(148): Homolog of NCBI NO: 14714733 NR Description: Rpn2 protein [Mus musculus]
  misc_feature (1)..(148): Homolog of NCBI NO: 34996495 NR Description: ribophorin II [Mus musculus] unnamed protein product [Mus musculus]
  misc_feature (1)..(157): Homolog of NCBI NO: 28436786 NR Description: Similar to ribophorin II [Xenopus laevis]
  misc_feature (1)..(148): Homolog of NCBI NO: 88567 NR Description: ribophorin II precursor - human
VGDAVMENSFLRPLGHLELDLPDAPEKAPRPPAQAVDPFSKFGPKAEISHIFRAPEKRPPKELSLAFTGLTLLPSIGFLIGLVRLGVNLKNFPSLPGPAAFASLFHAGIGAVLMLYVLFWIKLDLFTTLKYLGFLGIFLVFVGHRALSYLSSVSTKQKTA

SEQ ID NO: 15198 - protein, 155 aa, Zea mays subsp. mays
  peptide (1)..(155): Ceres Seq. ID no. 13589563
  misc_feature (1)..(155): Homolog of NCBI NO: 34906860 NR Description: P0470A12.7 [Oryza sativa (japonica
  misc_feature (1)..(155): Homolog of NCBI NO: 22328844 NR Description: expressed protein [Arabidopsis thaliana] AT4g21150/F7J7_90 [Arabidopsis thaliana]
  misc_feature (1)..(127): Homolog of NCBI NO: 7486600 NR Description: hypothetical protein F7J7.90 - Arabidopsis >gi|2911072|emb|CAA17534.1| putative protein [Arabidopsis >gi|7268912|emb|CAB79115.1| putative protein [Arabidopsis
  misc_feature (1)..(153): Homolog of NCBI NO: 39598219 NR Description: Hypothetical protein CBG14887 [Caenorhabditis
  misc_feature (1)..(154): Homolog of NCBI NO: 17508279 NR Description: Ribophorin II (31.1 kD) [Caenorhabditis elegans]
  misc_feature (13)..(155): Homolog of NCBI NO: 29841329 NR Description: similar to GenBank Accession Number AK004968
  misc_feature (1)..(143): Homolog of NCBI NO: 14714733 NR Description: Rpn2 protein [Mus musculus]
  misc_feature (1)..(143): Homolog of NCBI NO: 34996495 NR Description: ribophorin II [Mus musculus] unnamed protein product [Mus musculus]
  misc_feature (1)..(152): Homolog of NCBI NO: 28436786 NR Description: Similar to ribophorin II [Xenopus laevis]
  misc_feature (1)..(143): Homolog of NCBI NO: 88567 NR Description: ribophorin II precursor - human
MENSFLRPLGHLELDLPDAPEKAPRPPAQAVDPFSKFGPKAEISHIFRAPEKRPPKELSLAFTGLTLLPSIGFLIGLVRLGVNLKNFPSLPGPAAFASLFHAGIGAVLMLYVLFWIKLDLFTTLKYLGFLGIFLVFVGHRALSYLSSVSTKQKTA

SEQ ID NO: 15199 - DNA, 549 bp, Zea mays subsp. mays
  misc_feature (1)..(549): Ceres Seq. ID no. 13624847
  misc_feature: MA Experiment ID: 20000487 Result: Up-regulated in Transcription
  misc_feature: MA Experiment 20000487 PARAMETER Experiment Name: Zm_50mM_NH4NO3_L_to_H_P Parameter: Organism Value: Zea mays
  misc_feature: MA Experiment 20000487 PARAMETER Experiment Name: Zm_50mM_NH4NO3_L_to_H_P Parameter: Timepoint (hr) Value: 4
  misc_feature: MA Experiment 20000487 PARAMETER Experiment Name: Zm_50mM_NH4NO3_L_to_H_P Parameter: Tissue Value: Leaves
  misc_feature: MA Experiment 20000487 PARAMETER Experiment Name: Zm_50mM_NH4NO3_L_to_H_P Parameter: Treatment Value: 50mM NH4NO3 vs. 100mM Mannitol
gctagcttttgtctctgtgtcgccttcctcctcctaagtttgtaaacctaattttgagcaaagttcatagcttttatcttcctcatggccactcgtcttcagtttgagaataactgtgaagttggagtcttttcaaaactcactaacgcctattgcttagtcgctattggaggctctgagaatttttacagtgcttttgagtcggagttagctgatgttatccctatcgttaagacctctcttggtggaacacgaatcattggccgtctttgcgctggaaacaagaatggtcttcttgtccctcatacaactactgaccaagagcttcagcacttgaggaacagtttacctgatgcagttgtggtccagagaatcgaggaacgtctgtctgctcttggaaattgcattgcctgcaatgaccatgtcgcccttgctcacaccgatcttgacaaggaaactgaggagataatagcagatgtgcttggtgttgaagttttccgtcagacaattgcaggcaacattcttgttggcagttactgtgccttgtcc

SEQ ID NO: 15200 - protein, 155 aa, Zea mays subsp. mays
  peptide (1)..(155): Ceres Seq. ID no. 13624848
  misc_feature (3)..(154): Pfam Name: eIF-6 family Pfam Description: eIF-6 family
  misc_feature (1)..(154): Homolog of NCBI NO: 15228161 NR Description: eukaryotic translation initiation factor 6 - like protein [Arabidopsis thaliana] >gi|11280199|pir||T47701
  misc_feature (1)..(154): Homolog of NCBI NO: 27261099 NR Description: putative eukaryotic translation initiation factor
  misc_feature (1)..(154): Homolog of NCBI NO: 6016330 NR Description: EUKARYOTIC TRANSLATION INITIATION FACTOR 6 (EIF-6)
  misc_feature (1)..(154): Homolog of NCBI NO: 6325273 NR Description: similar to human translation initiation factor 6 however, TIF6 does not act as a true translation initiation protein may be involved in the biogenesis and or stability of the
  misc_feature (1)..(154): Homolog of NCBI NO: 11513605 NR Description: Chain A, Crystal Structure Of S.Cerevisiae Eif6
  misc_feature (1)..(154): Homolog of NCBI NO: 19075991 NR Description: eukaryotic translation initiation factor 6
  misc_feature (1)..(154): Homolog of NCBI NO: 21492634 NR Description: CG17611-PA [Drosophila melanogaster]
  misc_feature (1)..(154): Homolog of NCBI NO: 27501448 NR Description: integrin beta 4 binding protein [Mus musculus]
  misc_feature (1)..(154): Homolog of NCBI NO: 31242655 NR Description: ENSANGP00000017466 [Anopheles gambiae]
  misc_feature (1)..(154): Homolog of NCBI NO: 6381991 NR Description: b4 integrin interactor homolog [Mus musculus]
MATRLQFENNCEVGVFSKLTNAYCLVAIGGSENFYSAFESELADVIPIVKTSLGGTRIIGRLCAGNKNGLLVPHTTTDQELQHLRNSLPDAVVVQRIEERLSALGNCIACNDHVALAHTDLDKETEEIIADVLGVEVFRQTIAGNILVGSYCALS

SEQ ID NO: 15201 - DNA, 573 bp, Zea mays subsp. mays
  misc_feature (1)..(573): Ceres Seq. ID no. 13624849
  misc_feature: MA Experiment ID: 108523 Result: Down-regulated in Transcription
  misc_feature: MA Experiment 108523 PARAMETER Experiment Name: Zm_42deg_Heat_P Parameter: Age (day) Value: 8
  misc_feature: MA Experiment 108523 PARAMETER Experiment Name: Zm_42deg_Heat_P Parameter: Organism Value: Zea mays
  misc_feature: MA Experiment 108523 PARAMETER Experiment Name: Zm_42deg_Heat_P Parameter: Plant Line Value: 35A19
  misc_feature: MA Experiment 108523 PARAMETER Experiment Name: Zm_42deg_Heat_P Parameter: Temperature (deg C) Value: 42 vs. 22
  misc_feature: MA Experiment 108523 PARAMETER Experiment Name: Zm_42deg_Heat_P Parameter: Timepoint (hr) Value: 6
  misc_feature: MA Experiment 108523 PARAMETER Experiment Name: Zm_42deg_Heat_P Parameter: Tissue Value: Aerial
  misc_feature: MA Experiment ID: 108528 Result: Down-regulated in Transcription
  misc_feature: MA Experiment 108528 PARAMETER Experiment Name: Zm_Imbibed_Seeds_P Parameter: Age (day) Value: 5 vs. 2
  misc_feature: MA Experiment 108528 PARAMETER Experiment Name: Zm_Imbibed_Seeds_P Parameter: Organism Value: Zea mays
  misc_feature: MA Experiment 108528 PARAMETER Experiment Name: Zm_Imbibed_Seeds_P Parameter: Plant Line Value: 35A19
  misc_feature: MA Experiment 108528 PARAMETER Experiment Name: Zm_Imbibed_Seeds_P Parameter: Tissue Value: Aerial vs. Embryo
acgaccatgatttggtaaagaaagcaggaggaagccggcggtgtaggcgacccatggctccacagacgaggagagagaggttggcgggggaggcgcggccgagctcgtcggggctaacaccggcgaagccgggggcggtcgaggtgcagcgccgacgggtgggcagcggttggacgagccgtcggatctccatctacgcctcccgagtctacttcctcctcatcatgctccagatcccgctcttcagggtcccttgtagagctggcacatgcacaactcctattcaagtaacatcatctcagttggtctcaaatgatatattcccagcagctgttgtgaaggccatgctctaccctggagctaccgtgagcagcctaactaaaagcaagacatttccgagttggaatgacctgtttgacatgtacaacctgacagaagcaaaaaatgcttctgcagtagttgatctccagcgtctagagatacttgccggaagctacttctgtgttgctggagcgctcattggcatcataaatcctgggaggatgactttgtttggtacccttttgattatct

SEQ ID NO: 15202 - protein, 190 aa, Zea mays subsp. mays
  peptide (1)..(190): Ceres Seq. ID no. 13624850
  misc_feature (18)..(189): Homolog of NCBI NO: 34913974 NR Description: B1110C07.25 [Oryza sativa (japonica
  misc_feature (56)..(189): Homolog of NCBI NO: 18416514 NR Description: expressed protein [Arabidopsis thaliana] unknown protein [Arabidopsis thaliana]
  misc_feature (56)..(189): Homolog of NCBI NO: 17064978 NR Description: putative protein [Arabidopsis thaliana]
  misc_feature (104)..(189): Homolog of NCBI NO: 8953390 NR Description: putative protein [Arabidopsis thaliana]
  misc_feature (83)..(189): Homolog of NCBI NO: 15220078 NR Description: hypothetical protein [Arabidopsis thaliana]
DHDLVKKAGGSRRCRRPMAPQTRRERLAGEARPSSSGLTPAKPGAVEVQRRRVGSGWTSRRISIYASRVYFLLIMLQIPLFRVPCRAGTCTTPIQVTSSQLVSNDIFPAAVVKAMLYPGATVSSLTKSKTFPSWNDLFDMYNLTEAKNASAVVDLQRLEILAGSYFCVAGALIGIINPGRMTLFGTLLII

SEQ ID NO: 15203 - protein, 173 aa, Zea mays subsp. mays
  peptide (1)..(173): Ceres Seq. ID no. 13624851
  misc_feature (1)..(172): Homolog of NCBI NO: 34913974 NR Description: B1110C07.25 [Oryza sativa (japonica
  misc_feature (39)..(172): Homolog of NCBI NO: 18416514 NR Description: expressed protein [Arabidopsis thaliana] unknown protein [Arabidopsis thaliana]
  misc_feature (39)..(172): Homolog of NCBI NO: 17064978 NR Description: putative protein [Arabidopsis thaliana]
  misc_feature (87)..(172): Homolog of NCBI NO: 8953390 NR Description: putative protein [Arabidopsis thaliana]
  misc_feature (66)..(172): Homolog of NCBI NO: 15220078 NR Description: hypothetical protein [Arabidopsis thaliana]
MAPQTRRERLAGEARPSSSGLTPAKPGAVEVQRRRVGSGWTSRRISIYASRVYFLLIMLQIPLFRVPCRAGTCTTPIQVTSSQLVSNDIFPAAVVKAMLYPGATVSSLTKSKTFPSWNDLFDMYNLTEAKNASAVVDLQRLEILAGSYFCVAGALIGIINPGRMTLFGTLLII

SEQ ID NO: 15204 - protein, 116 aa, Zea mays subsp. mays
  peptide (1)..(116): Ceres Seq. ID no. 13624852
  misc_feature (1)..(115): Homolog of NCBI NO: 34913974 NR Description: B1110C07.25 [Oryza sativa (japonica
  misc_feature (1)..(115): Homolog of NCBI NO: 18416514 NR Description: expressed protein [Arabidopsis thaliana] unknown protein [Arabidopsis thaliana]
  misc_feature (1)..(115): Homolog of NCBI NO: 17064978 NR Description: putative protein [Arabidopsis thaliana]
  misc_feature (30)..(115): Homolog of NCBI NO: 8953390 NR Description: putative protein [Arabidopsis thaliana]
  misc_feature (9)..(115): Homolog of NCBI NO: 15220078 NR Description: hypothetical protein [Arabidopsis thaliana]
MLQIPLFRVPCRAGTCTTPIQVTSSQLVSNDIFPAAVVKAMLYPGATVSSLTKSKTFPSWNDLFDMYNLTEAKNASAVVDLQRLEILAGSYFCVAGALIGIINPGRMTLFGTLLII

SEQ ID NO: 15205 - DNA, 538 bp, Zea mays subsp. mays
  misc_feature (1)..(538): Ceres Seq. ID no. 13625118
  misc_feature: MA Experiment ID: 108544 Result: Down-regulated in Transcription
  misc_feature: MA Experiment ID: 108687 Result: Up-regulated in Transcription
  misc_feature: MA Experiment 108687 PARAMETER Experiment Name: Zm_Embryos-Flowers__P Parameter: Tissue Value: Embryo vs. Aerial+
  misc_feature: MA Experiment ID: 20000535 Result: Up-regulated in Transcription
  misc_feature: MA Experiment 20000535 PARAMETER Experiment Name: Zm_Hybrid_Seed_Dev_P Parameter: DAP Value: 30 vs. 12
  misc_feature: MA Experiment 20000535 PARAMETER Experiment Name: Zm_Hybrid_Seed_Dev_P Parameter: Organism Value: Zea mays
  misc_feature: MA Experiment 20000535 PARAMETER Experiment Name: Zm_Hybrid_Seed_Dev_P Parameter: Plant Line Value: 35A19
  misc_feature: MA Experiment 20000535 PARAMETER Experiment Name: Zm_Hybrid_Seed_Dev_P Parameter: Tissue Value: Embryo vs. Unfert Floret
attgcgcacaccttgatgctgggcatgagcaggacggggttggccggagcggcgctgcgggtggcgctgacggcgctgctgccgctggtcctgccggcgtactacgtgtacaagctgaccacgtacctcctcggcgccgtcttccccgaggacgtcgccggcaaggtggtactcatcaccggcgcctcctccggcatcggcgagcacctggcctatgagtacgcgaagcggggagcctacctggnnnnnggtggcgaggagggaggcgagcctccgcgaggtcggcgacgtcgcgctggggctgggctcgccgggcgtcctcgtcctcccggctgacgtctccaagcctcgggactgcgagggcttcatcgacgacacgattagctacttcggtagactggatcacctggtgaacaacgcgtccatctggcaagtgtgcaagttcgaagagatccaggacgtcaggcacttgagagccctgatggacatcaacttctggggccacgtgtacccaacccggctcgccatccctcacctc

SEQ ID NO: 15206 - protein, 111 aa, Zea mays subsp. mays
  peptide (1)..(111): Ceres Seq. ID no. 13625119
  misc_feature (17)..(81): Homolog of NCBI NO: 21742781 NR Description: OSJNBa0055C08.3 [Oryza sativa (japonica
  misc_feature (31)..(81): Homolog of NCBI NO: 15824408 NR Description: steroleosin [Sesamum indicum]
  misc_feature (31)..(81): Homolog of NCBI NO: 18423187 NR Description: short-chain dehydrogenase/reductase family protein
  misc_feature (23)..(81): Homolog of NCBI NO: 15232779 NR Description: short-chain dehydrogenase/reductase family protein
  misc_feature (19)..(81): Homolog of NCBI NO: 8777392 NR Description: 11-beta-hydroxysteroid dehydrogenase-like
  misc_feature (19)..(81): Homolog of NCBI NO: 15241203 NR Description: short-chain dehydrogenase/reductase family protein
  misc_feature (25)..(81): Homolog of NCBI NO: 15232777 NR Description: short-chain dehydrogenase/reductase family protein
  misc_feature (50)..(81): Homolog of NCBI NO: 21311775 NR Description: steroleosin-B [Sesamum indicum]
  misc_feature (21)..(91): Homolog of NCBI NO: 15241261 NR Description: short-chain dehydrogenase/reductase family [Arabidopsis thaliana] >gi|8777400|dbj|BAA96990.1| contains
  misc_feature (50)..(81): Homolog of NCBI NO: 15234888 NR Description: short-chain dehydrogenase/reductase family protein
  misc_feature (82)..(82): Xaa is any aa, unknown or other
  misc_feature (83)..(83): Xaa is any aa, unknown or other
IAHTLMLGMSRTGLAGAALRVALTALLPLVLPAYYVYKLTTYLLGAVFPEDVAGKVVLITGASSGIGEHLAYEYAKRGAYLXXGGEEGGEPPRGRRRRAGAGLAGRPRPPG

SEQ ID NO: 15207 - protein, 108 aa, Zea mays subsp. mays
  peptide (1)..(108): Ceres Seq. ID no. 13625120
  misc_feature (13)..(107): Homolog of NCBI NO: 21742781 NR Description: OSJNBa0055C08.3 [Oryza sativa (japonica
  misc_feature (14)..(107): Homolog of NCBI NO: 15824408 NR Description: steroleosin [Sesamum indicum]
  misc_feature (14)..(107): Homolog of NCBI NO: 18423187 NR Description: short-chain dehydrogenase/reductase family protein
  misc_feature (13)..(107): Homolog of NCBI NO: 15232779 NR Description: short-chain dehydrogenase/reductase family protein
  misc_feature (13)..(107): Homolog of NCBI NO: 8777392 NR Description: 11-beta-hydroxysteroid dehydrogenase-like
  misc_feature (13)..(107): Homolog of NCBI NO: 15232777 NR Description: short-chain dehydrogenase/reductase family protein
  misc_feature (13)..(107): Homolog of NCBI NO: 15241203 NR Description: short-chain dehydrogenase/reductase family protein
  misc_feature (13)..(107): Homolog of NCBI NO: 21311775 NR Description: steroleosin-B [Sesamum indicum]
  misc_feature (16)..(107): Homolog of NCBI NO: 15241261 NR Description: short-chain dehydrogenase/reductase family [Arabidopsis thaliana] >gi|8777400|dbj|BAA96990.1| contains
  misc_feature (13)..(107): Homolog of NCBI NO: 15234888 NR Description: short-chain dehydrogenase/reductase family protein
  misc_feature (11)..(11): Xaa is any aa, unknown or other
  misc_feature (12)..(12): Xaa is any aa, unknown or other
MSTRSGEPTWXXVARREASLREVGDVALGLGSPGVLVLPADVSKPRDCEGFIDDTISYFGRLDHLVNNASIWQVCKFEEIQDVRHLRALMDINFWGHVYPTRLAIPHL

SEQ ID NO: 15208 - protein, 106 aa, Zea mays subsp. mays
  peptide (1)..(106): Ceres Seq. ID no. 13625121
  misc_feature (12)..(76): Homolog of NCBI NO: 21742781 NR Description: OSJNBa0055C08.3 [Oryza sativa (japonica
  misc_feature (26)..(76): Homolog of NCBI NO: 15824408 NR Description: steroleosin [Sesamum indicum]
  misc_feature (26)..(76): Homolog of NCBI NO: 18423187 NR Description: short-chain dehydrogenase/reductase family protein
  misc_feature (18)..(76): Homolog of NCBI NO: 15232779 NR Description: short-chain dehydrogenase/reductase family protein
  misc_feature (14)..(76): Homolog of NCBI NO: 8777392 NR Description: 11-beta-hydroxysteroid dehydrogenase-like
  misc_feature (14)..(76): Homolog of NCBI NO: 15241203 NR Description: short-chain dehydrogenase/reductase family protein
  misc_feature (20)..(76): Homolog of NCBI NO: 15232777 NR Description: short-chain dehydrogenase/reductase family protein
  misc_feature (45)..(76): Homolog of NCBI NO: 21311775 NR Description: steroleosin-B [Sesamum indicum]
  misc_feature (16)..(86): Homolog of NCBI NO: 15241261 NR Description: short-chain dehydrogenase/reductase family [Arabidopsis thaliana] >gi|8777400|dbj|BAA96990.1| contains
  misc_feature (45)..(76): Homolog of NCBI NO: 15234888 NR Description: short-chain dehydrogenase/reductase family protein
  misc_feature (77)..(77): Xaa is any aa, unknown or other
  misc_feature (78)..(78): Xaa is any aa, unknown or other
MLGMSRTGLAGAALRVALTALLPLVLPAYYVYKLTTYLLGAVFPEDVAGKVVLITGASSGIGEHLAYEYAKRGAYLXXGGEEGGEPPRGRRRRAGAGLAGRPRPPG

SEQ ID NO: 15209 - DNA, 596 bp, Zea mays subsp. mays
  misc_feature (1)..(596): Ceres Seq. ID no. 13625083
  misc_feature: MA Experiment ID: 20000492 Result: Up-regulated in Transcription
  misc_feature: MA Experiment 20000492 PARAMETER Experiment Name: Zm_Hybrid_Seed_Dev_P Parameter: DAP Value: 12
  misc_feature: MA Experiment 20000492 PARAMETER Experiment Name: Zm_Hybrid_Seed_Dev_P Parameter: Organism Value: Zea mays
  misc_feature: MA Experiment 20000492 PARAMETER Experiment Name: Zm_Hybrid_Seed_Dev_P Parameter: Plant Line Value: 35A19
  misc_feature: MA Experiment 20000492 PARAMETER Experiment Name: Zm_Hybrid_Seed_Dev_P Parameter: Tissue Value: Fert Kernel vs. Unfert Floret
acagtgcctctcgctcactgactgactactgtaataccagagatcgaacaacttggtcctgcagctcaagaagagagttttgtgcatttgggggccgggggcaagagagagagagagagccatggcggcggaccagcagccgcagctgcaggaggagatgaacgacgctgccggcggcggcctcaggctgcctccagggttccgcttccacccgagcgacttcgagattgtcagcttctacctcaccaacaaggtgctcaacacgcgcttcacctgcaccgccatcacggaggccgacctaaacaagattgagccatgggacctcccgagcaaggcgaagatgggcgagaaagagtggtacttcttctaccagaaggaccgcaagtacccgacggggctgagggcgaaccgggccaccgaggccggttactggaaggcgacgggcaaggacaaggaggtctacaacgccgcggaaggggtggcggtactggtcggcatgaagaagacgctcgtcttctacaggggcagggctcccaggggtgacaagacaaactgggtcatgcacgagtacaggctcgaaggcagcggcaggctcc

SEQ ID NO: 15210 - protein, 158 aa, Zea mays subsp. mays
  peptide (1)..(158): Ceres Seq. ID no. 13625084
  misc_feature (23)..(153): Pfam Name: No apical meristem (NAM) protein Pfam Description: No apical meristem (NAM) protein
  misc_feature (1)..(157): Homolog of NCBI NO: 32527660 NR Description: NAM-related protein 1 [Zea mays]
  misc_feature (23)..(154): Homolog of NCBI NO: 30686737 NR Description: NAM (no apical meristem)-related protein
  misc_feature (23)..(154): Homolog of NCBI NO: 9758909 NR Description: NAM (no apical meristem)-like protein thaliana] >gi|28973617|gb|AAO64133.1| putative NAM (no apical protein [Arabidopsis thaliana] >gi|29824189|gb|AAP04055.1|
  misc_feature (23)..(154): Homolog of NCBI NO: 1279640 NR Description: NAM [Petunia x hybrida]
  misc_feature (23)..(154): Homolog of NCBI NO: 15241819 NR Description: NAM / CUC2 - like protein [Arabidopsis thaliana] contains similarity to NAM (no apical meristem) [Arabidopsis thaliana] >gi|15810577|gb|AAL07176.1| putative NAM /
  misc_feature (23)..(154): Homolog of NCBI NO: 21536866 NR Description: NAM / CUC2-like protein [Arabidopsis thaliana]
  misc_feature (9)..(154): Homolog of NCBI NO: 34902148 NR Description: Putative NAM (no apical meristem) protein [Oryza
  misc_feature (23)..(154): Homolog of NCBI NO: 15240252 NR Description: NAM, no apical meristem, - like protein
  misc_feature (23)..(154): Homolog of NCBI NO: 21537315 NR Description: NAM, no apical meristem,-like protein
  misc_feature (26)..(154): Homolog of NCBI NO: 21389172 NR Description: nam-like protein 17 [Petunia x hybrida]
MAADQQPQLQEEMNDAAGGGLRLPPGFRFHPSDFEIVSFYLTNKVLNTRFTCTAITEADLNKIEPWDLPSKAKMGEKEWYFFYQKDRKYPTGLRANRATEAGYWKATGKDKEVYNAAEGVAVLVGMKKTLVFYRGRAPRGDKTNWVMHEYRLEGSGRL

SEQ ID NO: 15211 - protein, 146 aa, Zea mays subsp. mays
  peptide (1)..(146): Ceres Seq. ID no. 13625085
  misc_feature (11)..(141): Pfam Name: No apical meristem (NAM) protein Pfam Description: No apical meristem (NAM) protein
  misc_feature (11)..(142): Homolog of NCBI NO: 15241819 NR Description: NAM / CUC2 - like protein [Arabidopsis thaliana] contains similarity to NAM (no apical meristem) [Arabidopsis thaliana] >gi|15810577|gb|AAL07176.1| putative NAM /
  misc_feature (11)..(142): Homolog of NCBI NO: 21536866 NR Description: NAM / CUC2-like protein [Arabidopsis thaliana]
  misc_feature (1)..(142): Homolog of NCBI NO: 34902148 NR Description: Putative NAM (no apical meristem) protein [Oryza
  misc_feature (1)..(145): Homolog of NCBI NO: 32527660 NR Description: NAM-related protein 1 [Zea mays]
  misc_feature (11)..(142): Homolog of NCBI NO: 9758909 NR Description: NAM (no apical meristem)-like protein thaliana] >gi|28973617|gb|AAO64133.1| putative NAM (no apical protein [Arabidopsis thaliana] >gi|29824189|gb|AAP04055.1|
  misc_feature (11)..(142): Homolog of NCBI NO: 1279640 NR Description: NAM [Petunia x hybrida]
  misc_feature (11)..(142): Homolog of NCBI NO: 30686737 NR Description: NAM (no apical meristem)-related protein
  misc_feature (11)..(142): Homolog of NCBI NO: 15240252 NR Description: NAM, no apical meristem, - like protein
  misc_feature (11)..(142): Homolog of NCBI NO: 21537315 NR Description: NAM, no apical meristem,-like protein
  misc_feature (14)..(142): Homolog of NCBI NO: 21389172 NR Description: nam-like protein 17 [Petunia x hybrida]
MNDAAGGGLRLPPGFRFHPSDFEIVSFYLTNKVLNTRFTCTAITEADLNKIEPWDLPSKAKMGEKEWYFFYQKDRKYPTGLRANRATEAGYWKATGKDKEVYNAAEGVAVLVGMKKTLVFYRGRAPRGDKTNWVMHEYRLEGSGRL

SEQ ID NO: 15212 - protein, 85 aa, Zea mays subsp. mays
  peptide (1)..(85): Ceres Seq. ID no. 13625086
  misc_feature (1)..(80): Pfam Name: No apical meristem (NAM) protein Pfam Description: No apical meristem (NAM) protein
  misc_feature (1)..(84): Homolog of NCBI NO: 32527660 NR Description: NAM-related protein 1 [Zea mays]
  misc_feature (1)..(81): Homolog of NCBI NO: 30686737 NR Description: NAM (no apical meristem)-related protein
  misc_feature (1)..(81): Homolog of NCBI NO: 9758909 NR Description: NAM (no apical meristem)-like protein thaliana] >gi|28973617|gb|AAO64133.1| putative NAM (no apical protein [Arabidopsis thaliana] >gi|29824189|gb|AAP04055.1|
  misc_feature (1)..(81): Homolog of NCBI NO: 1279640 NR Description: NAM [Petunia x hybrida]
  misc_feature (1)..(81): Homolog of NCBI NO: 15241819 NR Description: NAM / CUC2 - like protein [Arabidopsis thaliana] contains similarity to NAM (no apical meristem) [Arabidopsis thaliana] >gi|15810577|gb|AAL07176.1| putative NAM /
  misc_feature (1)..(81): Homolog of NCBI NO: 21536866 NR Description: NAM / CUC2-like protein [Arabidopsis thaliana]
  misc_feature (1)..(81): Homolog of NCBI NO: 34902148 NR Description: Putative NAM (no apical meristem) protein [Oryza
  misc_feature (1)..(81): Homolog of NCBI NO: 15240252 NR Description: NAM, no apical meristem, - like protein
  misc_feature (1)..(81): Homolog of NCBI NO: 21537315 NR Description: NAM, no apical meristem,-like protein
  misc_feature (1)..(81): Homolog of NCBI NO: 21389172 NR Description: nam-like protein 17 [Petunia x hybrida]
MGEKEWYFFYQKDRKYPTGLRANRATEAGYWKATGKDKEVYNAAEGVAVLVGMKKTLVFYRGRAPRGDKTNWVMHEYRLEGSGRL

SEQ ID NO: 15213 - DNA, 834 bp, Zea mays subsp. mays
  misc_feature (1)..(834): Ceres Seq. ID no. 13636282
  misc_feature: MA Experiment ID: 108522 Result: Up-regulated in Transcription
  misc_feature: MA Experiment 108522 PARAMETER Experiment Name: Zm_42deg_Heat_P Parameter: Age (day) Value: 8
  misc_feature: MA Experiment 108522 PARAMETER Experiment Name: Zm_42deg_Heat_P Parameter: Organism Value: Zea mays
  misc_feature: MA Experiment 108522 PARAMETER Experiment Name: Zm_42deg_Heat_P Parameter: Plant Line Value: 35A19
  misc_feature: MA Experiment 108522 PARAMETER Experiment Name: Zm_42deg_Heat_P Parameter: Temperature (deg C) Value: 42 vs. 22
  misc_feature: MA Experiment 108522 PARAMETER Experiment Name: Zm_42deg_Heat_P Parameter: Timepoint (hr) Value: 1
  misc_feature: MA Experiment 108522 PARAMETER Experiment Name: Zm_42deg_Heat_P Parameter: Tissue Value: Aerial
gtgctttcttagaggtgggttggcttctcctccccctccggttcgggttcgggttcgtgaggttctccggggttcggtttcgtgggtgagcggatcgagatggcggcgtcggatgttgagtaccgctgcttcgtcggcggcctcgcctgggccacggacgaccactccctccacaacgccttcagcacctacggcgaggtcctcgagtccaagatcatcctcgatcgggagacgcagaggtcccgcggcttcggcttcgtcaccttctccacggaggagcgcatgcggaaccgcatcgagggcatgaacggcaaggagctggacggccgcaacatcaccgtcaacgaggcccagtcccgcggcggccgtggaggcggcggcggtgggtacggtggtggccgtggaggcggcggctacggcggtggcgggcgccgtgatggcggcggcggctacggcggtggcggcggctacggtggcggcggcggctacggtggtggtggcggcggctacggcggtggcaaccgtggcggcggctacggcaactccgacgggaactggaggaactgagcggtggggcccgcgcggccaagttatcctgttcgctgccgtgatgtttaccctagtccagagggtttatcttcgttcgtctcgtgtttgttgttgcccatctgtgtttttgattgcaaggtcgctctgtgtcagttgttagtgctgtgttcatcctcggctccagcagacccatgcatcaaacagcatggactgcggatcgatggatgctgttacccccgtcaggctttattctaagttaatcttaaggaaaaaatggtgcttctt

SEQ ID NO: 15214 - protein, 155 aa, Zea mays subsp. mays
  peptide (1)..(155): Ceres Seq. ID no. 13636283
  misc_feature (10)..(81): Pfam Name: RNA recognition motif. (a.k.a. RRM, RBD, or RNP domain) Pfam Description: RNA recognition motif. (a.k.a. RRM, RBD, or RNP
  misc_feature (1)..(155): Homolog of NCBI NO: 82696 NR Description: glycine-rich protein - maize
  misc_feature (1)..(155): Homolog of NCBI NO: 20257675 NR Description: glycine-rich RNA binding protein [Zea mays]
  misc_feature (1)..(155): Homolog of NCBI NO: 20257691 NR Description: glycine-rich RNA binding protein [Zea mays]
  misc_feature (1)..(155): Homolog of NCBI NO: 20257683 NR Description: glycine-rich RNA binding protein [Zea mays]
  misc_feature (1)..(155): Homolog of NCBI NO: 20257699 NR Description: glycine-rich RNA binding protein [Zea mays]
  misc_feature (1)..(155): Homolog of NCBI NO: 20257693 NR Description: glycine-rich RNA binding protein [Zea mays]
  misc_feature (1)..(155): Homolog of NCBI NO: 20257667 NR Description: glycine-rich RNA binding protein [Zea mays]
  misc_feature (1)..(155): Homolog of NCBI NO: 20257669 NR Description: glycine-rich RNA binding protein [Zea mays]
  misc_feature (1)..(155): Homolog of NCBI NO: 20257709 NR Description: glycine-rich RNA binding protein [Zea mays]
  misc_feature (1)..(155): Homolog of NCBI NO: 20257687 NR Description: glycine-rich RNA binding protein [Zea mays]
MAASDVEYRCFVGGLAWATDDHSLHNAFSTYGEVLESKIILDRETQRSRGFGFVTFSTEERMRNRIEGMNGKELDGRNITVNEAQSRGGRGGGGGGYGGGRGGGGYGGGGRRDGGGGYGGGGGYGGGGGYGGGGGGYGGGNRGGGYGNSDGNWRN

SEQ ID NO: 15215 - protein, 101 aa, Zea mays subsp. mays
  peptide (1)..(101): Ceres Seq. ID no. 13636284
  misc_feature (40)..(101): Pfam Name: Equine herpesvirus glycoprotein gp2 Pfam Description: Equine herpesvirus glycoprotein gp2
CFLRGGLASPPPPVRVRVREVLRGSVSWVSGSRWRRRMLSTAASSAASPGPRTTTPSTTPSAPTARSSSPRSSSIGRRRGPAASASSPSPRRSACGTASRA

SEQ ID NO: 15216 - protein, 94 aa, Zea mays subsp. mays
  peptide (1)..(94): Ceres Seq. ID no. 13636285
  misc_feature (9)..(94): Pfam Name: Herpesvirus latent membrane protein 1 (LMP1) Pfam Description: Herpesvirus latent membrane protein 1 (LMP1)
  misc_feature (1)..(94): Homolog of NCBI NO: 82696 NR Description: glycine-rich protein - maize
  misc_feature (1)..(94): Homolog of NCBI NO: 20257675 NR Description: glycine-rich RNA binding protein [Zea mays]
  misc_feature (1)..(94): Homolog of NCBI NO: 20257691 NR Description: glycine-rich RNA binding protein [Zea mays]
  misc_feature (1)..(94): Homolog of NCBI NO: 20257683 NR Description: glycine-rich RNA binding protein [Zea mays]
  misc_feature (1)..(94): Homolog of NCBI NO: 20257699 NR Description: glycine-rich RNA binding protein [Zea mays]
  misc_feature (1)..(94): Homolog of NCBI NO: 20257693 NR Description: glycine-rich RNA binding protein [Zea mays]
  misc_feature (1)..(94): Homolog of NCBI NO: 20257667 NR Description: glycine-rich RNA binding protein [Zea mays]
  misc_feature (1)..(94): Homolog of NCBI NO: 20257669 NR Description: glycine-rich RNA binding protein [Zea mays]
  misc_feature (1)..(94): Homolog of NCBI NO: 20257709 NR Description: glycine-rich RNA binding protein [Zea mays]
  misc_feature (1)..(94): Homolog of NCBI NO: 20257687 NR Description: glycine-rich RNA binding protein [Zea mays]
MRNRIEGMNGKELDGRNITVNEAQSRGGRGGGGGGYGGGRGGGGYGGGGRRDGGGGYGGGGGYGGGGGYGGGGGGYGGGNRGGGYGNSDGNWRN

SEQ ID NO: 15217 - DNA, 589 bp, Zea mays subsp. mays
  misc_feature (1)..(589): Ceres Seq. ID no. 13637313
  misc_feature: MA Experiment ID: 108535 Result: Up-regulated in Transcription
  misc_feature: MA Experiment 108535 PARAMETER Experiment Name: Zm_Meristem_P Parameter: Age (day) Value: 8
  misc_feature: MA Experiment 108535 PARAMETER Experiment Name: Zm_Meristem_P Parameter: Organism Value: Zea mays
  misc_feature: MA Experiment 108535 PARAMETER Experiment Name: Zm_Meristem_P Parameter: Plant Line Value: 35A19
  misc_feature: MA Experiment 108535 PARAMETER Experiment Name: Zm_Meristem_P Parameter: Tissue Value: Root Meristem vs. Above Root Meristem
  misc_feature: MA Experiment ID: 108543 Result: Up-regulated in Transcription
  misc_feature: MA Experiment ID: 20000632 Result: Down-regulated in Transcription
  misc_feature: MA Experiment 20000632 PARAMETER Experiment Name: Zm_Herbicide-Treatments_P Parameter: Timepoint (hr) Value: 4
  misc_feature: MA Experiment 20000632 PARAMETER Experiment Name: Zm_Herbicide-Treatments_P Parameter: Tissue Value: Aerial
  misc_feature: MA Experiment 20000632 PARAMETER Experiment Name: Zm_Herbicide-Treatments_P Parameter: Treatment Value: Glean vs. No Treatment
aaaaaaaaatccccttgctcacgcgctctctgccccgcttgctatatcctcctagagcccagccaaatcccccgccgtcctcctgttcatctcctcttctccctctcctcctcctcctcctcgtcccccttcctcgggttggaaattggaatggaggcggcgacgatggcgtggacggcggcggtggtcggggcggggctggtgtactggttcgtgtgggtgatgggcgcggcggaggtgaagggcaagcgggcggtggatctcaagatgggatccatcacgcgggacaaggtgcaggacaagtacacccagtactggtccttcttccgccggcccaaggagacggccaccacggcggcgtcggcggagaaggtgccggccttcgtggacaccttctacaacctggtgaccgacatctacgagtggggctggggccagtccttccacttctcgccgtccctgcccggccgctcccaccgcgacgccacgcgcgtccacgaggagcgcgtcgccgacctcctcggcgcccggccgggccaccgcctcctcgacgtcggctgcggcgtcggcgggcccatgcgcgctatcg

SEQ ID NO: 15218 - protein, 196 aa, Zea mays subsp. mays
  peptide (1)..(196): Ceres Seq. ID no. 13637314
  misc_feature (51)..(195): Homolog of NCBI NO: 3560533 NR Description: 24-methylene lophenol C24(1)methyltransferase
  misc_feature (51)..(195): Homolog of NCBI NO: 7443718 NR Description: probable sterol 24-C-methyltransferase (EC
  misc_feature (51)..(195): Homolog of NCBI NO: 1061040 NR Description: sterol-C-methyltransferase [Arabidopsis thaliana]
  misc_feature (51)..(195): Homolog of NCBI NO: 15217917 NR Description: sterol-C-methyltransferase [Arabidopsis thaliana]
  misc_feature (51)..(195): Homolog of NCBI NO: 23397216 NR Description: putative sterol-C-methyltransferase [Arabidopsis
  misc_feature (51)..(195): Homolog of NCBI NO: 22136020 NR Description: 24-sterol C-methyltransferase [Arabidopsis
  misc_feature (59)..(195): Homolog of NCBI NO: 7443717 NR Description: probable sterol 24-C-methyltransferase (EC
  misc_feature (51)..(195): Homolog of NCBI NO: 21555010 NR Description: sterol-C-methyltransferase [Arabidopsis thaliana]
  misc_feature (51)..(195): Homolog of NCBI NO: 15222955 NR Description: S-adenosyl-methionine-sterol-C-methyltransferase [Arabidopsis thaliana] >gi|14030613|gb|AAK52981.1|AF375397_1 [Arabidopsis thaliana] >gi|21360447|gb|AAM47339.1|
  misc_feature (51)..(195): Homolog of NCBI NO: 2246456 NR Description: S-adenosyl-methionine-sterol-C-methyltransferase
KKKSPCSRALCPACYILLEPSQIPRRPPVHLLFSLSSSSSSSPFLGLEIGMEAATMAWTAAVVGAGLVYWFVWVMGAAEVKGKRAVDLKMGSITRDKVQDKYTQYWSFFRRPKETATTAASAEKVPAFVDTFYNLVTDIYEWGWGQSFHFSPSLPGRSHRDATRVHEERVADLLGARPGHRLLDVGCGVGGPMRAI

SEQ ID NO: 15219 - protein, 195 aa, Zea mays subsp. mays
  peptide (1)..(195): Ceres Seq. ID no. 13637315
  misc_feature (47)..(126): Homolog of NCBI NO: 30793991 NR Description: unknown protein [Arabidopsis thaliana]
  misc_feature (47)..(129): Homolog of NCBI NO: 15224564 NR Description: glycine-rich protein [Arabidopsis thaliana]
  misc_feature (47)..(100): Homolog of NCBI NO: 17539034 NR Description: Putative protein [Caenorhabditis elegans]
KKIPLLTRSLPRLLYPPRAQPNPPPSSCSSPLLPLLLLLLVPLPRVGNWNGGGDDGVDGGGGRGGAGVLVRVGDGRGGGEGQAGGGSQDGIHHAGQGAGQVHPVLVLLPPAQGDGHHGGVGGEGAGLRGHLLQPGDRHLRVGLGPVLPLLAVPARPLPPRRHARPRGARRRPPRRPAGPPPPRRRLRRRRAHARY

SEQ ID NO: 15220 - protein, 146 aa, Zea mays subsp. mays
  peptide (1)..(146): Ceres Seq. ID no. 13637316
  misc_feature (1)..(145): Homolog of NCBI NO: 3560533 NR Description: 24-methylene lophenol C24(1)methyltransferase
  misc_feature (1)..(145): Homolog of NCBI NO: 7443718 NR Description: probable sterol 24-C-methyltransferase (EC
  misc_feature (1)..(145): Homolog of NCBI NO: 1061040 NR Description: sterol-C-methyltransferase [Arabidopsis thaliana]
  misc_feature (1)..(145): Homolog of NCBI NO: 15217917 NR Description: sterol-C-methyltransferase [Arabidopsis thaliana]
  misc_feature (1)..(145): Homolog of NCBI NO: 23397216 NR Description: putative sterol-C-methyltransferase [Arabidopsis
  misc_feature (1)..(145): Homolog of NCBI NO: 22136020 NR Description: 24-sterol C-methyltransferase [Arabidopsis
  misc_feature (9)..(145): Homolog of NCBI NO: 7443717 NR Description: probable sterol 24-C-methyltransferase (EC
  misc_feature (1)..(145): Homolog of NCBI NO: 21555010 NR Description: sterol-C-methyltransferase [Arabidopsis thaliana]
  misc_feature (1)..(145): Homolog of NCBI NO: 15222955 NR Description: S-adenosyl-methionine-sterol-C-methyltransferase [Arabidopsis thaliana] >gi|14030613|gb|AAK52981.1|AF375397_1 [Arabidopsis thaliana] >gi|21360447|gb|AAM47339.1|
  misc_feature (1)..(145): Homolog of NCBI NO: 2246456 NR Description: S-adenosyl-methionine-sterol-C-methyltransferase
MEAATMAWTAAVVGAGLVYWFVWVMGAAEVKGKRAVDLKMGSITRDKVQDKYTQYWSFFRRPKETATTAASAEKVPAFVDTFYNLVTDIYEWGWGQSFHFSPSLPGRSHRDATRVHEERVADLLGARPGHRLLDVGCGVGGPMRAI

SEQ ID NO: 15221 - DNA, 1361 bp, Zea mays subsp. mays; identical to SEQ ID NO: 2304
  misc_feature (1)..(1361): Ceres Seq. ID no. 13636326
  misc_feature: MA Experiment ID: 108530 Result: Down-regulated in Transcription
  misc_feature: MA Experiment 108530 PARAMETER Experiment Name: Zm_Imbibed_Seeds_P Parameter: Age (day) Value: 6 vs. 2
  misc_feature: MA Experiment 108530 PARAMETER Experiment Name: Zm_Imbibed_Seeds_P Parameter: Organism Value: Zea mays
  misc_feature: MA Experiment 108530 PARAMETER Experiment Name: Zm_Imbibed_Seeds_P Parameter: Plant Line Value: 35A19
  misc_feature: MA Experiment 108530 PARAMETER Experiment Name: Zm_Imbibed_Seeds_P Parameter: Tissue Value: Aerial vs. Embryo
  misc_feature: MA Experiment ID: 108535 Result: Up-regulated in Transcription
  misc_feature: MA Experiment 108535 PARAMETER Experiment Name: Zm_Meristem_P Parameter: Age (day) Value: 8
  misc_feature: MA Experiment 108535 PARAMETER Experiment Name: Zm_Meristem_P Parameter: Organism Value: Zea mays
  misc_feature: MA Experiment 108535 PARAMETER Experiment Name: Zm_Meristem_P Parameter: Plant Line Value: 35A19
  misc_feature: MA Experiment 108535 PARAMETER Experiment Name: Zm_Meristem_P Parameter: Tissue Value: Root Meristem vs. Above Root Meristem
  misc_feature: MA Experiment ID: 108544 Result: Down-regulated in Transcription
  misc_feature: MA Experiment ID: 20000478 Result: Down-regulated in Transcription
  misc_feature: MA Experiment 20000478 PARAMETER Experiment Name: Zm_5mM_SA_P Parameter: Age (day) Value: 11
  misc_feature: MA Experiment 20000478 PARAMETER Experiment Name: Zm_5mM_SA_P Parameter: Organism Value: Zea mays
  misc_feature: MA Experiment 20000478 PARAMETER Experiment Name: Zm_5mM_SA_P Parameter: Plant Line Value: 35A19
  misc_feature: MA Experiment 20000478 PARAMETER Experiment Name: Zm_5mM_SA_P Parameter: Timepoint (hr) Value: 72
  misc_feature: MA Experiment 20000478 PARAMETER Experiment Name: Zm_5mM_SA_P Parameter: Tissue Value: Aerial
  misc_feature: MA Experiment 20000478 PARAMETER Experiment Name: Zm_5mM_SA_P Parameter: Treatment Value: 5mM SA vs. No Treatment
  misc_feature: MA Experiment ID: 20001612 Result: Up-regulated in Transcription
  misc_feature: MA Experiment 20001612 PARAMETER Experiment Name: Zm_50ppm_KNO3_L-to-H_P Parameter: Age (day) Value: 19
  misc_feature: MA Experiment 20001612 PARAMETER Experiment Name: Zm_50ppm_KNO3_L-to-H_P Parameter: Organism Value: Zea mays
  misc_feature: MA Experiment 20001612 PARAMETER Experiment Name: Zm_50ppm_KNO3_L-to-H_P Parameter: Plant Line Value: 35A19
  misc_feature: MA Experiment 20001612 PARAMETER Experiment Name: Zm_50ppm_KNO3_L-to-H_P Parameter: Timepoint (hr) Value: 8
  misc_feature: MA Experiment 20001612 PARAMETER Experiment Name: Zm_50ppm_KNO3_L-to-H_P Parameter: Tissue Value: Roots
  misc_feature: MA Experiment 20001612 PARAMETER Experiment Name: Zm_50ppm_KNO3_L-to-H_P Parameter: Treatment Value: 50ppm KNO3 vs. 50ppm KCl

SEQ ID NO: 15222 - protein, 418 aa, Zea mays subsp. mays; identical to SEQ ID NO: 2305
  peptide (1)..(418): Ceres Seq. ID no. 15219393
  misc_feature (39)..(281): Pfam Name: Ribosomal protein L4/L1 family Pfam Description: Ribosomal protein L4/L1 family
  misc_feature (15)..(418): Homolog of NCBI NO: 34393487 NR Description: putative 60S ribosomal protein L4/L1 [Oryza
  misc_feature (15)..(418): Homolog of NCBI NO: 34897236 NR Description: putative 60S ribosomal protein L1 [Oryza sativa
  misc_feature (16)..(418): Homolog of NCBI NO: 15232723 NR Description: 60S ribosomal protein L4/L1 (RPL4A) [Arabidopsis
  misc_feature (16)..(418): Homolog of NCBI NO: 21593543 NR Description: 60S ribosomal protein L4-B (L1) [Arabidopsis
  misc_feature (16)..(418): Homolog of NCBI NO: 15242558 NR Description: 60S ribosomal protein L4/L1 (RPL4D) [Arabidopsis
  misc_feature (13)..(418): Homolog of NCBI NO: 17367847 NR Description: 60S ribosomal protein L4 (L1)
  misc_feature (16)..(418): Homolog of NCBI NO: 26450328 NR Description: putative 60S ribosomal protein [Arabidopsis
  misc_feature (112)..(418): Homolog of NCBI NO: 13605831 NR Description: AT5g02870/F9G14_180 [Arabidopsis thaliana]
  misc_feature (64)..(418): Homolog of NCBI NO: 6441068 NR Description: 60S ribosomal protein L4 [Chlamydomonas sp. HS-5]
  misc_feature (13)..(388): Homolog of NCBI NO: 32822849 NR Description: Ribosomal protein [Xenopus laevis]

SEQ ID NO: 15223 - protein, 404 aa, Zea mays subsp. mays; identical to SEQ ID NO: 2306
  peptide (1)..(404): Ceres Seq. ID no. 15219394
  misc_feature (25)..(267): Pfam Name: Ribosomal protein L4/L1 family Pfam Description: Ribosomal protein L4/L1 family
  misc_feature (1)..(404): Homolog of NCBI NO: 34393487 NR Description: putative 60S ribosomal protein L4/L1 [Oryza
  misc_feature (1)..(404): Homolog of NCBI NO: 34897236 NR Description: putative 60S ribosomal protein L1 [Oryza sativa
  misc_feature (2)..(404): Homolog of NCBI NO: 15232723 NR Description: 60S ribosomal protein L4/L1 (RPL4A) [Arabidopsis
  misc_feature (2)..(404): Homolog of NCBI NO: 21593543 NR Description: 60S ribosomal protein L4-B (L1) [Arabidopsis
  misc_feature (2)..(404): Homolog of NCBI NO: 15242558 NR Description: 60S ribosomal protein L4/L1 (RPL4D) [Arabidopsis
  misc_feature (1)..(404): Homolog of NCBI NO: 17367847 NR Description: 60S ribosomal protein L4 (L1)
  misc_feature (2)..(404): Homolog of NCBI NO: 26450328 NR Description: putative 60S ribosomal protein [Arabidopsis
  misc_feature (98)..(404): Homolog of NCBI NO: 13605831 NR Description: AT5g02870/F9G14_180 [Arabidopsis thaliana]
  misc_feature (50)..(404): Homolog of NCBI NO: 6441068 NR Description: 60S ribosomal protein L4 [Chlamydomonas sp. HS-5]
  misc_feature (1)..(374): Homolog of NCBI NO: 32822849 NR Description: Ribosomal protein [Xenopus laevis]

SEQ ID NO: 15224 - protein, 387 aa, Zea mays subsp. mays; identical to SEQ ID NO: 2307
  peptide (1)..(387): Ceres Seq. ID no. 15219395
  misc_feature (8)..(250): Pfam Name: Ribosomal protein L4/L1 family Pfam Description: Ribosomal protein L4/L1 family
  misc_feature (1)..(387): Homolog of NCBI NO: 34393487 NR Description: putative 60S ribosomal protein L4/L1 [Oryza
  misc_feature (1)..(387): Homolog of NCBI NO: 34897236 NR Description: putative 60S ribosomal protein L1 [Oryza sativa
  misc_feature (1)..(387): Homolog of NCBI NO: 15232723 NR Description: 60S ribosomal protein L4/L1 (RPL4A) [Arabidopsis
  misc_feature (1)..(387): Homolog of NCBI NO: 21593543 NR Description: 60S ribosomal protein L4-B (L1) [Arabidopsis
  misc_feature (1)..(387): Homolog of NCBI NO: 15242558 NR Description: 60S ribosomal protein L4/L1 (RPL4D) [Arabidopsis
  misc_feature (1)..(387): Homolog of NCBI NO: 17367847 NR Description: 60S ribosomal protein L4 (L1)
  misc_feature (1)..(387): Homolog of NCBI NO: 26450328 NR Description: putative 60S ribosomal protein [Arabidopsis
  misc_feature (81)..(387): Homolog of NCBI NO: 13605831 NR Description: AT5g02870/F9G14_180 [Arabidopsis thaliana]
  misc_feature (33)..(387): Homolog of NCBI NO: 6441068 NR Description: 60S ribosomal protein L4 [Chlamydomonas sp. HS-5]
  misc_feature (1)..(357): Homolog of NCBI NO: 32822849 NR Description: Ribosomal protein [Xenopus laevis]

SEQ ID NO: 15225 - DNA, 519 bp, Zea mays subsp. mays
  misc_feature (1)..(519): Ceres Seq. ID no. 13626773
  misc_feature: MA Experiment ID: 108543 Result: Up-regulated in Transcription
  misc_feature: MA Experiment ID: 108545 Result: Down-regulated in Transcription
  misc_feature: MA Experiment 108545 PARAMETER Experiment Name: Zm_Imbibed_Seeds_P Parameter: Age (day) Value: 3 vs. 2
  misc_feature: MA Experiment 108545 PARAMETER Experiment Name: Zm_Imbibed_Seeds_P Parameter: Organism Value: Zea mays
  misc_feature: MA Experiment 108545 PARAMETER Experiment Name: Zm_Imbibed_Seeds_P Parameter: Plant Line Value: 35A19
  misc_feature: MA Experiment 108545 PARAMETER Experiment Name: Zm_Imbibed_Seeds_P Parameter: Tissue Value: Aerial vs. Embryo
  misc_feature: MA Experiment ID: 20000487 Result: Up-regulated in Transcription
  misc_feature: MA Experiment 20000487 PARAMETER Experiment Name: Zm_50mM_NH4NO3_L_to_H_P Parameter: Organism Value: Zea mays
  misc_feature: MA Experiment 20000487 PARAMETER Experiment Name: Zm_50mM_NH4NO3_L_to_H_P Parameter: Timepoint (hr) Value: 4
  misc_feature: MA Experiment 20000487 PARAMETER Experiment Name: Zm_50mM_NH4NO3_L_to_H_P Parameter: Tissue Value: Leaves
  misc_feature: MA Experiment 20000487 PARAMETER Experiment Name: Zm_50mM_NH4NO3_L_to_H_P Parameter: Treatment Value: 50mM NH4NO3 vs. 100mM Mannitol
atccttagtgtatctcctggccgtttctgcttcatcttctcgaatcgtcttctcttcttcttctcaaagtttagtgaaagatggccgatggtgaggacattcagccccttgtttgtgacaatggaactggaatggtgaaggctggatttgctggtgatgatgctccaagggctgtgttcccgagtattgttggtcgtcctagacacactggtgtcatggttgggatgggtcagaaagacgcttacgttggtgacgaagctcagtccaagagaggtattcttaccctcaagtatccgattgagcatggtattgtgagcaactgggatgacatggagaagatctggcatcacactttctacaacgagcttcgtgttgcacctgaagagcacccggttcttctcactgaggcgccgcttaaccctaaggctaacagggagaagatgactcagatcatgttcgagactttcaatgtccctgccatgtatgttgctattcaggctgttctttctctttacgcta

SEQ ID NO: 15226 - protein, 146 aa, Zea mays subsp. mays
  peptide (1)..(146): Ceres Seq. ID no. 13626774
  misc_feature (1)..(145): Pfam Name: Actin Pfam Description: Actin
  misc_feature (1)..(145): Homolog of NCBI NO: 9965319 NR Description: actin [Setaria italica]
  misc_feature (1)..(145): Homolog of NCBI NO: 15076949 NR Description: actin [Musa x paradisiaca]
  misc_feature (1)..(145): Homolog of NCBI NO: 15088544 NR Description: actin [Triticum monococcum]
  misc_feature (1)..(145): Homolog of NCBI NO: 24496452 NR Description: actin [Hordeum vulgare]
  misc_feature (1)..(145): Homolog of NCBI NO: 15242516 NR Description: ACTIN 2/7 (sp|P53492) [Arabidopsis thaliana]
  misc_feature (1)..(145): Homolog of NCBI NO: 34905850 NR Description: putative actin [Oryza sativa (japonica
  misc_feature (1)..(145): Homolog of NCBI NO: 461465 NR Description: ACTIN >gi|322751|pir||S31933 actin - common
  misc_feature (1)..(145): Homolog of NCBI NO: 15229955 NR Description: actin 11 (ACT11) [Arabidopsis thaliana]
  misc_feature (1)..(145): Homolog of NCBI NO: 11276970 NR Description: actin [imported] - Malva pusilla
  misc_feature (1)..(145): Homolog of NCBI NO: 11276968 NR Description: actin [imported] - Picea rubens
MADGEDIQPLVCDNGTGMVKAGFAGDDAPRAVFPSIVGRPRHTGVMVGMGQKDAYVGDEAQSKRGILTLKYPIEHGIVSNWDDMEKIWHHTFYNELRVAPEEHPVLLTEAPLNPKANREKMTQIMFETFNVPAMYVAIQAVLSLYA

SEQ ID NO: 15227 - protein, 129 aa, Zea mays subsp. mays
  peptide (1)..(129): Ceres Seq. ID no. 13626775
  misc_feature (1)..(128): Pfam Name: Actin Pfam Description: Actin
  misc_feature (1)..(128): Homolog of NCBI NO: 9965319 NR Description: actin [Setaria italica]
  misc_feature (1)..(128): Homolog of NCBI NO: 15242516 NR Description: ACTIN 2/7 (sp|P53492) [Arabidopsis thaliana]
  misc_feature (1)..(128): Homolog of NCBI NO: 24496452 NR Description: actin [Hordeum vulgare]
  misc_feature (1)..(128): Homolog of NCBI NO: 15088544 NR Description: actin [Triticum monococcum]
  misc_feature (1)..(128): Homolog of NCBI NO: 15076949 NR Description: actin [Musa x paradisiaca]
  misc_feature (1)..(128): Homolog of NCBI NO: 34905850 NR Description: putative actin [Oryza sativa (japonica
  misc_feature (1)..(128): Homolog of NCBI NO: 461465 NR Description: ACTIN >gi|322751|pir||S31933 actin - common
  misc_feature (1)..(128): Homolog of NCBI NO: 15229955 NR Description: actin 11 (ACT11) [Arabidopsis thaliana]
  misc_feature (1)..(128): Homolog of NCBI NO: 11276970 NR Description: actin [imported] - Malva pusilla
  misc_feature (1)..(128): Homolog of NCBI NO: 11276968 NR Description: actin [imported] - Picea rubens
MVKAGFAGDDAPRAVFPSIVGRPRHTGVMVGMGQKDAYVGDEAQSKRGILTLKYPIEHGIVSNWDDMEKIWHHTFYNELRVAPEEHPVLLTEAPLNPKANREKMTQIMFETFNVPAMYVAIQAVLSLYA

SEQ ID NO: 15228 - protein, 101 aa, Zea mays subsp. mays
  peptide (1)..(101): Ceres Seq. ID no. 13626776
  misc_feature (1)..(100): Pfam Name: Actin Pfam Description: Actin
  misc_feature (1)..(100): Homolog of NCBI NO: 9965319 NR Description: actin [Setaria italica]
  misc_feature (1)..(100): Homolog of NCBI NO: 15088544 NR Description: actin [Triticum monococcum]
  misc_feature (1)..(100): Homolog of NCBI NO: 24496452 NR Description: actin [Hordeum vulgare]
  misc_feature (1)..(100): Homolog of NCBI NO: 15242516 NR Description: ACTIN 2/7 (sp|P53492) [Arabidopsis thaliana]
  misc_feature (1)..(100): Homolog of NCBI NO: 15076949 NR Description: actin [Musa x paradisiaca]
  misc_feature (1)..(100): Homolog of NCBI NO: 34905850 NR Description: putative actin [Oryza sativa (japonica
  misc_feature (1)..(100): Homolog of NCBI NO: 461465 NR Description: ACTIN >gi|322751|pir||S31933 actin - common
  misc_feature (1)..(100): Homolog of NCBI NO: 15229955 NR Description: actin 11 (ACT11) [Arabidopsis thaliana]
  misc_feature (1)..(100): Homolog of NCBI NO: 11276970 NR Description: actin [imported] - Malva pusilla
  misc_feature (1)..(100): Homolog of NCBI NO: 11276968 NR Description: actin [imported] - Picea rubens
MVGMGQKDAYVGDEAQSKRGILTLKYPIEHGIVSNWDDMEKIWHHTFYNELRVAPEEHPVLLTEAPLNPKANREKMTQIMFETFNVPAMYVAIQAVLSLYA

SEQ ID NO: 15229 - DNA, 945 bp, Zea mays subsp. mays; identical to SEQ ID NO: 3959
  misc_feature (1)..(945): Ceres Seq. ID no. 13636168
  misc_feature: MA Experiment ID: 108529 Result: Up-regulated in Transcription
  misc_feature: MA Experiment 108529 PARAMETER Experiment Name: Zm_Imbibed_Seeds_P Parameter: Age (day) Value: 5 vs. 2
  misc_feature: MA Experiment 108529 PARAMETER Experiment Name: Zm_Imbibed_Seeds_P Parameter: Organism Value: Zea mays
  misc_feature: MA Experiment 108529 PARAMETER Experiment Name: Zm_Imbibed_Seeds_P Parameter: Plant Line Value: 35A19
  misc_feature: MA Experiment 108529 PARAMETER Experiment Name: Zm_Imbibed_Seeds_P Parameter: Tissue Value: Roots vs. Embryo
  misc_feature: MA Experiment ID: 108556 Result: Down-regulated in Transcription
  misc_feature: MA Experiment 108556 PARAMETER Experiment Name: Zm_Drought_P Parameter: Age (day) Value: 9
  misc_feature: MA Experiment 108556 PARAMETER Experiment Name: Zm_Drought_P Parameter: Organism Value: Zea mays
  misc_feature: MA Experiment 108556 PARAMETER Experiment Name: Zm_Drought_P Parameter: Plant Line Value: 35A19
  misc_feature: MA Experiment 108556 PARAMETER Experiment Name: Zm_Drought_P Parameter: Timepoint (hr) Value: 24
  misc_feature: MA Experiment 108556 PARAMETER Experiment Name: Zm_Drought_P Parameter: Tissue Value: Aerial
  misc_feature: MA Experiment 108556 PARAMETER Experiment Name: Zm_Drought_P Parameter: Treatment Value: Drought vs. No Drought
  misc_feature: MA Experiment ID: 108688 Result: Down-regulated in Transcription
  misc_feature: MA Experiment 108688 PARAMETER Experiment Name: Zm_Embryos-Flowers__P Parameter: Tissue Value: Immature Flowers vs. Aerial+
  misc_feature: MA Experiment ID: 20000108 Result: Down-regulated in Transcription
  misc_feature: MA Experiment 20000108 PARAMETER Experiment Name: Zm_Root-Tips_P Parameter: Age (day) Value: 12
  misc_feature: MA Experiment 20000108 PARAMETER Experiment Name: Zm_Root-Tips_P Parameter: Organism Value: Zea mays
  misc_feature: MA Experiment 20000108 PARAMETER Experiment Name: Zm_Root-Tips_P Parameter: Tissue Value: Root tips vs. Root mid region    35
  misc_feature: MA Experiment 20000108 PARAMETER Experiment Name: Zm_Root-Tips_P Parameter: Tissue Value: Root tips vs. Root mid region   Sequence Listing-Misc Features (4)
  misc_feature: MA Experiment ID: 20000477 Result: Up-regulated in Transcription
  misc_feature: MA Experiment 20000477 PARAMETER Experiment Name: Zm_5mM_SA_P Parameter: Age (day) Value: 10
  misc_feature: MA Experiment 20000477 PARAMETER Experiment Name: Zm_5mM_SA_P Parameter: Organism Value: Zea mays
  misc_feature: MA Experiment 20000477 PARAMETER Experiment Name: Zm_5mM_SA_P Parameter: Plant Line Value: 35A19
  misc_feature: MA Experiment 20000477 PARAMETER Experiment Name: Zm_5mM_SA_P Parameter: Timepoint (hr) Value: 48
  misc_feature: MA Experiment 20000477 PARAMETER Experiment Name: Zm_5mM_SA_P Parameter: Tissue Value: Aerial
  misc_feature: MA Experiment 20000477 PARAMETER Experiment Name: Zm_5mM_SA_P Parameter: Treatment Value: 5mM SA vs. No Treatment

SEQ ID NO: 15230 - protein, 195 aa, Zea mays subsp. mays; identical to SEQ ID NO: 3960
  peptide (1)..(195): Ceres Seq. ID no. 13636169
  misc_feature (1)..(75): Homolog of NCBI NO: 34394517 NR Description: r40g2 protein [Oryza sativa (japonica
  misc_feature (1)..(75): Homolog of NCBI NO: 7489571 NR Description: r40c1 protein - rice >gi|1296955|emb|CAA64683.1|
  misc_feature (1)..(75): Homolog of NCBI NO: 7489572 NR Description: r40g2 protein - rice (fragment)
  misc_feature (1)..(75): Homolog of NCBI NO: 34902150 NR Description: Putative r40c1 protein - rice [Oryza sativa
  misc_feature (26)..(75): Homolog of NCBI NO: 34394517 NR Description: r40g2 protein [Oryza sativa (japonica
  misc_feature (26)..(75): Homolog of NCBI NO: 34394518 NR Description: putative r40c2 protein [Oryza sativa (japonica
  misc_feature (26)..(75): Homolog of NCBI NO: 7489572 NR Description: r40g2 protein - rice (fragment)
  misc_feature (7)..(75): Homolog of NCBI NO: 34894060 NR Description: putative r40c1 protein [Oryza sativa (japonica group)] >gi|10697200|dbj|BAB16331.1| putative r40c1 protein
  misc_feature (26)..(73): Homolog of NCBI NO: 18404934 NR Description: lectin repeat protein family [Arabidopsis >gi|15724197|gb|AAL06490.1|AF411801_1 At2g39050/T7F6.22 thaliana] >gi|20147403|gb|AAM10411.1| At2g39050/T7F6.22
  misc_feature (26)..(73): Homolog of NCBI NO: 25408635 NR Description: hypothetical protein At2g39050 [imported] -

SEQ ID NO: 15231 - protein, 134 aa, Zea mays subsp. mays; identical to SEQ ID NO: 3961
  peptide (1)..(134): Ceres Seq. ID no. 13636170
  misc_feature (1)..(14): Homolog of NCBI NO: 34394518 NR Description: putative r40c2 protein [Oryza sativa (japonica
  misc_feature (1)..(14): Homolog of NCBI NO: 7489572 NR Description: r40g2 protein - rice (fragment)
  misc_feature (1)..(14): Homolog of NCBI NO: 34894060 NR Description: putative r40c1 protein [Oryza sativa (japonica group)] >gi|10697200|dbj|BAB16331.1| putative r40c1 protein
  misc_feature (1)..(12): Homolog of NCBI NO: 18404934 NR Description: lectin repeat protein family [Arabidopsis >gi|15724197|gb|AAL06490.1|AF411801_1 At2g39050/T7F6.22 thaliana] >gi|20147403|gb|AAM10411.1| At2g39050/T7F6.22
  misc_feature (1)..(12): Homolog of NCBI NO: 25408635 NR Description: hypothetical protein At2g39050 [imported] -
  misc_feature (1)..(14): Homolog of NCBI NO: 34394517 NR Description: r40g2 protein [Oryza sativa (japonica
  misc_feature (1)..(14): Homolog of NCBI NO: 7489571 NR Description: r40c1 protein - rice >gi|1296955|emb|CAA64683.1|
  misc_feature (1)..(14): Homolog of NCBI NO: 7489572 NR Description: r40g2 protein - rice (fragment)
  misc_feature (1)..(14): Homolog of NCBI NO: 34902150 NR Description: Putative r40c1 protein - rice [Oryza sativa
  misc_feature (1)..(14): Homolog of NCBI NO: 34394517 NR Description: r40g2 protein [Oryza sativa (japonica

SEQ ID NO: 15232 - protein, 107 aa, Zea mays subsp. mays; identical to SEQ ID NO: 3962
  peptide (1)..(107): Ceres Seq. ID no. 13636171
  misc_feature (50)..(107): Pfam Name: Equine herpesvirus glycoprotein gp2 Pfam Description: Equine herpesvirus glycoprotein gp2
  misc_feature (54)..(107): Homolog of NCBI NO: 34394516 NR Description: putative r40c1 protein [Oryza sativa (japonica
  misc_feature (50)..(107): Homolog of NCBI NO: 17221108 NR Description: glycoprotein gp2 [Equine herpesvirus 1]
  misc_feature (50)..(107): Homolog of NCBI NO: 17221104 NR Description: glycoprotein gp2 [Equine herpesvirus 1]
  misc_feature (50)..(107): Homolog of NCBI NO: 17221110 NR Description: glycoprotein gp2 [Equine herpesvirus 1]
  misc_feature (50)..(107): Homolog of NCBI NO: 17221100 NR Description: glycoprotein gp2 [Equine herpesvirus 1]
  misc_feature (18)..(107): Homolog of NCBI NO: 17221108 NR Description: glycoprotein gp2 [Equine herpesvirus 1]
  misc_feature (18)..(107): Homolog of NCBI NO: 17221104 NR Description: glycoprotein gp2 [Equine herpesvirus 1]
  misc_feature (18)..(107): Homolog of NCBI NO: 17221110 NR Description: glycoprotein gp2 [Equine herpesvirus 1]
  misc_feature (18)..(107): Homolog of NCBI NO: 17221100 NR Description: glycoprotein gp2 [Equine herpesvirus 1]
  misc_feature (50)..(107): Homolog of NCBI NO: 17221114 NR Description: glycoprotein gp2 [Equine herpesvirus 1]

SEQ ID NO: 15233 - DNA, 1931 bp, Zea mays subsp. mays; identical to SEQ ID NO: 10020
  misc_feature (1)..(1931): Ceres Seq. ID no. 13636275
  misc_feature: MA Experiment ID: 108523 Result: Down-regulated in Transcription
  misc_feature: MA Experiment 108523 PARAMETER Experiment Name: Zm_42deg_Heat_P Parameter: Age (day) Value: 8
  misc_feature: MA Experiment 108523 PARAMETER Experiment Name: Zm_42deg_Heat_P Parameter: Organism Value: Zea mays
  misc_feature: MA Experiment 108523 PARAMETER Experiment Name: Zm_42deg_Heat_P Parameter: Plant Line Value: 35A19
  misc_feature: MA Experiment 108523 PARAMETER Experiment Name: Zm_42deg_Heat_P Parameter: Temperature (deg C) Value: 42 vs. 22
  misc_feature: MA Experiment 108523 PARAMETER Experiment Name: Zm_42deg_Heat_P Parameter: Timepoint (hr) Value: 6
  misc_feature: MA Experiment 108523 PARAMETER Experiment Name: Zm_42deg_Heat_P Parameter: Tissue Value: Aerial
  misc_feature: MA Experiment ID: 108529 Result: Down-regulated in Transcription
  misc_feature: MA Experiment 108529 PARAMETER Experiment Name: Zm_Imbibed_Seeds_P Parameter: Age (day) Value: 5 vs. 2
  misc_feature: MA Experiment 108529 PARAMETER Experiment Name: Zm_Imbibed_Seeds_P Parameter: Organism Value: Zea mays
  misc_feature: MA Experiment 108529 PARAMETER Experiment Name: Zm_Imbibed_Seeds_P Parameter: Plant Line Value: 35A19
  misc_feature: MA Experiment 108529 PARAMETER Experiment Name: Zm_Imbibed_Seeds_P Parameter: Tissue Value: Roots vs. Embryo
  misc_feature: MA Experiment ID: 108543 Result: Up-regulated in Transcription
  misc_feature: MA Experiment ID: 108544 Result: Down-regulated in Transcription
  misc_feature: MA Experiment ID: 108545 Result: Up-regulated in Transcription
  misc_feature: MA Experiment 108545 PARAMETER Experiment Name: Zm_Imbibed_Seeds_P Parameter: Age (day) Value: 3 vs. 2
  misc_feature: MA Experiment 108545 PARAMETER Experiment Name: Zm_Imbibed_Seeds_P Parameter: Organism Value: Zea mays
  misc_feature: MA Experiment 108545 PARAMETER Experiment Name: Zm_Imbibed_Seeds_P Parameter: Plant Line Value: 35A19
  misc_feature: MA Experiment 108545 PARAMETER Experiment Name: Zm_Imbibed_Seeds_P Parameter: Tissue Value: Aerial vs. Embryo
  misc_feature: MA Experiment ID: 108546 Result: Down-regulated in Transcription
  misc_feature: MA Experiment 108546 PARAMETER Experiment Name: Zm_Imbibed_Seeds_P Parameter: Age (day) Value: 3 vs. 2
  misc_feature: MA Experiment 108546 PARAMETER Experiment Name: Zm_Imbibed_Seeds_P Parameter: Organism Value: Zea mays
  misc_feature: MA Experiment 108546 PARAMETER Experiment Name: Zm_Imbibed_Seeds_P Parameter: Plant Line Value: 35A19
  misc_feature: MA Experiment 108546 PARAMETER Experiment Name: Zm_Imbibed_Seeds_P Parameter: Tissue Value: Roots vs. Embryo
  misc_feature: MA Experiment ID: 108556 Result: Down-regulated in Transcription
  misc_feature: MA Experiment 108556 PARAMETER Experiment Name: Zm_Drought_P Parameter: Age (day) Value: 9
  misc_feature: MA Experiment 108556 PARAMETER Experiment Name: Zm_Drought_P Parameter: Organism Value: Zea mays
  misc_feature: MA Experiment 108556 PARAMETER Experiment Name: Zm_Drought_P Parameter: Plant Line Value: 35A19
  misc_feature: MA Experiment 108556 PARAMETER Experiment Name: Zm_Drought_P Parameter: Timepoint (hr) Value: 24
  misc_feature: MA Experiment 108556 PARAMETER Experiment Name: Zm_Drought_P Parameter: Tissue Value: Aerial
  misc_feature: MA Experiment 108556 PARAMETER Experiment Name: Zm_Drought_P Parameter: Treatment Value: Drought vs. No Drought
  misc_feature: MA Experiment ID: 108689 Result: Down-regulated in Transcription
  misc_feature: MA Experiment 108689 PARAMETER Experiment Name: Zm_Drought_Roots_P Parameter: Age (day) Value: 9
  misc_feature: MA Experiment 108689 PARAMETER Experiment Name: Zm_Drought_Roots_P Parameter: Organism Value: Zea mays
  misc_feature: MA Experiment 108689 PARAMETER Experiment Name: Zm_Drought_Roots_P Parameter: Plant Line Value: 35A19
  misc_feature: MA Experiment 108689 PARAMETER Experiment Name: Zm_Drought_Roots_P Parameter: Timepoint (hr) Value: 24
  misc_feature: MA Experiment 108689 PARAMETER Experiment Name: Zm_Drought_Roots_P Parameter: Tissue Value: Roots
  misc_feature: MA Experiment 108689 PARAMETER Experiment Name: Zm_Drought_Roots_P Parameter: Treatment Value: Drought vs. No Drought
  misc_feature: MA Experiment ID: 20000477 Result: Down-regulated in Transcription
  misc_feature: MA Experiment 20000477 PARAMETER Experiment Name: Zm_5mM_SA_P Parameter: Age (day) Value: 10
  misc_feature: MA Experiment 20000477 PARAMETER Experiment Name: Zm_5mM_SA_P Parameter: Organism Value: Zea mays
  misc_feature: MA Experiment 20000477 PARAMETER Experiment Name: Zm_5mM_SA_P Parameter: Plant Line Value: 35A19
  misc_feature: MA Experiment 20000477 PARAMETER Experiment Name: Zm_5mM_SA_P Parameter: Timepoint (hr) Value: 48
  misc_feature: MA Experiment 20000477 PARAMETER Experiment Name: Zm_5mM_SA_P Parameter: Tissue Value: Aerial
  misc_feature: MA Experiment 20000477 PARAMETER Experiment Name: Zm_5mM_SA_P Parameter: Treatment Value: 5mM SA vs. No Treatment
  misc_feature: MA Experiment ID: 20000478 Result: Down-regulated in Transcription
  misc_feature: MA Experiment 20000478 PARAMETER Experiment Name: Zm_5mM_SA_P Parameter: Age (day) Value: 11
  misc_feature: MA Experiment 20000478 PARAMETER Experiment Name: Zm_5mM_SA_P Parameter: Organism Value: Zea mays
  misc_feature: MA Experiment 20000478 PARAMETER Experiment Name: Zm_5mM_SA_P Parameter: Plant Line Value: 35A19
  misc_feature: MA Experiment 20000478 PARAMETER Experiment Name: Zm_5mM_SA_P Parameter: Timepoint (hr) Value: 72
  misc_feature: MA Experiment 20000478 PARAMETER Experiment Name: Zm_5mM_SA_P Parameter: Tissue Value: Aerial
  misc_feature: MA Experiment 20000478 PARAMETER Experiment Name: Zm_5mM_SA_P Parameter: Treatment Value: 5mM SA vs. No Treatment
  misc_feature: MA Experiment ID: 20000479 Result: Down-regulated in Transcription
  misc_feature: MA Experiment 20000479 PARAMETER Experiment Name: Zm_Drought_P Parameter: Age (day) Value: 10
  misc_feature: MA Experiment 20000479 PARAMETER Experiment Name: Zm_Drought_P Parameter: Organism Value: Zea mays
  misc_feature: MA Experiment 20000479 PARAMETER Experiment Name: Zm_Drought_P Parameter: Plant Line Value: 35A19
  misc_feature: MA Experiment 20000479 PARAMETER Experiment Name: Zm_Drought_P Parameter: Timepoint (hr) Value: 48
  misc_feature: MA Experiment 20000479 PARAMETER Experiment Name: Zm_Drought_P Parameter: Tissue Value: Aerial
  misc_feature: MA Experiment 20000479 PARAMETER Experiment Name: Zm_Drought_P Parameter: Treatment Value: Drought vs. No Drought
  misc_feature: MA Experiment ID: 20000480 Result: Down-regulated in Transcription
  misc_feature: MA Experiment 20000480 PARAMETER Experiment Name: Zm_Drought_P Parameter: Age (day) Value: 11
  misc_feature: MA Experiment 20000480 PARAMETER Experiment Name: Zm_Drought_P Parameter: Organism Value: Zea mays
  misc_feature: MA Experiment 20000480 PARAMETER Experiment Name: Zm_Drought_P Parameter: Plant Line Value: 35A19
  misc_feature: MA Experiment 20000480 PARAMETER Experiment Name: Zm_Drought_P Parameter: Timepoint (hr) Value: 72
  misc_feature: MA Experiment 20000480 PARAMETER Experiment Name: Zm_Drought_P Parameter: Tissue Value: Aerial
  misc_feature: MA Experiment 20000480 PARAMETER Experiment Name: Zm_Drought_P Parameter: Treatment Value: Drought vs. No Drought
  misc_feature: MA Experiment ID: 20000488 Result: Down-regulated in Transcription
  misc_feature: MA Experiment 20000488 PARAMETER Experiment Name: Zm_50mM_NH4NO3_L_to_H_P Parameter: Organism Value: Zea mays
  misc_feature: MA Experiment 20000488 PARAMETER Experiment Name: Zm_50mM_NH4NO3_L_to_H_P Parameter: Timepoint (hr) Value: 8
  misc_feature: MA Experiment 20000488 PARAMETER Experiment Name: Zm_50mM_NH4NO3_L_to_H_P Parameter: Tissue Value: Leaves
  misc_feature: MA Experiment 20000488 PARAMETER Experiment Name: Zm_50mM_NH4NO3_L_to_H_P Parameter: Treatment Value: 50mM NH4NO3 vs. 100mM Mannitol
  misc_feature: MA Experiment ID: 20000626 Result: Down-regulated in Transcription
  misc_feature: MA Experiment 20000626 PARAMETER Experiment Name: Zm_Herbicide-Treatments_P Parameter: Timepoint (hr) Value: 12
  misc_feature: MA Experiment 20000626 PARAMETER Experiment Name: Zm_Herbicide-Treatments_P Parameter: Tissue Value: Aerial
  misc_feature: MA Experiment 20000626 PARAMETER Experiment Name: Zm_Herbicide-Treatments_P Parameter: Treatment Value: Roundup vs. No Treatment

SEQ ID NO: 15234 - protein, 343 aa, Zea mays subsp. mays; identical to SEQ ID NO: 10021
  peptide (1)..(343): Ceres Seq. ID no. 13636276
  misc_feature (173)..(338): Pfam Name: Protein kinase domain Pfam Description: Protein kinase domain
  misc_feature (173)..(338): Pfam Name: Protein kinase domain Pfam Description: Protein kinase domain
  misc_feature (147)..(338): Homolog of NCBI NO: 34897534 NR Description: OSJNBa0042L16.4 [Oryza sativa (japonica
  misc_feature (12)..(85): Homolog of NCBI NO: 34897534 NR Description: OSJNBa0042L16.4 [Oryza sativa (japonica
  misc_feature (10)..(338): Homolog of NCBI NO: 14194119 NR Description: At1g01540/F22L4_6 [Arabidopsis thaliana]
  misc_feature (10)..(338): Homolog of NCBI NO: 15223428 NR Description: protein kinase family [Arabidopsis thaliana] putative kinase [Arabidopsis thaliana]
  misc_feature (7)..(338): Homolog of NCBI NO: 15234142 NR Description: protein kinase family [Arabidopsis thaliana]
  misc_feature (12)..(85): Homolog of NCBI NO: 34897534 NR Description: OSJNBa0042L16.4 [Oryza sativa (japonica
  misc_feature (10)..(338): Homolog of NCBI NO: 15223428 NR Description: protein kinase family [Arabidopsis thaliana] putative kinase [Arabidopsis thaliana]
  misc_feature (1)..(17): Homolog of NCBI NO: 37536398 NR Description: putative receptor-like protein kinase [Oryza
  misc_feature (14)..(338): Homolog of NCBI NO: 37536398 NR Description: putative receptor-like protein kinase [Oryza
  misc_feature (10)..(118): Homolog of NCBI NO: 37535714 NR Description: putative kinase [Oryza sativa (japonica
  misc_feature (127)..(338): Homolog of NCBI NO: 37535714 NR Description: putative kinase [Oryza sativa (japonica
  misc_feature (10)..(338): Homolog of NCBI NO: 15235432 NR Description: protein kinase family [Arabidopsis thaliana]
  misc_feature (7)..(338): Homolog of NCBI NO: 15234142 NR Description: protein kinase family [Arabidopsis thaliana]
  misc_feature (10)..(338): Homolog of NCBI NO: 14194119 NR Description: At1g01540/F22L4_6 [Arabidopsis thaliana]
  misc_feature (147)..(338): Homolog of NCBI NO: 34897534 NR Description: OSJNBa0042L16.4 [Oryza sativa (japonica
  misc_feature (10)..(338): Homolog of NCBI NO: 15235432 NR Description: protein kinase family [Arabidopsis thaliana]
  misc_feature (127)..(338): Homolog of NCBI NO: 37535714 NR Description: putative kinase [Oryza sativa (japonica
  misc_feature (10)..(118): Homolog of NCBI NO: 37535714 NR Description: putative kinase [Oryza sativa (japonica
  misc_feature (14)..(338): Homolog of NCBI NO: 37536398 NR Description: putative receptor-like protein kinase [Oryza
  misc_feature (1)..(17): Homolog of NCBI NO: 37536398 NR Description: putative receptor-like protein kinase [Oryza

SEQ ID NO: 15235 - protein, 211 aa, Zea mays subsp. mays; identical to SEQ ID NO: 10022
  peptide (1)..(211): Ceres Seq. ID no. 13636277
  misc_feature (41)..(206): Pfam Name: Protein kinase domain Pfam Description: Protein kinase domain
  misc_feature (41)..(206): Pfam Name: Protein kinase domain Pfam Description: Protein kinase domain
  misc_feature (15)..(206): Homolog of NCBI NO: 34897534 NR Description: OSJNBa0042L16.4 [Oryza sativa (japonica
  misc_feature (1)..(206): Homolog of NCBI NO: 14194119 NR Description: At1g01540/F22L4_6 [Arabidopsis thaliana]
  misc_feature (1)..(206): Homolog of NCBI NO: 15223428 NR Description: protein kinase family [Arabidopsis thaliana] putative kinase [Arabidopsis thaliana]
  misc_feature (1)..(206): Homolog of NCBI NO: 15234142 NR Description: protein kinase family [Arabidopsis thaliana]
  misc_feature (1)..(206): Homolog of NCBI NO: 15235432 NR Description: protein kinase family [Arabidopsis thaliana]
  misc_feature (1)..(206): Homolog of NCBI NO: 14194119 NR Description: At1g01540/F22L4_6 [Arabidopsis thaliana]
  misc_feature (1)..(206): Homolog of NCBI NO: 15234142 NR Description: protein kinase family [Arabidopsis thaliana]
  misc_feature (1)..(206): Homolog of NCBI NO: 30690058 NR Description: protein kinase family [Arabidopsis thaliana]
  misc_feature (10)..(206): Homolog of NCBI NO: 15231637 NR Description: protein kinase family [Arabidopsis thaliana]
  misc_feature (1)..(206): Homolog of NCBI NO: 25518287 NR Description: hypothetical protein F22L4.8 - Arabidopsis >gi|8920590|gb|AAF81312.1|AC061957_8 Contains a strong similarity an unknown protein from Arabidopsis thaliana gi|2505874 and
  misc_feature (1)..(206): Homolog of NCBI NO: 37536398 NR Description: putative receptor-like protein kinase [Oryza
  misc_feature (1)..(206): Homolog of NCBI NO: 37535714 NR Description: putative kinase [Oryza sativa (japonica
  misc_feature (1)..(206): Homolog of NCBI NO: 15235432 NR Description: protein kinase family [Arabidopsis thaliana]
  misc_feature (1)..(206): Homolog of NCBI NO: 15223428 NR Description: protein kinase family [Arabidopsis thaliana] putative kinase [Arabidopsis thaliana]
  misc_feature (15)..(206): Homolog of NCBI NO: 34897534 NR Description: OSJNBa0042L16.4 [Oryza sativa (japonica
  misc_feature (1)..(206): Homolog of NCBI NO: 37535714 NR Description: putative kinase [Oryza sativa (japonica
  misc_feature (1)..(206): Homolog of NCBI NO: 37536398 NR Description: putative receptor-like protein kinase [Oryza
  misc_feature (1)..(206): Homolog of NCBI NO: 25518287 NR Description: hypothetical protein F22L4.8 - Arabidopsis >gi|8920590|gb|AAF81312.1|AC061957_8 Contains a strong similarity an unknown protein from Arabidopsis thaliana gi|2505874 and
  misc_feature (10)..(206): Homolog of NCBI NO: 15231637 NR Description: protein kinase family [Arabidopsis thaliana]
  misc_feature (1)..(206): Homolog of NCBI NO: 30690058 NR Description: protein kinase family [Arabidopsis thaliana]

SEQ ID NO: 15236 - DNA, 549 bp, Zea mays subsp. mays
  misc_feature (1)..(549): Ceres Seq. ID no. 13625268
  misc_feature: MA Experiment ID: 108535 Result: Up-regulated in Transcription
  misc_feature: MA Experiment 108535 PARAMETER Experiment Name: Zm_Meristem_P Parameter: Age (day) Value: 8
  misc_feature: MA Experiment 108535 PARAMETER Experiment Name: Zm_Meristem_P Parameter: Organism Value: Zea mays
  misc_feature: MA Experiment 108535 PARAMETER Experiment Name: Zm_Meristem_P Parameter: Plant Line Value: 35A19
  misc_feature: MA Experiment 108535 PARAMETER Experiment Name: Zm_Meristem_P Parameter: Tissue Value: Root Meristem vs. Above Root Meristem
  misc_feature: MA Experiment ID: 20000535 Result: Up-regulated in Transcription
  misc_feature: MA Experiment 20000535 PARAMETER Experiment Name: Zm_Hybrid_Seed_Dev_P Parameter: DAP Value: 30 vs. 12
  misc_feature: MA Experiment 20000535 PARAMETER Experiment Name: Zm_Hybrid_Seed_Dev_P Parameter: Organism Value: Zea mays
  misc_feature: MA Experiment 20000535 PARAMETER Experiment Name: Zm_Hybrid_Seed_Dev_P Parameter: Plant Line Value: 35A19
  misc_feature: MA Experiment 20000535 PARAMETER Experiment Name: Zm_Hybrid_Seed_Dev_P Parameter: Tissue Value: Embryo vs. Unfert Floret
accaacaggaaaaaaggcccagaggcggtgccgtgaccgattcgagacgcaagagaaggatcgagacgaggcggcggttttccgggggcagcatcggcgcggccacgaaagatgtcttactcaagaggctcaaggtatggatctcgctcgccttactcgagaagcacaaggtaccgaagtcgctctaggagtgtcgactctagtgatgctgaaaaccctgggaacaacctgtatgtgactggtttgtcagctcgtgtaacggatcgagatctggagaagcacttctccactgagggtgaggtgattgatgcaagcgttgtatatgatccttggacaagggaatcacggggttttggttttgttaccatggctgctgttaaagatgcagatcgctgcatcaaatatctggaccgttctgtgttgcaaggtcgggtcataactgttgagaagattttgttgacagcaacagggtagatgttggtagctgctctgcaacaaactgatacaacctaacaccaaaccatgccaacctcagccaaagggttgtat

SEQ ID NO: 15237 - protein, 120 aa, Zea mays subsp. mays
  peptide (1)..(120): Ceres Seq. ID no. 13625269
  misc_feature (40)..(111): Pfam Name: RNA recognition motif. (a.k.a. RRM, RBD, or RNP domain) Pfam Description: RNA recognition motif. (a.k.a. RRM, RBD, or RNP
  misc_feature (21)..(113): Homolog of NCBI NO: 34902002 NR Description: putative transformer serine/arginine-rich
  misc_feature (1)..(115): Homolog of NCBI NO: 30680096 NR Description: transformer serine/arginine-rich putative [Arabidopsis thaliana] >gi|15450753|gb|AAK96648.1|
  misc_feature (1)..(113): Homolog of NCBI NO: 18390758 NR Description: transformer serine/arginine-rich
  misc_feature (1)..(113): Homolog of NCBI NO: 28973767 NR Description: putative transformer-SR ribonucleoprotein
  misc_feature (1)..(113): Homolog of NCBI NO: 40253470 NR Description: putative transformer-SR ribonucleoprotein [Oryza
  misc_feature (1)..(113): Homolog of NCBI NO: 11275253 NR Description: transformer-2-like protein - liverwort
  misc_feature (26)..(113): Homolog of NCBI NO: 8778550 NR Description: F22G5.31 [Arabidopsis thaliana]
  misc_feature (2)..(113): Homolog of NCBI NO: 7489207 NR Description: transformer-SR ribonucleoprotein - common tobacco
  misc_feature (1)..(113): Homolog of NCBI NO: 40738429 NR Description: hypothetical protein AN6676.2 [Aspergillus
  misc_feature (1)..(113): Homolog of NCBI NO: 681904 NR Description: cp29 [Arabidopsis thaliana]
MSYSRGSRYGSRSPYSRSTRYRSRSRSVDSSDAENPGNNLYVTGLSARVTDRDLEKHFSTEGEVIDASVVYDPWTRESRGFGFVTMAAVKDADRCIKYLDRSVLQGRVITVEKILLTATG

SEQ ID NO: 15238 - protein, 78 aa, Zea mays subsp. mays
  peptide (1)..(78): Ceres Seq. ID no. 13625270
PTGKKAQRRCRDRFETQEKDRDEAAVFRGQHRRGHERCLTQEAQGMDLARLTREAQGTEVALGVSTLVMLKTLGTTCM

SEQ ID NO: 15239 - protein, 61 aa, Zea mays subsp. mays
  peptide (1)..(61): Ceres Seq. ID no. 13625271
QQEKRPRGGAVTDSRRKRRIETRRRFSGGSIGAATKDVLLKRLKVWISLALLEKHKVPKSL

SEQ ID NO: 15240 - DNA, 514 bp, Zea mays subsp. mays
  misc_feature (1)..(514): Ceres Seq. ID no. 13625317
  misc_feature: MA Experiment ID: 108504 Result: Up-regulated in Transcription
  misc_feature: MA Experiment 108504 PARAMETER Experiment Name: Zm_Drought_P Parameter: Age (day) Value: 8
  misc_feature: MA Experiment 108504 PARAMETER Experiment Name: Zm_Drought_P Parameter: Organism Value: Zea mays
  misc_feature: MA Experiment 108504 PARAMETER Experiment Name: Zm_Drought_P Parameter: Plant Line Value: 35A19
  misc_feature: MA Experiment 108504 PARAMETER Experiment Name: Zm_Drought_P Parameter: Timepoint (hr) Value: 12
  misc_feature: MA Experiment 108504 PARAMETER Experiment Name: Zm_Drought_P Parameter: Tissue Value: Aerial
  misc_feature: MA Experiment 108504 PARAMETER Experiment Name: Zm_Drought_P Parameter: Treatment Value: Drought vs. No Drought
  misc_feature: MA Experiment ID: 108540 Result: Up-regulated in Transcription
  misc_feature: MA Experiment 108540 PARAMETER Experiment Name: Zm_20percent_PEG_P Parameter: Age (day) Value: 8
  misc_feature: MA Experiment 108540 PARAMETER Experiment Name: Zm_20percent_PEG_P Parameter: Organism Value: Zea mays
  misc_feature: MA Experiment 108540 PARAMETER Experiment Name: Zm_20percent_PEG_P Parameter: Plant Line Value: 35A19
  misc_feature: MA Experiment 108540 PARAMETER Experiment Name: Zm_20percent_PEG_P Parameter: Timepoint (hr) Value: 6
  misc_feature: MA Experiment 108540 PARAMETER Experiment Name: Zm_20percent_PEG_P Parameter: Tissue Value: Aerial
  misc_feature: MA Experiment 108540 PARAMETER Experiment Name: Zm_20percent_PEG_P Parameter: Treatment Value: 20percent PEG vs. No Treatment
  misc_feature: MA Experiment ID: 108556 Result: Up-regulated in Transcription
  misc_feature: MA Experiment 108556 PARAMETER Experiment Name: Zm_Drought_P Parameter: Age (day) Value: 9
  misc_feature: MA Experiment 108556 PARAMETER Experiment Name: Zm_Drought_P Parameter: Organism Value: Zea mays
  misc_feature: MA Experiment 108556 PARAMETER Experiment Name: Zm_Drought_P Parameter: Plant Line Value: 35A19
  misc_feature: MA Experiment 108556 PARAMETER Experiment Name: Zm_Drought_P Parameter: Timepoint (hr) Value: 24
  misc_feature: MA Experiment 108556 PARAMETER Experiment Name: Zm_Drought_P Parameter: Tissue Value: Aerial
  misc_feature: MA Experiment 108556 PARAMETER Experiment Name: Zm_Drought_P Parameter: Treatment Value: Drought vs. No Drought
  misc_feature: MA Experiment ID: 108597 Result: Up-regulated in Transcription
  misc_feature: MA Experiment 108597 PARAMETER Experiment Name: Zm_100uM_ABA_P Parameter: Age (day) Value: 9
  misc_feature: MA Experiment 108597 PARAMETER Experiment Name: Zm_100uM_ABA_P Parameter: Organism Value: Zea mays
  misc_feature: MA Experiment 108597 PARAMETER Experiment Name: Zm_100uM_ABA_P Parameter: Plant Line Value: 35A19
  misc_feature: MA Experiment 108597 PARAMETER Experiment Name: Zm_100uM_ABA_P Parameter: Timepoint (hr) Value: 24
  misc_feature: MA Experiment 108597 PARAMETER Experiment Name: Zm_100uM_ABA_P Parameter: Tissue Value: Aerial
  misc_feature: MA Experiment 108597 PARAMETER Experiment Name: Zm_100uM_ABA_P Parameter: Treatment Value: 100uM ABA vs. No Treatment
  misc_feature: MA Experiment ID: 108689 Result: Up-regulated in Transcription
  misc_feature: MA Experiment 108689 PARAMETER Experiment Name: Zm_Drought_Roots_P Parameter: Age (day) Value: 9
  misc_feature: MA Experiment 108689 PARAMETER Experiment Name: Zm_Drought_Roots_P Parameter: Organism Value: Zea mays
  misc_feature: MA Experiment 108689 PARAMETER Experiment Name: Zm_Drought_Roots_P Parameter: Plant Line Value: 35A19
  misc_feature: MA Experiment 108689 PARAMETER Experiment Name: Zm_Drought_Roots_P Parameter: Timepoint (hr) Value: 24
  misc_feature: MA Experiment 108689 PARAMETER Experiment Name: Zm_Drought_Roots_P Parameter: Tissue Value: Roots
  misc_feature: MA Experiment 108689 PARAMETER Experiment Name: Zm_Drought_Roots_P Parameter: Treatment Value: Drought vs. No Drought
  misc_feature: MA Experiment ID: 20000478 Result: Up-regulated in Transcription
  misc_feature: MA Experiment 20000478 PARAMETER Experiment Name: Zm_5mM_SA_P Parameter: Age (day) Value: 11
  misc_feature: MA Experiment 20000478 PARAMETER Experiment Name: Zm_5mM_SA_P Parameter: Organism Value: Zea mays
  misc_feature: MA Experiment 20000478 PARAMETER Experiment Name: Zm_5mM_SA_P Parameter: Plant Line Value: 35A19
  misc_feature: MA Experiment 20000478 PARAMETER Experiment Name: Zm_5mM_SA_P Parameter: Timepoint (hr) Value: 72
  misc_feature: MA Experiment 20000478 PARAMETER Experiment Name: Zm_5mM_SA_P Parameter: Tissue Value: Aerial
  misc_feature: MA Experiment 20000478 PARAMETER Experiment Name: Zm_5mM_SA_P Parameter: Treatment Value: 5mM SA vs. No Treatment
  misc_feature: MA Experiment ID: 20000479 Result: Up-regulated in Transcription
  misc_feature: MA Experiment 20000479 PARAMETER Experiment Name: Zm_Drought_P Parameter: Age (day) Value: 10
  misc_feature: MA Experiment 20000479 PARAMETER Experiment Name: Zm_Drought_P Parameter: Organism Value: Zea mays
  misc_feature: MA Experiment 20000479 PARAMETER Experiment Name: Zm_Drought_P Parameter: Plant Line Value: 35A19
  misc_feature: MA Experiment 20000479 PARAMETER Experiment Name: Zm_Drought_P Parameter: Timepoint (hr) Value: 48
  misc_feature: MA Experiment 20000479 PARAMETER Experiment Name: Zm_Drought_P Parameter: Tissue Value: Aerial
  misc_feature: MA Experiment 20000479 PARAMETER Experiment Name: Zm_Drought_P Parameter: Treatment Value: Drought vs. No Drought
aaaacttctcctcttgaggaaggcagcccgagcgagcgcgctgcaatggcggactcgtcggcgccgacgagagtgatgatggcggtgaacgagtcgtcgctcaaggggtacccgcacccctccatcagctgtcgcaccgccttcgactggacgctctccaagctcgtccgctccaaccctgggggcttccacttcctcttcgtccacgttcatgtccccgacgaggacggatttgatgacatggatagcatctatgcttcgccggaggactttcaccaaatgaagcagagagacaagataagagggcttcatttgctcgagtactttgtaaaccaatgccatcagttagggataaaatgcgaggcatggatcagacatggagatccaaaggaggttatctgcagcgaagtgaagagagtccagcctgaccttctagttgtgggaagtaggggtcttgggccatttcagaggaggacaagcctggtgcaatggtgagagctatctcgctgagtca

SEQ ID NO: 15241 - protein, 164 aa, Zea mays subsp. mays
  peptide (1)..(164): Ceres Seq. ID no. 13625318
  misc_feature (22)..(157): Pfam Name: Universal stress protein family Pfam Description: Universal stress protein family
  misc_feature (16)..(157): Homolog of NCBI NO: 19387249 NR Description: putative ethylene-responsive protein [Oryza
  misc_feature (20)..(157): Homolog of NCBI NO: 15241464 NR Description: expressed protein [Arabidopsis thaliana]
  misc_feature (20)..(157): Homolog of NCBI NO: 6016711 NR Description: unknown protein [Arabidopsis thaliana]
  misc_feature (20)..(157): Homolog of NCBI NO: 18395845 NR Description: expressed protein [Arabidopsis thaliana] AT3g01520/F4P13_7 [Arabidopsis thaliana]
  misc_feature (26)..(157): Homolog of NCBI NO: 21536534 NR Description: putative ethylene-responsive protein [Arabidopsis
  misc_feature (1)..(157): Homolog of NCBI NO: 30681955 NR Description: ethylene-responsive protein -related [Arabidopsis >gi|6671949|gb|AAF23209.1|AC016795_22 unknown protein thaliana] >gi|10998131|dbj|BAB03102.1| gene_id:MEC18.3~unknown
  misc_feature (1)..(157): Homolog of NCBI NO: 30681959 NR Description: ethylene-responsive protein -related [Arabidopsis
  misc_feature (5)..(157): Homolog of NCBI NO: 40539010 NR Description: putative stress-related protein [Oryza sativa
  misc_feature (16)..(157): Homolog of NCBI NO: 34914610 NR Description: P0520B06.18 [Oryza sativa (japonica
  misc_feature (83)..(157): Homolog of NCBI NO: 18399413 NR Description: ethylene-responsive protein -related [Arabidopsis
KTSPLEEGSPSERAAMADSSAPTRVMMAVNESSLKGYPHPSISCRTAFDWTLSKLVRSNPGGFHFLFVHVHVPDEDGFDDMDSIYASPEDFHQMKQRDKIRGLHLLEYFVNQCHQLGIKCEAWIRHGDPKEVICSEVKRVQPDLLVVGSRGLGPFQRRTSLVQW

SEQ ID NO: 15242 - protein, 149 aa, Zea mays subsp. mays
  peptide (1)..(149): Ceres Seq. ID no. 13625319
  misc_feature (7)..(142): Pfam Name: Universal stress protein family Pfam Description: Universal stress protein family
  misc_feature (1)..(142): Homolog of NCBI NO: 19387249 NR Description: putative ethylene-responsive protein [Oryza
  misc_feature (5)..(142): Homolog of NCBI NO: 15241464 NR Description: expressed protein [Arabidopsis thaliana]
  misc_feature (5)..(142): Homolog of NCBI NO: 6016711 NR Description: unknown protein [Arabidopsis thaliana]
  misc_feature (5)..(142): Homolog of NCBI NO: 18395845 NR Description: expressed protein [Arabidopsis thaliana] AT3g01520/F4P13_7 [Arabidopsis thaliana]
  misc_feature (11)..(142): Homolog of NCBI NO: 21536534 NR Description: putative ethylene-responsive protein [Arabidopsis
  misc_feature (1)..(142): Homolog of NCBI NO: 30681955 NR Description: ethylene-responsive protein -related [Arabidopsis >gi|6671949|gb|AAF23209.1|AC016795_22 unknown protein thaliana] >gi|10998131|dbj|BAB03102.1| gene_id:MEC18.3~unknown
  misc_feature (1)..(142): Homolog of NCBI NO: 30681959 NR Description: ethylene-responsive protein -related [Arabidopsis
  misc_feature (1)..(142): Homolog of NCBI NO: 40539010 NR Description: putative stress-related protein [Oryza sativa
  misc_feature (1)..(142): Homolog of NCBI NO: 34914610 NR Description: P0520B06.18 [Oryza sativa (japonica
  misc_feature (68)..(142): Homolog of NCBI NO: 18399413 NR Description: ethylene-responsive protein -related [Arabidopsis
MADSSAPTRVMMAVNESSLKGYPHPSISCRTAFDWTLSKLVRSNPGGFHFLFVHVHVPDEDGFDDMDSIYASPEDFHQMKQRDKIRGLHLLEYFVNQCHQLGIKCEAWIRHGDPKEVICSEVKRVQPDLLVVGSRGLGPFQRRTSLVQW

SEQ ID NO: 15243 - protein, 139 aa, Zea mays subsp. mays
  peptide (1)..(139): Ceres Seq. ID no. 13625320
  misc_feature (1)..(132): Pfam Name: Universal stress protein family Pfam Description: Universal stress protein family
  misc_feature (1)..(132): Homolog of NCBI NO: 19387249 NR Description: putative ethylene-responsive protein [Oryza
  misc_feature (1)..(132): Homolog of NCBI NO: 15241464 NR Description: expressed protein [Arabidopsis thaliana]
  misc_feature (1)..(132): Homolog of NCBI NO: 6016711 NR Description: unknown protein [Arabidopsis thaliana]
  misc_feature (1)..(132): Homolog of NCBI NO: 18395845 NR Description: expressed protein [Arabidopsis thaliana] AT3g01520/F4P13_7 [Arabidopsis thaliana]
  misc_feature (1)..(132): Homolog of NCBI NO: 21536534 NR Description: putative ethylene-responsive protein [Arabidopsis
  misc_feature (1)..(132): Homolog of NCBI NO: 30681955 NR Description: ethylene-responsive protein -related [Arabidopsis >gi|6671949|gb|AAF23209.1|AC016795_22 unknown protein thaliana] >gi|10998131|dbj|BAB03102.1| gene_id:MEC18.3~unknown
  misc_feature (1)..(132): Homolog of NCBI NO: 30681959 NR Description: ethylene-responsive protein -related [Arabidopsis
  misc_feature (1)..(132): Homolog of NCBI NO: 40539010 NR Description: putative stress-related protein [Oryza sativa
  misc_feature (1)..(132): Homolog of NCBI NO: 34914610 NR Description: P0520B06.18 [Oryza sativa (japonica
  misc_feature (58)..(132): Homolog of NCBI NO: 18399413 NR Description: ethylene-responsive protein -related [Arabidopsis
MMAVNESSLKGYPHPSISCRTAFDWTLSKLVRSNPGGFHFLFVHVHVPDEDGFDDMDSIYASPEDFHQMKQRDKIRGLHLLEYFVNQCHQLGIKCEAWIRHGDPKEVICSEVKRVQPDLLVVGSRGLGPFQRRTSLVQW

SEQ ID NO: 15244 - DNA, 955 bp, Zea mays subsp. mays
  misc_feature (1)..(955): Ceres Seq. ID no. 13627624
  misc_feature: MA Experiment ID: 108556 Result: Down-regulated in Transcription
  misc_feature: MA Experiment 108556 PARAMETER Experiment Name: Zm_Drought_P Parameter: Age (day) Value: 9
  misc_feature: MA Experiment 108556 PARAMETER Experiment Name: Zm_Drought_P Parameter: Organism Value: Zea mays
  misc_feature: MA Experiment 108556 PARAMETER Experiment Name: Zm_Drought_P Parameter: Plant Line Value: 35A19
  misc_feature: MA Experiment 108556 PARAMETER Experiment Name: Zm_Drought_P Parameter: Timepoint (hr) Value: 24
  misc_feature: MA Experiment 108556 PARAMETER Experiment Name: Zm_Drought_P Parameter: Tissue Value: Aerial
  misc_feature: MA Experiment 108556 PARAMETER Experiment Name: Zm_Drought_P Parameter: Treatment Value: Drought vs. No Drought
  misc_feature: MA Experiment ID: 20000108 Result: Up-regulated in Transcription
  misc_feature: MA Experiment 20000108 PARAMETER Experiment Name: Zm_Root-Tips_P Parameter: Age (day) Value: 12
  misc_feature: MA Experiment 20000108 PARAMETER Experiment Name: Zm_Root-Tips_P Parameter: Organism Value: Zea mays
  misc_feature: MA Experiment 20000108 PARAMETER Experiment Name: Zm_Root-Tips_P Parameter: Tissue Value: Root tips vs. Root mid region    35
  misc_feature: MA Experiment 20000108 PARAMETER Experiment Name: Zm_Root-Tips_P Parameter: Tissue Value: Root tips vs. Root mid region   Sequence Listing-Misc Features (4)
  misc_feature: MA Experiment ID: 20000477 Result: Down-regulated in Transcription
  misc_feature: MA Experiment 20000477 PARAMETER Experiment Name: Zm_5mM_SA_P Parameter: Age (day) Value: 10
  misc_feature: MA Experiment 20000477 PARAMETER Experiment Name: Zm_5mM_SA_P Parameter: Organism Value: Zea mays
  misc_feature: MA Experiment 20000477 PARAMETER Experiment Name: Zm_5mM_SA_P Parameter: Plant Line Value: 35A19
  misc_feature: MA Experiment 20000477 PARAMETER Experiment Name: Zm_5mM_SA_P Parameter: Timepoint (hr) Value: 48
  misc_feature: MA Experiment 20000477 PARAMETER Experiment Name: Zm_5mM_SA_P Parameter: Tissue Value: Aerial
  misc_feature: MA Experiment 20000477 PARAMETER Experiment Name: Zm_5mM_SA_P Parameter: Treatment Value: 5mM SA vs. No Treatment
gaaccgcacaaacgcgctcggcgcttccccacccaaaaaggaaaaccaaccaccactcccaccaccctccgcctccgcctgcgccacagctgccgattcgaaagccctcgtcctgacccctcgcaaaaccctagctccaaccaccatgaagggcaaggccaacgcctccaagaaggatgaggccaggctccgggccggcggcggcggcgccggaaagcgcaagaaggccgccgcgagcggcaagcccaagcgccctccctccgccttcttcgtcttcatgtctgaattcaggcaggagtaccaggcgcagcaccctggcaacaagagcgttgcggccgtgagcaaggcagcaggggaaaagtggcgctctatgtcagagcaagagaagcaaccctatgtggaccaagctgggcagaagaagcaggactatgagaagactaaggcaaatattgagaaggagagcacaagctcaaagaaggctaagactgatgacgacgatggctcgaagtccgaggtcgatgatgaggatggcggtagtgacgaggataacgacgacgacgagtaaatagtatttccgctgttgtgaggtagcaaatcgattgttaggtccccaattagctcactggtttgctatctttaatgttaagttgtttggaacaggtgtttatgaaggggatctattagtttcgtgaggttgttagtttagtgcattagcaaagaaaaagccgaatgctgctagctattatgttgcttttcttttgctaatcacttgtgtcacaactttctgtacctgtttcattgactaatctagtgactagtcagttatgggtttaatgtttggttttggttttatatatttctttgttgcattctgtgcggtctacggaagtcatctgtgctgtatgaatgatgaatatctgcttgtggctcgtttcagtttagtgagtttttgttt

SEQ ID NO: 15245 - protein, 187 aa, Zea mays subsp. mays
  peptide (1)..(187): Ceres Seq. ID no. 13627625
  misc_feature (82)..(151): Pfam Name: HMG (high mobility group) box Pfam Description: HMG (high mobility group) box
  misc_feature (49)..(187): Homolog of NCBI NO: 7446227 NR Description: high mobility group protein HMGc2 - maize
  misc_feature (49)..(187): Homolog of NCBI NO: 7446226 NR Description: high mobility group protein HMGc1 - maize HMGc1 [Zea mays] >gi|5441504|emb|CAB46753.1| HMGc1 protein [Zea
  misc_feature (49)..(187): Homolog of NCBI NO: 17017394 NR Description: HMG-like nucleosome/chromatin assembly factor D
  misc_feature (49)..(187): Homolog of NCBI NO: 18700443 NR Description: high mobility group box protein 2 [Oryza sativa
  misc_feature (50)..(186): Homolog of NCBI NO: 7446231 NR Description: probable high mobility group protein HMG1 - sword
  misc_feature (42)..(187): Homolog of NCBI NO: 7446229 NR Description: high mobility group protein MNB1b - maize
  misc_feature (49)..(187): Homolog of NCBI NO: 123378 NR Description: DNA-BINDING PROTEIN MNB1B (HMG1-LIKE PROTEIN)
  misc_feature (52)..(187): Homolog of NCBI NO: 729737 NR Description: HMG1/2-LIKE PROTEIN >gi|541981|pir||S39556 high
  misc_feature (49)..(187): Homolog of NCBI NO: 3885888 NR Description: high mobility group protein [Oryza sativa]
  misc_feature (49)..(187): Homolog of NCBI NO: 729738 NR Description: HMG1/2-LIKE PROTEIN >gi|100791|pir||S18991 high
NRTNALGASPPKKENQPPLPPPSASACATAADSKALVLTPRKTLAPTTMKGKANASKKDEARLRAGGGGAGKRKKAAASGKPKRPPSAFFVFMSEFRQEYQAQHPGNKSVAAVSKAAGEKWRSMSEQEKQPYVDQAGQKKQDYEKTKANIEKESTSSKKAKTDDDDGSKSEVDDEDGGSDEDNDDDE

SEQ ID NO: 15246 - protein, 139 aa, Zea mays subsp. mays
  peptide (1)..(139): Ceres Seq. ID no. 13627626
  misc_feature (34)..(103): Pfam Name: HMG (high mobility group) box Pfam Description: HMG (high mobility group) box
  misc_feature (1)..(139): Homolog of NCBI NO: 7446227 NR Description: high mobility group protein HMGc2 - maize
  misc_feature (1)..(139): Homolog of NCBI NO: 7446226 NR Description: high mobility group protein HMGc1 - maize HMGc1 [Zea mays] >gi|5441504|emb|CAB46753.1| HMGc1 protein [Zea
  misc_feature (1)..(139): Homolog of NCBI NO: 17017394 NR Description: HMG-like nucleosome/chromatin assembly factor D
  misc_feature (1)..(139): Homolog of NCBI NO: 18700443 NR Description: high mobility group box protein 2 [Oryza sativa
  misc_feature (2)..(138): Homolog of NCBI NO: 7446231 NR Description: probable high mobility group protein HMG1 - sword
  misc_feature (1)..(139): Homolog of NCBI NO: 7446229 NR Description: high mobility group protein MNB1b - maize
  misc_feature (1)..(139): Homolog of NCBI NO: 123378 NR Description: DNA-BINDING PROTEIN MNB1B (HMG1-LIKE PROTEIN)
  misc_feature (4)..(139): Homolog of NCBI NO: 729737 NR Description: HMG1/2-LIKE PROTEIN >gi|541981|pir||S39556 high
  misc_feature (1)..(139): Homolog of NCBI NO: 3885888 NR Description: high mobility group protein [Oryza sativa]
  misc_feature (1)..(139): Homolog of NCBI NO: 729738 NR Description: HMG1/2-LIKE PROTEIN >gi|100791|pir||S18991 high
MKGKANASKKDEARLRAGGGGAGKRKKAAASGKPKRPPSAFFVFMSEFRQEYQAQHPGNKSVAAVSKAAGEKWRSMSEQEKQPYVDQAGQKKQDYEKTKANIEKESTSSKKAKTDDDDGSKSEVDDEDGGSDEDNDDDE

SEQ ID NO: 15247 - protein, 95 aa, Zea mays subsp. mays
  peptide (1)..(95): Ceres Seq. ID no. 13627627
  misc_feature (1)..(59): Pfam Name: HMG (high mobility group) box Pfam Description: HMG (high mobility group) box
  misc_feature (1)..(95): Homolog of NCBI NO: 7446227 NR Description: high mobility group protein HMGc2 - maize
  misc_feature (1)..(95): Homolog of NCBI NO: 7446226 NR Description: high mobility group protein HMGc1 - maize HMGc1 [Zea mays] >gi|5441504|emb|CAB46753.1| HMGc1 protein [Zea
  misc_feature (1)..(95): Homolog of NCBI NO: 17017394 NR Description: HMG-like nucleosome/chromatin assembly factor D
  misc_feature (1)..(95): Homolog of NCBI NO: 18700443 NR Description: high mobility group box protein 2 [Oryza sativa
  misc_feature (1)..(94): Homolog of NCBI NO: 7446231 NR Description: probable high mobility group protein HMG1 - sword
  misc_feature (1)..(95): Homolog of NCBI NO: 7446229 NR Description: high mobility group protein MNB1b - maize
  misc_feature (1)..(95): Homolog of NCBI NO: 123378 NR Description: DNA-BINDING PROTEIN MNB1B (HMG1-LIKE PROTEIN)
  misc_feature (1)..(95): Homolog of NCBI NO: 729737 NR Description: HMG1/2-LIKE PROTEIN >gi|541981|pir||S39556 high
  misc_feature (1)..(95): Homolog of NCBI NO: 3885888 NR Description: high mobility group protein [Oryza sativa]
  misc_feature (1)..(95): Homolog of NCBI NO: 729738 NR Description: HMG1/2-LIKE PROTEIN >gi|100791|pir||S18991 high
MSEFRQEYQAQHPGNKSVAAVSKAAGEKWRSMSEQEKQPYVDQAGQKKQDYEKTKANIEKESTSSKKAKTDDDDGSKSEVDDEDGGSDEDNDDDE

SEQ ID NO: 15248 - DNA, 1462 bp, Zea mays subsp. mays; identical to SEQ ID NO: 10801
  misc_feature (1)..(1462): Ceres Seq. ID no. 13579635
  misc_feature: MA Experiment ID: 108522 Result: Up-regulated in Transcription
  misc_feature: MA Experiment 108522 PARAMETER Experiment Name: Zm_42deg_Heat_P Parameter: Age (day) Value: 8
  misc_feature: MA Experiment 108522 PARAMETER Experiment Name: Zm_42deg_Heat_P Parameter: Organism Value: Zea mays
  misc_feature: MA Experiment 108522 PARAMETER Experiment Name: Zm_42deg_Heat_P Parameter: Plant Line Value: 35A19
  misc_feature: MA Experiment 108522 PARAMETER Experiment Name: Zm_42deg_Heat_P Parameter: Temperature (deg C) Value: 42 vs. 22
  misc_feature: MA Experiment 108522 PARAMETER Experiment Name: Zm_42deg_Heat_P Parameter: Timepoint (hr) Value: 1
  misc_feature: MA Experiment 108522 PARAMETER Experiment Name: Zm_42deg_Heat_P Parameter: Tissue Value: Aerial
  misc_feature: MA Experiment ID: 108527 Result: Up-regulated in Transcription
  misc_feature: MA Experiment 108527 PARAMETER Experiment Name: Zm_5mM_NO_P Parameter: Age (day) Value: 8
  misc_feature: MA Experiment 108527 PARAMETER Experiment Name: Zm_5mM_NO_P Parameter: Organism Value: Zea mays
  misc_feature: MA Experiment 108527 PARAMETER Experiment Name: Zm_5mM_NO_P Parameter: Plant Line Value: 35A19
  misc_feature: MA Experiment 108527 PARAMETER Experiment Name: Zm_5mM_NO_P Parameter: Timepoint (hr) Value: 6
  misc_feature: MA Experiment 108527 PARAMETER Experiment Name: Zm_5mM_NO_P Parameter: Tissue Value: Aerial
  misc_feature: MA Experiment 108527 PARAMETER Experiment Name: Zm_5mM_NO_P Parameter: Treatment Value: 5mM NO vs. No Treatment
  misc_feature: MA Experiment ID: 108543 Result: Down-regulated in Transcription

SEQ ID NO: 15249 - protein, 410 aa, Zea mays subsp. mays; identical to SEQ ID NO: 10802
  peptide (1)..(410): Ceres Seq. ID no. 13579636
  misc_feature (30)..(103): Pfam Name: Ubiquitin family Pfam Description: Ubiquitin family
  misc_feature (30)..(103): Pfam Name: Ubiquitin family Pfam Description: Ubiquitin family
  misc_feature (30)..(103): Pfam Name: Ubiquitin family Pfam Description: Ubiquitin family
  misc_feature (30)..(103): Pfam Name: Ubiquitin family Pfam Description: Ubiquitin family
  misc_feature (27)..(409): Homolog of NCBI NO: 902584 NR Description: polyubiquitin containing 7 ubiquitin monomers
  misc_feature (27)..(410): Homolog of NCBI NO: 902584 NR Description: polyubiquitin containing 7 ubiquitin monomers
  misc_feature (30)..(410): Homolog of NCBI NO: 4809266 NR Description: polyubiquitin [Sporobolus stapfianus]
  misc_feature (27)..(409): Homolog of NCBI NO: 100524 NR Description: polyubiquitin 6 - common sunflower hexaubiquitin protein [Helianthus annuus]
  misc_feature (27)..(410): Homolog of NCBI NO: 481477 NR Description: polyubiquitin 6 - rice >gi|416038|emb|CAA53665.1|
  misc_feature (27)..(410): Homolog of NCBI NO: 481477 NR Description: polyubiquitin 6 - rice >gi|416038|emb|CAA53665.1|
  misc_feature (27)..(409): Homolog of NCBI NO: 902584 NR Description: polyubiquitin containing 7 ubiquitin monomers
  misc_feature (30)..(410): Homolog of NCBI NO: 899608 NR Description: polyubiquitin
  misc_feature (27)..(410): Homolog of NCBI NO: 481477 NR Description: polyubiquitin 6 - rice >gi|416038|emb|CAA53665.1|
  misc_feature (27)..(410): Homolog of NCBI NO: 100934 NR Description: polyubiquitin - maize >gi|248337|gb|AAB21993.1|
  misc_feature (27)..(409): Homolog of NCBI NO: 100934 NR Description: polyubiquitin - maize >gi|248337|gb|AAB21993.1|
  misc_feature (27)..(409): Homolog of NCBI NO: 4115337 NR Description: ubiquitin [Pisum sativum]
  misc_feature (27)..(409): Homolog of NCBI NO: 16660462 NR Description: polyubiquitin OUB2 [Olea europaea]
  misc_feature (27)..(409): Homolog of NCBI NO: 100524 NR Description: polyubiquitin 6 - common sunflower hexaubiquitin protein [Helianthus annuus]
  misc_feature (30)..(410): Homolog of NCBI NO: 4809266 NR Description: polyubiquitin [Sporobolus stapfianus]
  misc_feature (27)..(410): Homolog of NCBI NO: 902584 NR Description: polyubiquitin containing 7 ubiquitin monomers
  misc_feature (27)..(409): Homolog of NCBI NO: 100934 NR Description: polyubiquitin - maize >gi|248337|gb|AAB21993.1|
  misc_feature (27)..(409): Homolog of NCBI NO: 4115337 NR Description: ubiquitin [Pisum sativum]
  misc_feature (27)..(409): Homolog of NCBI NO: 16660462 NR Description: polyubiquitin OUB2 [Olea europaea]
  misc_feature (27)..(409): Homolog of NCBI NO: 100524 NR Description: polyubiquitin 6 - common sunflower hexaubiquitin protein [Helianthus annuus]
  misc_feature (30)..(410): Homolog of NCBI NO: 4809266 NR Description: polyubiquitin [Sporobolus stapfianus]
  misc_feature (27)..(410): Homolog of NCBI NO: 902584 NR Description: polyubiquitin containing 7 ubiquitin monomers
  misc_feature (27)..(409): Homolog of NCBI NO: 902584 NR Description: polyubiquitin containing 7 ubiquitin monomers
  misc_feature (30)..(410): Homolog of NCBI NO: 899608 NR Description: polyubiquitin
  misc_feature (27)..(410): Homolog of NCBI NO: 481477 NR Description: polyubiquitin 6 - rice >gi|416038|emb|CAA53665.1|
  misc_feature (27)..(410): Homolog of NCBI NO: 100934 NR Description: polyubiquitin - maize >gi|248337|gb|AAB21993.1|
  misc_feature (27)..(409): Homolog of NCBI NO: 100934 NR Description: polyubiquitin - maize >gi|248337|gb|AAB21993.1|
  misc_feature (27)..(409): Homolog of NCBI NO: 4115337 NR Description: ubiquitin [Pisum sativum]
  misc_feature (27)..(409): Homolog of NCBI NO: 16660462 NR Description: polyubiquitin OUB2 [Olea europaea]
  misc_feature (27)..(409): Homolog of NCBI NO: 100524 NR Description: polyubiquitin 6 - common sunflower hexaubiquitin protein [Helianthus annuus]
  misc_feature (30)..(410): Homolog of NCBI NO: 4809266 NR Description: polyubiquitin [Sporobolus stapfianus]
  misc_feature (27)..(410): Homolog of NCBI NO: 902584 NR Description: polyubiquitin containing 7 ubiquitin monomers
  misc_feature (27)..(409): Homolog of NCBI NO: 902584 NR Description: polyubiquitin containing 7 ubiquitin monomers
  misc_feature (30)..(410): Homolog of NCBI NO: 899608 NR Description: polyubiquitin
  misc_feature (27)..(410): Homolog of NCBI NO: 100934 NR Description: polyubiquitin - maize >gi|248337|gb|AAB21993.1|
  misc_feature (30)..(410): Homolog of NCBI NO: 899608 NR Description: polyubiquitin
  misc_feature (27)..(410): Homolog of NCBI NO: 100934 NR Description: polyubiquitin - maize >gi|248337|gb|AAB21993.1|
  misc_feature (27)..(409): Homolog of NCBI NO: 16660462 NR Description: polyubiquitin OUB2 [Olea europaea]
  misc_feature (27)..(409): Homolog of NCBI NO: 4115337 NR Description: ubiquitin [Pisum sativum]
  misc_feature (27)..(409): Homolog of NCBI NO: 100934 NR Description: polyubiquitin - maize >gi|248337|gb|AAB21993.1|

SEQ ID NO: 15250 - protein, 381 aa, Zea mays subsp. mays; identical to SEQ ID NO: 10803
  peptide (1)..(381): Ceres Seq. ID no. 13579637
  misc_feature (1)..(74): Pfam Name: Ubiquitin family Pfam Description: Ubiquitin family
  misc_feature (1)..(74): Pfam Name: Ubiquitin family Pfam Description: Ubiquitin family
  misc_feature (1)..(74): Pfam Name: Ubiquitin family Pfam Description: Ubiquitin family
  misc_feature (1)..(74): Pfam Name: Ubiquitin family Pfam Description: Ubiquitin family
  misc_feature (1)..(381): Homolog of NCBI NO: 100934 NR Description: polyubiquitin - maize >gi|248337|gb|AAB21993.1|
  misc_feature (1)..(381): Homolog of NCBI NO: 481477 NR Description: polyubiquitin 6 - rice >gi|416038|emb|CAA53665.1|
  misc_feature (1)..(381): Homolog of NCBI NO: 899608 NR Description: polyubiquitin
  misc_feature (1)..(380): Homolog of NCBI NO: 902584 NR Description: polyubiquitin containing 7 ubiquitin monomers
  misc_feature (1)..(381): Homolog of NCBI NO: 902584 NR Description: polyubiquitin containing 7 ubiquitin monomers
  misc_feature (1)..(381): Homolog of NCBI NO: 4809266 NR Description: polyubiquitin [Sporobolus stapfianus]
  misc_feature (1)..(381): Homolog of NCBI NO: 481477 NR Description: polyubiquitin 6 - rice >gi|416038|emb|CAA53665.1|
  misc_feature (1)..(381): Homolog of NCBI NO: 899608 NR Description: polyubiquitin
  misc_feature (1)..(381): Homolog of NCBI NO: 481477 NR Description: polyubiquitin 6 - rice >gi|416038|emb|CAA53665.1|
  misc_feature (1)..(381): Homolog of NCBI NO: 100934 NR Description: polyubiquitin - maize >gi|248337|gb|AAB21993.1|
  misc_feature (1)..(380): Homolog of NCBI NO: 418854 NR Description: polyubiquitin 6 - parsley polyubiquitin [Petroselinum crispum] >gi|288114|emb|CAA45622.1|
  misc_feature (1)..(380): Homolog of NCBI NO: 100524 NR Description: polyubiquitin 6 - common sunflower hexaubiquitin protein [Helianthus annuus]
  misc_feature (1)..(381): Homolog of NCBI NO: 4809266 NR Description: polyubiquitin [Sporobolus stapfianus]
  misc_feature (1)..(381): Homolog of NCBI NO: 902584 NR Description: polyubiquitin containing 7 ubiquitin monomers
  misc_feature (1)..(380): Homolog of NCBI NO: 902584 NR Description: polyubiquitin containing 7 ubiquitin monomers
  misc_feature (1)..(381): Homolog of NCBI NO: 899608 NR Description: polyubiquitin
  misc_feature (1)..(380): Homolog of NCBI NO: 4115337 NR Description: ubiquitin [Pisum sativum]
  misc_feature (1)..(380): Homolog of NCBI NO: 16660462 NR Description: polyubiquitin OUB2 [Olea europaea]
  misc_feature (1)..(380): Homolog of NCBI NO: 418854 NR Description: polyubiquitin 6 - parsley polyubiquitin [Petroselinum crispum] >gi|288114|emb|CAA45622.1|
  misc_feature (1)..(380): Homolog of NCBI NO: 100524 NR Description: polyubiquitin 6 - common sunflower hexaubiquitin protein [Helianthus annuus]
  misc_feature (1)..(381): Homolog of NCBI NO: 4809266 NR Description: polyubiquitin [Sporobolus stapfianus]
  misc_feature (1)..(381): Homolog of NCBI NO: 902584 NR Description: polyubiquitin containing 7 ubiquitin monomers
  misc_feature (1)..(380): Homolog of NCBI NO: 902584 NR Description: polyubiquitin containing 7 ubiquitin monomers
  misc_feature (1)..(381): Homolog of NCBI NO: 899608 NR Description: polyubiquitin
  misc_feature (1)..(381): Homolog of NCBI NO: 481477 NR Description: polyubiquitin 6 - rice >gi|416038|emb|CAA53665.1|
  misc_feature (1)..(381): Homolog of NCBI NO: 100934 NR Description: polyubiquitin - maize >gi|248337|gb|AAB21993.1|
  misc_feature (1)..(380): Homolog of NCBI NO: 4115337 NR Description: ubiquitin [Pisum sativum]
  misc_feature (1)..(380): Homolog of NCBI NO: 16660462 NR Description: polyubiquitin OUB2 [Olea europaea]
  misc_feature (1)..(380): Homolog of NCBI NO: 418854 NR Description: polyubiquitin 6 - parsley polyubiquitin [Petroselinum crispum] >gi|288114|emb|CAA45622.1|
  misc_feature (1)..(380): Homolog of NCBI NO: 100524 NR Description: polyubiquitin 6 - common sunflower hexaubiquitin protein [Helianthus annuus]
  misc_feature (1)..(381): Homolog of NCBI NO: 4809266 NR Description: polyubiquitin [Sporobolus stapfianus]
  misc_feature (1)..(381): Homolog of NCBI NO: 902584 NR Description: polyubiquitin containing 7 ubiquitin monomers
  misc_feature (1)..(380): Homolog of NCBI NO: 902584 NR Description: polyubiquitin containing 7 ubiquitin monomers
  misc_feature (1)..(381): Homolog of NCBI NO: 100934 NR Description: polyubiquitin - maize >gi|248337|gb|AAB21993.1|
  misc_feature (1)..(380): Homolog of NCBI NO: 100524 NR Description: polyubiquitin 6 - common sunflower hexaubiquitin protein [Helianthus annuus]
  misc_feature (1)..(380): Homolog of NCBI NO: 418854 NR Description: polyubiquitin 6 - parsley polyubiquitin [Petroselinum crispum] >gi|288114|emb|CAA45622.1|
  misc_feature (1)..(380): Homolog of NCBI NO: 16660462 NR Description: polyubiquitin OUB2 [Olea europaea]
  misc_feature (1)..(380): Homolog of NCBI NO: 4115337 NR Description: ubiquitin [Pisum sativum]
  misc_feature (1)..(380): Homolog of NCBI NO: 16660462 NR Description: polyubiquitin OUB2 [Olea europaea]
  misc_feature (1)..(380): Homolog of NCBI NO: 4115337 NR Description: ubiquitin [Pisum sativum]

SEQ ID NO: 15251 - protein, 305 aa, Zea mays subsp. mays; identical to SEQ ID NO: 10804
  peptide (1)..(305): Ceres Seq. ID no. 13579638
  misc_feature (1)..(74): Pfam Name: Ubiquitin family Pfam Description: Ubiquitin family
  misc_feature (1)..(74): Pfam Name: Ubiquitin family Pfam Description: Ubiquitin family
  misc_feature (1)..(74): Pfam Name: Ubiquitin family Pfam Description: Ubiquitin family
  misc_feature (1)..(74): Pfam Name: Ubiquitin family Pfam Description: Ubiquitin family
  misc_feature (1)..(305): Homolog of NCBI NO: 100934 NR Description: polyubiquitin - maize >gi|248337|gb|AAB21993.1|
  misc_feature (1)..(305): Homolog of NCBI NO: 481477 NR Description: polyubiquitin 6 - rice >gi|416038|emb|CAA53665.1|
  misc_feature (1)..(305): Homolog of NCBI NO: 899608 NR Description: polyubiquitin
  misc_feature (1)..(304): Homolog of NCBI NO: 902584 NR Description: polyubiquitin containing 7 ubiquitin monomers
  misc_feature (1)..(305): Homolog of NCBI NO: 902584 NR Description: polyubiquitin containing 7 ubiquitin monomers
  misc_feature (1)..(305): Homolog of NCBI NO: 481477 NR Description: polyubiquitin 6 - rice >gi|416038|emb|CAA53665.1|
  misc_feature (1)..(304): Homolog of NCBI NO: 902584 NR Description: polyubiquitin containing 7 ubiquitin monomers
  misc_feature (1)..(305): Homolog of NCBI NO: 899608 NR Description: polyubiquitin
  misc_feature (1)..(305): Homolog of NCBI NO: 481477 NR Description: polyubiquitin 6 - rice >gi|416038|emb|CAA53665.1|
  misc_feature (1)..(305): Homolog of NCBI NO: 100934 NR Description: polyubiquitin - maize >gi|248337|gb|AAB21993.1|
  misc_feature (1)..(304): Homolog of NCBI NO: 170352 NR Description: hexameric polyubiquitin >gi|870792|gb|AAA68878.1| >gi|4115333|gb|AAD03341.1| ubiquitin [Pisum sativum] ubiquitin [Pisum sativum] >gi|22655101|gb|AAM98141.1|
  misc_feature (1)..(304): Homolog of NCBI NO: 4115337 NR Description: ubiquitin [Pisum sativum]
  misc_feature (1)..(304): Homolog of NCBI NO: 16660462 NR Description: polyubiquitin OUB2 [Olea europaea]
  misc_feature (1)..(304): Homolog of NCBI NO: 100524 NR Description: polyubiquitin 6 - common sunflower hexaubiquitin protein [Helianthus annuus]
  misc_feature (1)..(305): Homolog of NCBI NO: 4809266 NR Description: polyubiquitin [Sporobolus stapfianus]
  misc_feature (1)..(305): Homolog of NCBI NO: 902584 NR Description: polyubiquitin containing 7 ubiquitin monomers
  misc_feature (1)..(304): Homolog of NCBI NO: 170352 NR Description: hexameric polyubiquitin >gi|870792|gb|AAA68878.1| >gi|4115333|gb|AAD03341.1| ubiquitin [Pisum sativum] ubiquitin [Pisum sativum] >gi|22655101|gb|AAM98141.1|
  misc_feature (1)..(304): Homolog of NCBI NO: 4115337 NR Description: ubiquitin [Pisum sativum]
  misc_feature (1)..(304): Homolog of NCBI NO: 16660462 NR Description: polyubiquitin OUB2 [Olea europaea]
  misc_feature (1)..(304): Homolog of NCBI NO: 100524 NR Description: polyubiquitin 6 - common sunflower hexaubiquitin protein [Helianthus annuus]
  misc_feature (1)..(305): Homolog of NCBI NO: 4809266 NR Description: polyubiquitin [Sporobolus stapfianus]
  misc_feature (1)..(305): Homolog of NCBI NO: 902584 NR Description: polyubiquitin containing 7 ubiquitin monomers
  misc_feature (1)..(304): Homolog of NCBI NO: 902584 NR Description: polyubiquitin containing 7 ubiquitin monomers
  misc_feature (1)..(305): Homolog of NCBI NO: 899608 NR Description: polyubiquitin
  misc_feature (1)..(305): Homolog of NCBI NO: 481477 NR Description: polyubiquitin 6 - rice >gi|416038|emb|CAA53665.1|
  misc_feature (1)..(305): Homolog of NCBI NO: 100934 NR Description: polyubiquitin - maize >gi|248337|gb|AAB21993.1|
  misc_feature (1)..(304): Homolog of NCBI NO: 170352 NR Description: hexameric polyubiquitin >gi|870792|gb|AAA68878.1| >gi|4115333|gb|AAD03341.1| ubiquitin [Pisum sativum] ubiquitin [Pisum sativum] >gi|22655101|gb|AAM98141.1|
  misc_feature (1)..(304): Homolog of NCBI NO: 4115337 NR Description: ubiquitin [Pisum sativum]
  misc_feature (1)..(304): Homolog of NCBI NO: 16660462 NR Description: polyubiquitin OUB2 [Olea europaea]
  misc_feature (1)..(304): Homolog of NCBI NO: 100524 NR Description: polyubiquitin 6 - common sunflower hexaubiquitin protein [Helianthus annuus]
  misc_feature (1)..(305): Homolog of NCBI NO: 4809266 NR Description: polyubiquitin [Sporobolus stapfianus]
  misc_feature (1)..(305): Homolog of NCBI NO: 902584 NR Description: polyubiquitin containing 7 ubiquitin monomers
  misc_feature (1)..(304): Homolog of NCBI NO: 902584 NR Description: polyubiquitin containing 7 ubiquitin monomers
  misc_feature (1)..(305): Homolog of NCBI NO: 899608 NR Description: polyubiquitin
  misc_feature (1)..(305): Homolog of NCBI NO: 100934 NR Description: polyubiquitin - maize >gi|248337|gb|AAB21993.1|
  misc_feature (1)..(305): Homolog of NCBI NO: 4809266 NR Description: polyubiquitin [Sporobolus stapfianus]
  misc_feature (1)..(304): Homolog of NCBI NO: 100524 NR Description: polyubiquitin 6 - common sunflower hexaubiquitin protein [Helianthus annuus]
  misc_feature (1)..(304): Homolog of NCBI NO: 16660462 NR Description: polyubiquitin OUB2 [Olea europaea]
  misc_feature (1)..(304): Homolog of NCBI NO: 4115337 NR Description: ubiquitin [Pisum sativum]
  misc_feature (1)..(304): Homolog of NCBI NO: 170352 NR Description: hexameric polyubiquitin >gi|870792|gb|AAA68878.1| >gi|4115333|gb|AAD03341.1| ubiquitin [Pisum sativum] ubiquitin [Pisum sativum] >gi|22655101|gb|AAM98141.1|

SEQ ID NO: 15252 - DNA, 455 bp, Zea mays subsp. mays
  misc_feature (1)..(455): Ceres Seq. ID no. 13636910
  misc_feature: MA Experiment ID: 108527 Result: Up-regulated in Transcription
  misc_feature: MA Experiment 108527 PARAMETER Experiment Name: Zm_5mM_NO_P Parameter: Age (day) Value: 8
  misc_feature: MA Experiment 108527 PARAMETER Experiment Name: Zm_5mM_NO_P Parameter: Organism Value: Zea mays
  misc_feature: MA Experiment 108527 PARAMETER Experiment Name: Zm_5mM_NO_P Parameter: Plant Line Value: 35A19
  misc_feature: MA Experiment 108527 PARAMETER Experiment Name: Zm_5mM_NO_P Parameter: Timepoint (hr) Value: 6
  misc_feature: MA Experiment 108527 PARAMETER Experiment Name: Zm_5mM_NO_P Parameter: Tissue Value: Aerial
  misc_feature: MA Experiment 108527 PARAMETER Experiment Name: Zm_5mM_NO_P Parameter: Treatment Value: 5mM NO vs. No Treatment
  misc_feature: MA Experiment ID: 20000535 Result: Down-regulated in Transcription
  misc_feature: MA Experiment 20000535 PARAMETER Experiment Name: Zm_Hybrid_Seed_Dev_P Parameter: DAP Value: 30 vs. 12
  misc_feature: MA Experiment 20000535 PARAMETER Experiment Name: Zm_Hybrid_Seed_Dev_P Parameter: Organism Value: Zea mays
  misc_feature: MA Experiment 20000535 PARAMETER Experiment Name: Zm_Hybrid_Seed_Dev_P Parameter: Plant Line Value: 35A19
  misc_feature: MA Experiment 20000535 PARAMETER Experiment Name: Zm_Hybrid_Seed_Dev_P Parameter: Tissue Value: Embryo vs. Unfert Floret
taatcgtccatccgtatttccgtcacaactcacaacccgagccccccaaacccgaagcagcaggagctcccctgaccttgctccgcctccgatcaaggaaaaggaagatgagctactacggccagcagccccccgtcggcgtcccgccgcagcaaggctacccggggaaggacggctacccgccagcggggtacccgccggccggctaccccccgccggcgcagggctacccgccgcagggctacccgcagcagggttacccacagcagggctacccgccgcagtacgcgcagccgcctccacagcagcagcagagcagcgggccttccttcatggaaggatgcttggctgccctctgctgctgctgcctcctggacgcctgcttctgacggaaccatccgtgccgggtccaacacggctgcaagtgaagcaaccagcttacggaagagctggaa

SEQ ID NO: 15253 - protein, 151 aa, Zea mays subsp. mays
  peptide (1)..(151): Ceres Seq. ID no. 13636911
  misc_feature (2)..(104): Homolog of NCBI NO: 23000746 NR Description: hypothetical protein [Magnetococcus sp. MC-1]
NRPSVFPSQLTTRAPQTRSSRSSPDLAPPPIKEKEDELLRPAAPRRRPAAARLPGEGRLPASGVPAGRLPPAGAGLPAAGLPAAGLPTAGLPAAVRAAASTAAAEQRAFLHGRMLGCPLLLLPPGRLLLTEPSVPGPTRLQVKQPAYGRAG

SEQ ID NO: 15254 - protein, 128 aa, Zea mays subsp. mays
  peptide (1)..(128): Ceres Seq. ID no. 13636912
  misc_feature (3)..(100): Pfam Name: Extensin-like region Pfam Description: Extensin-like region
  misc_feature (36)..(128): Homolog of NCBI NO: 40538901 NR Description: expressed protein [Oryza sativa (japonica
  misc_feature (36)..(128): Homolog of NCBI NO: 34393718 NR Description: adhesive/proline-rich protein homolog-like
  misc_feature (36)..(128): Homolog of NCBI NO: 1808688 NR Description: hypothetical protein [Sporobolus stapfianus]
  misc_feature (36)..(113): Homolog of NCBI NO: 34901106 NR Description: contains ESTs
  misc_feature (36)..(128): Homolog of NCBI NO: 15227350 NR Description: proline-rich protein family [Arabidopsis thaliana]
  misc_feature (38)..(128): Homolog of NCBI NO: 18425209 NR Description: expressed protein [Arabidopsis thaliana] gene_id:K9I9.17~unknown protein [Arabidopsis thaliana] unknown protein [Arabidopsis thaliana]
  misc_feature (41)..(128): Homolog of NCBI NO: 21554421 NR Description: unknown [Arabidopsis thaliana]
  misc_feature (38)..(128): Homolog of NCBI NO: 21618167 NR Description: adhesive/proline-rich protein homolog
  misc_feature (43)..(128): Homolog of NCBI NO: 15229624 NR Description: proline-rich protein family [Arabidopsis thaliana]
  misc_feature (29)..(108): Homolog of NCBI NO: 15229624 NR Description: proline-rich protein family [Arabidopsis thaliana]
IVHPYFRHNSQPEPPKPEAAGAPLTLLRLRSRKRKMSYYGQQPPVGVPPQQGYPGKDGYPPAGYPPAGYPPPAQGYPPQGYPQQGYPQQGYPPQYAQPPPQQQQSSGPSFMEGCLAALCCCCLLDACF

SEQ ID NO: 15255 - protein, 93 aa, Zea mays subsp. mays
  peptide (1)..(93): Ceres Seq. ID no. 13636913
  misc_feature (1)..(65): Pfam Name: Extensin-like region Pfam Description: Extensin-like region
  misc_feature (1)..(93): Homolog of NCBI NO: 40538901 NR Description: expressed protein [Oryza sativa (japonica
  misc_feature (1)..(93): Homolog of NCBI NO: 34393718 NR Description: adhesive/proline-rich protein homolog-like
  misc_feature (1)..(93): Homolog of NCBI NO: 1808688 NR Description: hypothetical protein [Sporobolus stapfianus]
  misc_feature (1)..(78): Homolog of NCBI NO: 34901106 NR Description: contains ESTs
  misc_feature (1)..(93): Homolog of NCBI NO: 15227350 NR Description: proline-rich protein family [Arabidopsis thaliana]
  misc_feature (3)..(93): Homolog of NCBI NO: 18425209 NR Description: expressed protein [Arabidopsis thaliana] gene_id:K9I9.17~unknown protein [Arabidopsis thaliana] unknown protein [Arabidopsis thaliana]
  misc_feature (6)..(93): Homolog of NCBI NO: 21554421 NR Description: unknown [Arabidopsis thaliana]
  misc_feature (3)..(93): Homolog of NCBI NO: 21618167 NR Description: adhesive/proline-rich protein homolog
  misc_feature (8)..(93): Homolog of NCBI NO: 15229624 NR Description: proline-rich protein family [Arabidopsis thaliana]
  misc_feature (1)..(73): Homolog of NCBI NO: 15229624 NR Description: proline-rich protein family [Arabidopsis thaliana]
MSYYGQQPPVGVPPQQGYPGKDGYPPAGYPPAGYPPPAQGYPPQGYPQQGYPQQGYPPQYAQPPPQQQQSSGPSFMEGCLAALCCCCLLDACF

SEQ ID NO: 15256 - DNA, 538 bp, Zea mays subsp. mays
  misc_feature (1)..(538): Ceres Seq. ID no. 13629237
  misc_feature: MA Experiment ID: 20000535 Result: Up-regulated in Transcription
  misc_feature: MA Experiment 20000535 PARAMETER Experiment Name: Zm_Hybrid_Seed_Dev_P Parameter: DAP Value: 30 vs. 12
  misc_feature: MA Experiment 20000535 PARAMETER Experiment Name: Zm_Hybrid_Seed_Dev_P Parameter: Organism Value: Zea mays
  misc_feature: MA Experiment 20000535 PARAMETER Experiment Name: Zm_Hybrid_Seed_Dev_P Parameter: Plant Line Value: 35A19
  misc_feature: MA Experiment 20000535 PARAMETER Experiment Name: Zm_Hybrid_Seed_Dev_P Parameter: Tissue Value: Embryo vs. Unfert Floret
agttttcttgtgccgtagctttgtgacaaaagaagtagctgtttgcctctttgcagtgaaagcactaccaacaagaagatgattatcacagagaccaaccgcagagagatctgcaaataccttttcaaagaaggagtattgttcgccaagaaggacttcaatctcccaaagcatccgttgattgagtcagtgcccaacctgcaagtgatcaagctcatgcagagtttcaaatccaaggagtacgttagggagaccttcgcttggatgcactactattggtttctcaccaacgaagggattgagttcttgagaacttatcttaaccttccctcggatgttgttcccgcgaccttgaagaagtctgctaagcccattggtcgttccctttggtggccctcctggtgnnnngccctagaggtcctcgctttgagnanaccggtccntagnnntggtgaccgtgaggggtaccgagggccacnnnngcggtgatgcagcaggtggaaaagggtggagctccagctgattaccagccgctttc

SEQ ID NO: 15257 - protein, 136 aa, Zea mays subsp. mays
  peptide (1)..(136): Ceres Seq. ID no. 13629238
  misc_feature (3)..(98): Pfam Name: Plectin/S10 domain Pfam Description: Plectin/S10 domain
  misc_feature (1)..(132): Homolog of NCBI NO: 15235985 NR Description: 40S ribosomal protein S10 (RPS10A) [Arabidopsis
  misc_feature (1)..(133): Homolog of NCBI NO: 15237217 NR Description: 40S ribosomal protein S10 (RPS10C) [Arabidopsis >gi|17528966|gb|AAL38693.1| unknown protein [Arabidopsis >gi|21617950|gb|AAM67000.1| putative ribosomal protein S10
  misc_feature (1)..(133): Homolog of NCBI NO: 20139798 NR Description: 40S ribosomal protein S10-3 contains similarity to 40S ribosomal protein S10~gene_id:F6N7.14
  misc_feature (1)..(101): Homolog of NCBI NO: 15238099 NR Description: expressed protein [Arabidopsis thaliana]
  misc_feature (1)..(132): Homolog of NCBI NO: 34897532 NR Description: OSJNBa0042L16.3 [Oryza sativa (japonica
  misc_feature (1)..(132): Homolog of NCBI NO: 34905824 NR Description: putative ribosomal protein S10 [Oryza sativa
  misc_feature (1)..(132): Homolog of NCBI NO: 20140213 NR Description: 40S ribosomal protein S10
  misc_feature (1)..(97): Homolog of NCBI NO: 20140136 NR Description: 40S ribosomal protein S10
  misc_feature (1)..(98): Homolog of NCBI NO: 40642980 NR Description: ribosomal protein S10 [Crassostrea gigas]
  misc_feature (1)..(97): Homolog of NCBI NO: 19920344 NR Description: CG14206-PC [Drosophila melanogaster]
  misc_feature (109)..(109): Xaa is any aa, unknown or other
  misc_feature (110)..(110): Xaa is any aa, unknown or other
  misc_feature (118)..(118): Xaa is any aa, unknown or other
  misc_feature (119)..(119): Xaa is any aa, unknown or other
  misc_feature (122)..(122): Xaa is any aa, unknown or other
  misc_feature (123)..(123): Xaa is any aa, unknown or other
  misc_feature (124)..(124): Xaa is any aa, unknown or other
  misc_feature (134)..(134): Xaa is any aa, unknown or other
  misc_feature (135)..(135): Xaa is any aa, unknown or other
MIITETNRREICKYLFKEGVLFAKKDFNLPKHPLIESVPNLQVIKLMQSFKSKEYVRETFAWMHYYWFLTNEGIEFLRTYLNLPSDVVPATLKKSAKPIGRSLWWPSWXXALEVLALXXPVXXXGDREGYRGPXXR

SEQ ID NO: 15258 - protein, 90 aa, Zea mays subsp. mays
  peptide (1)..(90): Ceres Seq. ID no. 13629239
  misc_feature (1)..(52): Pfam Name: Plectin/S10 domain Pfam Description: Plectin/S10 domain
  misc_feature (1)..(86): Homolog of NCBI NO: 15235985 NR Description: 40S ribosomal protein S10 (RPS10A) [Arabidopsis
  misc_feature (1)..(87): Homolog of NCBI NO: 15237217 NR Description: 40S ribosomal protein S10 (RPS10C) [Arabidopsis >gi|17528966|gb|AAL38693.1| unknown protein [Arabidopsis >gi|21617950|gb|AAM67000.1| putative ribosomal protein S10
  misc_feature (1)..(87): Homolog of NCBI NO: 20139798 NR Description: 40S ribosomal protein S10-3 contains similarity to 40S ribosomal protein S10~gene_id:F6N7.14
  misc_feature (1)..(55): Homolog of NCBI NO: 15238099 NR Description: expressed protein [Arabidopsis thaliana]
  misc_feature (1)..(86): Homolog of NCBI NO: 34897532 NR Description: OSJNBa0042L16.3 [Oryza sativa (japonica
  misc_feature (1)..(86): Homolog of NCBI NO: 34905824 NR Description: putative ribosomal protein S10 [Oryza sativa
  misc_feature (1)..(86): Homolog of NCBI NO: 20140213 NR Description: 40S ribosomal protein S10
  misc_feature (1)..(51): Homolog of NCBI NO: 20140136 NR Description: 40S ribosomal protein S10
  misc_feature (1)..(52): Homolog of NCBI NO: 40642980 NR Description: ribosomal protein S10 [Crassostrea gigas]
  misc_feature (1)..(51): Homolog of NCBI NO: 19920344 NR Description: CG14206-PC [Drosophila melanogaster]
  misc_feature (63)..(63): Xaa is any aa, unknown or other
  misc_feature (64)..(64): Xaa is any aa, unknown or other
  misc_feature (72)..(72): Xaa is any aa, unknown or other
  misc_feature (73)..(73): Xaa is any aa, unknown or other
  misc_feature (76)..(76): Xaa is any aa, unknown or other
  misc_feature (77)..(77): Xaa is any aa, unknown or other
  misc_feature (78)..(78): Xaa is any aa, unknown or other
  misc_feature (88)..(88): Xaa is any aa, unknown or other
  misc_feature (89)..(89): Xaa is any aa, unknown or other
MQSFKSKEYVRETFAWMHYYWFLTNEGIEFLRTYLNLPSDVVPATLKKSAKPIGRSLWWPSWXXALEVLALXXPVXXXGDREGYRGPXXR

SEQ ID NO: 15259 - protein, 74 aa, Zea mays subsp. mays
  peptide (1)..(74): Ceres Seq. ID no. 13629240
  misc_feature (1)..(70): Homolog of NCBI NO: 15235985 NR Description: 40S ribosomal protein S10 (RPS10A) [Arabidopsis
  misc_feature (1)..(71): Homolog of NCBI NO: 15237217 NR Description: 40S ribosomal protein S10 (RPS10C) [Arabidopsis >gi|17528966|gb|AAL38693.1| unknown protein [Arabidopsis >gi|21617950|gb|AAM67000.1| putative ribosomal protein S10
  misc_feature (1)..(71): Homolog of NCBI NO: 20139798 NR Description: 40S ribosomal protein S10-3 contains similarity to 40S ribosomal protein S10~gene_id:F6N7.14
  misc_feature (1)..(39): Homolog of NCBI NO: 15238099 NR Description: expressed protein [Arabidopsis thaliana]
  misc_feature (1)..(70): Homolog of NCBI NO: 34897532 NR Description: OSJNBa0042L16.3 [Oryza sativa (japonica
  misc_feature (1)..(70): Homolog of NCBI NO: 34905824 NR Description: putative ribosomal protein S10 [Oryza sativa
  misc_feature (1)..(70): Homolog of NCBI NO: 20140213 NR Description: 40S ribosomal protein S10
  misc_feature (1)..(35): Homolog of NCBI NO: 20140136 NR Description: 40S ribosomal protein S10
  misc_feature (1)..(36): Homolog of NCBI NO: 40642980 NR Description: ribosomal protein S10 [Crassostrea gigas]
  misc_feature (1)..(35): Homolog of NCBI NO: 19920344 NR Description: CG14206-PC [Drosophila melanogaster]
  misc_feature (47)..(47): Xaa is any aa, unknown or other
  misc_feature (48)..(48): Xaa is any aa, unknown or other
  misc_feature (56)..(56): Xaa is any aa, unknown or other
  misc_feature (57)..(57): Xaa is any aa, unknown or other
  misc_feature (60)..(60): Xaa is any aa, unknown or other
  misc_feature (61)..(61): Xaa is any aa, unknown or other
  misc_feature (62)..(62): Xaa is any aa, unknown or other
  misc_feature (72)..(72): Xaa is any aa, unknown or other
  misc_feature (73)..(73): Xaa is any aa, unknown or other
MHYYWFLTNEGIEFLRTYLNLPSDVVPATLKKSAKPIGRSLWWPSWXXALEVLALXXPVXXXGDREGYRGPXXR

SEQ ID NO: 15260 - DNA, 1150 bp, Zea mays subsp. mays
  misc_feature (1)..(1150): Ceres Seq. ID no. 13636132
  misc_feature: MA Experiment ID: 108535 Result: Up-regulated in Transcription
  misc_feature: MA Experiment 108535 PARAMETER Experiment Name: Zm_Meristem_P Parameter: Age (day) Value: 8
  misc_feature: MA Experiment 108535 PARAMETER Experiment Name: Zm_Meristem_P Parameter: Organism Value: Zea mays
  misc_feature: MA Experiment 108535 PARAMETER Experiment Name: Zm_Meristem_P Parameter: Plant Line Value: 35A19
  misc_feature: MA Experiment 108535 PARAMETER Experiment Name: Zm_Meristem_P Parameter: Tissue Value: Root Meristem vs. Above Root Meristem
  misc_feature: MA Experiment ID: 108548 Result: Up-regulated in Transcription
  misc_feature: MA Experiment 108548 PARAMETER Experiment Name: Zm_20uM_KNO3_H-to-L_P Parameter: Age (day) Value: 11
  misc_feature: MA Experiment 108548 PARAMETER Experiment Name: Zm_20uM_KNO3_H-to-L_P Parameter: Organism Value: Zea mays
  misc_feature: MA Experiment 108548 PARAMETER Experiment Name: Zm_20uM_KNO3_H-to-L_P Parameter: Plant Line Value: 35A19
  misc_feature: MA Experiment 108548 PARAMETER Experiment Name: Zm_20uM_KNO3_H-to-L_P Parameter: Timepoint (hr) Value: 4
  misc_feature: MA Experiment 108548 PARAMETER Experiment Name: Zm_20uM_KNO3_H-to-L_P Parameter: Tissue Value: Roots
  misc_feature: MA Experiment 108548 PARAMETER Experiment Name: Zm_20uM_KNO3_H-to-L_P Parameter: Treatment Value: 20uM KNO3 vs. 60mM KNO3
  misc_feature: MA Experiment ID: 108556 Result: Down-regulated in Transcription
  misc_feature: MA Experiment 108556 PARAMETER Experiment Name: Zm_Drought_P Parameter: Age (day) Value: 9
  misc_feature: MA Experiment 108556 PARAMETER Experiment Name: Zm_Drought_P Parameter: Organism Value: Zea mays
  misc_feature: MA Experiment 108556 PARAMETER Experiment Name: Zm_Drought_P Parameter: Plant Line Value: 35A19
  misc_feature: MA Experiment 108556 PARAMETER Experiment Name: Zm_Drought_P Parameter: Timepoint (hr) Value: 24
  misc_feature: MA Experiment 108556 PARAMETER Experiment Name: Zm_Drought_P Parameter: Tissue Value: Aerial
  misc_feature: MA Experiment 108556 PARAMETER Experiment Name: Zm_Drought_P Parameter: Treatment Value: Drought vs. No Drought
  misc_feature: MA Experiment ID: 108597 Result: Down-regulated in Transcription
  misc_feature: MA Experiment 108597 PARAMETER Experiment Name: Zm_100uM_ABA_P Parameter: Age (day) Value: 9
  misc_feature: MA Experiment 108597 PARAMETER Experiment Name: Zm_100uM_ABA_P Parameter: Organism Value: Zea mays
  misc_feature: MA Experiment 108597 PARAMETER Experiment Name: Zm_100uM_ABA_P Parameter: Plant Line Value: 35A19
  misc_feature: MA Experiment 108597 PARAMETER Experiment Name: Zm_100uM_ABA_P Parameter: Timepoint (hr) Value: 24
  misc_feature: MA Experiment 108597 PARAMETER Experiment Name: Zm_100uM_ABA_P Parameter: Tissue Value: Aerial
  misc_feature: MA Experiment 108597 PARAMETER Experiment Name: Zm_100uM_ABA_P Parameter: Treatment Value: 100uM ABA vs. No Treatment
  misc_feature: MA Experiment ID: 20000478 Result: Down-regulated in Transcription
  misc_feature: MA Experiment 20000478 PARAMETER Experiment Name: Zm_5mM_SA_P Parameter: Age (day) Value: 11
  misc_feature: MA Experiment 20000478 PARAMETER Experiment Name: Zm_5mM_SA_P Parameter: Organism Value: Zea mays
  misc_feature: MA Experiment 20000478 PARAMETER Experiment Name: Zm_5mM_SA_P Parameter: Plant Line Value: 35A19
  misc_feature: MA Experiment 20000478 PARAMETER Experiment Name: Zm_5mM_SA_P Parameter: Timepoint (hr) Value: 72
  misc_feature: MA Experiment 20000478 PARAMETER Experiment Name: Zm_5mM_SA_P Parameter: Tissue Value: Aerial
  misc_feature: MA Experiment 20000478 PARAMETER Experiment Name: Zm_5mM_SA_P Parameter: Treatment Value: 5mM SA vs. No Treatment
  misc_feature: MA Experiment ID: 20000534 Result: Down-regulated in Transcription
  misc_feature: MA Experiment 20000534 PARAMETER Experiment Name: Zm_Hybrid_Pollen_P Parameter: Age (day) Value: 8
  misc_feature: MA Experiment 20000534 PARAMETER Experiment Name: Zm_Hybrid_Pollen_P Parameter: Organism Value: Zea mays
  misc_feature: MA Experiment 20000534 PARAMETER Experiment Name: Zm_Hybrid_Pollen_P Parameter: Plant Line Value: 35A19
  misc_feature: MA Experiment 20000534 PARAMETER Experiment Name: Zm_Hybrid_Pollen_P Parameter: Tissue Value: Pollen vs. Aerial
acacataaccagcacacagctctcgccttctctctcccatcggcacacccgagctcgctccctccttccacgtcgaggtccgagtcctgctttgatggcgaccgacgtggctgagactcccgcgccgttggtggatgcggccccagaggcgcccgccgacgccccggcggcgcctgctgccgacgcgaagccggccaaggccaagaaggccaccgcgccgaagaagcgcgccagcccgacccacccgccgtacgccgagatggtctcggaggcgatcacgtcgctcaaggagaggacggggtccagcagctatgcgattgccaagttcgtggaggacaagcacaaggacaagctcccgcccaacttccgcaagcttctgaacgttcagctcaagaagctcgtcgccggcggcaagctgaccaaggtgaagaactcgtacaagctgtcgtccgccaccaagccgaatcccaagcccaaggccgccccgaagaagcccaagaccggcgctaagaagcccaaggccgctgccaagcccaaagctaagacccccgccaaggcgaagcccgccacaaagcccaagcccgccgcgaagccgaaagccgtagtgaaaccgaagacacccgccaagcccaaggccaagccagctgccaaggcgaagcccaagaccgccggcgctaagccgaagccacttgctaagaaggccggccgcgccaaggcggcgaagacgtcggccaaggacacgccagggaagaaggcccctgccaagaaggccgctccctcaaagaaggcggcgaccccggtgcggaaagcgccgtcccgtaaggccaagaagtaaagcggccaagaaggggggcgcgatgctgtaaatttgatatcggagaggctcgggtacactggtcattcagtatccgagaccgatagctgaggctagtggcgatggaggactgtgttattactactataaactggtggttgtgtttctgtaactggtgaatgatcaagttggaagcttttagtctatcttagatatatcagtggatagtgttttttgtattttcgttttcttttccaatgtgtgttgggtcttgtggattatcctttttttctaatctaatacaatgaagaggcatgtcttttgaagcttcccctg

SEQ ID NO: 15261 - protein, 277 aa, Zea mays subsp. mays
  peptide (1)..(277): Ceres Seq. ID no. 13636133
  misc_feature (80)..(150): Pfam Name: linker histone H1 and H5 family Pfam Description: linker histone H1 and H5 family
  misc_feature (32)..(277): Homolog of NCBI NO: 121950 NR Description: HISTONE H1 >gi|7439629|pir||S26826 histone H1 -
  misc_feature (32)..(275): Homolog of NCBI NO: 34897182 NR Description: histone-like protein [Oryza sativa (japonica
  misc_feature (32)..(275): Homolog of NCBI NO: 5230785 NR Description: histone H1 WH1B.1 [Triticum aestivum]
  misc_feature (33)..(277): Homolog of NCBI NO: 5230785 NR Description: histone H1 WH1B.1 [Triticum aestivum]
  misc_feature (27)..(277): Homolog of NCBI NO: 7439660 NR Description: histone H1 (clone TH32) - wheat
  misc_feature (36)..(277): Homolog of NCBI NO: 7439656 NR Description: histone H1 (clone TH315) - wheat
  misc_feature (32)..(277): Homolog of NCBI NO: 5230790 NR Description: histone H1 WH1A.4 [Triticum aestivum]
  misc_feature (32)..(277): Homolog of NCBI NO: 11558848 NR Description: histone H1 [Triticum aestivum]
  misc_feature (32)..(277): Homolog of NCBI NO: 5230781 NR Description: histone H1 WH1A.1 [Triticum aestivum]
  misc_feature (38)..(277): Homolog of NCBI NO: 2623960 NR Description: histone H1 [Apium graveolens]
HITSTQLSPSLSHRHTRARSLLPRRGPSPALMATDVAETPAPLVDAAPEAPADAPAAPAADAKPAKAKKATAPKKRASPTHPPYAEMVSEAITSLKERTGSSSYAIAKFVEDKHKDKLPPNFRKLLNVQLKKLVAGGKLTKVKNSYKLSSATKPNPKPKAAPKKPKTGAKKPKAAAKPKAKTPAKAKPATKPKPAAKPKAVVKPKTPAKPKAKPAAKAKPKTAGAKPKPLAKKAGRAKAAKTSAKDTPGKKAPAKKAAPSKKAATPVRKAPSRKAKK

SEQ ID NO: 15262 - protein, 246 aa, Zea mays subsp. mays
  peptide (1)..(246): Ceres Seq. ID no. 13636134
  misc_feature (49)..(119): Pfam Name: linker histone H1 and H5 family Pfam Description: linker histone H1 and H5 family
  misc_feature (1)..(246): Homolog of NCBI NO: 121950 NR Description: HISTONE H1 >gi|7439629|pir||S26826 histone H1 -
  misc_feature (1)..(244): Homolog of NCBI NO: 34897182 NR Description: histone-like protein [Oryza sativa (japonica
  misc_feature (1)..(244): Homolog of NCBI NO: 5230785 NR Description: histone H1 WH1B.1 [Triticum aestivum]
  misc_feature (2)..(246): Homolog of NCBI NO: 5230785 NR Description: histone H1 WH1B.1 [Triticum aestivum]
  misc_feature (1)..(246): Homolog of NCBI NO: 7439660 NR Description: histone H1 (clone TH32) - wheat
  misc_feature (5)..(246): Homolog of NCBI NO: 7439656 NR Description: histone H1 (clone TH315) - wheat
  misc_feature (1)..(246): Homolog of NCBI NO: 5230790 NR Description: histone H1 WH1A.4 [Triticum aestivum]
  misc_feature (1)..(246): Homolog of NCBI NO: 11558848 NR Description: histone H1 [Triticum aestivum]
  misc_feature (1)..(246): Homolog of NCBI NO: 5230781 NR Description: histone H1 WH1A.1 [Triticum aestivum]
  misc_feature (7)..(246): Homolog of NCBI NO: 2623960 NR Description: histone H1 [Apium graveolens]
MATDVAETPAPLVDAAPEAPADAPAAPAADAKPAKAKKATAPKKRASPTHPPYAEMVSEAITSLKERTGSSSYAIAKFVEDKHKDKLPPNFRKLLNVQLKKLVAGGKLTKVKNSYKLSSATKPNPKPKAAPKKPKTGAKKPKAAAKPKAKTPAKAKPATKPKPAAKPKAVVKPKTPAKPKAKPAAKAKPKTAGAKPKPLAKKAGRAKAAKTSAKDTPGKKAPAKKAAPSKKAATPVRKAPSRKAKK

SEQ ID NO: 15263 - protein, 191 aa, Zea mays subsp. mays
  peptide (1)..(191): Ceres Seq. ID no. 13636135
  misc_feature (1)..(64): Pfam Name: linker histone H1 and H5 family Pfam Description: linker histone H1 and H5 family
  misc_feature (1)..(191): Homolog of NCBI NO: 121950 NR Description: HISTONE H1 >gi|7439629|pir||S26826 histone H1 -
  misc_feature (1)..(189): Homolog of NCBI NO: 34897182 NR Description: histone-like protein [Oryza sativa (japonica
  misc_feature (1)..(189): Homolog of NCBI NO: 5230785 NR Description: histone H1 WH1B.1 [Triticum aestivum]
  misc_feature (1)..(191): Homolog of NCBI NO: 5230785 NR Description: histone H1 WH1B.1 [Triticum aestivum]
  misc_feature (1)..(191): Homolog of NCBI NO: 7439660 NR Description: histone H1 (clone TH32) - wheat
  misc_feature (1)..(191): Homolog of NCBI NO: 7439656 NR Description: histone H1 (clone TH315) - wheat
  misc_feature (1)..(191): Homolog of NCBI NO: 5230790 NR Description: histone H1 WH1A.4 [Triticum aestivum]
  misc_feature (1)..(191): Homolog of NCBI NO: 11558848 NR Description: histone H1 [Triticum aestivum]
  misc_feature (1)..(191): Homolog of NCBI NO: 5230781 NR Description: histone H1 WH1A.1 [Triticum aestivum]
  misc_feature (1)..(191): Homolog of NCBI NO: 2623960 NR Description: histone H1 [Apium graveolens]
MVSEAITSLKERTGSSSYAIAKFVEDKHKDKLPPNFRKLLNVQLKKLVAGGKLTKVKNSYKLSSATKPNPKPKAAPKKPKTGAKKPKAAAKPKAKTPAKAKPATKPKPAAKPKAVVKPKTPAKPKAKPAAKAKPKTAGAKPKPLAKKAGRAKAAKTSAKDTPGKKAPAKKAAPSKKAATPVRKAPSRKAKK

SEQ ID NO: 15264 - DNA, 1665 bp, Zea mays subsp. mays; identical to SEQ ID NO: 11280
  misc_feature (1)..(1665): Ceres Seq. ID no. 13633473
  misc_feature: MA Experiment ID: 20000492 Result: Up-regulated in Transcription
  misc_feature: MA Experiment 20000492 PARAMETER Experiment Name: Zm_Hybrid_Seed_Dev_P Parameter: DAP Value: 12
  misc_feature: MA Experiment 20000492 PARAMETER Experiment Name: Zm_Hybrid_Seed_Dev_P Parameter: Organism Value: Zea mays
  misc_feature: MA Experiment 20000492 PARAMETER Experiment Name: Zm_Hybrid_Seed_Dev_P Parameter: Plant Line Value: 35A19
  misc_feature: MA Experiment 20000492 PARAMETER Experiment Name: Zm_Hybrid_Seed_Dev_P Parameter: Tissue Value: Fert Kernel vs. Unfert Floret

SEQ ID NO: 15265 - protein, 419 aa, Zea mays subsp. mays; identical to SEQ ID NO: 11281
  peptide (1)..(419): Ceres Seq. ID no. 13633474
  misc_feature (1)..(391): Homolog of NCBI NO: 34897424 NR Description: putative protein kinase [Oryza sativa (japonica group)] >gi|27545044|gb|AAO18450.1| putative protein kinase
  misc_feature (1)..(400): Homolog of NCBI NO: 14719339 NR Description: putative protein kinase [Oryza sativa]
  misc_feature (1)..(399): Homolog of NCBI NO: 34906046 NR Description: putative serine/threonine-specific protein kinase
  misc_feature (1)..(367): Homolog of NCBI NO: 15227001 NR Description: protein kinase (APK1b) [Arabidopsis thaliana]
  misc_feature (1)..(281): Homolog of NCBI NO: 8778537 NR Description: F22G5.5 [Arabidopsis thaliana]
  misc_feature (261)..(419): Homolog of NCBI NO: 8778537 NR Description: F22G5.5 [Arabidopsis thaliana]
  misc_feature (1)..(415): Homolog of NCBI NO: 15222437 NR Description: protein kinase (APK1a) [Arabidopsis thaliana]
  misc_feature (1)..(375): Homolog of NCBI NO: 15241749 NR Description: protein kinase, putative [Arabidopsis thaliana]
  misc_feature (1)..(375): Homolog of NCBI NO: 166809 NR Description: protein kinase
  misc_feature (1)..(401): Homolog of NCBI NO: 15225520 NR Description: protein kinase, putative [Arabidopsis thaliana]
  misc_feature (1)..(391): Homolog of NCBI NO: 34897424 NR Description: putative protein kinase [Oryza sativa (japonica group)] >gi|27545044|gb|AAO18450.1| putative protein kinase
  misc_feature (1)..(400): Homolog of NCBI NO: 14719339 NR Description: putative protein kinase [Oryza sativa]
  misc_feature (1)..(399): Homolog of NCBI NO: 34906046 NR Description: putative serine/threonine-specific protein kinase
  misc_feature (1)..(367): Homolog of NCBI NO: 15227001 NR Description: protein kinase (APK1b) [Arabidopsis thaliana]
  misc_feature (1)..(281): Homolog of NCBI NO: 8778537 NR Description: F22G5.5 [Arabidopsis thaliana]
  misc_feature (261)..(419): Homolog of NCBI NO: 8778537 NR Description: F22G5.5 [Arabidopsis thaliana]
  misc_feature (1)..(415): Homolog of NCBI NO: 15222437 NR Description: protein kinase (APK1a) [Arabidopsis thaliana]
  misc_feature (1)..(375): Homolog of NCBI NO: 15241749 NR Description: protein kinase, putative [Arabidopsis thaliana]
  misc_feature (1)..(375): Homolog of NCBI NO: 166809 NR Description: protein kinase
  misc_feature (1)..(401): Homolog of NCBI NO: 15225520 NR Description: protein kinase, putative [Arabidopsis thaliana]

SEQ ID NO: 15266 - protein, 399 aa, Zea mays subsp. mays; identical to SEQ ID NO: 11282
  peptide (1)..(399): Ceres Seq. ID no. 13633475
  misc_feature (1)..(371): Homolog of NCBI NO: 34897424 NR Description: putative protein kinase [Oryza sativa (japonica group)] >gi|27545044|gb|AAO18450.1| putative protein kinase
  misc_feature (1)..(380): Homolog of NCBI NO: 14719339 NR Description: putative protein kinase [Oryza sativa]
  misc_feature (1)..(379): Homolog of NCBI NO: 34906046 NR Description: putative serine/threonine-specific protein kinase
  misc_feature (1)..(347): Homolog of NCBI NO: 15227001 NR Description: protein kinase (APK1b) [Arabidopsis thaliana]
  misc_feature (1)..(261): Homolog of NCBI NO: 8778537 NR Description: F22G5.5 [Arabidopsis thaliana]
  misc_feature (241)..(399): Homolog of NCBI NO: 8778537 NR Description: F22G5.5 [Arabidopsis thaliana]
  misc_feature (1)..(395): Homolog of NCBI NO: 15222437 NR Description: protein kinase (APK1a) [Arabidopsis thaliana]
  misc_feature (1)..(355): Homolog of NCBI NO: 15241749 NR Description: protein kinase, putative [Arabidopsis thaliana]
  misc_feature (1)..(355): Homolog of NCBI NO: 166809 NR Description: protein kinase
  misc_feature (1)..(381): Homolog of NCBI NO: 15225520 NR Description: protein kinase, putative [Arabidopsis thaliana]
  misc_feature (1)..(371): Homolog of NCBI NO: 34897424 NR Description: putative protein kinase [Oryza sativa (japonica group)] >gi|27545044|gb|AAO18450.1| putative protein kinase
  misc_feature (1)..(380): Homolog of NCBI NO: 14719339 NR Description: putative protein kinase [Oryza sativa]
  misc_feature (1)..(379): Homolog of NCBI NO: 34906046 NR Description: putative serine/threonine-specific protein kinase
  misc_feature (1)..(347): Homolog of NCBI NO: 15227001 NR Description: protein kinase (APK1b) [Arabidopsis thaliana]
  misc_feature (1)..(261): Homolog of NCBI NO: 8778537 NR Description: F22G5.5 [Arabidopsis thaliana]
  misc_feature (241)..(399): Homolog of NCBI NO: 8778537 NR Description: F22G5.5 [Arabidopsis thaliana]
  misc_feature (1)..(395): Homolog of NCBI NO: 15222437 NR Description: protein kinase (APK1a) [Arabidopsis thaliana]
  misc_feature (1)..(355): Homolog of NCBI NO: 15241749 NR Description: protein kinase, putative [Arabidopsis thaliana]
  misc_feature (1)..(355): Homolog of NCBI NO: 166809 NR Description: protein kinase
  misc_feature (1)..(381): Homolog of NCBI NO: 15225520 NR Description: protein kinase, putative [Arabidopsis thaliana]

SEQ ID NO: 15267 - protein, 375 aa, Zea mays subsp. mays; identical to SEQ ID NO: 11283
  peptide (1)..(375): Ceres Seq. ID no. 13633476
  misc_feature (1)..(347): Homolog of NCBI NO: 34897424 NR Description: putative protein kinase [Oryza sativa (japonica group)] >gi|27545044|gb|AAO18450.1| putative protein kinase
  misc_feature (1)..(356): Homolog of NCBI NO: 14719339 NR Description: putative protein kinase [Oryza sativa]
  misc_feature (1)..(355): Homolog of NCBI NO: 34906046 NR Description: putative serine/threonine-specific protein kinase
  misc_feature (1)..(323): Homolog of NCBI NO: 15227001 NR Description: protein kinase (APK1b) [Arabidopsis thaliana]
  misc_feature (1)..(237): Homolog of NCBI NO: 8778537 NR Description: F22G5.5 [Arabidopsis thaliana]
  misc_feature (217)..(375): Homolog of NCBI NO: 8778537 NR Description: F22G5.5 [Arabidopsis thaliana]
  misc_feature (1)..(371): Homolog of NCBI NO: 15222437 NR Description: protein kinase (APK1a) [Arabidopsis thaliana]
  misc_feature (1)..(331): Homolog of NCBI NO: 15241749 NR Description: protein kinase, putative [Arabidopsis thaliana]
  misc_feature (1)..(331): Homolog of NCBI NO: 166809 NR Description: protein kinase
  misc_feature (1)..(357): Homolog of NCBI NO: 15225520 NR Description: protein kinase, putative [Arabidopsis thaliana]
  misc_feature (1)..(347): Homolog of NCBI NO: 34897424 NR Description: putative protein kinase [Oryza sativa (japonica group)] >gi|27545044|gb|AAO18450.1| putative protein kinase
  misc_feature (1)..(356): Homolog of NCBI NO: 14719339 NR Description: putative protein kinase [Oryza sativa]
  misc_feature (1)..(355): Homolog of NCBI NO: 34906046 NR Description: putative serine/threonine-specific protein kinase
  misc_feature (1)..(323): Homolog of NCBI NO: 15227001 NR Description: protein kinase (APK1b) [Arabidopsis thaliana]
  misc_feature (1)..(237): Homolog of NCBI NO: 8778537 NR Description: F22G5.5 [Arabidopsis thaliana]
  misc_feature (217)..(375): Homolog of NCBI NO: 8778537 NR Description: F22G5.5 [Arabidopsis thaliana]
  misc_feature (1)..(371): Homolog of NCBI NO: 15222437 NR Description: protein kinase (APK1a) [Arabidopsis thaliana]
  misc_feature (1)..(331): Homolog of NCBI NO: 15241749 NR Description: protein kinase, putative [Arabidopsis thaliana]
  misc_feature (1)..(331): Homolog of NCBI NO: 166809 NR Description: protein kinase
  misc_feature (1)..(357): Homolog of NCBI NO: 15225520 NR Description: protein kinase, putative [Arabidopsis thaliana]

SEQ ID NO: 15268 - DNA, 419 bp, Zea mays subsp. mays
  misc_feature (1)..(419): Ceres Seq. ID no. 13629513
  misc_feature: MA Experiment ID: 108522 Result: Up-regulated in Transcription
  misc_feature: MA Experiment 108522 PARAMETER Experiment Name: Zm_42deg_Heat_P Parameter: Age (day) Value: 8
  misc_feature: MA Experiment 108522 PARAMETER Experiment Name: Zm_42deg_Heat_P Parameter: Organism Value: Zea mays
  misc_feature: MA Experiment 108522 PARAMETER Experiment Name: Zm_42deg_Heat_P Parameter: Plant Line Value: 35A19
  misc_feature: MA Experiment 108522 PARAMETER Experiment Name: Zm_42deg_Heat_P Parameter: Temperature (deg C) Value: 42 vs. 22
  misc_feature: MA Experiment 108522 PARAMETER Experiment Name: Zm_42deg_Heat_P Parameter: Timepoint (hr) Value: 1
  misc_feature: MA Experiment 108522 PARAMETER Experiment Name: Zm_42deg_Heat_P Parameter: Tissue Value: Aerial
  misc_feature: MA Experiment ID: 108523 Result: Up-regulated in Transcription
  misc_feature: MA Experiment 108523 PARAMETER Experiment Name: Zm_42deg_Heat_P Parameter: Age (day) Value: 8
  misc_feature: MA Experiment 108523 PARAMETER Experiment Name: Zm_42deg_Heat_P Parameter: Organism Value: Zea mays
  misc_feature: MA Experiment 108523 PARAMETER Experiment Name: Zm_42deg_Heat_P Parameter: Plant Line Value: 35A19
  misc_feature: MA Experiment 108523 PARAMETER Experiment Name: Zm_42deg_Heat_P Parameter: Temperature (deg C) Value: 42 vs. 22
  misc_feature: MA Experiment 108523 PARAMETER Experiment Name: Zm_42deg_Heat_P Parameter: Timepoint (hr) Value: 6
  misc_feature: MA Experiment 108523 PARAMETER Experiment Name: Zm_42deg_Heat_P Parameter: Tissue Value: Aerial
  misc_feature: MA Experiment ID: 108547 Result: Up-regulated in Transcription
  misc_feature: MA Experiment 108547 PARAMETER Experiment Name: Zm_Imbibed_Seeds_P Parameter: Age (day) Value: 4 vs. 2
  misc_feature: MA Experiment 108547 PARAMETER Experiment Name: Zm_Imbibed_Seeds_P Parameter: Organism Value: Zea mays
  misc_feature: MA Experiment 108547 PARAMETER Experiment Name: Zm_Imbibed_Seeds_P Parameter: Plant Line Value: 35A19
  misc_feature: MA Experiment 108547 PARAMETER Experiment Name: Zm_Imbibed_Seeds_P Parameter: Tissue Value: Aerial vs. Embryo
  misc_feature: MA Experiment ID: 108597 Result: Up-regulated in Transcription
  misc_feature: MA Experiment 108597 PARAMETER Experiment Name: Zm_100uM_ABA_P Parameter: Age (day) Value: 9
  misc_feature: MA Experiment 108597 PARAMETER Experiment Name: Zm_100uM_ABA_P Parameter: Organism Value: Zea mays
  misc_feature: MA Experiment 108597 PARAMETER Experiment Name: Zm_100uM_ABA_P Parameter: Plant Line Value: 35A19
  misc_feature: MA Experiment 108597 PARAMETER Experiment Name: Zm_100uM_ABA_P Parameter: Timepoint (hr) Value: 24
  misc_feature: MA Experiment 108597 PARAMETER Experiment Name: Zm_100uM_ABA_P Parameter: Tissue Value: Aerial
  misc_feature: MA Experiment 108597 PARAMETER Experiment Name: Zm_100uM_ABA_P Parameter: Treatment Value: 100uM ABA vs. No Treatment
  misc_feature: MA Experiment ID: 20000487 Result: Up-regulated in Transcription
  misc_feature: MA Experiment 20000487 PARAMETER Experiment Name: Zm_50mM_NH4NO3_L_to_H_P Parameter: Organism Value: Zea mays
  misc_feature: MA Experiment 20000487 PARAMETER Experiment Name: Zm_50mM_NH4NO3_L_to_H_P Parameter: Timepoint (hr) Value: 4
  misc_feature: MA Experiment 20000487 PARAMETER Experiment Name: Zm_50mM_NH4NO3_L_to_H_P Parameter: Tissue Value: Leaves
  misc_feature: MA Experiment 20000487 PARAMETER Experiment Name: Zm_50mM_NH4NO3_L_to_H_P Parameter: Treatment Value: 50mM NH4NO3 vs. 100mM Mannitol
gccgccaacccccaaacaaaaccctaggccaccaccaggcacaagcagagcagaagcagacatggccaccattccgaccaccgattctggcctcgtcctcagttcctccgctctcctccggaggactaggagggccgcctcatccgtcaccgccaggctgccagccgtcgcccgccgtcgcccgcagctcctcgtgcgtgcctccgccaaggagatcgccttcgaccagggctccagagccgcccttcaggccggcgtcaanannntcgccggcgcgggcggcgtcaccctcggacccagagnnnnnaatgttgtcttggatgagtttggaacccccaaagtggtcaatgatggagttaccattgcccgcgctattgagctcgctgatcccatggagaatgctggtgcttccttgattc

SEQ ID NO: 15269 - protein, 139 aa, Zea mays subsp. mays
  peptide (1)..(139): Ceres Seq. ID no. 13629514
  misc_feature (65)..(138): Homolog of NCBI NO: 15226314 NR Description: RuBisCO subunit binding-protein alpha subunit/60 chaperonin alpha subunit [Arabidopsis thaliana]
  misc_feature (13)..(138): Homolog of NCBI NO: 29367489 NR Description: putative chaperonin 60 alpha subunit [Oryza
  misc_feature (21)..(138): Homolog of NCBI NO: 31193919 NR Description: putative rubisco subunit binding-protein alpha
  misc_feature (33)..(138): Homolog of NCBI NO: 1710807 NR Description: RuBisCO subunit binding-protein alpha subunit,
  misc_feature (33)..(138): Homolog of NCBI NO: 3790441 NR Description: chaperonin 60 alpha subunit [Canavalia lineata]
  misc_feature (21)..(138): Homolog of NCBI NO: 464727 NR Description: RuBisCO subunit binding-protein alpha subunit,
  misc_feature (67)..(138): Homolog of NCBI NO: 134102 NR Description: RuBisCO subunit binding-protein alpha subunit,
  misc_feature (65)..(138): Homolog of NCBI NO: 99801 NR Description: chaperonine 60K alpha chain - rape (fragment)
  misc_feature (65)..(138): Homolog of NCBI NO: 1351030 NR Description: RuBisCO subunit binding-protein alpha subunit,
  misc_feature (60)..(138): Homolog of NCBI NO: 10697184 NR Description: chaperonin-60 alpha subunit [Avicennia marina]
  misc_feature (87)..(87): Xaa is any aa, unknown or other
  misc_feature (88)..(88): Xaa is any aa, unknown or other
  misc_feature (89)..(89): Xaa is any aa, unknown or other
  misc_feature (101)..(101): Xaa is any aa, unknown or other
  misc_feature (102)..(102): Xaa is any aa, unknown or other
PPTPKQNPRPPPGTSRAEADMATIPTTDSGLVLSSSALLRRTRRAASSVTARLPAVARRRPQLLVRASAKEIAFDQGSRAALQAGVXXXAGAGGVTLGPRXXNVVLDEFGTPKVVNDGVTIARAIELADPMENAGASLI

SEQ ID NO: 15270 - protein, 137 aa, Zea mays subsp. mays
  peptide (1)..(137): Ceres Seq. ID no. 13629515
  misc_feature (3)..(125): Pfam Name: Extensin-like region Pfam Description: Extensin-like region
  misc_feature (26)..(99): Homolog of NCBI NO: 32422095 NR Description: predicted protein [Neurospora crassa]
  misc_feature (87)..(87): Xaa is any aa, unknown or other
  misc_feature (88)..(88): Xaa is any aa, unknown or other
  misc_feature (101)..(101): Xaa is any aa, unknown or other
  misc_feature (102)..(102): Xaa is any aa, unknown or other
RQPPNKTLGHHQAQAEQKQTWPPFRPPILASSSVPPLSSGGLGGPPHPSPPGCQPSPAVARSSSCVPPPRRSPSTRAPEPPFRPASXXSPARAASPSDPEXXMLSWMSLEPPKWSMMELPLPALLSSLIPWRMLVLP

SEQ ID NO: 15271 - protein, 119 aa, Zea mays subsp. mays
  peptide (1)..(119): Ceres Seq. ID no. 13629516
  misc_feature (1)..(118): Homolog of NCBI NO: 29367489 NR Description: putative chaperonin 60 alpha subunit [Oryza
  misc_feature (1)..(118): Homolog of NCBI NO: 31193919 NR Description: putative rubisco subunit binding-protein alpha
  misc_feature (13)..(118): Homolog of NCBI NO: 1710807 NR Description: RuBisCO subunit binding-protein alpha subunit,
  misc_feature (13)..(118): Homolog of NCBI NO: 3790441 NR Description: chaperonin 60 alpha subunit [Canavalia lineata]
  misc_feature (1)..(118): Homolog of NCBI NO: 464727 NR Description: RuBisCO subunit binding-protein alpha subunit,
  misc_feature (47)..(118): Homolog of NCBI NO: 134102 NR Description: RuBisCO subunit binding-protein alpha subunit,
  misc_feature (45)..(118): Homolog of NCBI NO: 99801 NR Description: chaperonine 60K alpha chain - rape (fragment)
  misc_feature (45)..(118): Homolog of NCBI NO: 1351030 NR Description: RuBisCO subunit binding-protein alpha subunit,
  misc_feature (40)..(118): Homolog of NCBI NO: 10697184 NR Description: chaperonin-60 alpha subunit [Avicennia marina]
  misc_feature (45)..(118): Homolog of NCBI NO: 15226314 NR Description: RuBisCO subunit binding-protein alpha subunit/60 chaperonin alpha subunit [Arabidopsis thaliana]
  misc_feature (67)..(67): Xaa is any aa, unknown or other
  misc_feature (68)..(68): Xaa is any aa, unknown or other
  misc_feature (69)..(69): Xaa is any aa, unknown or other
  misc_feature (81)..(81): Xaa is any aa, unknown or other
  misc_feature (82)..(82): Xaa is any aa, unknown or other
MATIPTTDSGLVLSSSALLRRTRRAASSVTARLPAVARRRPQLLVRASAKEIAFDQGSRAALQAGVXXXAGAGGVTLGPRXXNVVLDEFGTPKVVNDGVTIARAIELADPMENAGASLI

SEQ ID NO: 15272 - DNA, 546 bp, Zea mays subsp. mays
  misc_feature (1)..(546): Ceres Seq. ID no. 13629579
  misc_feature: MA Experiment ID: 108547 Result: Down-regulated in Transcription
  misc_feature: MA Experiment 108547 PARAMETER Experiment Name: Zm_Imbibed_Seeds_P Parameter: Age (day) Value: 4 vs. 2
  misc_feature: MA Experiment 108547 PARAMETER Experiment Name: Zm_Imbibed_Seeds_P Parameter: Organism Value: Zea mays
  misc_feature: MA Experiment 108547 PARAMETER Experiment Name: Zm_Imbibed_Seeds_P Parameter: Plant Line Value: 35A19
  misc_feature: MA Experiment 108547 PARAMETER Experiment Name: Zm_Imbibed_Seeds_P Parameter: Tissue Value: Aerial vs. Embryo
ctctttccattagccatcctagccttcgccccctcgacgagaagaaccacctcaaaaccgaacagccgcaaaagaaagctgctagctactctatacatgataactaggtagatatatataagcttccggggctttaatttggttgggagttccggccatgagcgagaagagattcatgcatggcgcaaatttcatgtgtgttttgcagaacaggaccgtgaagtaatatatatataatgacgaagtcaggggcgctacaacttgctcggagcaccggagggtcgcttagcaaggaccaagtcaaatccgccgttgatcagtatgtgaagtaccacgacctccacggaggcgaacaagaatcaagaaagtcaaattacgctgatttggcaaacaagtactatgatcttgtcactggcttctacgaatatggatggggcgactcattccattttgctggcggatatccgggtgaaacttcccgtgaagccattaagcggcaccagcattttatggcactacaattggggctcaagaagggtatgaagg

SEQ ID NO: 15273 - protein, 103 aa, Zea mays subsp. mays
  peptide (1)..(103): Ceres Seq. ID no. 13629580
  misc_feature (1)..(102): Homolog of NCBI NO: 3560531 NR Description: cycloartenol-C24-methyltransferase [Oryza sativa
  misc_feature (1)..(102): Homolog of NCBI NO: 34393309 NR Description: cycloartenol-C24-methyltransferase [Oryza sativa
  misc_feature (1)..(102): Homolog of NCBI NO: 7443715 NR Description: sterol 24-C-methyltransferase (EC 2.1.1.41) -
  misc_feature (1)..(102): Homolog of NCBI NO: 7443716 NR Description: sterol 24-C-methyltransferase (EC 2.1.1.41)
  misc_feature (1)..(102): Homolog of NCBI NO: 3560474 NR Description: S-adenosyl-methionine-sterol-C- methyltransferase
  misc_feature (1)..(102): Homolog of NCBI NO: 7443719 NR Description: sterol 24-C-methyltransferase (EC 2.1.1.41) -
  misc_feature (1)..(102): Homolog of NCBI NO: 3603295 NR Description: S-adenosyl-methionine
  misc_feature (2)..(102): Homolog of NCBI NO: 7443720 NR Description: probable sterol 24-C-methyltransferase (EC
  misc_feature (7)..(102): Homolog of NCBI NO: 15240691 NR Description: 24-sterol C-methyltransferase [Arabidopsis
  misc_feature (7)..(102): Homolog of NCBI NO: 21434843 NR Description: cephalopod [Arabidopsis thaliana]
MTKSGALQLARSTGGSLSKDQVKSAVDQYVKYHDLHGGEQESRKSNYADLANKYYDLVTGFYEYGWGDSFHFAGGYPGETSREAIKRHQHFMALQLGLKKGMK

SEQ ID NO: 15274 - DNA, 824 bp, Zea mays subsp. mays
  misc_feature (1)..(824): Ceres Seq. ID no. 13636883
  misc_feature: MA Experiment ID: 108529 Result: Down-regulated in Transcription
  misc_feature: MA Experiment 108529 PARAMETER Experiment Name: Zm_Imbibed_Seeds_P Parameter: Age (day) Value: 5 vs. 2
  misc_feature: MA Experiment 108529 PARAMETER Experiment Name: Zm_Imbibed_Seeds_P Parameter: Organism Value: Zea mays
  misc_feature: MA Experiment 108529 PARAMETER Experiment Name: Zm_Imbibed_Seeds_P Parameter: Plant Line Value: 35A19
  misc_feature: MA Experiment 108529 PARAMETER Experiment Name: Zm_Imbibed_Seeds_P Parameter: Tissue Value: Roots vs. Embryo
  misc_feature: MA Experiment ID: 108546 Result: Down-regulated in Transcription
  misc_feature: MA Experiment 108546 PARAMETER Experiment Name: Zm_Imbibed_Seeds_P Parameter: Age (day) Value: 3 vs. 2
  misc_feature: MA Experiment 108546 PARAMETER Experiment Name: Zm_Imbibed_Seeds_P Parameter: Organism Value: Zea mays
  misc_feature: MA Experiment 108546 PARAMETER Experiment Name: Zm_Imbibed_Seeds_P Parameter: Plant Line Value: 35A19
  misc_feature: MA Experiment 108546 PARAMETER Experiment Name: Zm_Imbibed_Seeds_P Parameter: Tissue Value: Roots vs. Embryo
  misc_feature: MA Experiment ID: 20000535 Result: Up-regulated in Transcription
  misc_feature: MA Experiment 20000535 PARAMETER Experiment Name: Zm_Hybrid_Seed_Dev_P Parameter: DAP Value: 30 vs. 12
  misc_feature: MA Experiment 20000535 PARAMETER Experiment Name: Zm_Hybrid_Seed_Dev_P Parameter: Organism Value: Zea mays
  misc_feature: MA Experiment 20000535 PARAMETER Experiment Name: Zm_Hybrid_Seed_Dev_P Parameter: Plant Line Value: 35A19
  misc_feature: MA Experiment 20000535 PARAMETER Experiment Name: Zm_Hybrid_Seed_Dev_P Parameter: Tissue Value: Embryo vs. Unfert Floret
accctagcctctatctcattccactccgacattcacgtgcagctgtcgggagcaggcaatggcgccggatctaagcgaactcgccgccgccgctccagcccgtggcgcctacctcgccggcgtcggtgtcgcggtcctcctcgctgcctccttcctcccagtagccgagtcgtcctgcgtgcgagataactcattggtgagagacataagccaaatgccgcaaagcagctatgggattgaaggattgtcacatataacagttgctggtgcgctcaatcatgggatgaaggaggtggaagtgtggcttcagacaataagtccaggtcaaaggacgccaatccacaggcattcctgtgaagaagttttcactgtcctcaaagggaagggtacgctcttgatgggatcaagctcactaaagtacccagggcagccacaggaaattcctttctttcagaataccacattttcaatccctgtaaatgatccacaccaggtttggaattctgacgagcacgaagatttgcaagttcttgtgatcatatcgagaccgcctgctaagatatttttatatgatgattggagcatgcctcatacagccgcggtactgaaattccccttcgtctgggatgaggactgcttcgaagcagcaaaagacgaactctaggtcacaagtgtttcctgcaatttatctgcttcatccatgatcctgctggtgctggactactacaattctcagcactagttgtaataaagccagtgcgcttttcatgtataattctgtattgtggctcgcgaaaataaaatttggcaacggtttatgaact

SEQ ID NO: 15275 - protein, 201 aa, Zea mays subsp. mays
  peptide (1)..(201): Ceres Seq. ID no. 13636884
  misc_feature (36)..(201): Pfam Name: Auxin binding protein Pfam Description: Auxin binding protein
  misc_feature (1)..(201): Homolog of NCBI NO: 168422 NR Description: auxin-binding protein precursor
  misc_feature (1)..(201): Homolog of NCBI NO: 113003 NR Description: Auxin-binding protein 1 precursor (ABP) (ERABP1)
  misc_feature (1)..(201): Homolog of NCBI NO: 168397 NR Description: auxin-binding protein >gi|264278|gb|AAB25115.1|
  misc_feature (39)..(201): Homolog of NCBI NO: 21730833 NR Description: Chain A, Crystal Structure Of Auxin Binding >gi|21730834|pdb|1LR5|B Chain B, Crystal Structure Of Auxin Protein >gi|21730835|pdb|1LR5|C Chain C, Crystal Structure Of
  misc_feature (11)..(201): Homolog of NCBI NO: 461451 NR Description: AUXIN-BINDING PROTEIN 4 PRECURSOR (ABP)
  misc_feature (6)..(201): Homolog of NCBI NO: 7442016 NR Description: auxin-binding protein - oat
  misc_feature (24)..(201): Homolog of NCBI NO: 461449 NR Description: AUXIN-BINDING PROTEIN T85 PRECURSOR (ABP)
  misc_feature (26)..(201): Homolog of NCBI NO: 1050443 NR Description: auxin binding protein 1 [Capsicum annuum]
  misc_feature (23)..(201): Homolog of NCBI NO: 3819676 NR Description: ER auxin binding protein 1 [Lycopersicon
  misc_feature (24)..(201): Homolog of NCBI NO: 461450 NR Description: AUXIN-BINDING PROTEIN T92 PRECURSOR (ABP)
MAPDLSELAAAAPARGAYLAGVGVAVLLAASFLPVAESSCVRDNSLVRDISQMPQSSYGIEGLSHITVAGALNHGMKEVEVWLQTISPGQRTPIHRHSCEEVFTVLKGKGTLLMGSSSLKYPGQPQEIPFFQNTTFSIPVNDPHQVWNSDEHEDLQVLVIISRPPAKIFLYDDWSMPHTAAVLKFPFVWDEDCFEAAKDEL

SEQ ID NO: 15276 - protein, 149 aa, Zea mays subsp. mays
  peptide (1)..(149): Ceres Seq. ID no. 13636885
  misc_feature (1)..(149): Pfam Name: Auxin binding protein Pfam Description: Auxin binding protein
  misc_feature (1)..(149): Homolog of NCBI NO: 168422 NR Description: auxin-binding protein precursor
  misc_feature (1)..(149): Homolog of NCBI NO: 113003 NR Description: Auxin-binding protein 1 precursor (ABP) (ERABP1)
  misc_feature (1)..(149): Homolog of NCBI NO: 168397 NR Description: auxin-binding protein >gi|264278|gb|AAB25115.1|
  misc_feature (1)..(149): Homolog of NCBI NO: 21730833 NR Description: Chain A, Crystal Structure Of Auxin Binding >gi|21730834|pdb|1LR5|B Chain B, Crystal Structure Of Auxin Protein >gi|21730835|pdb|1LR5|C Chain C, Crystal Structure Of
  misc_feature (1)..(149): Homolog of NCBI NO: 461451 NR Description: AUXIN-BINDING PROTEIN 4 PRECURSOR (ABP)
  misc_feature (1)..(149): Homolog of NCBI NO: 7442016 NR Description: auxin-binding protein - oat
  misc_feature (1)..(149): Homolog of NCBI NO: 461449 NR Description: AUXIN-BINDING PROTEIN T85 PRECURSOR (ABP)
  misc_feature (1)..(149): Homolog of NCBI NO: 1050443 NR Description: auxin binding protein 1 [Capsicum annuum]
  misc_feature (1)..(149): Homolog of NCBI NO: 3819676 NR Description: ER auxin binding protein 1 [Lycopersicon
  misc_feature (1)..(149): Homolog of NCBI NO: 461450 NR Description: AUXIN-BINDING PROTEIN T92 PRECURSOR (ABP)
MPQSSYGIEGLSHITVAGALNHGMKEVEVWLQTISPGQRTPIHRHSCEEVFTVLKGKGTLLMGSSSLKYPGQPQEIPFFQNTTFSIPVNDPHQVWNSDEHEDLQVLVIISRPPAKIFLYDDWSMPHTAAVLKFPFVWDEDCFEAAKDEL

SEQ ID NO: 15277 - protein, 126 aa, Zea mays subsp. mays
  peptide (1)..(126): Ceres Seq. ID no. 13636886
  misc_feature (1)..(126): Pfam Name: Auxin binding protein Pfam Description: Auxin binding protein
  misc_feature (1)..(126): Homolog of NCBI NO: 168422 NR Description: auxin-binding protein precursor
  misc_feature (1)..(126): Homolog of NCBI NO: 113003 NR Description: Auxin-binding protein 1 precursor (ABP) (ERABP1)
  misc_feature (1)..(126): Homolog of NCBI NO: 168397 NR Description: auxin-binding protein >gi|264278|gb|AAB25115.1|
  misc_feature (1)..(126): Homolog of NCBI NO: 21730833 NR Description: Chain A, Crystal Structure Of Auxin Binding >gi|21730834|pdb|1LR5|B Chain B, Crystal Structure Of Auxin Protein >gi|21730835|pdb|1LR5|C Chain C, Crystal Structure Of
  misc_feature (1)..(126): Homolog of NCBI NO: 461451 NR Description: AUXIN-BINDING PROTEIN 4 PRECURSOR (ABP)
  misc_feature (1)..(126): Homolog of NCBI NO: 7442016 NR Description: auxin-binding protein - oat
  misc_feature (1)..(126): Homolog of NCBI NO: 461449 NR Description: AUXIN-BINDING PROTEIN T85 PRECURSOR (ABP)
  misc_feature (1)..(126): Homolog of NCBI NO: 1050443 NR Description: auxin binding protein 1 [Capsicum annuum]
  misc_feature (1)..(126): Homolog of NCBI NO: 3819676 NR Description: ER auxin binding protein 1 [Lycopersicon
  misc_feature (1)..(126): Homolog of NCBI NO: 461450 NR Description: AUXIN-BINDING PROTEIN T92 PRECURSOR (ABP)
MKEVEVWLQTISPGQRTPIHRHSCEEVFTVLKGKGTLLMGSSSLKYPGQPQEIPFFQNTTFSIPVNDPHQVWNSDEHEDLQVLVIISRPPAKIFLYDDWSMPHTAAVLKFPFVWDEDCFEAAKDEL

SEQ ID NO: 15278 - DNA, 542 bp, Zea mays subsp. mays
  misc_feature (1)..(542): Ceres Seq. ID no. 13629835
  misc_feature: MA Experiment ID: 108522 Result: Up-regulated in Transcription
  misc_feature: MA Experiment 108522 PARAMETER Experiment Name: Zm_42deg_Heat_P Parameter: Age (day) Value: 8
  misc_feature: MA Experiment 108522 PARAMETER Experiment Name: Zm_42deg_Heat_P Parameter: Organism Value: Zea mays
  misc_feature: MA Experiment 108522 PARAMETER Experiment Name: Zm_42deg_Heat_P Parameter: Plant Line Value: 35A19
  misc_feature: MA Experiment 108522 PARAMETER Experiment Name: Zm_42deg_Heat_P Parameter: Temperature (deg C) Value: 42 vs. 22
  misc_feature: MA Experiment 108522 PARAMETER Experiment Name: Zm_42deg_Heat_P Parameter: Timepoint (hr) Value: 1
  misc_feature: MA Experiment 108522 PARAMETER Experiment Name: Zm_42deg_Heat_P Parameter: Tissue Value: Aerial
gaagccagagaaaaggttactccgcagaaagcaaaaccctagcccactccggcgcgccaccggccgatggtttcgatgagcaccacgccgaagccgcttgactccgccgtcgtcagcgcagccgttgacggcggggatgagggtggtggtggaggcggtggcgggaagaagcaggcgcacggggcggtgatggcgccgccaccgatggtggtcccggccgcggcgcccgcggccgaggaggaggttcggaaggtcaggaagccgtacaccatcaccaagtcgcgggagagctggacggagccggagcacgacaagttcctcgaggccctgcagctttttgatcgtgattggaagaaaattgaagcatatgttggctcaaagactgttatacagataaggagnnatgcacagaatacctttcctgaaggttcagaagaaatggtacgggcgagcatctgcccccacccaggccaaaacgaaaggcagctcatccatatccacagaaaggcatctaaaaatgtttctcaagctattttatcaca

SEQ ID NO: 15279 - protein, 158 aa, Zea mays subsp. mays
  peptide (1)..(158): Ceres Seq. ID no. 13629836
  misc_feature (73)..(118): Pfam Name: Myb-like DNA-binding domain Pfam Description: Myb-like DNA-binding domain
  misc_feature (43)..(156): Homolog of NCBI NO: 6682239 NR Description: putative MYB-related protein [Arabidopsis
  misc_feature (43)..(156): Homolog of NCBI NO: 30680926 NR Description: myb family transcription factor [Arabidopsis >gi|20268705|gb|AAM14056.1| unknown protein [Arabidopsis >gi|21689883|gb|AAM67502.1| unknown protein [Arabidopsis
  misc_feature (49)..(152): Homolog of NCBI NO: 8953721 NR Description: contains similarity to MYB-related DNA-binding
  misc_feature (49)..(152): Homolog of NCBI NO: 30696225 NR Description: myb family transcription factor [Arabidopsis >gi|25082907|gb|AAN72013.1| putative protein [Arabidopsis
  misc_feature (49)..(152): Homolog of NCBI NO: 30696221 NR Description: myb family transcription factor [Arabidopsis
  misc_feature (51)..(156): Homolog of NCBI NO: 11357907 NR Description: hypothetical protein F9G14.150 - Arabidopsis >gi|7413559|emb|CAB86038.1| putative protein [Arabidopsis
  misc_feature (51)..(156): Homolog of NCBI NO: 14596213 NR Description: putative protein [Arabidopsis thaliana]
  misc_feature (51)..(156): Homolog of NCBI NO: 18414039 NR Description: myb family transcription factor [Arabidopsis >gi|30679792|ref|NP_850756.1| myb family transcription factor
  misc_feature (62)..(124): Homolog of NCBI NO: 10177075 NR Description: gene_id:MKP11.15~unknown protein [Arabidopsis
  misc_feature (55)..(132): Homolog of NCBI NO: 37805865 NR Description: putative LHY protein [Oryza sativa (japonica
  misc_feature (112)..(112): Xaa is any aa, unknown or other
  misc_feature (113)..(113): Xaa is any aa, unknown or other
MVSMSTTPKPLDSAVVSAAVDGGDEGGGGGGGGKKQAHGAVMAPPPMVVPAAAPAAEEEVRKVRKPYTITKSRESWTEPEHDKFLEALQLFDRDWKKIEAYVGSKTVIQIRXXAQNTFPEGSEEMVRASICPHPGQNERQLIHIHRKASKNVSQAILS

SEQ ID NO: 15280 - protein, 155 aa, Zea mays subsp. mays
  peptide (1)..(155): Ceres Seq. ID no. 13629837
  misc_feature (70)..(115): Pfam Name: Myb-like DNA-binding domain Pfam Description: Myb-like DNA-binding domain
  misc_feature (40)..(153): Homolog of NCBI NO: 6682239 NR Description: putative MYB-related protein [Arabidopsis
  misc_feature (40)..(153): Homolog of NCBI NO: 30680926 NR Description: myb family transcription factor [Arabidopsis >gi|20268705|gb|AAM14056.1| unknown protein [Arabidopsis >gi|21689883|gb|AAM67502.1| unknown protein [Arabidopsis
  misc_feature (46)..(149): Homolog of NCBI NO: 8953721 NR Description: contains similarity to MYB-related DNA-binding
  misc_feature (46)..(149): Homolog of NCBI NO: 30696221 NR Description: myb family transcription factor [Arabidopsis
  misc_feature (46)..(149): Homolog of NCBI NO: 30696225 NR Description: myb family transcription factor [Arabidopsis >gi|25082907|gb|AAN72013.1| putative protein [Arabidopsis
  misc_feature (48)..(153): Homolog of NCBI NO: 11357907 NR Description: hypothetical protein F9G14.150 - Arabidopsis >gi|7413559|emb|CAB86038.1| putative protein [Arabidopsis
  misc_feature (48)..(153): Homolog of NCBI NO: 18414039 NR Description: myb family transcription factor [Arabidopsis >gi|30679792|ref|NP_850756.1| myb family transcription factor
  misc_feature (48)..(153): Homolog of NCBI NO: 14596213 NR Description: putative protein [Arabidopsis thaliana]
  misc_feature (59)..(121): Homolog of NCBI NO: 10177075 NR Description: gene_id:MKP11.15~unknown protein [Arabidopsis
  misc_feature (52)..(129): Homolog of NCBI NO: 37805865 NR Description: putative LHY protein [Oryza sativa (japonica
  misc_feature (109)..(109): Xaa is any aa, unknown or other
  misc_feature (110)..(110): Xaa is any aa, unknown or other
MSTTPKPLDSAVVSAAVDGGDEGGGGGGGGKKQAHGAVMAPPPMVVPAAAPAAEEEVRKVRKPYTITKSRESWTEPEHDKFLEALQLFDRDWKKIEAYVGSKTVIQIRXXAQNTFPEGSEEMVRASICPHPGQNERQLIHIHRKASKNVSQAILS

SEQ ID NO: 15281 - protein, 117 aa, Zea mays subsp. mays
  peptide (1)..(117): Ceres Seq. ID no. 13629838
  misc_feature (32)..(77): Pfam Name: Myb-like DNA-binding domain Pfam Description: Myb-like DNA-binding domain
  misc_feature (2)..(115): Homolog of NCBI NO: 6682239 NR Description: putative MYB-related protein [Arabidopsis
  misc_feature (2)..(115): Homolog of NCBI NO: 30680926 NR Description: myb family transcription factor [Arabidopsis >gi|20268705|gb|AAM14056.1| unknown protein [Arabidopsis >gi|21689883|gb|AAM67502.1| unknown protein [Arabidopsis
  misc_feature (8)..(111): Homolog of NCBI NO: 8953721 NR Description: contains similarity to MYB-related DNA-binding
  misc_feature (8)..(111): Homolog of NCBI NO: 30696221 NR Description: myb family transcription factor [Arabidopsis
  misc_feature (8)..(111): Homolog of NCBI NO: 30696225 NR Description: myb family transcription factor [Arabidopsis >gi|25082907|gb|AAN72013.1| putative protein [Arabidopsis
  misc_feature (10)..(115): Homolog of NCBI NO: 11357907 NR Description: hypothetical protein F9G14.150 - Arabidopsis >gi|7413559|emb|CAB86038.1| putative protein [Arabidopsis
  misc_feature (10)..(115): Homolog of NCBI NO: 14596213 NR Description: putative protein [Arabidopsis thaliana]
  misc_feature (10)..(115): Homolog of NCBI NO: 18414039 NR Description: myb family transcription factor [Arabidopsis >gi|30679792|ref|NP_850756.1| myb family transcription factor
  misc_feature (21)..(83): Homolog of NCBI NO: 10177075 NR Description: gene_id:MKP11.15~unknown protein [Arabidopsis
  misc_feature (14)..(91): Homolog of NCBI NO: 37805865 NR Description: putative LHY protein [Oryza sativa (japonica
  misc_feature (71)..(71): Xaa is any aa, unknown or other
  misc_feature (72)..(72): Xaa is any aa, unknown or other
MAPPPMVVPAAAPAAEEEVRKVRKPYTITKSRESWTEPEHDKFLEALQLFDRDWKKIEAYVGSKTVIQIRXXAQNTFPEGSEEMVRASICPHPGQNERQLIHIHRKASKNVSQAILS

SEQ ID NO: 15282 - DNA, 546 bp, Zea mays subsp. mays
  misc_feature (1)..(546): Ceres Seq. ID no. 13633729
  misc_feature: MA Experiment ID: 108687 Result: Up-regulated in Transcription
  misc_feature: MA Experiment 108687 PARAMETER Experiment Name: Zm_Embryos-Flowers__P Parameter: Tissue Value: Embryo vs. Aerial+
  misc_feature: MA Experiment ID: 20000535 Result: Up-regulated in Transcription
  misc_feature: MA Experiment 20000535 PARAMETER Experiment Name: Zm_Hybrid_Seed_Dev_P Parameter: DAP Value: 30 vs. 12
  misc_feature: MA Experiment 20000535 PARAMETER Experiment Name: Zm_Hybrid_Seed_Dev_P Parameter: Organism Value: Zea mays
  misc_feature: MA Experiment 20000535 PARAMETER Experiment Name: Zm_Hybrid_Seed_Dev_P Parameter: Plant Line Value: 35A19
  misc_feature: MA Experiment 20000535 PARAMETER Experiment Name: Zm_Hybrid_Seed_Dev_P Parameter: Tissue Value: Embryo vs. Unfert Floret
acgccttcaagctctgctagactgagaaaatcaacgagttctttctccggcgataccttttccaatcgatcagatggcgaaggatccagttcgtgttctcgtcaccggagctgcaggacaaatcggatacgctctagtccctatgattgcgagaggaatcatgcttggtgcagaccagcctgtgatcctccacatgctcgatatccctcctgctgctgaagctttgaacggtgtcaaaatggagttgatcgacgctgctttccctcttctcaaaggtgtggtggctaccactgacgctgttgaagggtgtactggcgtcaacgttgcagttatggttggtggtttcccgaggaaagaaggaatggagaggaaggatgtcatgtccaagaacgtttccatttacaagtctcaagccgctgccttggagaagcacgccgcaccaaactgcaaggttttggttgttgcaaaccctgcaaacaccaacgcgttgatccttaaggagtttgcaccgtcgattcctgagaannacatcacttgcttgacgag

SEQ ID NO: 15283 - protein, 157 aa, Zea mays subsp. mays
  peptide (1)..(157): Ceres Seq. ID no. 13633730
  misc_feature (3)..(155): Pfam Name: lactate/malate dehydrogenase, NAD binding domain Pfam Description: lactate/malate dehydrogenase, NAD binding domain
  misc_feature (1)..(156): Homolog of NCBI NO: 15219721 NR Description: malate dehydrogenase, cytosolic, putative thaliana] >gi|11133509|sp|P93819|MDHC_ARATH Malate dehydrogenase,
  misc_feature (1)..(156): Homolog of NCBI NO: 10798652 NR Description: malate dehydrogenase [Nicotiana tabacum]
  misc_feature (1)..(156): Homolog of NCBI NO: 15239843 NR Description: malate dehydrogenase, cytosolic, putative thaliana] >gi|11133446|sp|P57106|MDHD_ARATH Malate dehydrogenase,
  misc_feature (1)..(156): Homolog of NCBI NO: 21593565 NR Description: cytosolic malate dehydrogenase [Arabidopsis
  misc_feature (1)..(156): Homolog of NCBI NO: 18202485 NR Description: Malate dehydrogenase, cytoplasmic
  misc_feature (1)..(156): Homolog of NCBI NO: 15982948 NR Description: NAD-dependent malate dehydrogenase [Prunus
  misc_feature (1)..(156): Homolog of NCBI NO: 39939491 NR Description: malate dehydrogenase [Pinus pinaster]
  misc_feature (1)..(156): Homolog of NCBI NO: 37535388 NR Description: cytoplasmic malate dehydrogenase [Oryza sativa
  misc_feature (1)..(156): Homolog of NCBI NO: 10334493 NR Description: cytosolic malate dehydrogenase [Cicer arietinum]
  misc_feature (1)..(156): Homolog of NCBI NO: 27462764 NR Description: malate dehydrogenase [Lupinus albus]
  misc_feature (151)..(151): Xaa is any aa, unknown or other
  misc_feature (152)..(152): Xaa is any aa, unknown or other
MAKDPVRVLVTGAAGQIGYALVPMIARGIMLGADQPVILHMLDIPPAAEALNGVKMELIDAAFPLLKGVVATTDAVEGCTGVNVAVMVGGFPRKEGMERKDVMSKNVSIYKSQAAALEKHAAPNCKVLVVANPANTNALILKEFAPSIPEXXITCLT

SEQ ID NO: 15284 - protein, 134 aa, Zea mays subsp. mays
  peptide (1)..(134): Ceres Seq. ID no. 13633731
  misc_feature (1)..(132): Pfam Name: lactate/malate dehydrogenase, NAD binding domain Pfam Description: lactate/malate dehydrogenase, NAD binding domain
  misc_feature (1)..(133): Homolog of NCBI NO: 15219721 NR Description: malate dehydrogenase, cytosolic, putative thaliana] >gi|11133509|sp|P93819|MDHC_ARATH Malate dehydrogenase,
  misc_feature (1)..(133): Homolog of NCBI NO: 10798652 NR Description: malate dehydrogenase [Nicotiana tabacum]
  misc_feature (1)..(133): Homolog of NCBI NO: 15239843 NR Description: malate dehydrogenase, cytosolic, putative thaliana] >gi|11133446|sp|P57106|MDHD_ARATH Malate dehydrogenase,
  misc_feature (1)..(133): Homolog of NCBI NO: 21593565 NR Description: cytosolic malate dehydrogenase [Arabidopsis
  misc_feature (1)..(133): Homolog of NCBI NO: 18202485 NR Description: Malate dehydrogenase, cytoplasmic
  misc_feature (1)..(133): Homolog of NCBI NO: 15982948 NR Description: NAD-dependent malate dehydrogenase [Prunus
  misc_feature (1)..(133): Homolog of NCBI NO: 39939491 NR Description: malate dehydrogenase [Pinus pinaster]
  misc_feature (1)..(133): Homolog of NCBI NO: 37535388 NR Description: cytoplasmic malate dehydrogenase [Oryza sativa
  misc_feature (1)..(133): Homolog of NCBI NO: 10334493 NR Description: cytosolic malate dehydrogenase [Cicer arietinum]
  misc_feature (1)..(133): Homolog of NCBI NO: 27462764 NR Description: malate dehydrogenase [Lupinus albus]
  misc_feature (128)..(128): Xaa is any aa, unknown or other
  misc_feature (129)..(129): Xaa is any aa, unknown or other
MIARGIMLGADQPVILHMLDIPPAAEALNGVKMELIDAAFPLLKGVVATTDAVEGCTGVNVAVMVGGFPRKEGMERKDVMSKNVSIYKSQAAALEKHAAPNCKVLVVANPANTNALILKEFAPSIPEXXITCLT

SEQ ID NO: 15285 - protein, 128 aa, Zea mays subsp. mays
  peptide (1)..(128): Ceres Seq. ID no. 13633732
  misc_feature (1)..(126): Pfam Name: lactate/malate dehydrogenase, NAD binding domain Pfam Description: lactate/malate dehydrogenase, NAD binding domain
  misc_feature (1)..(127): Homolog of NCBI NO: 15219721 NR Description: malate dehydrogenase, cytosolic, putative thaliana] >gi|11133509|sp|P93819|MDHC_ARATH Malate dehydrogenase,
  misc_feature (1)..(127): Homolog of NCBI NO: 10798652 NR Description: malate dehydrogenase [Nicotiana tabacum]
  misc_feature (1)..(127): Homolog of NCBI NO: 15239843 NR Description: malate dehydrogenase, cytosolic, putative thaliana] >gi|11133446|sp|P57106|MDHD_ARATH Malate dehydrogenase,
  misc_feature (1)..(127): Homolog of NCBI NO: 21593565 NR Description: cytosolic malate dehydrogenase [Arabidopsis
  misc_feature (1)..(127): Homolog of NCBI NO: 18202485 NR Description: Malate dehydrogenase, cytoplasmic
  misc_feature (1)..(127): Homolog of NCBI NO: 15982948 NR Description: NAD-dependent malate dehydrogenase [Prunus
  misc_feature (1)..(127): Homolog of NCBI NO: 39939491 NR Description: malate dehydrogenase [Pinus pinaster]
  misc_feature (1)..(127): Homolog of NCBI NO: 37535388 NR Description: cytoplasmic malate dehydrogenase [Oryza sativa
  misc_feature (1)..(127): Homolog of NCBI NO: 10334493 NR Description: cytosolic malate dehydrogenase [Cicer arietinum]
  misc_feature (1)..(127): Homolog of NCBI NO: 27462764 NR Description: malate dehydrogenase [Lupinus albus]
  misc_feature (122)..(122): Xaa is any aa, unknown or other
  misc_feature (123)..(123): Xaa is any aa, unknown or other
MLGADQPVILHMLDIPPAAEALNGVKMELIDAAFPLLKGVVATTDAVEGCTGVNVAVMVGGFPRKEGMERKDVMSKNVSIYKSQAAALEKHAAPNCKVLVVANPANTNALILKEFAPSIPEXXITCLT

SEQ ID NO: 15286 - DNA, 1747 bp, Zea mays subsp. mays; identical to SEQ ID NO: 12952
  misc_feature (1)..(1747): Ceres Seq. ID no. 13637284
  misc_feature: MA Experiment ID: 108543 Result: Down-regulated in Transcription
  misc_feature: MA Experiment ID: 20000534 Result: Down-regulated in Transcription
  misc_feature: MA Experiment 20000534 PARAMETER Experiment Name: Zm_Hybrid_Pollen_P Parameter: Age (day) Value: 8
  misc_feature: MA Experiment 20000534 PARAMETER Experiment Name: Zm_Hybrid_Pollen_P Parameter: Organism Value: Zea mays
  misc_feature: MA Experiment 20000534 PARAMETER Experiment Name: Zm_Hybrid_Pollen_P Parameter: Plant Line Value: 35A19
  misc_feature: MA Experiment 20000534 PARAMETER Experiment Name: Zm_Hybrid_Pollen_P Parameter: Tissue Value: Pollen vs. Aerial

SEQ ID NO: 15287 - protein, 366 aa, Zea mays subsp. mays; identical to SEQ ID NO: 12953
  peptide (1)..(366): Ceres Seq. ID no. 13637285
  misc_feature (139)..(362): Homolog of NCBI NO: 15231083 NR Description: mitochondrial carrier protein family [Arabidopsis >gi|9293980|dbj|BAB01883.1| contains similarity to membrane [Arabidopsis thaliana] >gi|29029108|gb|AAO64933.1| At3g20240
  misc_feature (139)..(362): Homolog of NCBI NO: 21537282 NR Description: mitochondrial carrier protein, putative
  misc_feature (85)..(166): Homolog of NCBI NO: 15231083 NR Description: mitochondrial carrier protein family [Arabidopsis >gi|9293980|dbj|BAB01883.1| contains similarity to membrane [Arabidopsis thaliana] >gi|29029108|gb|AAO64933.1| At3g20240
  misc_feature (85)..(166): Homolog of NCBI NO: 21537282 NR Description: mitochondrial carrier protein, putative
  misc_feature (84)..(358): Homolog of NCBI NO: 20864410 NR Description: RIKEN cDNA 2900084M01 [Mus musculus]
  misc_feature (84)..(358): Homolog of NCBI NO: 34877651 NR Description: similar to CG4241-PA [Rattus norvegicus]
  misc_feature (84)..(358): Homolog of NCBI NO: 29742699 NR Description: similar to CG4241-PA [Homo sapiens]
  misc_feature (29)..(364): Homolog of NCBI NO: 4138581 NR Description: mitochondrial energy transfer protein [Solanum
  misc_feature (82)..(366): Homolog of NCBI NO: 231654 NR Description: Brittle-1 protein, chloroplast precursor
  misc_feature (54)..(365): Homolog of NCBI NO: 15236783 NR Description: mitochondrial carrier protein family [Arabidopsis
  misc_feature (29)..(364): Homolog of NCBI NO: 4138581 NR Description: mitochondrial energy transfer protein [Solanum
  misc_feature (82)..(366): Homolog of NCBI NO: 231654 NR Description: Brittle-1 protein, chloroplast precursor
  misc_feature (54)..(365): Homolog of NCBI NO: 15236783 NR Description: mitochondrial carrier protein family [Arabidopsis
  misc_feature (139)..(362): Homolog of NCBI NO: 15231083 NR Description: mitochondrial carrier protein family [Arabidopsis >gi|9293980|dbj|BAB01883.1| contains similarity to membrane [Arabidopsis thaliana] >gi|29029108|gb|AAO64933.1| At3g20240
  misc_feature (139)..(362): Homolog of NCBI NO: 21537282 NR Description: mitochondrial carrier protein, putative
  misc_feature (85)..(166): Homolog of NCBI NO: 15231083 NR Description: mitochondrial carrier protein family [Arabidopsis >gi|9293980|dbj|BAB01883.1| contains similarity to membrane [Arabidopsis thaliana] >gi|29029108|gb|AAO64933.1| At3g20240
  misc_feature (85)..(166): Homolog of NCBI NO: 21537282 NR Description: mitochondrial carrier protein, putative
  misc_feature (84)..(358): Homolog of NCBI NO: 20864410 NR Description: RIKEN cDNA 2900084M01 [Mus musculus]
  misc_feature (84)..(358): Homolog of NCBI NO: 34877651 NR Description: similar to CG4241-PA [Rattus norvegicus]
  misc_feature (84)..(358): Homolog of NCBI NO: 29742699 NR Description: similar to CG4241-PA [Homo sapiens]

SEQ ID NO: 15288 - protein, 330 aa, Zea mays subsp. mays; identical to SEQ ID NO: 12954
  peptide (1)..(330): Ceres Seq. ID no. 13637286
  misc_feature (1)..(328): Homolog of NCBI NO: 4138581 NR Description: mitochondrial energy transfer protein [Solanum
  misc_feature (46)..(330): Homolog of NCBI NO: 231654 NR Description: Brittle-1 protein, chloroplast precursor
  misc_feature (18)..(329): Homolog of NCBI NO: 15236783 NR Description: mitochondrial carrier protein family [Arabidopsis
  misc_feature (103)..(326): Homolog of NCBI NO: 15231083 NR Description: mitochondrial carrier protein family [Arabidopsis >gi|9293980|dbj|BAB01883.1| contains similarity to membrane [Arabidopsis thaliana] >gi|29029108|gb|AAO64933.1| At3g20240
  misc_feature (103)..(326): Homolog of NCBI NO: 21537282 NR Description: mitochondrial carrier protein, putative
  misc_feature (49)..(130): Homolog of NCBI NO: 15231083 NR Description: mitochondrial carrier protein family [Arabidopsis >gi|9293980|dbj|BAB01883.1| contains similarity to membrane [Arabidopsis thaliana] >gi|29029108|gb|AAO64933.1| At3g20240
  misc_feature (49)..(130): Homolog of NCBI NO: 21537282 NR Description: mitochondrial carrier protein, putative
  misc_feature (48)..(322): Homolog of NCBI NO: 20864410 NR Description: RIKEN cDNA 2900084M01 [Mus musculus]
  misc_feature (48)..(322): Homolog of NCBI NO: 34877651 NR Description: similar to CG4241-PA [Rattus norvegicus]
  misc_feature (48)..(322): Homolog of NCBI NO: 29742699 NR Description: similar to CG4241-PA [Homo sapiens]
  misc_feature (1)..(328): Homolog of NCBI NO: 4138581 NR Description: mitochondrial energy transfer protein [Solanum
  misc_feature (46)..(330): Homolog of NCBI NO: 231654 NR Description: Brittle-1 protein, chloroplast precursor
  misc_feature (18)..(329): Homolog of NCBI NO: 15236783 NR Description: mitochondrial carrier protein family [Arabidopsis
  misc_feature (103)..(326): Homolog of NCBI NO: 15231083 NR Description: mitochondrial carrier protein family [Arabidopsis >gi|9293980|dbj|BAB01883.1| contains similarity to membrane [Arabidopsis thaliana] >gi|29029108|gb|AAO64933.1| At3g20240
  misc_feature (103)..(326): Homolog of NCBI NO: 21537282 NR Description: mitochondrial carrier protein, putative
  misc_feature (49)..(130): Homolog of NCBI NO: 15231083 NR Description: mitochondrial carrier protein family [Arabidopsis >gi|9293980|dbj|BAB01883.1| contains similarity to membrane [Arabidopsis thaliana] >gi|29029108|gb|AAO64933.1| At3g20240
  misc_feature (49)..(130): Homolog of NCBI NO: 21537282 NR Description: mitochondrial carrier protein, putative
  misc_feature (48)..(322): Homolog of NCBI NO: 20864410 NR Description: RIKEN cDNA 2900084M01 [Mus musculus]
  misc_feature (48)..(322): Homolog of NCBI NO: 34877651 NR Description: similar to CG4241-PA [Rattus norvegicus]
  misc_feature (48)..(322): Homolog of NCBI NO: 29742699 NR Description: similar to CG4241-PA [Homo sapiens]

SEQ ID NO: 15289 - protein, 255 aa, Zea mays subsp. mays; identical to SEQ ID NO: 12955
  peptide (1)..(255): Ceres Seq. ID no. 13637287
  misc_feature (1)..(253): Homolog of NCBI NO: 4138581 NR Description: mitochondrial energy transfer protein [Solanum
  misc_feature (1)..(255): Homolog of NCBI NO: 231654 NR Description: Brittle-1 protein, chloroplast precursor
  misc_feature (1)..(254): Homolog of NCBI NO: 15236783 NR Description: mitochondrial carrier protein family [Arabidopsis
  misc_feature (28)..(251): Homolog of NCBI NO: 15231083 NR Description: mitochondrial carrier protein family [Arabidopsis >gi|9293980|dbj|BAB01883.1| contains similarity to membrane [Arabidopsis thaliana] >gi|29029108|gb|AAO64933.1| At3g20240
  misc_feature (28)..(251): Homolog of NCBI NO: 21537282 NR Description: mitochondrial carrier protein, putative
  misc_feature (1)..(55): Homolog of NCBI NO: 15231083 NR Description: mitochondrial carrier protein family [Arabidopsis >gi|9293980|dbj|BAB01883.1| contains similarity to membrane [Arabidopsis thaliana] >gi|29029108|gb|AAO64933.1| At3g20240
  misc_feature (1)..(55): Homolog of NCBI NO: 21537282 NR Description: mitochondrial carrier protein, putative
  misc_feature (1)..(247): Homolog of NCBI NO: 20864410 NR Description: RIKEN cDNA 2900084M01 [Mus musculus]
  misc_feature (1)..(247): Homolog of NCBI NO: 34877651 NR Description: similar to CG4241-PA [Rattus norvegicus]
  misc_feature (1)..(247): Homolog of NCBI NO: 29742699 NR Description: similar to CG4241-PA [Homo sapiens]
  misc_feature (1)..(253): Homolog of NCBI NO: 4138581 NR Description: mitochondrial energy transfer protein [Solanum
  misc_feature (1)..(255): Homolog of NCBI NO: 231654 NR Description: Brittle-1 protein, chloroplast precursor
  misc_feature (1)..(254): Homolog of NCBI NO: 15236783 NR Description: mitochondrial carrier protein family [Arabidopsis
  misc_feature (28)..(251): Homolog of NCBI NO: 15231083 NR Description: mitochondrial carrier protein family [Arabidopsis >gi|9293980|dbj|BAB01883.1| contains similarity to membrane [Arabidopsis thaliana] >gi|29029108|gb|AAO64933.1| At3g20240
  misc_feature (28)..(251): Homolog of NCBI NO: 21537282 NR Description: mitochondrial carrier protein, putative
  misc_feature (1)..(55): Homolog of NCBI NO: 15231083 NR Description: mitochondrial carrier protein family [Arabidopsis >gi|9293980|dbj|BAB01883.1| contains similarity to membrane [Arabidopsis thaliana] >gi|29029108|gb|AAO64933.1| At3g20240
  misc_feature (1)..(55): Homolog of NCBI NO: 21537282 NR Description: mitochondrial carrier protein, putative
  misc_feature (1)..(247): Homolog of NCBI NO: 20864410 NR Description: RIKEN cDNA 2900084M01 [Mus musculus]
  misc_feature (1)..(247): Homolog of NCBI NO: 34877651 NR Description: similar to CG4241-PA [Rattus norvegicus]
  misc_feature (1)..(247): Homolog of NCBI NO: 29742699 NR Description: similar to CG4241-PA [Homo sapiens]

SEQ ID NO: 15290 - DNA, 445 bp, Zea mays subsp. mays
  misc_feature (1)..(445): Ceres Seq. ID no. 13627430
  misc_feature: MA Experiment ID: 20000108 Result: Up-regulated in Transcription
  misc_feature: MA Experiment 20000108 PARAMETER Experiment Name: Zm_Root-Tips_P Parameter: Age (day) Value: 12
  misc_feature: MA Experiment 20000108 PARAMETER Experiment Name: Zm_Root-Tips_P Parameter: Organism Value: Zea mays
  misc_feature: MA Experiment 20000108 PARAMETER Experiment Name: Zm_Root-Tips_P Parameter: Tissue Value: Root tips vs. Root mid region    35
  misc_feature: MA Experiment 20000108 PARAMETER Experiment Name: Zm_Root-Tips_P Parameter: Tissue Value: Root tips vs. Root mid region   Sequence Listing-Misc Features (4)
  misc_feature: MA Experiment ID: 20000487 Result: Up-regulated in Transcription
  misc_feature: MA Experiment 20000487 PARAMETER Experiment Name: Zm_50mM_NH4NO3_L_to_H_P Parameter: Organism Value: Zea mays
  misc_feature: MA Experiment 20000487 PARAMETER Experiment Name: Zm_50mM_NH4NO3_L_to_H_P Parameter: Timepoint (hr) Value: 4
  misc_feature: MA Experiment 20000487 PARAMETER Experiment Name: Zm_50mM_NH4NO3_L_to_H_P Parameter: Tissue Value: Leaves
  misc_feature: MA Experiment 20000487 PARAMETER Experiment Name: Zm_50mM_NH4NO3_L_to_H_P Parameter: Treatment Value: 50mM NH4NO3 vs. 100mM Mannitol
  misc_feature: MA Experiment ID: 20000492 Result: Up-regulated in Transcription
  misc_feature: MA Experiment 20000492 PARAMETER Experiment Name: Zm_Hybrid_Seed_Dev_P Parameter: DAP Value: 12
  misc_feature: MA Experiment 20000492 PARAMETER Experiment Name: Zm_Hybrid_Seed_Dev_P Parameter: Organism Value: Zea mays
  misc_feature: MA Experiment 20000492 PARAMETER Experiment Name: Zm_Hybrid_Seed_Dev_P Parameter: Plant Line Value: 35A19
  misc_feature: MA Experiment 20000492 PARAMETER Experiment Name: Zm_Hybrid_Seed_Dev_P Parameter: Tissue Value: Fert Kernel vs. Unfert Floret
  misc_feature: MA Experiment ID: 20000534 Result: Down-regulated in Transcription
  misc_feature: MA Experiment 20000534 PARAMETER Experiment Name: Zm_Hybrid_Pollen_P Parameter: Age (day) Value: 8
  misc_feature: MA Experiment 20000534 PARAMETER Experiment Name: Zm_Hybrid_Pollen_P Parameter: Organism Value: Zea mays
  misc_feature: MA Experiment 20000534 PARAMETER Experiment Name: Zm_Hybrid_Pollen_P Parameter: Plant Line Value: 35A19
  misc_feature: MA Experiment 20000534 PARAMETER Experiment Name: Zm_Hybrid_Pollen_P Parameter: Tissue Value: Pollen vs. Aerial
  misc_feature: MA Experiment ID: 20001613 Result: Up-regulated in Transcription
  misc_feature: MA Experiment 20001613 PARAMETER Experiment Name: Zm_50ppm_KNO3_L-to-H_P Parameter: Age (day) Value: 20
  misc_feature: MA Experiment 20001613 PARAMETER Experiment Name: Zm_50ppm_KNO3_L-to-H_P Parameter: Organism Value: Zea mays
  misc_feature: MA Experiment 20001613 PARAMETER Experiment Name: Zm_50ppm_KNO3_L-to-H_P Parameter: Plant Line Value: 35A19
  misc_feature: MA Experiment 20001613 PARAMETER Experiment Name: Zm_50ppm_KNO3_L-to-H_P Parameter: Timepoint (hr) Value: 24
  misc_feature: MA Experiment 20001613 PARAMETER Experiment Name: Zm_50ppm_KNO3_L-to-H_P Parameter: Tissue Value: Roots
  misc_feature: MA Experiment 20001613 PARAMETER Experiment Name: Zm_50ppm_KNO3_L-to-H_P Parameter: Treatment Value: 50ppm KNO3 vs. 50ppm KCl
aacccagggtgagtctccggatccgtcgccgtctggtctccgtgtgctctcgtcgccgtcgccgtcgccgccgtctgactgaccccctcgcctcccgcggcgtcgggtctctggtgctgctgctactgctgctgcgtgcagggctgtgatggcgacgaagaggagcgtgggcaccctcggcgaggcggatctgaagggtaagaaggtgttcgtgcgcgccgacctctacgtccctctcgacgacgcccagaagatcaccgacgacacccgcatccgcgcctccgtccccaccatcaagttcctcctcgagaagggcgccaaggtcatcctcgccagccacctgggtcgtccaaaaggtgtcaccccaaagtacagcttgaagcctcttgttccacgcttgtctgagctccttgaagttgaagtcgtgatggccaatgattgcatt

SEQ ID NO: 15291 - protein, 99 aa, Zea mays subsp. mays
  peptide (1)..(99): Ceres Seq. ID no. 13627431
  misc_feature (3)..(98): Pfam Name: Phosphoglycerate kinase Pfam Description: Phosphoglycerate kinase
  misc_feature (1)..(98): Homolog of NCBI NO: 129916 NR Description: Phosphoglycerate kinase, cytosolic
  misc_feature (1)..(98): Homolog of NCBI NO: 15219412 NR Description: phosphoglycerate kinase -related [Arabidopsis
  misc_feature (1)..(98): Homolog of NCBI NO: 21536853 NR Description: phosphoglycerate kinase, putative [Arabidopsis
  misc_feature (1)..(98): Homolog of NCBI NO: 3738261 NR Description: chloroplast phosphoglycerate kinase [Populus
  misc_feature (1)..(98): Homolog of NCBI NO: 7434544 NR Description: phosphoglycerate kinase (EC 2.7.2.3) precursor,
  misc_feature (1)..(98): Homolog of NCBI NO: 29124969 NR Description: 3-phosphoglycerate kinase [Populus tremuloides]
  misc_feature (1)..(98): Homolog of NCBI NO: 3738257 NR Description: cytosolic phosphoglycerate kinase 1 [Populus
  misc_feature (1)..(98): Homolog of NCBI NO: 3738259 NR Description: cytosolic phosphoglycerate kinase 1 [Populus
  misc_feature (1)..(98): Homolog of NCBI NO: 6056366 NR Description: phosphoglycerate kinase [Arabidopsis thaliana]
  misc_feature (1)..(98): Homolog of NCBI NO: 12644295 NR Description: PHOSPHOGLYCERATE KINASE, CHLOROPLAST PRECURSOR
MATKRSVGTLGEADLKGKKVFVRADLYVPLDDAQKITDDTRIRASVPTIKFLLEKGAKVILASHLGRPKGVTPKYSLKPLVPRLSELLEVEVVMANDCI

SEQ ID NO: 15292 - DNA, 1764 bp, Zea mays subsp. mays; identical to SEQ ID NO: 1515
  misc_feature (1)..(1764): Ceres Seq. ID no. 13636367
  misc_feature: MA Experiment ID: 108535 Result: Up-regulated in Transcription
  misc_feature: MA Experiment 108535 PARAMETER Experiment Name: Zm_Meristem_P Parameter: Age (day) Value: 8
  misc_feature: MA Experiment 108535 PARAMETER Experiment Name: Zm_Meristem_P Parameter: Organism Value: Zea mays
  misc_feature: MA Experiment 108535 PARAMETER Experiment Name: Zm_Meristem_P Parameter: Plant Line Value: 35A19
  misc_feature: MA Experiment 108535 PARAMETER Experiment Name: Zm_Meristem_P Parameter: Tissue Value: Root Meristem vs. Above Root Meristem
  misc_feature: MA Experiment ID: 108544 Result: Down-regulated in Transcription
  misc_feature: MA Experiment ID: 108556 Result: Down-regulated in Transcription
  misc_feature: MA Experiment 108556 PARAMETER Experiment Name: Zm_Drought_P Parameter: Age (day) Value: 9
  misc_feature: MA Experiment 108556 PARAMETER Experiment Name: Zm_Drought_P Parameter: Organism Value: Zea mays
  misc_feature: MA Experiment 108556 PARAMETER Experiment Name: Zm_Drought_P Parameter: Plant Line Value: 35A19
  misc_feature: MA Experiment 108556 PARAMETER Experiment Name: Zm_Drought_P Parameter: Timepoint (hr) Value: 24
  misc_feature: MA Experiment 108556 PARAMETER Experiment Name: Zm_Drought_P Parameter: Tissue Value: Aerial
  misc_feature: MA Experiment 108556 PARAMETER Experiment Name: Zm_Drought_P Parameter: Treatment Value: Drought vs. No Drought
  misc_feature: MA Experiment ID: 108689 Result: Up-regulated in Transcription
  misc_feature: MA Experiment 108689 PARAMETER Experiment Name: Zm_Drought_Roots_P Parameter: Age (day) Value: 9
  misc_feature: MA Experiment 108689 PARAMETER Experiment Name: Zm_Drought_Roots_P Parameter: Organism Value: Zea mays
  misc_feature: MA Experiment 108689 PARAMETER Experiment Name: Zm_Drought_Roots_P Parameter: Plant Line Value: 35A19
  misc_feature: MA Experiment 108689 PARAMETER Experiment Name: Zm_Drought_Roots_P Parameter: Timepoint (hr) Value: 24
  misc_feature: MA Experiment 108689 PARAMETER Experiment Name: Zm_Drought_Roots_P Parameter: Tissue Value: Roots
  misc_feature: MA Experiment 108689 PARAMETER Experiment Name: Zm_Drought_Roots_P Parameter: Treatment Value: Drought vs. No Drought
  misc_feature: MA Experiment ID: 20000477 Result: Down-regulated in Transcription
  misc_feature: MA Experiment 20000477 PARAMETER Experiment Name: Zm_5mM_SA_P Parameter: Age (day) Value: 10
  misc_feature: MA Experiment 20000477 PARAMETER Experiment Name: Zm_5mM_SA_P Parameter: Organism Value: Zea mays
  misc_feature: MA Experiment 20000477 PARAMETER Experiment Name: Zm_5mM_SA_P Parameter: Plant Line Value: 35A19
  misc_feature: MA Experiment 20000477 PARAMETER Experiment Name: Zm_5mM_SA_P Parameter: Timepoint (hr) Value: 48
  misc_feature: MA Experiment 20000477 PARAMETER Experiment Name: Zm_5mM_SA_P Parameter: Tissue Value: Aerial
  misc_feature: MA Experiment 20000477 PARAMETER Experiment Name: Zm_5mM_SA_P Parameter: Treatment Value: 5mM SA vs. No Treatment
  misc_feature: MA Experiment ID: 20000478 Result: Down-regulated in Transcription
  misc_feature: MA Experiment 20000478 PARAMETER Experiment Name: Zm_5mM_SA_P Parameter: Age (day) Value: 11
  misc_feature: MA Experiment 20000478 PARAMETER Experiment Name: Zm_5mM_SA_P Parameter: Organism Value: Zea mays
  misc_feature: MA Experiment 20000478 PARAMETER Experiment Name: Zm_5mM_SA_P Parameter: Plant Line Value: 35A19
  misc_feature: MA Experiment 20000478 PARAMETER Experiment Name: Zm_5mM_SA_P Parameter: Timepoint (hr) Value: 72
  misc_feature: MA Experiment 20000478 PARAMETER Experiment Name: Zm_5mM_SA_P Parameter: Tissue Value: Aerial
  misc_feature: MA Experiment 20000478 PARAMETER Experiment Name: Zm_5mM_SA_P Parameter: Treatment Value: 5mM SA vs. No Treatment
  misc_feature: MA Experiment ID: 20000479 Result: Down-regulated in Transcription
  misc_feature: MA Experiment 20000479 PARAMETER Experiment Name: Zm_Drought_P Parameter: Age (day) Value: 10
  misc_feature: MA Experiment 20000479 PARAMETER Experiment Name: Zm_Drought_P Parameter: Organism Value: Zea mays
  misc_feature: MA Experiment 20000479 PARAMETER Experiment Name: Zm_Drought_P Parameter: Plant Line Value: 35A19
  misc_feature: MA Experiment 20000479 PARAMETER Experiment Name: Zm_Drought_P Parameter: Timepoint (hr) Value: 48
  misc_feature: MA Experiment 20000479 PARAMETER Experiment Name: Zm_Drought_P Parameter: Tissue Value: Aerial
  misc_feature: MA Experiment 20000479 PARAMETER Experiment Name: Zm_Drought_P Parameter: Treatment Value: Drought vs. No Drought
  misc_feature: MA Experiment ID: 20000480 Result: Down-regulated in Transcription
  misc_feature: MA Experiment 20000480 PARAMETER Experiment Name: Zm_Drought_P Parameter: Age (day) Value: 11
  misc_feature: MA Experiment 20000480 PARAMETER Experiment Name: Zm_Drought_P Parameter: Organism Value: Zea mays
  misc_feature: MA Experiment 20000480 PARAMETER Experiment Name: Zm_Drought_P Parameter: Plant Line Value: 35A19
  misc_feature: MA Experiment 20000480 PARAMETER Experiment Name: Zm_Drought_P Parameter: Timepoint (hr) Value: 72
  misc_feature: MA Experiment 20000480 PARAMETER Experiment Name: Zm_Drought_P Parameter: Tissue Value: Aerial
  misc_feature: MA Experiment 20000480 PARAMETER Experiment Name: Zm_Drought_P Parameter: Treatment Value: Drought vs. No Drought
  misc_feature: MA Experiment ID: 20000535 Result: Up-regulated in Transcription
  misc_feature: MA Experiment 20000535 PARAMETER Experiment Name: Zm_Hybrid_Seed_Dev_P Parameter: DAP Value: 30 vs. 12
  misc_feature: MA Experiment 20000535 PARAMETER Experiment Name: Zm_Hybrid_Seed_Dev_P Parameter: Organism Value: Zea mays
  misc_feature: MA Experiment 20000535 PARAMETER Experiment Name: Zm_Hybrid_Seed_Dev_P Parameter: Plant Line Value: 35A19
  misc_feature: MA Experiment 20000535 PARAMETER Experiment Name: Zm_Hybrid_Seed_Dev_P Parameter: Tissue Value: Embryo vs. Unfert Floret
  misc_feature: MA Experiment ID: 20001610 Result: Up-regulated in Transcription
  misc_feature: MA Experiment 20001610 PARAMETER Experiment Name: Zm_50ppm_KNO3_L-to-H_P Parameter: Age (day) Value: 19
  misc_feature: MA Experiment 20001610 PARAMETER Experiment Name: Zm_50ppm_KNO3_L-to-H_P Parameter: Organism Value: Zea mays
  misc_feature: MA Experiment 20001610 PARAMETER Experiment Name: Zm_50ppm_KNO3_L-to-H_P Parameter: Plant Line Value: 35A19
  misc_feature: MA Experiment 20001610 PARAMETER Experiment Name: Zm_50ppm_KNO3_L-to-H_P Parameter: Timepoint (hr) Value: 2
  misc_feature: MA Experiment 20001610 PARAMETER Experiment Name: Zm_50ppm_KNO3_L-to-H_P Parameter: Tissue Value: Roots
  misc_feature: MA Experiment 20001610 PARAMETER Experiment Name: Zm_50ppm_KNO3_L-to-H_P Parameter: Treatment Value: 50ppm KNO3 vs. 50ppm KCl

SEQ ID NO: 15293 - protein, 456 aa, Zea mays subsp. mays; identical to SEQ ID NO: 1516
  peptide (1)..(456): Ceres Seq. ID no. 13636368
  misc_feature (162)..(414): Pfam Name: Fatty acid desaturase Pfam Description: Fatty acid desaturase
  misc_feature (162)..(414): Pfam Name: Fatty acid desaturase Pfam Description: Fatty acid desaturase
  misc_feature (65)..(452): Homolog of NCBI NO: 28371827 NR Description: delta-12 oleate desaturase [Punica granatum]
  misc_feature (65)..(452): Homolog of NCBI NO: 28564441 NR Description: delta 12-acyl-lipid-desaturase [Punica granatum]
  misc_feature (65)..(456): Homolog of NCBI NO: 27261181 NR Description: delta 12 oleic acid desaturase FAD2 [Vernicia
  misc_feature (65)..(456): Homolog of NCBI NO: 34903462 NR Description: putative omega-6 fatty acid desaturase [Oryza
  misc_feature (65)..(456): Homolog of NCBI NO: 8886726 NR Description: omega-6 fatty acid desaturase [Sesamum indicum]
  misc_feature (65)..(452): Homolog of NCBI NO: 28564441 NR Description: delta 12-acyl-lipid-desaturase [Punica granatum]
  misc_feature (65)..(456): Homolog of NCBI NO: 34903462 NR Description: putative omega-6 fatty acid desaturase [Oryza
  misc_feature (248)..(455): Homolog of NCBI NO: 32421083 NR Description: hypothetical protein [Neurospora crassa]
  misc_feature (65)..(455): Homolog of NCBI NO: 17225582 NR Description: delta-12 fatty acid desaturase [Gossypium
  misc_feature (65)..(455): Homolog of NCBI NO: 7433295 NR Description: omega-6 desaturase, microsomal - upland cotton
  misc_feature (65)..(455): Homolog of NCBI NO: 4378875 NR Description: delta-12 desaturase [Brassica carinata]
  misc_feature (65)..(455): Homolog of NCBI NO: 1345977 NR Description: Omega-6 fatty acid desaturase, endoplasmic
  misc_feature (65)..(456): Homolog of NCBI NO: 8886726 NR Description: omega-6 fatty acid desaturase [Sesamum indicum]
  misc_feature (65)..(456): Homolog of NCBI NO: 27261181 NR Description: delta 12 oleic acid desaturase FAD2 [Vernicia
  misc_feature (65)..(452): Homolog of NCBI NO: 28371827 NR Description: delta-12 oleate desaturase [Punica granatum]
  misc_feature (65)..(455): Homolog of NCBI NO: 1345977 NR Description: Omega-6 fatty acid desaturase, endoplasmic
  misc_feature (65)..(455): Homolog of NCBI NO: 4378875 NR Description: delta-12 desaturase [Brassica carinata]
  misc_feature (65)..(455): Homolog of NCBI NO: 7433295 NR Description: omega-6 desaturase, microsomal - upland cotton
  misc_feature (65)..(455): Homolog of NCBI NO: 17225582 NR Description: delta-12 fatty acid desaturase [Gossypium
  misc_feature (248)..(455): Homolog of NCBI NO: 32421083 NR Description: hypothetical protein [Neurospora crassa]

SEQ ID NO: 15294 - protein, 392 aa, Zea mays subsp. mays; identical to SEQ ID NO: 1517
  peptide (1)..(392): Ceres Seq. ID no. 13636369
  misc_feature (98)..(350): Pfam Name: Fatty acid desaturase Pfam Description: Fatty acid desaturase
  misc_feature (98)..(350): Pfam Name: Fatty acid desaturase Pfam Description: Fatty acid desaturase
  misc_feature (1)..(388): Homolog of NCBI NO: 28371827 NR Description: delta-12 oleate desaturase [Punica granatum]
  misc_feature (1)..(388): Homolog of NCBI NO: 28564441 NR Description: delta 12-acyl-lipid-desaturase [Punica granatum]
  misc_feature (1)..(392): Homolog of NCBI NO: 27261181 NR Description: delta 12 oleic acid desaturase FAD2 [Vernicia
  misc_feature (1)..(392): Homolog of NCBI NO: 34903462 NR Description: putative omega-6 fatty acid desaturase [Oryza
  misc_feature (1)..(392): Homolog of NCBI NO: 8886726 NR Description: omega-6 fatty acid desaturase [Sesamum indicum]
  misc_feature (1)..(388): Homolog of NCBI NO: 28564441 NR Description: delta 12-acyl-lipid-desaturase [Punica granatum]
  misc_feature (1)..(392): Homolog of NCBI NO: 34903462 NR Description: putative omega-6 fatty acid desaturase [Oryza
  misc_feature (184)..(391): Homolog of NCBI NO: 32421083 NR Description: hypothetical protein [Neurospora crassa]
  misc_feature (1)..(391): Homolog of NCBI NO: 17225582 NR Description: delta-12 fatty acid desaturase [Gossypium
  misc_feature (1)..(391): Homolog of NCBI NO: 7433295 NR Description: omega-6 desaturase, microsomal - upland cotton
  misc_feature (1)..(391): Homolog of NCBI NO: 4378875 NR Description: delta-12 desaturase [Brassica carinata]
  misc_feature (1)..(391): Homolog of NCBI NO: 1345977 NR Description: Omega-6 fatty acid desaturase, endoplasmic
  misc_feature (1)..(392): Homolog of NCBI NO: 8886726 NR Description: omega-6 fatty acid desaturase [Sesamum indicum]
  misc_feature (1)..(392): Homolog of NCBI NO: 27261181 NR Description: delta 12 oleic acid desaturase FAD2 [Vernicia
  misc_feature (1)..(388): Homolog of NCBI NO: 28371827 NR Description: delta-12 oleate desaturase [Punica granatum]
  misc_feature (1)..(391): Homolog of NCBI NO: 1345977 NR Description: Omega-6 fatty acid desaturase, endoplasmic
  misc_feature (1)..(391): Homolog of NCBI NO: 4378875 NR Description: delta-12 desaturase [Brassica carinata]
  misc_feature (1)..(391): Homolog of NCBI NO: 7433295 NR Description: omega-6 desaturase, microsomal - upland cotton
  misc_feature (1)..(391): Homolog of NCBI NO: 17225582 NR Description: delta-12 fatty acid desaturase [Gossypium
  misc_feature (184)..(391): Homolog of NCBI NO: 32421083 NR Description: hypothetical protein [Neurospora crassa]

SEQ ID NO: 15295 - protein, 386 aa, Zea mays subsp. mays; identical to SEQ ID NO: 1518
  peptide (1)..(386): Ceres Seq. ID no. 13636370
  misc_feature (92)..(344): Pfam Name: Fatty acid desaturase Pfam Description: Fatty acid desaturase
  misc_feature (92)..(344): Pfam Name: Fatty acid desaturase Pfam Description: Fatty acid desaturase
  misc_feature (1)..(382): Homolog of NCBI NO: 28371827 NR Description: delta-12 oleate desaturase [Punica granatum]
  misc_feature (1)..(382): Homolog of NCBI NO: 28564441 NR Description: delta 12-acyl-lipid-desaturase [Punica granatum]
  misc_feature (1)..(386): Homolog of NCBI NO: 27261181 NR Description: delta 12 oleic acid desaturase FAD2 [Vernicia
  misc_feature (1)..(386): Homolog of NCBI NO: 34903462 NR Description: putative omega-6 fatty acid desaturase [Oryza
  misc_feature (1)..(386): Homolog of NCBI NO: 8886726 NR Description: omega-6 fatty acid desaturase [Sesamum indicum]
  misc_feature (1)..(382): Homolog of NCBI NO: 28564441 NR Description: delta 12-acyl-lipid-desaturase [Punica granatum]
  misc_feature (1)..(386): Homolog of NCBI NO: 34903462 NR Description: putative omega-6 fatty acid desaturase [Oryza
  misc_feature (178)..(385): Homolog of NCBI NO: 32421083 NR Description: hypothetical protein [Neurospora crassa]
  misc_feature (1)..(385): Homolog of NCBI NO: 17225582 NR Description: delta-12 fatty acid desaturase [Gossypium
  misc_feature (1)..(385): Homolog of NCBI NO: 7433295 NR Description: omega-6 desaturase, microsomal - upland cotton
  misc_feature (1)..(385): Homolog of NCBI NO: 4378875 NR Description: delta-12 desaturase [Brassica carinata]
  misc_feature (1)..(385): Homolog of NCBI NO: 1345977 NR Description: Omega-6 fatty acid desaturase, endoplasmic
  misc_feature (1)..(386): Homolog of NCBI NO: 8886726 NR Description: omega-6 fatty acid desaturase [Sesamum indicum]
  misc_feature (1)..(386): Homolog of NCBI NO: 27261181 NR Description: delta 12 oleic acid desaturase FAD2 [Vernicia
  misc_feature (1)..(382): Homolog of NCBI NO: 28371827 NR Description: delta-12 oleate desaturase [Punica granatum]
  misc_feature (1)..(385): Homolog of NCBI NO: 1345977 NR Description: Omega-6 fatty acid desaturase, endoplasmic
  misc_feature (1)..(385): Homolog of NCBI NO: 4378875 NR Description: delta-12 desaturase [Brassica carinata]
  misc_feature (1)..(385): Homolog of NCBI NO: 7433295 NR Description: omega-6 desaturase, microsomal - upland cotton
  misc_feature (1)..(385): Homolog of NCBI NO: 17225582 NR Description: delta-12 fatty acid desaturase [Gossypium
  misc_feature (178)..(385): Homolog of NCBI NO: 32421083 NR Description: hypothetical protein [Neurospora crassa]

SEQ ID NO: 15296 - DNA, 430 bp, Zea mays subsp. mays
  misc_feature (1)..(430): Ceres Seq. ID no. 13630640
  misc_feature: MA Experiment ID: 20000535 Result: Up-regulated in Transcription
  misc_feature: MA Experiment 20000535 PARAMETER Experiment Name: Zm_Hybrid_Seed_Dev_P Parameter: DAP Value: 30 vs. 12
  misc_feature: MA Experiment 20000535 PARAMETER Experiment Name: Zm_Hybrid_Seed_Dev_P Parameter: Organism Value: Zea mays
  misc_feature: MA Experiment 20000535 PARAMETER Experiment Name: Zm_Hybrid_Seed_Dev_P Parameter: Plant Line Value: 35A19
  misc_feature: MA Experiment 20000535 PARAMETER Experiment Name: Zm_Hybrid_Seed_Dev_P Parameter: Tissue Value: Embryo vs. Unfert Floret
agctttcttgtnnnngagctttgtgacaaaagaagaagctgtttgcctctttgcagtgaaagcactaccagcaagaagatgattatcaccgagannagccgnannnagatctcggnataccttttcaaagaaggagtattgctcgccaggaaggacttcactctcccaaagcatccgctgattgagccagcgtccaagcnnnnngcgatctgggtcatgccgagtttccaatccaaggagcacgtaagggagatcttcgcttggatgctactactattgnnntctgaccaacgaaggaactgagttcttgacaacttagcttacccttccctcggacgttgttcccgcgaccttgaagaagtctgctaaacccgttggtcgtccctttggtgggcctcctggtgatcgccctacaggtcctcgctttgag

SEQ ID NO: 15297 - protein, 100 aa, Zea mays subsp. mays
  peptide (1)..(100): Ceres Seq. ID no. 13630641
  misc_feature (29)..(89): Pfam Name: Plectin/S10 domain Pfam Description: Plectin/S10 domain
  misc_feature (27)..(89): Homolog of NCBI NO: 15237217 NR Description: 40S ribosomal protein S10 (RPS10C) [Arabidopsis >gi|17528966|gb|AAL38693.1| unknown protein [Arabidopsis >gi|21617950|gb|AAM67000.1| putative ribosomal protein S10
  misc_feature (27)..(89): Homolog of NCBI NO: 20139798 NR Description: 40S ribosomal protein S10-3 contains similarity to 40S ribosomal protein S10~gene_id:F6N7.14
  misc_feature (27)..(89): Homolog of NCBI NO: 15235985 NR Description: 40S ribosomal protein S10 (RPS10A) [Arabidopsis
  misc_feature (27)..(89): Homolog of NCBI NO: 15238099 NR Description: expressed protein [Arabidopsis thaliana]
  misc_feature (27)..(88): Homolog of NCBI NO: 34897532 NR Description: OSJNBa0042L16.3 [Oryza sativa (japonica
  misc_feature (27)..(88): Homolog of NCBI NO: 20140213 NR Description: 40S ribosomal protein S10
  misc_feature (27)..(88): Homolog of NCBI NO: 34905824 NR Description: putative ribosomal protein S10 [Oryza sativa
  misc_feature (27)..(88): Homolog of NCBI NO: 40642980 NR Description: ribosomal protein S10 [Crassostrea gigas]
  misc_feature (27)..(88): Homolog of NCBI NO: 20140136 NR Description: 40S ribosomal protein S10
  misc_feature (27)..(88): Homolog of NCBI NO: 24266976 NR Description: ribosomal protein S10 [Branchiostoma belcheri]
  misc_feature (4)..(4): Xaa is any aa, unknown or other
  misc_feature (5)..(5): Xaa is any aa, unknown or other
  misc_feature (32)..(32): Xaa is any aa, unknown or other
  misc_feature (34)..(34): Xaa is any aa, unknown or other
  misc_feature (35)..(35): Xaa is any aa, unknown or other
  misc_feature (36)..(36): Xaa is any aa, unknown or other
  misc_feature (39)..(39): Xaa is any aa, unknown or other
  misc_feature (67)..(67): Xaa is any aa, unknown or other
  misc_feature (68)..(68): Xaa is any aa, unknown or other
  misc_feature (94)..(94): Xaa is any aa, unknown or other
SFLXXELCDKRRSCLPLCSESTTSKKMIITEXSXXXISXYLFKEGVLLARKDFTLPKHPLIEPASKXXAIWVMPSFQSKEHVREIFAWMLLLLXSDQRRN

SEQ ID NO: 15298 - protein, 74 aa, Zea mays subsp. mays
  peptide (1)..(74): Ceres Seq. ID no. 13630642
  misc_feature (3)..(63): Pfam Name: Plectin/S10 domain Pfam Description: Plectin/S10 domain
  misc_feature (1)..(63): Homolog of NCBI NO: 15237217 NR Description: 40S ribosomal protein S10 (RPS10C) [Arabidopsis >gi|17528966|gb|AAL38693.1| unknown protein [Arabidopsis >gi|21617950|gb|AAM67000.1| putative ribosomal protein S10
  misc_feature (1)..(63): Homolog of NCBI NO: 20139798 NR Description: 40S ribosomal protein S10-3 contains similarity to 40S ribosomal protein S10~gene_id:F6N7.14
  misc_feature (1)..(63): Homolog of NCBI NO: 15235985 NR Description: 40S ribosomal protein S10 (RPS10A) [Arabidopsis
  misc_feature (1)..(63): Homolog of NCBI NO: 15238099 NR Description: expressed protein [Arabidopsis thaliana]
  misc_feature (1)..(62): Homolog of NCBI NO: 34897532 NR Description: OSJNBa0042L16.3 [Oryza sativa (japonica
  misc_feature (1)..(62): Homolog of NCBI NO: 20140213 NR Description: 40S ribosomal protein S10
  misc_feature (1)..(62): Homolog of NCBI NO: 34905824 NR Description: putative ribosomal protein S10 [Oryza sativa
  misc_feature (1)..(62): Homolog of NCBI NO: 40642980 NR Description: ribosomal protein S10 [Crassostrea gigas]
  misc_feature (1)..(62): Homolog of NCBI NO: 20140136 NR Description: 40S ribosomal protein S10
  misc_feature (1)..(62): Homolog of NCBI NO: 24266976 NR Description: ribosomal protein S10 [Branchiostoma belcheri]
  misc_feature (6)..(6): Xaa is any aa, unknown or other
  misc_feature (8)..(8): Xaa is any aa, unknown or other
  misc_feature (9)..(9): Xaa is any aa, unknown or other
  misc_feature (10)..(10): Xaa is any aa, unknown or other
  misc_feature (13)..(13): Xaa is any aa, unknown or other
  misc_feature (41)..(41): Xaa is any aa, unknown or other
  misc_feature (42)..(42): Xaa is any aa, unknown or other
  misc_feature (68)..(68): Xaa is any aa, unknown or other
MIITEXSXXXISXYLFKEGVLLARKDFTLPKHPLIEPASKXXAIWVMPSFQSKEHVREIFAWMLLLLXSDQRRN

SEQ ID NO: 15299 - DNA, 541 bp, Zea mays subsp. mays
  misc_feature (1)..(541): Ceres Seq. ID no. 13632682
  misc_feature: MA Experiment ID: 20000534 Result: Up-regulated in Transcription
  misc_feature: MA Experiment 20000534 PARAMETER Experiment Name: Zm_Hybrid_Pollen_P Parameter: Age (day) Value: 8
  misc_feature: MA Experiment 20000534 PARAMETER Experiment Name: Zm_Hybrid_Pollen_P Parameter: Organism Value: Zea mays
  misc_feature: MA Experiment 20000534 PARAMETER Experiment Name: Zm_Hybrid_Pollen_P Parameter: Plant Line Value: 35A19
  misc_feature: MA Experiment 20000534 PARAMETER Experiment Name: Zm_Hybrid_Pollen_P Parameter: Tissue Value: Pollen vs. Aerial
acgaaccaaagagtgcaaaatggcagcgacgtctctctccatcgcaaccacattccgctcctcgtcttacctcactcacgcttctccccatggcttcttcccttcccgacccaacacaacattccgcatctgttcaccttcctccacaccgacccaccgtgcaacccacctccgtcccgtctccgccgtcgaagctccggagaagatcgagaagattgggtccgagatctcttctctgactctcgaggaagcccgcgtcctcgtggactaccttcaggacaagttcggtgtgtcgccgctctcgttagctcccgctgcggcggctgtggctgctccgggagacggtggcggtgcggcggctgcggtggaggagcagacggagttcgacgtggtgattaacgaagtgccgagcagtgcgcgtatcgcggtgattaaagcggtgagggctttgactagcttggcgttgaaggaagcgaaggagcttatcgaagggttgccgaagaagtttaaggaaggtgtgacgaaggatgaagctgaagaa

SEQ ID NO: 15300 - protein, 180 aa, Zea mays subsp. mays
  peptide (1)..(180): Ceres Seq. ID no. 13632683
  misc_feature (127)..(179): Pfam Name: Ribosomal protein L7/L12 C-terminal domain Pfam Description: Ribosomal protein L7/L12 C-terminal domain
  misc_feature (7)..(179): Homolog of NCBI NO: 15232274 NR Description: 50S ribosomal protein L12-1, chloroplast (CL12-A) [Arabidopsis thaliana] >gi|548653|sp|P36210|R121_ARATH
  misc_feature (7)..(179): Homolog of NCBI NO: 15232276 NR Description: 50S ribosomal protein L12-3, chloroplast (CL12-C) [Arabidopsis thaliana] >gi|21431811|sp|P36212|R123_ARATH
  misc_feature (7)..(179): Homolog of NCBI NO: 541897 NR Description: ribosomal protein L12.C precursor, chloroplast - thaliana >gi|468773|emb|CAA48183.1| ribosomal protein L12
  misc_feature (7)..(179): Homolog of NCBI NO: 21592776 NR Description: 50S ribosomal protein L12-C [Arabidopsis thaliana]
  misc_feature (7)..(179): Homolog of NCBI NO: 541896 NR Description: ribosomal protein L12.B precursor, chloroplast - thaliana >gi|468772|emb|CAA48182.1| ribosomal protein L12
  misc_feature (7)..(179): Homolog of NCBI NO: 15232275 NR Description: 50S ribosomal protein L12-2, chloroplast (CL12-B) [Arabidopsis thaliana] >gi|21431810|sp|P36211|R122_ARATH
  misc_feature (7)..(179): Homolog of NCBI NO: 133085 NR Description: 50S RIBOSOMAL PROTEIN L12, CHLOROPLAST PRECURSOR
  misc_feature (7)..(179): Homolog of NCBI NO: 548746 NR Description: 50S RIBOSOMAL PROTEIN L12, CHLOROPLAST PRECURSOR
  misc_feature (7)..(179): Homolog of NCBI NO: 20020 NR Description: ribosomal protein L12-1a [Nicotiana tabacum]
  misc_feature (7)..(179): Homolog of NCBI NO: 133088 NR Description: 50S RIBOSOMAL PROTEIN L12, CHLOROPLAST PRECURSOR
RTKECKMAATSLSIATTFRSSSYLTHASPHGFFPSRPNTTFRICSPSSTPTHRATHLRPVSAVEAPEKIEKIGSEISSLTLEEARVLVDYLQDKFGVSPLSLAPAAAAVAAPGDGGGAAAAVEEQTEFDVVINEVPSSARIAVIKAVRALTSLALKEAKELIEGLPKKFKEGVTKDEAEE

SEQ ID NO: 15301 - protein, 174 aa, Zea mays subsp. mays
  peptide (1)..(174): Ceres Seq. ID no. 13632684
  misc_feature (121)..(173): Pfam Name: Ribosomal protein L7/L12 C-terminal domain Pfam Description: Ribosomal protein L7/L12 C-terminal domain
  misc_feature (1)..(173): Homolog of NCBI NO: 15232274 NR Description: 50S ribosomal protein L12-1, chloroplast (CL12-A) [Arabidopsis thaliana] >gi|548653|sp|P36210|R121_ARATH
  misc_feature (1)..(173): Homolog of NCBI NO: 15232276 NR Description: 50S ribosomal protein L12-3, chloroplast (CL12-C) [Arabidopsis thaliana] >gi|21431811|sp|P36212|R123_ARATH
  misc_feature (1)..(173): Homolog of NCBI NO: 541897 NR Description: ribosomal protein L12.C precursor, chloroplast - thaliana >gi|468773|emb|CAA48183.1| ribosomal protein L12
  misc_feature (1)..(173): Homolog of NCBI NO: 21592776 NR Description: 50S ribosomal protein L12-C [Arabidopsis thaliana]
  misc_feature (1)..(173): Homolog of NCBI NO: 541896 NR Description: ribosomal protein L12.B precursor, chloroplast - thaliana >gi|468772|emb|CAA48182.1| ribosomal protein L12
  misc_feature (1)..(173): Homolog of NCBI NO: 15232275 NR Description: 50S ribosomal protein L12-2, chloroplast (CL12-B) [Arabidopsis thaliana] >gi|21431810|sp|P36211|R122_ARATH
  misc_feature (1)..(173): Homolog of NCBI NO: 133085 NR Description: 50S RIBOSOMAL PROTEIN L12, CHLOROPLAST PRECURSOR
  misc_feature (1)..(173): Homolog of NCBI NO: 548746 NR Description: 50S RIBOSOMAL PROTEIN L12, CHLOROPLAST PRECURSOR
  misc_feature (1)..(173): Homolog of NCBI NO: 20020 NR Description: ribosomal protein L12-1a [Nicotiana tabacum]
  misc_feature (1)..(173): Homolog of NCBI NO: 133088 NR Description: 50S RIBOSOMAL PROTEIN L12, CHLOROPLAST PRECURSOR
MAATSLSIATTFRSSSYLTHASPHGFFPSRPNTTFRICSPSSTPTHRATHLRPVSAVEAPEKIEKIGSEISSLTLEEARVLVDYLQDKFGVSPLSLAPAAAAVAAPGDGGGAAAAVEEQTEFDVVINEVPSSARIAVIKAVRALTSLALKEAKELIEGLPKKFKEGVTKDEAEE

SEQ ID NO: 15302 - protein, 132 aa, Zea mays subsp. mays
  peptide (1)..(132): Ceres Seq. ID no. 13632685
TNQRVQNGSDVSLHRNHIPLLVLPHSRFSPWLLPFPTQHNIPHLFTFLHTDPPCNPPPSRLRRRSSGEDREDWVRDLFSDSRGSPRPRGLPSGQVRCVAALVSSRCGGCGCSGRRWRCGGCGGGADGVRRGD

SEQ ID NO: 15303 - DNA, 1172 bp, Zea mays subsp. mays
  misc_feature (1)..(1172): Ceres Seq. ID no. 14309088
  misc_feature: MA Experiment ID: 108530 Result: Down-regulated in Transcription
  misc_feature: MA Experiment 108530 PARAMETER Experiment Name: Zm_Imbibed_Seeds_P Parameter: Age (day) Value: 6 vs. 2
  misc_feature: MA Experiment 108530 PARAMETER Experiment Name: Zm_Imbibed_Seeds_P Parameter: Organism Value: Zea mays
  misc_feature: MA Experiment 108530 PARAMETER Experiment Name: Zm_Imbibed_Seeds_P Parameter: Plant Line Value: 35A19
  misc_feature: MA Experiment 108530 PARAMETER Experiment Name: Zm_Imbibed_Seeds_P Parameter: Tissue Value: Aerial vs. Embryo
  misc_feature: MA Experiment ID: 108535 Result: Up-regulated in Transcription
  misc_feature: MA Experiment 108535 PARAMETER Experiment Name: Zm_Meristem_P Parameter: Age (day) Value: 8
  misc_feature: MA Experiment 108535 PARAMETER Experiment Name: Zm_Meristem_P Parameter: Organism Value: Zea mays
  misc_feature: MA Experiment 108535 PARAMETER Experiment Name: Zm_Meristem_P Parameter: Plant Line Value: 35A19
  misc_feature: MA Experiment 108535 PARAMETER Experiment Name: Zm_Meristem_P Parameter: Tissue Value: Root Meristem vs. Above Root Meristem
  misc_feature: MA Experiment ID: 108544 Result: Down-regulated in Transcription
  misc_feature: MA Experiment ID: 20000478 Result: Down-regulated in Transcription
  misc_feature: MA Experiment 20000478 PARAMETER Experiment Name: Zm_5mM_SA_P Parameter: Age (day) Value: 11
  misc_feature: MA Experiment 20000478 PARAMETER Experiment Name: Zm_5mM_SA_P Parameter: Organism Value: Zea mays
  misc_feature: MA Experiment 20000478 PARAMETER Experiment Name: Zm_5mM_SA_P Parameter: Plant Line Value: 35A19
  misc_feature: MA Experiment 20000478 PARAMETER Experiment Name: Zm_5mM_SA_P Parameter: Timepoint (hr) Value: 72
  misc_feature: MA Experiment 20000478 PARAMETER Experiment Name: Zm_5mM_SA_P Parameter: Tissue Value: Aerial
  misc_feature: MA Experiment 20000478 PARAMETER Experiment Name: Zm_5mM_SA_P Parameter: Treatment Value: 5mM SA vs. No Treatment
  misc_feature: MA Experiment ID: 20000487 Result: Up-regulated in Transcription
  misc_feature: MA Experiment 20000487 PARAMETER Experiment Name: Zm_50mM_NH4NO3_L_to_H_P Parameter: Organism Value: Zea mays
  misc_feature: MA Experiment 20000487 PARAMETER Experiment Name: Zm_50mM_NH4NO3_L_to_H_P Parameter: Timepoint (hr) Value: 4
  misc_feature: MA Experiment 20000487 PARAMETER Experiment Name: Zm_50mM_NH4NO3_L_to_H_P Parameter: Tissue Value: Leaves
  misc_feature: MA Experiment 20000487 PARAMETER Experiment Name: Zm_50mM_NH4NO3_L_to_H_P Parameter: Treatment Value: 50mM NH4NO3 vs. 100mM Mannitol
  misc_feature: MA Experiment ID: 20000488 Result: Up-regulated in Transcription
  misc_feature: MA Experiment 20000488 PARAMETER Experiment Name: Zm_50mM_NH4NO3_L_to_H_P Parameter: Organism Value: Zea mays
  misc_feature: MA Experiment 20000488 PARAMETER Experiment Name: Zm_50mM_NH4NO3_L_to_H_P Parameter: Timepoint (hr) Value: 8
  misc_feature: MA Experiment 20000488 PARAMETER Experiment Name: Zm_50mM_NH4NO3_L_to_H_P Parameter: Tissue Value: Leaves
  misc_feature: MA Experiment 20000488 PARAMETER Experiment Name: Zm_50mM_NH4NO3_L_to_H_P Parameter: Treatment Value: 50mM NH4NO3 vs. 100mM Mannitol
  misc_feature: MA Experiment ID: 20000535 Result: Up-regulated in Transcription
  misc_feature: MA Experiment 20000535 PARAMETER Experiment Name: Zm_Hybrid_Seed_Dev_P Parameter: DAP Value: 30 vs. 12
  misc_feature: MA Experiment 20000535 PARAMETER Experiment Name: Zm_Hybrid_Seed_Dev_P Parameter: Organism Value: Zea mays
  misc_feature: MA Experiment 20000535 PARAMETER Experiment Name: Zm_Hybrid_Seed_Dev_P Parameter: Plant Line Value: 35A19
  misc_feature: MA Experiment 20000535 PARAMETER Experiment Name: Zm_Hybrid_Seed_Dev_P Parameter: Tissue Value: Embryo vs. Unfert Floret
  misc_feature: MA Experiment ID: 20000626 Result: Up-regulated in Transcription
  misc_feature: MA Experiment 20000626 PARAMETER Experiment Name: Zm_Herbicide-Treatments_P Parameter: Timepoint (hr) Value: 12
  misc_feature: MA Experiment 20000626 PARAMETER Experiment Name: Zm_Herbicide-Treatments_P Parameter: Tissue Value: Aerial
  misc_feature: MA Experiment 20000626 PARAMETER Experiment Name: Zm_Herbicide-Treatments_P Parameter: Treatment Value: Roundup vs. No Treatment
ctctctgttgcatttcccgtcctgtccttccacccggcggcttaaaccctagttctcactcccatcgccgcttcagctccgccgctgcagatggagttctggggtctcgaggtcaagcctggttccactgttaagtgtgagcctggatatggctttgtgctgcacctttcccaggctgctcttggggaatcgaagaagagtgataatgccttgatgtatgtcaaaattgatgatcagaaacttgccattggaaccctctctgttgacaagaacccacacatacaatttgatctgattttcgataaagagtttgagctgtcgcacacatcaaaaactaccagcgttttcttcactggctacaaggttgagcagccattcgaggaagatgaaatggatcttgattctgaagatgaagacgaggagctgaatgttccagtagtcaaggaaaatggcaaagctgatgagaagaaacagaaaagtcaagaaaaggcagttgctgcaccttcaaaatcaagtccggattccaagaagagcaaggatgacgacgattctgatgaggacgagactgatgattctgatgaggatgagacggacgattctgatgagggtttgtctcctgaagaaggcgatgatgattcaagtgatgaagatgataccagtgacgatgaggaggaagacactccaactcctaagaagcctgaggtaggcaagaagagagctgctgaaagttccgtgctgaaaactcctctatctgataagaaagcaaaggttgccacaccgtcatctcagaagacaggtggcaagaagggcgccgccgtccatgtggcaactccacacccagcaaaaggcaagaccattgtaaacaatgacaaatcggtcaagtctccaaaatctgcgccaaaatctggtgtcccttgcaaatcgtgcagcaagtcattcatcagtgagacggcacttcaggctcactcgaaggcgaagcatgggggcaagtgagtcgcaggtccaatagagtcaacaacaaatgcgaaacatgggagaggagggtaagcgagagtctcgaaagagtgtcggtggaagtaggcctaaccttattttgtttagagacgggctatgcgttcgatgtagcaaaacaaggctgtggtttgtgtacttcaatatttgggttgtgtgtt

SEQ ID NO: 15304 - protein, 300 aa, Zea mays subsp. mays
  peptide (1)..(300): Ceres Seq. ID no. 14309089
  misc_feature (19)..(196): Pfam Name: Nucleoplasmin Pfam Description: Nucleoplasmin
  misc_feature (1)..(300): Homolog of NCBI NO: 7716950 NR Description: histone deacetylase 2 isoform c [Zea mays]
  misc_feature (1)..(298): Homolog of NCBI NO: 7489751 NR Description: histone deacetylase (EC 3.5.1.-) HD2-p39,
  misc_feature (1)..(300): Homolog of NCBI NO: 7716948 NR Description: histone deacetylase 2 isoform b [Zea mays]
  misc_feature (1)..(300): Homolog of NCBI NO: 7804960 NR Description: putative histone deacetylase HD2 [Oryza sativa]
MEFWGLEVKPGSTVKCEPGYGFVLHLSQAALGESKKSDNALMYVKIDDQKLAIGTLSVDKNPHIQFDLIFDKEFELSHTSKTTSVFFTGYKVEQPFEEDEMDLDSEDEDEELNVPVVKENGKADEKKQKSQEKAVAAPSKSSPDSKKSKDDDDSDEDETDDSDEDETDDSDEGLSPEEGDDDSSDEDDTSDDEEEDTPTPKKPEVGKKRAAESSVLKTPLSDKKAKVATPSSQKTGGKKGAAVHVATPHPAKGKTIVNNDKSVKSPKSAPKSGVPCKSCSKSFISETALQAHSKAKHGGK

SEQ ID NO: 15305 - protein, 259 aa, Zea mays subsp. mays
  peptide (1)..(259): Ceres Seq. ID no. 14309090
  misc_feature (1)..(155): Pfam Name: Nucleoplasmin Pfam Description: Nucleoplasmin
  misc_feature (1)..(259): Homolog of NCBI NO: 7716950 NR Description: histone deacetylase 2 isoform c [Zea mays]
  misc_feature (1)..(257): Homolog of NCBI NO: 7489751 NR Description: histone deacetylase (EC 3.5.1.-) HD2-p39,
  misc_feature (1)..(259): Homolog of NCBI NO: 7716948 NR Description: histone deacetylase 2 isoform b [Zea mays]
  misc_feature (1)..(259): Homolog of NCBI NO: 7804960 NR Description: putative histone deacetylase HD2 [Oryza sativa]
MYVKIDDQKLAIGTLSVDKNPHIQFDLIFDKEFELSHTSKTTSVFFTGYKVEQPFEEDEMDLDSEDEDEELNVPVVKENGKADEKKQKSQEKAVAAPSKSSPDSKKSKDDDDSDEDETDDSDEDETDDSDEGLSPEEGDDDSSDEDDTSDDEEEDTPTPKKPEVGKKRAAESSVLKTPLSDKKAKVATPSSQKTGGKKGAAVHVATPHPAKGKTIVNNDKSVKSPKSAPKSGVPCKSCSKSFISETALQAHSKAKHGGK

SEQ ID NO: 15306 - protein, 200 aa, Zea mays subsp. mays
  peptide (1)..(200): Ceres Seq. ID no. 14309091
  misc_feature (1)..(96): Pfam Name: Nucleoplasmin Pfam Description: Nucleoplasmin
  misc_feature (1)..(200): Homolog of NCBI NO: 7716950 NR Description: histone deacetylase 2 isoform c [Zea mays]
  misc_feature (1)..(198): Homolog of NCBI NO: 7489751 NR Description: histone deacetylase (EC 3.5.1.-) HD2-p39,
  misc_feature (1)..(200): Homolog of NCBI NO: 7716948 NR Description: histone deacetylase 2 isoform b [Zea mays]
  misc_feature (1)..(200): Homolog of NCBI NO: 7804960 NR Description: putative histone deacetylase HD2 [Oryza sativa]
MDLDSEDEDEELNVPVVKENGKADEKKQKSQEKAVAAPSKSSPDSKKSKDDDDSDEDETDDSDEDETDDSDEGLSPEEGDDDSSDEDDTSDDEEEDTPTPKKPEVGKKRAAESSVLKTPLSDKKAKVATPSSQKTGGKKGAAVHVATPHPAKGKTIVNNDKSVKSPKSAPKSGVPCKSCSKSFISETALQAHSKAKHGGK

SEQ ID NO: 15307 - DNA, 1462 bp, Zea mays subsp. mays; identical to SEQ ID NO: 10801
  misc_feature (1)..(1462): Ceres Seq. ID no. 13579635
  misc_feature: MA Experiment ID: 108522 Result: Up-regulated in Transcription
  misc_feature: MA Experiment 108522 PARAMETER Experiment Name: Zm_42deg_Heat_P Parameter: Age (day) Value: 8
  misc_feature: MA Experiment 108522 PARAMETER Experiment Name: Zm_42deg_Heat_P Parameter: Organism Value: Zea mays
  misc_feature: MA Experiment 108522 PARAMETER Experiment Name: Zm_42deg_Heat_P Parameter: Plant Line Value: 35A19
  misc_feature: MA Experiment 108522 PARAMETER Experiment Name: Zm_42deg_Heat_P Parameter: Temperature (deg C) Value: 42 vs. 22
  misc_feature: MA Experiment 108522 PARAMETER Experiment Name: Zm_42deg_Heat_P Parameter: Timepoint (hr) Value: 1
  misc_feature: MA Experiment 108522 PARAMETER Experiment Name: Zm_42deg_Heat_P Parameter: Tissue Value: Aerial
  misc_feature: MA Experiment ID: 108527 Result: Up-regulated in Transcription
  misc_feature: MA Experiment 108527 PARAMETER Experiment Name: Zm_5mM_NO_P Parameter: Age (day) Value: 8
  misc_feature: MA Experiment 108527 PARAMETER Experiment Name: Zm_5mM_NO_P Parameter: Organism Value: Zea mays
  misc_feature: MA Experiment 108527 PARAMETER Experiment Name: Zm_5mM_NO_P Parameter: Plant Line Value: 35A19
  misc_feature: MA Experiment 108527 PARAMETER Experiment Name: Zm_5mM_NO_P Parameter: Timepoint (hr) Value: 6
  misc_feature: MA Experiment 108527 PARAMETER Experiment Name: Zm_5mM_NO_P Parameter: Tissue Value: Aerial
  misc_feature: MA Experiment 108527 PARAMETER Experiment Name: Zm_5mM_NO_P Parameter: Treatment Value: 5mM NO vs. No Treatment
  misc_feature: MA Experiment ID: 108543 Result: Down-regulated in Transcription

SEQ ID NO: 15308 - protein, 410 aa, Zea mays subsp. mays; identical to SEQ ID NO: 10802
  peptide (1)..(410): Ceres Seq. ID no. 13579636
  misc_feature (30)..(103): Pfam Name: Ubiquitin family Pfam Description: Ubiquitin family
  misc_feature (30)..(103): Pfam Name: Ubiquitin family Pfam Description: Ubiquitin family
  misc_feature (30)..(103): Pfam Name: Ubiquitin family Pfam Description: Ubiquitin family
  misc_feature (30)..(103): Pfam Name: Ubiquitin family Pfam Description: Ubiquitin family
  misc_feature (27)..(409): Homolog of NCBI NO: 902584 NR Description: polyubiquitin containing 7 ubiquitin monomers
  misc_feature (27)..(410): Homolog of NCBI NO: 902584 NR Description: polyubiquitin containing 7 ubiquitin monomers
  misc_feature (30)..(410): Homolog of NCBI NO: 4809266 NR Description: polyubiquitin [Sporobolus stapfianus]
  misc_feature (27)..(409): Homolog of NCBI NO: 100524 NR Description: polyubiquitin 6 - common sunflower hexaubiquitin protein [Helianthus annuus]
  misc_feature (27)..(410): Homolog of NCBI NO: 481477 NR Description: polyubiquitin 6 - rice >gi|416038|emb|CAA53665.1|
  misc_feature (27)..(410): Homolog of NCBI NO: 481477 NR Description: polyubiquitin 6 - rice >gi|416038|emb|CAA53665.1|
  misc_feature (27)..(409): Homolog of NCBI NO: 902584 NR Description: polyubiquitin containing 7 ubiquitin monomers
  misc_feature (30)..(410): Homolog of NCBI NO: 899608 NR Description: polyubiquitin
  misc_feature (27)..(410): Homolog of NCBI NO: 481477 NR Description: polyubiquitin 6 - rice >gi|416038|emb|CAA53665.1|
  misc_feature (27)..(410): Homolog of NCBI NO: 100934 NR Description: polyubiquitin - maize >gi|248337|gb|AAB21993.1|
  misc_feature (27)..(409): Homolog of NCBI NO: 100934 NR Description: polyubiquitin - maize >gi|248337|gb|AAB21993.1|
  misc_feature (27)..(409): Homolog of NCBI NO: 4115337 NR Description: ubiquitin [Pisum sativum]
  misc_feature (27)..(409): Homolog of NCBI NO: 16660462 NR Description: polyubiquitin OUB2 [Olea europaea]
  misc_feature (27)..(409): Homolog of NCBI NO: 100524 NR Description: polyubiquitin 6 - common sunflower hexaubiquitin protein [Helianthus annuus]
  misc_feature (30)..(410): Homolog of NCBI NO: 4809266 NR Description: polyubiquitin [Sporobolus stapfianus]
  misc_feature (27)..(410): Homolog of NCBI NO: 902584 NR Description: polyubiquitin containing 7 ubiquitin monomers
  misc_feature (27)..(409): Homolog of NCBI NO: 100934 NR Description: polyubiquitin - maize >gi|248337|gb|AAB21993.1|
  misc_feature (27)..(409): Homolog of NCBI NO: 4115337 NR Description: ubiquitin [Pisum sativum]
  misc_feature (27)..(409): Homolog of NCBI NO: 16660462 NR Description: polyubiquitin OUB2 [Olea europaea]
  misc_feature (27)..(409): Homolog of NCBI NO: 100524 NR Description: polyubiquitin 6 - common sunflower hexaubiquitin protein [Helianthus annuus]
  misc_feature (30)..(410): Homolog of NCBI NO: 4809266 NR Description: polyubiquitin [Sporobolus stapfianus]
  misc_feature (27)..(410): Homolog of NCBI NO: 902584 NR Description: polyubiquitin containing 7 ubiquitin monomers
  misc_feature (27)..(409): Homolog of NCBI NO: 902584 NR Description: polyubiquitin containing 7 ubiquitin monomers
  misc_feature (30)..(410): Homolog of NCBI NO: 899608 NR Description: polyubiquitin
  misc_feature (27)..(410): Homolog of NCBI NO: 481477 NR Description: polyubiquitin 6 - rice >gi|416038|emb|CAA53665.1|
  misc_feature (27)..(410): Homolog of NCBI NO: 100934 NR Description: polyubiquitin - maize >gi|248337|gb|AAB21993.1|
  misc_feature (27)..(409): Homolog of NCBI NO: 100934 NR Description: polyubiquitin - maize >gi|248337|gb|AAB21993.1|
  misc_feature (27)..(409): Homolog of NCBI NO: 4115337 NR Description: ubiquitin [Pisum sativum]
  misc_feature (27)..(409): Homolog of NCBI NO: 16660462 NR Description: polyubiquitin OUB2 [Olea europaea]
  misc_feature (27)..(409): Homolog of NCBI NO: 100524 NR Description: polyubiquitin 6 - common sunflower hexaubiquitin protein [Helianthus annuus]
  misc_feature (30)..(410): Homolog of NCBI NO: 4809266 NR Description: polyubiquitin [Sporobolus stapfianus]
  misc_feature (27)..(410): Homolog of NCBI NO: 902584 NR Description: polyubiquitin containing 7 ubiquitin monomers
  misc_feature (27)..(409): Homolog of NCBI NO: 902584 NR Description: polyubiquitin containing 7 ubiquitin monomers
  misc_feature (30)..(410): Homolog of NCBI NO: 899608 NR Description: polyubiquitin
  misc_feature (27)..(410): Homolog of NCBI NO: 100934 NR Description: polyubiquitin - maize >gi|248337|gb|AAB21993.1|
  misc_feature (30)..(410): Homolog of NCBI NO: 899608 NR Description: polyubiquitin
  misc_feature (27)..(410): Homolog of NCBI NO: 100934 NR Description: polyubiquitin - maize >gi|248337|gb|AAB21993.1|
  misc_feature (27)..(409): Homolog of NCBI NO: 16660462 NR Description: polyubiquitin OUB2 [Olea europaea]
  misc_feature (27)..(409): Homolog of NCBI NO: 4115337 NR Description: ubiquitin [Pisum sativum]
  misc_feature (27)..(409): Homolog of NCBI NO: 100934 NR Description: polyubiquitin - maize >gi|248337|gb|AAB21993.1|

SEQ ID NO: 15309 - protein, 381 aa, Zea mays subsp. mays; identical to SEQ ID NO: 10803
  peptide (1)..(381): Ceres Seq. ID no. 13579637
  misc_feature (1)..(74): Pfam Name: Ubiquitin family Pfam Description: Ubiquitin family
  misc_feature (1)..(74): Pfam Name: Ubiquitin family Pfam Description: Ubiquitin family
  misc_feature (1)..(74): Pfam Name: Ubiquitin family Pfam Description: Ubiquitin family
  misc_feature (1)..(74): Pfam Name: Ubiquitin family Pfam Description: Ubiquitin family
  misc_feature (1)..(381): Homolog of NCBI NO: 100934 NR Description: polyubiquitin - maize >gi|248337|gb|AAB21993.1|
  misc_feature (1)..(381): Homolog of NCBI NO: 481477 NR Description: polyubiquitin 6 - rice >gi|416038|emb|CAA53665.1|
  misc_feature (1)..(381): Homolog of NCBI NO: 899608 NR Description: polyubiquitin
  misc_feature (1)..(380): Homolog of NCBI NO: 902584 NR Description: polyubiquitin containing 7 ubiquitin monomers
  misc_feature (1)..(381): Homolog of NCBI NO: 902584 NR Description: polyubiquitin containing 7 ubiquitin monomers
  misc_feature (1)..(381): Homolog of NCBI NO: 4809266 NR Description: polyubiquitin [Sporobolus stapfianus]
  misc_feature (1)..(381): Homolog of NCBI NO: 481477 NR Description: polyubiquitin 6 - rice >gi|416038|emb|CAA53665.1|
  misc_feature (1)..(381): Homolog of NCBI NO: 899608 NR Description: polyubiquitin
  misc_feature (1)..(381): Homolog of NCBI NO: 481477 NR Description: polyubiquitin 6 - rice >gi|416038|emb|CAA53665.1|
  misc_feature (1)..(381): Homolog of NCBI NO: 100934 NR Description: polyubiquitin - maize >gi|248337|gb|AAB21993.1|
  misc_feature (1)..(380): Homolog of NCBI NO: 418854 NR Description: polyubiquitin 6 - parsley polyubiquitin [Petroselinum crispum] >gi|288114|emb|CAA45622.1|
  misc_feature (1)..(380): Homolog of NCBI NO: 100524 NR Description: polyubiquitin 6 - common sunflower hexaubiquitin protein [Helianthus annuus]
  misc_feature (1)..(381): Homolog of NCBI NO: 4809266 NR Description: polyubiquitin [Sporobolus stapfianus]
  misc_feature (1)..(381): Homolog of NCBI NO: 902584 NR Description: polyubiquitin containing 7 ubiquitin monomers
  misc_feature (1)..(380): Homolog of NCBI NO: 902584 NR Description: polyubiquitin containing 7 ubiquitin monomers
  misc_feature (1)..(381): Homolog of NCBI NO: 899608 NR Description: polyubiquitin
  misc_feature (1)..(380): Homolog of NCBI NO: 4115337 NR Description: ubiquitin [Pisum sativum]
  misc_feature (1)..(380): Homolog of NCBI NO: 16660462 NR Description: polyubiquitin OUB2 [Olea europaea]
  misc_feature (1)..(380): Homolog of NCBI NO: 418854 NR Description: polyubiquitin 6 - parsley polyubiquitin [Petroselinum crispum] >gi|288114|emb|CAA45622.1|
  misc_feature (1)..(380): Homolog of NCBI NO: 100524 NR Description: polyubiquitin 6 - common sunflower hexaubiquitin protein [Helianthus annuus]
  misc_feature (1)..(381): Homolog of NCBI NO: 4809266 NR Description: polyubiquitin [Sporobolus stapfianus]
  misc_feature (1)..(381): Homolog of NCBI NO: 902584 NR Description: polyubiquitin containing 7 ubiquitin monomers
  misc_feature (1)..(380): Homolog of NCBI NO: 902584 NR Description: polyubiquitin containing 7 ubiquitin monomers
  misc_feature (1)..(381): Homolog of NCBI NO: 899608 NR Description: polyubiquitin
  misc_feature (1)..(381): Homolog of NCBI NO: 481477 NR Description: polyubiquitin 6 - rice >gi|416038|emb|CAA53665.1|
  misc_feature (1)..(381): Homolog of NCBI NO: 100934 NR Description: polyubiquitin - maize >gi|248337|gb|AAB21993.1|
  misc_feature (1)..(380): Homolog of NCBI NO: 4115337 NR Description: ubiquitin [Pisum sativum]
  misc_feature (1)..(380): Homolog of NCBI NO: 16660462 NR Description: polyubiquitin OUB2 [Olea europaea]
  misc_feature (1)..(380): Homolog of NCBI NO: 418854 NR Description: polyubiquitin 6 - parsley polyubiquitin [Petroselinum crispum] >gi|288114|emb|CAA45622.1|
  misc_feature (1)..(380): Homolog of NCBI NO: 100524 NR Description: polyubiquitin 6 - common sunflower hexaubiquitin protein [Helianthus annuus]
  misc_feature (1)..(381): Homolog of NCBI NO: 4809266 NR Description: polyubiquitin [Sporobolus stapfianus]
  misc_feature (1)..(381): Homolog of NCBI NO: 902584 NR Description: polyubiquitin containing 7 ubiquitin monomers
  misc_feature (1)..(380): Homolog of NCBI NO: 902584 NR Description: polyubiquitin containing 7 ubiquitin monomers
  misc_feature (1)..(381): Homolog of NCBI NO: 100934 NR Description: polyubiquitin - maize >gi|248337|gb|AAB21993.1|
  misc_feature (1)..(380): Homolog of NCBI NO: 100524 NR Description: polyubiquitin 6 - common sunflower hexaubiquitin protein [Helianthus annuus]
  misc_feature (1)..(380): Homolog of NCBI NO: 418854 NR Description: polyubiquitin 6 - parsley polyubiquitin [Petroselinum crispum] >gi|288114|emb|CAA45622.1|
  misc_feature (1)..(380): Homolog of NCBI NO: 16660462 NR Description: polyubiquitin OUB2 [Olea europaea]
  misc_feature (1)..(380): Homolog of NCBI NO: 4115337 NR Description: ubiquitin [Pisum sativum]
  misc_feature (1)..(380): Homolog of NCBI NO: 16660462 NR Description: polyubiquitin OUB2 [Olea europaea]
  misc_feature (1)..(380): Homolog of NCBI NO: 4115337 NR Description: ubiquitin [Pisum sativum]

SEQ ID NO: 15310 - protein, 305 aa, Zea mays subsp. mays; identical to SEQ ID NO: 10804
  peptide (1)..(305): Ceres Seq. ID no. 13579638
  misc_feature (1)..(74): Pfam Name: Ubiquitin family Pfam Description: Ubiquitin family
  misc_feature (1)..(74): Pfam Name: Ubiquitin family Pfam Description: Ubiquitin family
  misc_feature (1)..(74): Pfam Name: Ubiquitin family Pfam Description: Ubiquitin family
  misc_feature (1)..(74): Pfam Name: Ubiquitin family Pfam Description: Ubiquitin family
  misc_feature (1)..(305): Homolog of NCBI NO: 100934 NR Description: polyubiquitin - maize >gi|248337|gb|AAB21993.1|
  misc_feature (1)..(305): Homolog of NCBI NO: 481477 NR Description: polyubiquitin 6 - rice >gi|416038|emb|CAA53665.1|
  misc_feature (1)..(305): Homolog of NCBI NO: 899608 NR Description: polyubiquitin
  misc_feature (1)..(304): Homolog of NCBI NO: 902584 NR Description: polyubiquitin containing 7 ubiquitin monomers
  misc_feature (1)..(305): Homolog of NCBI NO: 902584 NR Description: polyubiquitin containing 7 ubiquitin monomers
  misc_feature (1)..(305): Homolog of NCBI NO: 481477 NR Description: polyubiquitin 6 - rice >gi|416038|emb|CAA53665.1|
  misc_feature (1)..(304): Homolog of NCBI NO: 902584 NR Description: polyubiquitin containing 7 ubiquitin monomers
  misc_feature (1)..(305): Homolog of NCBI NO: 899608 NR Description: polyubiquitin
  misc_feature (1)..(305): Homolog of NCBI NO: 481477 NR Description: polyubiquitin 6 - rice >gi|416038|emb|CAA53665.1|
  misc_feature (1)..(305): Homolog of NCBI NO: 100934 NR Description: polyubiquitin - maize >gi|248337|gb|AAB21993.1|
  misc_feature (1)..(304): Homolog of NCBI NO: 170352 NR Description: hexameric polyubiquitin >gi|870792|gb|AAA68878.1| >gi|4115333|gb|AAD03341.1| ubiquitin [Pisum sativum] ubiquitin [Pisum sativum] >gi|22655101|gb|AAM98141.1|
  misc_feature (1)..(304): Homolog of NCBI NO: 4115337 NR Description: ubiquitin [Pisum sativum]
  misc_feature (1)..(304): Homolog of NCBI NO: 16660462 NR Description: polyubiquitin OUB2 [Olea europaea]
  misc_feature (1)..(304): Homolog of NCBI NO: 100524 NR Description: polyubiquitin 6 - common sunflower hexaubiquitin protein [Helianthus annuus]
  misc_feature (1)..(305): Homolog of NCBI NO: 4809266 NR Description: polyubiquitin [Sporobolus stapfianus]
  misc_feature (1)..(305): Homolog of NCBI NO: 902584 NR Description: polyubiquitin containing 7 ubiquitin monomers
  misc_feature (1)..(304): Homolog of NCBI NO: 170352 NR Description: hexameric polyubiquitin >gi|870792|gb|AAA68878.1| >gi|4115333|gb|AAD03341.1| ubiquitin [Pisum sativum] ubiquitin [Pisum sativum] >gi|22655101|gb|AAM98141.1|
  misc_feature (1)..(304): Homolog of NCBI NO: 4115337 NR Description: ubiquitin [Pisum sativum]
  misc_feature (1)..(304): Homolog of NCBI NO: 16660462 NR Description: polyubiquitin OUB2 [Olea europaea]
  misc_feature (1)..(304): Homolog of NCBI NO: 100524 NR Description: polyubiquitin 6 - common sunflower hexaubiquitin protein [Helianthus annuus]
  misc_feature (1)..(305): Homolog of NCBI NO: 4809266 NR Description: polyubiquitin [Sporobolus stapfianus]
  misc_feature (1)..(305): Homolog of NCBI NO: 902584 NR Description: polyubiquitin containing 7 ubiquitin monomers
  misc_feature (1)..(304): Homolog of NCBI NO: 902584 NR Description: polyubiquitin containing 7 ubiquitin monomers
  misc_feature (1)..(305): Homolog of NCBI NO: 899608 NR Description: polyubiquitin
  misc_feature (1)..(305): Homolog of NCBI NO: 481477 NR Description: polyubiquitin 6 - rice >gi|416038|emb|CAA53665.1|
  misc_feature (1)..(305): Homolog of NCBI NO: 100934 NR Description: polyubiquitin - maize >gi|248337|gb|AAB21993.1|
  misc_feature (1)..(304): Homolog of NCBI NO: 170352 NR Description: hexameric polyubiquitin >gi|870792|gb|AAA68878.1| >gi|4115333|gb|AAD03341.1| ubiquitin [Pisum sativum] ubiquitin [Pisum sativum] >gi|22655101|gb|AAM98141.1|
  misc_feature (1)..(304): Homolog of NCBI NO: 4115337 NR Description: ubiquitin [Pisum sativum]
  misc_feature (1)..(304): Homolog of NCBI NO: 16660462 NR Description: polyubiquitin OUB2 [Olea europaea]
  misc_feature (1)..(304): Homolog of NCBI NO: 100524 NR Description: polyubiquitin 6 - common sunflower hexaubiquitin protein [Helianthus annuus]
  misc_feature (1)..(305): Homolog of NCBI NO: 4809266 NR Description: polyubiquitin [Sporobolus stapfianus]
  misc_feature (1)..(305): Homolog of NCBI NO: 902584 NR Description: polyubiquitin containing 7 ubiquitin monomers
  misc_feature (1)..(304): Homolog of NCBI NO: 902584 NR Description: polyubiquitin containing 7 ubiquitin monomers
  misc_feature (1)..(305): Homolog of NCBI NO: 899608 NR Description: polyubiquitin
  misc_feature (1)..(305): Homolog of NCBI NO: 100934 NR Description: polyubiquitin - maize >gi|248337|gb|AAB21993.1|
  misc_feature (1)..(305): Homolog of NCBI NO: 4809266 NR Description: polyubiquitin [Sporobolus stapfianus]
  misc_feature (1)..(304): Homolog of NCBI NO: 100524 NR Description: polyubiquitin 6 - common sunflower hexaubiquitin protein [Helianthus annuus]
  misc_feature (1)..(304): Homolog of NCBI NO: 16660462 NR Description: polyubiquitin OUB2 [Olea europaea]
  misc_feature (1)..(304): Homolog of NCBI NO: 4115337 NR Description: ubiquitin [Pisum sativum]
  misc_feature (1)..(304): Homolog of NCBI NO: 170352 NR Description: hexameric polyubiquitin >gi|870792|gb|AAA68878.1| >gi|4115333|gb|AAD03341.1| ubiquitin [Pisum sativum] ubiquitin [Pisum sativum] >gi|22655101|gb|AAM98141.1|

SEQ ID NO: 15311 - DNA, 435 bp, Zea mays subsp. mays
  misc_feature (1)..(435): Ceres Seq. ID no. 13637179
  misc_feature: MA Experiment ID: 20000534 Result: Up-regulated in Transcription
  misc_feature: MA Experiment 20000534 PARAMETER Experiment Name: Zm_Hybrid_Pollen_P Parameter: Age (day) Value: 8
  misc_feature: MA Experiment 20000534 PARAMETER Experiment Name: Zm_Hybrid_Pollen_P Parameter: Organism Value: Zea mays
  misc_feature: MA Experiment 20000534 PARAMETER Experiment Name: Zm_Hybrid_Pollen_P Parameter: Plant Line Value: 35A19
  misc_feature: MA Experiment 20000534 PARAMETER Experiment Name: Zm_Hybrid_Pollen_P Parameter: Tissue Value: Pollen vs. Aerial
tctctgcatttaggttttcattttagcggcgggcgaaagagaaggagaagaaggtcctatccatggcgactcaagcggctaaacaatccgttcaatgcttcgggcgtaagaagacagcagtggctgtaacccactgcaagcctggatgcggtatgatcaagctcaacggctccccgatcgagctgttcaacccagagatcctccgtttcaagatcttcgagccagtccttctcctcggcaagcaccgtttcgctggcgtcgacatgaggatccgtgtcaagggtggtggtcacacttcccaggtctacgccatccgtcagagtatcgccaaggcgctcgtggcgttctaccagaagtacgtgaacgagcagtcgaagaaggaggtgaaggatatccttatccgttacgataggactctccttgtggcggatccga

SEQ ID NO: 15312 - protein, 124 aa, Zea mays subsp. mays
  peptide (1)..(124): Ceres Seq. ID no. 13637180
  misc_feature (14)..(123): Pfam Name: Ribosomal protein S9/S16 Pfam Description: Ribosomal protein S9/S16
  misc_feature (1)..(123): Homolog of NCBI NO: 15238809 NR Description: 40S ribosomal protein S16 (RPS16C) [Arabidopsis >gi|2500430|sp|Q42340|RS16_ARATH 40S ribosomal protein S16 putative 40S ribosomal protein S16 [Arabidopsis thaliana]
  misc_feature (1)..(123): Homolog of NCBI NO: 15226676 NR Description: 40S ribosomal protein S16 (RPS16A) [Arabidopsis
  misc_feature (1)..(123): Homolog of NCBI NO: 15229252 NR Description: 40S ribosomal protein S16 (RPS16B) [Arabidopsis >gi|6721162|gb|AAF26790.1|AC016829_14 putative 40S ribosomal S16 [Arabidopsis thaliana] >gi|28466835|gb|AAO44026.1| At3g04230
  misc_feature (8)..(123): Homolog of NCBI NO: 6984222 NR Description: 40S ribosomal protein S16 [Euphorbia esula]
  misc_feature (1)..(123): Homolog of NCBI NO: 3122800 NR Description: 40S RIBOSOMAL PROTEIN S16
  misc_feature (1)..(123): Homolog of NCBI NO: 1173209 NR Description: 40S RIBOSOMAL PROTEIN S16 >gi|541835|pir||S41193
  misc_feature (5)..(123): Homolog of NCBI NO: 17369864 NR Description: 40S ribosomal protein S16
  misc_feature (1)..(123): Homolog of NCBI NO: 39850096 NR Description: Unknown (protein for IMAGE:6887619) [Rattus
  misc_feature (1)..(123): Homolog of NCBI NO: 4506691 NR Description: ribosomal protein S16; 40S ribosomal protein S16 sapiens] >gi|27676542|ref|XP_214829.1| similar to ribosomal
  misc_feature (1)..(123): Homolog of NCBI NO: 15294045 NR Description: 40S ribosomal protein S16 [Ictalurus punctatus]
MATQAAKQSVQCFGRKKTAVAVTHCKPGCGMIKLNGSPIELFNPEILRFKIFEPVLLLGKHRFAGVDMRIRVKGGGHTSQVYAIRQSIAKALVAFYQKYVNEQSKKEVKDILIRYDRTLLVADP

SEQ ID NO: 15313 - protein, 94 aa, Zea mays subsp. mays
  peptide (1)..(94): Ceres Seq. ID no. 13637181
  misc_feature (1)..(93): Pfam Name: Ribosomal protein S9/S16 Pfam Description: Ribosomal protein S9/S16
  misc_feature (1)..(93): Homolog of NCBI NO: 15238809 NR Description: 40S ribosomal protein S16 (RPS16C) [Arabidopsis >gi|2500430|sp|Q42340|RS16_ARATH 40S ribosomal protein S16 putative 40S ribosomal protein S16 [Arabidopsis thaliana]
  misc_feature (1)..(93): Homolog of NCBI NO: 15226676 NR Description: 40S ribosomal protein S16 (RPS16A) [Arabidopsis
  misc_feature (1)..(93): Homolog of NCBI NO: 15229252 NR Description: 40S ribosomal protein S16 (RPS16B) [Arabidopsis >gi|6721162|gb|AAF26790.1|AC016829_14 putative 40S ribosomal S16 [Arabidopsis thaliana] >gi|28466835|gb|AAO44026.1| At3g04230
  misc_feature (1)..(93): Homolog of NCBI NO: 6984222 NR Description: 40S ribosomal protein S16 [Euphorbia esula]
  misc_feature (1)..(93): Homolog of NCBI NO: 3122800 NR Description: 40S RIBOSOMAL PROTEIN S16
  misc_feature (1)..(93): Homolog of NCBI NO: 1173209 NR Description: 40S RIBOSOMAL PROTEIN S16 >gi|541835|pir||S41193
  misc_feature (1)..(93): Homolog of NCBI NO: 17369864 NR Description: 40S ribosomal protein S16
  misc_feature (1)..(93): Homolog of NCBI NO: 39850096 NR Description: Unknown (protein for IMAGE:6887619) [Rattus
  misc_feature (1)..(93): Homolog of NCBI NO: 4506691 NR Description: ribosomal protein S16; 40S ribosomal protein S16 sapiens] >gi|27676542|ref|XP_214829.1| similar to ribosomal
  misc_feature (1)..(93): Homolog of NCBI NO: 15294045 NR Description: 40S ribosomal protein S16 [Ictalurus punctatus]
MIKLNGSPIELFNPEILRFKIFEPVLLLGKHRFAGVDMRIRVKGGGHTSQVYAIRQSIAKALVAFYQKYVNEQSKKEVKDILIRYDRTLLVADP

SEQ ID NO: 15314 - protein, 88 aa, Zea mays subsp. mays
  peptide (1)..(88): Ceres Seq. ID no. 13637182
MRYDQAQRLPDRAVQPRDPPFQDLRASPSPRQAPFRWRRHEDPCQGWWSHFPGLRHPSEYRQGARGVLPEVRERAVEEGGEGYPYPLR

SEQ ID NO: 15315 - DNA, 1116 bp, Zea mays subsp. mays
  misc_feature (1)..(1116): Ceres Seq. ID no. 13630146
  misc_feature: MA Experiment ID: 108504 Result: Up-regulated in Transcription
  misc_feature: MA Experiment 108504 PARAMETER Experiment Name: Zm_Drought_P Parameter: Age (day) Value: 8
  misc_feature: MA Experiment 108504 PARAMETER Experiment Name: Zm_Drought_P Parameter: Organism Value: Zea mays
  misc_feature: MA Experiment 108504 PARAMETER Experiment Name: Zm_Drought_P Parameter: Plant Line Value: 35A19
  misc_feature: MA Experiment 108504 PARAMETER Experiment Name: Zm_Drought_P Parameter: Timepoint (hr) Value: 12
  misc_feature: MA Experiment 108504 PARAMETER Experiment Name: Zm_Drought_P Parameter: Tissue Value: Aerial
  misc_feature: MA Experiment 108504 PARAMETER Experiment Name: Zm_Drought_P Parameter: Treatment Value: Drought vs. No Drought
  misc_feature: MA Experiment ID: 108515 Result: Up-regulated in Transcription
  misc_feature: MA Experiment 108515 PARAMETER Experiment Name: Zm_2mM_SA_P Parameter: Age (day) Value: 8
  misc_feature: MA Experiment 108515 PARAMETER Experiment Name: Zm_2mM_SA_P Parameter: Organism Value: Zea mays
  misc_feature: MA Experiment 108515 PARAMETER Experiment Name: Zm_2mM_SA_P Parameter: Plant Line Value: 35A19
  misc_feature: MA Experiment 108515 PARAMETER Experiment Name: Zm_2mM_SA_P Parameter: Timepoint (hr) Value: 12
  misc_feature: MA Experiment 108515 PARAMETER Experiment Name: Zm_2mM_SA_P Parameter: Tissue Value: Aerial
  misc_feature: MA Experiment 108515 PARAMETER Experiment Name: Zm_2mM_SA_P Parameter: Treatment Value: 2mM SA vs. No Treatment
  misc_feature: MA Experiment ID: 108522 Result: Up-regulated in Transcription
  misc_feature: MA Experiment 108522 PARAMETER Experiment Name: Zm_42deg_Heat_P Parameter: Age (day) Value: 8
  misc_feature: MA Experiment 108522 PARAMETER Experiment Name: Zm_42deg_Heat_P Parameter: Organism Value: Zea mays
  misc_feature: MA Experiment 108522 PARAMETER Experiment Name: Zm_42deg_Heat_P Parameter: Plant Line Value: 35A19
  misc_feature: MA Experiment 108522 PARAMETER Experiment Name: Zm_42deg_Heat_P Parameter: Temperature (deg C) Value: 42 vs. 22
  misc_feature: MA Experiment 108522 PARAMETER Experiment Name: Zm_42deg_Heat_P Parameter: Timepoint (hr) Value: 1
  misc_feature: MA Experiment 108522 PARAMETER Experiment Name: Zm_42deg_Heat_P Parameter: Tissue Value: Aerial
  misc_feature: MA Experiment ID: 108523 Result: Up-regulated in Transcription
  misc_feature: MA Experiment 108523 PARAMETER Experiment Name: Zm_42deg_Heat_P Parameter: Age (day) Value: 8
  misc_feature: MA Experiment 108523 PARAMETER Experiment Name: Zm_42deg_Heat_P Parameter: Organism Value: Zea mays
  misc_feature: MA Experiment 108523 PARAMETER Experiment Name: Zm_42deg_Heat_P Parameter: Plant Line Value: 35A19
  misc_feature: MA Experiment 108523 PARAMETER Experiment Name: Zm_42deg_Heat_P Parameter: Temperature (deg C) Value: 42 vs. 22
  misc_feature: MA Experiment 108523 PARAMETER Experiment Name: Zm_42deg_Heat_P Parameter: Timepoint (hr) Value: 6
  misc_feature: MA Experiment 108523 PARAMETER Experiment Name: Zm_42deg_Heat_P Parameter: Tissue Value: Aerial
  misc_feature: MA Experiment ID: 108527 Result: Up-regulated in Transcription
  misc_feature: MA Experiment 108527 PARAMETER Experiment Name: Zm_5mM_NO_P Parameter: Age (day) Value: 8
  misc_feature: MA Experiment 108527 PARAMETER Experiment Name: Zm_5mM_NO_P Parameter: Organism Value: Zea mays
  misc_feature: MA Experiment 108527 PARAMETER Experiment Name: Zm_5mM_NO_P Parameter: Plant Line Value: 35A19
  misc_feature: MA Experiment 108527 PARAMETER Experiment Name: Zm_5mM_NO_P Parameter: Timepoint (hr) Value: 6
  misc_feature: MA Experiment 108527 PARAMETER Experiment Name: Zm_5mM_NO_P Parameter: Tissue Value: Aerial
  misc_feature: MA Experiment 108527 PARAMETER Experiment Name: Zm_5mM_NO_P Parameter: Treatment Value: 5mM NO vs. No Treatment
  misc_feature: MA Experiment ID: 108528 Result: Down-regulated in Transcription
  misc_feature: MA Experiment 108528 PARAMETER Experiment Name: Zm_Imbibed_Seeds_P Parameter: Age (day) Value: 5 vs. 2
  misc_feature: MA Experiment 108528 PARAMETER Experiment Name: Zm_Imbibed_Seeds_P Parameter: Organism Value: Zea mays
  misc_feature: MA Experiment 108528 PARAMETER Experiment Name: Zm_Imbibed_Seeds_P Parameter: Plant Line Value: 35A19
  misc_feature: MA Experiment 108528 PARAMETER Experiment Name: Zm_Imbibed_Seeds_P Parameter: Tissue Value: Aerial vs. Embryo
  misc_feature: MA Experiment ID: 108535 Result: Down-regulated in Transcription
  misc_feature: MA Experiment 108535 PARAMETER Experiment Name: Zm_Meristem_P Parameter: Age (day) Value: 8
  misc_feature: MA Experiment 108535 PARAMETER Experiment Name: Zm_Meristem_P Parameter: Organism Value: Zea mays
  misc_feature: MA Experiment 108535 PARAMETER Experiment Name: Zm_Meristem_P Parameter: Plant Line Value: 35A19
  misc_feature: MA Experiment 108535 PARAMETER Experiment Name: Zm_Meristem_P Parameter: Tissue Value: Root Meristem vs. Above Root Meristem
  misc_feature: MA Experiment ID: 108540 Result: Up-regulated in Transcription
  misc_feature: MA Experiment 108540 PARAMETER Experiment Name: Zm_20percent_PEG_P Parameter: Age (day) Value: 8
  misc_feature: MA Experiment 108540 PARAMETER Experiment Name: Zm_20percent_PEG_P Parameter: Organism Value: Zea mays
  misc_feature: MA Experiment 108540 PARAMETER Experiment Name: Zm_20percent_PEG_P Parameter: Plant Line Value: 35A19
  misc_feature: MA Experiment 108540 PARAMETER Experiment Name: Zm_20percent_PEG_P Parameter: Timepoint (hr) Value: 6
  misc_feature: MA Experiment 108540 PARAMETER Experiment Name: Zm_20percent_PEG_P Parameter: Tissue Value: Aerial
  misc_feature: MA Experiment 108540 PARAMETER Experiment Name: Zm_20percent_PEG_P Parameter: Treatment Value: 20percent PEG vs. No Treatment
  misc_feature: MA Experiment ID: 108543 Result: Down-regulated in Transcription
  misc_feature: MA Experiment ID: 108545 Result: Down-regulated in Transcription
  misc_feature: MA Experiment 108545 PARAMETER Experiment Name: Zm_Imbibed_Seeds_P Parameter: Age (day) Value: 3 vs. 2
  misc_feature: MA Experiment 108545 PARAMETER Experiment Name: Zm_Imbibed_Seeds_P Parameter: Organism Value: Zea mays
  misc_feature: MA Experiment 108545 PARAMETER Experiment Name: Zm_Imbibed_Seeds_P Parameter: Plant Line Value: 35A19
  misc_feature: MA Experiment 108545 PARAMETER Experiment Name: Zm_Imbibed_Seeds_P Parameter: Tissue Value: Aerial vs. Embryo
  misc_feature: MA Experiment ID: 108546 Result: Down-regulated in Transcription
  misc_feature: MA Experiment 108546 PARAMETER Experiment Name: Zm_Imbibed_Seeds_P Parameter: Age (day) Value: 3 vs. 2
  misc_feature: MA Experiment 108546 PARAMETER Experiment Name: Zm_Imbibed_Seeds_P Parameter: Organism Value: Zea mays
  misc_feature: MA Experiment 108546 PARAMETER Experiment Name: Zm_Imbibed_Seeds_P Parameter: Plant Line Value: 35A19
  misc_feature: MA Experiment 108546 PARAMETER Experiment Name: Zm_Imbibed_Seeds_P Parameter: Tissue Value: Roots vs. Embryo
  misc_feature: MA Experiment ID: 108547 Result: Down-regulated in Transcription
  misc_feature: MA Experiment 108547 PARAMETER Experiment Name: Zm_Imbibed_Seeds_P Parameter: Age (day) Value: 4 vs. 2
  misc_feature: MA Experiment 108547 PARAMETER Experiment Name: Zm_Imbibed_Seeds_P Parameter: Organism Value: Zea mays
  misc_feature: MA Experiment 108547 PARAMETER Experiment Name: Zm_Imbibed_Seeds_P Parameter: Plant Line Value: 35A19
  misc_feature: MA Experiment 108547 PARAMETER Experiment Name: Zm_Imbibed_Seeds_P Parameter: Tissue Value: Aerial vs. Embryo
  misc_feature: MA Experiment ID: 108556 Result: Up-regulated in Transcription
  misc_feature: MA Experiment 108556 PARAMETER Experiment Name: Zm_Drought_P Parameter: Age (day) Value: 9
  misc_feature: MA Experiment 108556 PARAMETER Experiment Name: Zm_Drought_P Parameter: Organism Value: Zea mays
  misc_feature: MA Experiment 108556 PARAMETER Experiment Name: Zm_Drought_P Parameter: Plant Line Value: 35A19
  misc_feature: MA Experiment 108556 PARAMETER Experiment Name: Zm_Drought_P Parameter: Timepoint (hr) Value: 24
  misc_feature: MA Experiment 108556 PARAMETER Experiment Name: Zm_Drought_P Parameter: Tissue Value: Aerial
  misc_feature: MA Experiment 108556 PARAMETER Experiment Name: Zm_Drought_P Parameter: Treatment Value: Drought vs. No Drought
  misc_feature: MA Experiment ID: 108559 Result: Up-regulated in Transcription
  misc_feature: MA Experiment 108559 PARAMETER Experiment Name: Zm_5mM_NO_P Parameter: Age (day) Value: 8
  misc_feature: MA Experiment 108559 PARAMETER Experiment Name: Zm_5mM_NO_P Parameter: Organism Value: Zea mays
  misc_feature: MA Experiment 108559 PARAMETER Experiment Name: Zm_5mM_NO_P Parameter: Plant Line Value: 35A19
  misc_feature: MA Experiment 108559 PARAMETER Experiment Name: Zm_5mM_NO_P Parameter: Timepoint (hr) Value: 12
  misc_feature: MA Experiment 108559 PARAMETER Experiment Name: Zm_5mM_NO_P Parameter: Tissue Value: Aerial
  misc_feature: MA Experiment 108559 PARAMETER Experiment Name: Zm_5mM_NO_P Parameter: Treatment Value: 5mM NO vs. No Treatment
  misc_feature: MA Experiment ID: 108599 Result: Up-regulated in Transcription
  misc_feature: MA Experiment 108599 PARAMETER Experiment Name: Zm_RT1_P Parameter: Age (day) Value: 11
  misc_feature: MA Experiment 108599 PARAMETER Experiment Name: Zm_RT1_P Parameter: Organism Value: Zea mays
  misc_feature: MA Experiment 108599 PARAMETER Experiment Name: Zm_RT1_P Parameter: Plant Line Value: rt1 mut vs. rt1 wt
  misc_feature: MA Experiment 108599 PARAMETER Experiment Name: Zm_RT1_P Parameter: Tissue Value: Roots
  misc_feature: MA Experiment ID: 108688 Result: Down-regulated in Transcription
  misc_feature: MA Experiment 108688 PARAMETER Experiment Name: Zm_Embryos-Flowers__P Parameter: Tissue Value: Immature Flowers vs. Aerial+
  misc_feature: MA Experiment ID: 20000477 Result: Up-regulated in Transcription
  misc_feature: MA Experiment 20000477 PARAMETER Experiment Name: Zm_5mM_SA_P Parameter: Age (day) Value: 10
  misc_feature: MA Experiment 20000477 PARAMETER Experiment Name: Zm_5mM_SA_P Parameter: Organism Value: Zea mays
  misc_feature: MA Experiment 20000477 PARAMETER Experiment Name: Zm_5mM_SA_P Parameter: Plant Line Value: 35A19
  misc_feature: MA Experiment 20000477 PARAMETER Experiment Name: Zm_5mM_SA_P Parameter: Timepoint (hr) Value: 48
  misc_feature: MA Experiment 20000477 PARAMETER Experiment Name: Zm_5mM_SA_P Parameter: Tissue Value: Aerial
  misc_feature: MA Experiment 20000477 PARAMETER Experiment Name: Zm_5mM_SA_P Parameter: Treatment Value: 5mM SA vs. No Treatment
  misc_feature: MA Experiment ID: 20000478 Result: Up-regulated in Transcription
  misc_feature: MA Experiment 20000478 PARAMETER Experiment Name: Zm_5mM_SA_P Parameter: Age (day) Value: 11
  misc_feature: MA Experiment 20000478 PARAMETER Experiment Name: Zm_5mM_SA_P Parameter: Organism Value: Zea mays
  misc_feature: MA Experiment 20000478 PARAMETER Experiment Name: Zm_5mM_SA_P Parameter: Plant Line Value: 35A19
  misc_feature: MA Experiment 20000478 PARAMETER Experiment Name: Zm_5mM_SA_P Parameter: Timepoint (hr) Value: 72
  misc_feature: MA Experiment 20000478 PARAMETER Experiment Name: Zm_5mM_SA_P Parameter: Tissue Value: Aerial
  misc_feature: MA Experiment 20000478 PARAMETER Experiment Name: Zm_5mM_SA_P Parameter: Treatment Value: 5mM SA vs. No Treatment
  misc_feature: MA Experiment ID: 20000479 Result: Up-regulated in Transcription
  misc_feature: MA Experiment 20000479 PARAMETER Experiment Name: Zm_Drought_P Parameter: Age (day) Value: 10
  misc_feature: MA Experiment 20000479 PARAMETER Experiment Name: Zm_Drought_P Parameter: Organism Value: Zea mays
  misc_feature: MA Experiment 20000479 PARAMETER Experiment Name: Zm_Drought_P Parameter: Plant Line Value: 35A19
  misc_feature: MA Experiment 20000479 PARAMETER Experiment Name: Zm_Drought_P Parameter: Timepoint (hr) Value: 48
  misc_feature: MA Experiment 20000479 PARAMETER Experiment Name: Zm_Drought_P Parameter: Tissue Value: Aerial
  misc_feature: MA Experiment 20000479 PARAMETER Experiment Name: Zm_Drought_P Parameter: Treatment Value: Drought vs. No Drought
  misc_feature: MA Experiment ID: 20000480 Result: Up-regulated in Transcription
  misc_feature: MA Experiment 20000480 PARAMETER Experiment Name: Zm_Drought_P Parameter: Age (day) Value: 11
  misc_feature: MA Experiment 20000480 PARAMETER Experiment Name: Zm_Drought_P Parameter: Organism Value: Zea mays
  misc_feature: MA Experiment 20000480 PARAMETER Experiment Name: Zm_Drought_P Parameter: Plant Line Value: 35A19
  misc_feature: MA Experiment 20000480 PARAMETER Experiment Name: Zm_Drought_P Parameter: Timepoint (hr) Value: 72
  misc_feature: MA Experiment 20000480 PARAMETER Experiment Name: Zm_Drought_P Parameter: Tissue Value: Aerial
  misc_feature: MA Experiment 20000480 PARAMETER Experiment Name: Zm_Drought_P Parameter: Treatment Value: Drought vs. No Drought
  misc_feature: MA Experiment ID: 20000487 Result: Down-regulated in Transcription
  misc_feature: MA Experiment 20000487 PARAMETER Experiment Name: Zm_50mM_NH4NO3_L_to_H_P Parameter: Organism Value: Zea mays
  misc_feature: MA Experiment 20000487 PARAMETER Experiment Name: Zm_50mM_NH4NO3_L_to_H_P Parameter: Timepoint (hr) Value: 4
  misc_feature: MA Experiment 20000487 PARAMETER Experiment Name: Zm_50mM_NH4NO3_L_to_H_P Parameter: Tissue Value: Leaves
  misc_feature: MA Experiment 20000487 PARAMETER Experiment Name: Zm_50mM_NH4NO3_L_to_H_P Parameter: Treatment Value: 50mM NH4NO3 vs. 100mM Mannitol
  misc_feature: MA Experiment ID: 20000492 Result: Down-regulated in Transcription
  misc_feature: MA Experiment 20000492 PARAMETER Experiment Name: Zm_Hybrid_Seed_Dev_P Parameter: DAP Value: 12
  misc_feature: MA Experiment 20000492 PARAMETER Experiment Name: Zm_Hybrid_Seed_Dev_P Parameter: Organism Value: Zea mays
  misc_feature: MA Experiment 20000492 PARAMETER Experiment Name: Zm_Hybrid_Seed_Dev_P Parameter: Plant Line Value: 35A19
  misc_feature: MA Experiment 20000492 PARAMETER Experiment Name: Zm_Hybrid_Seed_Dev_P Parameter: Tissue Value: Fert Kernel vs. Unfert Floret
  misc_feature: MA Experiment ID: 20000533 Result: Up-regulated in Transcription
  misc_feature: MA Experiment 20000533 PARAMETER Experiment Name: Zm_0.001percent_MeJA_P Parameter: Age (day) Value: 11
  misc_feature: MA Experiment 20000533 PARAMETER Experiment Name: Zm_0.001percent_MeJA_P Parameter: Organism Value: Zea mays
  misc_feature: MA Experiment 20000533 PARAMETER Experiment Name: Zm_0.001percent_MeJA_P Parameter: Plant Line Value: 35A19
  misc_feature: MA Experiment 20000533 PARAMETER Experiment Name: Zm_0.001percent_MeJA_P Parameter: Timepoint (hr) Value: 72
  misc_feature: MA Experiment 20000533 PARAMETER Experiment Name: Zm_0.001percent_MeJA_P Parameter: Tissue Value: Aerial
  misc_feature: MA Experiment 20000533 PARAMETER Experiment Name: Zm_0.001percent_MeJA_P Parameter: Treatment Value: 0.001percent MeJA vs. No Treatment
  misc_feature: MA Experiment ID: 20000535 Result: Up-regulated in Transcription
  misc_feature: MA Experiment 20000535 PARAMETER Experiment Name: Zm_Hybrid_Seed_Dev_P Parameter: DAP Value: 30 vs. 12
  misc_feature: MA Experiment 20000535 PARAMETER Experiment Name: Zm_Hybrid_Seed_Dev_P Parameter: Organism Value: Zea mays
  misc_feature: MA Experiment 20000535 PARAMETER Experiment Name: Zm_Hybrid_Seed_Dev_P Parameter: Plant Line Value: 35A19
  misc_feature: MA Experiment 20000535 PARAMETER Experiment Name: Zm_Hybrid_Seed_Dev_P Parameter: Tissue Value: Embryo vs. Unfert Floret
  misc_feature: MA Experiment ID: 20000626 Result: Up-regulated in Transcription
  misc_feature: MA Experiment 20000626 PARAMETER Experiment Name: Zm_Herbicide-Treatments_P Parameter: Timepoint (hr) Value: 12
  misc_feature: MA Experiment 20000626 PARAMETER Experiment Name: Zm_Herbicide-Treatments_P Parameter: Tissue Value: Aerial
  misc_feature: MA Experiment 20000626 PARAMETER Experiment Name: Zm_Herbicide-Treatments_P Parameter: Treatment Value: Roundup vs. No Treatment
  misc_feature: MA Experiment ID: 20000630 Result: Up-regulated in Transcription
  misc_feature: MA Experiment 20000630 PARAMETER Experiment Name: Zm_Herbicide-Treatments_P Parameter: Timepoint (hr) Value: 4
  misc_feature: MA Experiment 20000630 PARAMETER Experiment Name: Zm_Herbicide-Treatments_P Parameter: Tissue Value: Aerial
  misc_feature: MA Experiment 20000630 PARAMETER Experiment Name: Zm_Herbicide-Treatments_P Parameter: Treatment Value: Roundup vs. No Treatment
atcatcagtagctagctgykcgaacgctttcagccgatcgagcaccatcgtcacagtcagtagtagccaagcatatttctttctccgagtgatttgcgctgagcgatcagttcatccagagcgagcggagctgagctgagctgagcgagcttgcgttgcttgagagaccctgctgccatggcttcccaccaggacaaggctagctaccaggccggcgagaccaaggcccgcaccgaggagaagaccgggcaggcggtgggggcgaccaaggacacggcgcagcacgccaaggaccgggcggcggacgcggcggggcacgcggcgggcaagggccaggacgccaaggaggccaccaagcagaaggcgtccgacaccggcagctacctgggcaagaagaccgacgaggccaagcacaaggccggcgagacgacggaggccaccaagcasaaggccggcgagacgacggaggccgccaagcagaaggcmgscgacgmcgayggaggccgccaagcagaaggccgscgagacgacggagacgaccaagcagaaggccggcgagacgacggaggccgccaggcagaaggcagccgacgccatggaggccgccaagcagaaggccgccgaggccgggcagtacgccaaggacaccgccgtctccggcaaggacaagtccggcggcgtcatccagcaggccactgagcaggtgaagagcgcggcggcggggcgcaaggacgcggtgatgagcacgctggggatgggcggggacaacaagcagggcgacgccaacaccaacaccaacaccaacaccaccaaggactcctctaccatcaccagggatcactagacgcgtgtatgcacacgcagcacttggtccgatcctgtcgtccgtgaccctgtttgcttgttcgcgagtccagtatgggtttgtgcatgttttcagtgtcatggtttccttttctacgaatttggtgttgtaattttgatttgcaggtacgttgctgtgttttttctgcgtcatcaagtgtctgtaaacgagtcgggcgggtttgagtgtcctttgttgtgataataaagttggtaaatcctaattaatatatagcatgcgactgtcttgct

SEQ ID NO: 15316 - protein, 173 aa, Zea mays subsp. mays
  peptide (1)..(173): Ceres Seq. ID no. 15220747
  misc_feature (28)..(105): Pfam Name: Late embryogenesis abundant protein Pfam Description: Late embryogenesis abundant protein
  misc_feature (1)..(151): Homolog of NCBI NO: 7387829 NR Description: Late embryogenesis abundant protein, group 3 (LEA)
  misc_feature (1)..(139): Homolog of NCBI NO: 7489493 NR Description: LEA protein - rice >gi|1486503|gb|AAC03364.1|
  misc_feature (1)..(108): Homolog of NCBI NO: 4105441 NR Description: group 3 LEA protein [Oryza sativa]
  misc_feature (1)..(139): Homolog of NCBI NO: 7489569 NR Description: protein LEA type 1 - rice
  misc_feature (1)..(153): Homolog of NCBI NO: 1076757 NR Description: WSI18 protein - rice >gi|537402|dbj|BAA05537.1|
  misc_feature (1)..(105): Homolog of NCBI NO: 4929080 NR Description: ABA-inducible protein WRAB1 [Triticum aestivum]
  misc_feature (1)..(152): Homolog of NCBI NO: 25989707 NR Description: LEA3 protein [Triticum aestivum]
  misc_feature (1)..(153): Homolog of NCBI NO: 7387828 NR Description: Late embryogenesis abundant protein, group 3
  misc_feature (1)..(153): Homolog of NCBI NO: 25989705 NR Description: LEA1 protein [Triticum aestivum]
  misc_feature (1)..(105): Homolog of NCBI NO: 33342178 NR Description: ABA inducible protein [Triticum aestivum]
  misc_feature (90)..(90): Xaa is any aa, unknown or other
  misc_feature (103)..(103): Xaa is any aa, unknown or other
  misc_feature (104)..(104): Xaa is any aa, unknown or other
  misc_feature (106)..(106): Xaa is any aa, unknown or other
  misc_feature (107)..(107): Xaa is any aa, unknown or other
  misc_feature (115)..(115): Xaa is any aa, unknown or other
MASHQDKASYQAGETKARTEEKTGQAVGATKDTAQHAKDRAADAAGHAAGKGQDAKEATKQKASDTGSYLGKKTDEAKHKAGETTEATKXKAGETTEAAKQKXXDXXGGRQAEGXRDDGDDQAEGRRDDGGRQAEGSRRHGGRQAEGRRGRAVRQGHRRLRQGQVRRRHPAGH

SEQ ID NO: 15317 - DNA, 546 bp, Zea mays subsp. mays
  misc_feature (1)..(546): Ceres Seq. ID no. 13633184
  misc_feature: MA Experiment ID: 20000535 Result: Down-regulated in Transcription
  misc_feature: MA Experiment 20000535 PARAMETER Experiment Name: Zm_Hybrid_Seed_Dev_P Parameter: DAP Value: 30 vs. 12
  misc_feature: MA Experiment 20000535 PARAMETER Experiment Name: Zm_Hybrid_Seed_Dev_P Parameter: Organism Value: Zea mays
  misc_feature: MA Experiment 20000535 PARAMETER Experiment Name: Zm_Hybrid_Seed_Dev_P Parameter: Plant Line Value: 35A19
  misc_feature: MA Experiment 20000535 PARAMETER Experiment Name: Zm_Hybrid_Seed_Dev_P Parameter: Tissue Value: Embryo vs. Unfert Floret
atcccaacattctcgttccaacttgaaattcacatccaaatcttctccttcaactatcaccatggccagcatcaaagtccacggagtccccatgtccaccgccaccatgcgcgttctcgccgctctttacgagaaggagctcgagttcgagttgatccccgtcgacatgagagccggcgctcacaagcaggagcctttcctttccctcaaccccttcggtcagatccctgctctccaagacggtgacttaactctattcgagtcacgagccatcacagagtacatagcggatgagtacagtgagaaaggcgagaagcttatgtgcccaggctgcaacaaagtcaaggcactcaccaaggtctggcttaacgttgaaggtcaacagtttgaccctatcgcctctaagatcgccttcgagcgtgtcttcaaaggcatgtttggcatgaccaccgatcctgccgctgtccaagatctcgaaggcaaagctcgtcagggtcttggatatctacgaggcgaggtctccaaatccgagttcctcgcttgtga

SEQ ID NO: 15318 - protein, 181 aa, Zea mays subsp. mays
  peptide (1)..(181): Ceres Seq. ID no. 13633185
  misc_feature (1)..(180): Homolog of NCBI NO: 30690772 NR Description: glutathione transferase, putative (GST6)
  misc_feature (21)..(180): Homolog of NCBI NO: 12643792 NR Description: Glutathione S-transferase 6 (GST class phi)
  misc_feature (21)..(180): Homolog of NCBI NO: 14532562 NR Description: At2g47730/F17A22.12 [Arabidopsis thaliana]
  misc_feature (21)..(180): Homolog of NCBI NO: 1402898 NR Description: gst6 [Arabidopsis thaliana]
  misc_feature (21)..(179): Homolog of NCBI NO: 7649155 NR Description: glutathione S-transferase [Euphorbia esula]
  misc_feature (23)..(179): Homolog of NCBI NO: 7434067 NR Description: glutathione transferase (EC 2.5.1.18), class-phi -
  misc_feature (24)..(179): Homolog of NCBI NO: 1170094 NR Description: Glutathione S-transferase (GST class-PHI) (25 kDa binding protein) >gi|860956|emb|CAA55039.1| glutathione
  misc_feature (23)..(179): Homolog of NCBI NO: 232202 NR Description: GLUTATHIONE S-TRANSFERASE PARB (GST CLASS-PHI)
  misc_feature (23)..(179): Homolog of NCBI NO: 1279588 NR Description: glutathione S-transferase [Nicotiana
  misc_feature (23)..(179): Homolog of NCBI NO: 417093 NR Description: GLUTATHIONE S-TRANSFERASE (GST CLASS-PHI)
SQHSRSNLKFTSKSSPSTITMASIKVHGVPMSTATMRVLAALYEKELEFELIPVDMRAGAHKQEPFLSLNPFGQIPALQDGDLTLFESRAITEYIADEYSEKGEKLMCPGCNKVKALTKVWLNVEGQQFDPIASKIAFERVFKGMFGMTTDPAAVQDLEGKARQGLGYLRGEVSKSEFLAC

SEQ ID NO: 15319 - protein, 161 aa, Zea mays subsp. mays
  peptide (1)..(161): Ceres Seq. ID no. 13633186
  misc_feature (1)..(160): Homolog of NCBI NO: 30690772 NR Description: glutathione transferase, putative (GST6)
  misc_feature (1)..(160): Homolog of NCBI NO: 12643792 NR Description: Glutathione S-transferase 6 (GST class phi)
  misc_feature (1)..(160): Homolog of NCBI NO: 14532562 NR Description: At2g47730/F17A22.12 [Arabidopsis thaliana]
  misc_feature (1)..(160): Homolog of NCBI NO: 1402898 NR Description: gst6 [Arabidopsis thaliana]
  misc_feature (1)..(159): Homolog of NCBI NO: 7649155 NR Description: glutathione S-transferase [Euphorbia esula]
  misc_feature (3)..(159): Homolog of NCBI NO: 7434067 NR Description: glutathione transferase (EC 2.5.1.18), class-phi -
  misc_feature (4)..(159): Homolog of NCBI NO: 1170094 NR Description: Glutathione S-transferase (GST class-PHI) (25 kDa binding protein) >gi|860956|emb|CAA55039.1| glutathione
  misc_feature (3)..(159): Homolog of NCBI NO: 232202 NR Description: GLUTATHIONE S-TRANSFERASE PARB (GST CLASS-PHI)
  misc_feature (3)..(159): Homolog of NCBI NO: 1279588 NR Description: glutathione S-transferase [Nicotiana
  misc_feature (3)..(159): Homolog of NCBI NO: 417093 NR Description: GLUTATHIONE S-TRANSFERASE (GST CLASS-PHI)
MASIKVHGVPMSTATMRVLAALYEKELEFELIPVDMRAGAHKQEPFLSLNPFGQIPALQDGDLTLFESRAITEYIADEYSEKGEKLMCPGCNKVKALTKVWLNVEGQQFDPIASKIAFERVFKGMFGMTTDPAAVQDLEGKARQGLGYLRGEVSKSEFLAC

SEQ ID NO: 15320 - protein, 151 aa, Zea mays subsp. mays
  peptide (1)..(151): Ceres Seq. ID no. 13633187
  misc_feature (1)..(150): Homolog of NCBI NO: 30690772 NR Description: glutathione transferase, putative (GST6)
  misc_feature (1)..(150): Homolog of NCBI NO: 12643792 NR Description: Glutathione S-transferase 6 (GST class phi)
  misc_feature (1)..(150): Homolog of NCBI NO: 14532562 NR Description: At2g47730/F17A22.12 [Arabidopsis thaliana]
  misc_feature (1)..(150): Homolog of NCBI NO: 1402898 NR Description: gst6 [Arabidopsis thaliana]
  misc_feature (1)..(149): Homolog of NCBI NO: 7649155 NR Description: glutathione S-transferase [Euphorbia esula]
  misc_feature (1)..(149): Homolog of NCBI NO: 7434067 NR Description: glutathione transferase (EC 2.5.1.18), class-phi -
  misc_feature (1)..(149): Homolog of NCBI NO: 1170094 NR Description: Glutathione S-transferase (GST class-PHI) (25 kDa binding protein) >gi|860956|emb|CAA55039.1| glutathione
  misc_feature (1)..(149): Homolog of NCBI NO: 232202 NR Description: GLUTATHIONE S-TRANSFERASE PARB (GST CLASS-PHI)
  misc_feature (1)..(149): Homolog of NCBI NO: 1279588 NR Description: glutathione S-transferase [Nicotiana
  misc_feature (1)..(149): Homolog of NCBI NO: 417093 NR Description: GLUTATHIONE S-TRANSFERASE (GST CLASS-PHI)
MSTATMRVLAALYEKELEFELIPVDMRAGAHKQEPFLSLNPFGQIPALQDGDLTLFESRAITEYIADEYSEKGEKLMCPGCNKVKALTKVWLNVEGQQFDPIASKIAFERVFKGMFGMTTDPAAVQDLEGKARQGLGYLRGEVSKSEFLAC

SEQ ID NO: 15321 - DNA, 556 bp, Zea mays subsp. mays
  misc_feature (1)..(556): Ceres Seq. ID no. 13628901
  misc_feature: MA Experiment ID: 108522 Result: Up-regulated in Transcription
  misc_feature: MA Experiment 108522 PARAMETER Experiment Name: Zm_42deg_Heat_P Parameter: Age (day) Value: 8
  misc_feature: MA Experiment 108522 PARAMETER Experiment Name: Zm_42deg_Heat_P Parameter: Organism Value: Zea mays
  misc_feature: MA Experiment 108522 PARAMETER Experiment Name: Zm_42deg_Heat_P Parameter: Plant Line Value: 35A19
  misc_feature: MA Experiment 108522 PARAMETER Experiment Name: Zm_42deg_Heat_P Parameter: Temperature (deg C) Value: 42 vs. 22
  misc_feature: MA Experiment 108522 PARAMETER Experiment Name: Zm_42deg_Heat_P Parameter: Timepoint (hr) Value: 1
  misc_feature: MA Experiment 108522 PARAMETER Experiment Name: Zm_42deg_Heat_P Parameter: Tissue Value: Aerial
aaaaaaaaaagcacacaccacgcagggcacaaggagaagaagaggggaagaaatattcttcccgtcgaaagacggagagaggaaaagggacaagggcaaggcaagagagaggcgtcgtcgtttgatctgctgccggagtgcgaagaggaagaggaagaggagcgccggagttgtaaagatgttcctggtggactggttctatggggtgctggcatcgcttgggctgtggcagaaggaggctaagatcctcttccttggcctcgacaacgccggcaagaccaccctcctccacatgctgaaggacgagcggctcgtacagcaccagccgacgcaataccccacgtcagaagagttgagcatcggcaggatcaagttcaaggcgttcgaccttgggggccaccagatcgcccgccgcgtctggaaggactactacgccaaggttgatgctgttgtgtacttggtggatgctgttgacaaggaacgttttgccgagtcgaagaaggagctcgatgcgcttcttgcagatgactcccttgcaaacgttcctttcctcata

SEQ ID NO: 15322 - protein, 185 aa, Zea mays subsp. mays
  peptide (1)..(185): Ceres Seq. ID no. 13628902
  misc_feature (64)..(184): Pfam Name: ADP-ribosylation factor family Pfam Description: ADP-ribosylation factor family
  misc_feature (60)..(184): Homolog of NCBI NO: 34902852 NR Description: unnamed protein product [Oryza sativa (japonica group)] >gi|5922611|dbj|BAA84612.1| unnamed protein product
  misc_feature (60)..(184): Homolog of NCBI NO: 7438456 NR Description: GTP-binding protein (clone Np50SAR) -
  misc_feature (60)..(184): Homolog of NCBI NO: 15228793 NR Description: GTP-binding protein SAR1A, putative [Arabidopsis >gi|17979297|gb|AAL49874.1| putative Sar1 GTP binding protein thaliana] >gi|21436475|gb|AAM51438.1| putative Sar1 GTP binding
  misc_feature (60)..(184): Homolog of NCBI NO: 25294172 NR Description: ras-like small monomeric GTP-binding protein
  misc_feature (60)..(184): Homolog of NCBI NO: 15235226 NR Description: GTP-binding protein SAR1A [Arabidopsis thaliana]
  misc_feature (60)..(184): Homolog of NCBI NO: 25294173 NR Description: small GTP-binding protein Sar1BNt [imported] -
  misc_feature (60)..(184): Homolog of NCBI NO: 3334321 NR Description: GTP-binding protein SAR1A
  misc_feature (60)..(184): Homolog of NCBI NO: 34894960 NR Description: putative GTP-binding protein [Oryza sativa
  misc_feature (60)..(184): Homolog of NCBI NO: 1549222 NR Description: NtSar1 protein [Nicotiana tabacum]
  misc_feature (60)..(184): Homolog of NCBI NO: 3334322 NR Description: GTP-binding protein SAR1B
KKKAHTTQGTRRRRGEEIFFPSKDGERKRDKGKARERRRRLICCRSAKRKRKRSAGVVKMFLVDWFYGVLASLGLWQKEAKILFLGLDNAGKTTLLHMLKDERLVQHQPTQYPTSEELSIGRIKFKAFDLGGHQIARRVWKDYYAKVDAVVYLVDAVDKERFAESKKELDALLADDSLANVPFLI

SEQ ID NO: 15323 - protein, 126 aa, Zea mays subsp. mays
  peptide (1)..(126): Ceres Seq. ID no. 13628903
  misc_feature (5)..(125): Pfam Name: ADP-ribosylation factor family Pfam Description: ADP-ribosylation factor family
  misc_feature (1)..(125): Homolog of NCBI NO: 34902852 NR Description: unnamed protein product [Oryza sativa (japonica group)] >gi|5922611|dbj|BAA84612.1| unnamed protein product
  misc_feature (1)..(125): Homolog of NCBI NO: 7438456 NR Description: GTP-binding protein (clone Np50SAR) -
  misc_feature (1)..(125): Homolog of NCBI NO: 15228793 NR Description: GTP-binding protein SAR1A, putative [Arabidopsis >gi|17979297|gb|AAL49874.1| putative Sar1 GTP binding protein thaliana] >gi|21436475|gb|AAM51438.1| putative Sar1 GTP binding
  misc_feature (1)..(125): Homolog of NCBI NO: 25294172 NR Description: ras-like small monomeric GTP-binding protein
  misc_feature (1)..(125): Homolog of NCBI NO: 15235226 NR Description: GTP-binding protein SAR1A [Arabidopsis thaliana]
  misc_feature (1)..(125): Homolog of NCBI NO: 25294173 NR Description: small GTP-binding protein Sar1BNt [imported] -
  misc_feature (1)..(125): Homolog of NCBI NO: 3334321 NR Description: GTP-binding protein SAR1A
  misc_feature (1)..(125): Homolog of NCBI NO: 34894960 NR Description: putative GTP-binding protein [Oryza sativa
  misc_feature (1)..(125): Homolog of NCBI NO: 1549222 NR Description: NtSar1 protein [Nicotiana tabacum]
  misc_feature (1)..(125): Homolog of NCBI NO: 3334322 NR Description: GTP-binding protein SAR1B
MFLVDWFYGVLASLGLWQKEAKILFLGLDNAGKTTLLHMLKDERLVQHQPTQYPTSEELSIGRIKFKAFDLGGHQIARRVWKDYYAKVDAVVYLVDAVDKERFAESKKELDALLADDSLANVPFLI

SEQ ID NO: 15324 - DNA, 427 bp, Zea mays subsp. mays
  misc_feature (1)..(427): Ceres Seq. ID no. 13637160
  misc_feature: MA Experiment ID: 20000627 Result: Down-regulated in Transcription
  misc_feature: MA Experiment 20000627 PARAMETER Experiment Name: Zm_Herbicide-Treatments_P Parameter: Timepoint (hr) Value: 12
  misc_feature: MA Experiment 20000627 PARAMETER Experiment Name: Zm_Herbicide-Treatments_P Parameter: Tissue Value: Aerial
  misc_feature: MA Experiment 20000627 PARAMETER Experiment Name: Zm_Herbicide-Treatments_P Parameter: Treatment Value: Finale vs. No Treatment
  misc_feature: MA Experiment ID: 20000629 Result: Down-regulated in Transcription
  misc_feature: MA Experiment 20000629 PARAMETER Experiment Name: Zm_Herbicide-Treatments_P Parameter: Timepoint (hr) Value: 12
  misc_feature: MA Experiment 20000629 PARAMETER Experiment Name: Zm_Herbicide-Treatments_P Parameter: Tissue Value: Aerial
  misc_feature: MA Experiment 20000629 PARAMETER Experiment Name: Zm_Herbicide-Treatments_P Parameter: Treatment Value: Trimec vs. No Treatment
atcccaaaacctaaatcccctcttcgtttccgagaaaaccaaagaaaaagagagagagactcacgatggcaccaaaggcaggaaagaaaccagcagagaagaaacccgccgccgcagagaagccagtggaggaagagaaggtagcggagaaagcaccagctgagaagaagcccaaggccggaaagaagctacctaaggaagccatcggcgcgaccgacaagaagaagaagcgcagcaagaagaacatcgagacgtacaagatatacatcttcaaggttcttaagcaagtccacccagacatcggaatctcgagtaaggccatggggatcatgaacagcttcatcaacgacatcttcgagaagcttgctcaggaagcgtcgaaactcgcaaggtacaacaagaagccgaccattacttctcgcgagat

SEQ ID NO: 15325 - protein, 120 aa, Zea mays subsp. mays
  peptide (1)..(120): Ceres Seq. ID no. 13637161
  misc_feature (32)..(119): Pfam Name: Core histone H2A/H2B/H3/H4 Pfam Description: Core histone H2A/H2B/H3/H4
  misc_feature (1)..(119): Homolog of NCBI NO: 15226943 NR Description: histone H2B, putative [Arabidopsis thaliana]
  misc_feature (1)..(119): Homolog of NCBI NO: 15238563 NR Description: histone H2B [Arabidopsis thaliana] Histone H2B >gi|9757912|dbj|BAB08359.1| contains similarity to H2B~gene_id:MMN10.15 [Arabidopsis thaliana]
  misc_feature (1)..(119): Homolog of NCBI NO: 21617908 NR Description: histone H2B [Arabidopsis thaliana]
  misc_feature (1)..(119): Homolog of NCBI NO: 21554180 NR Description: histone H2B-like protein [Arabidopsis thaliana]
  misc_feature (1)..(119): Homolog of NCBI NO: 15223016 NR Description: histone H2B, putative [Arabidopsis thaliana]
  misc_feature (1)..(119): Homolog of NCBI NO: 15231304 NR Description: histone H2B [Arabidopsis thaliana]
  misc_feature (1)..(119): Homolog of NCBI NO: 7387726 NR Description: Histone H2B >gi|7439759|pir||T09722 histone H2B1 upland cotton >gi|2558962|gb|AAB97163.1| histone H2B1 [Gossypium
  misc_feature (1)..(119): Homolog of NCBI NO: 15231313 NR Description: histone H2B, putative [Arabidopsis thaliana]
  misc_feature (1)..(119): Homolog of NCBI NO: 7387727 NR Description: Histone H2B (CaH2B) >gi|7439757|pir||T08063 H2B - pepper >gi|2746719|gb|AAB94923.1| histone H2B [Capsicum
  misc_feature (1)..(119): Homolog of NCBI NO: 7439756 NR Description: histone H2B - tomato >gi|3021489|emb|CAA12233.1|
MAPKAGKKPAEKKPAAAEKPVEEEKVAEKAPAEKKPKAGKKLPKEAIGATDKKKKRSKKNIETYKIYIFKVLKQVHPDIGISSKAMGIMNSFINDIFEKLAQEASKLARYNKKPTITSRE

SEQ ID NO: 15326 - DNA, 386 bp, Zea mays subsp. mays
  misc_feature (1)..(386): Ceres Seq. ID no. 13633461
  misc_feature: MA Experiment ID: 108504 Result: Up-regulated in Transcription
  misc_feature: MA Experiment 108504 PARAMETER Experiment Name: Zm_Drought_P Parameter: Age (day) Value: 8
  misc_feature: MA Experiment 108504 PARAMETER Experiment Name: Zm_Drought_P Parameter: Organism Value: Zea mays
  misc_feature: MA Experiment 108504 PARAMETER Experiment Name: Zm_Drought_P Parameter: Plant Line Value: 35A19
  misc_feature: MA Experiment 108504 PARAMETER Experiment Name: Zm_Drought_P Parameter: Timepoint (hr) Value: 12
  misc_feature: MA Experiment 108504 PARAMETER Experiment Name: Zm_Drought_P Parameter: Tissue Value: Aerial
  misc_feature: MA Experiment 108504 PARAMETER Experiment Name: Zm_Drought_P Parameter: Treatment Value: Drought vs. No Drought
  misc_feature: MA Experiment ID: 108687 Result: Up-regulated in Transcription
  misc_feature: MA Experiment 108687 PARAMETER Experiment Name: Zm_Embryos-Flowers__P Parameter: Tissue Value: Embryo vs. Aerial+
  misc_feature: MA Experiment ID: 108689 Result: Up-regulated in Transcription
  misc_feature: MA Experiment 108689 PARAMETER Experiment Name: Zm_Drought_Roots_P Parameter: Age (day) Value: 9
  misc_feature: MA Experiment 108689 PARAMETER Experiment Name: Zm_Drought_Roots_P Parameter: Organism Value: Zea mays
  misc_feature: MA Experiment 108689 PARAMETER Experiment Name: Zm_Drought_Roots_P Parameter: Plant Line Value: 35A19
  misc_feature: MA Experiment 108689 PARAMETER Experiment Name: Zm_Drought_Roots_P Parameter: Timepoint (hr) Value: 24
  misc_feature: MA Experiment 108689 PARAMETER Experiment Name: Zm_Drought_Roots_P Parameter: Tissue Value: Roots
  misc_feature: MA Experiment 108689 PARAMETER Experiment Name: Zm_Drought_Roots_P Parameter: Treatment Value: Drought vs. No Drought
  misc_feature: MA Experiment ID: 20000535 Result: Up-regulated in Transcription
  misc_feature: MA Experiment 20000535 PARAMETER Experiment Name: Zm_Hybrid_Seed_Dev_P Parameter: DAP Value: 30 vs. 12
  misc_feature: MA Experiment 20000535 PARAMETER Experiment Name: Zm_Hybrid_Seed_Dev_P Parameter: Organism Value: Zea mays
  misc_feature: MA Experiment 20000535 PARAMETER Experiment Name: Zm_Hybrid_Seed_Dev_P Parameter: Plant Line Value: 35A19
  misc_feature: MA Experiment 20000535 PARAMETER Experiment Name: Zm_Hybrid_Seed_Dev_P Parameter: Tissue Value: Embryo vs. Unfert Floret
acaacaacgagttaacgaaagccttttatccaagctcaggaaagctcacagtttcgttggatccaatcttagttttatccaagctcagcaatggcttctcgtcagcagcatcctactagctaccacgccggcgagacaaaggcccgtgccgaggagaagacgggtcaagtgatgnnngcggcgcaggagaaaggcagggaggccaagcacaaggcgtccgacgccgccgaccgcgccatggggatgggccacgaccccagggaggcgaccagggagaacgcgcgcgccgccgcgaaccgaatcatggggatgggccacgacgtcgctaagacggccaaggacagggagtagcgggtcaaggacgcggcctccggtgccgatgtccg

SEQ ID NO: 15327 - protein, 86 aa, Zea mays subsp. mays
  peptide (1)..(86): Ceres Seq. ID no. 13633462
  misc_feature (31)..(86): Pfam Name: Late embryogenesis abundant protein Pfam Description: Late embryogenesis abundant protein
  misc_feature (1)..(85): Homolog of NCBI NO: 20126724 NR Description: late embryogenesis-abundant protein [Brassica
  misc_feature (1)..(85): Homolog of NCBI NO: 20126722 NR Description: late embryogenesis-abundant protein [Brassica
  misc_feature (1)..(86): Homolog of NCBI NO: 34910364 NR Description: WSI18 protein [Oryza sativa (japonica
  misc_feature (1)..(86): Homolog of NCBI NO: 7489493 NR Description: LEA protein - rice >gi|1486503|gb|AAC03364.1|
  misc_feature (1)..(85): Homolog of NCBI NO: 7489569 NR Description: protein LEA type 1 - rice
  misc_feature (1)..(80): Homolog of NCBI NO: 7387829 NR Description: Late embryogenesis abundant protein, group 3 (LEA)
  misc_feature (1)..(86): Homolog of NCBI NO: 4105441 NR Description: group 3 LEA protein [Oryza sativa]
  misc_feature (1)..(86): Homolog of NCBI NO: 1076757 NR Description: WSI18 protein - rice >gi|537402|dbj|BAA05537.1|
  misc_feature (1)..(85): Homolog of NCBI NO: 1592677 NR Description: LEA76 homologue type2 [Arabidopsis thaliana]
  misc_feature (1)..(85): Homolog of NCBI NO: 15232660 NR Description: late embryogenesis abundant (LEA) protein, [Arabidopsis thaliana] >gi|11994339|dbj|BAB02298.1| embryonic
  misc_feature (29)..(29): Xaa is any aa, unknown or other
MASRQQHPTSYHAGETKARAEEKTGQVMXAAQEKGREAKHKASDAADRAMGMGHDPREATRENARAAANRIMGMGHDVAKTAKDRE

SEQ ID NO: 15328 - protein, 59 aa, Zea mays subsp. mays
  peptide (1)..(59): Ceres Seq. ID no. 13633463
  misc_feature (4)..(59): Pfam Name: Late embryogenesis abundant protein Pfam Description: Late embryogenesis abundant protein
  misc_feature (1)..(59): Homolog of NCBI NO: 34910364 NR Description: WSI18 protein [Oryza sativa (japonica
  misc_feature (1)..(59): Homolog of NCBI NO: 1076757 NR Description: WSI18 protein - rice >gi|537402|dbj|BAA05537.1|
  misc_feature (1)..(59): Homolog of NCBI NO: 7489493 NR Description: LEA protein - rice >gi|1486503|gb|AAC03364.1|
  misc_feature (1)..(59): Homolog of NCBI NO: 4105441 NR Description: group 3 LEA protein [Oryza sativa]
  misc_feature (1)..(58): Homolog of NCBI NO: 7489569 NR Description: protein LEA type 1 - rice
  misc_feature (1)..(53): Homolog of NCBI NO: 7387829 NR Description: Late embryogenesis abundant protein, group 3 (LEA)
  misc_feature (1)..(58): Homolog of NCBI NO: 20126724 NR Description: late embryogenesis-abundant protein [Brassica
  misc_feature (1)..(58): Homolog of NCBI NO: 20126722 NR Description: late embryogenesis-abundant protein [Brassica
  misc_feature (1)..(58): Homolog of NCBI NO: 1592677 NR Description: LEA76 homologue type2 [Arabidopsis thaliana]
  misc_feature (1)..(58): Homolog of NCBI NO: 15232660 NR Description: late embryogenesis abundant (LEA) protein, [Arabidopsis thaliana] >gi|11994339|dbj|BAB02298.1| embryonic
  misc_feature (2)..(2): Xaa is any aa, unknown or other
MXAAQEKGREAKHKASDAADRAMGMGHDPREATRENARAAANRIMGMGHDVAKTAKDRE

SEQ ID NO: 15329 - protein, 56 aa, Zea mays subsp. mays
  peptide (1)..(56): Ceres Seq. ID no. 13633464
QQRVNESLLSKLRKAHSFVGSNLSFIQAQQWLLVSSILLATTPARQRPVPRRRRVK

SEQ ID NO: 15330 - DNA, 1628 bp, Zea mays subsp. mays; identical to SEQ ID NO: 5721
  misc_feature (1)..(1628): Ceres Seq. ID no. 13636255
  misc_feature: MA Experiment ID: 108528 Result: Down-regulated in Transcription
  misc_feature: MA Experiment 108528 PARAMETER Experiment Name: Zm_Imbibed_Seeds_P Parameter: Age (day) Value: 5 vs. 2
  misc_feature: MA Experiment 108528 PARAMETER Experiment Name: Zm_Imbibed_Seeds_P Parameter: Organism Value: Zea mays
  misc_feature: MA Experiment 108528 PARAMETER Experiment Name: Zm_Imbibed_Seeds_P Parameter: Plant Line Value: 35A19
  misc_feature: MA Experiment 108528 PARAMETER Experiment Name: Zm_Imbibed_Seeds_P Parameter: Tissue Value: Aerial vs. Embryo
  misc_feature: MA Experiment ID: 108530 Result: Down-regulated in Transcription
  misc_feature: MA Experiment 108530 PARAMETER Experiment Name: Zm_Imbibed_Seeds_P Parameter: Age (day) Value: 6 vs. 2
  misc_feature: MA Experiment 108530 PARAMETER Experiment Name: Zm_Imbibed_Seeds_P Parameter: Organism Value: Zea mays
  misc_feature: MA Experiment 108530 PARAMETER Experiment Name: Zm_Imbibed_Seeds_P Parameter: Plant Line Value: 35A19
  misc_feature: MA Experiment 108530 PARAMETER Experiment Name: Zm_Imbibed_Seeds_P Parameter: Tissue Value: Aerial vs. Embryo
  misc_feature: MA Experiment ID: 20000492 Result: Up-regulated in Transcription
  misc_feature: MA Experiment 20000492 PARAMETER Experiment Name: Zm_Hybrid_Seed_Dev_P Parameter: DAP Value: 12
  misc_feature: MA Experiment 20000492 PARAMETER Experiment Name: Zm_Hybrid_Seed_Dev_P Parameter: Organism Value: Zea mays
  misc_feature: MA Experiment 20000492 PARAMETER Experiment Name: Zm_Hybrid_Seed_Dev_P Parameter: Plant Line Value: 35A19
  misc_feature: MA Experiment 20000492 PARAMETER Experiment Name: Zm_Hybrid_Seed_Dev_P Parameter: Tissue Value: Fert Kernel vs. Unfert Floret

SEQ ID NO: 15331 - protein, 270 aa, Zea mays subsp. mays; identical to SEQ ID NO: 5722
  peptide (1)..(270): Ceres Seq. ID no. 13636256
  misc_feature (108)..(141): Pfam Name: TPR Domain Pfam Description: TPR Domain
  misc_feature (108)..(141): Pfam Name: TPR Domain Pfam Description: TPR Domain
  misc_feature (1)..(256): Homolog of NCBI NO: 18397936 NR Description: cyclophilin-40 [Arabidopsis thaliana]
  misc_feature (1)..(244): Homolog of NCBI NO: 25411671 NR Description: hypothetical protein At2g15790 [imported] -
  misc_feature (1)..(256): Homolog of NCBI NO: 34857103 NR Description: similar to peptidylprolyl isomerase D
  misc_feature (1)..(256): Homolog of NCBI NO: 13385854 NR Description: peptidylprolyl isomerase D (cyclophilin D) [Mus
  misc_feature (1)..(256): Homolog of NCBI NO: 27806463 NR Description: peptidylprolyl isomerase D (cyclophilin D) [Bos
  misc_feature (1)..(244): Homolog of NCBI NO: 25411671 NR Description: hypothetical protein At2g15790 [imported] -
  misc_feature (1)..(256): Homolog of NCBI NO: 13385854 NR Description: peptidylprolyl isomerase D (cyclophilin D) [Mus
  misc_feature (1)..(258): Homolog of NCBI NO: 40741736 NR Description: hypothetical protein AN4583.2 [Aspergillus
  misc_feature (1)..(256): Homolog of NCBI NO: 32405118 NR Description: hypothetical protein ( (AJ292563) peptidyl-prolyl
  misc_feature (1)..(256): Homolog of NCBI NO: 38174405 NR Description: Unknown (protein for MGC:75854) [Silurana
  misc_feature (1)..(256): Homolog of NCBI NO: 4826932 NR Description: peptidylprolyl isomerase D (cyclophilin D);
  misc_feature (1)..(256): Homolog of NCBI NO: 27687349 NR Description: similar to peptidylprolyl isomerase D
  misc_feature (1)..(256): Homolog of NCBI NO: 27806463 NR Description: peptidylprolyl isomerase D (cyclophilin D) [Bos
  misc_feature (1)..(256): Homolog of NCBI NO: 34857103 NR Description: similar to peptidylprolyl isomerase D
  misc_feature (1)..(256): Homolog of NCBI NO: 18397936 NR Description: cyclophilin-40 [Arabidopsis thaliana]
  misc_feature (1)..(256): Homolog of NCBI NO: 27687349 NR Description: similar to peptidylprolyl isomerase D
  misc_feature (1)..(256): Homolog of NCBI NO: 4826932 NR Description: peptidylprolyl isomerase D (cyclophilin D);
  misc_feature (1)..(256): Homolog of NCBI NO: 38174405 NR Description: Unknown (protein for MGC:75854) [Silurana
  misc_feature (1)..(256): Homolog of NCBI NO: 32405118 NR Description: hypothetical protein ( (AJ292563) peptidyl-prolyl
  misc_feature (1)..(258): Homolog of NCBI NO: 40741736 NR Description: hypothetical protein AN4583.2 [Aspergillus

SEQ ID NO: 15332 - protein, 267 aa, Zea mays subsp. mays; identical to SEQ ID NO: 5723
  peptide (1)..(267): Ceres Seq. ID no. 13636257
  misc_feature (105)..(138): Pfam Name: TPR Domain Pfam Description: TPR Domain
  misc_feature (105)..(138): Pfam Name: TPR Domain Pfam Description: TPR Domain
  misc_feature (1)..(253): Homolog of NCBI NO: 18397936 NR Description: cyclophilin-40 [Arabidopsis thaliana]
  misc_feature (1)..(241): Homolog of NCBI NO: 25411671 NR Description: hypothetical protein At2g15790 [imported] -
  misc_feature (1)..(253): Homolog of NCBI NO: 34857103 NR Description: similar to peptidylprolyl isomerase D
  misc_feature (1)..(253): Homolog of NCBI NO: 13385854 NR Description: peptidylprolyl isomerase D (cyclophilin D) [Mus
  misc_feature (1)..(253): Homolog of NCBI NO: 27806463 NR Description: peptidylprolyl isomerase D (cyclophilin D) [Bos
  misc_feature (1)..(241): Homolog of NCBI NO: 25411671 NR Description: hypothetical protein At2g15790 [imported] -
  misc_feature (1)..(253): Homolog of NCBI NO: 13385854 NR Description: peptidylprolyl isomerase D (cyclophilin D) [Mus
  misc_feature (1)..(255): Homolog of NCBI NO: 40741736 NR Description: hypothetical protein AN4583.2 [Aspergillus
  misc_feature (1)..(253): Homolog of NCBI NO: 32405118 NR Description: hypothetical protein ( (AJ292563) peptidyl-prolyl
  misc_feature (1)..(253): Homolog of NCBI NO: 38174405 NR Description: Unknown (protein for MGC:75854) [Silurana
  misc_feature (1)..(253): Homolog of NCBI NO: 4826932 NR Description: peptidylprolyl isomerase D (cyclophilin D);
  misc_feature (1)..(253): Homolog of NCBI NO: 27687349 NR Description: similar to peptidylprolyl isomerase D
  misc_feature (1)..(253): Homolog of NCBI NO: 27806463 NR Description: peptidylprolyl isomerase D (cyclophilin D) [Bos
  misc_feature (1)..(253): Homolog of NCBI NO: 34857103 NR Description: similar to peptidylprolyl isomerase D
  misc_feature (1)..(253): Homolog of NCBI NO: 18397936 NR Description: cyclophilin-40 [Arabidopsis thaliana]
  misc_feature (1)..(253): Homolog of NCBI NO: 27687349 NR Description: similar to peptidylprolyl isomerase D
  misc_feature (1)..(253): Homolog of NCBI NO: 4826932 NR Description: peptidylprolyl isomerase D (cyclophilin D);
  misc_feature (1)..(253): Homolog of NCBI NO: 38174405 NR Description: Unknown (protein for MGC:75854) [Silurana
  misc_feature (1)..(253): Homolog of NCBI NO: 32405118 NR Description: hypothetical protein ( (AJ292563) peptidyl-prolyl
  misc_feature (1)..(255): Homolog of NCBI NO: 40741736 NR Description: hypothetical protein AN4583.2 [Aspergillus

SEQ ID NO: 15333 - protein, 234 aa, Zea mays subsp. mays; identical to SEQ ID NO: 5724
  peptide (1)..(234): Ceres Seq. ID no. 13636258
  misc_feature (72)..(105): Pfam Name: TPR Domain Pfam Description: TPR Domain
  misc_feature (72)..(105): Pfam Name: TPR Domain Pfam Description: TPR Domain
  misc_feature (1)..(220): Homolog of NCBI NO: 18397936 NR Description: cyclophilin-40 [Arabidopsis thaliana]
  misc_feature (1)..(208): Homolog of NCBI NO: 25411671 NR Description: hypothetical protein At2g15790 [imported] -
  misc_feature (1)..(220): Homolog of NCBI NO: 34857103 NR Description: similar to peptidylprolyl isomerase D
  misc_feature (1)..(220): Homolog of NCBI NO: 13385854 NR Description: peptidylprolyl isomerase D (cyclophilin D) [Mus
  misc_feature (1)..(220): Homolog of NCBI NO: 27806463 NR Description: peptidylprolyl isomerase D (cyclophilin D) [Bos
  misc_feature (1)..(208): Homolog of NCBI NO: 25411671 NR Description: hypothetical protein At2g15790 [imported] -
  misc_feature (1)..(220): Homolog of NCBI NO: 13385854 NR Description: peptidylprolyl isomerase D (cyclophilin D) [Mus
  misc_feature (1)..(222): Homolog of NCBI NO: 40741736 NR Description: hypothetical protein AN4583.2 [Aspergillus
  misc_feature (1)..(220): Homolog of NCBI NO: 32405118 NR Description: hypothetical protein ( (AJ292563) peptidyl-prolyl
  misc_feature (1)..(220): Homolog of NCBI NO: 38174405 NR Description: Unknown (protein for MGC:75854) [Silurana
  misc_feature (1)..(220): Homolog of NCBI NO: 4826932 NR Description: peptidylprolyl isomerase D (cyclophilin D);
  misc_feature (1)..(220): Homolog of NCBI NO: 27687349 NR Description: similar to peptidylprolyl isomerase D
  misc_feature (1)..(220): Homolog of NCBI NO: 27806463 NR Description: peptidylprolyl isomerase D (cyclophilin D) [Bos
  misc_feature (1)..(220): Homolog of NCBI NO: 34857103 NR Description: similar to peptidylprolyl isomerase D
  misc_feature (1)..(220): Homolog of NCBI NO: 18397936 NR Description: cyclophilin-40 [Arabidopsis thaliana]
  misc_feature (1)..(220): Homolog of NCBI NO: 27687349 NR Description: similar to peptidylprolyl isomerase D
  misc_feature (1)..(220): Homolog of NCBI NO: 4826932 NR Description: peptidylprolyl isomerase D (cyclophilin D);
  misc_feature (1)..(220): Homolog of NCBI NO: 38174405 NR Description: Unknown (protein for MGC:75854) [Silurana
  misc_feature (1)..(220): Homolog of NCBI NO: 32405118 NR Description: hypothetical protein ( (AJ292563) peptidyl-prolyl
  misc_feature (1)..(222): Homolog of NCBI NO: 40741736 NR Description: hypothetical protein AN4583.2 [Aspergillus

SEQ ID NO: 15334 - DNA, 1733 bp, Zea mays subsp. mays
  misc_feature (1)..(1733): Ceres Seq. ID no. 15176870
  misc_feature: MA Experiment ID: 108515 Result: Down-regulated in Transcription
  misc_feature: MA Experiment 108515 PARAMETER Experiment Name: Zm_2mM_SA_P Parameter: Age (day) Value: 8
  misc_feature: MA Experiment 108515 PARAMETER Experiment Name: Zm_2mM_SA_P Parameter: Organism Value: Zea mays
  misc_feature: MA Experiment 108515 PARAMETER Experiment Name: Zm_2mM_SA_P Parameter: Plant Line Value: 35A19
  misc_feature: MA Experiment 108515 PARAMETER Experiment Name: Zm_2mM_SA_P Parameter: Timepoint (hr) Value: 12
  misc_feature: MA Experiment 108515 PARAMETER Experiment Name: Zm_2mM_SA_P Parameter: Tissue Value: Aerial
  misc_feature: MA Experiment 108515 PARAMETER Experiment Name: Zm_2mM_SA_P Parameter: Treatment Value: 2mM SA vs. No Treatment
  misc_feature: MA Experiment ID: 108523 Result: Down-regulated in Transcription
  misc_feature: MA Experiment 108523 PARAMETER Experiment Name: Zm_42deg_Heat_P Parameter: Age (day) Value: 8
  misc_feature: MA Experiment 108523 PARAMETER Experiment Name: Zm_42deg_Heat_P Parameter: Organism Value: Zea mays
  misc_feature: MA Experiment 108523 PARAMETER Experiment Name: Zm_42deg_Heat_P Parameter: Plant Line Value: 35A19
  misc_feature: MA Experiment 108523 PARAMETER Experiment Name: Zm_42deg_Heat_P Parameter: Temperature (deg C) Value: 42 vs. 22
  misc_feature: MA Experiment 108523 PARAMETER Experiment Name: Zm_42deg_Heat_P Parameter: Timepoint (hr) Value: 6
  misc_feature: MA Experiment 108523 PARAMETER Experiment Name: Zm_42deg_Heat_P Parameter: Tissue Value: Aerial
  misc_feature: MA Experiment ID: 108527 Result: Down-regulated in Transcription
  misc_feature: MA Experiment 108527 PARAMETER Experiment Name: Zm_5mM_NO_P Parameter: Age (day) Value: 8
  misc_feature: MA Experiment 108527 PARAMETER Experiment Name: Zm_5mM_NO_P Parameter: Organism Value: Zea mays
  misc_feature: MA Experiment 108527 PARAMETER Experiment Name: Zm_5mM_NO_P Parameter: Plant Line Value: 35A19
  misc_feature: MA Experiment 108527 PARAMETER Experiment Name: Zm_5mM_NO_P Parameter: Timepoint (hr) Value: 6
  misc_feature: MA Experiment 108527 PARAMETER Experiment Name: Zm_5mM_NO_P Parameter: Tissue Value: Aerial
  misc_feature: MA Experiment 108527 PARAMETER Experiment Name: Zm_5mM_NO_P Parameter: Treatment Value: 5mM NO vs. No Treatment
  misc_feature: MA Experiment ID: 108528 Result: Up-regulated in Transcription
  misc_feature: MA Experiment 108528 PARAMETER Experiment Name: Zm_Imbibed_Seeds_P Parameter: Age (day) Value: 5 vs. 2
  misc_feature: MA Experiment 108528 PARAMETER Experiment Name: Zm_Imbibed_Seeds_P Parameter: Organism Value: Zea mays
  misc_feature: MA Experiment 108528 PARAMETER Experiment Name: Zm_Imbibed_Seeds_P Parameter: Plant Line Value: 35A19
  misc_feature: MA Experiment 108528 PARAMETER Experiment Name: Zm_Imbibed_Seeds_P Parameter: Tissue Value: Aerial vs. Embryo
  misc_feature: MA Experiment ID: 108530 Result: Up-regulated in Transcription
  misc_feature: MA Experiment 108530 PARAMETER Experiment Name: Zm_Imbibed_Seeds_P Parameter: Age (day) Value: 6 vs. 2
  misc_feature: MA Experiment 108530 PARAMETER Experiment Name: Zm_Imbibed_Seeds_P Parameter: Organism Value: Zea mays
  misc_feature: MA Experiment 108530 PARAMETER Experiment Name: Zm_Imbibed_Seeds_P Parameter: Plant Line Value: 35A19
  misc_feature: MA Experiment 108530 PARAMETER Experiment Name: Zm_Imbibed_Seeds_P Parameter: Tissue Value: Aerial vs. Embryo
  misc_feature: MA Experiment ID: 108545 Result: Up-regulated in Transcription
  misc_feature: MA Experiment 108545 PARAMETER Experiment Name: Zm_Imbibed_Seeds_P Parameter: Age (day) Value: 3 vs. 2
  misc_feature: MA Experiment 108545 PARAMETER Experiment Name: Zm_Imbibed_Seeds_P Parameter: Organism Value: Zea mays
  misc_feature: MA Experiment 108545 PARAMETER Experiment Name: Zm_Imbibed_Seeds_P Parameter: Plant Line Value: 35A19
  misc_feature: MA Experiment 108545 PARAMETER Experiment Name: Zm_Imbibed_Seeds_P Parameter: Tissue Value: Aerial vs. Embryo
  misc_feature: MA Experiment ID: 108547 Result: Up-regulated in Transcription
  misc_feature: MA Experiment 108547 PARAMETER Experiment Name: Zm_Imbibed_Seeds_P Parameter: Age (day) Value: 4 vs. 2
  misc_feature: MA Experiment 108547 PARAMETER Experiment Name: Zm_Imbibed_Seeds_P Parameter: Organism Value: Zea mays
  misc_feature: MA Experiment 108547 PARAMETER Experiment Name: Zm_Imbibed_Seeds_P Parameter: Plant Line Value: 35A19
  misc_feature: MA Experiment 108547 PARAMETER Experiment Name: Zm_Imbibed_Seeds_P Parameter: Tissue Value: Aerial vs. Embryo
  misc_feature: MA Experiment ID: 108556 Result: Down-regulated in Transcription
  misc_feature: MA Experiment 108556 PARAMETER Experiment Name: Zm_Drought_P Parameter: Age (day) Value: 9
  misc_feature: MA Experiment 108556 PARAMETER Experiment Name: Zm_Drought_P Parameter: Organism Value: Zea mays
  misc_feature: MA Experiment 108556 PARAMETER Experiment Name: Zm_Drought_P Parameter: Plant Line Value: 35A19
  misc_feature: MA Experiment 108556 PARAMETER Experiment Name: Zm_Drought_P Parameter: Timepoint (hr) Value: 24
  misc_feature: MA Experiment 108556 PARAMETER Experiment Name: Zm_Drought_P Parameter: Tissue Value: Aerial
  misc_feature: MA Experiment 108556 PARAMETER Experiment Name: Zm_Drought_P Parameter: Treatment Value: Drought vs. No Drought
  misc_feature: MA Experiment ID: 108559 Result: Down-regulated in Transcription
  misc_feature: MA Experiment 108559 PARAMETER Experiment Name: Zm_5mM_NO_P Parameter: Age (day) Value: 8
  misc_feature: MA Experiment 108559 PARAMETER Experiment Name: Zm_5mM_NO_P Parameter: Organism Value: Zea mays
  misc_feature: MA Experiment 108559 PARAMETER Experiment Name: Zm_5mM_NO_P Parameter: Plant Line Value: 35A19
  misc_feature: MA Experiment 108559 PARAMETER Experiment Name: Zm_5mM_NO_P Parameter: Timepoint (hr) Value: 12
  misc_feature: MA Experiment 108559 PARAMETER Experiment Name: Zm_5mM_NO_P Parameter: Tissue Value: Aerial
  misc_feature: MA Experiment 108559 PARAMETER Experiment Name: Zm_5mM_NO_P Parameter: Treatment Value: 5mM NO vs. No Treatment
  misc_feature: MA Experiment ID: 108687 Result: Down-regulated in Transcription
  misc_feature: MA Experiment 108687 PARAMETER Experiment Name: Zm_Embryos-Flowers__P Parameter: Tissue Value: Embryo vs. Aerial+
  misc_feature: MA Experiment ID: 108688 Result: Down-regulated in Transcription
  misc_feature: MA Experiment 108688 PARAMETER Experiment Name: Zm_Embryos-Flowers__P Parameter: Tissue Value: Immature Flowers vs. Aerial+
  misc_feature: MA Experiment ID: 20000477 Result: Down-regulated in Transcription
  misc_feature: MA Experiment 20000477 PARAMETER Experiment Name: Zm_5mM_SA_P Parameter: Age (day) Value: 10
  misc_feature: MA Experiment 20000477 PARAMETER Experiment Name: Zm_5mM_SA_P Parameter: Organism Value: Zea mays
  misc_feature: MA Experiment 20000477 PARAMETER Experiment Name: Zm_5mM_SA_P Parameter: Plant Line Value: 35A19
  misc_feature: MA Experiment 20000477 PARAMETER Experiment Name: Zm_5mM_SA_P Parameter: Timepoint (hr) Value: 48
  misc_feature: MA Experiment 20000477 PARAMETER Experiment Name: Zm_5mM_SA_P Parameter: Tissue Value: Aerial
  misc_feature: MA Experiment 20000477 PARAMETER Experiment Name: Zm_5mM_SA_P Parameter: Treatment Value: 5mM SA vs. No Treatment
  misc_feature: MA Experiment ID: 20000478 Result: Down-regulated in Transcription
  misc_feature: MA Experiment 20000478 PARAMETER Experiment Name: Zm_5mM_SA_P Parameter: Age (day) Value: 11
  misc_feature: MA Experiment 20000478 PARAMETER Experiment Name: Zm_5mM_SA_P Parameter: Organism Value: Zea mays
  misc_feature: MA Experiment 20000478 PARAMETER Experiment Name: Zm_5mM_SA_P Parameter: Plant Line Value: 35A19
  misc_feature: MA Experiment 20000478 PARAMETER Experiment Name: Zm_5mM_SA_P Parameter: Timepoint (hr) Value: 72
  misc_feature: MA Experiment 20000478 PARAMETER Experiment Name: Zm_5mM_SA_P Parameter: Tissue Value: Aerial
  misc_feature: MA Experiment 20000478 PARAMETER Experiment Name: Zm_5mM_SA_P Parameter: Treatment Value: 5mM SA vs. No Treatment
  misc_feature: MA Experiment ID: 20000532 Result: Up-regulated in Transcription
  misc_feature: MA Experiment 20000532 PARAMETER Experiment Name: Zm_0.001percent_MeJA_P Parameter: Age (day) Value: 10
  misc_feature: MA Experiment 20000532 PARAMETER Experiment Name: Zm_0.001percent_MeJA_P Parameter: Organism Value: Zea mays
  misc_feature: MA Experiment 20000532 PARAMETER Experiment Name: Zm_0.001percent_MeJA_P Parameter: Plant Line Value: 35A19
  misc_feature: MA Experiment 20000532 PARAMETER Experiment Name: Zm_0.001percent_MeJA_P Parameter: Timepoint (hr) Value: 48
  misc_feature: MA Experiment 20000532 PARAMETER Experiment Name: Zm_0.001percent_MeJA_P Parameter: Tissue Value: Aerial
  misc_feature: MA Experiment 20000532 PARAMETER Experiment Name: Zm_0.001percent_MeJA_P Parameter: Treatment Value: 0.001percent MeJA vs. No Treatment
  misc_feature: MA Experiment ID: 20000626 Result: Up-regulated in Transcription
  misc_feature: MA Experiment 20000626 PARAMETER Experiment Name: Zm_Herbicide-Treatments_P Parameter: Timepoint (hr) Value: 12
  misc_feature: MA Experiment 20000626 PARAMETER Experiment Name: Zm_Herbicide-Treatments_P Parameter: Tissue Value: Aerial
  misc_feature: MA Experiment 20000626 PARAMETER Experiment Name: Zm_Herbicide-Treatments_P Parameter: Treatment Value: Roundup vs. No Treatment
aagctactaagtaataaaaccacgcgggcaccagcaggcagcagctagctagccatccagtccagagatggccacgagcggccccgtccttctggtctcgcaggcgcagcagcgcaagtcacggacctacaccccgagcccatggggtgacttcttcctccaccacgtcccatgcactccgtcacagctcttgtccatgaaggagagggcaaaggtcaaggagcaacaagtgaggcagatgatacacgaaacgatcgcctcctccgacctgcttcgtaagatggagctcgtggacacactacagcgcctcggggtggactaccactacaacgaggagatcgaccagttgctttgctctatctacgaccaccacgacgacggaggagacggcctcgacgatctctacgtcacctccctgcggttctatttgctcaggaagcatgggtacacaatctcttcagatggtggaatgatttccgatcgcatatagacctgagctttgcgcgggacagaatggtggagcttcatttctggatgctcggagtaatacatgatccctattgctcacggatcatgatagtcaagatcttcgtattcataagcttgtttgatgaccttatggacaactatagcaccacagaggagagcaatgtcttcaccgcagccatggaaaggttggttacatttatttgaaatcatatcattagagcgcaactatatacaactcagaatatatttaccatttctttgcttgaagaaataaaaacaaccctaattaatgagataggtgggacgaacagatggcacagcagcttccagcaggcttgaaggcactcttggtcaggatatttaacgctacgaacaagatcgaggaggagttaaaacttcaggggaacatgcatgctgaactcatcaaaaaaatggtgattaatagtgccaagttctaccatgctgaggtcaaatggcgcgacgaacacttcgtgccaactagtcttgaggagcacctccaaaaatctatccctaccagtgcttgtatgcagatggcaaatcttgcgttggtttcactgggaaatgtgactactagagaggacgtcgagtgggttttcaccttccccaaaatcatcagaggtgcttgtattgtgggccgcatctccaacgacatcgtgtcacatgaggtttaccaaaacctctccaccacattctagctagtcatatattccccatcagctgactatatacgtattctctaaagactcacattgcttgttcttgctttaatttccttgatgaagcgggaacaagcttcttcagaccatgtggcatccacggttcaaacttgcatgaagcagtacaacgtgacaataaaggaagccaacgagaaacttagagcggtaatcgaagaggcatggatggacatcgtccaagatagcctcgagcaggaacgccctagagcacttctcgacatagccatcaatgttgcacgagttgcagatttcatgtacaagcgcgaagacgcgtacacgctctcattcgtcatcaaggacattatagcttcaatgtacatctattccgtgtgagcttattgatctactgctagtaagaaagactttttcagtaatgtacatgaattgaaaaaggtccgttaattgatggtacatttaattaatcccaaaattattgtataagtagtatgtgtgatgtactgcatatcctaataaatgtgtttgtgttcc

SEQ ID NO: 15335 - protein, 140 aa, Zea mays subsp. mays
  peptide (1)..(140): Ceres Seq. ID no. 15176871
  misc_feature (26)..(132): Pfam Name: Terpene synthase, N-terminal domain Pfam Description: Terpene synthase, N-terminal domain
  misc_feature (23)..(132): Homolog of NCBI NO: 38636781 NR Description: putative sesquiterpene cyclase 1 [Oryza sativa
  misc_feature (1)..(132): Homolog of NCBI NO: 11545431 NR Description: sesquiterpene cyclase 1 [Zea mays]
  misc_feature (15)..(131): Homolog of NCBI NO: 34894946 NR Description: putative sesquiterpene cyclase 1 [Oryza sativa
  misc_feature (1)..(132): Homolog of NCBI NO: 18092338 NR Description: sesquiterpene cyclase [Zea mays]
  misc_feature (21)..(132): Homolog of NCBI NO: 4733937 NR Description: sesquiterpene synthase [Elaeis oleifera]
  misc_feature (1)..(132): Homolog of NCBI NO: 3287835 NR Description: (+)-delta-cadinene synthase isozyme A (D-cadinene
  misc_feature (1)..(132): Homolog of NCBI NO: 3970689 NR Description: (+)-delta-cadinene synthase [Gossypium arboreum]
  misc_feature (23)..(132): Homolog of NCBI NO: 15321626 NR Description: cyclase [Nicotiana tabacum]
  misc_feature (21)..(132): Homolog of NCBI NO: 18766934 NR Description: beta-caryophyllene synthase QHS1 [Artemisia annua]
  misc_feature (1)..(132): Homolog of NCBI NO: 8389329 NR Description: (+)-delta-cadinene synthase [Gossypium hirsutum]
MATSGPVLLVSQAQQRKSRTYTPSPWGDFFLHHVPCTPSQLLSMKERAKVKEQQVRQMIHETIASSDLLRKMELVDTLQRLGVDYHYNEEIDQLLCSIYDHHDDGGDGLDDLYVTSLRFYLLRKHGYTISSDGGMISDRI

SEQ ID NO: 15336 - protein, 134 aa, Zea mays subsp. mays
  peptide (1)..(134): Ceres Seq. ID no. 15176872
  misc_feature (1)..(133): Homolog of NCBI NO: 38636781 NR Description: putative sesquiterpene cyclase 1 [Oryza sativa
  misc_feature (1)..(125): Homolog of NCBI NO: 11545431 NR Description: sesquiterpene cyclase 1 [Zea mays]
  misc_feature (1)..(125): Homolog of NCBI NO: 34894946 NR Description: putative sesquiterpene cyclase 1 [Oryza sativa
  misc_feature (1)..(125): Homolog of NCBI NO: 18092338 NR Description: sesquiterpene cyclase [Zea mays]
  misc_feature (1)..(125): Homolog of NCBI NO: 4733937 NR Description: sesquiterpene synthase [Elaeis oleifera]
  misc_feature (1)..(125): Homolog of NCBI NO: 3287835 NR Description: (+)-delta-cadinene synthase isozyme A (D-cadinene
  misc_feature (1)..(125): Homolog of NCBI NO: 3970689 NR Description: (+)-delta-cadinene synthase [Gossypium arboreum]
  misc_feature (1)..(128): Homolog of NCBI NO: 15321626 NR Description: cyclase [Nicotiana tabacum]
  misc_feature (1)..(125): Homolog of NCBI NO: 18766934 NR Description: beta-caryophyllene synthase QHS1 [Artemisia annua]
  misc_feature (1)..(125): Homolog of NCBI NO: 8389329 NR Description: (+)-delta-cadinene synthase [Gossypium hirsutum]
MAQQLPAGLKALLVRIFNATNKIEEELKLQGNMHAELIKKMVINSAKFYHAEVKWRDEHFVPTSLEEHLQKSIPTSACMQMANLALVSLGNVTTREDVEWVFTFPKIIRGACIVGRISNDIVSHEVYQNLSTTF

SEQ ID NO: 15337 - protein, 102 aa, Zea mays subsp. mays
  peptide (1)..(102): Ceres Seq. ID no. 15176873
  misc_feature (1)..(101): Homolog of NCBI NO: 38636781 NR Description: putative sesquiterpene cyclase 1 [Oryza sativa
  misc_feature (1)..(93): Homolog of NCBI NO: 11545431 NR Description: sesquiterpene cyclase 1 [Zea mays]
  misc_feature (1)..(93): Homolog of NCBI NO: 34894946 NR Description: putative sesquiterpene cyclase 1 [Oryza sativa
  misc_feature (1)..(93): Homolog of NCBI NO: 18092338 NR Description: sesquiterpene cyclase [Zea mays]
  misc_feature (1)..(93): Homolog of NCBI NO: 4733937 NR Description: sesquiterpene synthase [Elaeis oleifera]
  misc_feature (1)..(93): Homolog of NCBI NO: 3287835 NR Description: (+)-delta-cadinene synthase isozyme A (D-cadinene
  misc_feature (1)..(93): Homolog of NCBI NO: 3970689 NR Description: (+)-delta-cadinene synthase [Gossypium arboreum]
  misc_feature (1)..(96): Homolog of NCBI NO: 15321626 NR Description: cyclase [Nicotiana tabacum]
  misc_feature (1)..(93): Homolog of NCBI NO: 18766934 NR Description: beta-caryophyllene synthase QHS1 [Artemisia annua]
  misc_feature (1)..(93): Homolog of NCBI NO: 8389329 NR Description: (+)-delta-cadinene synthase [Gossypium hirsutum]
MHAELIKKMVINSAKFYHAEVKWRDEHFVPTSLEEHLQKSIPTSACMQMANLALVSLGNVTTREDVEWVFTFPKIIRGACIVGRISNDIVSHEVYQNLSTTF

SEQ ID NO: 15338 - DNA, 556 bp, Zea mays subsp. mays
  misc_feature (1)..(556): Ceres Seq. ID no. 13635982
  misc_feature: MA Experiment ID: 20000633 Result: Down-regulated in Transcription
  misc_feature: MA Experiment 20000633 PARAMETER Experiment Name: Zm_Herbicide-Treatments_P Parameter: Timepoint (hr) Value: 4
  misc_feature: MA Experiment 20000633 PARAMETER Experiment Name: Zm_Herbicide-Treatments_P Parameter: Tissue Value: Aerial
  misc_feature: MA Experiment 20000633 PARAMETER Experiment Name: Zm_Herbicide-Treatments_P Parameter: Treatment Value: Trimec vs. No Treatment
gaaccaagtcctgctagcggtgtccggtccggcgcccccctatttcctctcgcagcctcttctccccaaaccctaatcttgctcctgcctatctctgctccaatccgtcggtggagcggcggcgatggaggggaaggaggaaggtcggatcttcgtgggcggcctgtcgtggcaaacggacgagcgcaagcttcaggacgcctttggtcgcttcggcaaggtcgtcgatgttcagatcatgctggagaggcacacaaaccgccacaggggctttggcttcgtgacattcgaagatcgaagggcagttgacagcgctatcaaagagatgcgtggccaagagttagatggtcgtaccatctcagtgaacaaggctgagcctaagatgaatacagatgacacaaggttcgacaatggcggtggacgagactatcgaggtggtagaggtgatggtccaccccctggcaattgctatgagtgtggccgtcctggtcattgggtccgtgactgccctagtgctgctggtggtcgttctggcagattcccgtccaagttcagt

SEQ ID NO: 15339 - protein, 144 aa, Zea mays subsp. mays
  peptide (1)..(144): Ceres Seq. ID no. 13635983
  misc_feature (10)..(80): Pfam Name: RNA recognition motif. (a.k.a. RRM, RBD, or RNP domain) Pfam Description: RNA recognition motif. (a.k.a. RRM, RBD, or RNP
  misc_feature (1)..(143): Homolog of NCBI NO: 31712074 NR Description: putative RNA-binding protein [Oryza sativa
  misc_feature (1)..(138): Homolog of NCBI NO: 33146923 NR Description: glycine-rich RNA-binding protein-like [Oryza
  misc_feature (1)..(137): Homolog of NCBI NO: 15237666 NR Description: glycine-rich RNA-binding protein [Arabidopsis
  misc_feature (2)..(139): Homolog of NCBI NO: 18406831 NR Description: glycine-rich RNA-binding protein, putative
  misc_feature (1)..(143): Homolog of NCBI NO: 12659074 NR Description: RNA-binding protein [Triticum aestivum]
  misc_feature (5)..(139): Homolog of NCBI NO: 2129944 NR Description: RNA-binding protein RZ-1 - wood tobacco
  misc_feature (1)..(139): Homolog of NCBI NO: 40714682 NR Description: putative RNA binding protein [Oryza sativa
  misc_feature (1)..(142): Homolog of NCBI NO: 15231557 NR Description: glycine-rich RNA-binding protein [Arabidopsis
  misc_feature (1)..(130): Homolog of NCBI NO: 15982739 NR Description: AT3g26420/F20C19_14 [Arabidopsis thaliana]
  misc_feature (3)..(142): Homolog of NCBI NO: 15226605 NR Description: glycine-rich RNA-binding protein (AtGRP7)
MEGKEEGRIFVGGLSWQTDERKLQDAFGRFGKVVDVQIMLERHTNRHRGFGFVTFEDRRAVDSAIKEMRGQELDGRTISVNKAEPKMNTDDTRFDNGGGRDYRGGRGDGPPPGNCYECGRPGHWVRDCPSAAGGRSGRFPSKFS

SEQ ID NO: 15340 - protein, 106 aa, Zea mays subsp. mays
  peptide (1)..(106): Ceres Seq. ID no. 13635984
  misc_feature (1)..(105): Homolog of NCBI NO: 31712074 NR Description: putative RNA-binding protein [Oryza sativa
  misc_feature (1)..(100): Homolog of NCBI NO: 33146923 NR Description: glycine-rich RNA-binding protein-like [Oryza
  misc_feature (1)..(99): Homolog of NCBI NO: 15237666 NR Description: glycine-rich RNA-binding protein [Arabidopsis
  misc_feature (1)..(101): Homolog of NCBI NO: 18406831 NR Description: glycine-rich RNA-binding protein, putative
  misc_feature (1)..(105): Homolog of NCBI NO: 12659074 NR Description: RNA-binding protein [Triticum aestivum]
  misc_feature (1)..(101): Homolog of NCBI NO: 2129944 NR Description: RNA-binding protein RZ-1 - wood tobacco
  misc_feature (1)..(101): Homolog of NCBI NO: 40714682 NR Description: putative RNA binding protein [Oryza sativa
  misc_feature (1)..(104): Homolog of NCBI NO: 15231557 NR Description: glycine-rich RNA-binding protein [Arabidopsis
  misc_feature (1)..(92): Homolog of NCBI NO: 15982739 NR Description: AT3g26420/F20C19_14 [Arabidopsis thaliana]
  misc_feature (1)..(104): Homolog of NCBI NO: 15226605 NR Description: glycine-rich RNA-binding protein (AtGRP7)
MLERHTNRHRGFGFVTFEDRRAVDSAIKEMRGQELDGRTISVNKAEPKMNTDDTRFDNGGGRDYRGGRGDGPPPGNCYECGRPGHWVRDCPSAAGGRSGRFPSKFS

SEQ ID NO: 15341 - protein, 102 aa, Zea mays subsp. mays
  peptide (1)..(102): Ceres Seq. ID no. 13635985
EPSPASGVRSGAPLFPLAASSPQTLILLLPISAPIRRWSGGDGGEGGRSDLRGRPVVANGRAQASGRLWSLRQGRRCSDHAGEAHKPPQGLWLRDIRRSKGS

SEQ ID NO: 15342 - DNA, 2628 bp, Zea mays subsp. mays
  misc_feature (1)..(2628): Ceres Seq. ID no. 13627034
  misc_feature: MA Experiment ID: 20000492 Result: Down-regulated in Transcription
  misc_feature: MA Experiment 20000492 PARAMETER Experiment Name: Zm_Hybrid_Seed_Dev_P Parameter: DAP Value: 12
  misc_feature: MA Experiment 20000492 PARAMETER Experiment Name: Zm_Hybrid_Seed_Dev_P Parameter: Organism Value: Zea mays
  misc_feature: MA Experiment 20000492 PARAMETER Experiment Name: Zm_Hybrid_Seed_Dev_P Parameter: Plant Line Value: 35A19
  misc_feature: MA Experiment 20000492 PARAMETER Experiment Name: Zm_Hybrid_Seed_Dev_P Parameter: Tissue Value: Fert Kernel vs. Unfert Floret
atcacttgttcttcttcgagctaccagctgcctatcatggtcatcatggtcgagctgctgcccccacttgcctctctaatcctcagtcctctgtagagctggtcctcctacccctcactttgccttgagcaatttggtttctagcatctgtggggtggcttgtgggtggtcgccttggactgctccttcctccacctgccgcgccggcagggcgacgaggtccaaaagcctggtggggctcatcatcaagaacaccgaagcggcgagagtggcatgggatctgatccgaggcggagctcgaggagctgagggctgtacgtgctcttggatccggtagagatcacgtgccctcgtgttcgtccccggccgccgcgatggggaacacgtgcgtcggccccagcatcaccatgaacggcttcttccagtccgtgtccacggcgctgtggaagacgccgcaggaaggcgacgcgctgcccgccgccgccaatggccccggcgggccagccggggccggttcgcagtcggcgctgccgaagccggcgtccgacgtgcaccacgtcgccgtgcagagcgaggcccctgagcccgtcaagatcgccgcctaccactcggagccggcgcccgccgtgcggagcgaggcccctgagcccgtcaagatcgccgcctctcactcggagccggcgcccatggccgccaagcctggtggcgccgccgccaacgccagccccagccccagccccaggccgcgtccgcaggtgaagcgcgtgtcgagcgccgggctgctgctggggtcggtgctgaggcgcaagacggagaacctcaaggacaagtacagcctggggcggcggctcgggcaggggcagttcggcacgacgcacctgtgcgtggagcgcgccacggggaaggagctcgcgtgcaagtcgatcctgaagcgcaagctgggcagcgacgacgacgtggaggacgtgcggcgggagatccagataatgcaccacctggcgggccaccccagcgtggtcggcatccgcggcgcgtacgaggacgccgtggccgtgcacctcgtcatggagctctgcggcggcggcgagctgttcgaccggatcgtgcggaggggccactacaccgagaggaaggccgccgagctcgcccgcgtcatcgtcggcgtcgtggaggcgtgccactccatgggcgtcatgcaccgggacctcaagcccgagaacttcctcttcgctgaccactcggaggaggccgctctcaagaccattgacttcggtctctccatcttctttcgccctggccaaattttcaccgacgtcgtgggcagcccttactacgtggcgccggaggtactgaagaagagatacgggccagaggcggacgtctggagcgctggcgtaatcatctacatcctgctgtgcggagtgccgccattctgggcagagaacgagcagggcatattcgaggaggttctgcacgggaggctggacttcgagtcggagccgtggcccagcatctccgacggcgccaaggatctcgtgaggaggatgcttgtcagggacccgaggaagagactgaccgctcacgaagttctacggcatccgtgggttcaggtcggtggagtggctcctgacaggccgctggactcggccgttctgtctcgcatgaagcagttctcggctatgaataagctgaagaagatggctcttagggtgatcgccgagaacctgtcggaggacgagatcgccgggctgagggagatgttcaagatgatcgacgcggacaacagcgggcagatcacgttcgaggagctcaaggttggcctggagaaggtgggcgccaacctgcaggagtcggagatctacgcgctcatgcaagccgcggacgtggacaacaacggcacgatcgactacggcgagttcatcgcggccacgctgcacctgaacaaggtggagcgggaggaccacctgttcgcggcgttccagtacttcgacaaggacggcagcggctacatcaccgccgacgagctgcaggtggcgtgcgaggagttcggcctgggcgacgtccagctggaggacttgatcggggaagtcgaccaggacaacgacgggcgcatagactacaacgagttcgtggcgatgatgcagaagccgacggtggggggatcccgaagaaggccgatctgcagaacagcttcagcatcgggttcagcatcgggttcagggaggcgctcaggatggcctagacctctgtgtctctggcttccctgctgcctgcgtgtaggtgtagatgattgaattgagtgggtgtcagtgcagttgctgtagagaccaccgtagcatagagatctgatgagatgcgagttgaggcgggccaggagacgtgtacatgtgccatagccatacaggcggccctgcatcggtttgatttgattgcttggttccaaacggtcctgtgtttcatgtcgcgtgcacatgtgccatatctgcctgctgctgctactactgctatatgccgtgcacgtgcacgtcggtgacctgaaacttggctgtccggcggtccggccaccgagctctaaggctatccatagcggtttttctaaatttttatccttatatcattttttgcgtc

SEQ ID NO: 15343 - protein, 639 aa, Zea mays subsp. mays
  peptide (1)..(639): Ceres Seq. ID no. 13627035
  misc_feature (153)..(411): Pfam Name: Protein kinase domain Pfam Description: Protein kinase domain
  misc_feature (84)..(599): Homolog of NCBI NO: 16215471 NR Description: calcium-dependent protein kinase 3 [Nicotiana
  misc_feature (1)..(96): Homolog of NCBI NO: 16215471 NR Description: calcium-dependent protein kinase 3 [Nicotiana
  misc_feature (84)..(599): Homolog of NCBI NO: 15289758 NR Description: calcium dependent protein kinase [Solanum
  misc_feature (1)..(96): Homolog of NCBI NO: 15289758 NR Description: calcium dependent protein kinase [Solanum
  misc_feature (85)..(594): Homolog of NCBI NO: 7434364 NR Description: calcium-dependent protein kinase (EC 2.7.1.-)
  misc_feature (1)..(93): Homolog of NCBI NO: 7434364 NR Description: calcium-dependent protein kinase (EC 2.7.1.-)
  misc_feature (1)..(596): Homolog of NCBI NO: 15238353 NR Description: calcium-dependent protein kinase (CDPK)(AK1)
  misc_feature (65)..(596): Homolog of NCBI NO: 15228350 NR Description: calcium-dependent protein kinase (CDPK)(CPK2)
  misc_feature (1)..(123): Homolog of NCBI NO: 15228350 NR Description: calcium-dependent protein kinase (CDPK)(CPK2)
  misc_feature (80)..(599): Homolog of NCBI NO: 16215467 NR Description: calcium-dependent protein kinase 2 [Nicotiana
MGNTCVGPSITMNGFFQSVSTALWKTPQEGDALPAAANGPGGPAGAGSQSALPKPASDVHHVAVQSEAPEPVKIAAYHSEPAPAVRSEAPEPVKIAASHSEPAPMAAKPGGAAANASPSPSPRPRPQVKRVSSAGLLLGSVLRRKTENLKDKYSLGRRLGQGQFGTTHLCVERATGKELACKSILKRKLGSDDDVEDVRREIQIMHHLAGHPSVVGIRGAYEDAVAVHLVMELCGGGELFDRIVRRGHYTERKAAELARVIVGVVEACHSMGVMHRDLKPENFLFADHSEEAALKTIDFGLSIFFRPGQIFTDVVGSPYYVAPEVLKKRYGPEADVWSAGVIIYILLCGVPPFWAENEQGIFEEVLHGRLDFESEPWPSISDGAKDLVRRMLVRDPRKRLTAHEVLRHPWVQVGGVAPDRPLDSAVLSRMKQFSAMNKLKKMALRVIAENLSEDEIAGLREMFKMIDADNSGQITFEELKVGLEKVGANLQESEIYALMQAADVDNNGTIDYGEFIAATLHLNKVEREDHLFAAFQYFDKDGSGYITADELQVACEEFGLGDVQLEDLIGEVDQDNDGRIDYNEFVAMMQKPTVGGSRRRPICRTASASGSASGSGRRSGWPRPLCLWLPCCLRVGVDD

SEQ ID NO: 15344 - protein, 628 aa, Zea mays subsp. mays
  peptide (1)..(628): Ceres Seq. ID no. 13627036
  misc_feature (142)..(400): Pfam Name: Protein kinase domain Pfam Description: Protein kinase domain
  misc_feature (73)..(588): Homolog of NCBI NO: 16215471 NR Description: calcium-dependent protein kinase 3 [Nicotiana
  misc_feature (1)..(85): Homolog of NCBI NO: 16215471 NR Description: calcium-dependent protein kinase 3 [Nicotiana
  misc_feature (73)..(588): Homolog of NCBI NO: 15289758 NR Description: calcium dependent protein kinase [Solanum
  misc_feature (1)..(85): Homolog of NCBI NO: 15289758 NR Description: calcium dependent protein kinase [Solanum
  misc_feature (74)..(583): Homolog of NCBI NO: 7434364 NR Description: calcium-dependent protein kinase (EC 2.7.1.-)
  misc_feature (1)..(82): Homolog of NCBI NO: 7434364 NR Description: calcium-dependent protein kinase (EC 2.7.1.-)
  misc_feature (1)..(585): Homolog of NCBI NO: 15238353 NR Description: calcium-dependent protein kinase (CDPK)(AK1)
  misc_feature (54)..(585): Homolog of NCBI NO: 15228350 NR Description: calcium-dependent protein kinase (CDPK)(CPK2)
  misc_feature (1)..(112): Homolog of NCBI NO: 15228350 NR Description: calcium-dependent protein kinase (CDPK)(CPK2)
  misc_feature (69)..(588): Homolog of NCBI NO: 16215467 NR Description: calcium-dependent protein kinase 2 [Nicotiana
MNGFFQSVSTALWKTPQEGDALPAAANGPGGPAGAGSQSALPKPASDVHHVAVQSEAPEPVKIAAYHSEPAPAVRSEAPEPVKIAASHSEPAPMAAKPGGAAANASPSPSPRPRPQVKRVSSAGLLLGSVLRRKTENLKDKYSLGRRLGQGQFGTTHLCVERATGKELACKSILKRKLGSDDDVEDVRREIQIMHHLAGHPSVVGIRGAYEDAVAVHLVMELCGGGELFDRIVRRGHYTERKAAELARVIVGVVEACHSMGVMHRDLKPENFLFADHSEEAALKTIDFGLSIFFRPGQIFTDVVGSPYYVAPEVLKKRYGPEADVWSAGVIIYILLCGVPPFWAENEQGIFEEVLHGRLDFESEPWPSISDGAKDLVRRMLVRDPRKRLTAHEVLRHPWVQVGGVAPDRPLDSAVLSRMKQFSAMNKLKKMALRVIAENLSEDEIAGLREMFKMIDADNSGQITFEELKVGLEKVGANLQESEIYALMQAADVDNNGTIDYGEFIAATLHLNKVEREDHLFAAFQYFDKDGSGYITADELQVACEEFGLGDVQLEDLIGEVDQDNDGRIDYNEFVAMMQKPTVGGSRRRPICRTASASGSASGSGRRSGWPRPLCLWLPCCLRVGVDD

SEQ ID NO: 15345 - protein, 535 aa, Zea mays subsp. mays
  peptide (1)..(535): Ceres Seq. ID no. 13627037
  misc_feature (49)..(307): Pfam Name: Protein kinase domain Pfam Description: Protein kinase domain
  misc_feature (1)..(495): Homolog of NCBI NO: 16215471 NR Description: calcium-dependent protein kinase 3 [Nicotiana
  misc_feature (1)..(495): Homolog of NCBI NO: 15289758 NR Description: calcium dependent protein kinase [Solanum
  misc_feature (1)..(490): Homolog of NCBI NO: 7434364 NR Description: calcium-dependent protein kinase (EC 2.7.1.-)
  misc_feature (1)..(492): Homolog of NCBI NO: 15238353 NR Description: calcium-dependent protein kinase (CDPK)(AK1)
  misc_feature (1)..(492): Homolog of NCBI NO: 15228350 NR Description: calcium-dependent protein kinase (CDPK)(CPK2)
  misc_feature (1)..(19): Homolog of NCBI NO: 15228350 NR Description: calcium-dependent protein kinase (CDPK)(CPK2)
  misc_feature (1)..(495): Homolog of NCBI NO: 16215467 NR Description: calcium-dependent protein kinase 2 [Nicotiana
  misc_feature (1)..(495): Homolog of NCBI NO: 16215475 NR Description: calcium-dependent protein kinase 2 [Nicotiana
  misc_feature (1)..(487): Homolog of NCBI NO: 27819504 NR Description: putative calcium-dependent protein kinase [Oryza
  misc_feature (1)..(491): Homolog of NCBI NO: 15224978 NR Description: calcium-dependent protein kinase, putative (CDPK)
MAAKPGGAAANASPSPSPRPRPQVKRVSSAGLLLGSVLRRKTENLKDKYSLGRRLGQGQFGTTHLCVERATGKELACKSILKRKLGSDDDVEDVRREIQIMHHLAGHPSVVGIRGAYEDAVAVHLVMELCGGGELFDRIVRRGHYTERKAAELARVIVGVVEACHSMGVMHRDLKPENFLFADHSEEAALKTIDFGLSIFFRPGQIFTDVVGSPYYVAPEVLKKRYGPEADVWSAGVIIYILLCGVPPFWAENEQGIFEEVLHGRLDFESEPWPSISDGAKDLVRRMLVRDPRKRLTAHEVLRHPWVQVGGVAPDRPLDSAVLSRMKQFSAMNKLKKMALRVIAENLSEDEIAGLREMFKMIDADNSGQITFEELKVGLEKVGANLQESEIYALMQAADVDNNGTIDYGEFIAATLHLNKVEREDHLFAAFQYFDKDGSGYITADELQVACEEFGLGDVQLEDLIGEVDQDNDGRIDYNEFVAMMQKPTVGGSRRRPICRTASASGSASGSGRRSGWPRPLCLWLPCCLRVGVDD

SEQ ID NO: 15346 - DNA, 485 bp, Zea mays subsp. mays
  misc_feature (1)..(485): Ceres Seq. ID no. 13634595
  misc_feature: MA Experiment ID: 108528 Result: Down-regulated in Transcription
  misc_feature: MA Experiment 108528 PARAMETER Experiment Name: Zm_Imbibed_Seeds_P Parameter: Age (day) Value: 5 vs. 2
  misc_feature: MA Experiment 108528 PARAMETER Experiment Name: Zm_Imbibed_Seeds_P Parameter: Organism Value: Zea mays
  misc_feature: MA Experiment 108528 PARAMETER Experiment Name: Zm_Imbibed_Seeds_P Parameter: Plant Line Value: 35A19
  misc_feature: MA Experiment 108528 PARAMETER Experiment Name: Zm_Imbibed_Seeds_P Parameter: Tissue Value: Aerial vs. Embryo
  misc_feature: MA Experiment ID: 20000535 Result: Up-regulated in Transcription
  misc_feature: MA Experiment 20000535 PARAMETER Experiment Name: Zm_Hybrid_Seed_Dev_P Parameter: DAP Value: 30 vs. 12
  misc_feature: MA Experiment 20000535 PARAMETER Experiment Name: Zm_Hybrid_Seed_Dev_P Parameter: Organism Value: Zea mays
  misc_feature: MA Experiment 20000535 PARAMETER Experiment Name: Zm_Hybrid_Seed_Dev_P Parameter: Plant Line Value: 35A19
  misc_feature: MA Experiment 20000535 PARAMETER Experiment Name: Zm_Hybrid_Seed_Dev_P Parameter: Tissue Value: Embryo vs. Unfert Floret
aaagcaccacgcacgatcgccttcgccaaccgcgccgctctctctctctttctctctcgcacgagccgcgccggcgccgccaccacgcgcgcgggagacagagaccacagccgcagccaccgacgggcggaataggaatggtggcgccggggggaggagcaggaggaggtccgttgcggtggccggcggcggaggagcttgacactgtacggaagaaggtggtggagattagtggaagggatgaacaagaggttatggttgctgcttgcccctacagaatttgccctttgggggctcatattgatcatcagggtggagtagtcacagctatgaccataaattatggagtactccttggtttcgttccctctaatggttctgagcaacctttatttttctttcaggttttacttcattctggtcagtttgaaggtgctataagattcagagttgatgacttgcaaaagcctattgataaacctgag

SEQ ID NO: 15347 - protein, 161 aa, Zea mays subsp. mays
  peptide (1)..(161): Ceres Seq. ID no. 13634596
  misc_feature (46)..(160): Homolog of NCBI NO: 38567889 NR Description: OSJNBa0060N03.9 [Oryza sativa (japonica
  misc_feature (58)..(157): Homolog of NCBI NO: 22330971 NR Description: GHMP kinase family [Arabidopsis thaliana] putative galactokinase [Arabidopsis thaliana]
  misc_feature (58)..(156): Homolog of NCBI NO: 6630560 NR Description: galactokinase-like protein [Arabidopsis thaliana]
STTHDRLRQPRRSLSLSLSHEPRRRRHHARGRQRPQPQPPTGGIGMVAPGGGAGGGPLRWPAAEELDTVRKKVVEISGRDEQEVMVAACPYRICPLGAHIDHQGGVVTAMTINYGVLLGFVPSNGSEQPLFFFQVLLHSGQFEGAIRFRVDDLQKPIDKPE

SEQ ID NO: 15348 - protein, 116 aa, Zea mays subsp. mays
  peptide (1)..(116): Ceres Seq. ID no. 13634597
  misc_feature (1)..(115): Homolog of NCBI NO: 38567889 NR Description: OSJNBa0060N03.9 [Oryza sativa (japonica
  misc_feature (13)..(112): Homolog of NCBI NO: 22330971 NR Description: GHMP kinase family [Arabidopsis thaliana] putative galactokinase [Arabidopsis thaliana]
  misc_feature (13)..(111): Homolog of NCBI NO: 6630560 NR Description: galactokinase-like protein [Arabidopsis thaliana]
MVAPGGGAGGGPLRWPAAEELDTVRKKVVEISGRDEQEVMVAACPYRICPLGAHIDHQGGVVTAMTINYGVLLGFVPSNGSEQPLFFFQVLLHSGQFEGAIRFRVDDLQKPIDKPE

SEQ ID NO: 15349 - DNA, 1396 bp, Zea mays subsp. mays; identical to SEQ ID NO: 14449
  misc_feature (1)..(1396): Ceres Seq. ID no. 13636262
  misc_feature: MA Experiment ID: 108504 Result: Down-regulated in Transcription
  misc_feature: MA Experiment 108504 PARAMETER Experiment Name: Zm_Drought_P Parameter: Age (day) Value: 8
  misc_feature: MA Experiment 108504 PARAMETER Experiment Name: Zm_Drought_P Parameter: Organism Value: Zea mays
  misc_feature: MA Experiment 108504 PARAMETER Experiment Name: Zm_Drought_P Parameter: Plant Line Value: 35A19
  misc_feature: MA Experiment 108504 PARAMETER Experiment Name: Zm_Drought_P Parameter: Timepoint (hr) Value: 12
  misc_feature: MA Experiment 108504 PARAMETER Experiment Name: Zm_Drought_P Parameter: Tissue Value: Aerial
  misc_feature: MA Experiment 108504 PARAMETER Experiment Name: Zm_Drought_P Parameter: Treatment Value: Drought vs. No Drought
  misc_feature: MA Experiment ID: 108522 Result: Up-regulated in Transcription
  misc_feature: MA Experiment 108522 PARAMETER Experiment Name: Zm_42deg_Heat_P Parameter: Age (day) Value: 8
  misc_feature: MA Experiment 108522 PARAMETER Experiment Name: Zm_42deg_Heat_P Parameter: Organism Value: Zea mays
  misc_feature: MA Experiment 108522 PARAMETER Experiment Name: Zm_42deg_Heat_P Parameter: Plant Line Value: 35A19
  misc_feature: MA Experiment 108522 PARAMETER Experiment Name: Zm_42deg_Heat_P Parameter: Temperature (deg C) Value: 42 vs. 22
  misc_feature: MA Experiment 108522 PARAMETER Experiment Name: Zm_42deg_Heat_P Parameter: Timepoint (hr) Value: 1
  misc_feature: MA Experiment 108522 PARAMETER Experiment Name: Zm_42deg_Heat_P Parameter: Tissue Value: Aerial
  misc_feature: MA Experiment ID: 108523 Result: Up-regulated in Transcription
  misc_feature: MA Experiment 108523 PARAMETER Experiment Name: Zm_42deg_Heat_P Parameter: Age (day) Value: 8
  misc_feature: MA Experiment 108523 PARAMETER Experiment Name: Zm_42deg_Heat_P Parameter: Organism Value: Zea mays
  misc_feature: MA Experiment 108523 PARAMETER Experiment Name: Zm_42deg_Heat_P Parameter: Plant Line Value: 35A19
  misc_feature: MA Experiment 108523 PARAMETER Experiment Name: Zm_42deg_Heat_P Parameter: Temperature (deg C) Value: 42 vs. 22
  misc_feature: MA Experiment 108523 PARAMETER Experiment Name: Zm_42deg_Heat_P Parameter: Timepoint (hr) Value: 6
  misc_feature: MA Experiment 108523 PARAMETER Experiment Name: Zm_42deg_Heat_P Parameter: Tissue Value: Aerial
  misc_feature: MA Experiment ID: 108529 Result: Down-regulated in Transcription
  misc_feature: MA Experiment 108529 PARAMETER Experiment Name: Zm_Imbibed_Seeds_P Parameter: Age (day) Value: 5 vs. 2
  misc_feature: MA Experiment 108529 PARAMETER Experiment Name: Zm_Imbibed_Seeds_P Parameter: Organism Value: Zea mays
  misc_feature: MA Experiment 108529 PARAMETER Experiment Name: Zm_Imbibed_Seeds_P Parameter: Plant Line Value: 35A19
  misc_feature: MA Experiment 108529 PARAMETER Experiment Name: Zm_Imbibed_Seeds_P Parameter: Tissue Value: Roots vs. Embryo
  misc_feature: MA Experiment ID: 108533 Result: Up-regulated in Transcription
  misc_feature: MA Experiment 108533 PARAMETER Experiment Name: Zm_4deg_Cold_P Parameter: Age (hr) Value: 8
  misc_feature: MA Experiment 108533 PARAMETER Experiment Name: Zm_4deg_Cold_P Parameter: Organism Value: Zea mays
  misc_feature: MA Experiment 108533 PARAMETER Experiment Name: Zm_4deg_Cold_P Parameter: Plant Line Value: 35A19
  misc_feature: MA Experiment 108533 PARAMETER Experiment Name: Zm_4deg_Cold_P Parameter: Temperature (deg C) Value: 4 vs. 22
  misc_feature: MA Experiment 108533 PARAMETER Experiment Name: Zm_4deg_Cold_P Parameter: Timepoint (hr) Value: 1
  misc_feature: MA Experiment 108533 PARAMETER Experiment Name: Zm_4deg_Cold_P Parameter: Tissue Value: Aerial
  misc_feature: MA Experiment ID: 108534 Result: Up-regulated in Transcription
  misc_feature: MA Experiment 108534 PARAMETER Experiment Name: Zm_4deg_Cold_P Parameter: Age (hr) Value: 8
  misc_feature: MA Experiment 108534 PARAMETER Experiment Name: Zm_4deg_Cold_P Parameter: Organism Value: Zea mays
  misc_feature: MA Experiment 108534 PARAMETER Experiment Name: Zm_4deg_Cold_P Parameter: Plant Line Value: 35A19
  misc_feature: MA Experiment 108534 PARAMETER Experiment Name: Zm_4deg_Cold_P Parameter: Temperature (deg C) Value: 4 vs. 22
  misc_feature: MA Experiment 108534 PARAMETER Experiment Name: Zm_4deg_Cold_P Parameter: Timepoint (hr) Value: 6
  misc_feature: MA Experiment 108534 PARAMETER Experiment Name: Zm_4deg_Cold_P Parameter: Tissue Value: Aerial
  misc_feature: MA Experiment ID: 108543 Result: Up-regulated in Transcription
  misc_feature: MA Experiment ID: 108599 Result: Down-regulated in Transcription
  misc_feature: MA Experiment 108599 PARAMETER Experiment Name: Zm_RT1_P Parameter: Age (day) Value: 11
  misc_feature: MA Experiment 108599 PARAMETER Experiment Name: Zm_RT1_P Parameter: Organism Value: Zea mays
  misc_feature: MA Experiment 108599 PARAMETER Experiment Name: Zm_RT1_P Parameter: Plant Line Value: rt1 mut vs. rt1 wt
  misc_feature: MA Experiment 108599 PARAMETER Experiment Name: Zm_RT1_P Parameter: Tissue Value: Roots
  misc_feature: MA Experiment ID: 20000478 Result: Down-regulated in Transcription
  misc_feature: MA Experiment 20000478 PARAMETER Experiment Name: Zm_5mM_SA_P Parameter: Age (day) Value: 11
  misc_feature: MA Experiment 20000478 PARAMETER Experiment Name: Zm_5mM_SA_P Parameter: Organism Value: Zea mays
  misc_feature: MA Experiment 20000478 PARAMETER Experiment Name: Zm_5mM_SA_P Parameter: Plant Line Value: 35A19
  misc_feature: MA Experiment 20000478 PARAMETER Experiment Name: Zm_5mM_SA_P Parameter: Timepoint (hr) Value: 72
  misc_feature: MA Experiment 20000478 PARAMETER Experiment Name: Zm_5mM_SA_P Parameter: Tissue Value: Aerial
  misc_feature: MA Experiment 20000478 PARAMETER Experiment Name: Zm_5mM_SA_P Parameter: Treatment Value: 5mM SA vs. No Treatment
  misc_feature: MA Experiment ID: 20000488 Result: Down-regulated in Transcription
  misc_feature: MA Experiment 20000488 PARAMETER Experiment Name: Zm_50mM_NH4NO3_L_to_H_P Parameter: Organism Value: Zea mays
  misc_feature: MA Experiment 20000488 PARAMETER Experiment Name: Zm_50mM_NH4NO3_L_to_H_P Parameter: Timepoint (hr) Value: 8
  misc_feature: MA Experiment 20000488 PARAMETER Experiment Name: Zm_50mM_NH4NO3_L_to_H_P Parameter: Tissue Value: Leaves
  misc_feature: MA Experiment 20000488 PARAMETER Experiment Name: Zm_50mM_NH4NO3_L_to_H_P Parameter: Treatment Value: 50mM NH4NO3 vs. 100mM Mannitol
  misc_feature: MA Experiment ID: 20000533 Result: Down-regulated in Transcription
  misc_feature: MA Experiment 20000533 PARAMETER Experiment Name: Zm_0.001percent_MeJA_P Parameter: Age (day) Value: 11
  misc_feature: MA Experiment 20000533 PARAMETER Experiment Name: Zm_0.001percent_MeJA_P Parameter: Organism Value: Zea mays
  misc_feature: MA Experiment 20000533 PARAMETER Experiment Name: Zm_0.001percent_MeJA_P Parameter: Plant Line Value: 35A19
  misc_feature: MA Experiment 20000533 PARAMETER Experiment Name: Zm_0.001percent_MeJA_P Parameter: Timepoint (hr) Value: 72
  misc_feature: MA Experiment 20000533 PARAMETER Experiment Name: Zm_0.001percent_MeJA_P Parameter: Tissue Value: Aerial
  misc_feature: MA Experiment 20000533 PARAMETER Experiment Name: Zm_0.001percent_MeJA_P Parameter: Treatment Value: 0.001percent MeJA vs. No Treatment
  misc_feature: MA Experiment ID: 20000535 Result: Up-regulated in Transcription
  misc_feature: MA Experiment 20000535 PARAMETER Experiment Name: Zm_Hybrid_Seed_Dev_P Parameter: DAP Value: 30 vs. 12
  misc_feature: MA Experiment 20000535 PARAMETER Experiment Name: Zm_Hybrid_Seed_Dev_P Parameter: Organism Value: Zea mays
  misc_feature: MA Experiment 20000535 PARAMETER Experiment Name: Zm_Hybrid_Seed_Dev_P Parameter: Plant Line Value: 35A19
  misc_feature: MA Experiment 20000535 PARAMETER Experiment Name: Zm_Hybrid_Seed_Dev_P Parameter: Tissue Value: Embryo vs. Unfert Floret
  misc_feature: MA Experiment ID: 20001605 Result: Up-regulated in Transcription
  misc_feature: MA Experiment 20001605 PARAMETER Experiment Name: Zm_50ppm_KNO3_L-to-H_P Parameter: Age (day) Value: 19
  misc_feature: MA Experiment 20001605 PARAMETER Experiment Name: Zm_50ppm_KNO3_L-to-H_P Parameter: Organism Value: Zea mays
  misc_feature: MA Experiment 20001605 PARAMETER Experiment Name: Zm_50ppm_KNO3_L-to-H_P Parameter: Plant Line Value: 35A19
  misc_feature: MA Experiment 20001605 PARAMETER Experiment Name: Zm_50ppm_KNO3_L-to-H_P Parameter: Timepoint (hr) Value: 4
  misc_feature: MA Experiment 20001605 PARAMETER Experiment Name: Zm_50ppm_KNO3_L-to-H_P Parameter: Tissue Value: Shoots
  misc_feature: MA Experiment 20001605 PARAMETER Experiment Name: Zm_50ppm_KNO3_L-to-H_P Parameter: Treatment Value: 50ppm KNO3 vs. 50ppm KCl

SEQ ID NO: 15350 - protein, 233 aa, Zea mays subsp. mays; identical to SEQ ID NO: 14450
  peptide (1)..(233): Ceres Seq. ID no. 13636263
  misc_feature (27)..(96): Pfam Name: Glycosyl hydrolases family 16 Pfam Description: Glycosyl hydrolases family 16
  misc_feature (27)..(96): Pfam Name: Glycosyl hydrolases family 16 Pfam Description: Glycosyl hydrolases family 16
  misc_feature (27)..(96): Pfam Name: Glycosyl hydrolases family 16 Pfam Description: Glycosyl hydrolases family 16
  misc_feature (26)..(96): Homolog of NCBI NO: 29500891 NR Description: putative xyloglucan endotransglycosylase [Cucumis >gi|29500899|emb|CAD87533.1| putative xyloglucan
  misc_feature (12)..(96): Homolog of NCBI NO: 7447413 NR Description: xyloglucan endo-1,4-beta-D-glucanase (EC 3.2.1.-) barley >gi|1890577|emb|CAA63663.1| xyloglucan
  misc_feature (5)..(81): Homolog of NCBI NO: 14330332 NR Description: Xet1 protein [Festuca pratensis]
  misc_feature (9)..(96): Homolog of NCBI NO: 8886867 NR Description: xyloglucan endotransglycosylase XET2 [Asparagus
  misc_feature (1)..(96): Homolog of NCBI NO: 8886865 NR Description: xyloglucan endotransglycosylase XET1 [Asparagus
  misc_feature (5)..(81): Homolog of NCBI NO: 14330332 NR Description: Xet1 protein [Festuca pratensis]
  misc_feature (1)..(96): Homolog of NCBI NO: 8886865 NR Description: xyloglucan endotransglycosylase XET1 [Asparagus
  misc_feature (9)..(96): Homolog of NCBI NO: 8886867 NR Description: xyloglucan endotransglycosylase XET2 [Asparagus
  misc_feature (5)..(81): Homolog of NCBI NO: 14330332 NR Description: Xet1 protein [Festuca pratensis]
  misc_feature (12)..(96): Homolog of NCBI NO: 7447413 NR Description: xyloglucan endo-1,4-beta-D-glucanase (EC 3.2.1.-) barley >gi|1890577|emb|CAA63663.1| xyloglucan
  misc_feature (26)..(96): Homolog of NCBI NO: 29500891 NR Description: putative xyloglucan endotransglycosylase [Cucumis >gi|29500899|emb|CAD87533.1| putative xyloglucan
  misc_feature (7)..(96): Homolog of NCBI NO: 22947852 NR Description: xyloglucan endotransglycosylase [Malus x
  misc_feature (1)..(96): Homolog of NCBI NO: 17064792 NR Description: xyloglucan endo-1, 4-beta-D-glucanase (XTR-6)
  misc_feature (1)..(96): Homolog of NCBI NO: 15235997 NR Description: xyloglucan endotransglycosylase (XTR-6)
  misc_feature (6)..(96): Homolog of NCBI NO: 15242781 NR Description: xyloglucan endotransglycosylase (TCH4)
  misc_feature (9)..(96): Homolog of NCBI NO: 7447412 NR Description: xyloglucan endo-1,4-beta-D-glucanase (EC 3.2.1.-) barley >gi|1890575|emb|CAA63662.1| xyloglucan
  misc_feature (26)..(96): Homolog of NCBI NO: 29500891 NR Description: putative xyloglucan endotransglycosylase [Cucumis >gi|29500899|emb|CAD87533.1| putative xyloglucan
  misc_feature (7)..(96): Homolog of NCBI NO: 22947852 NR Description: xyloglucan endotransglycosylase [Malus x
  misc_feature (1)..(96): Homolog of NCBI NO: 17064792 NR Description: xyloglucan endo-1, 4-beta-D-glucanase (XTR-6)
  misc_feature (1)..(96): Homolog of NCBI NO: 15235997 NR Description: xyloglucan endotransglycosylase (XTR-6)
  misc_feature (6)..(96): Homolog of NCBI NO: 15242781 NR Description: xyloglucan endotransglycosylase (TCH4)
  misc_feature (9)..(96): Homolog of NCBI NO: 7447412 NR Description: xyloglucan endo-1,4-beta-D-glucanase (EC 3.2.1.-) barley >gi|1890575|emb|CAA63662.1| xyloglucan
  misc_feature (1)..(96): Homolog of NCBI NO: 8886865 NR Description: xyloglucan endotransglycosylase XET1 [Asparagus
  misc_feature (9)..(96): Homolog of NCBI NO: 8886867 NR Description: xyloglucan endotransglycosylase XET2 [Asparagus
  misc_feature (12)..(96): Homolog of NCBI NO: 7447413 NR Description: xyloglucan endo-1,4-beta-D-glucanase (EC 3.2.1.-) barley >gi|1890577|emb|CAA63663.1| xyloglucan
  misc_feature (9)..(96): Homolog of NCBI NO: 7447412 NR Description: xyloglucan endo-1,4-beta-D-glucanase (EC 3.2.1.-) barley >gi|1890575|emb|CAA63662.1| xyloglucan
  misc_feature (6)..(96): Homolog of NCBI NO: 15242781 NR Description: xyloglucan endotransglycosylase (TCH4)
  misc_feature (1)..(96): Homolog of NCBI NO: 15235997 NR Description: xyloglucan endotransglycosylase (XTR-6)
  misc_feature (1)..(96): Homolog of NCBI NO: 17064792 NR Description: xyloglucan endo-1, 4-beta-D-glucanase (XTR-6)
  misc_feature (7)..(96): Homolog of NCBI NO: 22947852 NR Description: xyloglucan endotransglycosylase [Malus x

SEQ ID NO: 15351 - protein, 201 aa, Zea mays subsp. mays; identical to SEQ ID NO: 14451
  peptide (1)..(201): Ceres Seq. ID no. 13636264
  misc_feature (1)..(64): Pfam Name: Glycosyl hydrolases family 16 Pfam Description: Glycosyl hydrolases family 16
  misc_feature (1)..(64): Pfam Name: Glycosyl hydrolases family 16 Pfam Description: Glycosyl hydrolases family 16
  misc_feature (1)..(64): Pfam Name: Glycosyl hydrolases family 16 Pfam Description: Glycosyl hydrolases family 16
  misc_feature (1)..(64): Homolog of NCBI NO: 7447413 NR Description: xyloglucan endo-1,4-beta-D-glucanase (EC 3.2.1.-) barley >gi|1890577|emb|CAA63663.1| xyloglucan
  misc_feature (1)..(49): Homolog of NCBI NO: 14330332 NR Description: Xet1 protein [Festuca pratensis]
  misc_feature (1)..(64): Homolog of NCBI NO: 8886867 NR Description: xyloglucan endotransglycosylase XET2 [Asparagus
  misc_feature (1)..(64): Homolog of NCBI NO: 8886865 NR Description: xyloglucan endotransglycosylase XET1 [Asparagus
  misc_feature (1)..(64): Homolog of NCBI NO: 7447412 NR Description: xyloglucan endo-1,4-beta-D-glucanase (EC 3.2.1.-) barley >gi|1890575|emb|CAA63662.1| xyloglucan
  misc_feature (1)..(49): Homolog of NCBI NO: 14330332 NR Description: Xet1 protein [Festuca pratensis]
  misc_feature (1)..(64): Homolog of NCBI NO: 8886865 NR Description: xyloglucan endotransglycosylase XET1 [Asparagus
  misc_feature (1)..(64): Homolog of NCBI NO: 8886867 NR Description: xyloglucan endotransglycosylase XET2 [Asparagus
  misc_feature (1)..(49): Homolog of NCBI NO: 14330332 NR Description: Xet1 protein [Festuca pratensis]
  misc_feature (1)..(64): Homolog of NCBI NO: 7447413 NR Description: xyloglucan endo-1,4-beta-D-glucanase (EC 3.2.1.-) barley >gi|1890577|emb|CAA63663.1| xyloglucan
  misc_feature (1)..(64): Homolog of NCBI NO: 29500891 NR Description: putative xyloglucan endotransglycosylase [Cucumis >gi|29500899|emb|CAD87533.1| putative xyloglucan
  misc_feature (1)..(64): Homolog of NCBI NO: 22947852 NR Description: xyloglucan endotransglycosylase [Malus x
  misc_feature (1)..(64): Homolog of NCBI NO: 17064792 NR Description: xyloglucan endo-1, 4-beta-D-glucanase (XTR-6)
  misc_feature (1)..(64): Homolog of NCBI NO: 15235997 NR Description: xyloglucan endotransglycosylase (XTR-6)
  misc_feature (1)..(64): Homolog of NCBI NO: 15242781 NR Description: xyloglucan endotransglycosylase (TCH4)
  misc_feature (1)..(64): Homolog of NCBI NO: 7447412 NR Description: xyloglucan endo-1,4-beta-D-glucanase (EC 3.2.1.-) barley >gi|1890575|emb|CAA63662.1| xyloglucan
  misc_feature (1)..(64): Homolog of NCBI NO: 29500891 NR Description: putative xyloglucan endotransglycosylase [Cucumis >gi|29500899|emb|CAD87533.1| putative xyloglucan
  misc_feature (1)..(64): Homolog of NCBI NO: 22947852 NR Description: xyloglucan endotransglycosylase [Malus x
  misc_feature (1)..(64): Homolog of NCBI NO: 17064792 NR Description: xyloglucan endo-1, 4-beta-D-glucanase (XTR-6)
  misc_feature (1)..(64): Homolog of NCBI NO: 15235997 NR Description: xyloglucan endotransglycosylase (XTR-6)
  misc_feature (1)..(64): Homolog of NCBI NO: 15242781 NR Description: xyloglucan endotransglycosylase (TCH4)
  misc_feature (1)..(64): Homolog of NCBI NO: 7447412 NR Description: xyloglucan endo-1,4-beta-D-glucanase (EC 3.2.1.-) barley >gi|1890575|emb|CAA63662.1| xyloglucan
  misc_feature (1)..(64): Homolog of NCBI NO: 8886865 NR Description: xyloglucan endotransglycosylase XET1 [Asparagus
  misc_feature (1)..(64): Homolog of NCBI NO: 8886867 NR Description: xyloglucan endotransglycosylase XET2 [Asparagus
  misc_feature (1)..(64): Homolog of NCBI NO: 7447413 NR Description: xyloglucan endo-1,4-beta-D-glucanase (EC 3.2.1.-) barley >gi|1890577|emb|CAA63663.1| xyloglucan
  misc_feature (1)..(64): Homolog of NCBI NO: 15242781 NR Description: xyloglucan endotransglycosylase (TCH4)
  misc_feature (1)..(64): Homolog of NCBI NO: 15235997 NR Description: xyloglucan endotransglycosylase (XTR-6)
  misc_feature (1)..(64): Homolog of NCBI NO: 17064792 NR Description: xyloglucan endo-1, 4-beta-D-glucanase (XTR-6)
  misc_feature (1)..(64): Homolog of NCBI NO: 22947852 NR Description: xyloglucan endotransglycosylase [Malus x
  misc_feature (1)..(64): Homolog of NCBI NO: 29500891 NR Description: putative xyloglucan endotransglycosylase [Cucumis >gi|29500899|emb|CAD87533.1| putative xyloglucan
